United States Patent Application Publication US 2011/0177960 A1 - sequence listing, part 12

SEQ ID NO: 188167 - DNA, 25 bp, Artificial
  probe
  misc_feature (1)..(25): SEQ ID NO: 1415; WAN024EZ5_at; Start 544; Stop 568
cagttggatgaagaaatgggtgaaa

SEQ ID NO: 188168 - DNA, 25 bp, Artificial
  probe
  misc_feature (1)..(25): SEQ ID NO: 1415; WAN024EZ5_at; Start 112; Stop 136
ccaattgagtttgtgaccggtcgag

SEQ ID NO: 188169 - DNA, 25 bp, Artificial
  probe
  misc_feature (1)..(25): SEQ ID NO: 1415; WAN024EZ5_at; Start 594; Stop 618
ggcactttttgatcctttgagtaga

SEQ ID NO: 188170 - DNA, 25 bp, Artificial
  probe
  misc_feature (1)..(25): SEQ ID NO: 1415; WAN024EZ5_at; Start 269; Stop 293
tggatattttgcacaagcgtcagga

SEQ ID NO: 188171 - DNA, 25 bp, Artificial
  probe
  misc_feature (1)..(25): SEQ ID NO: 1415; WAN024EZ5_at; Start 152; Stop 176
gcatcaaagaaaaaatggctcgtcg

SEQ ID NO: 188172 - DNA, 25 bp, Artificial
  probe
  misc_feature (1)..(25): SEQ ID NO: 1415; WAN024EZ5_at; Start 202; Stop 226
cacgatttgcaggatattgctggct

SEQ ID NO: 188173 - DNA, 25 bp, Artificial
  probe
  misc_feature (1)..(25): SEQ ID NO: 1415; WAN024EZ5_at; Start 625; Stop 649
aatgacggtgtaggaaacagtgacg

SEQ ID NO: 188174 - DNA, 25 bp, Artificial
  probe
  misc_feature (1)..(25): SEQ ID NO: 1415; WAN024EZ5_at; Start 357; Stop 381
tcatgtggtagtagaatatacggtt

SEQ ID NO: 188175 - DNA, 25 bp, Artificial
  probe
  misc_feature (1)..(25): SEQ ID NO: 1415; WAN024EZ5_at; Start 292; Stop 316
gatatgcgaatcatacaggagcgag

SEQ ID NO: 188176 - DNA, 25 bp, Artificial
  probe
  misc_feature (1)..(25): SEQ ID NO: 1415; WAN024EZ5_at; Start 237; Stop 261
ggttcagtttgtagatgacgtcaag

SEQ ID NO: 188177 - DNA, 25 bp, Artificial
  probe
  misc_feature (1)..(25): SEQ ID NO: 1415; WAN024EZ5_at; Start 96; Stop 120
gcaaaataagcattctccaattgag

SEQ ID NO: 188178 - DNA, 25 bp, Artificial
  probe
  misc_feature (1)..(25): SEQ ID NO: 1415; WAN024EZ5_at; Start 446; Stop 470
tctgggcaacgatagaacattctct

SEQ ID NO: 188179 - DNA, 25 bp, Artificial
  probe
  misc_feature (1)..(25): SEQ ID NO: 1415; WAN024EZ5_at; Start 340; Stop 364
tcaggctatcgttcctatcatgtgg

SEQ ID NO: 188180 - DNA, 25 bp, Artificial
  probe
  misc_feature (1)..(25): SEQ ID NO: 1415; WAN024EZ5_at; Start 78; Stop 102
tcgtaagcaatatcgtaagcaaaat

SEQ ID NO: 188181 - DNA, 25 bp, Artificial
  probe
  misc_feature (1)..(25): SEQ ID NO: 1415; WAN024EZ5_at; Start 494; Stop 518
tcccagatgagattaagaagcgact

SEQ ID NO: 188182 - DNA, 25 bp, Artificial
  probe
  misc_feature (1)..(25): SEQ ID NO: 1415; WAN024EZ5_at; Start 26; Stop 50
tagatccttacattcaagctgttgg

SEQ ID NO: 188183 - DNA, 25 bp, Artificial
  probe
  misc_feature (1)..(25): SEQ ID NO: 1415; WAN024EZ5_at; Start 522; Stop 546
aattacagctagaatcgcccatcag

SEQ ID NO: 188184 - DNA, 25 bp, Artificial
  probe
  misc_feature (1)..(25): SEQ ID NO: 1415; WAN024EZ5_at; Start 465; Stop 489
ttctctcaactacaagtaccaaggg

SEQ ID NO: 188185 - DNA, 25 bp, Artificial
  probe
  misc_feature (1)..(25): SEQ ID NO: 1415; WAN024EZ5_at; Start 187; Stop 211
tatgcgaccttggaacacgatttgc

SEQ ID NO: 188186 - DNA, 25 bp, Artificial
  probe
  misc_feature (1)..(25): SEQ ID NO: 1415; WAN024EZ5_at; Start 180; Stop 204
cattacttatgcgaccttggaacac

SEQ ID NO: 188187 - DNA, 25 bp, Artificial
  probe
  misc_feature (1)..(25): SEQ ID NO: 1415; WAN024EZ5_at; Start 373; Stop 397
tatacggttgataccatcaatggag

SEQ ID NO: 188188 - DNA, 25 bp, Artificial
  probe
  misc_feature (1)..(25): SEQ ID NO: 1415; WAN024EZ5_at; Start 415; Stop 439
gaaattcaaattcgtactttggcca

SEQ ID NO: 188189 - DNA, 25 bp, Artificial
  probe
  misc_feature (1)..(25): SEQ ID NO: 1415; WAN024EZ5_at; Start 561; Stop 585
gggtgaaattcgtgatgatatccaa

SEQ ID NO: 188190 - DNA, 25 bp, Artificial
  probe
  misc_feature (1)..(25): SEQ ID NO: 1415; WAN024EZ5_at; Start 280; Stop 304
cacaagcgtcaggatatgcgaatca

SEQ ID NO: 188191 - DNA, 25 bp, Artificial
  probe
  misc_feature (1)..(25): SEQ ID NO: 1415; WAN024EZ5_at; Start 218; Stop 242
ttgctggcttacgtgtgatggttca

SEQ ID NO: 188192 - DNA, 25 bp, Artificial
  probe
  misc_feature (1)..(25): SEQ ID NO: 1415; WAN024EZ5_at; Start 507; Stop 531
taagaagcgactggaaattacagct

SEQ ID NO: 188193 - DNA, 25 bp, Artificial
  probe
  misc_feature (1)..(25): SEQ ID NO: 1415; WAN024EZ5_at; Start 305; Stop 329
tacaggagcgagattacattactca

SEQ ID NO: 188194 - DNA, 25 bp, Artificial
  probe
  misc_feature (1)..(25): SEQ ID NO: 1415; WAN024EZ5_at; Start 533; Stop 557
gaatcgcccatcagttggatgaaga

SEQ ID NO: 188195 - DNA, 25 bp, Artificial
  probe
  misc_feature (1)..(25): SEQ ID NO: 1415; WAN024EZ5_at; Start 252; Stop 276
tgacgtcaaggaagtagtggatatt

SEQ ID NO: 188196 - DNA, 25 bp, Artificial
  probe
  misc_feature (1)..(25): SEQ ID NO: 1415; WAN024EZ5_at; Start 2; Stop 26
tgaccttagaatgggaagaatttct

SEQ ID NO: 188197 - DNA, 25 bp, Artificial
  probe
  misc_feature (1)..(25): SEQ ID NO: 1415; WAN024EZ5_at; Start 40; Stop 64
caagctgttggtgagttaaagatta

SEQ ID NO: 188198 - DNA, 25 bp, Artificial
  probe
  misc_feature (1)..(25): SEQ ID NO: 1415; WAN024EZ5_at; Start 63; Stop 87
taaacttcgtggtattcgtaagcaa

SEQ ID NO: 188199 - DNA, 25 bp, Artificial
  probe
  misc_feature (1)..(25): SEQ ID NO: 1415; WAN024EZ5_at; Start 321; Stop 345
cattactcatagaaaagcatcaggc

SEQ ID NO: 188200 - DNA, 25 bp, Artificial
  probe
  misc_feature (1)..(25): SEQ ID NO: 4384; WAN024EZ6_at; Start 470; Stop 494
gagacgggctaacagtttcgacacc

SEQ ID NO: 188201 - DNA, 25 bp, Artificial
  probe
  misc_feature (1)..(25): SEQ ID NO: 4384; WAN024EZ6_at; Start 534; Stop 558
tgttttacaccctaccattgaagct

SEQ ID NO: 188202 - DNA, 25 bp, Artificial
  probe
  misc_feature (1)..(25): SEQ ID NO: 4384; WAN024EZ6_at; Start 548; Stop 572
ccattgaagctttgcaattaacgga

SEQ ID NO: 188203 - DNA, 25 bp, Artificial
  probe
  misc_feature (1)..(25): SEQ ID NO: 4384; WAN024EZ6_at; Start 626; Stop 650
tgcctaagaaggataagattgaact

SEQ ID NO: 188204 - DNA, 25 bp, Artificial
  probe
  misc_feature (1)..(25): SEQ ID NO: 4384; WAN024EZ6_at; Start 704; Stop 728
ctttccgtaatattgagcgtattga

SEQ ID NO: 188205 - DNA, 25 bp, Artificial
  probe
  misc_feature (1)..(25): SEQ ID NO: 4384; WAN024EZ6_at; Start 405; Stop 429
caggtctgatcgaaccatggtggca

SEQ ID NO: 188206 - DNA, 25 bp, Artificial
  probe
  misc_feature (1)..(25): SEQ ID NO: 4384; WAN024EZ6_at; Start 86; Stop 110
tgcgagatcgtttgaagagaaatca

SEQ ID NO: 188207 - DNA, 25 bp, Artificial
  probe
  misc_feature (1)..(25): SEQ ID NO: 4384; WAN024EZ6_at; Start 364; Stop 388
gaagttaagattttcagagcactca

SEQ ID NO: 188208 - DNA, 25 bp, Artificial
  probe
  misc_feature (1)..(25): SEQ ID NO: 4384; WAN024EZ6_at; Start 342; Stop 366
gaaggtctttcttgaaaatggtgaa

SEQ ID NO: 188209 - DNA, 25 bp, Artificial
  probe
  misc_feature (1)..(25): SEQ ID NO: 4384; WAN024EZ6_at; Start 503; Stop 527
gtactgcctataacaagtctcttgg

SEQ ID NO: 188210 - DNA, 25 bp, Artificial
  probe
  misc_feature (1)..(25): SEQ ID NO: 4384; WAN024EZ6_at; Start 609; Stop 633
gggctcttccattattgtgcctaag

SEQ ID NO: 188211 - DNA, 25 bp, Artificial
  probe
  misc_feature (1)..(25): SEQ ID NO: 4384; WAN024EZ6_at; Start 25; Stop 49
ggtaaacgaattgatctgatagcca

SEQ ID NO: 188212 - DNA, 25 bp, Artificial
  probe
  misc_feature (1)..(25): SEQ ID NO: 4384; WAN024EZ6_at; Start 773; Stop 797
gccataccagtttctggaaccgtgt

SEQ ID NO: 188213 - DNA, 25 bp, Artificial
  probe
  misc_feature (1)..(25): SEQ ID NO: 4384; WAN024EZ6_at; Start 760; Stop 784
gtcgcgactcctagccataccagtt

SEQ ID NO: 188214 - DNA, 25 bp, Artificial
  probe
  misc_feature (1)..(25): SEQ ID NO: 4384; WAN024EZ6_at; Start 313; Stop 337
gcaagggtttcttaccctgttctga

SEQ ID NO: 188215 - DNA, 25 bp, Artificial
  probe
  misc_feature (1)..(25): SEQ ID NO: 4384; WAN024EZ6_at; Start 173; Stop 197
tgtcggcctttcataagtacgaaaa

SEQ ID NO: 188216 - DNA, 25 bp, Artificial
  probe
  misc_feature (1)..(25): SEQ ID NO: 4384; WAN024EZ6_at; Start 394; Stop 418
gccagcatccgcaggtctgatcgaa

SEQ ID NO: 188217 - DNA, 25 bp, Artificial
  probe
  misc_feature (1)..(25): SEQ ID NO: 4384; WAN024EZ6_at; Start 328; Stop 352
cctgttctgaatgtgaaggtctttc

SEQ ID NO: 188218 - DNA, 25 bp, Artificial
  probe
  misc_feature (1)..(25): SEQ ID NO: 4384; WAN024EZ6_at; Start 135; Stop 159
ggatattgtcatttccattggcggg

SEQ ID NO: 188219 - DNA, 25 bp, Artificial
  probe
  misc_feature (1)..(25): SEQ ID NO: 4384; WAN024EZ6_at; Start 235; Stop 259
ggacatttgggcttctatacagatt

SEQ ID NO: 188220 - DNA, 25 bp, Artificial
  probe
  misc_feature (1)..(25): SEQ ID NO: 4384; WAN024EZ6_at; Start 745; Stop 769
cataagattcactttgtcgcgactc

SEQ ID NO: 188221 - DNA, 25 bp, Artificial
  probe
  misc_feature (1)..(25): SEQ ID NO: 4384; WAN024EZ6_at; Start 377; Stop 401
tcagagcactcaacgaagccagcat

SEQ ID NO: 188222 - DNA, 25 bp, Artificial
  probe
  misc_feature (1)..(25): SEQ ID NO: 4384; WAN024EZ6_at; Start 419; Stop 443
ccatggtggcagatattgtaataaa

SEQ ID NO: 188223 - DNA, 25 bp, Artificial
  probe
  misc_feature (1)..(25): SEQ ID NO: 4384; WAN024EZ6_at; Start 688; Stop 712
gacaatagcgtttattctttccgta

SEQ ID NO: 188224 - DNA, 25 bp, Artificial
  probe
  misc_feature (1)..(25): SEQ ID NO: 4384; WAN024EZ6_at; Start 673; Stop 697
catactatttcggttgacaatagcg

SEQ ID NO: 188225 - DNA, 25 bp, Artificial
  probe
  misc_feature (1)..(25): SEQ ID NO: 4384; WAN024EZ6_at; Start 159; Stop 183
ggatggtatgctcttgtcggccttt

SEQ ID NO: 188226 - DNA, 25 bp, Artificial
  probe
  misc_feature (1)..(25): SEQ ID NO: 4384; WAN024EZ6_at; Start 435; Stop 459
tgtaataaatggtgttccctttgaa

SEQ ID NO: 188227 - DNA, 25 bp, Artificial
  probe
  misc_feature (1)..(25): SEQ ID NO: 4384; WAN024EZ6_at; Start 275; Stop 299
tggacaagctagtgactaatttgca

SEQ ID NO: 188228 - DNA, 25 bp, Artificial
  probe
  misc_feature (1)..(25): SEQ ID NO: 4384; WAN024EZ6_at; Start 518; Stop 542
agtctcttggcggtgctgttttaca

SEQ ID NO: 188229 - DNA, 25 bp, Artificial
  probe
  misc_feature (1)..(25): SEQ ID NO: 4384; WAN024EZ6_at; Start 259; Stop 283
tatcgtgattttgagttggacaagc

SEQ ID NO: 188230 - DNA, 25 bp, Artificial
  probe
  misc_feature (1)..(25): SEQ ID NO: 4384; WAN024EZ6_at; Start 456; Stop 480
tgaacgttttcgtggagacgggcta

SEQ ID NO: 188231 - DNA, 25 bp, Artificial
  probe
  misc_feature (1)..(25): SEQ ID NO: 4384; WAN024EZ6_at; Start 645; Stop 669
tgaacttattccaacaagaaacgat

SEQ ID NO: 188232 - DNA, 25 bp, Artificial
  probe
  misc_feature (1)..(25): SEQ ID NO: 4384; WAN024EZ6_at; Start 39; Stop 63
tctgatagccaatagaaaaccgcag

SEQ ID NO: 188233 - DNA, 25 bp, Artificial
  probe
  misc_feature (1)..(25): SEQ ID NO: 4384; WAN024EZ6_at; Start 489; Stop 513
gacaccgactggtagtactgcctat

SEQ ID NO: 188234 - DNA, 25 bp, Artificial
  probe
  misc_feature (1)..(25): SEQ ID NO: 1478; WAN024EZ7_at; Start 247; Stop 271
tccttaatcatctcttcggcatcga

SEQ ID NO: 188235 - DNA, 25 bp, Artificial
  probe
  misc_feature (1)..(25): SEQ ID NO: 1478; WAN024EZ7_at; Start 233; Stop 257
catctccgcctgattccttaatcat

SEQ ID NO: 188236 - DNA, 25 bp, Artificial
  probe
  misc_feature (1)..(25): SEQ ID NO: 1478; WAN024EZ7_at; Start 136; Stop 160
tcctttggaaggagcaaaattttca

SEQ ID NO: 188237 - DNA, 25 bp, Artificial
  probe
  misc_feature (1)..(25): SEQ ID NO: 1478; WAN024EZ7_at; Start 67; Stop 91
aaaagtgccgcttcgtctccaccag

SEQ ID NO: 188238 - DNA, 25 bp, Artificial
  probe
  misc_feature (1)..(25): SEQ ID NO: 1478; WAN024EZ7_at; Start 4; Stop 28
acttcaaagcgccaaccttgggctt

SEQ ID NO: 188239 - DNA, 25 bp, Artificial
  probe
  misc_feature (1)..(25): SEQ ID NO: 1478; WAN024EZ7_at; Start 91; Stop 115
gctgctccacggatttcaaggatga

SEQ ID NO: 188240 - DNA, 25 bp, Artificial
  probe
  misc_feature (1)..(25): SEQ ID NO: 1478; WAN024EZ7_at; Start 9; Stop 33
aaagcgccaaccttgggcttccgca

SEQ ID NO: 188241 - DNA, 25 bp, Artificial
  probe
  misc_feature (1)..(25): SEQ ID NO: 1478; WAN024EZ7_at; Start 120; Stop 144
cttgtcatcgtttggatcctttgga

SEQ ID NO: 188242 - DNA, 25 bp, Artificial
  probe
  misc_feature (1)..(25): SEQ ID NO: 1478; WAN024EZ7_at; Start 94; Stop 118
gctccacggatttcaaggatgatat

SEQ ID NO: 188243 - DNA, 25 bp, Artificial
  probe
  misc_feature (1)..(25): SEQ ID NO: 1478; WAN024EZ7_at; Start 60; Stop 84
tccagcgaaaagtgccgcttcgtct

SEQ ID NO: 188244 - DNA, 25 bp, Artificial
  probe
  misc_feature (1)..(25): SEQ ID NO: 1478; WAN024EZ7_at; Start 170; Stop 194
catattcttctttttcagccttggc

SEQ ID NO: 188245 - DNA, 25 bp, Artificial
  probe
  misc_feature (1)..(25): SEQ ID NO: 1478; WAN024EZ7_at; Start 49; Stop 73
gttagcaaatctccagcgaaaagtg

SEQ ID NO: 188246 - DNA, 25 bp, Artificial
  probe
  misc_feature (1)..(25): SEQ ID NO: 1478; WAN024EZ7_at; Start 17; Stop 41
aaccttgggcttccgcatacttttg

SEQ ID NO: 188247 - DNA, 25 bp, Artificial
  probe
  misc_feature (1)..(25): SEQ ID NO: 1478; WAN024EZ7_at; Start 20; Stop 44
cttgggcttccgcatacttttggta

SEQ ID NO: 188248 - DNA, 25 bp, Artificial
  probe
  misc_feature (1)..(25): SEQ ID NO: 1478; WAN024EZ7_at; Start 30; Stop 54
cgcatacttttggtacatagttagc

SEQ ID NO: 188249 - DNA, 25 bp, Artificial
  probe
  misc_feature (1)..(25): SEQ ID NO: 1478; WAN024EZ7_at; Start 86; Stop 110
caccagctgctccacggatttcaag

SEQ ID NO: 188250 - DNA, 25 bp, Artificial
  probe
  misc_feature (1)..(25): SEQ ID NO: 1478; WAN024EZ7_at; Start 58; Stop 82
tctccagcgaaaagtgccgcttcgt

SEQ ID NO: 188251 - DNA, 25 bp, Artificial
  probe
  misc_feature (1)..(25): SEQ ID NO: 1478; WAN024EZ7_at; Start 97; Stop 121
ccacggatttcaaggatgatattct

SEQ ID NO: 188252 - DNA, 25 bp, Artificial
  probe
  misc_feature (1)..(25): SEQ ID NO: 1478; WAN024EZ7_at; Start 114; Stop 138
gatattcttgtcatcgtttggatcc

SEQ ID NO: 188253 - DNA, 25 bp, Artificial
  probe
  misc_feature (1)..(25): SEQ ID NO: 1478; WAN024EZ7_at; Start 51; Stop 75
tagcaaatctccagcgaaaagtgcc

SEQ ID NO: 188254 - DNA, 25 bp, Artificial
  probe
  misc_feature (1)..(25): SEQ ID NO: 1478; WAN024EZ7_at; Start 147; Stop 171
gagcaaaattttcagtttttcttca

SEQ ID NO: 188255 - DNA, 25 bp, Artificial
  probe
  misc_feature (1)..(25): SEQ ID NO: 1478; WAN024EZ7_at; Start 41; Stop 65
ggtacatagttagcaaatctccagc

SEQ ID NO: 188256 - DNA, 25 bp, Artificial
  probe
  misc_feature (1)..(25): SEQ ID NO: 1478; WAN024EZ7_at; Start 258; Stop 282
ctcttcggcatcgacgatattttga

SEQ ID NO: 188257 - DNA, 25 bp, Artificial
  probe
  misc_feature (1)..(25): SEQ ID NO: 1478; WAN024EZ7_at; Start 124; Stop 148
tcatcgtttggatcctttggaagga

SEQ ID NO: 188258 - DNA, 25 bp, Artificial
  probe
  misc_feature (1)..(25): SEQ ID NO: 1478; WAN024EZ7_at; Start 193; Stop 217
gcatctttgagttcttgcttggcca

SEQ ID NO: 188259 - DNA, 25 bp, Artificial
  probe
  misc_feature (1)..(25): SEQ ID NO: 1478; WAN024EZ7_at; Start 251; Stop 275
taatcatctcttcggcatcgacgat

SEQ ID NO: 188260 - DNA, 25 bp, Artificial
  probe
  misc_feature (1)..(25): SEQ ID NO: 1478; WAN024EZ7_at; Start 45; Stop 69
catagttagcaaatctccagcgaaa

SEQ ID NO: 188261 - DNA, 25 bp, Artificial
  probe
  misc_feature (1)..(25): SEQ ID NO: 1478; WAN024EZ7_at; Start 106; Stop 130
tcaaggatgatattcttgtcatcgt

SEQ ID NO: 188262 - DNA, 25 bp, Artificial
  probe
  misc_feature (1)..(25): SEQ ID NO: 1478; WAN024EZ7_at; Start 255; Stop 279
catctcttcggcatcgacgatattt

SEQ ID NO: 188263 - DNA, 25 bp, Artificial
  probe
  misc_feature (1)..(25): SEQ ID NO: 1478; WAN024EZ7_at; Start 54; Stop 78
caaatctccagcgaaaagtgccgct

SEQ ID NO: 188264 - DNA, 25 bp, Artificial
  probe
  misc_feature (1)..(25): SEQ ID NO: 1478; WAN024EZ7_at; Start 127; Stop 151
tcgtttggatcctttggaaggagca

SEQ ID NO: 188265 - DNA, 25 bp, Artificial
  probe
  misc_feature (1)..(25): SEQ ID NO: 1478; WAN024EZ7_at; Start 185; Stop 209
cagccttggcatctttgagttcttg

SEQ ID NO: 188266 - DNA, 25 bp, Artificial
  probe
  misc_feature (1)..(25): SEQ ID NO: 1478; WAN024EZ7_at; Start 24; Stop 48
ggcttccgcatacttttggtacata

SEQ ID NO: 188267 - DNA, 25 bp, Artificial
  probe
  misc_feature (1)..(25): SEQ ID NO: 1478; WAN024EZ7_at; Start 222; Stop 246
ttccaagtccgcatctccgcctgat

SEQ ID NO: 188268 - DNA, 25 bp, Artificial
  probe
  misc_feature (1)..(25): SEQ ID NO: 4212; WAN024EZ8_at; Start 231; Stop 255
gaactgtcgctgtcgaagtatgaac

SEQ ID NO: 188269 - DNA, 25 bp, Artificial
  probe
  misc_feature (1)..(25): SEQ ID NO: 4212; WAN024EZ8_at; Start 266; Stop 290
ctttctgtcacaggaacacgttgca

SEQ ID NO: 188270 - DNA, 25 bp, Artificial
  probe
  misc_feature (1)..(25): SEQ ID NO: 4212; WAN024EZ8_at; Start 257; Stop 281
cggccttggctttctgtcacaggaa

SEQ ID NO: 188271 - DNA, 25 bp, Artificial
  probe
  misc_feature (1)..(25): SEQ ID NO: 4212; WAN024EZ8_at; Start 102; Stop 126
gaacgatacgaacggcagtcgcaac

SEQ ID NO: 188272 - DNA, 25 bp, Artificial
  probe
  misc_feature (1)..(25): SEQ ID NO: 4212; WAN024EZ8_at; Start 97; Stop 121
caagtgaacgatacgaacggcagtc

SEQ ID NO: 188273 - DNA, 25 bp, Artificial
  probe
  misc_feature (1)..(25): SEQ ID NO: 4212; WAN024EZ8_at; Start 225; Stop 249
taacaagaactgtcgctgtcgaagt

SEQ ID NO: 188274 - DNA, 25 bp, Artificial
  probe
  misc_feature (1)..(25): SEQ ID NO: 4212; WAN024EZ8_at; Start 166; Stop 190
gatgtcgacacgaaggtcttttgga

SEQ ID NO: 188275 - DNA, 25 bp, Artificial
  probe
  misc_feature (1)..(25): SEQ ID NO: 4212; WAN024EZ8_at; Start 276; Stop 300
caggaacacgttgcacacggtgggc

SEQ ID NO: 188276 - DNA, 25 bp, Artificial
  probe
  misc_feature (1)..(25): SEQ ID NO: 4212; WAN024EZ8_at; Start 237; Stop 261
tcgctgtcgaagtatgaacacggcc

SEQ ID NO: 188277 - DNA, 25 bp, Artificial
  probe
  misc_feature (1)..(25): SEQ ID NO: 4212; WAN024EZ8_at; Start 200; Stop 224
tattcaacctcttcaacttctggca

SEQ ID NO: 188278 - DNA, 25 bp, Artificial
  probe
  misc_feature (1)..(25): SEQ ID NO: 4212; WAN024EZ8_at; Start 150; Stop 174
caccagaggcgtgatagatgtcgac

SEQ ID NO: 188279 - DNA, 25 bp, Artificial
  probe
  misc_feature (1)..(25): SEQ ID NO: 4212; WAN024EZ8_at; Start 142; Stop 166
tccaccagcaccagaggcgtgatag

SEQ ID NO: 188280 - DNA, 25 bp, Artificial
  probe
  misc_feature (1)..(25): SEQ ID NO: 4212; WAN024EZ8_at; Start 68; Stop 92
tcctgcatctcaaccttgatattgg

SEQ ID NO: 188281 - DNA, 25 bp, Artificial
  probe
  misc_feature (1)..(25): SEQ ID NO: 4212; WAN024EZ8_at; Start 44; Stop 68
cggttcttctgctgggtacgttctt

SEQ ID NO: 188282 - DNA, 25 bp, Artificial
  probe
  misc_feature (1)..(25): SEQ ID NO: 4212; WAN024EZ8_at; Start 187; Stop 211
tggatcaatgtcgtattcaacctct

SEQ ID NO: 188283 - DNA, 25 bp, Artificial
  probe
  misc_feature (1)..(25): SEQ ID NO: 4212; WAN024EZ8_at; Start 243; Stop 267
tcgaagtatgaacacggccttggct

SEQ ID NO: 188284 - DNA, 25 bp, Artificial
  probe
  misc_feature (1)..(25): SEQ ID NO: 4212; WAN024EZ8_at; Start 106; Stop 130
gatacgaacggcagtcgcaacctta

SEQ ID NO: 188285 - DNA, 25 bp, Artificial
  probe
  misc_feature (1)..(25): SEQ ID NO: 4212; WAN024EZ8_at; Start 81; Stop 105
ccttgatattggttggcaagtgaac

SEQ ID NO: 188286 - DNA, 25 bp, Artificial
  probe
  misc_feature (1)..(25): SEQ ID NO: 4212; WAN024EZ8_at; Start 281; Stop 305
acacgttgcacacggtgggcacctg

SEQ ID NO: 188287 - DNA, 25 bp, Artificial
  probe
  misc_feature (1)..(25): SEQ ID NO: 4212; WAN024EZ8_at; Start 174; Stop 198
cacgaaggtcttttggatcaatgtc

SEQ ID NO: 188288 - DNA, 25 bp, Artificial
  probe
  misc_feature (1)..(25): SEQ ID NO: 4212; WAN024EZ8_at; Start 121; Stop 145
cgcaaccttattgacgttctgtcca

SEQ ID NO: 188289 - DNA, 25 bp, Artificial
  probe
  misc_feature (1)..(25): SEQ ID NO: 4212; WAN024EZ8_at; Start 159; Stop 183
cgtgatagatgtcgacacgaaggtc

SEQ ID NO: 188290 - DNA, 25 bp, Artificial
  probe
  misc_feature (1)..(25): SEQ ID NO: 4212; WAN024EZ8_at; Start 271; Stop 295
tgtcacaggaacacgttgcacacgg

SEQ ID NO: 188291 - DNA, 25 bp, Artificial
  probe
  misc_feature (1)..(25): SEQ ID NO: 4212; WAN024EZ8_at; Start 62; Stop 86
cgttcttcctgcatctcaaccttga

SEQ ID NO: 188292 - DNA, 25 bp, Artificial
  probe
  misc_feature (1)..(25): SEQ ID NO: 4212; WAN024EZ8_at; Start 111; Stop 135
gaacggcagtcgcaaccttattgac

SEQ ID NO: 188293 - DNA, 25 bp, Artificial
  probe
  misc_feature (1)..(25): SEQ ID NO: 4212; WAN024EZ8_at; Start 56; Stop 80
tgggtacgttcttcctgcatctcaa

SEQ ID NO: 188294 - DNA, 25 bp, Artificial
  probe
  misc_feature (1)..(25): SEQ ID NO: 4212; WAN024EZ8_at; Start 115; Stop 139
ggcagtcgcaaccttattgacgttc

SEQ ID NO: 188295 - DNA, 25 bp, Artificial
  probe
  misc_feature (1)..(25): SEQ ID NO: 4212; WAN024EZ8_at; Start 93; Stop 117
ttggcaagtgaacgatacgaacggc

SEQ ID NO: 188296 - DNA, 25 bp, Artificial
  probe
  misc_feature (1)..(25): SEQ ID NO: 4212; WAN024EZ8_at; Start 207; Stop 231
cctcttcaacttctggcataacaag

SEQ ID NO: 188297 - DNA, 25 bp, Artificial
  probe
  misc_feature (1)..(25): SEQ ID NO: 4212; WAN024EZ8_at; Start 152; Stop 176
ccagaggcgtgatagatgtcgacac

SEQ ID NO: 188298 - DNA, 25 bp, Artificial
  probe
  misc_feature (1)..(25): SEQ ID NO: 4212; WAN024EZ8_at; Start 48; Stop 72
tcttctgctgggtacgttcttcctg

SEQ ID NO: 188299 - DNA, 25 bp, Artificial
  probe
  misc_feature (1)..(25): SEQ ID NO: 4212; WAN024EZ8_at; Start 249; Stop 273
tatgaacacggccttggctttctgt

SEQ ID NO: 188300 - DNA, 25 bp, Artificial
  probe
  misc_feature (1)..(25): SEQ ID NO: 4212; WAN024EZ8_at; Start 134; Stop 158
acgttctgtccaccagcaccagagg

SEQ ID NO: 188301 - DNA, 25 bp, Artificial
  probe
  misc_feature (1)..(25): SEQ ID NO: 4212; WAN024EZ8_at; Start 218; Stop 242
tctggcataacaagaactgtcgctg

SEQ ID NO: 188302 - DNA, 25 bp, Artificial
  probe
  misc_feature (1)..(25): SEQ ID NO: 1022; WAN024EZ9_at; Start 1008; Stop 1032
taaattggacgaagttgtggatgcc

SEQ ID NO: 188303 - DNA, 25 bp, Artificial
  probe
  misc_feature (1)..(25): SEQ ID NO: 1022; WAN024EZ9_at; Start 649; Stop 673
gacattgatccaaaagaccttcgtg

SEQ ID NO: 188304 - DNA, 25 bp, Artificial
  probe
  misc_feature (1)..(25): SEQ ID NO: 1022; WAN024EZ9_at; Start 531; Stop 555
taagtatgaatcaggtgcccaccgt

SEQ ID NO: 188305 - DNA, 25 bp, Artificial
  probe
  misc_feature (1)..(25): SEQ ID NO: 1022; WAN024EZ9_at; Start 621; Stop 645
tatgccagaagttgaagaggttgaa

SEQ ID NO: 188306 - DNA, 25 bp, Artificial
  probe
  misc_feature (1)..(25): SEQ ID NO: 1022; WAN024EZ9_at; Start 362; Stop 386
ctggtggagacgaagcggcactttt

SEQ ID NO: 188307 - DNA, 25 bp, Artificial
  probe
  misc_feature (1)..(25): SEQ ID NO: 1022; WAN024EZ9_at; Start 766; Stop 790
gttgagatgcaggaagaacgtaccc

SEQ ID NO: 188308 - DNA, 25 bp, Artificial
  probe
  misc_feature (1)..(25): SEQ ID NO: 1022; WAN024EZ9_at; Start 931; Stop 955
tataacttcccacaaaaccgtgtca

SEQ ID NO: 188309 - DNA, 25 bp, Artificial
  probe
  misc_feature (1)..(25): SEQ ID NO: 1022; WAN024EZ9_at; Start 180; Stop 204
cgtcgatgccgaagagatgattaag

SEQ ID NO: 188310 - DNA, 25 bp, Artificial
  probe
  misc_feature (1)..(25): SEQ ID NO: 1022; WAN024EZ9_at; Start 67; Stop 91
gaccctgatgtcgtttcagacacca

SEQ ID NO: 188311 - DNA, 25 bp, Artificial
  probe
  misc_feature (1)..(25): SEQ ID NO: 1022; WAN024EZ9_at; Start 388; Stop 412
gctggagatttgctaactatgtacc

SEQ ID NO: 188312 - DNA, 25 bp, Artificial
  probe
  misc_feature (1)..(25): SEQ ID NO: 1022; WAN024EZ9_at; Start 309; Stop 333
tccaaaggatccaaacgatgacaag

SEQ ID NO: 188313 - DNA, 25 bp, Artificial
  probe
  misc_feature (1)..(25): SEQ ID NO: 1022; WAN024EZ9_at; Start 910; Stop 934
cgttcagaacggatccgaacttata

SEQ ID NO: 188314 - DNA, 25 bp, Artificial
  probe
  misc_feature (1)..(25): SEQ ID NO: 1022; WAN024EZ9_at; Start 567; Stop 591
tcctgtgacagaaagccaaggccgt

SEQ ID NO: 188315 - DNA, 25 bp, Artificial
  probe
  misc_feature (1)..(25): SEQ ID NO: 1022; WAN024EZ9_at; Start 605; Stop 629
cagcgacagttcttgttatgccaga

SEQ ID NO: 188316 - DNA, 25 bp, Artificial
  probe
  misc_feature (1)..(25): SEQ ID NO: 1022; WAN024EZ9_at; Start 877; Stop 901
gctgagcgtaagtcgacaatcggta

SEQ ID NO: 188317 - DNA, 25 bp, Artificial
  probe
  misc_feature (1)..(25): SEQ ID NO: 1022; WAN024EZ9_at; Start 709; Stop 733
aacgtcaataaggttgcgactgccg

SEQ ID NO: 188318 - DNA, 25 bp, Artificial
  probe
  misc_feature (1)..(25): SEQ ID NO: 1022; WAN024EZ9_at; Start 148; Stop 172
taccgtgagtataaacaagtccttc

SEQ ID NO: 188319 - DNA, 25 bp, Artificial
  probe
  misc_feature (1)..(25): SEQ ID NO: 1022; WAN024EZ9_at; Start 550; Stop 574
caccgtgtgcaacgtgttcctgtga

SEQ ID NO: 188320 - DNA, 25 bp, Artificial
  probe
  misc_feature (1)..(25): SEQ ID NO: 1022; WAN024EZ9_at; Start 672; Stop 696
tgtcgacatctatcacgcctctggt

SEQ ID NO: 188321 - DNA, 25 bp, Artificial
  probe
  misc_feature (1)..(25): SEQ ID NO: 1022; WAN024EZ9_at; Start 488; Stop 512
aagtggttgctatggtttcaggtca

SEQ ID NO: 188322 - DNA, 25 bp, Artificial
  probe
  misc_feature (1)..(25): SEQ ID NO: 1022; WAN024EZ9_at; Start 505; Stop 529
tcaggtcagtctgtatactctaagc

SEQ ID NO: 188323 - DNA, 25 bp, Artificial
  probe
  misc_feature (1)..(25): SEQ ID NO: 1022; WAN024EZ9_at; Start 293; Stop 317
tgaaaattttgctccttccaaagga

SEQ ID NO: 188324 - DNA, 25 bp, Artificial
  probe
  misc_feature (1)..(25): SEQ ID NO: 1022; WAN024EZ9_at; Start 685; Stop 709
cacgcctctggtgctggtggacaga

SEQ ID NO: 188325 - DNA, 25 bp, Artificial
  probe
  misc_feature (1)..(25): SEQ ID NO: 1022; WAN024EZ9_at; Start 83; Stop 107
cagacaccaagcgttttatggagct

SEQ ID NO: 188326 - DNA, 25 bp, Artificial
  probe
  misc_feature (1)..(25): SEQ ID NO: 1022; WAN024EZ9_at; Start 258; Stop 282
tgccaaggctgaaaaagaagaatat

SEQ ID NO: 188327 - DNA, 25 bp, Artificial
  probe
  misc_feature (1)..(25): SEQ ID NO: 1022; WAN024EZ9_at; Start 163; Stop 187
caagtccttcaaaatatcgtcgatg

SEQ ID NO: 188328 - DNA, 25 bp, Artificial
  probe
  misc_feature (1)..(25): SEQ ID NO: 1022; WAN024EZ9_at; Start 583; Stop 607
caaggccgtgttcatacttcgacag

SEQ ID NO: 188329 - DNA, 25 bp, Artificial
  probe
  misc_feature (1)..(25): SEQ ID NO: 1022; WAN024EZ9_at; Start 244; Stop 268
caagaactcaaagatgccaaggctg

SEQ ID NO: 188330 - DNA, 25 bp, Artificial
  probe
  misc_feature (1)..(25): SEQ ID NO: 1022; WAN024EZ9_at; Start 52; Stop 76
ggagaattgctgagtgaccctgatg

SEQ ID NO: 188331 - DNA, 25 bp, Artificial
  probe
  misc_feature (1)..(25): SEQ ID NO: 1022; WAN024EZ9_at; Start 129; Stop 153
tcgtgacaccgtaatagcctaccgt

SEQ ID NO: 188332 - DNA, 25 bp, Artificial
  probe
  misc_feature (1)..(25): SEQ ID NO: 1022; WAN024EZ9_at; Start 779; Stop 803
aagaacgtacccagcagaagaaccg

SEQ ID NO: 188333 - DNA, 25 bp, Artificial
  probe
  misc_feature (1)..(25): SEQ ID NO: 1022; WAN024EZ9_at; Start 893; Stop 917
caatcggtactggtgaccgttcaga

SEQ ID NO: 188334 - DNA, 25 bp, Artificial
  probe
  misc_feature (1)..(25): SEQ ID NO: 1022; WAN024EZ9_at; Start 341; Stop 365
tccttgaaatccgtggagcagctgg

SEQ ID NO: 188335 - DNA, 25 bp, Artificial
  probe
  misc_feature (1)..(25): SEQ ID NO: 1022; WAN024EZ9_at; Start 949; Stop 973
cgtgtcacagaccaccgtatcggct

SEQ ID NO: 188336 - DNA, 25 bp, Artificial
  probe
  misc_feature (1)..(25): SEQ ID NO: 5113; WAN024EZA_at; Start 97; Stop 121
aaaatctgtagcatccttctgctca

SEQ ID NO: 188337 - DNA, 25 bp, Artificial
  probe
  misc_feature (1)..(25): SEQ ID NO: 5113; WAN024EZA_at; Start 107; Stop 131
gcatccttctgctcaacaatacgaa

SEQ ID NO: 188338 - DNA, 25 bp, Artificial
  probe
  misc_feature (1)..(25): SEQ ID NO: 5113; WAN024EZA_at; Start 191; Stop 215
gcagtcaagatagtggccacatttt

SEQ ID NO: 188339 - DNA, 25 bp, Artificial
  probe
  misc_feature (1)..(25): SEQ ID NO: 5113; WAN024EZA_at; Start 206; Stop 230
gccacatttttatgattgatatgga

SEQ ID NO: 188340 - DNA, 25 bp, Artificial
  probe
  misc_feature (1)..(25): SEQ ID NO: 5113; WAN024EZA_at; Start 238; Stop 262
caagtttttcaagctttcaccagtg

SEQ ID NO: 188341 - DNA, 25 bp, Artificial
  probe
  misc_feature (1)..(25): SEQ ID NO: 5113; WAN024EZA_at; Start 90; Stop 114
gcttttcaaaatctgtagcatcctt

SEQ ID NO: 188342 - DNA, 25 bp, Artificial
  probe
  misc_feature (1)..(25): SEQ ID NO: 5113; WAN024EZA_at; Start 25; Stop 49
tttcaaagcctcaaacaaacgctcg

SEQ ID NO: 188343 - DNA, 25 bp, Artificial
  probe
  misc_feature (1)..(25): SEQ ID NO: 5113; WAN024EZA_at; Start 37; Stop 61
aaacaaacgctcgttgtcaaagacg

SEQ ID NO: 188344 - DNA, 25 bp, Artificial
  probe
  misc_feature (1)..(25): SEQ ID NO: 5113; WAN024EZA_at; Start 144; Stop 168
tgtcattacgaacaattcgtccata

SEQ ID NO: 188345 - DNA, 25 bp, Artificial
  probe
  misc_feature (1)..(25): SEQ ID NO: 5113; WAN024EZA_at; Start 176; Stop 200
ggattatccgtttcagcagtcaaga

SEQ ID NO: 188346 - DNA, 25 bp, Artificial
  probe
  misc_feature (1)..(25): SEQ ID NO: 5113; WAN024EZA_at; Start 124; Stop 148
aatacgaagaacctcagcattgtca

SEQ ID NO: 188347 - DNA, 25 bp, Artificial
  probe
  misc_feature (1)..(25): SEQ ID NO: 5113; WAN024EZA_at; Start 185; Stop 209
gtttcagcagtcaagatagtggcca

SEQ ID NO: 188348 - DNA, 25 bp, Artificial
  probe
  misc_feature (1)..(25): SEQ ID NO: 5113; WAN024EZA_at; Start 223; Stop 247
gatatggaaatcaatcaagtttttc

SEQ ID NO: 188349 - DNA, 25 bp, Artificial
  probe
  misc_feature (1)..(25): SEQ ID NO: 5113; WAN024EZA_at; Start 68; Stop 92
ccagtgttgatttccttgatttgct

SEQ ID NO: 188350 - DNA, 25 bp, Artificial
  probe
  misc_feature (1)..(25): SEQ ID NO: 5113; WAN024EZA_at; Start 51; Stop 75
tgtcaaagacgtatgttccagtgtt

SEQ ID NO: 188351 - DNA, 25 bp, Artificial
  probe
  misc_feature (1)..(25): SEQ ID NO: 5113; WAN024EZA_at; Start 13; Stop 37
ggtattgatatttttcaaagcctca

SEQ ID NO: 188352 - DNA, 25 bp, Artificial
  probe
  misc_feature (1)..(25): SEQ ID NO: 5113; WAN024EZA_at; Start 199; Stop 223
gatagtggccacatttttatgattg

SEQ ID NO: 188353 - DNA, 25 bp, Artificial
  probe
  misc_feature (1)..(25): SEQ ID NO: 5113; WAN024EZA_at; Start 62; Stop 86
tatgttccagtgttgatttccttga

SEQ ID NO: 188354 - DNA, 25 bp, Artificial
  probe
  misc_feature (1)..(25): SEQ ID NO: 5113; WAN024EZA_at; Start 173; Stop 197
aaaggattatccgtttcagcagtca

SEQ ID NO: 188355 - DNA, 25 bp, Artificial
  probe
  misc_feature (1)..(25): SEQ ID NO: 5113; WAN024EZA_at; Start 58; Stop 82
gacgtatgttccagtgttgatttcc

SEQ ID NO: 188356 - DNA, 25 bp, Artificial
  probe
  misc_feature (1)..(25): SEQ ID NO: 5113; WAN024EZA_at; Start 47; Stop 71
tcgttgtcaaagacgtatgttccag

SEQ ID NO: 188357 - DNA, 25 bp, Artificial
  probe
  misc_feature (1)..(25): SEQ ID NO: 5113; WAN024EZA_at; Start 5; Stop 29
gcgttattggtattgatatttttca

SEQ ID NO: 188358 - DNA, 25 bp, Artificial
  probe
  misc_feature (1)..(25): SEQ ID NO: 5113; WAN024EZA_at; Start 132; Stop 156
gaacctcagcattgtcattacgaac

SEQ ID NO: 188359 - DNA, 25 bp, Artificial
  probe
  misc_feature (1)..(25): SEQ ID NO: 5113; WAN024EZA_at; Start 29; Stop 53
aaagcctcaaacaaacgctcgttgt

SEQ ID NO: 188360 - DNA, 25 bp, Artificial
  probe
  misc_feature (1)..(25): SEQ ID NO: 5113; WAN024EZA_at; Start 116; Stop 140
tgctcaacaatacgaagaacctcag

SEQ ID NO: 188361 - DNA, 25 bp, Artificial
  probe
  misc_feature (1)..(25): SEQ ID NO: 5113; WAN024EZA_at; Start 54; Stop 78
caaagacgtatgttccagtgttgat

SEQ ID NO: 188362 - DNA, 25 bp, Artificial
  probe
  misc_feature (1)..(25): SEQ ID NO: 5113; WAN024EZA_at; Start 138; Stop 162
cagcattgtcattacgaacaattcg

SEQ ID NO: 188363 - DNA, 25 bp, Artificial
  probe
  misc_feature (1)..(25): SEQ ID NO: 5113; WAN024EZA_at; Start 182; Stop 206
tccgtttcagcagtcaagatagtgg

SEQ ID NO: 188364 - DNA, 25 bp, Artificial
  probe
  misc_feature (1)..(25): SEQ ID NO: 5113; WAN024EZA_at; Start 40; Stop 64
caaacgctcgttgtcaaagacgtat

SEQ ID NO: 188365 - DNA, 25 bp, Artificial
  probe
  misc_feature (1)..(25): SEQ ID NO: 5113; WAN024EZA_at; Start 119; Stop 143
tcaacaatacgaagaacctcagcat

SEQ ID NO: 188366 - DNA, 25 bp, Artificial
  probe
  misc_feature (1)..(25): SEQ ID NO: 5113; WAN024EZA_at; Start 129; Stop 153
gaagaacctcagcattgtcattacg

SEQ ID NO: 188367 - DNA, 25 bp, Artificial
  probe
  misc_feature (1)..(25): SEQ ID NO: 5113; WAN024EZA_at; Start 85; Stop 109
gatttgcttttcaaaatctgtagca

SEQ ID NO: 188368 - DNA, 25 bp, Artificial
  probe
  misc_feature (1)..(25): SEQ ID NO: 5113; WAN024EZA_at; Start 188; Stop 212
tcagcagtcaagatagtggccacat

SEQ ID NO: 188369 - DNA, 25 bp, Artificial
  probe
  misc_feature (1)..(25): SEQ ID NO: 5113; WAN024EZA_at; Start 242; Stop 266
tttttcaagctttcaccagtgatta

SEQ ID NO: 188370 - DNA, 25 bp, Artificial
  probe
  misc_feature (1)..(25): SEQ ID NO: 3961; WAN024EZB_at; Start 54; Stop 78
tagaattggtaatgaccgctcctgc

SEQ ID NO: 188371 - DNA, 25 bp, Artificial
  probe
  misc_feature (1)..(25): SEQ ID NO: 3961; WAN024EZB_at; Start 258; Stop 282
gattgatgcgacgacgcataactga

SEQ ID NO: 188372 - DNA, 25 bp, Artificial
  probe
  misc_feature (1)..(25): SEQ ID NO: 3961; WAN024EZB_at; Start 158; Stop 182
acattggcttcgatttgaacttccg

SEQ ID NO: 188373 - DNA, 25 bp, Artificial
  probe
  misc_feature (1)..(25): SEQ ID NO: 3961; WAN024EZB_at; Start 97; Stop 121
tacataagtaccgtttgtcaaaaca

SEQ ID NO: 188374 - DNA, 25 bp, Artificial
  probe
  misc_feature (1)..(25): SEQ ID NO: 3961; WAN024EZB_at; Start 251; Stop 275
tgtttatgattgatgcgacgacgca

SEQ ID NO: 188375 - DNA, 25 bp, Artificial
  probe
  misc_feature (1)..(25): SEQ ID NO: 3961; WAN024EZB_at; Start 105; Stop 129
taccgtttgtcaaaacagtctcagc

SEQ ID NO: 188376 - DNA, 25 bp, Artificial
  probe
  misc_feature (1)..(25): SEQ ID NO: 3961; WAN024EZB_at; Start 90; Stop 114
tgtccactacataagtaccgtttgt

SEQ ID NO: 188377 - DNA, 25 bp, Artificial
  probe
  misc_feature (1)..(25): SEQ ID NO: 3961; WAN024EZB_at; Start 128; Stop 152
gcaccaattttcgtttgccctttca

SEQ ID NO: 188378 - DNA, 25 bp, Artificial
  probe
  misc_feature (1)..(25): SEQ ID NO: 3961; WAN024EZB_at; Start 255; Stop 279
tatgattgatgcgacgacgcataac

SEQ ID NO: 188379 - DNA, 25 bp, Artificial
  probe
  misc_feature (1)..(25): SEQ ID NO: 3961; WAN024EZB_at; Start 32; Stop 56
gcaacactactttcctcaatcatag

SEQ ID NO: 188380 - DNA, 25 bp, Artificial
  probe
  misc_feature (1)..(25): SEQ ID NO: 3961; WAN024EZB_at; Start 204; Stop 228
cgatataagttgcttctggattgac

SEQ ID NO: 188381 - DNA, 25 bp, Artificial
  probe
  misc_feature (1)..(25): SEQ ID NO: 3961; WAN024EZB_at; Start 222; Stop 246
gattgacaaagctaacaccgttgac

SEQ ID NO: 188382 - DNA, 25 bp, Artificial
  probe
  misc_feature (1)..(25): SEQ ID NO: 3961; WAN024EZB_at; Start 109; Stop 133
gtttgtcaaaacagtctcagcacca

SEQ ID NO: 188383 - DNA, 25 bp, Artificial
  probe
  misc_feature (1)..(25): SEQ ID NO: 3961; WAN024EZB_at; Start 185; Stop 209
gcaatctcaacatcaatatcgatat

SEQ ID NO: 188384 - DNA, 25 bp, Artificial
  probe
  misc_feature (1)..(25): SEQ ID NO: 3961; WAN024EZB_at; Start 48; Stop 72
caatcatagaattggtaatgaccgc

SEQ ID NO: 188385 - DNA, 25 bp, Artificial
  probe
  misc_feature (1)..(25): SEQ ID NO: 3961; WAN024EZB_at; Start 71; Stop 95
gctcctgctccgatagtgctgtcca

SEQ ID NO: 188386 - DNA, 25 bp, Artificial
  probe
  misc_feature (1)..(25): SEQ ID NO: 3961; WAN024EZB_at; Start 209; Stop 233
taagttgcttctggattgacaaagc

SEQ ID NO: 188387 - DNA, 25 bp, Artificial
  probe
  misc_feature (1)..(25): SEQ ID NO: 3961; WAN024EZB_at; Start 198; Stop 222
caatatcgatataagttgcttctgg

SEQ ID NO: 188388 - DNA, 25 bp, Artificial
  probe
  misc_feature (1)..(25): SEQ ID NO: 3961; WAN024EZB_at; Start 64; Stop 88
aatgaccgctcctgctccgatagtg

SEQ ID NO: 188389 - DNA, 25 bp, Artificial
  probe
  misc_feature (1)..(25): SEQ ID NO: 3961; WAN024EZB_at; Start 220; Stop 244
tggattgacaaagctaacaccgttg

SEQ ID NO: 188390 - DNA, 25 bp, Artificial
  probe
  misc_feature (1)..(25): SEQ ID NO: 3961; WAN024EZB_at; Start 229; Stop 253
aaagctaacaccgttgaccatgtgt

SEQ ID NO: 188391 - DNA, 25 bp, Artificial
  probe
  misc_feature (1)..(25): SEQ ID NO: 3961; WAN024EZB_at; Start 244; Stop 268
gaccatgtgtttatgattgatgcga

SEQ ID NO: 188392 - DNA, 25 bp, Artificial
  probe
  misc_feature (1)..(25): SEQ ID NO: 3961; WAN024EZB_at; Start 85; Stop 109
agtgctgtccactacataagtaccg

SEQ ID NO: 188393 - DNA, 25 bp, Artificial
  probe
  misc_feature (1)..(25): SEQ ID NO: 3961; WAN024EZB_at; Start 156; Stop 180
taacattggcttcgatttgaacttc

SEQ ID NO: 188394 - DNA, 25 bp, Artificial
  probe
  misc_feature (1)..(25): SEQ ID NO: 3961; WAN024EZB_at; Start 120; Stop 144
cagtctcagcaccaattttcgtttg

SEQ ID NO: 188395 - DNA, 25 bp, Artificial
  probe
  misc_feature (1)..(25): SEQ ID NO: 3961; WAN024EZB_at; Start 57; Stop 81
aattggtaatgaccgctcctgctcc

SEQ ID NO: 188396 - DNA, 25 bp, Artificial
  probe
  misc_feature (1)..(25): SEQ ID NO: 3961; WAN024EZB_at; Start 73; Stop 97
tcctgctccgatagtgctgtccact

SEQ ID NO: 188397 - DNA, 25 bp, Artificial
  probe
  misc_feature (1)..(25): SEQ ID NO: 3961; WAN024EZB_at; Start 27; Stop 51
cgtctgcaacactactttcctcaat

SEQ ID NO: 188398 - DNA, 25 bp, Artificial
  probe
  misc_feature (1)..(25): SEQ ID NO: 3961; WAN024EZB_at; Start 217; Stop 241
ttctggattgacaaagctaacaccg

SEQ ID NO: 188399 - DNA, 25 bp, Artificial
  probe
  misc_feature (1)..(25): SEQ ID NO: 3961; WAN024EZB_at; Start 76; Stop 100
tgctccgatagtgctgtccactaca

SEQ ID NO: 188400 - DNA, 25 bp, Artificial
  probe
  misc_feature (1)..(25): SEQ ID NO: 3961; WAN024EZB_at; Start 226; Stop 250
gacaaagctaacaccgttgaccatg

SEQ ID NO: 188401 - DNA, 25 bp, Artificial
  probe
  misc_feature (1)..(25): SEQ ID NO: 3961; WAN024EZB_at; Start 237; Stop 261
caccgttgaccatgtgtttatgatt

SEQ ID NO: 188402 - DNA, 25 bp, Artificial
  probe
  misc_feature (1)..(25): SEQ ID NO: 3961; WAN024EZB_at; Start 112; Stop 136
tgtcaaaacagtctcagcaccaatt

SEQ ID NO: 188403 - DNA, 25 bp, Artificial
  probe
  misc_feature (1)..(25): SEQ ID NO: 3961; WAN024EZB_at; Start 51; Stop 75
tcatagaattggtaatgaccgctcc

SEQ ID NO: 188404 - DNA, 25 bp, Artificial
  probe
  misc_feature (1)..(25): SEQ ID NO: 4078; WAN024EZC_at; Start 1355; Stop 1379
cagatgctattgctattggtcgcgg

SEQ ID NO: 188405 - DNA, 25 bp, Artificial
  probe
  misc_feature (1)..(25): SEQ ID NO: 4078; WAN024EZC_at; Start 1056; Stop 1080
tccaaattcaagtctgggtgcccaa

SEQ ID NO: 188406 - DNA, 25 bp, Artificial
  probe
  misc_feature (1)..(25): SEQ ID NO: 4078; WAN024EZC_at; Start 161; Stop 185
aacatgttttccgtagtgtgggagc

SEQ ID NO: 188407 - DNA, 25 bp, Artificial
  probe
  misc_feature (1)..(25): SEQ ID NO: 4078; WAN024EZC_at; Start 1179; Stop 1203
caacgttaatttcggtgctggaact

SEQ ID NO: 188408 - DNA, 25 bp, Artificial
  probe
  misc_feature (1)..(25): SEQ ID NO: 4078; WAN024EZC_at; Start 181; Stop 205
ggagctatccaacctgaaaagacag

SEQ ID NO: 188409 - DNA, 25 bp, Artificial
  probe
  misc_feature (1)..(25): SEQ ID NO: 4078; WAN024EZC_at; Start 1160; Stop 1184
gaaactgtgaagtgggaagcaacgt

SEQ ID NO: 188410 - DNA, 25 bp, Artificial
  probe
  misc_feature (1)..(25): SEQ ID NO: 4078; WAN024EZC_at; Start 1295; Stop 1319
tagaacttggtgacaattccctcgt

SEQ ID NO: 188411 - DNA, 25 bp, Artificial
  probe
  misc_feature (1)..(25): SEQ ID NO: 4078; WAN024EZC_at; Start 203; Stop 227
cagtaacagttgtaggacacaaggc

SEQ ID NO: 188412 - DNA, 25 bp, Artificial
  probe
  misc_feature (1)..(25): SEQ ID NO: 4078; WAN024EZC_at; Start 81; Stop 105
tttagcagcgggtaaagggactcgc

SEQ ID NO: 188413 - DNA, 25 bp, Artificial
  probe
  misc_feature (1)..(25): SEQ ID NO: 4078; WAN024EZC_at; Start 938; Stop 962
caaacggtacttatgtagtggacag

SEQ ID NO: 188414 - DNA, 25 bp, Artificial
  probe
  misc_feature (1)..(25): SEQ ID NO: 4078; WAN024EZC_at; Start 788; Stop 812
tcaatcataaacacatggtcaacgg

SEQ ID NO: 188415 - DNA, 25 bp, Artificial
  probe
  misc_feature (1)..(25): SEQ ID NO: 4078; WAN024EZC_at; Start 489; Stop 513
taatgacaatgctgaggttcttcgt

SEQ ID NO: 188416 - DNA, 25 bp, Artificial
  probe
  misc_feature (1)..(25): SEQ ID NO: 4078; WAN024EZC_at; Start 1277; Stop 1301
caaccattattgcaccagtagaact

SEQ ID NO: 188417 - DNA, 25 bp, Artificial
  probe
  misc_feature (1)..(25): SEQ ID NO: 4078; WAN024EZC_at; Start 869; Stop 893
cggaagttcaaatcgaagccaatgt

SEQ ID NO: 188418 - DNA, 25 bp, Artificial
  probe
  misc_feature (1)..(25): SEQ ID NO: 4078; WAN024EZC_at; Start 572; Stop 596
gaacatacgtctttgacaacgagcg

SEQ ID NO: 188419 - DNA, 25 bp, Artificial
  probe
  misc_feature (1)..(25): SEQ ID NO: 4078; WAN024EZC_at; Start 966; Stop 990
tatcggagcaggagcggtcattacc

SEQ ID NO: 188420 - DNA, 25 bp, Artificial
  probe
  misc_feature (1)..(25): SEQ ID NO: 4078; WAN024EZC_at; Start 1309; Stop 1333
aattccctcgttggtgctggttcaa

SEQ ID NO: 188421 - DNA, 25 bp, Artificial
  probe
  misc_feature (1)..(25): SEQ ID NO: 4078; WAN024EZC_at; Start 122; Stop 146
caaaagttttgcacaaggttgcggg

SEQ ID NO: 188422 - DNA, 25 bp, Artificial
  probe
  misc_feature (1)..(25): SEQ ID NO: 4078; WAN024EZC_at; Start 736; Stop 760
gtaaatgaccgtgtggcgcttgcga

SEQ ID NO: 188423 - DNA, 25 bp, Artificial
  probe
  misc_feature (1)..(25): SEQ ID NO: 4078; WAN024EZC_at; Start 93; Stop 117
taaagggactcgcatgaaatctgat

SEQ ID NO: 188424 - DNA, 25 bp, Artificial
  probe
  misc_feature (1)..(25): SEQ ID NO: 4078; WAN024EZC_at; Start 1338; Stop 1362
tactaaagacgtgccagcagatgct

SEQ ID NO: 188425 - DNA, 25 bp, Artificial
  probe
  misc_feature (1)..(25): SEQ ID NO: 4078; WAN024EZC_at; Start 362; Stop 386
gagatactcctttaatcactggtga

SEQ ID NO: 188426 - DNA, 25 bp, Artificial
  probe
  misc_feature (1)..(25): SEQ ID NO: 4078; WAN024EZC_at; Start 440; Stop 464
tcttgactgctgaaacggataatcc

SEQ ID NO: 188427 - DNA, 25 bp, Artificial
  probe
  misc_feature (1)..(25): SEQ ID NO: 4078; WAN024EZC_at; Start 426; Stop 450
aaatgtggccactatcttgactgct

SEQ ID NO: 188428 - DNA, 25 bp, Artificial
  probe
  misc_feature (1)..(25): SEQ ID NO: 4078; WAN024EZC_at; Start 763; Stop 787
gctgagtcagttatgcgtcgtcgca

SEQ ID NO: 188429 - DNA, 25 bp, Artificial
  probe
  misc_feature (1)..(25): SEQ ID NO: 4078; WAN024EZC_at; Start 378; Stop 402
cactggtgaaagcttgaaaaacttg

SEQ ID NO: 188430 - DNA, 25 bp, Artificial
  probe
  misc_feature (1)..(25): SEQ ID NO: 4078; WAN024EZC_at; Start 274; Stop 298
caatctgaacagttgggaactggtc

SEQ ID NO: 188431 - DNA, 25 bp, Artificial
  probe
  misc_feature (1)..(25): SEQ ID NO: 4078; WAN024EZC_at; Start 954; Stop 978
agtggacagcactatcggagcagga

SEQ ID NO: 188432 - DNA, 25 bp, Artificial
  probe
  misc_feature (1)..(25): SEQ ID NO: 4078; WAN024EZC_at; Start 620; Stop 644
tcaataccaataacgctcaaggcga

SEQ ID NO: 188433 - DNA, 25 bp, Artificial
  probe
  misc_feature (1)..(25): SEQ ID NO: 4078; WAN024EZC_at; Start 807; Stop 831
caacggtgttagctttgtcaatcca

SEQ ID NO: 188434 - DNA, 25 bp, Artificial
  probe
  misc_feature (1)..(25): SEQ ID NO: 4078; WAN024EZC_at; Start 340; Stop 364
ggacacaccttggtcattgcaggag

SEQ ID NO: 188435 - DNA, 25 bp, Artificial
  probe
  misc_feature (1)..(25): SEQ ID NO: 4078; WAN024EZC_at; Start 1372; Stop 1396
ggtcgcggtcgtcagatcaataaag

SEQ ID NO: 188436 - DNA, 25 bp, Artificial
  probe
  misc_feature (1)..(25): SEQ ID NO: 4078; WAN024EZC_at; Start 558; Stop 582
ggaaatcaacactggaacatacgtc

SEQ ID NO: 188437 - DNA, 25 bp, Artificial
  probe
  misc_feature (1)..(25): SEQ ID NO: 4078; WAN024EZC_at; Start 907; Stop 931
caaacgaaaattggtgctgagactg

SEQ ID NO: 188438 - DNA, 25 bp, Artificial
  probe
  misc_feature (1)..(25): SEQ ID NO: 2494; WAN024EZD_at; Start 88; Stop 112
cctgaactggcatcaaatacattgc

SEQ ID NO: 188439 - DNA, 25 bp, Artificial
  probe
  misc_feature (1)..(25): SEQ ID NO: 2494; WAN024EZD_at; Start 302; Stop 326
tcttgtctggatgggtttttgaatt

SEQ ID NO: 188440 - DNA, 25 bp, Artificial
  probe
  misc_feature (1)..(25): SEQ ID NO: 2494; WAN024EZD_at; Start 54; Stop 78
aaaaccgcgagctttactgcgttca

SEQ ID NO: 188441 - DNA, 25 bp, Artificial
  probe
  misc_feature (1)..(25): SEQ ID NO: 2494; WAN024EZD_at; Start 60; Stop 84
gcgagctttactgcgttcaaacaaa

SEQ ID NO: 188442 - DNA, 25 bp, Artificial
  probe
  misc_feature (1)..(25): SEQ ID NO: 2494; WAN024EZD_at; Start 144; Stop 168
tgcaatcacaatcacaacagataat

SEQ ID NO: 188443 - DNA, 25 bp, Artificial
  probe
  misc_feature (1)..(25): SEQ ID NO: 2494; WAN024EZD_at; Start 30; Stop 54
tgtcaaacgctgcattacagcttca

SEQ ID NO: 188444 - DNA, 25 bp, Artificial
  probe
  misc_feature (1)..(25): SEQ ID NO: 2494; WAN024EZD_at; Start 134; Stop 158
gcatgaaaattgcaatcacaatcac

SEQ ID NO: 188445 - DNA, 25 bp, Artificial
  probe
  misc_feature (1)..(25): SEQ ID NO: 2494; WAN024EZD_at; Start 292; Stop 316
aaaacctcaatcttgtctggatggg

SEQ ID NO: 188446 - DNA, 25 bp, Artificial
  probe
  misc_feature (1)..(25): SEQ ID NO: 2494; WAN024EZD_at; Start 247; Stop 271
gattcaagatgtagggttacttttc

SEQ ID NO: 188447 - DNA, 25 bp, Artificial
  probe
  misc_feature (1)..(25): SEQ ID NO: 2494; WAN024EZD_at; Start 21; Stop 45
taaaatccctgtcaaacgctgcatt

SEQ ID NO: 188448 - DNA, 25 bp, Artificial
  probe
  misc_feature (1)..(25): SEQ ID NO: 2494; WAN024EZD_at; Start 10; Stop 34
cagaaaaagactaaaatccctgtca

SEQ ID NO: 188449 - DNA, 25 bp, Artificial
  probe
  misc_feature (1)..(25): SEQ ID NO: 2494; WAN024EZD_at; Start 77; Stop 101
caaacaaatcacctgaactggcatc

SEQ ID NO: 188450 - DNA, 25 bp, Artificial
  probe
  misc_feature (1)..(25): SEQ ID NO: 2494; WAN024EZD_at; Start 3; Stop 27
ggctagccagaaaaagactaaaatc

SEQ ID NO: 188451 - DNA, 25 bp, Artificial
  probe
  misc_feature (1)..(25): SEQ ID NO: 2494; WAN024EZD_at; Start 45; Stop 69
tacagcttcaaaaccgcgagcttta

SEQ ID NO: 188452 - DNA, 25 bp, Artificial
  probe
  misc_feature (1)..(25): SEQ ID NO: 2494; WAN024EZD_at; Start 239; Stop 263
tctacttagattcaagatgtagggt

SEQ ID NO: 188453 - DNA, 25 bp, Artificial
  probe
  misc_feature (1)..(25): SEQ ID NO: 2494; WAN024EZD_at; Start 18; Stop 42
gactaaaatccctgtcaaacgctgc

SEQ ID NO: 188454 - DNA, 25 bp, Artificial
  probe
  misc_feature (1)..(25): SEQ ID NO: 2494; WAN024EZD_at; Start 126; Stop 150
ggttggttgcatgaaaattgcaatc

SEQ ID NO: 188455 - DNA, 25 bp, Artificial
  probe
  misc_feature (1)..(25): SEQ ID NO: 2494; WAN024EZD_at; Start 81; Stop 105
caaatcacctgaactggcatcaaat

SEQ ID NO: 188456 - DNA, 25 bp, Artificial
  probe
  misc_feature (1)..(25): SEQ ID NO: 2494; WAN024EZD_at; Start 299; Stop 323
caatcttgtctggatgggtttttga

SEQ ID NO: 188457 - DNA, 25 bp, Artificial
  probe
  misc_feature (1)..(25): SEQ ID NO: 2494; WAN024EZD_at; Start 186; Stop 210
taataggttatacatatcaaactcc

SEQ ID NO: 188458 - DNA, 25 bp, Artificial
  probe
  misc_feature (1)..(25): SEQ ID NO: 2494; WAN024EZD_at; Start 68; Stop 92
tactgcgttcaaacaaatcacctga

SEQ ID NO: 188459 - DNA, 25 bp, Artificial
  probe
  misc_feature (1)..(25): SEQ ID NO: 2494; WAN024EZD_at; Start 40; Stop 64
tgcattacagcttcaaaaccgcgag

SEQ ID NO: 188460 - DNA, 25 bp, Artificial
  probe
  misc_feature (1)..(25): SEQ ID NO: 2494; WAN024EZD_at; Start 107; Stop 131
cattgctggattggtttttggttgg

SEQ ID NO: 188461 - DNA, 25 bp, Artificial
  probe
  misc_feature (1)..(25): SEQ ID NO: 2494; WAN024EZD_at; Start 161; Stop 185
cagataatactaataaaatggttaa

SEQ ID NO: 188462 - DNA, 25 bp, Artificial
  probe
  misc_feature (1)..(25): SEQ ID NO: 2494; WAN024EZD_at; Start 115; Stop 139
gattggtttttggttggttgcatga

SEQ ID NO: 188463 - DNA, 25 bp, Artificial
  probe
  misc_feature (1)..(25): SEQ ID NO: 2494; WAN024EZD_at; Start 97; Stop 121
gcatcaaatacattgctggattggt

SEQ ID NO: 188464 - DNA, 25 bp, Artificial
  probe
  misc_feature (1)..(25): SEQ ID NO: 2494; WAN024EZD_at; Start 286; Stop 310
tactttaaaacctcaatcttgtctg

SEQ ID NO: 188465 - DNA, 25 bp, Artificial
  probe
  misc_feature (1)..(25): SEQ ID NO: 2494; WAN024EZD_at; Start 224; Stop 248
tattttaccataaaatctacttaga

SEQ ID NO: 188466 - DNA, 25 bp, Artificial
  probe
  misc_feature (1)..(25): SEQ ID NO: 2494; WAN024EZD_at; Start 198; Stop 222
catatcaaactccttaaaatcccta

SEQ ID NO: 188467 - DNA, 25 bp, Artificial
  probe
  misc_feature (1)..(25): SEQ ID NO: 2494; WAN024EZD_at; Start 51; Stop 75
ttcaaaaccgcgagctttactgcgt

SEQ ID NO: 188468 - DNA, 25 bp, Artificial
  probe
  misc_feature (1)..(25): SEQ ID NO: 2494; WAN024EZD_at; Start 24; Stop 48
aatccctgtcaaacgctgcattaca

SEQ ID NO: 188469 - DNA, 25 bp, Artificial
  probe
  misc_feature (1)..(25): SEQ ID NO: 2494; WAN024EZD_at; Start 91; Stop 115
gaactggcatcaaatacattgctgg

SEQ ID NO: 188470 - DNA, 25 bp, Artificial
  probe
  misc_feature (1)..(25): SEQ ID NO: 2494; WAN024EZD_at; Start 191; Stop 215
ggttatacatatcaaactccttaaa

SEQ ID NO: 188471 - DNA, 25 bp, Artificial
  probe
  misc_feature (1)..(25): SEQ ID NO: 2494; WAN024EZD_at; Start 243; Stop 267
cttagattcaagatgtagggttact

SEQ ID NO: 188472 - DNA, 25 bp, Artificial
  probe
  misc_feature (1)..(25): SEQ ID NO: 4076; WAN024EZE_at; Start 64; Stop 88
aattcaaaaacccatccagacaaga

SEQ ID NO: 188473 - DNA, 25 bp, Artificial
  probe
  misc_feature (1)..(25): SEQ ID NO: 4076; WAN024EZE_at; Start 69; Stop 93
aaaaacccatccagacaagattgag

SEQ ID NO: 188474 - DNA, 25 bp, Artificial
  probe
  misc_feature (1)..(25): SEQ ID NO: 4076; WAN024EZE_at; Start 39; Stop 63
cagtatcaattacctaaccagtaaa

SEQ ID NO: 188475 - DNA, 25 bp, Artificial
  probe
  misc_feature (1)..(25): SEQ ID NO: 4076; WAN024EZE_at; Start 121; Stop 145
aaagtaaccctacatcttgaatcta

SEQ ID NO: 188476 - DNA, 25 bp, Artificial
  probe
  misc_feature (1)..(25): SEQ ID NO: 4076; WAN024EZE_at; Start 71; Stop 95
aaacccatccagacaagattgaggt

SEQ ID NO: 188477 - DNA, 25 bp, Artificial
  probe
  misc_feature (1)..(25): SEQ ID NO: 4076; WAN024EZE_at; Start 65; Stop 89
attcaaaaacccatccagacaagat

SEQ ID NO: 188478 - DNA, 25 bp, Artificial
  probe
  misc_feature (1)..(25): SEQ ID NO: 4076; WAN024EZE_at; Start 70; Stop 94
aaaacccatccagacaagattgagg

SEQ ID NO: 188479 - DNA, 25 bp, Artificial
  probe
  misc_feature (1)..(25): SEQ ID NO: 4076; WAN024EZE_at; Start 81; Stop 105
agacaagattgaggttttaaagtat

SEQ ID NO: 188480 - DNA, 25 bp, Artificial
  probe
  misc_feature (1)..(25): SEQ ID NO: 4076; WAN024EZE_at; Start 118; Stop 142
agaaaagtaaccctacatcttgaat

SEQ ID NO: 188481 - DNA, 25 bp, Artificial
  probe
  misc_feature (1)..(25): SEQ ID NO: 4076; WAN024EZE_at; Start 83; Stop 107
acaagattgaggttttaaagtattg

SEQ ID NO: 188482 - DNA, 25 bp, Artificial
  probe
  misc_feature (1)..(25): SEQ ID NO: 4076; WAN024EZE_at; Start 73; Stop 97
acccatccagacaagattgaggttt

SEQ ID NO: 188483 - DNA, 25 bp, Artificial
  probe
  misc_feature (1)..(25): SEQ ID NO: 4076; WAN024EZE_at; Start 79; Stop 103
ccagacaagattgaggttttaaagt

SEQ ID NO: 188484 - DNA, 25 bp, Artificial
  probe
  misc_feature (1)..(25): SEQ ID NO: 4076; WAN024EZE_at; Start 125; Stop 149
taaccctacatcttgaatctaagta

SEQ ID NO: 188485 - DNA, 25 bp, Artificial
  probe
  misc_feature (1)..(25): SEQ ID NO: 4076; WAN024EZE_at; Start 77; Stop 101
atccagacaagattgaggttttaaa

SEQ ID NO: 188486 - DNA, 25 bp, Artificial
  probe
  misc_feature (1)..(25): SEQ ID NO: 4076; WAN024EZE_at; Start 67; Stop 91
tcaaaaacccatccagacaagattg

SEQ ID NO: 188487 - DNA, 25 bp, Artificial
  probe
  misc_feature (1)..(25): SEQ ID NO: 4076; WAN024EZE_at; Start 63; Stop 87
aaattcaaaaacccatccagacaag

SEQ ID NO: 188488 - DNA, 25 bp, Artificial
  probe
  misc_feature (1)..(25): SEQ ID NO: 4076; WAN024EZE_at; Start 119; Stop 143
gaaaagtaaccctacatcttgaatc

SEQ ID NO: 188489 - DNA, 25 bp, Artificial
  probe
  misc_feature (1)..(25): SEQ ID NO: 4076; WAN024EZE_at; Start 80; Stop 104
cagacaagattgaggttttaaagta

SEQ ID NO: 188490 - DNA, 25 bp, Artificial
  probe
  misc_feature (1)..(25): SEQ ID NO: 4076; WAN024EZE_at; Start 76; Stop 100
catccagacaagattgaggttttaa

SEQ ID NO: 188491 - DNA, 25 bp, Artificial
  probe
  misc_feature (1)..(25): SEQ ID NO: 4076; WAN024EZE_at; Start 122; Stop 146
aagtaaccctacatcttgaatctaa

SEQ ID NO: 188492 - DNA, 25 bp, Artificial
  probe
  misc_feature (1)..(25): SEQ ID NO: 4076; WAN024EZE_at; Start 120; Stop 144
aaaagtaaccctacatcttgaatct

SEQ ID NO: 188493 - DNA, 25 bp, Artificial
  probe
  misc_feature (1)..(25): SEQ ID NO: 4076; WAN024EZE_at; Start 126; Stop 150
aaccctacatcttgaatctaagtag

SEQ ID NO: 188494 - DNA, 25 bp, Artificial
  probe
  misc_feature (1)..(25): SEQ ID NO: 4076; WAN024EZE_at; Start 66; Stop 90
ttcaaaaacccatccagacaagatt

SEQ ID NO: 188495 - DNA, 25 bp, Artificial
  probe
  misc_feature (1)..(25): SEQ ID NO: 4076; WAN024EZE_at; Start 74; Stop 98
cccatccagacaagattgaggtttt

SEQ ID NO: 188496 - DNA, 25 bp, Artificial
  probe
  misc_feature (1)..(25): SEQ ID NO: 4076; WAN024EZE_at; Start 75; Stop 99
ccatccagacaagattgaggtttta

SEQ ID NO: 188497 - DNA, 25 bp, Artificial
  probe
  misc_feature (1)..(25): SEQ ID NO: 4076; WAN024EZE_at; Start 84; Stop 108
caagattgaggttttaaagtattgt

SEQ ID NO: 188498 - DNA, 25 bp, Artificial
  probe
  misc_feature (1)..(25): SEQ ID NO: 4076; WAN024EZE_at; Start 123; Stop 147
agtaaccctacatcttgaatctaag

SEQ ID NO: 188499 - DNA, 25 bp, Artificial
  probe
  misc_feature (1)..(25): SEQ ID NO: 4076; WAN024EZE_at; Start 68; Stop 92
caaaaacccatccagacaagattga

SEQ ID NO: 188500 - DNA, 25 bp, Artificial
  probe
  misc_feature (1)..(25): SEQ ID NO: 4076; WAN024EZE_at; Start 72; Stop 96
aacccatccagacaagattgaggtt

SEQ ID NO: 188501 - DNA, 25 bp, Artificial
  probe
  misc_feature (1)..(25): SEQ ID NO: 4076; WAN024EZE_at; Start 78; Stop 102
tccagacaagattgaggttttaaag

SEQ ID NO: 188502 - DNA, 25 bp, Artificial
  probe
  misc_feature (1)..(25): SEQ ID NO: 4076; WAN024EZE_at; Start 124; Stop 148
gtaaccctacatcttgaatctaagt

SEQ ID NO: 188503 - DNA, 25 bp, Artificial
  probe
  misc_feature (1)..(25): SEQ ID NO: 2785; WAN024EZF_at; Start 55; Stop 79
gcaattttcatgcaaccaaccaaaa

SEQ ID NO: 188504 - DNA, 25 bp, Artificial
  probe
  misc_feature (1)..(25): SEQ ID NO: 2785; WAN024EZF_at; Start 179; Stop 203
tagtctttttctggctagccattgc

SEQ ID NO: 188505 - DNA, 25 bp, Artificial
  probe
  misc_feature (1)..(25): SEQ ID NO: 2785; WAN024EZF_at; Start 51; Stop 75
gattgcaattttcatgcaaccaacc

SEQ ID NO: 188506 - DNA, 25 bp, Artificial
  probe
  misc_feature (1)..(25): SEQ ID NO: 2785; WAN024EZF_at; Start 137; Stop 161
ctcgcggttttgaagctgtaatgca

SEQ ID NO: 188507 - DNA, 25 bp, Artificial
  probe
  misc_feature (1)..(25): SEQ ID NO: 2785; WAN024EZF_at; Start 82; Stop 106
caatccagcaatgtatttgatgcca

SEQ ID NO: 188508 - DNA, 25 bp, Artificial
  probe
  misc_feature (1)..(25): SEQ ID NO: 2785; WAN024EZF_at; Start 100; Stop 124
gatgccagttcaggtgatttgtttg

SEQ ID NO: 188509 - DNA, 25 bp, Artificial
  probe
  misc_feature (1)..(25): SEQ ID NO: 2785; WAN024EZF_at; Start 213; Stop 237
gacggtattatcaagtagataacta

SEQ ID NO: 188510 - DNA, 25 bp, Artificial
  probe
  misc_feature (1)..(25): SEQ ID NO: 2785; WAN024EZF_at; Start 124; Stop 148
gaacgcagtaaagctcgcggttttg

SEQ ID NO: 188511 - DNA, 25 bp, Artificial
  probe
  misc_feature (1)..(25): SEQ ID NO: 2785; WAN024EZF_at; Start 190; Stop 214
tggctagccattgccttagcattga

SEQ ID NO: 188512 - DNA, 25 bp, Artificial
  probe
  misc_feature (1)..(25): SEQ ID NO: 2785; WAN024EZF_at; Start 160; Stop 184
cagcgtttgacagggattttagtct

SEQ ID NO: 188513 - DNA, 25 bp, Artificial
  probe
  misc_feature (1)..(25): SEQ ID NO: 2785; WAN024EZF_at; Start 201; Stop 225
tgccttagcattgacggtattatca

SEQ ID NO: 188514 - DNA, 25 bp, Artificial
  probe
  misc_feature (1)..(25): SEQ ID NO: 2785; WAN024EZF_at; Start 119; Stop 143
tgtttgaacgcagtaaagctcgcgg

SEQ ID NO: 188515 - DNA, 25 bp, Artificial
  probe
  misc_feature (1)..(25): SEQ ID NO: 2785; WAN024EZF_at; Start 17; Stop 41
taaccattttattagtattatctgt

SEQ ID NO: 188516 - DNA, 25 bp, Artificial
  probe
  misc_feature (1)..(25): SEQ ID NO: 2785; WAN024EZF_at; Start 174; Stop 198
gattttagtctttttctggctagcc

SEQ ID NO: 188517 - DNA, 25 bp, Artificial
  probe
  misc_feature (1)..(25): SEQ ID NO: 2785; WAN024EZF_at; Start 132; Stop 156
taaagctcgcggttttgaagctgta

SEQ ID NO: 188518 - DNA, 25 bp, Artificial
  probe
  misc_feature (1)..(25): SEQ ID NO: 2785; WAN024EZF_at; Start 86; Stop 110
ccagcaatgtatttgatgccagttc

SEQ ID NO: 188519 - DNA, 25 bp, Artificial
  probe
  misc_feature (1)..(25): SEQ ID NO: 2785; WAN024EZF_at; Start 32; Stop 56
tattatctgttgtgattgtgattgc

SEQ ID NO: 188520 - DNA, 25 bp, Artificial
  probe
  misc_feature (1)..(25): SEQ ID NO: 2785; WAN024EZF_at; Start 71; Stop 95
caaccaaaaaccaatccagcaatgt

SEQ ID NO: 188521 - DNA, 25 bp, Artificial
  probe
  misc_feature (1)..(25): SEQ ID NO: 2785; WAN024EZF_at; Start 194; Stop 218
tagccattgccttagcattgacggt

SEQ ID NO: 188522 - DNA, 25 bp, Artificial
  probe
  misc_feature (1)..(25): SEQ ID NO: 2785; WAN024EZF_at; Start 208; Stop 232
gcattgacggtattatcaagtagat

SEQ ID NO: 188523 - DNA, 25 bp, Artificial
  probe
  misc_feature (1)..(25): SEQ ID NO: 2785; WAN024EZF_at; Start 117; Stop 141
tttgtttgaacgcagtaaagctcgc

SEQ ID NO: 188524 - DNA, 25 bp, Artificial
  probe
  misc_feature (1)..(25): SEQ ID NO: 2785; WAN024EZF_at; Start 186; Stop 210
tttctggctagccattgccttagca

SEQ ID NO: 188525 - DNA, 25 bp, Artificial
  probe
  misc_feature (1)..(25): SEQ ID NO: 2785; WAN024EZF_at; Start 139; Stop 163
cgcggttttgaagctgtaatgcagc

SEQ ID NO: 188526 - DNA, 25 bp, Artificial
  probe
  misc_feature (1)..(25): SEQ ID NO: 2785; WAN024EZF_at; Start 65; Stop 89
tgcaaccaaccaaaaaccaatccag

SEQ ID NO: 188527 - DNA, 25 bp, Artificial
  probe
  misc_feature (1)..(25): SEQ ID NO: 2785; WAN024EZF_at; Start 196; Stop 220
gccattgccttagcattgacggtat

SEQ ID NO: 188528 - DNA, 25 bp, Artificial
  probe
  misc_feature (1)..(25): SEQ ID NO: 2785; WAN024EZF_at; Start 148; Stop 172
gaagctgtaatgcagcgtttgacag

SEQ ID NO: 188529 - DNA, 25 bp, Artificial
  probe
  misc_feature (1)..(25): SEQ ID NO: 2785; WAN024EZF_at; Start 156; Stop 180
aatgcagcgtttgacagggatttta

SEQ ID NO: 188530 - DNA, 25 bp, Artificial
  probe
  misc_feature (1)..(25): SEQ ID NO: 2785; WAN024EZF_at; Start 127; Stop 151
cgcagtaaagctcgcggttttgaag

SEQ ID NO: 188531 - DNA, 25 bp, Artificial
  probe
  misc_feature (1)..(25): SEQ ID NO: 2785; WAN024EZF_at; Start 121; Stop 145
tttgaacgcagtaaagctcgcggtt

SEQ ID NO: 188532 - DNA, 25 bp, Artificial
  probe
  misc_feature (1)..(25): SEQ ID NO: 2785; WAN024EZF_at; Start 93; Stop 117
tgtatttgatgccagttcaggtgat

SEQ ID NO: 188533 - DNA, 25 bp, Artificial
  probe
  misc_feature (1)..(25): SEQ ID NO: 2785; WAN024EZF_at; Start 35; Stop 59
tatctgttgtgattgtgattgcaat

SEQ ID NO: 188534 - DNA, 25 bp, Artificial
  probe
  misc_feature (1)..(25): SEQ ID NO: 2785; WAN024EZF_at; Start 153; Stop 177
tgtaatgcagcgtttgacagggatt

SEQ ID NO: 188535 - DNA, 25 bp, Artificial
  probe
  misc_feature (1)..(25): SEQ ID NO: 2785; WAN024EZF_at; Start 110; Stop 134
caggtgatttgtttgaacgcagtaa

SEQ ID NO: 188536 - DNA, 25 bp, Artificial
  probe
  misc_feature (1)..(25): SEQ ID NO: 2785; WAN024EZF_at; Start 90; Stop 114
caatgtatttgatgccagttcaggt

SEQ ID NO: 188537 - DNA, 25 bp, Artificial
  probe
  misc_feature (1)..(25): SEQ ID NO: 929; WAN024EZG_at; Start 125; Stop 149
tctgctgtcaaagtctgggaaggtc

SEQ ID NO: 188538 - DNA, 25 bp, Artificial
  probe
  misc_feature (1)..(25): SEQ ID NO: 929; WAN024EZG_at; Start 68; Stop 92
ttttcaacagcctggcccaaaacag

SEQ ID NO: 188539 - DNA, 25 bp, Artificial
  probe
  misc_feature (1)..(25): SEQ ID NO: 929; WAN024EZG_at; Start 195; Stop 219
tattgccaagtccagctaccaaggt

SEQ ID NO: 188540 - DNA, 25 bp, Artificial
  probe
  misc_feature (1)..(25): SEQ ID NO: 929; WAN024EZG_at; Start 119; Stop 143
gcttcttctgctgtcaaagtctggg

SEQ ID NO: 188541 - DNA, 25 bp, Artificial
  probe
  misc_feature (1)..(25): SEQ ID NO: 929; WAN024EZG_at; Start 84; Stop 108
ccaaaacagcaatggtctggtcatg

SEQ ID NO: 188542 - DNA, 25 bp, Artificial
  probe
  misc_feature (1)..(25): SEQ ID NO: 929; WAN024EZG_at; Start 79; Stop 103
ctggcccaaaacagcaatggtctgg

SEQ ID NO: 188543 - DNA, 25 bp, Artificial
  probe
  misc_feature (1)..(25): SEQ ID NO: 929; WAN024EZG_at; Start 144; Stop 168
aaggtctagctggatgaacctgagc

SEQ ID NO: 188544 - DNA, 25 bp, Artificial
  probe
  misc_feature (1)..(25): SEQ ID NO: 929; WAN024EZG_at; Start 164; Stop 188
tgagctcgccagagaacctcatcca

SEQ ID NO: 188545 - DNA, 25 bp, Artificial
  probe
  misc_feature (1)..(25): SEQ ID NO: 929; WAN024EZG_at; Start 185; Stop 209
tccacatagatattgccaagtccag

SEQ ID NO: 188546 - DNA, 25 bp, Artificial
  probe
  misc_feature (1)..(25): SEQ ID NO: 929; WAN024EZG_at; Start 108; Stop 132
gaatggcagtcgcttcttctgctgt

SEQ ID NO: 188547 - DNA, 25 bp, Artificial
  probe
  misc_feature (1)..(25): SEQ ID NO: 929; WAN024EZG_at; Start 27; Stop 51
ccccaaaggcattggtataagtccg

SEQ ID NO: 188548 - DNA, 25 bp, Artificial
  probe
  misc_feature (1)..(25): SEQ ID NO: 929; WAN024EZG_at; Start 99; Stop 123
tctggtcatgaatggcagtcgcttc

SEQ ID NO: 188549 - DNA, 25 bp, Artificial
  probe
  misc_feature (1)..(25): SEQ ID NO: 929; WAN024EZG_at; Start 154; Stop 178
tggatgaacctgagctcgccagaga

SEQ ID NO: 188550 - DNA, 25 bp, Artificial
  probe
  misc_feature (1)..(25): SEQ ID NO: 929; WAN024EZG_at; Start 94; Stop 118
aatggtctggtcatgaatggcagtc

SEQ ID NO: 188551 - DNA, 25 bp, Artificial
  probe
  misc_feature (1)..(25): SEQ ID NO: 929; WAN024EZG_at; Start 30; Stop 54
caaaggcattggtataagtccgaat

SEQ ID NO: 188552 - DNA, 25 bp, Artificial
  probe
  misc_feature (1)..(25): SEQ ID NO: 929; WAN024EZG_at; Start 102; Stop 126
ggtcatgaatggcagtcgcttcttc

SEQ ID NO: 188553 - DNA, 25 bp, Artificial
  probe
  misc_feature (1)..(25): SEQ ID NO: 929; WAN024EZG_at; Start 36; Stop 60
cattggtataagtccgaatggtgga

SEQ ID NO: 188554 - DNA, 25 bp, Artificial
  probe
  misc_feature (1)..(25): SEQ ID NO: 929; WAN024EZG_at; Start 201; Stop 225
caagtccagctaccaaggtctggtc

SEQ ID NO: 188555 - DNA, 25 bp, Artificial
  probe
  misc_feature (1)..(25): SEQ ID NO: 929; WAN024EZG_at; Start 193; Stop 217
gatattgccaagtccagctaccaag

SEQ ID NO: 188556 - DNA, 25 bp, Artificial
  probe
  misc_feature (1)..(25): SEQ ID NO: 929; WAN024EZG_at; Start 204; Stop 228
gtccagctaccaaggtctggtctag

SEQ ID NO: 188557 - DNA, 25 bp, Artificial
  probe
  misc_feature (1)..(25): SEQ ID NO: 929; WAN024EZG_at; Start 129; Stop 153
ctgtcaaagtctgggaaggtctagc

SEQ ID NO: 188558 - DNA, 25 bp, Artificial
  probe
  misc_feature (1)..(25): SEQ ID NO: 929; WAN024EZG_at; Start 114; Stop 138
cagtcgcttcttctgctgtcaaagt

SEQ ID NO: 188559 - DNA, 25 bp, Artificial
  probe
  misc_feature (1)..(25): SEQ ID NO: 929; WAN024EZG_at; Start 157; Stop 181
atgaacctgagctcgccagagaacc

SEQ ID NO: 188560 - DNA, 25 bp, Artificial
  probe
  misc_feature (1)..(25): SEQ ID NO: 929; WAN024EZG_at; Start 169; Stop 193
tcgccagagaacctcatccacatag

SEQ ID NO: 188561 - DNA, 25 bp, Artificial
  probe
  misc_feature (1)..(25): SEQ ID NO: 929; WAN024EZG_at; Start 175; Stop 199
gagaacctcatccacatagatattg

SEQ ID NO: 188562 - DNA, 25 bp, Artificial
  probe
  misc_feature (1)..(25): SEQ ID NO: 929; WAN024EZG_at; Start 2; Stop 26
tgaaagtcctgcatgcttccatctt

SEQ ID NO: 188563 - DNA, 25 bp, Artificial
  probe
  misc_feature (1)..(25): SEQ ID NO: 929; WAN024EZG_at; Start 150; Stop 174
tagctggatgaacctgagctcgcca

SEQ ID NO: 188564 - DNA, 25 bp, Artificial
  probe
  misc_feature (1)..(25): SEQ ID NO: 929; WAN024EZG_at; Start 19; Stop 43
tccatcttccccaaaggcattggta

SEQ ID NO: 188565 - DNA, 25 bp, Artificial
  probe
  misc_feature (1)..(25): SEQ ID NO: 929; WAN024EZG_at; Start 75; Stop 99
cagcctggcccaaaacagcaatggt

SEQ ID NO: 188566 - DNA, 25 bp, Artificial
  probe
  misc_feature (1)..(25): SEQ ID NO: 929; WAN024EZG_at; Start 198; Stop 222
tgccaagtccagctaccaaggtctg

SEQ ID NO: 188567 - DNA, 25 bp, Artificial
  probe
  misc_feature (1)..(25): SEQ ID NO: 929; WAN024EZG_at; Start 11; Stop 35
tgcatgcttccatcttccccaaagg

SEQ ID NO: 188568 - DNA, 25 bp, Artificial
  probe
  misc_feature (1)..(25): SEQ ID NO: 929; WAN024EZG_at; Start 138; Stop 162
tctgggaaggtctagctggatgaac

SEQ ID NO: 188569 - DNA, 25 bp, Artificial
  probe
  misc_feature (1)..(25): SEQ ID NO: 929; WAN024EZG_at; Start 133; Stop 157
caaagtctgggaaggtctagctgga

SEQ ID NO: 188570 - DNA, 25 bp, Artificial
  probe
  misc_feature (1)..(25): SEQ ID NO: 929; WAN024EZG_at; Start 90; Stop 114
cagcaatggtctggtcatgaatggc

SEQ ID NO: 188571 - DNA, 25 bp, Artificial
  probe
  misc_feature (1)..(25): SEQ ID NO: 2016; WAN024EZH_at; Start 50; Stop 74
tgattataggaaagaagatttcgag

SEQ ID NO: 188572 - DNA, 25 bp, Artificial
  probe
  misc_feature (1)..(25): SEQ ID NO: 2016; WAN024EZH_at; Start 712; Stop 736
caggtctatgataagactggtcaag

SEQ ID NO: 188573 - DNA, 25 bp, Artificial
  probe
  misc_feature (1)..(25): SEQ ID NO: 2016; WAN024EZH_at; Start 411; Stop 435
cgaacaagactttgatttacaggtc

SEQ ID NO: 188574 - DNA, 25 bp, Artificial
  probe
  misc_feature (1)..(25): SEQ ID NO: 2016; WAN024EZH_at; Start 743; Stop 767
tacgctgtggtaccatcattgagaa

SEQ ID NO: 188575 - DNA, 25 bp, Artificial
  probe
  misc_feature (1)..(25): SEQ ID NO: 2016; WAN024EZH_at; Start 129; Stop 153
ggaattgcctagtcagattatcgag

SEQ ID NO: 188576 - DNA, 25 bp, Artificial
  probe
  misc_feature (1)..(25): SEQ ID NO: 2016; WAN024EZH_at; Start 338; Stop 362
gaaccatggaactcttggtgcctga

SEQ ID NO: 188577 - DNA, 25 bp, Artificial
  probe
  misc_feature (1)..(25): SEQ ID NO: 2016; WAN024EZH_at; Start 490; Stop 514
cagaccttggtagctggacttggca

SEQ ID NO: 188578 - DNA, 25 bp, Artificial
  probe
  misc_feature (1)..(25): SEQ ID NO: 2016; WAN024EZH_at; Start 445; Stop 469
gcccttgccaagtccaaaaagccta

SEQ ID NO: 188579 - DNA, 25 bp, Artificial
  probe
  misc_feature (1)..(25): SEQ ID NO: 2016; WAN024EZH_at; Start 328; Stop 352
cgcaagtttggaaccatggaactct

SEQ ID NO: 188580 - DNA, 25 bp, Artificial
  probe
  misc_feature (1)..(25): SEQ ID NO: 2016; WAN024EZH_at; Start 761; Stop 785
ttgagaaaattcaactaggcggacg

SEQ ID NO: 188581 - DNA, 25 bp, Artificial
  probe
  misc_feature (1)..(25): SEQ ID NO: 2016; WAN024EZH_at; Start 463; Stop 487
aagcctatcaaatcccatctcctag

SEQ ID NO: 188582 - DNA, 25 bp, Artificial
  probe
  misc_feature (1)..(25): SEQ ID NO: 2016; WAN024EZH_at; Start 540; Stop 564
gcgagctcaggttcatccagctaga

SEQ ID NO: 188583 - DNA, 25 bp, Artificial
  probe
  misc_feature (1)..(25): SEQ ID NO: 2016; WAN024EZH_at; Start 797; Stop 821
tttgtccaaactgtcaaaggaggga

SEQ ID NO: 188584 - DNA, 25 bp, Artificial
  probe
  misc_feature (1)..(25): SEQ ID NO: 2016; WAN024EZH_at; Start 568; Stop 592
tcccagactttgacagcagaagaag

SEQ ID NO: 188585 - DNA, 25 bp, Artificial
  probe
  misc_feature (1)..(25): SEQ ID NO: 2016; WAN024EZH_at; Start 524; Stop 548
tggatgaggttctctggcgagctca

SEQ ID NO: 188586 - DNA, 25 bp, Artificial
  probe
  misc_feature (1)..(25): SEQ ID NO: 2016; WAN024EZH_at; Start 198; Stop 222
caaggtcttgatttcccatttgcgg

SEQ ID NO: 188587 - DNA, 25 bp, Artificial
  probe
  misc_feature (1)..(25): SEQ ID NO: 2016; WAN024EZH_at; Start 695; Stop 719
gcatgcaggactttcatcaggtcta

SEQ ID NO: 188588 - DNA, 25 bp, Artificial
  probe
  misc_feature (1)..(25): SEQ ID NO: 2016; WAN024EZH_at; Start 4; Stop 28
cctgaattacctgaggttgaaaccg

SEQ ID NO: 188589 - DNA, 25 bp, Artificial
  probe
  misc_feature (1)..(25): SEQ ID NO: 2016; WAN024EZH_at; Start 31; Stop 55
tgtcgtggcttagaaaaattgatta

SEQ ID NO: 188590 - DNA, 25 bp, Artificial
  probe
  misc_feature (1)..(25): SEQ ID NO: 2016; WAN024EZH_at; Start 349; Stop 373
ctcttggtgcctgaccttttagacg

SEQ ID NO: 188591 - DNA, 25 bp, Artificial
  probe
  misc_feature (1)..(25): SEQ ID NO: 2016; WAN024EZH_at; Start 101; Stop 125
ttaagacggatttggaagagtttca

SEQ ID NO: 188592 - DNA, 25 bp, Artificial
  probe
  misc_feature (1)..(25): SEQ ID NO: 2016; WAN024EZH_at; Start 142; Stop 166
cagattatcgagtcaatgggacgtc

SEQ ID NO: 188593 - DNA, 25 bp, Artificial
  probe
  misc_feature (1)..(25): SEQ ID NO: 2016; WAN024EZH_at; Start 259; Stop 283
cctgaacgcaagcatgcccatgttt

SEQ ID NO: 188594 - DNA, 25 bp, Artificial
  probe
  misc_feature (1)..(25): SEQ ID NO: 2016; WAN024EZH_at; Start 72; Stop 96
gagtatagaaattcgctaccccaag

SEQ ID NO: 188595 - DNA, 25 bp, Artificial
  probe
  misc_feature (1)..(25): SEQ ID NO: 2016; WAN024EZH_at; Start 613; Stop 637
accattgctgttttgggccaggctg

SEQ ID NO: 188596 - DNA, 25 bp, Artificial
  probe
  misc_feature (1)..(25): SEQ ID NO: 2016; WAN024EZH_at; Start 395; Stop 419
taggtcctgaaccaagcgaacaaga

SEQ ID NO: 188597 - DNA, 25 bp, Artificial
  probe
  misc_feature (1)..(25): SEQ ID NO: 2016; WAN024EZH_at; Start 660; Stop 684
tcggacttataccaatgcctttggg

SEQ ID NO: 188598 - DNA, 25 bp, Artificial
  probe
  misc_feature (1)..(25): SEQ ID NO: 2016; WAN024EZH_at; Start 21; Stop 45
tgaaaccgtttgtcgtggcttagaa

SEQ ID NO: 188599 - DNA, 25 bp, Artificial
  probe
  misc_feature (1)..(25): SEQ ID NO: 2016; WAN024EZH_at; Start 115; Stop 139
gaagagtttcaaagggaattgccta

SEQ ID NO: 188600 - DNA, 25 bp, Artificial
  probe
  misc_feature (1)..(25): SEQ ID NO: 2016; WAN024EZH_at; Start 86; Stop 110
gctaccccaagatgattaagacgga

SEQ ID NO: 188601 - DNA, 25 bp, Artificial
  probe
  misc_feature (1)..(25): SEQ ID NO: 2016; WAN024EZH_at; Start 158; Stop 182
tgggacgtcgtggaaaatatttgct

SEQ ID NO: 188602 - DNA, 25 bp, Artificial
  probe
  misc_feature (1)..(25): SEQ ID NO: 2016; WAN024EZH_at; Start 212; Stop 236
cccatttgcggatggagggcaagta

SEQ ID NO: 188603 - DNA, 25 bp, Artificial
  probe
  misc_feature (1)..(25): SEQ ID NO: 2016; WAN024EZH_at; Start 685; Stop 709
gaagatggaagcatgcaggactttc

SEQ ID NO: 188604 - DNA, 25 bp, Artificial
  probe
  misc_feature (1)..(25): SEQ ID NO: 2016; WAN024EZH_at; Start 478; Stop 502
catctcctagaccagaccttggtag

SEQ ID NO: 188605 - DNA, 25 bp, Artificial
  probe
  misc_feature (1)..(25): SEQ ID NO: 5394; WAN024EZI_at; Start 202; Stop 226
gaggccatctgtcgcaaactgattg

SEQ ID NO: 188606 - DNA, 25 bp, Artificial
  probe
  misc_feature (1)..(25): SEQ ID NO: 5394; WAN024EZI_at; Start 112; Stop 136
caaacgattaacctcgcggtcacta

SEQ ID NO: 188607 - DNA, 25 bp, Artificial
  probe
  misc_feature (1)..(25): SEQ ID NO: 5394; WAN024EZI_at; Start 57; Stop 81
gaagagaaaggtagccttgacgaac

SEQ ID NO: 188608 - DNA, 25 bp, Artificial
  probe
  misc_feature (1)..(25): SEQ ID NO: 5394; WAN024EZI_at; Start 221; Stop 245
tgattgagccagtcaatggcttcaa

SEQ ID NO: 188609 - DNA, 25 bp, Artificial
  probe
  misc_feature (1)..(25): SEQ ID NO: 5394; WAN024EZI_at; Start 5; Stop 29
tccaaagggagactagcatcaatct

SEQ ID NO: 188610 - DNA, 25 bp, Artificial
  probe
  misc_feature (1)..(25): SEQ ID NO: 5394; WAN024EZI_at; Start 1; Stop 25
ttgctccaaagggagactagcatca

SEQ ID NO: 188611 - DNA, 25 bp, Artificial
  probe
  misc_feature (1)..(25): SEQ ID NO: 5394; WAN024EZI_at; Start 137; Stop 161
ttagcagcaatacgagccagccctt

SEQ ID NO: 188612 - DNA, 25 bp, Artificial
  probe
  misc_feature (1)..(25): SEQ ID NO: 5394; WAN024EZI_at; Start 232; Stop 256
gtcaatggcttcaatatctaactaa

SEQ ID NO: 188613 - DNA, 25 bp, Artificial
  probe
  misc_feature (1)..(25): SEQ ID NO: 5394; WAN024EZI_at; Start 166; Stop 190
cacctcgatgtcaaaatagagtgtc

SEQ ID NO: 188614 - DNA, 25 bp, Artificial
  probe
  misc_feature (1)..(25): SEQ ID NO: 5394; WAN024EZI_at; Start 160; Stop 184
ttcttccacctcgatgtcaaaatag

SEQ ID NO: 188615 - DNA, 25 bp, Artificial
  probe
  misc_feature (1)..(25): SEQ ID NO: 5394; WAN024EZI_at; Start 83; Stop 107
tttttatgcaagtccaacccttcca

SEQ ID NO: 188616 - DNA, 25 bp, Artificial
  probe
  misc_feature (1)..(25): SEQ ID NO: 5394; WAN024EZI_at; Start 192; Stop 216
aatcgggtttgaggccatctgtcgc

SEQ ID NO: 188617 - DNA, 25 bp, Artificial
  probe
  misc_feature (1)..(25): SEQ ID NO: 5394; WAN024EZI_at; Start 36; Stop 60
tgcgatttccctctttatccagaag

SEQ ID NO: 188618 - DNA, 25 bp, Artificial
  probe
  misc_feature (1)..(25): SEQ ID NO: 5394; WAN024EZI_at; Start 68; Stop 92
tagccttgacgaacttttttatgca

SEQ ID NO: 188619 - DNA, 25 bp, Artificial
  probe
  misc_feature (1)..(25): SEQ ID NO: 5394; WAN024EZI_at; Start 207; Stop 231
catctgtcgcaaactgattgagcca

SEQ ID NO: 188620 - DNA, 25 bp, Artificial
  probe
  misc_feature (1)..(25): SEQ ID NO: 5394; WAN024EZI_at; Start 177; Stop 201
caaaatagagtgtcaaatcgggttt

SEQ ID NO: 188621 - DNA, 25 bp, Artificial
  probe
  misc_feature (1)..(25): SEQ ID NO: 5394; WAN024EZI_at; Start 51; Stop 75
tatccagaagagaaaggtagccttg

SEQ ID NO: 188622 - DNA, 25 bp, Artificial
  probe
  misc_feature (1)..(25): SEQ ID NO: 5394; WAN024EZI_at; Start 228; Stop 252
gccagtcaatggcttcaatatctaa

SEQ ID NO: 188623 - DNA, 25 bp, Artificial
  probe
  misc_feature (1)..(25): SEQ ID NO: 5394; WAN024EZI_at; Start 11; Stop 35
gggagactagcatcaatcttgacaa

SEQ ID NO: 188624 - DNA, 25 bp, Artificial
  probe
  misc_feature (1)..(25): SEQ ID NO: 5394; WAN024EZI_at; Start 15; Stop 39
gactagcatcaatcttgacaatgcg

SEQ ID NO: 188625 - DNA, 25 bp, Artificial
  probe
  misc_feature (1)..(25): SEQ ID NO: 5394; WAN024EZI_at; Start 135; Stop 159
tattagcagcaatacgagccagccc

SEQ ID NO: 188626 - DNA, 25 bp, Artificial
  probe
  misc_feature (1)..(25): SEQ ID NO: 5394; WAN024EZI_at; Start 106; Stop 130
caaatccaaacgattaacctcgcgg

SEQ ID NO: 188627 - DNA, 25 bp, Artificial
  probe
  misc_feature (1)..(25): SEQ ID NO: 5394; WAN024EZI_at; Start 49; Stop 73
tttatccagaagagaaaggtagcct

SEQ ID NO: 188628 - DNA, 25 bp, Artificial
  probe
  misc_feature (1)..(25): SEQ ID NO: 5394; WAN024EZI_at; Start 195; Stop 219
cgggtttgaggccatctgtcgcaaa

SEQ ID NO: 188629 - DNA, 25 bp, Artificial
  probe
  misc_feature (1)..(25): SEQ ID NO: 5394; WAN024EZI_at; Start 216; Stop 240
caaactgattgagccagtcaatggc

SEQ ID NO: 188630 - DNA, 25 bp, Artificial
  probe
  misc_feature (1)..(25): SEQ ID NO: 5394; WAN024EZI_at; Start 126; Stop 150
cgcggtcactattagcagcaatacg

SEQ ID NO: 188631 - DNA, 25 bp, Artificial
  probe
  misc_feature (1)..(25): SEQ ID NO: 5394; WAN024EZI_at; Start 120; Stop 144
taacctcgcggtcactattagcagc

SEQ ID NO: 188632 - DNA, 25 bp, Artificial
  probe
  misc_feature (1)..(25): SEQ ID NO: 5394; WAN024EZI_at; Start 75; Stop 99
gacgaacttttttatgcaagtccaa

SEQ ID NO: 188633 - DNA, 25 bp, Artificial
  probe
  misc_feature (1)..(25): SEQ ID NO: 5394; WAN024EZI_at; Start 24; Stop 48
caatcttgacaatgcgatttccctc

SEQ ID NO: 188634 - DNA, 25 bp, Artificial
  probe
  misc_feature (1)..(25): SEQ ID NO: 5394; WAN024EZI_at; Start 139; Stop 163
agcagcaatacgagccagcccttct

SEQ ID NO: 188635 - DNA, 25 bp, Artificial
  probe
  misc_feature (1)..(25): SEQ ID NO: 5394; WAN024EZI_at; Start 190; Stop 214
caaatcgggtttgaggccatctgtc

SEQ ID NO: 188636 - DNA, 25 bp, Artificial
  probe
  misc_feature (1)..(25): SEQ ID NO: 5394; WAN024EZI_at; Start 211; Stop 235
tgtcgcaaactgattgagccagtca

SEQ ID NO: 188637 - DNA, 25 bp, Artificial
  probe
  misc_feature (1)..(25): SEQ ID NO: 5394; WAN024EZI_at; Start 174; Stop 198
tgtcaaaatagagtgtcaaatcggg

SEQ ID NO: 188638 - DNA, 25 bp, Artificial
  probe
  misc_feature (1)..(25): SEQ ID NO: 5394; WAN024EZI_at; Start 87; Stop 111
tatgcaagtccaacccttccaaatc

SEQ ID NO: 188639 - DNA, 25 bp, Artificial
  probe
  misc_feature (1)..(25): SEQ ID NO: 812; WAN024EZJ_at; Start 728; Stop 752
aacaggatcaggttttacggattct

SEQ ID NO: 188640 - DNA, 25 bp, Artificial
  probe
  misc_feature (1)..(25): SEQ ID NO: 812; WAN024EZJ_at; Start 384; Stop 408
caaggtcatcgaagaaccccagagt

SEQ ID NO: 188641 - DNA, 25 bp, Artificial
  probe
  misc_feature (1)..(25): SEQ ID NO: 812; WAN024EZJ_at; Start 623; Stop 647
ccttggtcgatgaaagtgaacgcct

SEQ ID NO: 188642 - DNA, 25 bp, Artificial
  probe
  misc_feature (1)..(25): SEQ ID NO: 812; WAN024EZJ_at; Start 188; Stop 212
gccgaagttgcaagctgattgaaca

SEQ ID NO: 188643 - DNA, 25 bp, Artificial
  probe
  misc_feature (1)..(25): SEQ ID NO: 812; WAN024EZJ_at; Start 768; Stop 792
gcaggacctcttgcaggtaagagta

SEQ ID NO: 188644 - DNA, 25 bp, Artificial
  probe
  misc_feature (1)..(25): SEQ ID NO: 812; WAN024EZJ_at; Start 825; Stop 849
aaaaatgtggcaagctaatgtcagc

SEQ ID NO: 188645 - DNA, 25 bp, Artificial
  probe
  misc_feature (1)..(25): SEQ ID NO: 812; WAN024EZJ_at; Start 781; Stop 805
caggtaagagtaagagtgattctac

SEQ ID NO: 188646 - DNA, 25 bp, Artificial
  probe
  misc_feature (1)..(25): SEQ ID NO: 812; WAN024EZJ_at; Start 560; Stop 584
tagctaagtttagtcaatcgcgagc

SEQ ID NO: 188647 - DNA, 25 bp, Artificial
  probe
  misc_feature (1)..(25): SEQ ID NO: 812; WAN024EZJ_at; Start 417; Stop 441
tattttcttcttgactagcgatgag

SEQ ID NO: 188648 - DNA, 25 bp, Artificial
  probe
  misc_feature (1)..(25): SEQ ID NO: 812; WAN024EZJ_at; Start 64; Stop 88
gaacaagaccagctcaatcacgcct

SEQ ID NO: 188649 - DNA, 25 bp, Artificial
  probe
  misc_feature (1)..(25): SEQ ID NO: 812; WAN024EZJ_at; Start 688; Stop 712
caggttgccaaattagccaacttgg

SEQ ID NO: 188650 - DNA, 25 bp, Artificial
  probe
  misc_feature (1)..(25): SEQ ID NO: 812; WAN024EZJ_at; Start 853; Stop 877
caaaatgccatggaatatctggtct

SEQ ID NO: 188651 - DNA, 25 bp, Artificial
  probe
  misc_feature (1)..(25): SEQ ID NO: 812; WAN024EZJ_at; Start 702; Stop 726
agccaacttggcagatgataaggaa

SEQ ID NO: 188652 - DNA, 25 bp, Artificial
  probe
  misc_feature (1)..(25): SEQ ID NO: 812; WAN024EZJ_at; Start 51; Stop 75
tgtccgtatcttagaacaagaccag

SEQ ID NO: 188653 - DNA, 25 bp, Artificial
  probe
  misc_feature (1)..(25): SEQ ID NO: 812; WAN024EZJ_at; Start 838; Stop 862
gctaatgtcagctttcaaaatgcca

SEQ ID NO: 188654 - DNA, 25 bp, Artificial
  probe
  misc_feature (1)..(25): SEQ ID NO: 812; WAN024EZJ_at; Start 349; Stop 373
gataaaatgcatcccaacgcagcca

SEQ ID NO: 188655 - DNA, 25 bp, Artificial
  probe
  misc_feature (1)..(25): SEQ ID NO: 812; WAN024EZJ_at; Start 475; Stop 499
cagatcttccactttaaaaagcaag

SEQ ID NO: 188656 - DNA, 25 bp, Artificial
  probe
  misc_feature (1)..(25): SEQ ID NO: 812; WAN024EZJ_at; Start 173; Stop 197
taccatgtgagaaatgccgaagttg

SEQ ID NO: 188657 - DNA, 25 bp, Artificial
  probe
  misc_feature (1)..(25): SEQ ID NO: 812; WAN024EZJ_at; Start 78; Stop 102
caatcacgcctatctcttttcaggt

SEQ ID NO: 188658 - DNA, 25 bp, Artificial
  probe
  misc_feature (1)..(25): SEQ ID NO: 812; WAN024EZJ_at; Start 370; Stop 394
gccaattctctgctcaaggtcatcg

SEQ ID NO: 188659 - DNA, 25 bp, Artificial
  probe
  misc_feature (1)..(25): SEQ ID NO: 812; WAN024EZJ_at; Start 640; Stop 664
gaacgcctgctgacttggttagtag

SEQ ID NO: 188660 - DNA, 25 bp, Artificial
  probe
  misc_feature (1)..(25): SEQ ID NO: 812; WAN024EZJ_at; Start 308; Stop 332
ggattgaaagccagcaacaggtctt

SEQ ID NO: 188661 - DNA, 25 bp, Artificial
  probe
  misc_feature (1)..(25): SEQ ID NO: 812; WAN024EZJ_at; Start 812; Stop 836
tactagaagctagaaaaatgtggca

SEQ ID NO: 188662 - DNA, 25 bp, Artificial
  probe
  misc_feature (1)..(25): SEQ ID NO: 812; WAN024EZJ_at; Start 432; Stop 456
tagcgatgaggaaaagatgttaccg

SEQ ID NO: 188663 - DNA, 25 bp, Artificial
  probe
  misc_feature (1)..(25): SEQ ID NO: 812; WAN024EZJ_at; Start 292; Stop 316
cagttttctcaagcagggattgaaa

SEQ ID NO: 188664 - DNA, 25 bp, Artificial
  probe
  misc_feature (1)..(25): SEQ ID NO: 812; WAN024EZJ_at; Start 513; Stop 537
cttactcttagaacaaatgggactt

SEQ ID NO: 188665 - DNA, 25 bp, Artificial
  probe
  misc_feature (1)..(25): SEQ ID NO: 812; WAN024EZJ_at; Start 574; Stop 598
caatcgcgagctgaagcagaaaagt

SEQ ID NO: 188666 - DNA, 25 bp, Artificial
  probe
  misc_feature (1)..(25): SEQ ID NO: 812; WAN024EZJ_at; Start 338; Stop 362
tcgagcaagcggataaaatgcatcc

SEQ ID NO: 188667 - DNA, 25 bp, Artificial
  probe
  misc_feature (1)..(25): SEQ ID NO: 812; WAN024EZJ_at; Start 157; Stop 181
gataaagttggcgtcttaccatgtg

SEQ ID NO: 188668 - DNA, 25 bp, Artificial
  probe
  misc_feature (1)..(25): SEQ ID NO: 812; WAN024EZJ_at; Start 461; Stop 485
tccgaagtcggactcagatcttcca

SEQ ID NO: 188669 - DNA, 25 bp, Artificial
  probe
  misc_feature (1)..(25): SEQ ID NO: 812; WAN024EZJ_at; Start 607; Stop 631
caggcaagtttttggaccttggtcg

SEQ ID NO: 188670 - DNA, 25 bp, Artificial
  probe
  misc_feature (1)..(25): SEQ ID NO: 812; WAN024EZJ_at; Start 32; Stop 56
cagctcagtttgaccgttttgtccg

SEQ ID NO: 188671 - DNA, 25 bp, Artificial
  probe
  misc_feature (1)..(25): SEQ ID NO: 812; WAN024EZJ_at; Start 673; Stop 697
aaagaaagttatctacaggttgcca

SEQ ID NO: 188672 - DNA, 25 bp, Artificial
  probe
  misc_feature (1)..(25): SEQ ID NO: 812; WAN024EZJ_at; Start 447; Stop 471
gatgttaccgacaatccgaagtcgg

SEQ ID NO: 188673 - DNA, 25 bp, Artificial
  probe
  misc_feature (1)..(25): SEQ ID NO: 2819; WAN024EZK_at; Start 511; Stop 535
caaggctacctttctcttctggata

SEQ ID NO: 188674 - DNA, 25 bp, Artificial
  probe
  misc_feature (1)..(25): SEQ ID NO: 2819; WAN024EZK_at; Start 33; Stop 57
accagagggagcaggcaagaccagt

SEQ ID NO: 188675 - DNA, 25 bp, Artificial
  probe
  misc_feature (1)..(25): SEQ ID NO: 2819; WAN024EZK_at; Start 175; Stop 199
catactcagatggatgctaaaacag

SEQ ID NO: 188676 - DNA, 25 bp, Artificial
  probe
  misc_feature (1)..(25): SEQ ID NO: 2819; WAN024EZK_at; Start 224; Stop 248
gcagacagcatttggtggaaaaagt

SEQ ID NO: 188677 - DNA, 25 bp, Artificial
  probe
  misc_feature (1)..(25): SEQ ID NO: 2819; WAN024EZK_at; Start 526; Stop 550
cttctggataaagagggaaatcgca

SEQ ID NO: 188678 - DNA, 25 bp, Artificial
  probe
  misc_feature (1)..(25): SEQ ID NO: 2819; WAN024EZK_at; Start 388; Stop 412
cccgatttgacactctattttgaca

SEQ ID NO: 188679 - DNA, 25 bp, Artificial
  probe
  misc_feature (1)..(25): SEQ ID NO: 2819; WAN024EZK_at; Start 162; Stop 186
tttggatccaagtcatactcagatg

SEQ ID NO: 188680 - DNA, 25 bp, Artificial
  probe
  misc_feature (1)..(25): SEQ ID NO: 2819; WAN024EZK_at; Start 239; Stop 263
tggaaaaagttcttccagcccttga

SEQ ID NO: 188681 - DNA, 25 bp, Artificial
  probe
  misc_feature (1)..(25): SEQ ID NO: 2819; WAN024EZK_at; Start 147; Stop 171
gattcgggaagtgattttggatcca

SEQ ID NO: 188682 - DNA, 25 bp, Artificial
  probe
  misc_feature (1)..(25): SEQ ID NO: 2819; WAN024EZK_at; Start 187; Stop 211
gatgctaaaacagagctacttctct

SEQ ID NO: 188683 - DNA, 25 bp, Artificial
  probe
  misc_feature (1)..(25): SEQ ID NO: 2819; WAN024EZK_at; Start 403; Stop 427
tattttgacatcgaggtggaagaag

SEQ ID NO: 188684 - DNA, 25 bp, Artificial
  probe
  misc_feature (1)..(25): SEQ ID NO: 2819; WAN024EZK_at; Start 254; Stop 278
cagcccttgaagctggcaagttggt

SEQ ID NO: 188685 - DNA, 25 bp, Artificial
  probe
  misc_feature (1)..(25): SEQ ID NO: 2819; WAN024EZK_at; Start 112; Stop 136
acccgtgaacctggcggagtcttga

SEQ ID NO: 188686 - DNA, 25 bp, Artificial
  probe
  misc_feature (1)..(25): SEQ ID NO: 2819; WAN024EZK_at; Start 450; Stop 474
tagtgaccgcgaggttaatcgtttg

SEQ ID NO: 188687 - DNA, 25 bp, Artificial
  probe
  misc_feature (1)..(25): SEQ ID NO: 2819; WAN024EZK_at; Start 372; Stop 396
gacagatggcctcaaacccgatttg

SEQ ID NO: 188688 - DNA, 25 bp, Artificial
  probe
  misc_feature (1)..(25): SEQ ID NO: 2819; WAN024EZK_at; Start 47; Stop 71
gcaagaccagtgttttagaggctct

SEQ ID NO: 188689 - DNA, 25 bp, Artificial
  probe
  misc_feature (1)..(25): SEQ ID NO: 2819; WAN024EZK_at; Start 479; Stop 503
tggaagggttggacttgcataaaaa

SEQ ID NO: 188690 - DNA, 25 bp, Artificial
  probe
  misc_feature (1)..(25): SEQ ID NO: 2819; WAN024EZK_at; Start 348; Stop 372
cattgactggctcaatcagtttgcg

SEQ ID NO: 188691 - DNA, 25 bp, Artificial
  probe
  misc_feature (1)..(25): SEQ ID NO: 2819; WAN024EZK_at; Start 311; Stop 335
cctatcagggatttggtcgtggctt

SEQ ID NO: 188692 - DNA, 25 bp, Artificial
  probe
  misc_feature (1)..(25): SEQ ID NO: 2819; WAN024EZK_at; Start 558; Stop 582
gattgatgctagtctccctttggag

SEQ ID NO: 188693 - DNA, 25 bp, Artificial
  probe
  misc_feature (1)..(25): SEQ ID NO: 2819; WAN024EZK_at; Start 282; Stop 306
catggatcgttttatcgatagttct

SEQ ID NO: 188694 - DNA, 25 bp, Artificial
  probe
  misc_feature (1)..(25): SEQ ID NO: 2819; WAN024EZK_at; Start 60; Stop 84
tttagaggctctgctaccaatttta

SEQ ID NO: 188695 - DNA, 25 bp, Artificial
  probe
  misc_feature (1)..(25): SEQ ID NO: 2819; WAN024EZK_at; Start 608; Stop 632
tcttgtttgacggaatgggcttggc

SEQ ID NO: 188696 - DNA, 25 bp, Artificial
  probe
  misc_feature (1)..(25): SEQ ID NO: 2819; WAN024EZK_at; Start 495; Stop 519
gcataaaaaagttcgtcaaggctac

SEQ ID NO: 188697 - DNA, 25 bp, Artificial
  probe
  misc_feature (1)..(25): SEQ ID NO: 2819; WAN024EZK_at; Start 542; Stop 566
gaaatcgcattgtcaagattgatgc

SEQ ID NO: 188698 - DNA, 25 bp, Artificial
  probe
  misc_feature (1)..(25): SEQ ID NO: 2819; WAN024EZK_at; Start 203; Stop 227
tacttctctatattgccagtcgcag

SEQ ID NO: 188699 - DNA, 25 bp, Artificial
  probe
  misc_feature (1)..(25): SEQ ID NO: 2819; WAN024EZK_at; Start 213; Stop 237
tattgccagtcgcagacagcatttg

SEQ ID NO: 188700 - DNA, 25 bp, Artificial
  probe
  misc_feature (1)..(25): SEQ ID NO: 2819; WAN024EZK_at; Start 297; Stop 321
cgatagttctgttgcctatcaggga

SEQ ID NO: 188701 - DNA, 25 bp, Artificial
  probe
  misc_feature (1)..(25): SEQ ID NO: 2819; WAN024EZK_at; Start 267; Stop 291
tggcaagttggtcatcatggatcgt

SEQ ID NO: 188702 - DNA, 25 bp, Artificial
  probe
  misc_feature (1)..(25): SEQ ID NO: 2819; WAN024EZK_at; Start 334; Stop 358
ttagatattgaagccattgactggc

SEQ ID NO: 188703 - DNA, 25 bp, Artificial
  probe
  misc_feature (1)..(25): SEQ ID NO: 2819; WAN024EZK_at; Start 17; Stop 41
tagtctctcttgagggaccagaggg

SEQ ID NO: 188704 - DNA, 25 bp, Artificial
  probe
  misc_feature (1)..(25): SEQ ID NO: 2819; WAN024EZK_at; Start 360; Stop 384
caatcagtttgcgacagatggcctc

SEQ ID NO: 188705 - DNA, 25 bp, Artificial
  probe
  misc_feature (1)..(25): SEQ ID NO: 2819; WAN024EZK_at; Start 2; Stop 26
tgtcaaaaggatttttagtctctct

SEQ ID NO: 188706 - DNA, 25 bp, Artificial
  probe
  misc_feature (1)..(25): SEQ ID NO: 2819; WAN024EZK_at; Start 572; Stop 596
tccctttggagcaagttgtggaaac

SEQ ID NO: 188707 - DNA, 25 bp, Artificial
  probe
  misc_feature (1)..(25): SEQ ID NO: 7696; WAN024EZL_at; Start 14; Stop 38
acaagtataacacagaggtgttttc

SEQ ID NO: 188708 - DNA, 25 bp, Artificial
  probe
  misc_feature (1)..(25): SEQ ID NO: 7696; WAN024EZL_at; Start 3; Stop 27
gtggttgaacaacaagtataacaca

SEQ ID NO: 188709 - DNA, 25 bp, Artificial
  probe
  misc_feature (1)..(25): SEQ ID NO: 7696; WAN024EZL_at; Start 15; Stop 39
caagtataacacagaggtgttttct

SEQ ID NO: 188710 - DNA, 25 bp, Artificial
  probe
  misc_feature (1)..(25): SEQ ID NO: 7696; WAN024EZL_at; Start 12; Stop 36
caacaagtataacacagaggtgttt

SEQ ID NO: 188711 - DNA, 25 bp, Artificial
  probe
  misc_feature (1)..(25): SEQ ID NO: 7696; WAN024EZL_at; Start 2; Stop 26
tgtggttgaacaacaagtataacac

SEQ ID NO: 188712 - DNA, 25 bp, Artificial
  probe
  misc_feature (1)..(25): SEQ ID NO: 7696; WAN024EZL_at; Start 7; Stop 31
ttgaacaacaagtataacacagagg

SEQ ID NO: 188713 - DNA, 25 bp, Artificial
  probe
  misc_feature (1)..(25): SEQ ID NO: 7696; WAN024EZL_at; Start 13; Stop 37
aacaagtataacacagaggtgtttt

SEQ ID NO: 188714 - DNA, 25 bp, Artificial
  probe
  misc_feature (1)..(25): SEQ ID NO: 7696; WAN024EZL_at; Start 10; Stop 34
aacaacaagtataacacagaggtgt

SEQ ID NO: 188715 - DNA, 25 bp, Artificial
  probe
  misc_feature (1)..(25): SEQ ID NO: 7696; WAN024EZL_at; Start 9; Stop 33
gaacaacaagtataacacagaggtg

SEQ ID NO: 188716 - DNA, 25 bp, Artificial
  probe
  misc_feature (1)..(25): SEQ ID NO: 7696; WAN024EZL_at; Start 17; Stop 41
agtataacacagaggtgttttctta

SEQ ID NO: 188717 - DNA, 25 bp, Artificial
  probe
  misc_feature (1)..(25): SEQ ID NO: 7696; WAN024EZL_at; Start 8; Stop 32
tgaacaacaagtataacacagaggt

SEQ ID NO: 188718 - DNA, 25 bp, Artificial
  probe
  misc_feature (1)..(25): SEQ ID NO: 7696; WAN024EZL_at; Start 5; Stop 29
ggttgaacaacaagtataacacaga

SEQ ID NO: 188719 - DNA, 25 bp, Artificial
  probe
  misc_feature (1)..(25): SEQ ID NO: 7696; WAN024EZL_at; Start 6; Stop 30
gttgaacaacaagtataacacagag

SEQ ID NO: 188720 - DNA, 25 bp, Artificial
  probe
  misc_feature (1)..(25): SEQ ID NO: 7696; WAN024EZL_at; Start 16; Stop 40
aagtataacacagaggtgttttctt

SEQ ID NO: 188721 - DNA, 25 bp, Artificial
  probe
  misc_feature (1)..(25): SEQ ID NO: 7696; WAN024EZL_at; Start 1; Stop 25
ttgtggttgaacaacaagtataaca

SEQ ID NO: 188722 - DNA, 25 bp, Artificial
  probe
  misc_feature (1)..(25): SEQ ID NO: 7696; WAN024EZL_at; Start 4; Stop 28
tggttgaacaacaagtataacacag

SEQ ID NO: 188723 - DNA, 25 bp, Artificial
  probe
  misc_feature (1)..(25): SEQ ID NO: 7696; WAN024EZL_at; Start 11; Stop 35
acaacaagtataacacagaggtgtt

SEQ ID NO: 188724 - DNA, 25 bp, Artificial
  probe
  misc_feature (1)..(25): SEQ ID NO: 7321; WAN024EZM_at; Start 35; Stop 59
tcagttcaaccatttgtgcttctgc

SEQ ID NO: 188725 - DNA, 25 bp, Artificial
  probe
  misc_feature (1)..(25): SEQ ID NO: 7321; WAN024EZM_at; Start 81; Stop 105
tgaagctgaggatttcttccatgtt

SEQ ID NO: 188726 - DNA, 25 bp, Artificial
  probe
  misc_feature (1)..(25): SEQ ID NO: 7321; WAN024EZM_at; Start 20; Stop 44
taatcacaccatctctcagttcaac

SEQ ID NO: 188727 - DNA, 25 bp, Artificial
  probe
  misc_feature (1)..(25): SEQ ID NO: 7321; WAN024EZM_at; Start 73; Stop 97
aacggaattgaagctgaggatttct

SEQ ID NO: 188728 - DNA, 25 bp, Artificial
  probe
  misc_feature (1)..(25): SEQ ID NO: 7321; WAN024EZM_at; Start 31; Stop 55
tctctcagttcaaccatttgtgctt

SEQ ID NO: 188729 - DNA, 25 bp, Artificial
  probe
  misc_feature (1)..(25): SEQ ID NO: 7321; WAN024EZM_at; Start 38; Stop 62
gttcaaccatttgtgcttctgctgt

SEQ ID NO: 188730 - DNA, 25 bp, Artificial
  probe
  misc_feature (1)..(25): SEQ ID NO: 7321; WAN024EZM_at; Start 49; Stop 73
tgtgcttctgctgttgcatttttaa

SEQ ID NO: 188731 - DNA, 25 bp, Artificial
  probe
  misc_feature (1)..(25): SEQ ID NO: 7321; WAN024EZM_at; Start 33; Stop 57
tctcagttcaaccatttgtgcttct

SEQ ID NO: 188732 - DNA, 25 bp, Artificial
  probe
  misc_feature (1)..(25): SEQ ID NO: 7321; WAN024EZM_at; Start 10; Stop 34
aagaatgttctaatcacaccatctc

SEQ ID NO: 188733 - DNA, 25 bp, Artificial
  probe
  misc_feature (1)..(25): SEQ ID NO: 7321; WAN024EZM_at; Start 65; Stop 89
catttttaaacggaattgaagctga

SEQ ID NO: 188734 - DNA, 25 bp, Artificial
  probe
  misc_feature (1)..(25): SEQ ID NO: 7321; WAN024EZM_at; Start 6; Stop 30
tctaaagaatgttctaatcacacca

SEQ ID NO: 188735 - DNA, 25 bp, Artificial
  probe
  misc_feature (1)..(25): SEQ ID NO: 7321; WAN024EZM_at; Start 37; Stop 61
agttcaaccatttgtgcttctgctg

SEQ ID NO: 188736 - DNA, 25 bp, Artificial
  probe
  misc_feature (1)..(25): SEQ ID NO: 7321; WAN024EZM_at; Start 29; Stop 53
catctctcagttcaaccatttgtgc

SEQ ID NO: 188737 - DNA, 25 bp, Artificial
  probe
  misc_feature (1)..(25): SEQ ID NO: 7321; WAN024EZM_at; Start 16; Stop 40
gttctaatcacaccatctctcagtt

SEQ ID NO: 188738 - DNA, 25 bp, Artificial
  probe
  misc_feature (1)..(25): SEQ ID NO: 7321; WAN024EZM_at; Start 63; Stop 87
tgcatttttaaacggaattgaagct

SEQ ID NO: 188739 - DNA, 25 bp, Artificial
  probe
  misc_feature (1)..(25): SEQ ID NO: 7321; WAN024EZM_at; Start 58; Stop 82
gctgttgcatttttaaacggaattg

SEQ ID NO: 188740 - DNA, 25 bp, Artificial
  probe
  misc_feature (1)..(25): SEQ ID NO: 7321; WAN024EZM_at; Start 80; Stop 104
ttgaagctgaggatttcttccatgt

SEQ ID NO: 188741 - DNA, 25 bp, Artificial
  probe
  misc_feature (1)..(25): SEQ ID NO: 7321; WAN024EZM_at; Start 45; Stop 69
catttgtgcttctgctgttgcattt

SEQ ID NO: 188742 - DNA, 25 bp, Artificial
  probe
  misc_feature (1)..(25): SEQ ID NO: 7321; WAN024EZM_at; Start 71; Stop 95
taaacggaattgaagctgaggattt

SEQ ID NO: 188743 - DNA, 25 bp, Artificial
  probe
  misc_feature (1)..(25): SEQ ID NO: 7321; WAN024EZM_at; Start 2; Stop 26
tggttctaaagaatgttctaatcac

SEQ ID NO: 188744 - DNA, 25 bp, Artificial
  probe
  misc_feature (1)..(25): SEQ ID NO: 7321; WAN024EZM_at; Start 68; Stop 92
ttttaaacggaattgaagctgagga

SEQ ID NO: 188745 - DNA, 25 bp, Artificial
  probe
  misc_feature (1)..(25): SEQ ID NO: 7321; WAN024EZM_at; Start 18; Stop 42
tctaatcacaccatctctcagttca

SEQ ID NO: 188746 - DNA, 25 bp, Artificial
  probe
  misc_feature (1)..(25): SEQ ID NO: 7321; WAN024EZM_at; Start 52; Stop 76
gcttctgctgttgcatttttaaacg

SEQ ID NO: 188747 - DNA, 25 bp, Artificial
  probe
  misc_feature (1)..(25): SEQ ID NO: 7321; WAN024EZM_at; Start 77; Stop 101
gaattgaagctgaggatttcttcca

SEQ ID NO: 188748 - DNA, 25 bp, Artificial
  probe
  misc_feature (1)..(25): SEQ ID NO: 7321; WAN024EZM_at; Start 8; Stop 32
taaagaatgttctaatcacaccatc

SEQ ID NO: 188749 - DNA, 25 bp, Artificial
  probe
  misc_feature (1)..(25): SEQ ID NO: 7321; WAN024EZM_at; Start 12; Stop 36
gaatgttctaatcacaccatctctc

SEQ ID NO: 188750 - DNA, 25 bp, Artificial
  probe
  misc_feature (1)..(25): SEQ ID NO: 7321; WAN024EZM_at; Start 55; Stop 79
tctgctgttgcatttttaaacggaa

SEQ ID NO: 188751 - DNA, 25 bp, Artificial
  probe
  misc_feature (1)..(25): SEQ ID NO: 7321; WAN024EZM_at; Start 28; Stop 52
ccatctctcagttcaaccatttgtg

SEQ ID NO: 188752 - DNA, 25 bp, Artificial
  probe
  misc_feature (1)..(25): SEQ ID NO: 7321; WAN024EZM_at; Start 69; Stop 93
tttaaacggaattgaagctgaggat

SEQ ID NO: 188753 - DNA, 25 bp, Artificial
  probe
  misc_feature (1)..(25): SEQ ID NO: 7321; WAN024EZM_at; Start 56; Stop 80
ctgctgttgcatttttaaacggaat

SEQ ID NO: 188754 - DNA, 25 bp, Artificial
  probe
  misc_feature (1)..(25): SEQ ID NO: 7321; WAN024EZM_at; Start 44; Stop 68
ccatttgtgcttctgctgttgcatt

SEQ ID NO: 188755 - DNA, 25 bp, Artificial
  probe
  misc_feature (1)..(25): SEQ ID NO: 7321; WAN024EZM_at; Start 75; Stop 99
cggaattgaagctgaggatttcttc

SEQ ID NO: 188756 - DNA, 25 bp, Artificial
  probe
  misc_feature (1)..(25): SEQ ID NO: 7321; WAN024EZM_at; Start 42; Stop 66
aaccatttgtgcttctgctgttgca

SEQ ID NO: 188757 - DNA, 25 bp, Artificial
  probe
  misc_feature (1)..(25): SEQ ID NO: 7321; WAN024EZM_at; Start 15; Stop 39
tgttctaatcacaccatctctcagt

SEQ ID NO: 188758 - DNA, 25 bp, Artificial
  probe
  misc_feature (1)..(25): SEQ ID NO: 5014; WAN024EZN_at; Start 95; Stop 119
acaagtctcccagagaatttttgat

SEQ ID NO: 188759 - DNA, 25 bp, Artificial
  probe
  misc_feature (1)..(25): SEQ ID NO: 5014; WAN024EZN_at; Start 36; Stop 60
taaagaagccgccttcatcgaaaag

SEQ ID NO: 188760 - DNA, 25 bp, Artificial
  probe
  misc_feature (1)..(25): SEQ ID NO: 5014; WAN024EZN_at; Start 96; Stop 120
caagtctcccagagaatttttgatt

SEQ ID NO: 188761 - DNA, 25 bp, Artificial
  probe
  misc_feature (1)..(25): SEQ ID NO: 5014; WAN024EZN_at; Start 30; Stop 54
gactcctaaagaagccgccttcatc

SEQ ID NO: 188762 - DNA, 25 bp, Artificial
  probe
  misc_feature (1)..(25): SEQ ID NO: 5014; WAN024EZN_at; Start 1; Stop 25
ttgacaaagagccaaggaactaaga

SEQ ID NO: 188763 - DNA, 25 bp, Artificial
  probe
  misc_feature (1)..(25): SEQ ID NO: 5014; WAN024EZN_at; Start 2; Stop 26
tgacaaagagccaaggaactaagaa

SEQ ID NO: 188764 - DNA, 25 bp, Artificial
  probe
  misc_feature (1)..(25): SEQ ID NO: 5014; WAN024EZN_at; Start 32; Stop 56
ctcctaaagaagccgccttcatcga

SEQ ID NO: 188765 - DNA, 25 bp, Artificial
  probe
  misc_feature (1)..(25): SEQ ID NO: 5014; WAN024EZN_at; Start 102; Stop 126
tcccagagaatttttgattgctggc

SEQ ID NO: 188766 - DNA, 25 bp, Artificial
  probe
  misc_feature (1)..(25): SEQ ID NO: 5014; WAN024EZN_at; Start 92; Stop 116
actacaagtctcccagagaattttt

SEQ ID NO: 188767 - DNA, 25 bp, Artificial
  probe
  misc_feature (1)..(25): SEQ ID NO: 5014; WAN024EZN_at; Start 29; Stop 53
cgactcctaaagaagccgccttcat

SEQ ID NO: 188768 - DNA, 25 bp, Artificial
  probe
  misc_feature (1)..(25): SEQ ID NO: 5014; WAN024EZN_at; Start 91; Stop 115
gactacaagtctcccagagaatttt

SEQ ID NO: 188769 - DNA, 25 bp, Artificial
  probe
  misc_feature (1)..(25): SEQ ID NO: 5014; WAN024EZN_at; Start 98; Stop 122
agtctcccagagaatttttgattgc

SEQ ID NO: 188770 - DNA, 25 bp, Artificial
  probe
  misc_feature (1)..(25): SEQ ID NO: 5014; WAN024EZN_at; Start 3; Stop 27
gacaaagagccaaggaactaagaaa

SEQ ID NO: 188771 - DNA, 25 bp, Artificial
  probe
  misc_feature (1)..(25): SEQ ID NO: 5014; WAN024EZN_at; Start 31; Stop 55
actcctaaagaagccgccttcatcg

SEQ ID NO: 188772 - DNA, 25 bp, Artificial
  probe
  misc_feature (1)..(25): SEQ ID NO: 5014; WAN024EZN_at; Start 101; Stop 125
ctcccagagaatttttgattgctgg

SEQ ID NO: 188773 - DNA, 25 bp, Artificial
  probe
  misc_feature (1)..(25): SEQ ID NO: 5014; WAN024EZN_at; Start 97; Stop 121
aagtctcccagagaatttttgattg

SEQ ID NO: 188774 - DNA, 25 bp, Artificial
  probe
  misc_feature (1)..(25): SEQ ID NO: 5014; WAN024EZN_at; Start 34; Stop 58
cctaaagaagccgccttcatcgaaa

SEQ ID NO: 188775 - DNA, 25 bp, Artificial
  probe
  misc_feature (1)..(25): SEQ ID NO: 5014; WAN024EZN_at; Start 94; Stop 118
tacaagtctcccagagaatttttga

SEQ ID NO: 188776 - DNA, 25 bp, Artificial
  probe
  misc_feature (1)..(25): SEQ ID NO: 5014; WAN024EZN_at; Start 93; Stop 117
ctacaagtctcccagagaatttttg

SEQ ID NO: 188777 - DNA, 25 bp, Artificial
  probe
  misc_feature (1)..(25): SEQ ID NO: 5014; WAN024EZN_at; Start 35; Stop 59
ctaaagaagccgccttcatcgaaaa

SEQ ID NO: 188778 - DNA, 25 bp, Artificial
  probe
  misc_feature (1)..(25): SEQ ID NO: 5014; WAN024EZN_at; Start 100; Stop 124
tctcccagagaatttttgattgctg

SEQ ID NO: 188779 - DNA, 25 bp, Artificial
  probe
  misc_feature (1)..(25): SEQ ID NO: 5014; WAN024EZN_at; Start 99; Stop 123
gtctcccagagaatttttgattgct

SEQ ID NO: 188780 - DNA, 25 bp, Artificial
  probe
  misc_feature (1)..(25): SEQ ID NO: 5014; WAN024EZN_at; Start 33; Stop 57
tcctaaagaagccgccttcatcgaa

SEQ ID NO: 188781 - DNA, 25 bp, Artificial
  probe
  misc_feature (1)..(25): SEQ ID NO: 5014; WAN024EZN_at; Start 28; Stop 52
acgactcctaaagaagccgccttca

SEQ ID NO: 188782 - DNA, 25 bp, Artificial
  probe
  misc_feature (1)..(25): SEQ ID NO: 5537; WAN024EZO_at; Start 49; Stop 73
gcagcttcctcggtatcttttggag

SEQ ID NO: 188783 - DNA, 25 bp, Artificial
  probe
  misc_feature (1)..(25): SEQ ID NO: 5537; WAN024EZO_at; Start 106; Stop 130
gaaaaggcaccagctaagatagccg

SEQ ID NO: 188784 - DNA, 25 bp, Artificial
  probe
  misc_feature (1)..(25): SEQ ID NO: 5537; WAN024EZO_at; Start 104; Stop 128
ttgaaaaggcaccagctaagatagc

SEQ ID NO: 188785 - DNA, 25 bp, Artificial
  probe
  misc_feature (1)..(25): SEQ ID NO: 5537; WAN024EZO_at; Start 20; Stop 44
ggtctagcaagagtttttctcgcga

SEQ ID NO: 188786 - DNA, 25 bp, Artificial
  probe
  misc_feature (1)..(25): SEQ ID NO: 5537; WAN024EZO_at; Start 234; Stop 258
cgcacgcaggatatttaaacgacct

SEQ ID NO: 188787 - DNA, 25 bp, Artificial
  probe
  misc_feature (1)..(25): SEQ ID NO: 5537; WAN024EZO_at; Start 6; Stop 30
tagttccctatcttggtctagcaag

SEQ ID NO: 188788 - DNA, 25 bp, Artificial
  probe
  misc_feature (1)..(25): SEQ ID NO: 5537; WAN024EZO_at; Start 257; Stop 281
ctgcaaaatttgaatcaatttcgtg

SEQ ID NO: 188789 - DNA, 25 bp, Artificial
  probe
  misc_feature (1)..(25): SEQ ID NO: 5537; WAN024EZO_at; Start 10; Stop 34
tccctatcttggtctagcaagagtt

SEQ ID NO: 188790 - DNA, 25 bp, Artificial
  probe
  misc_feature (1)..(25): SEQ ID NO: 5537; WAN024EZO_at; Start 189; Stop 213
cacaccagcaatggaaataattcca

SEQ ID NO: 188791 - DNA, 25 bp, Artificial
  probe
  misc_feature (1)..(25): SEQ ID NO: 5537; WAN024EZO_at; Start 64; Stop 88
tcttttggagttgaaacggatacat

SEQ ID NO: 188792 - DNA, 25 bp, Artificial
  probe
  misc_feature (1)..(25): SEQ ID NO: 5537; WAN024EZO_at; Start 240; Stop 264
caggatatttaaacgacctgcaaaa

SEQ ID NO: 188793 - DNA, 25 bp, Artificial
  probe
  misc_feature (1)..(25): SEQ ID NO: 5537; WAN024EZO_at; Start 168; Stop 192
ggcactggcaactccgataaccaca

SEQ ID NO: 188794 - DNA, 25 bp, Artificial
  probe
  misc_feature (1)..(25): SEQ ID NO: 5537; WAN024EZO_at; Start 76; Stop 100
gaaacggatacatattctccaccag

SEQ ID NO: 188795 - DNA, 25 bp, Artificial
  probe
  misc_feature (1)..(25): SEQ ID NO: 5537; WAN024EZO_at; Start 27; Stop 51
caagagtttttctcgcgaaacggca

SEQ ID NO: 188796 - DNA, 25 bp, Artificial
  probe
  misc_feature (1)..(25): SEQ ID NO: 5537; WAN024EZO_at; Start 88; Stop 112
tattctccaccagccattgaaaagg

SEQ ID NO: 188797 - DNA, 25 bp, Artificial
  probe
  misc_feature (1)..(25): SEQ ID NO: 5537; WAN024EZO_at; Start 39; Stop 63
tcgcgaaacggcagcttcctcggta

SEQ ID NO: 188798 - DNA, 25 bp, Artificial
  probe
  misc_feature (1)..(25): SEQ ID NO: 5537; WAN024EZO_at; Start 1; Stop 25
ttggctagttccctatcttggtcta

SEQ ID NO: 188799 - DNA, 25 bp, Artificial
  probe
  misc_feature (1)..(25): SEQ ID NO: 5537; WAN024EZO_at; Start 98; Stop 122
cagccattgaaaaggcaccagctaa

SEQ ID NO: 188800 - DNA, 25 bp, Artificial
  probe
  misc_feature (1)..(25): SEQ ID NO: 5537; WAN024EZO_at; Start 164; Stop 188
tcgtggcactggcaactccgataac

SEQ ID NO: 188801 - DNA, 25 bp, Artificial
  probe
  misc_feature (1)..(25): SEQ ID NO: 5537; WAN024EZO_at; Start 82; Stop 106
gatacatattctccaccagccattg

SEQ ID NO: 188802 - DNA, 25 bp, Artificial
  probe
  misc_feature (1)..(25): SEQ ID NO: 5537; WAN024EZO_at; Start 230; Stop 254
cacccgcacgcaggatatttaaacg

SEQ ID NO: 188803 - DNA, 25 bp, Artificial
  probe
  misc_feature (1)..(25): SEQ ID NO: 5537; WAN024EZO_at; Start 248; Stop 272
ttaaacgacctgcaaaatttgaatc

SEQ ID NO: 188804 - DNA, 25 bp, Artificial
  probe
  misc_feature (1)..(25): SEQ ID NO: 5537; WAN024EZO_at; Start 177; Stop 201
aactccgataaccacaccagcaatg

SEQ ID NO: 188805 - DNA, 25 bp, Artificial
  probe
  misc_feature (1)..(25): SEQ ID NO: 5537; WAN024EZO_at; Start 71; Stop 95
gagttgaaacggatacatattctcc

SEQ ID NO: 188806 - DNA, 25 bp, Artificial
  probe
  misc_feature (1)..(25): SEQ ID NO: 5537; WAN024EZO_at; Start 183; Stop 207
gataaccacaccagcaatggaaata

SEQ ID NO: 188807 - DNA, 25 bp, Artificial
  probe
  misc_feature (1)..(25): SEQ ID NO: 5537; WAN024EZO_at; Start 201; Stop 225
ggaaataattccatcgttagcatca

SEQ ID NO: 188808 - DNA, 25 bp, Artificial
  probe
  misc_feature (1)..(25): SEQ ID NO: 5537; WAN024EZO_at; Start 43; Stop 67
gaaacggcagcttcctcggtatctt

SEQ ID NO: 188809 - DNA, 25 bp, Artificial
  probe
  misc_feature (1)..(25): SEQ ID NO: 5537; WAN024EZO_at; Start 206; Stop 230
taattccatcgttagcatcaagaac

SEQ ID NO: 188810 - DNA, 25 bp, Artificial
  probe
  misc_feature (1)..(25): SEQ ID NO: 5537; WAN024EZO_at; Start 33; Stop 57
tttttctcgcgaaacggcagcttcc

SEQ ID NO: 188811 - DNA, 25 bp, Artificial
  probe
  misc_feature (1)..(25): SEQ ID NO: 5537; WAN024EZO_at; Start 214; Stop 238
tcgttagcatcaagaacacccgcac

SEQ ID NO: 188812 - DNA, 25 bp, Artificial
  probe
  misc_feature (1)..(25): SEQ ID NO: 5537; WAN024EZO_at; Start 57; Stop 81
ctcggtatcttttggagttgaaacg

SEQ ID NO: 188813 - DNA, 25 bp, Artificial
  probe
  misc_feature (1)..(25): SEQ ID NO: 5537; WAN024EZO_at; Start 93; Stop 117
tccaccagccattgaaaaggcacca

SEQ ID NO: 188814 - DNA, 25 bp, Artificial
  probe
  misc_feature (1)..(25): SEQ ID NO: 5537; WAN024EZO_at; Start 136; Stop 160
cctgataaaaagataatccagatat

SEQ ID NO: 188815 - DNA, 25 bp, Artificial
  probe
  misc_feature (1)..(25): SEQ ID NO: 5537; WAN024EZO_at; Start 225; Stop 249
aagaacacccgcacgcaggatattt

SEQ ID NO: 188816 - DNA, 25 bp, Artificial
  probe
  misc_feature (1)..(25): SEQ ID NO: 2703; WAN024EZP_at; Start 119; Stop 143
cgaacaaagggaaatcaaatagaga

SEQ ID NO: 188817 - DNA, 25 bp, Artificial
  probe
  misc_feature (1)..(25): SEQ ID NO: 2703; WAN024EZP_at; Start 117; Stop 141
ggcgaacaaagggaaatcaaataga

SEQ ID NO: 188818 - DNA, 25 bp, Artificial
  probe
  misc_feature (1)..(25): SEQ ID NO: 2703; WAN024EZP_at; Start 116; Stop 140
aggcgaacaaagggaaatcaaatag

SEQ ID NO: 188819 - DNA, 25 bp, Artificial
  probe
  misc_feature (1)..(25): SEQ ID NO: 2703; WAN024EZP_at; Start 103; Stop 127
attatactacaaaaggcgaacaaag

SEQ ID NO: 188820 - DNA, 25 bp, Artificial
  probe
  misc_feature (1)..(25): SEQ ID NO: 2703; WAN024EZP_at; Start 118; Stop 142
gcgaacaaagggaaatcaaatagag

SEQ ID NO: 188821 - DNA, 25 bp, Artificial
  probe
  misc_feature (1)..(25): SEQ ID NO: 2703; WAN024EZP_at; Start 102; Stop 126
cattatactacaaaaggcgaacaaa

SEQ ID NO: 188822 - DNA, 25 bp, Artificial
  probe
  misc_feature (1)..(25): SEQ ID NO: 2703; WAN024EZP_at; Start 120; Stop 144
gaacaaagggaaatcaaatagagaa

SEQ ID NO: 188823 - DNA, 25 bp, Artificial
  probe
  misc_feature (1)..(25): SEQ ID NO: 2703; WAN024EZP_at; Start 101; Stop 125
ccattatactacaaaaggcgaacaa

SEQ ID NO: 188824 - DNA, 25 bp, Artificial
  probe
  misc_feature (1)..(25): SEQ ID NO: 2703; WAN024EZP_at; Start 100; Stop 124
accattatactacaaaaggcgaaca

SEQ ID NO: 188825 - DNA, 25 bp, Artificial
  probe
  misc_feature (1)..(25): SEQ ID NO: 4295; WAN024EZQ_at; Start 366; Stop 390
taagaaacaggctagcaccaacttt

SEQ ID NO: 188826 - DNA, 25 bp, Artificial
  probe
  misc_feature (1)..(25): SEQ ID NO: 4295; WAN024EZQ_at; Start 294; Stop 318
caagaaatcaagcttgaccaaggaa

SEQ ID NO: 188827 - DNA, 25 bp, Artificial
  probe
  misc_feature (1)..(25): SEQ ID NO: 4295; WAN024EZQ_at; Start 297; Stop 321
gaaatcaagcttgaccaaggaacta

SEQ ID NO: 188828 - DNA, 25 bp, Artificial
  probe
  misc_feature (1)..(25): SEQ ID NO: 4295; WAN024EZQ_at; Start 673; Stop 697
gaggagcacatctattatgcgcacc

SEQ ID NO: 188829 - DNA, 25 bp, Artificial
  probe
  misc_feature (1)..(25): SEQ ID NO: 4295; WAN024EZQ_at; Start 927; Stop 951
attttgcaggtcgtttaaatatcct

SEQ ID NO: 188830 - DNA, 25 bp, Artificial
  probe
  misc_feature (1)..(25): SEQ ID NO: 4295; WAN024EZQ_at; Start 390; Stop 414
taaacctgctggtcaatccatcgaa

SEQ ID NO: 188831 - DNA, 25 bp, Artificial
  probe
  misc_feature (1)..(25): SEQ ID NO: 4295; WAN024EZQ_at; Start 396; Stop 420
tgctggtcaatccatcgaacagcgg

SEQ ID NO: 188832 - DNA, 25 bp, Artificial
  probe
  misc_feature (1)..(25): SEQ ID NO: 4295; WAN024EZQ_at; Start 411; Stop 435
cgaacagcggtctgaagctatcaat

SEQ ID NO: 188833 - DNA, 25 bp, Artificial
  probe
  misc_feature (1)..(25): SEQ ID NO: 4295; WAN024EZQ_at; Start 60; Stop 84
tactacaaaagccaaacatttgaca

SEQ ID NO: 188834 - DNA, 25 bp, Artificial
  probe
  misc_feature (1)..(25): SEQ ID NO: 4295; WAN024EZQ_at; Start 676; Stop 700
gagcacatctattatgcgcacccct

SEQ ID NO: 188835 - DNA, 25 bp, Artificial
  probe
  misc_feature (1)..(25): SEQ ID NO: 4295; WAN024EZQ_at; Start 352; Stop 376
aaattttcgcctgataagaaacagg

SEQ ID NO: 188836 - DNA, 25 bp, Artificial
  probe
  misc_feature (1)..(25): SEQ ID NO: 4295; WAN024EZQ_at; Start 419; Stop 443
ggtctgaagctatcaatcttcgctt

SEQ ID NO: 188837 - DNA, 25 bp, Artificial
  probe
  misc_feature (1)..(25): SEQ ID NO: 4295; WAN024EZQ_at; Start 938; Stop 962
cgtttaaatatcctgcgcgcaggtg

SEQ ID NO: 188838 - DNA, 25 bp, Artificial
  probe
  misc_feature (1)..(25): SEQ ID NO: 4295; WAN024EZQ_at; Start 276; Stop 300
taatcgcaagcactcggtcaagaaa

SEQ ID NO: 188839 - DNA, 25 bp, Artificial
  probe
  misc_feature (1)..(25): SEQ ID NO: 4295; WAN024EZQ_at; Start 655; Stop 679
ttgtttgatgtattttctgaggagc

SEQ ID NO: 188840 - DNA, 25 bp, Artificial
  probe
  misc_feature (1)..(25): SEQ ID NO: 4295; WAN024EZQ_at; Start 64; Stop 88
acaaaagccaaacatttgacaatcg

SEQ ID NO: 188841 - DNA, 25 bp, Artificial
  probe
  misc_feature (1)..(25): SEQ ID NO: 4295; WAN024EZQ_at; Start 399; Stop 423
tggtcaatccatcgaacagcggtct

SEQ ID NO: 188842 - DNA, 25 bp, Artificial
  probe
  misc_feature (1)..(25): SEQ ID NO: 4295; WAN024EZQ_at; Start 648; Stop 672
caatcgcttgtttgatgtattttct

SEQ ID NO: 188843 - DNA, 25 bp, Artificial
  probe
  misc_feature (1)..(25): SEQ ID NO: 4295; WAN024EZQ_at; Start 682; Stop 706
atctattatgcgcacccctatgcct

SEQ ID NO: 188844 - DNA, 25 bp, Artificial
  probe
  misc_feature (1)..(25): SEQ ID NO: 4295; WAN024EZQ_at; Start 369; Stop 393
gaaacaggctagcaccaactttaaa

SEQ ID NO: 188845 - DNA, 25 bp, Artificial
  probe
  misc_feature (1)..(25): SEQ ID NO: 4295; WAN024EZQ_at; Start 381; Stop 405
caccaactttaaacctgctggtcaa

SEQ ID NO: 188846 - DNA, 25 bp, Artificial
  probe
  misc_feature (1)..(25): SEQ ID NO: 4295; WAN024EZQ_at; Start 408; Stop 432
catcgaacagcggtctgaagctatc

SEQ ID NO: 188847 - DNA, 25 bp, Artificial
  probe
  misc_feature (1)..(25): SEQ ID NO: 4295; WAN024EZQ_at; Start 363; Stop 387
tgataagaaacaggctagcaccaac

SEQ ID NO: 188848 - DNA, 25 bp, Artificial
  probe
  misc_feature (1)..(25): SEQ ID NO: 4295; WAN024EZQ_at; Start 948; Stop 972
tcctgcgcgcaggtgttcttggtgc

SEQ ID NO: 188849 - DNA, 25 bp, Artificial
  probe
  misc_feature (1)..(25): SEQ ID NO: 4295; WAN024EZQ_at; Start 357; Stop 381
ttcgcctgataagaaacaggctagc

SEQ ID NO: 188850 - DNA, 25 bp, Artificial
  probe
  misc_feature (1)..(25): SEQ ID NO: 4295; WAN024EZQ_at; Start 404; Stop 428
aatccatcgaacagcggtctgaagc

SEQ ID NO: 188851 - DNA, 25 bp, Artificial
  probe
  misc_feature (1)..(25): SEQ ID NO: 4295; WAN024EZQ_at; Start 283; Stop 307
aagcactcggtcaagaaatcaagct

SEQ ID NO: 188852 - DNA, 25 bp, Artificial
  probe
  misc_feature (1)..(25): SEQ ID NO: 4295; WAN024EZQ_at; Start 415; Stop 439
cagcggtctgaagctatcaatcttc

SEQ ID NO: 188853 - DNA, 25 bp, Artificial
  probe
  misc_feature (1)..(25): SEQ ID NO: 4295; WAN024EZQ_at; Start 401; Stop 425
gtcaatccatcgaacagcggtctga

SEQ ID NO: 188854 - DNA, 25 bp, Artificial
  probe
  misc_feature (1)..(25): SEQ ID NO: 4295; WAN024EZQ_at; Start 286; Stop 310
cactcggtcaagaaatcaagcttga

SEQ ID NO: 188855 - DNA, 25 bp, Artificial
  probe
  misc_feature (1)..(25): SEQ ID NO: 4295; WAN024EZQ_at; Start 374; Stop 398
aggctagcaccaactttaaacctgc

SEQ ID NO: 188856 - DNA, 25 bp, Artificial
  probe
  misc_feature (1)..(25): SEQ ID NO: 4295; WAN024EZQ_at; Start 378; Stop 402
tagcaccaactttaaacctgctggt

SEQ ID NO: 188857 - DNA, 25 bp, Artificial
  probe
  misc_feature (1)..(25): SEQ ID NO: 4295; WAN024EZQ_at; Start 935; Stop 959
ggtcgtttaaatatcctgcgcgcag

SEQ ID NO: 188858 - DNA, 25 bp, Artificial
  probe
  misc_feature (1)..(25): SEQ ID NO: 4295; WAN024EZQ_at; Start 302; Stop 326
caagcttgaccaaggaactaaagga

SEQ ID NO: 188859 - DNA, 25 bp, Artificial
  probe
  misc_feature (1)..(25): SEQ ID NO: 5442; WAN024EZR_at; Start 37; Stop 61
aaatttcaagttcaagttagccatc

SEQ ID NO: 188860 - DNA, 25 bp, Artificial
  probe
  misc_feature (1)..(25): SEQ ID NO: 5442; WAN024EZR_at; Start 22; Stop 46
tatttccattttgctaaatttcaag

SEQ ID NO: 188861 - DNA, 25 bp, Artificial
  probe
  misc_feature (1)..(25): SEQ ID NO: 5442; WAN024EZR_at; Start 23; Stop 47
atttccattttgctaaatttcaagt

SEQ ID NO: 188862 - DNA, 25 bp, Artificial
  probe
  misc_feature (1)..(25): SEQ ID NO: 5442; WAN024EZR_at; Start 48; Stop 72
tcaagttagccatccagaagtcttc

SEQ ID NO: 188863 - DNA, 25 bp, Artificial
  probe
  misc_feature (1)..(25): SEQ ID NO: 5442; WAN024EZR_at; Start 32; Stop 56
ttgctaaatttcaagttcaagttag

SEQ ID NO: 188864 - DNA, 25 bp, Artificial
  probe
  misc_feature (1)..(25): SEQ ID NO: 5442; WAN024EZR_at; Start 41; Stop 65
ttcaagttcaagttagccatccaga

SEQ ID NO: 188865 - DNA, 25 bp, Artificial
  probe
  misc_feature (1)..(25): SEQ ID NO: 5442; WAN024EZR_at; Start 54; Stop 78
tagccatccagaagtcttctctggg

SEQ ID NO: 188866 - DNA, 25 bp, Artificial
  probe
  misc_feature (1)..(25): SEQ ID NO: 5442; WAN024EZR_at; Start 46; Stop 70
gttcaagttagccatccagaagtct

SEQ ID NO: 188867 - DNA, 25 bp, Artificial
  probe
  misc_feature (1)..(25): SEQ ID NO: 5442; WAN024EZR_at; Start 40; Stop 64
tttcaagttcaagttagccatccag

SEQ ID NO: 188868 - DNA, 25 bp, Artificial
  probe
  misc_feature (1)..(25): SEQ ID NO: 5442; WAN024EZR_at; Start 45; Stop 69
agttcaagttagccatccagaagtc

SEQ ID NO: 188869 - DNA, 25 bp, Artificial
  probe
  misc_feature (1)..(25): SEQ ID NO: 5442; WAN024EZR_at; Start 28; Stop 52
cattttgctaaatttcaagttcaag

SEQ ID NO: 188870 - DNA, 25 bp, Artificial
  probe
  misc_feature (1)..(25): SEQ ID NO: 5442; WAN024EZR_at; Start 38; Stop 62
aatttcaagttcaagttagccatcc

SEQ ID NO: 188871 - DNA, 25 bp, Artificial
  probe
  misc_feature (1)..(25): SEQ ID NO: 5442; WAN024EZR_at; Start 39; Stop 63
atttcaagttcaagttagccatcca

SEQ ID NO: 188872 - DNA, 25 bp, Artificial
  probe
  misc_feature (1)..(25): SEQ ID NO: 5442; WAN024EZR_at; Start 49; Stop 73
caagttagccatccagaagtcttct

SEQ ID NO: 188873 - DNA, 25 bp, Artificial
  probe
  misc_feature (1)..(25): SEQ ID NO: 5442; WAN024EZR_at; Start 36; Stop 60
taaatttcaagttcaagttagccat

SEQ ID NO: 188874 - DNA, 25 bp, Artificial
  probe
  misc_feature (1)..(25): SEQ ID NO: 5442; WAN024EZR_at; Start 43; Stop 67
caagttcaagttagccatccagaag

SEQ ID NO: 188875 - DNA, 25 bp, Artificial
  probe
  misc_feature (1)..(25): SEQ ID NO: 5442; WAN024EZR_at; Start 34; Stop 58
gctaaatttcaagttcaagttagcc

SEQ ID NO: 188876 - DNA, 25 bp, Artificial
  probe
  misc_feature (1)..(25): SEQ ID NO: 5442; WAN024EZR_at; Start 52; Stop 76
gttagccatccagaagtcttctctg

SEQ ID NO: 188877 - DNA, 25 bp, Artificial
  probe
  misc_feature (1)..(25): SEQ ID NO: 5442; WAN024EZR_at; Start 50; Stop 74
aagttagccatccagaagtcttctc

SEQ ID NO: 188878 - DNA, 25 bp, Artificial
  probe
  misc_feature (1)..(25): SEQ ID NO: 5442; WAN024EZR_at; Start 31; Stop 55
tttgctaaatttcaagttcaagtta

SEQ ID NO: 188879 - DNA, 25 bp, Artificial
  probe
  misc_feature (1)..(25): SEQ ID NO: 5442; WAN024EZR_at; Start 51; Stop 75
agttagccatccagaagtcttctct

SEQ ID NO: 188880 - DNA, 25 bp, Artificial
  probe
  misc_feature (1)..(25): SEQ ID NO: 5442; WAN024EZR_at; Start 44; Stop 68
aagttcaagttagccatccagaagt

SEQ ID NO: 188881 - DNA, 25 bp, Artificial
  probe
  misc_feature (1)..(25): SEQ ID NO: 5442; WAN024EZR_at; Start 53; Stop 77
ttagccatccagaagtcttctctgg

SEQ ID NO: 188882 - DNA, 25 bp, Artificial
  probe
  misc_feature (1)..(25): SEQ ID NO: 5442; WAN024EZR_at; Start 27; Stop 51
ccattttgctaaatttcaagttcaa

SEQ ID NO: 188883 - DNA, 25 bp, Artificial
  probe
  misc_feature (1)..(25): SEQ ID NO: 5442; WAN024EZR_at; Start 21; Stop 45
ttatttccattttgctaaatttcaa

SEQ ID NO: 188884 - DNA, 25 bp, Artificial
  probe
  misc_feature (1)..(25): SEQ ID NO: 5442; WAN024EZR_at; Start 26; Stop 50
tccattttgctaaatttcaagttca

SEQ ID NO: 188885 - DNA, 25 bp, Artificial
  probe
  misc_feature (1)..(25): SEQ ID NO: 5442; WAN024EZR_at; Start 42; Stop 66
tcaagttcaagttagccatccagaa

SEQ ID NO: 188886 - DNA, 25 bp, Artificial
  probe
  misc_feature (1)..(25): SEQ ID NO: 5442; WAN024EZR_at; Start 35; Stop 59
ctaaatttcaagttcaagttagcca

SEQ ID NO: 188887 - DNA, 25 bp, Artificial
  probe
  misc_feature (1)..(25): SEQ ID NO: 5442; WAN024EZR_at; Start 47; Stop 71
ttcaagttagccatccagaagtctt

SEQ ID NO: 188888 - DNA, 25 bp, Artificial
  probe
  misc_feature (1)..(25): SEQ ID NO: 5442; WAN024EZR_at; Start 25; Stop 49
ttccattttgctaaatttcaagttc

SEQ ID NO: 188889 - DNA, 25 bp, Artificial
  probe
  misc_feature (1)..(25): SEQ ID NO: 5442; WAN024EZR_at; Start 29; Stop 53
attttgctaaatttcaagttcaagt

SEQ ID NO: 188890 - DNA, 25 bp, Artificial
  probe
  misc_feature (1)..(25): SEQ ID NO: 5442; WAN024EZR_at; Start 33; Stop 57
tgctaaatttcaagttcaagttagc

SEQ ID NO: 188891 - DNA, 25 bp, Artificial
  probe
  misc_feature (1)..(25): SEQ ID NO: 5442; WAN024EZR_at; Start 20; Stop 44
attatttccattttgctaaatttca

SEQ ID NO: 188892 - DNA, 25 bp, Artificial
  probe
  misc_feature (1)..(25): SEQ ID NO: 3394; WAN024EZS_at; Start 570; Stop 594
gattcggaaccttgctattggtctc

SEQ ID NO: 188893 - DNA, 25 bp, Artificial
  probe
  misc_feature (1)..(25): SEQ ID NO: 3394; WAN024EZS_at; Start 338; Stop 362
ctctggtagaggaaaaatatgggat

SEQ ID NO: 188894 - DNA, 25 bp, Artificial
  probe
  misc_feature (1)..(25): SEQ ID NO: 3394; WAN024EZS_at; Start 115; Stop 139
gctatcttagctggtgccttttcaa

SEQ ID NO: 188895 - DNA, 25 bp, Artificial
  probe
  misc_feature (1)..(25): SEQ ID NO: 3394; WAN024EZS_at; Start 129; Stop 153
tgccttttcaatggctggtggagaa

SEQ ID NO: 188896 - DNA, 25 bp, Artificial
  probe
  misc_feature (1)..(25): SEQ ID NO: 3394; WAN024EZS_at; Start 324; Stop 348
aaatccactcaaggctctggtagag

SEQ ID NO: 188897 - DNA, 25 bp, Artificial
  probe
  misc_feature (1)..(25): SEQ ID NO: 3394; WAN024EZS_at; Start 232; Stop 256
gaactagccaaaaaatccctctatg

SEQ ID NO: 188898 - DNA, 25 bp, Artificial
  probe
  misc_feature (1)..(25): SEQ ID NO: 3394; WAN024EZS_at; Start 173; Stop 197
caaaagataccgaggaagctgccgt

SEQ ID NO: 188899 - DNA, 25 bp, Artificial
  probe
  misc_feature (1)..(25): SEQ ID NO: 3394; WAN024EZS_at; Start 373; Stop 397
gaatttaccaatccttggcacgctg

SEQ ID NO: 188900 - DNA, 25 bp, Artificial
  probe
  misc_feature (1)..(25): SEQ ID NO: 3394; WAN024EZS_at; Start 154; Stop 178
tatgtatccgtttcaactccaaaag

SEQ ID NO: 188901 - DNA, 25 bp, Artificial
  probe
  misc_feature (1)..(25): SEQ ID NO: 3394; WAN024EZS_at; Start 318; Stop 342
tcttaaaaatccactcaaggctctg

SEQ ID NO: 188902 - DNA, 25 bp, Artificial
  probe
  misc_feature (1)..(25): SEQ ID NO: 3394; WAN024EZS_at; Start 394; Stop 418
gctgccatttctagcttcgttgcct

SEQ ID NO: 188903 - DNA, 25 bp, Artificial
  probe
  misc_feature (1)..(25): SEQ ID NO: 3394; WAN024EZS_at; Start 218; Stop 242
tagaccaagatagggaactagccaa

SEQ ID NO: 188904 - DNA, 25 bp, Artificial
  probe
  misc_feature (1)..(25): SEQ ID NO: 3394; WAN024EZS_at; Start 178; Stop 202
gataccgaggaagctgccgtttcgc

SEQ ID NO: 188905 - DNA, 25 bp, Artificial
  probe
  misc_feature (1)..(25): SEQ ID NO: 3394; WAN024EZS_at; Start 21; Stop 45
tgctaacgatggaattatttccatt

SEQ ID NO: 188906 - DNA, 25 bp, Artificial
  probe
  misc_feature (1)..(25): SEQ ID NO: 3394; WAN024EZS_at; Start 376; Stop 400
tttaccaatccttggcacgctgcca

SEQ ID NO: 188907 - DNA, 25 bp, Artificial
  probe
  misc_feature (1)..(25): SEQ ID NO: 3394; WAN024EZS_at; Start 405; Stop 429
tagcttcgttgcctttttccttaga

SEQ ID NO: 188908 - DNA, 25 bp, Artificial
  probe
  misc_feature (1)..(25): SEQ ID NO: 3394; WAN024EZS_at; Start 420; Stop 444
tttccttagaagtttgcctccaatg

SEQ ID NO: 188909 - DNA, 25 bp, Artificial
  probe
  misc_feature (1)..(25): SEQ ID NO: 3394; WAN024EZS_at; Start 434; Stop 458
tgcctccaatgctgtcagtgaccat

SEQ ID NO: 188910 - DNA, 25 bp, Artificial
  probe
  misc_feature (1)..(25): SEQ ID NO: 3394; WAN024EZS_at; Start 122; Stop 146
tagctggtgccttttcaatggctgg

SEQ ID NO: 188911 - DNA, 25 bp, Artificial
  probe
  misc_feature (1)..(25): SEQ ID NO: 3394; WAN024EZS_at; Start 162; Stop 186
cgtttcaactccaaaagataccgag

SEQ ID NO: 188912 - DNA, 25 bp, Artificial
  probe
  misc_feature (1)..(25): SEQ ID NO: 3394; WAN024EZS_at; Start 81; Stop 105
caatatctggattatctttttatca

SEQ ID NO: 188913 - DNA, 25 bp, Artificial
  probe
  misc_feature (1)..(25): SEQ ID NO: 3394; WAN024EZS_at; Start 38; Stop 62
tttccattgctggtgtggttatcgg

SEQ ID NO: 188914 - DNA, 25 bp, Artificial
  probe
  misc_feature (1)..(25): SEQ ID NO: 3394; WAN024EZS_at; Start 184; Stop 208
gaggaagctgccgtttcgcgagaaa

SEQ ID NO: 188915 - DNA, 25 bp, Artificial
  probe
  misc_feature (1)..(25): SEQ ID NO: 3394; WAN024EZS_at; Start 188; Stop 212
aagctgccgtttcgcgagaaaaact

SEQ ID NO: 188916 - DNA, 25 bp, Artificial
  probe
  misc_feature (1)..(25): SEQ ID NO: 3394; WAN024EZS_at; Start 388; Stop 412
tggcacgctgccatttctagcttcg

SEQ ID NO: 188917 - DNA, 25 bp, Artificial
  probe
  misc_feature (1)..(25): SEQ ID NO: 3394; WAN024EZS_at; Start 357; Stop 381
tgggattgagtatgaagaatttacc

SEQ ID NO: 188918 - DNA, 25 bp, Artificial
  probe
  misc_feature (1)..(25): SEQ ID NO: 3394; WAN024EZS_at; Start 223; Stop 247
caagatagggaactagccaaaaaat

SEQ ID NO: 188919 - DNA, 25 bp, Artificial
  probe
  misc_feature (1)..(25): SEQ ID NO: 3394; WAN024EZS_at; Start 31; Stop 55
ggaattatttccattgctggtgtgg

SEQ ID NO: 188920 - DNA, 25 bp, Artificial
  probe
  misc_feature (1)..(25): SEQ ID NO: 3394; WAN024EZS_at; Start 329; Stop 353
cactcaaggctctggtagaggaaaa

SEQ ID NO: 188921 - DNA, 25 bp, Artificial
  probe
  misc_feature (1)..(25): SEQ ID NO: 3394; WAN024EZS_at; Start 137; Stop 161
caatggctggtggagaatatgtatc

SEQ ID NO: 188922 - DNA, 25 bp, Artificial
  probe
  misc_feature (1)..(25): SEQ ID NO: 3394; WAN024EZS_at; Start 428; Stop 452
gaagtttgcctccaatgctgtcagt

SEQ ID NO: 188923 - DNA, 25 bp, Artificial
  probe
  misc_feature (1)..(25): SEQ ID NO: 3394; WAN024EZS_at; Start 367; Stop 391
tatgaagaatttaccaatccttggc

SEQ ID NO: 188924 - DNA, 25 bp, Artificial
  probe
  misc_feature (1)..(25): SEQ ID NO: 3394; WAN024EZS_at; Start 145; Stop 169
ggtggagaatatgtatccgtttcaa

SEQ ID NO: 188925 - DNA, 25 bp, Artificial
  probe
  misc_feature (1)..(25): SEQ ID NO: 3394; WAN024EZS_at; Start 561; Stop 585
aacagctatgattcggaaccttgct

SEQ ID NO: 188926 - DNA, 25 bp, Artificial
  probe
  misc_feature (1)..(25): SEQ ID NO: 1162; WAN024EZT_at; Start 1704; Stop 1728
tagagattctggagaaacatggtcg

SEQ ID NO: 188927 - DNA, 25 bp, Artificial
  probe
  misc_feature (1)..(25): SEQ ID NO: 1162; WAN024EZT_at; Start 909; Stop 933
gcagttagtttactggccacgagat

SEQ ID NO: 188928 - DNA, 25 bp, Artificial
  probe
  misc_feature (1)..(25): SEQ ID NO: 1162; WAN024EZT_at; Start 91; Stop 115
gaattaaactatggtcaactgtcca

SEQ ID NO: 188929 - DNA, 25 bp, Artificial
  probe
  misc_feature (1)..(25): SEQ ID NO: 1162; WAN024EZT_at; Start 1563; Stop 1587
tagtggtcaaacatggaagaaatcc

SEQ ID NO: 188930 - DNA, 25 bp, Artificial
  probe
  misc_feature (1)..(25): SEQ ID NO: 1162; WAN024EZT_at; Start 634; Stop 658
aacaaagcaattagtgatcaggaag

SEQ ID NO: 188931 - DNA, 25 bp, Artificial
  probe
  misc_feature (1)..(25): SEQ ID NO: 1162; WAN024EZT_at; Start 1658; Stop 1682
gaacattctttagaaccactacagg

SEQ ID NO: 188932 - DNA, 25 bp, Artificial
  probe
  misc_feature (1)..(25): SEQ ID NO: 1162; WAN024EZT_at; Start 1832; Stop 1856
gtacaccaaattctagaagtggccg

SEQ ID NO: 188933 - DNA, 25 bp, Artificial
  probe
  misc_feature (1)..(25): SEQ ID NO: 1162; WAN024EZT_at; Start 1579; Stop 1603
aagaaatcctcagcttcaattccgt

SEQ ID NO: 188934 - DNA, 25 bp, Artificial
  probe
  misc_feature (1)..(25): SEQ ID NO: 1162; WAN024EZT_at; Start 1753; Stop 1777
caacaaacttcatatggcacacaag

SEQ ID NO: 188935 - DNA, 25 bp, Artificial
  probe
  misc_feature (1)..(25): SEQ ID NO: 1162; WAN024EZT_at; Start 548; Stop 572
tagataaggcaacactaggagctgt

SEQ ID NO: 188936 - DNA, 25 bp, Artificial
  probe
  misc_feature (1)..(25): SEQ ID NO: 1162; WAN024EZT_at; Start 1932; Stop 1956
tgatttgccttcgtatggttatgcc

SEQ ID NO: 188937 - DNA, 25 bp, Artificial
  probe
  misc_feature (1)..(25): SEQ ID NO: 1162; WAN024EZT_at; Start 1625; Stop 1649
cacaaatggttgaactgagagatgg

SEQ ID NO: 188938 - DNA, 25 bp, Artificial
  probe
  misc_feature (1)..(25): SEQ ID NO: 1162; WAN024EZT_at; Start 1972; Stop 1996
gaattgccaaatcatcacataggtg

SEQ ID NO: 188939 - DNA, 25 bp, Artificial
  probe
  misc_feature (1)..(25): SEQ ID NO: 1162; WAN024EZT_at; Start 1022; Stop 1046
tactagctgatgttatgcctgcggg

SEQ ID NO: 188940 - DNA, 25 bp, Artificial
  probe
  misc_feature (1)..(25): SEQ ID NO: 1162; WAN024EZT_at; Start 1527; Stop 1551
tactagtggagaactaacctatctc

SEQ ID NO: 188941 - DNA, 25 bp, Artificial
  probe
  misc_feature (1)..(25): SEQ ID NO: 1162; WAN024EZT_at; Start 1006; Stop 1030
tctgggaaaacgatattactagctg

SEQ ID NO: 188942 - DNA, 25 bp, Artificial
  probe
  misc_feature (1)..(25): SEQ ID NO: 1162; WAN024EZT_at; Start 568; Stop 592
gctgttaatcgtgaaggtaaggaac

SEQ ID NO: 188943 - DNA, 25 bp, Artificial
  probe
  misc_feature (1)..(25): SEQ ID NO: 1162; WAN024EZT_at; Start 415; Stop 439
ggacaggcagttgaaaatacactag

SEQ ID NO: 188944 - DNA, 25 bp, Artificial
  probe
  misc_feature (1)..(25): SEQ ID NO: 1162; WAN024EZT_at; Start 1948; Stop 1972
ggttatgcctattctgcgattacag

SEQ ID NO: 188945 - DNA, 25 bp, Artificial
  probe
  misc_feature (1)..(25): SEQ ID NO: 1162; WAN024EZT_at; Start 1422; Stop 1446
taagttgttgcctccgttcttagga

SEQ ID NO: 188946 - DNA, 25 bp, Artificial
  probe
  misc_feature (1)..(25): SEQ ID NO: 1162; WAN024EZT_at; Start 1238; Stop 1262
gaggaaagtctttaacagtcgaaca

SEQ ID NO: 188947 - DNA, 25 bp, Artificial
  probe
  misc_feature (1)..(25): SEQ ID NO: 1162; WAN024EZT_at; Start 2017; Stop 2041
tcgtggtcgagaaatgaattgcatt

SEQ ID NO: 188948 - DNA, 25 bp, Artificial
  probe
  misc_feature (1)..(25): SEQ ID NO: 1162; WAN024EZT_at; Start 585; Stop 609
taaggaacattacctcgcaaaagga

SEQ ID NO: 188949 - DNA, 25 bp, Artificial
  probe
  misc_feature (1)..(25): SEQ ID NO: 1162; WAN024EZT_at; Start 1611; Stop 1635
tgcaacagcagaagcacaaatggtt

SEQ ID NO: 188950 - DNA, 25 bp, Artificial
  probe
  misc_feature (1)..(25): SEQ ID NO: 1162; WAN024EZT_at; Start 1512; Stop 1536
gatttttgcaacatatactagtgga

SEQ ID NO: 188951 - DNA, 25 bp, Artificial
  probe
  misc_feature (1)..(25): SEQ ID NO: 1162; WAN024EZT_at; Start 1383; Stop 1407
gacaactagtcagaatagaggagag

SEQ ID NO: 188952 - DNA, 25 bp, Artificial
  probe
  misc_feature (1)..(25): SEQ ID NO: 1162; WAN024EZT_at; Start 784; Stop 808
gatgcacgttatggtgggactcatg

SEQ ID NO: 188953 - DNA, 25 bp, Artificial
  probe
  misc_feature (1)..(25): SEQ ID NO: 1162; WAN024EZT_at; Start 1037; Stop 1061
tgcctgcgggtattggaaataataa

SEQ ID NO: 188954 - DNA, 25 bp, Artificial
  probe
  misc_feature (1)..(25): SEQ ID NO: 1162; WAN024EZT_at; Start 335; Stop 359
taggtgtagaaataagagacgccca

SEQ ID NO: 188955 - DNA, 25 bp, Artificial
  probe
  misc_feature (1)..(25): SEQ ID NO: 1162; WAN024EZT_at; Start 852; Stop 876
taatgggaaaacgtggagtgagcca

SEQ ID NO: 188956 - DNA, 25 bp, Artificial
  probe
  misc_feature (1)..(25): SEQ ID NO: 1162; WAN024EZT_at; Start 1136; Stop 1160
acgatttccgttatacagttagaga

SEQ ID NO: 188957 - DNA, 25 bp, Artificial
  probe
  misc_feature (1)..(25): SEQ ID NO: 1162; WAN024EZT_at; Start 1059; Stop 1083
taatgcaaataaagccgactcaggt

SEQ ID NO: 188958 - DNA, 25 bp, Artificial
  probe
  misc_feature (1)..(25): SEQ ID NO: 1162; WAN024EZT_at; Start 948; Stop 972
tagtcaaattagtggaagtgcttca

SEQ ID NO: 188959 - DNA, 25 bp, Artificial
  probe
  misc_feature (1)..(25): SEQ ID NO: 1162; WAN024EZT_at; Start 888; Stop 912
gaagtttaatgactatgaggagcag

SEQ ID NO: 188960 - DNA, 25 bp, Artificial
  probe
  misc_feature (1)..(25): SEQ ID NO: 4089; WAN024EZU_at; Start 141; Stop 165
aattgcaggcttgttaggaaaggcg

SEQ ID NO: 188961 - DNA, 25 bp, Artificial
  probe
  misc_feature (1)..(25): SEQ ID NO: 4089; WAN024EZU_at; Start 493; Stop 517
caagctagtccgaactttaagccgg

SEQ ID NO: 188962 - DNA, 25 bp, Artificial
  probe
  misc_feature (1)..(25): SEQ ID NO: 4089; WAN024EZU_at; Start 523; Stop 547
aaatctatcgaagaacgtcctgacg

SEQ ID NO: 188963 - DNA, 25 bp, Artificial
  probe
  misc_feature (1)..(25): SEQ ID NO: 4089; WAN024EZU_at; Start 451; Stop 475
gccgacatgctttatcccagaaaaa

SEQ ID NO: 188964 - DNA, 25 bp, Artificial
  probe
  misc_feature (1)..(25): SEQ ID NO: 4089; WAN024EZU_at; Start 194; Stop 218
gaggtacaactttacaacaagtgag

SEQ ID NO: 188965 - DNA, 25 bp, Artificial
  probe
  misc_feature (1)..(25): SEQ ID NO: 4089; WAN024EZU_at; Start 959; Stop 983
tggactacaagtcgccaagtgaatt

SEQ ID NO: 188966 - DNA, 25 bp, Artificial
  probe
  misc_feature (1)..(25): SEQ ID NO: 4089; WAN024EZU_at; Start 699; Stop 723
tcaggcgcttacgttactattaggg

SEQ ID NO: 188967 - DNA, 25 bp, Artificial
  probe
  misc_feature (1)..(25): SEQ ID NO: 4089; WAN024EZU_at; Start 361; Stop 385
cctgaaatgatggttaacaagaagc

SEQ ID NO: 188968 - DNA, 25 bp, Artificial
  probe
  misc_feature (1)..(25): SEQ ID NO: 4089; WAN024EZU_at; Start 241; Stop 265
tattctgccgattacgcacaaactg

SEQ ID NO: 188969 - DNA, 25 bp, Artificial
  probe
  misc_feature (1)..(25): SEQ ID NO: 4089; WAN024EZU_at; Start 478; Stop 502
aaaggtgtcaagaagcaagctagtc

SEQ ID NO: 188970 - DNA, 25 bp, Artificial
  probe
  misc_feature (1)..(25): SEQ ID NO: 4089; WAN024EZU_at; Start 625; Stop 649
ttagtcttaaccgaccggcggagca

SEQ ID NO: 188971 - DNA, 25 bp, Artificial
  probe
  misc_feature (1)..(25): SEQ ID NO: 4089; WAN024EZU_at; Start 811; Stop 835
gcacatgcttactcttcatgggaga

SEQ ID NO: 188972 - DNA, 25 bp, Artificial
  probe
  misc_feature (1)..(25): SEQ ID NO: 4089; WAN024EZU_at; Start 78; Stop 102
tttgacaatagataaccgtcgcttg

SEQ ID NO: 188973 - DNA, 25 bp, Artificial
  probe
  misc_feature (1)..(25): SEQ ID NO: 4089; WAN024EZU_at; Start 126; Stop 150
taagtccaatcgtgaaattgcaggc

SEQ ID NO: 188974 - DNA, 25 bp, Artificial
  probe
  misc_feature (1)..(25): SEQ ID NO: 4089; WAN024EZU_at; Start 767; Stop 791
tcaaacgattgtctgaggtatttcc

SEQ ID NO: 188975 - DNA, 25 bp, Artificial
  probe
  misc_feature (1)..(25): SEQ ID NO: 4089; WAN024EZU_at; Start 859; Stop 883
cgattaattcggagatggttaccta

SEQ ID NO: 188976 - DNA, 25 bp, Artificial
  probe
  misc_feature (1)..(25): SEQ ID NO: 4089; WAN024EZU_at; Start 14; Stop 38
tgttcaccacaaacacaaggaaagg

SEQ ID NO: 188977 - DNA, 25 bp, Artificial
  probe
  misc_feature (1)..(25): SEQ ID NO: 4089; WAN024EZU_at; Start 47; Stop 71
tgcaagaacattataccccaaaagg

SEQ ID NO: 188978 - DNA, 25 bp, Artificial
  probe
  misc_feature (1)..(25): SEQ ID NO: 4089; WAN024EZU_at; Start 90; Stop 114
taaccgtcgcttgattgagcggtgg

SEQ ID NO: 188979 - DNA, 25 bp, Artificial
  probe
  misc_feature (1)..(25): SEQ ID NO: 4089; WAN024EZU_at; Start 748; Stop 772
gcagataatggttcggagttcaaac

SEQ ID NO: 188980 - DNA, 25 bp, Artificial
  probe
  misc_feature (1)..(25): SEQ ID NO: 4089; WAN024EZU_at; Start 157; Stop 181
ggaaaggcgcctcaaacgattcata

SEQ ID NO: 188981 - DNA, 25 bp, Artificial
  probe
  misc_feature (1)..(25): SEQ ID NO: 4089; WAN024EZU_at; Start 672; Stop 696
tccaaataaaactgctgaatctgtc

SEQ ID NO: 188982 - DNA, 25 bp, Artificial
  probe
  misc_feature (1)..(25): SEQ ID NO: 4089; WAN024EZU_at; Start 208; Stop 232
caacaagtgagaaaagggctataca

SEQ ID NO: 188983 - DNA, 25 bp, Artificial
  probe
  misc_feature (1)..(25): SEQ ID NO: 4089; WAN024EZU_at; Start 463; Stop 487
tatcccagaaaaaggaaaggtgtca

SEQ ID NO: 188984 - DNA, 25 bp, Artificial
  probe
  misc_feature (1)..(25): SEQ ID NO: 4089; WAN024EZU_at; Start 509; Stop 533
ttaagccggcaggtaaatctatcga

SEQ ID NO: 188985 - DNA, 25 bp, Artificial
  probe
  misc_feature (1)..(25): SEQ ID NO: 4089; WAN024EZU_at; Start 687; Stop 711
tgaatctgtcaatcaggcgcttacg

SEQ ID NO: 188986 - DNA, 25 bp, Artificial
  probe
  misc_feature (1)..(25): SEQ ID NO: 4089; WAN024EZU_at; Start 544; Stop 568
gacgttattaatcttcgcttggaaa

SEQ ID NO: 188987 - DNA, 25 bp, Artificial
  probe
  misc_feature (1)..(25): SEQ ID NO: 4089; WAN024EZU_at; Start 270; Stop 294
ccaattcaatcgaaaacggtcggtg

SEQ ID NO: 188988 - DNA, 25 bp, Artificial
  probe
  misc_feature (1)..(25): SEQ ID NO: 4089; WAN024EZU_at; Start 793; Stop 817
gaggaacatatctactacgcacatg

SEQ ID NO: 188989 - DNA, 25 bp, Artificial
  probe
  misc_feature (1)..(25): SEQ ID NO: 4089; WAN024EZU_at; Start 410; Stop 434
tctactactggtttcataatggtca

SEQ ID NO: 188990 - DNA, 25 bp, Artificial
  probe
  misc_feature (1)..(25): SEQ ID NO: 4089; WAN024EZU_at; Start 315; Stop 339
ggaaatcagagagaagatcttacac

SEQ ID NO: 188991 - DNA, 25 bp, Artificial
  probe
  misc_feature (1)..(25): SEQ ID NO: 4089; WAN024EZU_at; Start 580; Stop 604
gaaattgataccgtcctactgacta

SEQ ID NO: 188992 - DNA, 25 bp, Artificial
  probe
  misc_feature (1)..(25): SEQ ID NO: 4089; WAN024EZU_at; Start 108; Stop 132
gcggtggaagaatgaaaataagtcc

SEQ ID NO: 188993 - DNA, 25 bp, Artificial
  probe
  misc_feature (1)..(25): SEQ ID NO: 4089; WAN024EZU_at; Start 639; Stop 663
ccggcggagcagacaccaaattata

SEQ ID NO: 188994 - DNA, 25 bp, Artificial
  probe
  misc_feature (1)..(25): SEQ ID NO: 4296; WAN024EZV_at; Start 395; Stop 419
tgggaatttcaaccatttactattg

SEQ ID NO: 188995 - DNA, 25 bp, Artificial
  probe
  misc_feature (1)..(25): SEQ ID NO: 4296; WAN024EZV_at; Start 401; Stop 425
tttcaaccatttactattggattca

SEQ ID NO: 188996 - DNA, 25 bp, Artificial
  probe
  misc_feature (1)..(25): SEQ ID NO: 4296; WAN024EZV_at; Start 399; Stop 423
aatttcaaccatttactattggatt

SEQ ID NO: 188997 - DNA, 25 bp, Artificial
  probe
  misc_feature (1)..(25): SEQ ID NO: 4296; WAN024EZV_at; Start 393; Stop 417
cgtgggaatttcaaccatttactat

SEQ ID NO: 188998 - DNA, 25 bp, Artificial
  probe
  misc_feature (1)..(25): SEQ ID NO: 4296; WAN024EZV_at; Start 402; Stop 426
ttcaaccatttactattggattcat

SEQ ID NO: 188999 - DNA, 25 bp, Artificial
  probe
  misc_feature (1)..(25): SEQ ID NO: 4296; WAN024EZV_at; Start 400; Stop 424
atttcaaccatttactattggattc

SEQ ID NO: 189000 - DNA, 25 bp, Artificial
  probe
  misc_feature (1)..(25): SEQ ID NO: 4296; WAN024EZV_at; Start 403; Stop 427
tcaaccatttactattggattcatc

SEQ ID NO: 189001 - DNA, 25 bp, Artificial
  probe
  misc_feature (1)..(25): SEQ ID NO: 4296; WAN024EZV_at; Start 398; Stop 422
gaatttcaaccatttactattggat

SEQ ID NO: 189002 - DNA, 25 bp, Artificial
  probe
  misc_feature (1)..(25): SEQ ID NO: 4296; WAN024EZV_at; Start 397; Stop 421
ggaatttcaaccatttactattgga

SEQ ID NO: 189003 - DNA, 25 bp, Artificial
  probe
  misc_feature (1)..(25): SEQ ID NO: 2188; WAN024EZW_at; Start 361; Stop 385
tccttggaacggtttttcatgacaa

SEQ ID NO: 189004 - DNA, 25 bp, Artificial
  probe
  misc_feature (1)..(25): SEQ ID NO: 2188; WAN024EZW_at; Start 257; Stop 281
cgatacccgctccaacagttagaat

SEQ ID NO: 189005 - DNA, 25 bp, Artificial
  probe
  misc_feature (1)..(25): SEQ ID NO: 2188; WAN024EZW_at; Start 241; Stop 265
aacaaggctccaataccgatacccg

SEQ ID NO: 189006 - DNA, 25 bp, Artificial
  probe
  misc_feature (1)..(25): SEQ ID NO: 2188; WAN024EZW_at; Start 336; Stop 360
gcctaacatgccatatatacccagt

SEQ ID NO: 189007 - DNA, 25 bp, Artificial
  probe
  misc_feature (1)..(25): SEQ ID NO: 2188; WAN024EZW_at; Start 103; Stop 127
gcattcaggaacatgaggcctagga

SEQ ID NO: 189008 - DNA, 25 bp, Artificial
  probe
  misc_feature (1)..(25): SEQ ID NO: 2188; WAN024EZW_at; Start 269; Stop 293
caacagttagaatcccaaataccac

SEQ ID NO: 189009 - DNA, 25 bp, Artificial
  probe
  misc_feature (1)..(25): SEQ ID NO: 2188; WAN024EZW_at; Start 371; Stop 395
ggtttttcatgacaaaactattggc

SEQ ID NO: 189010 - DNA, 25 bp, Artificial
  probe
  misc_feature (1)..(25): SEQ ID NO: 2188; WAN024EZW_at; Start 265; Stop 289
gctccaacagttagaatcccaaata

SEQ ID NO: 189011 - DNA, 25 bp, Artificial
  probe
  misc_feature (1)..(25): SEQ ID NO: 2188; WAN024EZW_at; Start 357; Stop 381
cagttccttggaacggtttttcatg

SEQ ID NO: 189012 - DNA, 25 bp, Artificial
  probe
  misc_feature (1)..(25): SEQ ID NO: 2188; WAN024EZW_at; Start 204; Stop 228
cattagtttgagcaggaaagcgaaa

SEQ ID NO: 189013 - DNA, 25 bp, Artificial
  probe
  misc_feature (1)..(25): SEQ ID NO: 2188; WAN024EZW_at; Start 228; Stop 252
aattaacttgtcaaacaaggctcca

SEQ ID NO: 189014 - DNA, 25 bp, Artificial
  probe
  misc_feature (1)..(25): SEQ ID NO: 2188; WAN024EZW_at; Start 345; Stop 369
gccatatatacccagttccttggaa

SEQ ID NO: 189015 - DNA, 25 bp, Artificial
  probe
  misc_feature (1)..(25): SEQ ID NO: 2188; WAN024EZW_at; Start 326; Stop 350
gcttctccaagcctaacatgccata

SEQ ID NO: 189016 - DNA, 25 bp, Artificial
  probe
  misc_feature (1)..(25): SEQ ID NO: 2188; WAN024EZW_at; Start 348; Stop 372
atatatacccagttccttggaacgg

SEQ ID NO: 189017 - DNA, 25 bp, Artificial
  probe
  misc_feature (1)..(25): SEQ ID NO: 2188; WAN024EZW_at; Start 207; Stop 231
tagtttgagcaggaaagcgaaaatt

SEQ ID NO: 189018 - DNA, 25 bp, Artificial
  probe
  misc_feature (1)..(25): SEQ ID NO: 2188; WAN024EZW_at; Start 75; Stop 99
gagggcattcatacgggcgattcga

SEQ ID NO: 189019 - DNA, 25 bp, Artificial
  probe
  misc_feature (1)..(25): SEQ ID NO: 2188; WAN024EZW_at; Start 342; Stop 366
catgccatatatacccagttccttg

SEQ ID NO: 189020 - DNA, 25 bp, Artificial
  probe
  misc_feature (1)..(25): SEQ ID NO: 2188; WAN024EZW_at; Start 215; Stop 239
gcaggaaagcgaaaattaacttgtc

SEQ ID NO: 189021 - DNA, 25 bp, Artificial
  probe
  misc_feature (1)..(25): SEQ ID NO: 2188; WAN024EZW_at; Start 175; Stop 199
aaggtagcaaccagctcaaccttca

SEQ ID NO: 189022 - DNA, 25 bp, Artificial
  probe
  misc_feature (1)..(25): SEQ ID NO: 2188; WAN024EZW_at; Start 211; Stop 235
ttgagcaggaaagcgaaaattaact

SEQ ID NO: 189023 - DNA, 25 bp, Artificial
  probe
  misc_feature (1)..(25): SEQ ID NO: 2188; WAN024EZW_at; Start 110; Stop 134
ggaacatgaggcctaggaaaatcaa

SEQ ID NO: 189024 - DNA, 25 bp, Artificial
  probe
  misc_feature (1)..(25): SEQ ID NO: 2188; WAN024EZW_at; Start 172; Stop 196
tggaaggtagcaaccagctcaacct

SEQ ID NO: 189025 - DNA, 25 bp, Artificial
  probe
  misc_feature (1)..(25): SEQ ID NO: 2188; WAN024EZW_at; Start 73; Stop 97
tggagggcattcatacgggcgattc

SEQ ID NO: 189026 - DNA, 25 bp, Artificial
  probe
  misc_feature (1)..(25): SEQ ID NO: 2188; WAN024EZW_at; Start 236; Stop 260
tgtcaaacaaggctccaataccgat

SEQ ID NO: 189027 - DNA, 25 bp, Artificial
  probe
  misc_feature (1)..(25): SEQ ID NO: 2188; WAN024EZW_at; Start 255; Stop 279
accgatacccgctccaacagttaga

SEQ ID NO: 189028 - DNA, 25 bp, Artificial
  probe
  misc_feature (1)..(25): SEQ ID NO: 2188; WAN024EZW_at; Start 293; Stop 317
ctaactccttaaaggtcatactgat

SEQ ID NO: 189029 - DNA, 25 bp, Artificial
  probe
  misc_feature (1)..(25): SEQ ID NO: 2188; WAN024EZW_at; Start 329; Stop 353
tctccaagcctaacatgccatatat

SEQ ID NO: 189030 - DNA, 25 bp, Artificial
  probe
  misc_feature (1)..(25): SEQ ID NO: 2188; WAN024EZW_at; Start 201; Stop 225
tttcattagtttgagcaggaaagcg

SEQ ID NO: 189031 - DNA, 25 bp, Artificial
  probe
  misc_feature (1)..(25): SEQ ID NO: 2188; WAN024EZW_at; Start 107; Stop 131
tcaggaacatgaggcctaggaaaat

SEQ ID NO: 189032 - DNA, 25 bp, Artificial
  probe
  misc_feature (1)..(25): SEQ ID NO: 2188; WAN024EZW_at; Start 288; Stop 312
taccactaactccttaaaggtcata

SEQ ID NO: 189033 - DNA, 25 bp, Artificial
  probe
  misc_feature (1)..(25): SEQ ID NO: 2188; WAN024EZW_at; Start 276; Stop 300
tagaatcccaaataccactaactcc

SEQ ID NO: 189034 - DNA, 25 bp, Artificial
  probe
  misc_feature (1)..(25): SEQ ID NO: 2188; WAN024EZW_at; Start 234; Stop 258
cttgtcaaacaaggctccaataccg

SEQ ID NO: 189035 - DNA, 25 bp, Artificial
  probe
  misc_feature (1)..(25): SEQ ID NO: 2188; WAN024EZW_at; Start 222; Stop 246
agcgaaaattaacttgtcaaacaag

SEQ ID NO: 189036 - DNA, 25 bp, Artificial
  probe
  misc_feature (1)..(25): SEQ ID NO: 2188; WAN024EZW_at; Start 375; Stop 399
tttcatgacaaaactattggcatag

SEQ ID NO: 189037 - DNA, 25 bp, Artificial
  probe
  misc_feature (1)..(25): SEQ ID NO: 3082; WAN024EZX_at; Start 1881; Stop 1905
gactatgatgttgattgtgaccttg

SEQ ID NO: 189038 - DNA, 25 bp, Artificial
  probe
  misc_feature (1)..(25): SEQ ID NO: 3082; WAN024EZX_at; Start 887; Stop 911
ttttggtaaccatgtcagcagcgac

SEQ ID NO: 189039 - DNA, 25 bp, Artificial
  probe
  misc_feature (1)..(25): SEQ ID NO: 3082; WAN024EZX_at; Start 1938; Stop 1962
gctgattttcatgattacttcaaga

SEQ ID NO: 189040 - DNA, 25 bp, Artificial
  probe
  misc_feature (1)..(25): SEQ ID NO: 3082; WAN024EZX_at; Start 525; Stop 549
tcgaatcgcccgtatgaatgccctc

SEQ ID NO: 189041 - DNA, 25 bp, Artificial
  probe
  misc_feature (1)..(25): SEQ ID NO: 3082; WAN024EZX_at; Start 902; Stop 926
cagcagcgacaagcattttcaattc

SEQ ID NO: 189042 - DNA, 25 bp, Artificial
  probe
  misc_feature (1)..(25): SEQ ID NO: 3082; WAN024EZX_at; Start 1205; Stop 1229
tgtctctatcaggaaatgaggtcgg

SEQ ID NO: 189043 - DNA, 25 bp, Artificial
  probe
  misc_feature (1)..(25): SEQ ID NO: 3082; WAN024EZX_at; Start 1712; Stop 1736
gctttattatcttgcagaaagtcgg

SEQ ID NO: 189044 - DNA, 25 bp, Artificial
  probe
  misc_feature (1)..(25): SEQ ID NO: 3082; WAN024EZX_at; Start 2; Stop 26
tgtttcgattaaccaataagttagc

SEQ ID NO: 189045 - DNA, 25 bp, Artificial
  probe
  misc_feature (1)..(25): SEQ ID NO: 3082; WAN024EZX_at; Start 939; Stop 963
taaaaaagttctaaatcctcatgat

SEQ ID NO: 189046 - DNA, 25 bp, Artificial
  probe
  misc_feature (1)..(25): SEQ ID NO: 3082; WAN024EZX_at; Start 1428; Stop 1452
tatctataatcagttttacggtggt

SEQ ID NO: 189047 - DNA, 25 bp, Artificial
  probe
  misc_feature (1)..(25): SEQ ID NO: 3082; WAN024EZX_at; Start 308; Stop 332
tcagtatgacctttaaggagttagt

SEQ ID NO: 189048 - DNA, 25 bp, Artificial
  probe
  misc_feature (1)..(25): SEQ ID NO: 3082; WAN024EZX_at; Start 874; Stop 898
ttgtcaacaatggttttggtaacca

SEQ ID NO: 189049 - DNA, 25 bp, Artificial
  probe
  misc_feature (1)..(25): SEQ ID NO: 3082; WAN024EZX_at; Start 1912; Stop 1936
tgcgctatcttcctcatcgcctatg

SEQ ID NO: 189050 - DNA, 25 bp, Artificial
  probe
  misc_feature (1)..(25): SEQ ID NO: 3082; WAN024EZX_at; Start 224; Stop 248
tctatgccaatagttttgtcatgaa

SEQ ID NO: 189051 - DNA, 25 bp, Artificial
  probe
  misc_feature (1)..(25): SEQ ID NO: 3082; WAN024EZX_at; Start 637; Stop 661
ggctattatcttgcccttacggtaa

SEQ ID NO: 189052 - DNA, 25 bp, Artificial
  probe
  misc_feature (1)..(25): SEQ ID NO: 3082; WAN024EZX_at; Start 1589; Stop 1613
agatgagtgccctctttggtggtgt

SEQ ID NO: 189053 - DNA, 25 bp, Artificial
  probe
  misc_feature (1)..(25): SEQ ID NO: 3082; WAN024EZX_at; Start 1188; Stop 1212
tatgactggtcaaaaactgtctcta

SEQ ID NO: 189054 - DNA, 25 bp, Artificial
  probe
  misc_feature (1)..(25): SEQ ID NO: 3082; WAN024EZX_at; Start 1010; Stop 1034
tcttgagccagtttgcaagtgacaa

SEQ ID NO: 189055 - DNA, 25 bp, Artificial
  probe
  misc_feature (1)..(25): SEQ ID NO: 3082; WAN024EZX_at; Start 13; Stop 37
accaataagttagcggtatcgaact

SEQ ID NO: 189056 - DNA, 25 bp, Artificial
  probe
  misc_feature (1)..(25): SEQ ID NO: 3082; WAN024EZX_at; Start 824; Stop 848
tgattttccgtatgaagaaaaatgc

SEQ ID NO: 189057 - DNA, 25 bp, Artificial
  probe
  misc_feature (1)..(25): SEQ ID NO: 3082; WAN024EZX_at; Start 335; Stop 359
tatttgggattctaactgttggagc

SEQ ID NO: 189058 - DNA, 25 bp, Artificial
  probe
  misc_feature (1)..(25): SEQ ID NO: 3082; WAN024EZX_at; Start 1605; Stop 1629
tggtggtgtcttctttatcggtatt

SEQ ID NO: 189059 - DNA, 25 bp, Artificial
  probe
  misc_feature (1)..(25): SEQ ID NO: 3082; WAN024EZX_at; Start 363; Stop 387
tatcggtattggagccttgtttgac

SEQ ID NO: 189060 - DNA, 25 bp, Artificial
  probe
  misc_feature (1)..(25): SEQ ID NO: 3082; WAN024EZX_at; Start 1896; Stop 1920
tgtgaccttgtctatctgcgctatc

SEQ ID NO: 189061 - DNA, 25 bp, Artificial
  probe
  misc_feature (1)..(25): SEQ ID NO: 3082; WAN024EZX_at; Start 345; Stop 369
tctaactgttggagcgggtatcggt

SEQ ID NO: 189062 - DNA, 25 bp, Artificial
  probe
  misc_feature (1)..(25): SEQ ID NO: 3082; WAN024EZX_at; Start 1856; Stop 1880
taaaagtgattggtgtactggatac

SEQ ID NO: 189063 - DNA, 25 bp, Artificial
  probe
  misc_feature (1)..(25): SEQ ID NO: 3082; WAN024EZX_at; Start 28; Stop 52
gtatcgaacttgattaaaaaccgca

SEQ ID NO: 189064 - DNA, 25 bp, Artificial
  probe
  misc_feature (1)..(25): SEQ ID NO: 3082; WAN024EZX_at; Start 1634; Stop 1658
tatccattatctttatggtcggaac

SEQ ID NO: 189065 - DNA, 25 bp, Artificial
  probe
  misc_feature (1)..(25): SEQ ID NO: 3082; WAN024EZX_at; Start 428; Stop 452
aggttgagctggttgctaccttcca

SEQ ID NO: 189066 - DNA, 25 bp, Artificial
  probe
  misc_feature (1)..(25): SEQ ID NO: 3082; WAN024EZX_at; Start 1926; Stop 1950
catcgcctatgtgctgattttcatg

SEQ ID NO: 189067 - DNA, 25 bp, Artificial
  probe
  misc_feature (1)..(25): SEQ ID NO: 3082; WAN024EZX_at; Start 1149; Stop 1173
aacagttttcatggtatttgaccaa

SEQ ID NO: 189068 - DNA, 25 bp, Artificial
  probe
  misc_feature (1)..(25): SEQ ID NO: 3082; WAN024EZX_at; Start 398; Stop 422
tcgctttcctgctcaaactaatgaa

SEQ ID NO: 189069 - DNA, 25 bp, Artificial
  probe
  misc_feature (1)..(25): SEQ ID NO: 3082; WAN024EZX_at; Start 1869; Stop 1893
tgtactggatacgactatgatgttg

SEQ ID NO: 189070 - DNA, 25 bp, Artificial
  probe
  misc_feature (1)..(25): SEQ ID NO: 3082; WAN024EZX_at; Start 497; Stop 521
tcctaggcctcatgttcctgaatgc

SEQ ID NO: 189071 - DNA, 25 bp, Artificial
  probe
  misc_feature (1)..(25): SEQ ID NO: 5287; WAN024EZY_at; Start 105; Stop 129
cattaacgataacatagctgacttc

SEQ ID NO: 189072 - DNA, 25 bp, Artificial
  probe
  misc_feature (1)..(25): SEQ ID NO: 5287; WAN024EZY_at; Start 199; Stop 223
aataatctctacaccgtattgacca

SEQ ID NO: 189073 - DNA, 25 bp, Artificial
  probe
  misc_feature (1)..(25): SEQ ID NO: 5287; WAN024EZY_at; Start 60; Stop 84
cctgacgagcaagttcgctggcaga

SEQ ID NO: 189074 - DNA, 25 bp, Artificial
  probe
  misc_feature (1)..(25): SEQ ID NO: 5287; WAN024EZY_at; Start 178; Stop 202
ggccgttccatttccaatggcaata

SEQ ID NO: 189075 - DNA, 25 bp, Artificial
  probe
  misc_feature (1)..(25): SEQ ID NO: 5287; WAN024EZY_at; Start 79; Stop 103
ggcagaatagacagaagcaccactt

SEQ ID NO: 189076 - DNA, 25 bp, Artificial
  probe
  misc_feature (1)..(25): SEQ ID NO: 5287; WAN024EZY_at; Start 65; Stop 89
cgagcaagttcgctggcagaataga

SEQ ID NO: 189077 - DNA, 25 bp, Artificial
  probe
  misc_feature (1)..(25): SEQ ID NO: 5287; WAN024EZY_at; Start 164; Stop 188
tcactttcacgactggccgttccat

SEQ ID NO: 189078 - DNA, 25 bp, Artificial
  probe
  misc_feature (1)..(25): SEQ ID NO: 5287; WAN024EZY_at; Start 186; Stop 210
catttccaatggcaataatctctac

SEQ ID NO: 189079 - DNA, 25 bp, Artificial
  probe
  misc_feature (1)..(25): SEQ ID NO: 5287; WAN024EZY_at; Start 128; Stop 152
tcagggaaatctttcagaacttccg

SEQ ID NO: 189080 - DNA, 25 bp, Artificial
  probe
  misc_feature (1)..(25): SEQ ID NO: 5287; WAN024EZY_at; Start 37; Stop 61
ttcaacggtcaagtctggaaactcc

SEQ ID NO: 189081 - DNA, 25 bp, Artificial
  probe
  misc_feature (1)..(25): SEQ ID NO: 5287; WAN024EZY_at; Start 119; Stop 143
tagctgacttcagggaaatctttca

SEQ ID NO: 189082 - DNA, 25 bp, Artificial
  probe
  misc_feature (1)..(25): SEQ ID NO: 5287; WAN024EZY_at; Start 133; Stop 157
gaaatctttcagaacttccgctaca

SEQ ID NO: 189083 - DNA, 25 bp, Artificial
  probe
  misc_feature (1)..(25): SEQ ID NO: 5287; WAN024EZY_at; Start 25; Stop 49
ggcagagcgtttttcaacggtcaag

SEQ ID NO: 189084 - DNA, 25 bp, Artificial
  probe
  misc_feature (1)..(25): SEQ ID NO: 5287; WAN024EZY_at; Start 46; Stop 70
caagtctggaaactcctgacgagca

SEQ ID NO: 189085 - DNA, 25 bp, Artificial
  probe
  misc_feature (1)..(25): SEQ ID NO: 5287; WAN024EZY_at; Start 75; Stop 99
cgctggcagaatagacagaagcacc

SEQ ID NO: 189086 - DNA, 25 bp, Artificial
  probe
  misc_feature (1)..(25): SEQ ID NO: 5287; WAN024EZY_at; Start 92; Stop 116
gaagcaccactttcattaacgataa

SEQ ID NO: 189087 - DNA, 25 bp, Artificial
  probe
  misc_feature (1)..(25): SEQ ID NO: 5287; WAN024EZY_at; Start 144; Stop 168
gaacttccgctacaaaagcttcact

SEQ ID NO: 189088 - DNA, 25 bp, Artificial
  probe
  misc_feature (1)..(25): SEQ ID NO: 5287; WAN024EZY_at; Start 173; Stop 197
cgactggccgttccatttccaatgg

SEQ ID NO: 189089 - DNA, 25 bp, Artificial
  probe
  misc_feature (1)..(25): SEQ ID NO: 5287; WAN024EZY_at; Start 141; Stop 165
tcagaacttccgctacaaaagcttc

SEQ ID NO: 189090 - DNA, 25 bp, Artificial
  probe
  misc_feature (1)..(25): SEQ ID NO: 5287; WAN024EZY_at; Start 4; Stop 28
caaacgacgggcgatagaaatggca

SEQ ID NO: 189091 - DNA, 25 bp, Artificial
  probe
  misc_feature (1)..(25): SEQ ID NO: 5287; WAN024EZY_at; Start 114; Stop 138
taacatagctgacttcagggaaatc

SEQ ID NO: 189092 - DNA, 25 bp, Artificial
  probe
  misc_feature (1)..(25): SEQ ID NO: 5287; WAN024EZY_at; Start 21; Stop 45
aaatggcagagcgtttttcaacggt

SEQ ID NO: 189093 - DNA, 25 bp, Artificial
  probe
  misc_feature (1)..(25): SEQ ID NO: 5287; WAN024EZY_at; Start 56; Stop 80
aactcctgacgagcaagttcgctgg

SEQ ID NO: 189094 - DNA, 25 bp, Artificial
  probe
  misc_feature (1)..(25): SEQ ID NO: 5287; WAN024EZY_at; Start 6; Stop 30
aacgacgggcgatagaaatggcaga

SEQ ID NO: 189095 - DNA, 25 bp, Artificial
  probe
  misc_feature (1)..(25): SEQ ID NO: 5287; WAN024EZY_at; Start 50; Stop 74
tctggaaactcctgacgagcaagtt

SEQ ID NO: 189096 - DNA, 25 bp, Artificial
  probe
  misc_feature (1)..(25): SEQ ID NO: 5287; WAN024EZY_at; Start 29; Stop 53
gagcgtttttcaacggtcaagtctg

SEQ ID NO: 189097 - DNA, 25 bp, Artificial
  probe
  misc_feature (1)..(25): SEQ ID NO: 5287; WAN024EZY_at; Start 40; Stop 64
aacggtcaagtctggaaactcctga

SEQ ID NO: 189098 - DNA, 25 bp, Artificial
  probe
  misc_feature (1)..(25): SEQ ID NO: 5287; WAN024EZY_at; Start 192; Stop 216
caatggcaataatctctacaccgta

SEQ ID NO: 189099 - DNA, 25 bp, Artificial
  probe
  misc_feature (1)..(25): SEQ ID NO: 5287; WAN024EZY_at; Start 204; Stop 228
tctctacaccgtattgaccaattaa

SEQ ID NO: 189100 - DNA, 25 bp, Artificial
  probe
  misc_feature (1)..(25): SEQ ID NO: 5287; WAN024EZY_at; Start 88; Stop 112
gacagaagcaccactttcattaacg

SEQ ID NO: 189101 - DNA, 25 bp, Artificial
  probe
  misc_feature (1)..(25): SEQ ID NO: 5287; WAN024EZY_at; Start 158; Stop 182
aaagcttcactttcacgactggccg

SEQ ID NO: 189102 - DNA, 25 bp, Artificial
  probe
  misc_feature (1)..(25): SEQ ID NO: 5287; WAN024EZY_at; Start 69; Stop 93
caagttcgctggcagaatagacaga

SEQ ID NO: 189103 - DNA, 25 bp, Artificial
  probe
  misc_feature (1)..(25): SEQ ID NO: 5287; WAN024EZY_at; Start 109; Stop 133
aacgataacatagctgacttcaggg

SEQ ID NO: 189104 - DNA, 25 bp, Artificial
  probe
  misc_feature (1)..(25): SEQ ID NO: 5287; WAN024EZY_at; Start 83; Stop 107
gaatagacagaagcaccactttcat

SEQ ID NO: 189105 - DNA, 25 bp, Artificial
  probe
  misc_feature (1)..(25): SEQ ID NO: 5378; WAN024EZZ_at; Start 52; Stop 76
gctcccagacgaggaactttcttga

SEQ ID NO: 189106 - DNA, 25 bp, Artificial
  probe
  misc_feature (1)..(25): SEQ ID NO: 5378; WAN024EZZ_at; Start 213; Stop 237
cactgtatcgacaacaaagtccaga

SEQ ID NO: 189107 - DNA, 25 bp, Artificial
  probe
  misc_feature (1)..(25): SEQ ID NO: 5378; WAN024EZZ_at; Start 168; Stop 192
aagagctgggctagctgtattgaca

SEQ ID NO: 189108 - DNA, 25 bp, Artificial
  probe
  misc_feature (1)..(25): SEQ ID NO: 5378; WAN024EZZ_at; Start 137; Stop 161
tagttttgttgagtccagctacgtg

SEQ ID NO: 189109 - DNA, 25 bp, Artificial
  probe
  misc_feature (1)..(25): SEQ ID NO: 5378; WAN024EZZ_at; Start 234; Stop 258
cagactctcagatagtttcttctga

SEQ ID NO: 189110 - DNA, 25 bp, Artificial
  probe
  misc_feature (1)..(25): SEQ ID NO: 5378; WAN024EZZ_at; Start 147; Stop 171
gagtccagctacgtgtgaaagaaga

SEQ ID NO: 189111 - DNA, 25 bp, Artificial
  probe
  misc_feature (1)..(25): SEQ ID NO: 5378; WAN024EZZ_at; Start 143; Stop 167
tgttgagtccagctacgtgtgaaag

SEQ ID NO: 189112 - DNA, 25 bp, Artificial
  probe
  misc_feature (1)..(25): SEQ ID NO: 5378; WAN024EZZ_at; Start 120; Stop 144
gacaatattttcagagatagttttg

SEQ ID NO: 189113 - DNA, 25 bp, Artificial
  probe
  misc_feature (1)..(25): SEQ ID NO: 5378; WAN024EZZ_at; Start 90; Stop 114
agtgatttttccttcttcctcgcgg

SEQ ID NO: 189114 - DNA, 25 bp, Artificial
  probe
  misc_feature (1)..(25): SEQ ID NO: 5378; WAN024EZZ_at; Start 227; Stop 251
caaagtccagactctcagatagttt

SEQ ID NO: 189115 - DNA, 25 bp, Artificial
  probe
  misc_feature (1)..(25): SEQ ID NO: 5378; WAN024EZZ_at; Start 29; Stop 53
cagcagcctgctcaaaggccttggc

SEQ ID NO: 189116 - DNA, 25 bp, Artificial
  probe
  misc_feature (1)..(25): SEQ ID NO: 5378; WAN024EZZ_at; Start 8; Stop 32
tttcagggatacgaaggaaaccagc

SEQ ID NO: 189117 - DNA, 25 bp, Artificial
  probe
  misc_feature (1)..(25): SEQ ID NO: 5378; WAN024EZZ_at; Start 201; Stop 225
aacttggttaaccactgtatcgaca

SEQ ID NO: 189118 - DNA, 25 bp, Artificial
  probe
  misc_feature (1)..(25): SEQ ID NO: 5378; WAN024EZZ_at; Start 172; Stop 196
gctgggctagctgtattgacattga

SEQ ID NO: 189119 - DNA, 25 bp, Artificial
  probe
  misc_feature (1)..(25): SEQ ID NO: 5378; WAN024EZZ_at; Start 207; Stop 231
gttaaccactgtatcgacaacaaag

SEQ ID NO: 189120 - DNA, 25 bp, Artificial
  probe
  misc_feature (1)..(25): SEQ ID NO: 5378; WAN024EZZ_at; Start 36; Stop 60
ctgctcaaaggccttggctcccaga

SEQ ID NO: 189121 - DNA, 25 bp, Artificial
  probe
  misc_feature (1)..(25): SEQ ID NO: 5378; WAN024EZZ_at; Start 162; Stop 186
tgaaagaagagctgggctagctgta

SEQ ID NO: 189122 - DNA, 25 bp, Artificial
  probe
  misc_feature (1)..(25): SEQ ID NO: 5378; WAN024EZZ_at; Start 47; Stop 71
ccttggctcccagacgaggaacttt

SEQ ID NO: 189123 - DNA, 25 bp, Artificial
  probe
  misc_feature (1)..(25): SEQ ID NO: 5378; WAN024EZZ_at; Start 195; Stop 219
gacaccaacttggttaaccactgta

SEQ ID NO: 189124 - DNA, 25 bp, Artificial
  probe
  misc_feature (1)..(25): SEQ ID NO: 5378; WAN024EZZ_at; Start 62; Stop 86
gaggaactttcttgatttgggcgcg

SEQ ID NO: 189125 - DNA, 25 bp, Artificial
  probe
  misc_feature (1)..(25): SEQ ID NO: 5378; WAN024EZZ_at; Start 155; Stop 179
ctacgtgtgaaagaagagctgggct

SEQ ID NO: 189126 - DNA, 25 bp, Artificial
  probe
  misc_feature (1)..(25): SEQ ID NO: 5378; WAN024EZZ_at; Start 1; Stop 25
ttgctactttcagggatacgaagga

SEQ ID NO: 189127 - DNA, 25 bp, Artificial
  probe
  misc_feature (1)..(25): SEQ ID NO: 5378; WAN024EZZ_at; Start 11; Stop 35
cagggatacgaaggaaaccagcagc

SEQ ID NO: 189128 - DNA, 25 bp, Artificial
  probe
  misc_feature (1)..(25): SEQ ID NO: 5378; WAN024EZZ_at; Start 15; Stop 39
gatacgaaggaaaccagcagcctgc

SEQ ID NO: 189129 - DNA, 25 bp, Artificial
  probe
  misc_feature (1)..(25): SEQ ID NO: 5378; WAN024EZZ_at; Start 218; Stop 242
tatcgacaacaaagtccagactctc

SEQ ID NO: 189130 - DNA, 25 bp, Artificial
  probe
  misc_feature (1)..(25): SEQ ID NO: 5378; WAN024EZZ_at; Start 183; Stop 207
tgtattgacattgacaccaacttgg

SEQ ID NO: 189131 - DNA, 25 bp, Artificial
  probe
  misc_feature (1)..(25): SEQ ID NO: 5378; WAN024EZZ_at; Start 177; Stop 201
gctagctgtattgacattgacacca

SEQ ID NO: 189132 - DNA, 25 bp, Artificial
  probe
  misc_feature (1)..(25): SEQ ID NO: 5378; WAN024EZZ_at; Start 66; Stop 90
aactttcttgatttgggcgcgtgaa

SEQ ID NO: 189133 - DNA, 25 bp, Artificial
  probe
  misc_feature (1)..(25): SEQ ID NO: 5378; WAN024EZZ_at; Start 19; Stop 43
cgaaggaaaccagcagcctgctcaa

SEQ ID NO: 189134 - DNA, 25 bp, Artificial
  probe
  misc_feature (1)..(25): SEQ ID NO: 5378; WAN024EZZ_at; Start 150; Stop 174
tccagctacgtgtgaaagaagagct

SEQ ID NO: 189135 - DNA, 25 bp, Artificial
  probe
  misc_feature (1)..(25): SEQ ID NO: 5378; WAN024EZZ_at; Start 77; Stop 101
tttgggcgcgtgaagtgatttttcc

SEQ ID NO: 189136 - DNA, 25 bp, Artificial
  probe
  misc_feature (1)..(25): SEQ ID NO: 5378; WAN024EZZ_at; Start 110; Stop 134
cgcggtatttgacaatattttcaga

SEQ ID NO: 189137 - DNA, 25 bp, Artificial
  probe
  misc_feature (1)..(25): SEQ ID NO: 5378; WAN024EZZ_at; Start 103; Stop 127
tcttcctcgcggtatttgacaatat

SEQ ID NO: 189138 - DNA, 25 bp, Artificial
  probe
  misc_feature (1)..(25): SEQ ID NO: 5378; WAN024EZZ_at; Start 131; Stop 155
cagagatagttttgttgagtccagc

SEQ ID NO: 189139 - DNA, 25 bp, Artificial
  probe
  misc_feature (1)..(25): SEQ ID NO: 5766; WAN024F22_at; Start 1178; Stop 1202
tgaaagatttccctgaagtcagcta

SEQ ID NO: 189140 - DNA, 25 bp, Artificial
  probe
  misc_feature (1)..(25): SEQ ID NO: 5766; WAN024F22_at; Start 898; Stop 922
gacaatctgcgcaatctcctcttgg

SEQ ID NO: 189141 - DNA, 25 bp, Artificial
  probe
  misc_feature (1)..(25): SEQ ID NO: 5766; WAN024F22_at; Start 715; Stop 739
ggttttgaacatgcgacggaccgta

SEQ ID NO: 189142 - DNA, 25 bp, Artificial
  probe
  misc_feature (1)..(25): SEQ ID NO: 5766; WAN024F22_at; Start 1318; Stop 1342
caagatcctcttgcggaattggtca

SEQ ID NO: 189143 - DNA, 25 bp, Artificial
  probe
  misc_feature (1)..(25): SEQ ID NO: 5766; WAN024F22_at; Start 798; Stop 822
tcagcaatccgttaagaaaaaggtc

SEQ ID NO: 189144 - DNA, 25 bp, Artificial
  probe
  misc_feature (1)..(25): SEQ ID NO: 5766; WAN024F22_at; Start 525; Stop 549
gaccttgcgttctatgacttatcag

SEQ ID NO: 189145 - DNA, 25 bp, Artificial
  probe
  misc_feature (1)..(25): SEQ ID NO: 5766; WAN024F22_at; Start 468; Stop 492
caaggaagccttgaccggtgcagtt

SEQ ID NO: 189146 - DNA, 25 bp, Artificial
  probe
  misc_feature (1)..(25): SEQ ID NO: 5766; WAN024F22_at; Start 1302; Stop 1326
tatcgcccgtcgtttgcaagatcct

SEQ ID NO: 189147 - DNA, 25 bp, Artificial
  probe
  misc_feature (1)..(25): SEQ ID NO: 5766; WAN024F22_at; Start 360; Stop 384
cattgcccgtgaagctggactcttt

SEQ ID NO: 189148 - DNA, 25 bp, Artificial
  probe
  misc_feature (1)..(25): SEQ ID NO: 5766; WAN024F22_at; Start 1367; Stop 1391
tcggtcaataccaacacgatgtcag

SEQ ID NO: 189149 - DNA, 25 bp, Artificial
  probe
  misc_feature (1)..(25): SEQ ID NO: 5766; WAN024F22_at; Start 76; Stop 100
gataccgttctaagtttgacagctg

SEQ ID NO: 189150 - DNA, 25 bp, Artificial
  probe
  misc_feature (1)..(25): SEQ ID NO: 5766; WAN024F22_at; Start 1222; Stop 1246
ggtgcttctgtctattctgccagcg

SEQ ID NO: 189151 - DNA, 25 bp, Artificial
  probe
  misc_feature (1)..(25): SEQ ID NO: 5766; WAN024F22_at; Start 1257; Stop 1281
tcaggagtttccagacttgaccgtt

SEQ ID NO: 189152 - DNA, 25 bp, Artificial
  probe
  misc_feature (1)..(25): SEQ ID NO: 5766; WAN024F22_at; Start 509; Stop 533
ccttatcggaagatgtgaccttgcg

SEQ ID NO: 189153 - DNA, 25 bp, Artificial
  probe
  misc_feature (1)..(25): SEQ ID NO: 5766; WAN024F22_at; Start 992; Stop 1016
tcgtggatgcaacaggaaaaatgct

SEQ ID NO: 189154 - DNA, 25 bp, Artificial
  probe
  misc_feature (1)..(25): SEQ ID NO: 5766; WAN024F22_at; Start 333; Stop 357
taaggaaaagcgtcgtaccaaggca

SEQ ID NO: 189155 - DNA, 25 bp, Artificial
  probe
  misc_feature (1)..(25): SEQ ID NO: 5766; WAN024F22_at; Start 958; Stop 982
gacccagcctttcgtacaggtgcca

SEQ ID NO: 189156 - DNA, 25 bp, Artificial
  probe
  misc_feature (1)..(25): SEQ ID NO: 5766; WAN024F22_at; Start 446; Stop 470
tctgtgaaggatttgcgactggcaa

SEQ ID NO: 189157 - DNA, 25 bp, Artificial
  probe
  misc_feature (1)..(25): SEQ ID NO: 5766; WAN024F22_at; Start 127; Stop 151
cgttatcgcaaggacatgactggta

SEQ ID NO: 189158 - DNA, 25 bp, Artificial
  probe
  misc_feature (1)..(25): SEQ ID NO: 5766; WAN024F22_at; Start 1124; Stop 1148
ccattggaaatggaacggccagtcg

SEQ ID NO: 189159 - DNA, 25 bp, Artificial
  probe
  misc_feature (1)..(25): SEQ ID NO: 5766; WAN024F22_at; Start 1453; Stop 1477
gtcaatgtcaatacagctagcccag

SEQ ID NO: 189160 - DNA, 25 bp, Artificial
  probe
  misc_feature (1)..(25): SEQ ID NO: 5766; WAN024F22_at; Start 648; Stop 672
tggaactatgcaaggctatcgtacc

SEQ ID NO: 189161 - DNA, 25 bp, Artificial
  probe
  misc_feature (1)..(25): SEQ ID NO: 5766; WAN024F22_at; Start 1348; Stop 1372
gatcctaagtcaattggtgtcggtc

SEQ ID NO: 189162 - DNA, 25 bp, Artificial
  probe
  misc_feature (1)..(25): SEQ ID NO: 5766; WAN024F22_at; Start 920; Stop 944
tggttgctccactgaaagggcgcgt

SEQ ID NO: 189163 - DNA, 25 bp, Artificial
  probe
  misc_feature (1)..(25): SEQ ID NO: 5766; WAN024F22_at; Start 207; Stop 231
tctcaatgaccgtaaggaagctgtc

SEQ ID NO: 189164 - DNA, 25 bp, Artificial
  probe
  misc_feature (1)..(25): SEQ ID NO: 5766; WAN024F22_at; Start 1275; Stop 1299
gaccgttgaaaaacgctctgccatt

SEQ ID NO: 189165 - DNA, 25 bp, Artificial
  probe
  misc_feature (1)..(25): SEQ ID NO: 5766; WAN024F22_at; Start 1820; Stop 1844
tcattgcagatcttctcaaaccagg

SEQ ID NO: 189166 - DNA, 25 bp, Artificial
  probe
  misc_feature (1)..(25): SEQ ID NO: 5766; WAN024F22_at; Start 666; Stop 690
tcgtaccttggctctcaatcgtggg

SEQ ID NO: 189167 - DNA, 25 bp, Artificial
  probe
  misc_feature (1)..(25): SEQ ID NO: 5766; WAN024F22_at; Start 1139; Stop 1163
cggccagtcgtgaaagtgaagcttt

SEQ ID NO: 189168 - DNA, 25 bp, Artificial
  probe
  misc_feature (1)..(25): SEQ ID NO: 5766; WAN024F22_at; Start 1479; Stop 1503
tcttctttcacacgtagctggactc

SEQ ID NO: 189169 - DNA, 25 bp, Artificial
  probe
  misc_feature (1)..(25): SEQ ID NO: 5766; WAN024F22_at; Start 1046; Stop 1070
cagcatcagctcgtcaaatcgaaga

SEQ ID NO: 189170 - DNA, 25 bp, Artificial
  probe
  misc_feature (1)..(25): SEQ ID NO: 5766; WAN024F22_at; Start 292; Stop 316
gccgaaaaattagcagacgttgaag

SEQ ID NO: 189171 - DNA, 25 bp, Artificial
  probe
  misc_feature (1)..(25): SEQ ID NO: 5766; WAN024F22_at; Start 1240; Stop 1264
gccagcgaacttgctcgtcaggagt

SEQ ID NO: 189172 - DNA, 25 bp, Artificial
  probe
  misc_feature (1)..(25): SEQ ID NO: 5766; WAN024F22_at; Start 2028; Stop 2052
tatcaaacaccctagtcaagtggtg

SEQ ID NO: 189173 - DNA, 25 bp, Artificial
  probe
  misc_feature (1)..(25): SEQ ID NO: 5377; WAN024F23_at; Start 42; Stop 66
gccaaattttctacaaagactgaac

SEQ ID NO: 189174 - DNA, 25 bp, Artificial
  probe
  misc_feature (1)..(25): SEQ ID NO: 5377; WAN024F23_at; Start 101; Stop 125
taacaagtctcttaaatagtgcaaa

SEQ ID NO: 189175 - DNA, 25 bp, Artificial
  probe
  misc_feature (1)..(25): SEQ ID NO: 5377; WAN024F23_at; Start 198; Stop 222
acatcctgttgagacaaggccgcca

SEQ ID NO: 189176 - DNA, 25 bp, Artificial
  probe
  misc_feature (1)..(25): SEQ ID NO: 5377; WAN024F23_at; Start 117; Stop 141
tagtgcaaaagatcggtcacaaaac

SEQ ID NO: 189177 - DNA, 25 bp, Artificial
  probe
  misc_feature (1)..(25): SEQ ID NO: 5377; WAN024F23_at; Start 37; Stop 61
gaagtgccaaattttctacaaagac

SEQ ID NO: 189178 - DNA, 25 bp, Artificial
  probe
  misc_feature (1)..(25): SEQ ID NO: 5377; WAN024F23_at; Start 142; Stop 166
gagtcatgctcttaccattgtcaaa

SEQ ID NO: 189179 - DNA, 25 bp, Artificial
  probe
  misc_feature (1)..(25): SEQ ID NO: 5377; WAN024F23_at; Start 203; Stop 227
ctgttgagacaaggccgccacataa

SEQ ID NO: 189180 - DNA, 25 bp, Artificial
  probe
  misc_feature (1)..(25): SEQ ID NO: 5377; WAN024F23_at; Start 5; Stop 29
taagcgaatcatttcaaacagattt

SEQ ID NO: 189181 - DNA, 25 bp, Artificial
  probe
  misc_feature (1)..(25): SEQ ID NO: 5377; WAN024F23_at; Start 189; Stop 213
gctttgggaacatcctgttgagaca

SEQ ID NO: 189182 - DNA, 25 bp, Artificial
  probe
  misc_feature (1)..(25): SEQ ID NO: 5377; WAN024F23_at; Start 155; Stop 179
accattgtcaaaaagaagattcaag

SEQ ID NO: 189183 - DNA, 25 bp, Artificial
  probe
  misc_feature (1)..(25): SEQ ID NO: 5377; WAN024F23_at; Start 148; Stop 172
tgctcttaccattgtcaaaaagaag

SEQ ID NO: 189184 - DNA, 25 bp, Artificial
  probe
  misc_feature (1)..(25): SEQ ID NO: 5377; WAN024F23_at; Start 51; Stop 75
tctacaaagactgaactatgatgag

SEQ ID NO: 189185 - DNA, 25 bp, Artificial
  probe
  misc_feature (1)..(25): SEQ ID NO: 5377; WAN024F23_at; Start 196; Stop 220
gaacatcctgttgagacaaggccgc

SEQ ID NO: 189186 - DNA, 25 bp, Artificial
  probe
  misc_feature (1)..(25): SEQ ID NO: 5377; WAN024F23_at; Start 55; Stop 79
caaagactgaactatgatgagtatt

SEQ ID NO: 189187 - DNA, 25 bp, Artificial
  probe
  misc_feature (1)..(25): SEQ ID NO: 5377; WAN024F23_at; Start 193; Stop 217
tgggaacatcctgttgagacaaggc

SEQ ID NO: 189188 - DNA, 25 bp, Artificial
  probe
  misc_feature (1)..(25): SEQ ID NO: 5377; WAN024F23_at; Start 216; Stop 240
gccgccacataatcatccaaggctg

SEQ ID NO: 189189 - DNA, 25 bp, Artificial
  probe
  misc_feature (1)..(25): SEQ ID NO: 5377; WAN024F23_at; Start 130; Stop 154
cggtcacaaaacgagtcatgctctt

SEQ ID NO: 189190 - DNA, 25 bp, Artificial
  probe
  misc_feature (1)..(25): SEQ ID NO: 5377; WAN024F23_at; Start 185; Stop 209
caaagctttgggaacatcctgttga

SEQ ID NO: 189191 - DNA, 25 bp, Artificial
  probe
  misc_feature (1)..(25): SEQ ID NO: 5377; WAN024F23_at; Start 210; Stop 234
gacaaggccgccacataatcatcca

SEQ ID NO: 189192 - DNA, 25 bp, Artificial
  probe
  misc_feature (1)..(25): SEQ ID NO: 5377; WAN024F23_at; Start 21; Stop 45
aacagatttttttgaggaagtgcca

SEQ ID NO: 189193 - DNA, 25 bp, Artificial
  probe
  misc_feature (1)..(25): SEQ ID NO: 5377; WAN024F23_at; Start 162; Stop 186
tcaaaaagaagattcaagcaagaca

SEQ ID NO: 189194 - DNA, 25 bp, Artificial
  probe
  misc_feature (1)..(25): SEQ ID NO: 5377; WAN024F23_at; Start 110; Stop 134
tcttaaatagtgcaaaagatcggtc

SEQ ID NO: 189195 - DNA, 25 bp, Artificial
  probe
  misc_feature (1)..(25): SEQ ID NO: 5377; WAN024F23_at; Start 182; Stop 206
agacaaagctttgggaacatcctgt

SEQ ID NO: 189196 - DNA, 25 bp, Artificial
  probe
  misc_feature (1)..(25): SEQ ID NO: 5377; WAN024F23_at; Start 134; Stop 158
cacaaaacgagtcatgctcttacca

SEQ ID NO: 189197 - DNA, 25 bp, Artificial
  probe
  misc_feature (1)..(25): SEQ ID NO: 5377; WAN024F23_at; Start 127; Stop 151
gatcggtcacaaaacgagtcatgct

SEQ ID NO: 189198 - DNA, 25 bp, Artificial
  probe
  misc_feature (1)..(25): SEQ ID NO: 5377; WAN024F23_at; Start 213; Stop 237
aaggccgccacataatcatccaagg

SEQ ID NO: 189199 - DNA, 25 bp, Artificial
  probe
  misc_feature (1)..(25): SEQ ID NO: 5377; WAN024F23_at; Start 176; Stop 200
caagcaagacaaagctttgggaaca

SEQ ID NO: 189200 - DNA, 25 bp, Artificial
  probe
  misc_feature (1)..(25): SEQ ID NO: 5377; WAN024F23_at; Start 121; Stop 145
gcaaaagatcggtcacaaaacgagt

SEQ ID NO: 189201 - DNA, 25 bp, Artificial
  probe
  misc_feature (1)..(25): SEQ ID NO: 5377; WAN024F23_at; Start 172; Stop 196
gattcaagcaagacaaagctttggg

SEQ ID NO: 189202 - DNA, 25 bp, Artificial
  probe
  misc_feature (1)..(25): SEQ ID NO: 5377; WAN024F23_at; Start 1; Stop 25
ttgctaagcgaatcatttcaaacag

SEQ ID NO: 189203 - DNA, 25 bp, Artificial
  probe
  misc_feature (1)..(25): SEQ ID NO: 5377; WAN024F23_at; Start 113; Stop 137
taaatagtgcaaaagatcggtcaca

SEQ ID NO: 189204 - DNA, 25 bp, Artificial
  probe
  misc_feature (1)..(25): SEQ ID NO: 5377; WAN024F23_at; Start 33; Stop 57
tgaggaagtgccaaattttctacaa

SEQ ID NO: 189205 - DNA, 25 bp, Artificial
  probe
  misc_feature (1)..(25): SEQ ID NO: 5377; WAN024F23_at; Start 86; Stop 110
ccctgtttgaacaattaacaagtct

SEQ ID NO: 189206 - DNA, 25 bp, Artificial
  probe
  misc_feature (1)..(25): SEQ ID NO: 5377; WAN024F23_at; Start 179; Stop 203
gcaagacaaagctttgggaacatcc

SEQ ID NO: 189207 - DNA, 25 bp, Artificial
  probe
  misc_feature (1)..(25): SEQ ID NO: 2794; WAN024F24_at; Start 487; Stop 511
gctactattctatcccgtgtgcaac

SEQ ID NO: 189208 - DNA, 25 bp, Artificial
  probe
  misc_feature (1)..(25): SEQ ID NO: 2794; WAN024F24_at; Start 828; Stop 852
gagcatgactcgttttgtgaccgat

SEQ ID NO: 189209 - DNA, 25 bp, Artificial
  probe
  misc_feature (1)..(25): SEQ ID NO: 2794; WAN024F24_at; Start 1101; Stop 1125
tgctacgctgagacaggaagttgcc

SEQ ID NO: 189210 - DNA, 25 bp, Artificial
  probe
  misc_feature (1)..(25): SEQ ID NO: 2794; WAN024F24_at; Start 650; Stop 674
tgtctattttggatcaagccctgag

SEQ ID NO: 189211 - DNA, 25 bp, Artificial
  probe
  misc_feature (1)..(25): SEQ ID NO: 2794; WAN024F24_at; Start 226; Stop 250
tatatttgtcaagcagtgacggacg

SEQ ID NO: 189212 - DNA, 25 bp, Artificial
  probe
  misc_feature (1)..(25): SEQ ID NO: 2794; WAN024F24_at; Start 416; Stop 440
taaagacgctggaagaaccaacaca

SEQ ID NO: 189213 - DNA, 25 bp, Artificial
  probe
  misc_feature (1)..(25): SEQ ID NO: 2794; WAN024F24_at; Start 754; Stop 778
tatgtggcggccttgtctcaacagg

SEQ ID NO: 189214 - DNA, 25 bp, Artificial
  probe
  misc_feature (1)..(25): SEQ ID NO: 2794; WAN024F24_at; Start 321; Stop 345
tgataaatctacctatgcgcctagc

SEQ ID NO: 189215 - DNA, 25 bp, Artificial
  probe
  misc_feature (1)..(25): SEQ ID NO: 2794; WAN024F24_at; Start 1069; Stop 1093
ccagctctatcaggagcggttgaaa

SEQ ID NO: 189216 - DNA, 25 bp, Artificial
  probe
  misc_feature (1)..(25): SEQ ID NO: 2794; WAN024F24_at; Start 375; Stop 399
tgaggttcacatgctgtctacaggg

SEQ ID NO: 189217 - DNA, 25 bp, Artificial
  probe
  misc_feature (1)..(25): SEQ ID NO: 2794; WAN024F24_at; Start 1213; Stop 1237
tatcgtgtcgatcgcaataaagtgc

SEQ ID NO: 189218 - DNA, 25 bp, Artificial
  probe
  misc_feature (1)..(25): SEQ ID NO: 2794; WAN024F24_at; Start 1462; Stop 1486
tttggtaatatcctcagtcaggcgg

SEQ ID NO: 189219 - DNA, 25 bp, Artificial
  probe
  misc_feature (1)..(25): SEQ ID NO: 2794; WAN024F24_at; Start 1408; Stop 1432
gagtctaacttcaatgctggtcaaa

SEQ ID NO: 189220 - DNA, 25 bp, Artificial
  probe
  misc_feature (1)..(25): SEQ ID NO: 2794; WAN024F24_at; Start 1518; Stop 1542
catggaggaatggaaagaagttcgc

SEQ ID NO: 189221 - DNA, 25 bp, Artificial
  probe
  misc_feature (1)..(25): SEQ ID NO: 2794; WAN024F24_at; Start 169; Stop 193
tttgccaaggctatgaactgtccca

SEQ ID NO: 189222 - DNA, 25 bp, Artificial
  probe
  misc_feature (1)..(25): SEQ ID NO: 2794; WAN024F24_at; Start 693; Stop 717
gctgacgactgctatctctgaagaa

SEQ ID NO: 189223 - DNA, 25 bp, Artificial
  probe
  misc_feature (1)..(25): SEQ ID NO: 2794; WAN024F24_at; Start 336; Stop 360
tgcgcctagccttgctcgttataag

SEQ ID NO: 189224 - DNA, 25 bp, Artificial
  probe
  misc_feature (1)..(25): SEQ ID NO: 2794; WAN024F24_at; Start 1167; Stop 1191
acaagttgcaccagctcctagtcga

SEQ ID NO: 189225 - DNA, 25 bp, Artificial
  probe
  misc_feature (1)..(25): SEQ ID NO: 2794; WAN024F24_at; Start 1371; Stop 1395
ggttgctgccaatgaacaccatgct

SEQ ID NO: 189226 - DNA, 25 bp, Artificial
  probe
  misc_feature (1)..(25): SEQ ID NO: 2794; WAN024F24_at; Start 1152; Stop 1176
aggtgcggttcctaaacaagttgca

SEQ ID NO: 189227 - DNA, 25 bp, Artificial
  probe
  misc_feature (1)..(25): SEQ ID NO: 2794; WAN024F24_at; Start 1022; Stop 1046
tttatgctgaaatgatgaccgtccg

SEQ ID NO: 189228 - DNA, 25 bp, Artificial
  probe
  misc_feature (1)..(25): SEQ ID NO: 2794; WAN024F24_at; Start 595; Stop 619
ccagaggctgtggaaatcattgcca

SEQ ID NO: 189229 - DNA, 25 bp, Artificial
  probe
  misc_feature (1)..(25): SEQ ID NO: 2794; WAN024F24_at; Start 1116; Stop 1140
ggaagttgcccgtctcaaacaagag

SEQ ID NO: 189230 - DNA, 25 bp, Artificial
  probe
  misc_feature (1)..(25): SEQ ID NO: 2794; WAN024F24_at; Start 1193; Stop 1217
cagctacgggcaaaacagtctatcg

SEQ ID NO: 189231 - DNA, 25 bp, Artificial
  probe
  misc_feature (1)..(25): SEQ ID NO: 2794; WAN024F24_at; Start 1591; Stop 1615
gaagaaagcctgattccagaaggat

SEQ ID NO: 189232 - DNA, 25 bp, Artificial
  probe
  misc_feature (1)..(25): SEQ ID NO: 2794; WAN024F24_at; Start 1534; Stop 1558
gaagttcgcgcagccttttcagcca

SEQ ID NO: 189233 - DNA, 25 bp, Artificial
  probe
  misc_feature (1)..(25): SEQ ID NO: 2794; WAN024F24_at; Start 1475; Stop 1499
tcagtcaggcggcaggtttttcacc

SEQ ID NO: 189234 - DNA, 25 bp, Artificial
  probe
  misc_feature (1)..(25): SEQ ID NO: 2794; WAN024F24_at; Start 184; Stop 208
aactgtcccaatcaagtgggtggcg

SEQ ID NO: 189235 - DNA, 25 bp, Artificial
  probe
  misc_feature (1)..(25): SEQ ID NO: 2794; WAN024F24_at; Start 70; Stop 94
gctaagactcttaaacaagcggtgg

SEQ ID NO: 189236 - DNA, 25 bp, Artificial
  probe
  misc_feature (1)..(25): SEQ ID NO: 2794; WAN024F24_at; Start 202; Stop 226
ggtggcgaaccttgcaataactgct

SEQ ID NO: 189237 - DNA, 25 bp, Artificial
  probe
  misc_feature (1)..(25): SEQ ID NO: 2794; WAN024F24_at; Start 675; Stop 699
tttgacacagggaaatgagctgacg

SEQ ID NO: 189238 - DNA, 25 bp, Artificial
  probe
  misc_feature (1)..(25): SEQ ID NO: 2794; WAN024F24_at; Start 453; Stop 477
tattttggccactactgaattgcac

SEQ ID NO: 189239 - DNA, 25 bp, Artificial
  probe
  misc_feature (1)..(25): SEQ ID NO: 2794; WAN024F24_at; Start 1247; Stop 1271
tacaagaggccgtcgaaaatcctga

SEQ ID NO: 189240 - DNA, 25 bp, Artificial
  probe
  misc_feature (1)..(25): SEQ ID NO: 2794; WAN024F24_at; Start 580; Stop 604
aatatcagttctgaaccagaggctg

SEQ ID NO: 189241 - DNA, 25 bp, Artificial
  probe
  misc_feature (1)..(25): SEQ ID NO: 3125; WAN024F25_at; Start 27; Stop 51
tattattggcgaaactcatgacatt

SEQ ID NO: 189242 - DNA, 25 bp, Artificial
  probe
  misc_feature (1)..(25): SEQ ID NO: 3125; WAN024F25_at; Start 131; Stop 155
tcaaagattacatccttgttctcgt

SEQ ID NO: 189243 - DNA, 25 bp, Artificial
  probe
  misc_feature (1)..(25): SEQ ID NO: 3125; WAN024F25_at; Start 76; Stop 100
catggctacctcaactgtgatatca

SEQ ID NO: 189244 - DNA, 25 bp, Artificial
  probe
  misc_feature (1)..(25): SEQ ID NO: 3125; WAN024F25_at; Start 163; Stop 187
ttcaacgtaactagcaatcccacct

SEQ ID NO: 189245 - DNA, 25 bp, Artificial
  probe
  misc_feature (1)..(25): SEQ ID NO: 3125; WAN024F25_at; Start 207; Stop 231
tttgttccaaaccttggcgcttatc

SEQ ID NO: 189246 - DNA, 25 bp, Artificial
  probe
  misc_feature (1)..(25): SEQ ID NO: 3125; WAN024F25_at; Start 191; Stop 215
taatgataatgcttggtttgttcca

SEQ ID NO: 189247 - DNA, 25 bp, Artificial
  probe
  misc_feature (1)..(25): SEQ ID NO: 3125; WAN024F25_at; Start 65; Stop 89
gttgtgtactgcatggctacctcaa

SEQ ID NO: 189248 - DNA, 25 bp, Artificial
  probe
  misc_feature (1)..(25): SEQ ID NO: 3125; WAN024F25_at; Start 79; Stop 103
ggctacctcaactgtgatatcatcc

SEQ ID NO: 189249 - DNA, 25 bp, Artificial
  probe
  misc_feature (1)..(25): SEQ ID NO: 3125; WAN024F25_at; Start 174; Stop 198
tagcaatcccaccttcataatgata

SEQ ID NO: 189250 - DNA, 25 bp, Artificial
  probe
  misc_feature (1)..(25): SEQ ID NO: 3125; WAN024F25_at; Start 144; Stop 168
ccttgttctcgttgatatattcaac

SEQ ID NO: 189251 - DNA, 25 bp, Artificial
  probe
  misc_feature (1)..(25): SEQ ID NO: 3125; WAN024F25_at; Start 169; Stop 193
gtaactagcaatcccaccttcataa

SEQ ID NO: 189252 - DNA, 25 bp, Artificial
  probe
  misc_feature (1)..(25): SEQ ID NO: 3125; WAN024F25_at; Start 20; Stop 44
gtatgaatattattggcgaaactca

SEQ ID NO: 189253 - DNA, 25 bp, Artificial
  probe
  misc_feature (1)..(25): SEQ ID NO: 3125; WAN024F25_at; Start 34; Stop 58
ggcgaaactcatgacattttcatgg

SEQ ID NO: 189254 - DNA, 25 bp, Artificial
  probe
  misc_feature (1)..(25): SEQ ID NO: 3125; WAN024F25_at; Start 200; Stop 224
tgcttggtttgttccaaaccttggc

SEQ ID NO: 189255 - DNA, 25 bp, Artificial
  probe
  misc_feature (1)..(25): SEQ ID NO: 3125; WAN024F25_at; Start 121; Stop 145
gattggtgtatcaaagattacatcc

SEQ ID NO: 189256 - DNA, 25 bp, Artificial
  probe
  misc_feature (1)..(25): SEQ ID NO: 3125; WAN024F25_at; Start 159; Stop 183
tatattcaacgtaactagcaatccc

SEQ ID NO: 189257 - DNA, 25 bp, Artificial
  probe
  misc_feature (1)..(25): SEQ ID NO: 3125; WAN024F25_at; Start 182; Stop 206
ccaccttcataatgataatgcttgg

SEQ ID NO: 189258 - DNA, 25 bp, Artificial
  probe
  misc_feature (1)..(25): SEQ ID NO: 3125; WAN024F25_at; Start 67; Stop 91
tgtgtactgcatggctacctcaact

SEQ ID NO: 189259 - DNA, 25 bp, Artificial
  probe
  misc_feature (1)..(25): SEQ ID NO: 3125; WAN024F25_at; Start 103; Stop 127
catctcaccgtctgtatagattggt

SEQ ID NO: 189260 - DNA, 25 bp, Artificial
  probe
  misc_feature (1)..(25): SEQ ID NO: 3125; WAN024F25_at; Start 141; Stop 165
catccttgttctcgttgatatattc

SEQ ID NO: 189261 - DNA, 25 bp, Artificial
  probe
  misc_feature (1)..(25): SEQ ID NO: 3125; WAN024F25_at; Start 82; Stop 106
tacctcaactgtgatatcatccatc

SEQ ID NO: 189262 - DNA, 25 bp, Artificial
  probe
  misc_feature (1)..(25): SEQ ID NO: 3125; WAN024F25_at; Start 39; Stop 63
aactcatgacattttcatggtaacc

SEQ ID NO: 189263 - DNA, 25 bp, Artificial
  probe
  misc_feature (1)..(25): SEQ ID NO: 3125; WAN024F25_at; Start 91; Stop 115
tgtgatatcatccatctcaccgtct

SEQ ID NO: 189264 - DNA, 25 bp, Artificial
  probe
  misc_feature (1)..(25): SEQ ID NO: 3125; WAN024F25_at; Start 25; Stop 49
aatattattggcgaaactcatgaca

SEQ ID NO: 189265 - DNA, 25 bp, Artificial
  probe
  misc_feature (1)..(25): SEQ ID NO: 3125; WAN024F25_at; Start 71; Stop 95
tactgcatggctacctcaactgtga

SEQ ID NO: 189266 - DNA, 25 bp, Artificial
  probe
  misc_feature (1)..(25): SEQ ID NO: 3125; WAN024F25_at; Start 98; Stop 122
tcatccatctcaccgtctgtataga

SEQ ID NO: 189267 - DNA, 25 bp, Artificial
  probe
  misc_feature (1)..(25): SEQ ID NO: 3125; WAN024F25_at; Start 166; Stop 190
aacgtaactagcaatcccaccttca

SEQ ID NO: 189268 - DNA, 25 bp, Artificial
  probe
  misc_feature (1)..(25): SEQ ID NO: 3125; WAN024F25_at; Start 124; Stop 148
tggtgtatcaaagattacatccttg

SEQ ID NO: 189269 - DNA, 25 bp, Artificial
  probe
  misc_feature (1)..(25): SEQ ID NO: 3125; WAN024F25_at; Start 30; Stop 54
tattggcgaaactcatgacattttc

SEQ ID NO: 189270 - DNA, 25 bp, Artificial
  probe
  misc_feature (1)..(25): SEQ ID NO: 3125; WAN024F25_at; Start 195; Stop 219
gataatgcttggtttgttccaaacc

SEQ ID NO: 189271 - DNA, 25 bp, Artificial
  probe
  misc_feature (1)..(25): SEQ ID NO: 3125; WAN024F25_at; Start 94; Stop 118
gatatcatccatctcaccgtctgta

SEQ ID NO: 189272 - DNA, 25 bp, Artificial
  probe
  misc_feature (1)..(25): SEQ ID NO: 3125; WAN024F25_at; Start 136; Stop 160
gattacatccttgttctcgttgata

SEQ ID NO: 189273 - DNA, 25 bp, Artificial
  probe
  misc_feature (1)..(25): SEQ ID NO: 3125; WAN024F25_at; Start 74; Stop 98
tgcatggctacctcaactgtgatat

SEQ ID NO: 189274 - DNA, 25 bp, Artificial
  probe
  misc_feature (1)..(25): SEQ ID NO: 3125; WAN024F25_at; Start 110; Stop 134
ccgtctgtatagattggtgtatcaa

SEQ ID NO: 189275 - DNA, 25 bp, Artificial
  probe
  misc_feature (1)..(25): SEQ ID NO: 1089; WAN024F26_at; Start 109; Stop 133
ttggcagccacacgagccttggcag

SEQ ID NO: 189276 - DNA, 25 bp, Artificial
  probe
  misc_feature (1)..(25): SEQ ID NO: 1089; WAN024F26_at; Start 3; Stop 27
gaagagttctgtttcagcagggtta

SEQ ID NO: 189277 - DNA, 25 bp, Artificial
  probe
  misc_feature (1)..(25): SEQ ID NO: 1089; WAN024F26_at; Start 84; Stop 108
tttacgtgtgacttcacgcgcacgc

SEQ ID NO: 189278 - DNA, 25 bp, Artificial
  probe
  misc_feature (1)..(25): SEQ ID NO: 1089; WAN024F26_at; Start 207; Stop 231
gaagaggcgattggtaatcttgacc

SEQ ID NO: 189279 - DNA, 25 bp, Artificial
  probe
  misc_feature (1)..(25): SEQ ID NO: 1089; WAN024F26_at; Start 283; Stop 307
gggtgtttaactgagataactgcag

SEQ ID NO: 189280 - DNA, 25 bp, Artificial
  probe
  misc_feature (1)..(25): SEQ ID NO: 1089; WAN024F26_at; Start 305; Stop 329
cagttaagccttcgcgaacatcttc

SEQ ID NO: 189281 - DNA, 25 bp, Artificial
  probe
  misc_feature (1)..(25): SEQ ID NO: 1089; WAN024F26_at; Start 300; Stop 324
aactgcagttaagccttcgcgaaca

SEQ ID NO: 189282 - DNA, 25 bp, Artificial
  probe
  misc_feature (1)..(25): SEQ ID NO: 1089; WAN024F26_at; Start 79; Stop 103
gattttttacgtgtgacttcacgcg

SEQ ID NO: 189283 - DNA, 25 bp, Artificial
  probe
  misc_feature (1)..(25): SEQ ID NO: 1089; WAN024F26_at; Start 199; Stop 223
gcttcactgaagaggcgattggtaa

SEQ ID NO: 189284 - DNA, 25 bp, Artificial
  probe
  misc_feature (1)..(25): SEQ ID NO: 1089; WAN024F26_at; Start 42; Stop 66
tgctagtttccctggaaggttggaa

SEQ ID NO: 189285 - DNA, 25 bp, Artificial
  probe
  misc_feature (1)..(25): SEQ ID NO: 1089; WAN024F26_at; Start 232; Stop 256
acttcgctatttcccaatttggtct

SEQ ID NO: 189286 - DNA, 25 bp, Artificial
  probe
  misc_feature (1)..(25): SEQ ID NO: 1089; WAN024F26_at; Start 343; Stop 367
tcttcattgtctttcagtaacttat

SEQ ID NO: 189287 - DNA, 25 bp, Artificial
  probe
  misc_feature (1)..(25): SEQ ID NO: 1089; WAN024F26_at; Start 141; Stop 165
tcctttttctacgatacgtttggca

SEQ ID NO: 189288 - DNA, 25 bp, Artificial
  probe
  misc_feature (1)..(25): SEQ ID NO: 1089; WAN024F26_at; Start 228; Stop 252
gaccacttcgctatttcccaatttg

SEQ ID NO: 189289 - DNA, 25 bp, Artificial
  probe
  misc_feature (1)..(25): SEQ ID NO: 1089; WAN024F26_at; Start 215; Stop 239
gattggtaatcttgaccacttcgct

SEQ ID NO: 189290 - DNA, 25 bp, Artificial
  probe
  misc_feature (1)..(25): SEQ ID NO: 1089; WAN024F26_at; Start 130; Stop 154
gcagccaaaattcctttttctacga

SEQ ID NO: 189291 - DNA, 25 bp, Artificial
  probe
  misc_feature (1)..(25): SEQ ID NO: 1089; WAN024F26_at; Start 271; Stop 295
aactgtggatttgggtgtttaactg

SEQ ID NO: 189292 - DNA, 25 bp, Artificial
  probe
  misc_feature (1)..(25): SEQ ID NO: 1089; WAN024F26_at; Start 121; Stop 145
cgagccttggcagccaaaattcctt

SEQ ID NO: 189293 - DNA, 25 bp, Artificial
  probe
  misc_feature (1)..(25): SEQ ID NO: 1089; WAN024F26_at; Start 260; Stop 284
tttgtccttcaaactgtggatttgg

SEQ ID NO: 189294 - DNA, 25 bp, Artificial
  probe
  misc_feature (1)..(25): SEQ ID NO: 1089; WAN024F26_at; Start 157; Stop 181
cgtttggcaatctgtggattttcca

SEQ ID NO: 189295 - DNA, 25 bp, Artificial
  probe
  misc_feature (1)..(25): SEQ ID NO: 1089; WAN024F26_at; Start 20; Stop 44
cagggttattagaagaacagtctgc

SEQ ID NO: 189296 - DNA, 25 bp, Artificial
  probe
  misc_feature (1)..(25): SEQ ID NO: 1089; WAN024F26_at; Start 72; Stop 96
caaaccagattttttacgtgtgact

SEQ ID NO: 189297 - DNA, 25 bp, Artificial
  probe
  misc_feature (1)..(25): SEQ ID NO: 1089; WAN024F26_at; Start 297; Stop 321
gataactgcagttaagccttcgcga

SEQ ID NO: 189298 - DNA, 25 bp, Artificial
  probe
  misc_feature (1)..(25): SEQ ID NO: 1089; WAN024F26_at; Start 29; Stop 53
tagaagaacagtctgctagtttccc

SEQ ID NO: 189299 - DNA, 25 bp, Artificial
  probe
  misc_feature (1)..(25): SEQ ID NO: 1089; WAN024F26_at; Start 105; Stop 129
acgcttggcagccacacgagccttg

SEQ ID NO: 189300 - DNA, 25 bp, Artificial
  probe
  misc_feature (1)..(25): SEQ ID NO: 1089; WAN024F26_at; Start 15; Stop 39
ttcagcagggttattagaagaacag

SEQ ID NO: 189301 - DNA, 25 bp, Artificial
  probe
  misc_feature (1)..(25): SEQ ID NO: 1089; WAN024F26_at; Start 173; Stop 197
gattttccatgaggaaatcggagaa

SEQ ID NO: 189302 - DNA, 25 bp, Artificial
  probe
  misc_feature (1)..(25): SEQ ID NO: 1089; WAN024F26_at; Start 164; Stop 188
caatctgtggattttccatgaggaa

SEQ ID NO: 189303 - DNA, 25 bp, Artificial
  probe
  misc_feature (1)..(25): SEQ ID NO: 1089; WAN024F26_at; Start 37; Stop 61
cagtctgctagtttccctggaaggt

SEQ ID NO: 189304 - DNA, 25 bp, Artificial
  probe
  misc_feature (1)..(25): SEQ ID NO: 1089; WAN024F26_at; Start 34; Stop 58
gaacagtctgctagtttccctggaa

SEQ ID NO: 189305 - DNA, 25 bp, Artificial
  probe
  misc_feature (1)..(25): SEQ ID NO: 1089; WAN024F26_at; Start 150; Stop 174
tacgatacgtttggcaatctgtgga

SEQ ID NO: 189306 - DNA, 25 bp, Artificial
  probe
  misc_feature (1)..(25): SEQ ID NO: 1089; WAN024F26_at; Start 88; Stop 112
cgtgtgacttcacgcgcacgcttgg

SEQ ID NO: 189307 - DNA, 25 bp, Artificial
  probe
  misc_feature (1)..(25): SEQ ID NO: 1089; WAN024F26_at; Start 116; Stop 140
ccacacgagccttggcagccaaaat

SEQ ID NO: 189308 - DNA, 25 bp, Artificial
  probe
  misc_feature (1)..(25): SEQ ID NO: 1089; WAN024F26_at; Start 92; Stop 116
tgacttcacgcgcacgcttggcagc

SEQ ID NO: 189309 - DNA, 25 bp, Artificial
  probe
  misc_feature (1)..(25): SEQ ID NO: 1361; WAN024F27_at; Start 1318; Stop 1342
tcagccaaatctggtcgtaaccgtg

SEQ ID NO: 189310 - DNA, 25 bp, Artificial
  probe
  misc_feature (1)..(25): SEQ ID NO: 1361; WAN024F27_at; Start 1769; Stop 1793
tggacgatcatcagctgtgggaaac

SEQ ID NO: 189311 - DNA, 25 bp, Artificial
  probe
  misc_feature (1)..(25): SEQ ID NO: 1361; WAN024F27_at; Start 1799; Stop 1823
tggatcccgaacatcgcttgatggc

SEQ ID NO: 189312 - DNA, 25 bp, Artificial
  probe
  misc_feature (1)..(25): SEQ ID NO: 1361; WAN024F27_at; Start 71; Stop 95
tagaggctgttcgtatgcgtccagg

SEQ ID NO: 189313 - DNA, 25 bp, Artificial
  probe
  misc_feature (1)..(25): SEQ ID NO: 1361; WAN024F27_at; Start 1784; Stop 1808
tgtgggaaacaaccatggatcccga

SEQ ID NO: 189314 - DNA, 25 bp, Artificial
  probe
  misc_feature (1)..(25): SEQ ID NO: 1361; WAN024F27_at; Start 1652; Stop 1676
ttaaagaatatatccagccgggtgc

SEQ ID NO: 189315 - DNA, 25 bp, Artificial
  probe
  misc_feature (1)..(25): SEQ ID NO: 1361; WAN024F27_at; Start 1889; Stop 1913
tagagcctcgtcgtgagtttatcga

SEQ ID NO: 189316 - DNA, 25 bp, Artificial
  probe
  misc_feature (1)..(25): SEQ ID NO: 1361; WAN024F27_at; Start 1193; Stop 1217
gtgaagtcacacgtaaaaaatctgg

SEQ ID NO: 189317 - DNA, 25 bp, Artificial
  probe
  misc_feature (1)..(25): SEQ ID NO: 1361; WAN024F27_at; Start 1348; Stop 1372
caggctatccttccaattcgcggta

SEQ ID NO: 189318 - DNA, 25 bp, Artificial
  probe
  misc_feature (1)..(25): SEQ ID NO: 1361; WAN024F27_at; Start 1446; Stop 1470
catgggaacaggatttggcgcagaa

SEQ ID NO: 189319 - DNA, 25 bp, Artificial
  probe
  misc_feature (1)..(25): SEQ ID NO: 1361; WAN024F27_at; Start 1333; Stop 1357
cgtaaccgtgagtttcaggctatcc

SEQ ID NO: 189320 - DNA, 25 bp, Artificial
  probe
  misc_feature (1)..(25): SEQ ID NO: 1361; WAN024F27_at; Start 1041; Stop 1065
caaattgggaaatagcgaagtggtc

SEQ ID NO: 189321 - DNA, 25 bp, Artificial
  probe
  misc_feature (1)..(25): SEQ ID NO: 1361; WAN024F27_at; Start 1286; Stop 1310
tcttcatcgtcgaaggagactcagc

SEQ ID NO: 189322 - DNA, 25 bp, Artificial
  probe
  misc_feature (1)..(25): SEQ ID NO: 1361; WAN024F27_at; Start 1514; Stop 1538
ccgatgccgatgtcgatggagccca

SEQ ID NO: 189323 - DNA, 25 bp, Artificial
  probe
  misc_feature (1)..(25): SEQ ID NO: 1361; WAN024F27_at; Start 1688; Stop 1712
tcaaactccaagaagctttagcccg

SEQ ID NO: 189324 - DNA, 25 bp, Artificial
  probe
  misc_feature (1)..(25): SEQ ID NO: 1361; WAN024F27_at; Start 1714; Stop 1738
tatagtgaaggtcgtaccaaaccga

SEQ ID NO: 189325 - DNA, 25 bp, Artificial
  probe
  misc_feature (1)..(25): SEQ ID NO: 1361; WAN024F27_at; Start 1233; Stop 1257
ccttccagggaaactagcagactgt

SEQ ID NO: 189326 - DNA, 25 bp, Artificial
  probe
  misc_feature (1)..(25): SEQ ID NO: 1361; WAN024F27_at; Start 440; Stop 464
ttcattaccaagaataccgtcgtgg

SEQ ID NO: 189327 - DNA, 25 bp, Artificial
  probe
  misc_feature (1)..(25): SEQ ID NO: 1361; WAN024F27_at; Start 772; Stop 796
gatatcacagttgaggtagccatgc

SEQ ID NO: 189328 - DNA, 25 bp, Artificial
  probe
  misc_feature (1)..(25): SEQ ID NO: 1361; WAN024F27_at; Start 346; Stop 370
tacaaggtttcaggtggtcttcacg

SEQ ID NO: 189329 - DNA, 25 bp, Artificial
  probe
  misc_feature (1)..(25): SEQ ID NO: 1361; WAN024F27_at; Start 1429; Stop 1453
cgtagtcttttcacagccatgggaa

SEQ ID NO: 189330 - DNA, 25 bp, Artificial
  probe
  misc_feature (1)..(25): SEQ ID NO: 1361; WAN024F27_at; Start 121; Stop 145
gaaggtcttcaccatctagtctggg

SEQ ID NO: 189331 - DNA, 25 bp, Artificial
  probe
  misc_feature (1)..(25): SEQ ID NO: 1361; WAN024F27_at; Start 1573; Stop 1597
tatatgaaaccaatcctagaagctg

SEQ ID NO: 189332 - DNA, 25 bp, Artificial
  probe
  misc_feature (1)..(25): SEQ ID NO: 1361; WAN024F27_at; Start 156; Stop 180
taactcaattgacgaggccttggca

SEQ ID NO: 189333 - DNA, 25 bp, Artificial
  probe
  misc_feature (1)..(25): SEQ ID NO: 1361; WAN024F27_at; Start 178; Stop 202
gcaggatttgccagccatattcaag

SEQ ID NO: 189334 - DNA, 25 bp, Artificial
  probe
  misc_feature (1)..(25): SEQ ID NO: 1361; WAN024F27_at; Start 1666; Stop 1690
cagccgggtgcagatcaagaaatca

SEQ ID NO: 189335 - DNA, 25 bp, Artificial
  probe
  misc_feature (1)..(25): SEQ ID NO: 1361; WAN024F27_at; Start 1161; Stop 1185
tgccaaggctcgtgtggctgccaag

SEQ ID NO: 189336 - DNA, 25 bp, Artificial
  probe
  misc_feature (1)..(25): SEQ ID NO: 1361; WAN024F27_at; Start 583; Stop 607
aataaacggattcaagagttggcct

SEQ ID NO: 189337 - DNA, 25 bp, Artificial
  probe
  misc_feature (1)..(25): SEQ ID NO: 1361; WAN024F27_at; Start 598; Stop 622
gagttggcctttctaaatcgcggtc

SEQ ID NO: 189338 - DNA, 25 bp, Artificial
  probe
  misc_feature (1)..(25): SEQ ID NO: 1361; WAN024F27_at; Start 1177; Stop 1201
gctgccaagcgtgcgcgtgaagtca

SEQ ID NO: 189339 - DNA, 25 bp, Artificial
  probe
  misc_feature (1)..(25): SEQ ID NO: 1361; WAN024F27_at; Start 1301; Stop 1325
gagactcagctggtggatcagccaa

SEQ ID NO: 189340 - DNA, 25 bp, Artificial
  probe
  misc_feature (1)..(25): SEQ ID NO: 1361; WAN024F27_at; Start 10; Stop 34
gaaatcaaaaatctgcaggcacagg

SEQ ID NO: 189341 - DNA, 25 bp, Artificial
  probe
  misc_feature (1)..(25): SEQ ID NO: 1361; WAN024F27_at; Start 1473; Stop 1497
tgatgtttcgaaagcccgttaccaa

SEQ ID NO: 189342 - DNA, 25 bp, Artificial
  probe
  misc_feature (1)..(25): SEQ ID NO: 1361; WAN024F27_at; Start 1498; Stop 1522
aaactcgttttgatgaccgatgccg

SEQ ID NO: 189343 - DNA, 25 bp, Artificial
  probe
  misc_feature (1)..(25): SEQ ID NO: 5105; WAN024F28_at; Start 149; Stop 173
tcatcatctacatgacgggcctttt

SEQ ID NO: 189344 - DNA, 25 bp, Artificial
  probe
  misc_feature (1)..(25): SEQ ID NO: 5105; WAN024F28_at; Start 197; Stop 221
tactggatatccaagagcccttttt

SEQ ID NO: 189345 - DNA, 25 bp, Artificial
  probe
  misc_feature (1)..(25): SEQ ID NO: 5105; WAN024F28_at; Start 5; Stop 29
gccaaatcttcagcataagcctgat

SEQ ID NO: 189346 - DNA, 25 bp, Artificial
  probe
  misc_feature (1)..(25): SEQ ID NO: 5105; WAN024F28_at; Start 139; Stop 163
tccgtagggctcatcatctacatga

SEQ ID NO: 189347 - DNA, 25 bp, Artificial
  probe
  misc_feature (1)..(25): SEQ ID NO: 5105; WAN024F28_at; Start 3; Stop 27
gagccaaatcttcagcataagcctg

SEQ ID NO: 189348 - DNA, 25 bp, Artificial
  probe
  misc_feature (1)..(25): SEQ ID NO: 5105; WAN024F28_at; Start 146; Stop 170
ggctcatcatctacatgacgggcct

SEQ ID NO: 189349 - DNA, 25 bp, Artificial
  probe
  misc_feature (1)..(25): SEQ ID NO: 5105; WAN024F28_at; Start 151; Stop 175
atcatctacatgacgggccttttca

SEQ ID NO: 189350 - DNA, 25 bp, Artificial
  probe
  misc_feature (1)..(25): SEQ ID NO: 5105; WAN024F28_at; Start 211; Stop 235
gagccctttttctcgagcctttcca

SEQ ID NO: 189351 - DNA, 25 bp, Artificial
  probe
  misc_feature (1)..(25): SEQ ID NO: 5105; WAN024F28_at; Start 207; Stop 231
ccaagagccctttttctcgagcctt

SEQ ID NO: 189352 - DNA, 25 bp, Artificial
  probe
  misc_feature (1)..(25): SEQ ID NO: 5105; WAN024F28_at; Start 77; Stop 101
ttttcaatagcatcaaaggaatcga

SEQ ID NO: 189353 - DNA, 25 bp, Artificial
  probe
  misc_feature (1)..(25): SEQ ID NO: 5105; WAN024F28_at; Start 195; Stop 219
gatactggatatccaagagcccttt

SEQ ID NO: 189354 - DNA, 25 bp, Artificial
  probe
  misc_feature (1)..(25): SEQ ID NO: 5105; WAN024F28_at; Start 87; Stop 111
catcaaaggaatcgaaaataggttg

SEQ ID NO: 189355 - DNA, 25 bp, Artificial
  probe
  misc_feature (1)..(25): SEQ ID NO: 5105; WAN024F28_at; Start 131; Stop 155
tgaccgcctccgtagggctcatcat

SEQ ID NO: 189356 - DNA, 25 bp, Artificial
  probe
  misc_feature (1)..(25): SEQ ID NO: 5105; WAN024F28_at; Start 1; Stop 25
ttgagccaaatcttcagcataagcc

SEQ ID NO: 189357 - DNA, 25 bp, Artificial
  probe
  misc_feature (1)..(25): SEQ ID NO: 5105; WAN024F28_at; Start 165; Stop 189
gggccttttcagcattttctcgaaa

SEQ ID NO: 189358 - DNA, 25 bp, Artificial
  probe
  misc_feature (1)..(25): SEQ ID NO: 5105; WAN024F28_at; Start 84; Stop 108
tagcatcaaaggaatcgaaaatagg

SEQ ID NO: 189359 - DNA, 25 bp, Artificial
  probe
  misc_feature (1)..(25): SEQ ID NO: 5105; WAN024F28_at; Start 20; Stop 44
taagcctgatcaaactgctttccag

SEQ ID NO: 189360 - DNA, 25 bp, Artificial
  probe
  misc_feature (1)..(25): SEQ ID NO: 5105; WAN024F28_at; Start 7; Stop 31
caaatcttcagcataagcctgatca

SEQ ID NO: 189361 - DNA, 25 bp, Artificial
  probe
  misc_feature (1)..(25): SEQ ID NO: 5105; WAN024F28_at; Start 162; Stop 186
gacgggccttttcagcattttctcg

SEQ ID NO: 189362 - DNA, 25 bp, Artificial
  probe
  misc_feature (1)..(25): SEQ ID NO: 5105; WAN024F28_at; Start 27; Stop 51
gatcaaactgctttccagcaggatc

SEQ ID NO: 189363 - DNA, 25 bp, Artificial
  probe
  misc_feature (1)..(25): SEQ ID NO: 5105; WAN024F28_at; Start 219; Stop 243
tttctcgagcctttccaacgattga

SEQ ID NO: 189364 - DNA, 25 bp, Artificial
  probe
  misc_feature (1)..(25): SEQ ID NO: 5105; WAN024F28_at; Start 80; Stop 104
tcaatagcatcaaaggaatcgaaaa

SEQ ID NO: 189365 - DNA, 25 bp, Artificial
  probe
  misc_feature (1)..(25): SEQ ID NO: 5105; WAN024F28_at; Start 157; Stop 181
tacatgacgggccttttcagcattt

SEQ ID NO: 189366 - DNA, 25 bp, Artificial
  probe
  misc_feature (1)..(25): SEQ ID NO: 5105; WAN024F28_at; Start 201; Stop 225
ggatatccaagagccctttttctcg

SEQ ID NO: 189367 - DNA, 25 bp, Artificial
  probe
  misc_feature (1)..(25): SEQ ID NO: 5105; WAN024F28_at; Start 14; Stop 38
tcagcataagcctgatcaaactgct

SEQ ID NO: 189368 - DNA, 25 bp, Artificial
  probe
  misc_feature (1)..(25): SEQ ID NO: 5105; WAN024F28_at; Start 62; Stop 86
acgcgcggatttttcttttcaatag

SEQ ID NO: 189369 - DNA, 25 bp, Artificial
  probe
  misc_feature (1)..(25): SEQ ID NO: 5105; WAN024F28_at; Start 23; Stop 47
gcctgatcaaactgctttccagcag

SEQ ID NO: 189370 - DNA, 25 bp, Artificial
  probe
  misc_feature (1)..(25): SEQ ID NO: 5105; WAN024F28_at; Start 179; Stop 203
ttttctcgaaaattatgatactgga

SEQ ID NO: 189371 - DNA, 25 bp, Artificial
  probe
  misc_feature (1)..(25): SEQ ID NO: 5105; WAN024F28_at; Start 192; Stop 216
tatgatactggatatccaagagccc

SEQ ID NO: 189372 - DNA, 25 bp, Artificial
  probe
  misc_feature (1)..(25): SEQ ID NO: 5105; WAN024F28_at; Start 204; Stop 228
tatccaagagccctttttctcgagc

SEQ ID NO: 189373 - DNA, 25 bp, Artificial
  probe
  misc_feature (1)..(25): SEQ ID NO: 5105; WAN024F28_at; Start 64; Stop 88
gcgcggatttttcttttcaatagca

SEQ ID NO: 189374 - DNA, 25 bp, Artificial
  probe
  misc_feature (1)..(25): SEQ ID NO: 5105; WAN024F28_at; Start 159; Stop 183
catgacgggccttttcagcattttc

SEQ ID NO: 189375 - DNA, 25 bp, Artificial
  probe
  misc_feature (1)..(25): SEQ ID NO: 5105; WAN024F28_at; Start 115; Stop 139
tctgagcaacatgccctgaccgcct

SEQ ID NO: 189376 - DNA, 25 bp, Artificial
  probe
  misc_feature (1)..(25): SEQ ID NO: 5105; WAN024F28_at; Start 143; Stop 167
tagggctcatcatctacatgacggg

SEQ ID NO: 189377 - DNA, 25 bp, Artificial
  probe
  misc_feature (1)..(25): SEQ ID NO: 1100; WAN024F29_at; Start 339; Stop 363
tgatgagcgcattaagaccttggta

SEQ ID NO: 189378 - DNA, 25 bp, Artificial
  probe
  misc_feature (1)..(25): SEQ ID NO: 1100; WAN024F29_at; Start 29; Stop 53
cagagatgttttctccactggagca

SEQ ID NO: 189379 - DNA, 25 bp, Artificial
  probe
  misc_feature (1)..(25): SEQ ID NO: 1100; WAN024F29_at; Start 131; Stop 155
cccgtcatgtagatgatgagcccta

SEQ ID NO: 189380 - DNA, 25 bp, Artificial
  probe
  misc_feature (1)..(25): SEQ ID NO: 1100; WAN024F29_at; Start 356; Stop 380
ccttggtaacagatgagatttccct

SEQ ID NO: 189381 - DNA, 25 bp, Artificial
  probe
  misc_feature (1)..(25): SEQ ID NO: 1100; WAN024F29_at; Start 598; Stop 622
cagtggcgattgtacgagagtttaa

SEQ ID NO: 189382 - DNA, 25 bp, Artificial
  probe
  misc_feature (1)..(25): SEQ ID NO: 1100; WAN024F29_at; Start 538; Stop 562
gattatcgaggcatggtcgtgccag

SEQ ID NO: 189383 - DNA, 25 bp, Artificial
  probe
  misc_feature (1)..(25): SEQ ID NO: 1100; WAN024F29_at; Start 212; Stop 236
ctattgaaaagaaaaatccgcgcgt

SEQ ID NO: 189384 - DNA, 25 bp, Artificial
  probe
  misc_feature (1)..(25): SEQ ID NO: 1100; WAN024F29_at; Start 481; Stop 505
caagatgatagtttttcttcaggtc

SEQ ID NO: 189385 - DNA, 25 bp, Artificial
  probe
  misc_feature (1)..(25): SEQ ID NO: 1100; WAN024F29_at; Start 52; Stop 76
cactcaatcgttggaaaggctcgag

SEQ ID NO: 189386 - DNA, 25 bp, Artificial
  probe
  misc_feature (1)..(25): SEQ ID NO: 1100; WAN024F29_at; Start 403; Stop 427
ggagaattggcagctatgaccatga

SEQ ID NO: 189387 - DNA, 25 bp, Artificial
  probe
  misc_feature (1)..(25): SEQ ID NO: 1100; WAN024F29_at; Start 523; Stop 547
tacacacgtccctatgattatcgag

SEQ ID NO: 189388 - DNA, 25 bp, Artificial
  probe
  misc_feature (1)..(25): SEQ ID NO: 1100; WAN024F29_at; Start 91; Stop 115
gatatccagtatcataattttcgag

SEQ ID NO: 189389 - DNA, 25 bp, Artificial
  probe
  misc_feature (1)..(25): SEQ ID NO: 1100; WAN024F29_at; Start 197; Stop 221
tcgattcctttgatgctattgaaaa

SEQ ID NO: 189390 - DNA, 25 bp, Artificial
  probe
  misc_feature (1)..(25): SEQ ID NO: 1100; WAN024F29_at; Start 10; Stop 34
gatattttaaccctctttccagaga

SEQ ID NO: 189391 - DNA, 25 bp, Artificial
  probe
  misc_feature (1)..(25): SEQ ID NO: 1100; WAN024F29_at; Start 123; Stop 147
tgaaaaggcccgtcatgtagatgat

SEQ ID NO: 189392 - DNA, 25 bp, Artificial
  probe
  misc_feature (1)..(25): SEQ ID NO: 1100; WAN024F29_at; Start 450; Stop 474
tccagaagtgattggcaaggagtct

SEQ ID NO: 189393 - DNA, 25 bp, Artificial
  probe
  misc_feature (1)..(25): SEQ ID NO: 1100; WAN024F29_at; Start 252; Stop 276
tgctggaaagcagtttgatcaggct

SEQ ID NO: 189394 - DNA, 25 bp, Artificial
  probe
  misc_feature (1)..(25): SEQ ID NO: 1100; WAN024F29_at; Start 687; Stop 711
aatgctggcagaaatcaaagaaaac

SEQ ID NO: 189395 - DNA, 25 bp, Artificial
  probe
  misc_feature (1)..(25): SEQ ID NO: 1100; WAN024F29_at; Start 44; Stop 68
cactggagcactcaatcgttggaaa

SEQ ID NO: 189396 - DNA, 25 bp, Artificial
  probe
  misc_feature (1)..(25): SEQ ID NO: 1100; WAN024F29_at; Start 464; Stop 488
gcaaggagtctagccaccaagatga

SEQ ID NO: 189397 - DNA, 25 bp, Artificial
  probe
  misc_feature (1)..(25): SEQ ID NO: 1100; WAN024F29_at; Start 63; Stop 87
tggaaaggctcgagaaaaagggctc

SEQ ID NO: 189398 - DNA, 25 bp, Artificial
  probe
  misc_feature (1)..(25): SEQ ID NO: 1100; WAN024F29_at; Start 671; Stop 695
cagtagaagaagaaaaaatgctggc

SEQ ID NO: 189399 - DNA, 25 bp, Artificial
  probe
  misc_feature (1)..(25): SEQ ID NO: 1100; WAN024F29_at; Start 583; Stop 607
catgaaaagattcgtcagtggcgat

SEQ ID NO: 189400 - DNA, 25 bp, Artificial
  probe
  misc_feature (1)..(25): SEQ ID NO: 1100; WAN024F29_at; Start 289; Stop 313
ttggctcaagaggaagagctaatct

SEQ ID NO: 189401 - DNA, 25 bp, Artificial
  probe
  misc_feature (1)..(25): SEQ ID NO: 1100; WAN024F29_at; Start 304; Stop 328
gagctaatctttatctgtgggcact

SEQ ID NO: 189402 - DNA, 25 bp, Artificial
  probe
  misc_feature (1)..(25): SEQ ID NO: 1100; WAN024F29_at; Start 551; Stop 575
tggtcgtgccagatgtattgatgag

SEQ ID NO: 189403 - DNA, 25 bp, Artificial
  probe
  misc_feature (1)..(25): SEQ ID NO: 1100; WAN024F29_at; Start 325; Stop 349
cactatgagggttatgatgagcgca

SEQ ID NO: 189404 - DNA, 25 bp, Artificial
  probe
  misc_feature (1)..(25): SEQ ID NO: 1100; WAN024F29_at; Start 435; Stop 459
tacagttcgcctgattccagaagtg

SEQ ID NO: 189405 - DNA, 25 bp, Artificial
  probe
  misc_feature (1)..(25): SEQ ID NO: 1100; WAN024F29_at; Start 420; Stop 444
gaccatgattgatgctacagttcgc

SEQ ID NO: 189406 - DNA, 25 bp, Artificial
  probe
  misc_feature (1)..(25): SEQ ID NO: 1100; WAN024F29_at; Start 143; Stop 167
atgatgagccctacggaggcggtca

SEQ ID NO: 189407 - DNA, 25 bp, Artificial
  probe
  misc_feature (1)..(25): SEQ ID NO: 1100; WAN024F29_at; Start 111; Stop 135
tcgagaaaatgctgaaaaggcccgt

SEQ ID NO: 189408 - DNA, 25 bp, Artificial
  probe
  misc_feature (1)..(25): SEQ ID NO: 1100; WAN024F29_at; Start 76; Stop 100
gaaaaagggctcttggatatccagt

SEQ ID NO: 189409 - DNA, 25 bp, Artificial
  probe
  misc_feature (1)..(25): SEQ ID NO: 1100; WAN024F29_at; Start 654; Stop 678
tgaacattatcaactgacagtagaa

SEQ ID NO: 189410 - DNA, 25 bp, Artificial
  probe
  misc_feature (1)..(25): SEQ ID NO: 1100; WAN024F29_at; Start 271; Stop 295
caggcttatgctgaagatttggctc

SEQ ID NO: 189411 - DNA, 25 bp, Artificial
  probe
  misc_feature (1)..(25): SEQ ID NO: 4304; WAN024F2A_at; Start 93; Stop 117
gaccagtttcttctttcacttcacg

SEQ ID NO: 189412 - DNA, 25 bp, Artificial
  probe
  misc_feature (1)..(25): SEQ ID NO: 4304; WAN024F2A_at; Start 25; Stop 49
gacataacgataatccttgtcgtca

SEQ ID NO: 189413 - DNA, 25 bp, Artificial
  probe
  misc_feature (1)..(25): SEQ ID NO: 4304; WAN024F2A_at; Start 125; Stop 149
gcatcgacaaaggattcgccacgtt

SEQ ID NO: 189414 - DNA, 25 bp, Artificial
  probe
  misc_feature (1)..(25): SEQ ID NO: 4304; WAN024F2A_at; Start 48; Stop 72
cataccagtttttgataccacagag

SEQ ID NO: 189415 - DNA, 25 bp, Artificial
  probe
  misc_feature (1)..(25): SEQ ID NO: 4304; WAN024F2A_at; Start 128; Stop 152
tcgacaaaggattcgccacgttcaa

SEQ ID NO: 189416 - DNA, 25 bp, Artificial
  probe
  misc_feature (1)..(25): SEQ ID NO: 4304; WAN024F2A_at; Start 146; Stop 170
cgttcaacatgaccaccaggaaaag

SEQ ID NO: 189417 - DNA, 25 bp, Artificial
  probe
  misc_feature (1)..(25): SEQ ID NO: 4304; WAN024F2A_at; Start 218; Stop 242
tctccgtttttaatcatacacatgt

SEQ ID NO: 189418 - DNA, 25 bp, Artificial
  probe
  misc_feature (1)..(25): SEQ ID NO: 4304; WAN024F2A_at; Start 244; Stop 268
aacaaattcgactgcctctcttctg

SEQ ID NO: 189419 - DNA, 25 bp, Artificial
  probe
  misc_feature (1)..(25): SEQ ID NO: 4304; WAN024F2A_at; Start 113; Stop 137
tcacgaatgacagcatcgacaaagg

SEQ ID NO: 189420 - DNA, 25 bp, Artificial
  probe
  misc_feature (1)..(25): SEQ ID NO: 4304; WAN024F2A_at; Start 149; Stop 173
tcaacatgaccaccaggaaaagtaa

SEQ ID NO: 189421 - DNA, 25 bp, Artificial
  probe
  misc_feature (1)..(25): SEQ ID NO: 4304; WAN024F2A_at; Start 155; Stop 179
tgaccaccaggaaaagtaatgccag

SEQ ID NO: 189422 - DNA, 25 bp, Artificial
  probe
  misc_feature (1)..(25): SEQ ID NO: 4304; WAN024F2A_at; Start 292; Stop 316
tttaatcataatgcagacttcccgc

SEQ ID NO: 189423 - DNA, 25 bp, Artificial
  probe
  misc_feature (1)..(25): SEQ ID NO: 4304; WAN024F2A_at; Start 142; Stop 166
gccacgttcaacatgaccaccagga

SEQ ID NO: 189424 - DNA, 25 bp, Artificial
  probe
  misc_feature (1)..(25): SEQ ID NO: 4304; WAN024F2A_at; Start 78; Stop 102
gtttggaaatgatcagaccagtttc

SEQ ID NO: 189425 - DNA, 25 bp, Artificial
  probe
  misc_feature (1)..(25): SEQ ID NO: 4304; WAN024F2A_at; Start 83; Stop 107
gaaatgatcagaccagtttcttctt

SEQ ID NO: 189426 - DNA, 25 bp, Artificial
  probe
  misc_feature (1)..(25): SEQ ID NO: 4304; WAN024F2A_at; Start 38; Stop 62
tccttgtcgtcataccagtttttga

SEQ ID NO: 189427 - DNA, 25 bp, Artificial
  probe
  misc_feature (1)..(25): SEQ ID NO: 4304; WAN024F2A_at; Start 5; Stop 29
tctgtcttgtaaaaaaggacgacat

SEQ ID NO: 189428 - DNA, 25 bp, Artificial
  probe
  misc_feature (1)..(25): SEQ ID NO: 4304; WAN024F2A_at; Start 21; Stop 45
ggacgacataacgataatccttgtc

SEQ ID NO: 189429 - DNA, 25 bp, Artificial
  probe
  misc_feature (1)..(25): SEQ ID NO: 4304; WAN024F2A_at; Start 12; Stop 36
tgtaaaaaaggacgacataacgata

SEQ ID NO: 189430 - DNA, 25 bp, Artificial
  probe
  misc_feature (1)..(25): SEQ ID NO: 4304; WAN024F2A_at; Start 132; Stop 156
caaaggattcgccacgttcaacatg

SEQ ID NO: 189431 - DNA, 25 bp, Artificial
  probe
  misc_feature (1)..(25): SEQ ID NO: 4304; WAN024F2A_at; Start 120; Stop 144
tgacagcatcgacaaaggattcgcc

SEQ ID NO: 189432 - DNA, 25 bp, Artificial
  probe
  misc_feature (1)..(25): SEQ ID NO: 4304; WAN024F2A_at; Start 234; Stop 258
tacacatgttaacaaattcgactgc

SEQ ID NO: 189433 - DNA, 25 bp, Artificial
  probe
  misc_feature (1)..(25): SEQ ID NO: 4304; WAN024F2A_at; Start 267; Stop 291
tgttcattcttcacaacctttaatc

SEQ ID NO: 189434 - DNA, 25 bp, Artificial
  probe
  misc_feature (1)..(25): SEQ ID NO: 4304; WAN024F2A_at; Start 137; Stop 161
gattcgccacgttcaacatgaccac

SEQ ID NO: 189435 - DNA, 25 bp, Artificial
  probe
  misc_feature (1)..(25): SEQ ID NO: 4304; WAN024F2A_at; Start 248; Stop 272
aattcgactgcctctcttctgttca

SEQ ID NO: 189436 - DNA, 25 bp, Artificial
  probe
  misc_feature (1)..(25): SEQ ID NO: 4304; WAN024F2A_at; Start 257; Stop 281
gcctctcttctgttcattcttcaca

SEQ ID NO: 189437 - DNA, 25 bp, Artificial
  probe
  misc_feature (1)..(25): SEQ ID NO: 4304; WAN024F2A_at; Start 33; Stop 57
gataatccttgtcgtcataccagtt

SEQ ID NO: 189438 - DNA, 25 bp, Artificial
  probe
  misc_feature (1)..(25): SEQ ID NO: 4304; WAN024F2A_at; Start 283; Stop 307
cctttaatctttaatcataatgcag

SEQ ID NO: 189439 - DNA, 25 bp, Artificial
  probe
  misc_feature (1)..(25): SEQ ID NO: 4304; WAN024F2A_at; Start 134; Stop 158
aaggattcgccacgttcaacatgac

SEQ ID NO: 189440 - DNA, 25 bp, Artificial
  probe
  misc_feature (1)..(25): SEQ ID NO: 4304; WAN024F2A_at; Start 101; Stop 125
tcttctttcacttcacgaatgacag

SEQ ID NO: 189441 - DNA, 25 bp, Artificial
  probe
  misc_feature (1)..(25): SEQ ID NO: 4304; WAN024F2A_at; Start 240; Stop 264
tgttaacaaattcgactgcctctct

SEQ ID NO: 189442 - DNA, 25 bp, Artificial
  probe
  misc_feature (1)..(25): SEQ ID NO: 4304; WAN024F2A_at; Start 53; Stop 77
cagtttttgataccacagagttggg

SEQ ID NO: 189443 - DNA, 25 bp, Artificial
  probe
  misc_feature (1)..(25): SEQ ID NO: 4304; WAN024F2A_at; Start 116; Stop 140
cgaatgacagcatcgacaaaggatt

SEQ ID NO: 189444 - DNA, 25 bp, Artificial
  probe
  misc_feature (1)..(25): SEQ ID NO: 4304; WAN024F2A_at; Start 107; Stop 131
ttcacttcacgaatgacagcatcga

SEQ ID NO: 189445 - DNA, 25 bp, Artificial
  probe
  misc_feature (1)..(25): SEQ ID NO: 1949; WAN024F2B_at; Start 165; Stop 189
taacaaaggactttgcaagggacat

SEQ ID NO: 189446 - DNA, 25 bp, Artificial
  probe
  misc_feature (1)..(25): SEQ ID NO: 1949; WAN024F2B_at; Start 99; Stop 123
ggccaggtaccagcttactttcaag

SEQ ID NO: 189447 - DNA, 25 bp, Artificial
  probe
  misc_feature (1)..(25): SEQ ID NO: 1949; WAN024F2B_at; Start 132; Stop 156
gattgatttccttgagactgactcc

SEQ ID NO: 189448 - DNA, 25 bp, Artificial
  probe
  misc_feature (1)..(25): SEQ ID NO: 1949; WAN024F2B_at; Start 136; Stop 160
gatttccttgagactgactccaccc

SEQ ID NO: 189449 - DNA, 25 bp, Artificial
  probe
  misc_feature (1)..(25): SEQ ID NO: 1949; WAN024F2B_at; Start 140; Stop 164
tccttgagactgactccacccttgg

SEQ ID NO: 189450 - DNA, 25 bp, Artificial
  probe
  misc_feature (1)..(25): SEQ ID NO: 1949; WAN024F2B_at; Start 95; Stop 119
tggaggccaggtaccagcttacttt

SEQ ID NO: 189451 - DNA, 25 bp, Artificial
  probe
  misc_feature (1)..(25): SEQ ID NO: 1949; WAN024F2B_at; Start 210; Stop 234
taagttctttaatggactggacaag

SEQ ID NO: 189452 - DNA, 25 bp, Artificial
  probe
  misc_feature (1)..(25): SEQ ID NO: 1949; WAN024F2B_at; Start 363; Stop 387
gaaatgtaaccaagtccttctcaga

SEQ ID NO: 189453 - DNA, 25 bp, Artificial
  probe
  misc_feature (1)..(25): SEQ ID NO: 1949; WAN024F2B_at; Start 145; Stop 169
gagactgactccacccttggtaaca

SEQ ID NO: 189454 - DNA, 25 bp, Artificial
  probe
  misc_feature (1)..(25): SEQ ID NO: 1949; WAN024F2B_at; Start 30; Stop 54
agagggcagaagtgatgttaaagcc

SEQ ID NO: 189455 - DNA, 25 bp, Artificial
  probe
  misc_feature (1)..(25): SEQ ID NO: 1949; WAN024F2B_at; Start 367; Stop 391
tgtaaccaagtccttctcagaaagt

SEQ ID NO: 189456 - DNA, 25 bp, Artificial
  probe
  misc_feature (1)..(25): SEQ ID NO: 1949; WAN024F2B_at; Start 82; Stop 106
ttcgcctgcaaagtggaggccaggt

SEQ ID NO: 189457 - DNA, 25 bp, Artificial
  probe
  misc_feature (1)..(25): SEQ ID NO: 1949; WAN024F2B_at; Start 70; Stop 94
gatatccataacttcgcctgcaaag

SEQ ID NO: 189458 - DNA, 25 bp, Artificial
  probe
  misc_feature (1)..(25): SEQ ID NO: 1949; WAN024F2B_at; Start 219; Stop 243
taatggactggacaagttgttctcg

SEQ ID NO: 189459 - DNA, 25 bp, Artificial
  probe
  misc_feature (1)..(25): SEQ ID NO: 1949; WAN024F2B_at; Start 150; Stop 174
tgactccacccttggtaacaaagga

SEQ ID NO: 189460 - DNA, 25 bp, Artificial
  probe
  misc_feature (1)..(25): SEQ ID NO: 1949; WAN024F2B_at; Start 347; Stop 371
tcccgattttcttctagaaatgtaa

SEQ ID NO: 189461 - DNA, 25 bp, Artificial
  probe
  misc_feature (1)..(25): SEQ ID NO: 1949; WAN024F2B_at; Start 42; Stop 66
tgatgttaaagccacccgtgtgggc

SEQ ID NO: 189462 - DNA, 25 bp, Artificial
  probe
  misc_feature (1)..(25): SEQ ID NO: 1949; WAN024F2B_at; Start 86; Stop 110
cctgcaaagtggaggccaggtacca

SEQ ID NO: 189463 - DNA, 25 bp, Artificial
  probe
  misc_feature (1)..(25): SEQ ID NO: 1949; WAN024F2B_at; Start 35; Stop 59
gcagaagtgatgttaaagccacccg

SEQ ID NO: 189464 - DNA, 25 bp, Artificial
  probe
  misc_feature (1)..(25): SEQ ID NO: 1949; WAN024F2B_at; Start 296; Stop 320
tcggccaagcgttctggtaacaagg

SEQ ID NO: 189465 - DNA, 25 bp, Artificial
  probe
  misc_feature (1)..(25): SEQ ID NO: 1949; WAN024F2B_at; Start 276; Stop 300
gatatccttgtacaaaaaattcggc

SEQ ID NO: 189466 - DNA, 25 bp, Artificial
  probe
  misc_feature (1)..(25): SEQ ID NO: 1949; WAN024F2B_at; Start 90; Stop 114
caaagtggaggccaggtaccagctt

SEQ ID NO: 189467 - DNA, 25 bp, Artificial
  probe
  misc_feature (1)..(25): SEQ ID NO: 1949; WAN024F2B_at; Start 173; Stop 197
gactttgcaagggacatttttccag

SEQ ID NO: 189468 - DNA, 25 bp, Artificial
  probe
  misc_feature (1)..(25): SEQ ID NO: 1949; WAN024F2B_at; Start 356; Stop 380
tcttctagaaatgtaaccaagtcct

SEQ ID NO: 189469 - DNA, 25 bp, Artificial
  probe
  misc_feature (1)..(25): SEQ ID NO: 1949; WAN024F2B_at; Start 62; Stop 86
tgggcattgatatccataacttcgc

SEQ ID NO: 189470 - DNA, 25 bp, Artificial
  probe
  misc_feature (1)..(25): SEQ ID NO: 1949; WAN024F2B_at; Start 180; Stop 204
caagggacatttttccagttacagg

SEQ ID NO: 189471 - DNA, 25 bp, Artificial
  probe
  misc_feature (1)..(25): SEQ ID NO: 1949; WAN024F2B_at; Start 224; Stop 248
gactggacaagttgttctcgttcct

SEQ ID NO: 189472 - DNA, 25 bp, Artificial
  probe
  misc_feature (1)..(25): SEQ ID NO: 1949; WAN024F2B_at; Start 234; Stop 258
gttgttctcgttccttttcagtcag

SEQ ID NO: 189473 - DNA, 25 bp, Artificial
  probe
  misc_feature (1)..(25): SEQ ID NO: 1949; WAN024F2B_at; Start 261; Stop 285
gtttgactttttcaggatatccttg

SEQ ID NO: 189474 - DNA, 25 bp, Artificial
  probe
  misc_feature (1)..(25): SEQ ID NO: 1949; WAN024F2B_at; Start 48; Stop 72
taaagccacccgtgtgggcattgat

SEQ ID NO: 189475 - DNA, 25 bp, Artificial
  probe
  misc_feature (1)..(25): SEQ ID NO: 1949; WAN024F2B_at; Start 78; Stop 102
taacttcgcctgcaaagtggaggcc

SEQ ID NO: 189476 - DNA, 25 bp, Artificial
  probe
  misc_feature (1)..(25): SEQ ID NO: 1949; WAN024F2B_at; Start 102; Stop 126
caggtaccagcttactttcaagggt

SEQ ID NO: 189477 - DNA, 25 bp, Artificial
  probe
  misc_feature (1)..(25): SEQ ID NO: 1949; WAN024F2B_at; Start 370; Stop 394
aaccaagtccttctcagaaagttga

SEQ ID NO: 189478 - DNA, 25 bp, Artificial
  probe
  misc_feature (1)..(25): SEQ ID NO: 1949; WAN024F2B_at; Start 282; Stop 306
cttgtacaaaaaattcggccaagcg

SEQ ID NO: 189479 - DNA, 25 bp, Artificial
  probe
  misc_feature (1)..(25): SEQ ID NO: 1020; WAN024F2C_at; Start 257; Stop 281
tttacaagacagaacactttactgg

SEQ ID NO: 189480 - DNA, 25 bp, Artificial
  probe
  misc_feature (1)..(25): SEQ ID NO: 1020; WAN024F2C_at; Start 108; Stop 132
tcctggtggtcatgttgaacgtggc

SEQ ID NO: 189481 - DNA, 25 bp, Artificial
  probe
  misc_feature (1)..(25): SEQ ID NO: 1020; WAN024F2C_at; Start 397; Stop 421
gatctcagtgaattcttttactaca

SEQ ID NO: 189482 - DNA, 25 bp, Artificial
  probe
  misc_feature (1)..(25): SEQ ID NO: 1020; WAN024F2C_at; Start 366; Stop 390
gtctgatatgcttcgtgtgtttcta

SEQ ID NO: 189483 - DNA, 25 bp, Artificial
  probe
  misc_feature (1)..(25): SEQ ID NO: 1020; WAN024F2C_at; Start 157; Stop 181
cgtgaagtgaaagaagaaactggtc

SEQ ID NO: 189484 - DNA, 25 bp, Artificial
  probe
  misc_feature (1)..(25): SEQ ID NO: 1020; WAN024F2C_at; Start 342; Stop 366
tctaaaacttgcaaccgatgatatg

SEQ ID NO: 189485 - DNA, 25 bp, Artificial
  probe
  misc_feature (1)..(25): SEQ ID NO: 1020; WAN024F2C_at; Start 289; Stop 313
cagtcttcagacgaagggaaagttt

SEQ ID NO: 189486 - DNA, 25 bp, Artificial
  probe
  misc_feature (1)..(25): SEQ ID NO: 1020; WAN024F2C_at; Start 416; Stop 440
actacaaaaacggtgacgactggct

SEQ ID NO: 189487 - DNA, 25 bp, Artificial
  probe
  misc_feature (1)..(25): SEQ ID NO: 1020; WAN024F2C_at; Start 347; Stop 371
aacttgcaaccgatgatatgtctga

SEQ ID NO: 189488 - DNA, 25 bp, Artificial
  probe
  misc_feature (1)..(25): SEQ ID NO: 1020; WAN024F2C_at; Start 172; Stop 196
gaaactggtctgatcatttccaaac

SEQ ID NO: 189489 - DNA, 25 bp, Artificial
  probe
  misc_feature (1)..(25): SEQ ID NO: 1020; WAN024F2C_at; Start 16; Stop 40
gcagtcgaatttgttaacatgtgta

SEQ ID NO: 189490 - DNA, 25 bp, Artificial
  probe
  misc_feature (1)..(25): SEQ ID NO: 1020; WAN024F2C_at; Start 130; Stop 154
ggcgaatcctttgtcgatgctgtca

SEQ ID NO: 189491 - DNA, 25 bp, Artificial
  probe
  misc_feature (1)..(25): SEQ ID NO: 1020; WAN024F2C_at; Start 279; Stop 303
tggtgaactccagtcttcagacgaa

SEQ ID NO: 189492 - DNA, 25 bp, Artificial
  probe
  misc_feature (1)..(25): SEQ ID NO: 1020; WAN024F2C_at; Start 328; Stop 352
gaaaatctttctcatctaaaacttg

SEQ ID NO: 189493 - DNA, 25 bp, Artificial
  probe
  misc_feature (1)..(25): SEQ ID NO: 1020; WAN024F2C_at; Start 143; Stop 167
tcgatgctgtcattcgtgaagtgaa

SEQ ID NO: 189494 - DNA, 25 bp, Artificial
  probe
  misc_feature (1)..(25): SEQ ID NO: 1020; WAN024F2C_at; Start 229; Stop 253
gacaaggattatcgttatgtcgtcc

SEQ ID NO: 189495 - DNA, 25 bp, Artificial
  probe
  misc_feature (1)..(25): SEQ ID NO: 1020; WAN024F2C_at; Start 353; Stop 377
caaccgatgatatgtctgatatgct

SEQ ID NO: 189496 - DNA, 25 bp, Artificial
  probe
  misc_feature (1)..(25): SEQ ID NO: 1020; WAN024F2C_at; Start 214; Stop 238
aaaaactggtatgacgacaaggatt

SEQ ID NO: 189497 - DNA, 25 bp, Artificial
  probe
  misc_feature (1)..(25): SEQ ID NO: 1020; WAN024F2C_at; Start 218; Stop 242
actggtatgacgacaaggattatcg

SEQ ID NO: 189498 - DNA, 25 bp, Artificial
  probe
  misc_feature (1)..(25): SEQ ID NO: 1020; WAN024F2C_at; Start 33; Stop 57
catgtgtatgattaaaaacggagat

SEQ ID NO: 189499 - DNA, 25 bp, Artificial
  probe
  misc_feature (1)..(25): SEQ ID NO: 1020; WAN024F2C_at; Start 387; Stop 411
tctagaagaagatctcagtgaattc

SEQ ID NO: 189500 - DNA, 25 bp, Artificial
  probe
  misc_feature (1)..(25): SEQ ID NO: 1020; WAN024F2C_at; Start 283; Stop 307
gaactccagtcttcagacgaaggga

SEQ ID NO: 189501 - DNA, 25 bp, Artificial
  probe
  misc_feature (1)..(25): SEQ ID NO: 1020; WAN024F2C_at; Start 429; Stop 453
tgacgactggctttatgatttgaag

SEQ ID NO: 189502 - DNA, 25 bp, Artificial
  probe
  misc_feature (1)..(25): SEQ ID NO: 1020; WAN024F2C_at; Start 95; Stop 119
ctggcattacttttcctggtggtca

SEQ ID NO: 189503 - DNA, 25 bp, Artificial
  probe
  misc_feature (1)..(25): SEQ ID NO: 1020; WAN024F2C_at; Start 316; Stop 340
tgggaggactttgaaaatctttctc

SEQ ID NO: 189504 - DNA, 25 bp, Artificial
  probe
  misc_feature (1)..(25): SEQ ID NO: 1020; WAN024F2C_at; Start 117; Stop 141
tcatgttgaacgtggcgaatccttt

SEQ ID NO: 189505 - DNA, 25 bp, Artificial
  probe
  misc_feature (1)..(25): SEQ ID NO: 1020; WAN024F2C_at; Start 124; Stop 148
gaacgtggcgaatcctttgtcgatg

SEQ ID NO: 189506 - DNA, 25 bp, Artificial
  probe
  misc_feature (1)..(25): SEQ ID NO: 1020; WAN024F2C_at; Start 423; Stop 447
aaacggtgacgactggctttatgat

SEQ ID NO: 189507 - DNA, 25 bp, Artificial
  probe
  misc_feature (1)..(25): SEQ ID NO: 1020; WAN024F2C_at; Start 378; Stop 402
tcgtgtgtttctagaagaagatctc

SEQ ID NO: 189508 - DNA, 25 bp, Artificial
  probe
  misc_feature (1)..(25): SEQ ID NO: 1020; WAN024F2C_at; Start 183; Stop 207
gatcatttccaaaccccaactctgt

SEQ ID NO: 189509 - DNA, 25 bp, Artificial
  probe
  misc_feature (1)..(25): SEQ ID NO: 1020; WAN024F2C_at; Start 266; Stop 290
cagaacactttactggtgaactcca

SEQ ID NO: 189510 - DNA, 25 bp, Artificial
  probe
  misc_feature (1)..(25): SEQ ID NO: 1020; WAN024F2C_at; Start 9; Stop 33
aagagaggcagtcgaatttgttaac

SEQ ID NO: 189511 - DNA, 25 bp, Artificial
  probe
  misc_feature (1)..(25): SEQ ID NO: 1020; WAN024F2C_at; Start 2; Stop 26
tgaacagaagagaggcagtcgaatt

SEQ ID NO: 189512 - DNA, 25 bp, Artificial
  probe
  misc_feature (1)..(25): SEQ ID NO: 1020; WAN024F2C_at; Start 244; Stop 268
tatgtcgtccttttttacaagacag

SEQ ID NO: 189513 - DNA, 25 bp, Artificial
  probe
  misc_feature (1)..(25): SEQ ID NO: 5765; WAN024F2D_at; Start 206; Stop 230
ctggaattcctggaaacggacgctt

SEQ ID NO: 189514 - DNA, 25 bp, Artificial
  probe
  misc_feature (1)..(25): SEQ ID NO: 5765; WAN024F2D_at; Start 1170; Stop 1194
ggcgggaagtctgcattatgattaa

SEQ ID NO: 189515 - DNA, 25 bp, Artificial
  probe
  misc_feature (1)..(25): SEQ ID NO: 5765; WAN024F2D_at; Start 866; Stop 890
ccttgttaccagaacgcttggccga

SEQ ID NO: 189516 - DNA, 25 bp, Artificial
  probe
  misc_feature (1)..(25): SEQ ID NO: 5765; WAN024F2D_at; Start 319; Stop 343
ggacgcgtctttccagccagtgaca

SEQ ID NO: 189517 - DNA, 25 bp, Artificial
  probe
  misc_feature (1)..(25): SEQ ID NO: 5765; WAN024F2D_at; Start 1107; Stop 1131
tatggatatcaatgcccacacgggt

SEQ ID NO: 189518 - DNA, 25 bp, Artificial
  probe
  misc_feature (1)..(25): SEQ ID NO: 5765; WAN024F2D_at; Start 560; Stop 584
gccattttaagcataccatcaccga

SEQ ID NO: 189519 - DNA, 25 bp, Artificial
  probe
  misc_feature (1)..(25): SEQ ID NO: 5765; WAN024F2D_at; Start 578; Stop 602
tcaccgatcttgaggctgctgaaag

SEQ ID NO: 189520 - DNA, 25 bp, Artificial
  probe
  misc_feature (1)..(25): SEQ ID NO: 5765; WAN024F2D_at; Start 901; Stop 925
caaggatatcctgaaaaagtcaaac

SEQ ID NO: 189521 - DNA, 25 bp, Artificial
  probe
  misc_feature (1)..(25): SEQ ID NO: 5765; WAN024F2D_at; Start 91; Stop 115
tatggacagaaaaccctcctcatcg

SEQ ID NO: 189522 - DNA, 25 bp, Artificial
  probe
  misc_feature (1)..(25): SEQ ID NO: 5765; WAN024F2D_at; Start 1120; Stop 1144
gcccacacgggtggctttaacatca

SEQ ID NO: 189523 - DNA, 25 bp, Artificial
  probe
  misc_feature (1)..(25): SEQ ID NO: 5765; WAN024F2D_at; Start 385; Stop 409
gaactaggtggtcaagttgctactc

SEQ ID NO: 189524 - DNA, 25 bp, Artificial
  probe
  misc_feature (1)..(25): SEQ ID NO: 5765; WAN024F2D_at; Start 707; Stop 731
cccactttggtttgtcaggtcctgc

SEQ ID NO: 189525 - DNA, 25 bp, Artificial
  probe
  misc_feature (1)..(25): SEQ ID NO: 5765; WAN024F2D_at; Start 177; Stop 201
caacaatggtagcttagacaacctg

SEQ ID NO: 189526 - DNA, 25 bp, Artificial
  probe
  misc_feature (1)..(25): SEQ ID NO: 5765; WAN024F2D_at; Start 193; Stop 217
gacaacctgctagctggaattcctg

SEQ ID NO: 189527 - DNA, 25 bp, Artificial
  probe
  misc_feature (1)..(25): SEQ ID NO: 5765; WAN024F2D_at; Start 497; Stop 521
tcacaacaggtggtaagtcttatcc

SEQ ID NO: 189528 - DNA, 25 bp, Artificial
  probe
  misc_feature (1)..(25): SEQ ID NO: 5765; WAN024F2D_at; Start 724; Stop 748
ggtcctgctgccctacgcatgtcta

SEQ ID NO: 189529 - DNA, 25 bp, Artificial
  probe
  misc_feature (1)..(25): SEQ ID NO: 5765; WAN024F2D_at; Start 349; Stop 373
cggactattatcgaagctttggaaa

SEQ ID NO: 189530 - DNA, 25 bp, Artificial
  probe
  misc_feature (1)..(25): SEQ ID NO: 5765; WAN024F2D_at; Start 161; Stop 185
gacgttgcaatgtgaccaacaatgg

SEQ ID NO: 189531 - DNA, 25 bp, Artificial
  probe
  misc_feature (1)..(25): SEQ ID NO: 5765; WAN024F2D_at; Start 485; Stop 509
agaaactcattgtcacaacaggtgg

SEQ ID NO: 189532 - DNA, 25 bp, Artificial
  probe
  misc_feature (1)..(25): SEQ ID NO: 5765; WAN024F2D_at; Start 616; Stop 640
gattttccacataaagccttacaag

SEQ ID NO: 189533 - DNA, 25 bp, Artificial
  probe
  misc_feature (1)..(25): SEQ ID NO: 5765; WAN024F2D_at; Start 544; Stop 568
ggtcacgagattgctcgccatttta

SEQ ID NO: 189534 - DNA, 25 bp, Artificial
  probe
  misc_feature (1)..(25): SEQ ID NO: 5765; WAN024F2D_at; Start 795; Stop 819
actttctgagaaggacttggttaca

SEQ ID NO: 189535 - DNA, 25 bp, Artificial
  probe
  misc_feature (1)..(25): SEQ ID NO: 5765; WAN024F2D_at; Start 994; Stop 1018
aaaatgtcccttgcaaagtcctttg

SEQ ID NO: 189536 - DNA, 25 bp, Artificial
  probe
  misc_feature (1)..(25): SEQ ID NO: 5765; WAN024F2D_at; Start 511; Stop 535
aagtcttatccttcgactggttcga

SEQ ID NO: 189537 - DNA, 25 bp, Artificial
  probe
  misc_feature (1)..(25): SEQ ID NO: 5765; WAN024F2D_at; Start 982; Stop 1006
cctgtaactggaaaaatgtcccttg

SEQ ID NO: 189538 - DNA, 25 bp, Artificial
  probe
  misc_feature (1)..(25): SEQ ID NO: 5765; WAN024F2D_at; Start 1031; Stop 1055
gagtcagtctcaaggaaatcaatcc

SEQ ID NO: 189539 - DNA, 25 bp, Artificial
  probe
  misc_feature (1)..(25): SEQ ID NO: 5765; WAN024F2D_at; Start 765; Stop 789
ggaggttctctcactcgatgttttg

SEQ ID NO: 189540 - DNA, 25 bp, Artificial
  probe
  misc_feature (1)..(25): SEQ ID NO: 5765; WAN024F2D_at; Start 781; Stop 805
gatgttttgcctcaactttctgaga

SEQ ID NO: 189541 - DNA, 25 bp, Artificial
  probe
  misc_feature (1)..(25): SEQ ID NO: 5765; WAN024F2D_at; Start 665; Stop 689
taagttatggtaagcatgtcatcac

SEQ ID NO: 189542 - DNA, 25 bp, Artificial
  probe
  misc_feature (1)..(25): SEQ ID NO: 5765; WAN024F2D_at; Start 1066; Stop 1090
gaaagtaagctggtacctggcctcc

SEQ ID NO: 189543 - DNA, 25 bp, Artificial
  probe
  misc_feature (1)..(25): SEQ ID NO: 5765; WAN024F2D_at; Start 650; Stop 674
tggacgatgtgaccctaagttatgg

SEQ ID NO: 189544 - DNA, 25 bp, Artificial
  probe
  misc_feature (1)..(25): SEQ ID NO: 5765; WAN024F2D_at; Start 1017; Stop 1041
tgttaccaagggtggagtcagtctc

SEQ ID NO: 189545 - DNA, 25 bp, Artificial
  probe
  misc_feature (1)..(25): SEQ ID NO: 5765; WAN024F2D_at; Start 1084; Stop 1108
ggcctccactttgcaggcgaagtta

SEQ ID NO: 189546 - DNA, 25 bp, Artificial
  probe
  misc_feature (1)..(25): SEQ ID NO: 5765; WAN024F2D_at; Start 334; Stop 358
gccagtgacaagtctcggactatta

SEQ ID NO: 189547 - DNA, 25 bp, Artificial
  probe
  misc_feature (1)..(25): SEQ ID NO: 1262; WAN024F2E_at; Start 91; Stop 115
ccagtccttgtatgacatcttccaa

SEQ ID NO: 189548 - DNA, 25 bp, Artificial
  probe
  misc_feature (1)..(25): SEQ ID NO: 1262; WAN024F2E_at; Start 90; Stop 114
tccagtccttgtatgacatcttcca

SEQ ID NO: 189549 - DNA, 25 bp, Artificial
  probe
  misc_feature (1)..(25): SEQ ID NO: 1262; WAN024F2E_at; Start 92; Stop 116
cagtccttgtatgacatcttccaaa

SEQ ID NO: 189550 - DNA, 25 bp, Artificial
  probe
  misc_feature (1)..(25): SEQ ID NO: 1262; WAN024F2E_at; Start 89; Stop 113
ctccagtccttgtatgacatcttcc

SEQ ID NO: 189551 - DNA, 25 bp, Artificial
  probe
  misc_feature (1)..(25): SEQ ID NO: 3369; WAN024F2F_at; Start 75; Stop 99
aaaatatgaggagttcggactcgac

SEQ ID NO: 189552 - DNA, 25 bp, Artificial
  probe
  misc_feature (1)..(25): SEQ ID NO: 3369; WAN024F2F_at; Start 112; Stop 136
gaaacacgtggtggtcgtaaccatg

SEQ ID NO: 189553 - DNA, 25 bp, Artificial
  probe
  misc_feature (1)..(25): SEQ ID NO: 3369; WAN024F2F_at; Start 418; Stop 442
acgttttcgtaaggttcgcttgatg

SEQ ID NO: 189554 - DNA, 25 bp, Artificial
  probe
  misc_feature (1)..(25): SEQ ID NO: 3369; WAN024F2F_at; Start 102; Stop 126
tctccttcaagaaacacgtggtggt

SEQ ID NO: 189555 - DNA, 25 bp, Artificial
  probe
  misc_feature (1)..(25): SEQ ID NO: 3369; WAN024F2F_at; Start 469; Stop 493
aatcagtaaactgggatcttgttgg

SEQ ID NO: 189556 - DNA, 25 bp, Artificial
  probe
  misc_feature (1)..(25): SEQ ID NO: 3369; WAN024F2F_at; Start 547; Stop 571
ctattgttatggagctgttgatgcc

SEQ ID NO: 189557 - DNA, 25 bp, Artificial
  probe
  misc_feature (1)..(25): SEQ ID NO: 3369; WAN024F2F_at; Start 84; Stop 108
ggagttcggactcgactctctcctt

SEQ ID NO: 189558 - DNA, 25 bp, Artificial
  probe
  misc_feature (1)..(25): SEQ ID NO: 3369; WAN024F2F_at; Start 466; Stop 490
tagaatcagtaaactgggatcttgt

SEQ ID NO: 189559 - DNA, 25 bp, Artificial
  probe
  misc_feature (1)..(25): SEQ ID NO: 3369; WAN024F2F_at; Start 197; Stop 221
caggagaatttgttacaattgatgc

SEQ ID NO: 189560 - DNA, 25 bp, Artificial
  probe
  misc_feature (1)..(25): SEQ ID NO: 3369; WAN024F2F_at; Start 113; Stop 137
aaacacgtggtggtcgtaaccatgc

SEQ ID NO: 189561 - DNA, 25 bp, Artificial
  probe
  misc_feature (1)..(25): SEQ ID NO: 3369; WAN024F2F_at; Start 193; Stop 217
gaggcaggagaatttgttacaattg

SEQ ID NO: 189562 - DNA, 25 bp, Artificial
  probe
  misc_feature (1)..(25): SEQ ID NO: 3369; WAN024F2F_at; Start 97; Stop 121
gactctctccttcaagaaacacgtg

SEQ ID NO: 189563 - DNA, 25 bp, Artificial
  probe
  misc_feature (1)..(25): SEQ ID NO: 3369; WAN024F2F_at; Start 106; Stop 130
cttcaagaaacacgtggtggtcgta

SEQ ID NO: 189564 - DNA, 25 bp, Artificial
  probe
  misc_feature (1)..(25): SEQ ID NO: 3369; WAN024F2F_at; Start 73; Stop 97
aaaaaatatgaggagttcggactcg

SEQ ID NO: 189565 - DNA, 25 bp, Artificial
  probe
  misc_feature (1)..(25): SEQ ID NO: 3369; WAN024F2F_at; Start 104; Stop 128
tccttcaagaaacacgtggtggtcg

SEQ ID NO: 189566 - DNA, 25 bp, Artificial
  probe
  misc_feature (1)..(25): SEQ ID NO: 3369; WAN024F2F_at; Start 105; Stop 129
ccttcaagaaacacgtggtggtcgt

SEQ ID NO: 189567 - DNA, 25 bp, Artificial
  probe
  misc_feature (1)..(25): SEQ ID NO: 3369; WAN024F2F_at; Start 100; Stop 124
tctctccttcaagaaacacgtggtg

SEQ ID NO: 189568 - DNA, 25 bp, Artificial
  probe
  misc_feature (1)..(25): SEQ ID NO: 3369; WAN024F2F_at; Start 89; Stop 113
tcggactcgactctctccttcaaga

SEQ ID NO: 189569 - DNA, 25 bp, Artificial
  probe
  misc_feature (1)..(25): SEQ ID NO: 3369; WAN024F2F_at; Start 77; Stop 101
aatatgaggagttcggactcgactc

SEQ ID NO: 189570 - DNA, 25 bp, Artificial
  probe
  misc_feature (1)..(25): SEQ ID NO: 3369; WAN024F2F_at; Start 425; Stop 449
cgtaaggttcgcttgatgtaccaag

SEQ ID NO: 189571 - DNA, 25 bp, Artificial
  probe
  misc_feature (1)..(25): SEQ ID NO: 3369; WAN024F2F_at; Start 92; Stop 116
gactcgactctctccttcaagaaac

SEQ ID NO: 189572 - DNA, 25 bp, Artificial
  probe
  misc_feature (1)..(25): SEQ ID NO: 3369; WAN024F2F_at; Start 208; Stop 232
gttacaattgatgccttatttcagg

SEQ ID NO: 189573 - DNA, 25 bp, Artificial
  probe
  misc_feature (1)..(25): SEQ ID NO: 3369; WAN024F2F_at; Start 86; Stop 110
agttcggactcgactctctccttca

SEQ ID NO: 189574 - DNA, 25 bp, Artificial
  probe
  misc_feature (1)..(25): SEQ ID NO: 3369; WAN024F2F_at; Start 521; Stop 545
catagtcactatatacgagaatttc

SEQ ID NO: 189575 - DNA, 25 bp, Artificial
  probe
  misc_feature (1)..(25): SEQ ID NO: 3369; WAN024F2F_at; Start 202; Stop 226
gaatttgttacaattgatgccttat

SEQ ID NO: 189576 - DNA, 25 bp, Artificial
  probe
  misc_feature (1)..(25): SEQ ID NO: 3369; WAN024F2F_at; Start 455; Stop 479
gctggtttcggtagaatcagtaaac

SEQ ID NO: 189577 - DNA, 25 bp, Artificial
  probe
  misc_feature (1)..(25): SEQ ID NO: 3369; WAN024F2F_at; Start 422; Stop 446
tttcgtaaggttcgcttgatgtacc

SEQ ID NO: 189578 - DNA, 25 bp, Artificial
  probe
  misc_feature (1)..(25): SEQ ID NO: 3369; WAN024F2F_at; Start 108; Stop 132
tcaagaaacacgtggtggtcgtaac

SEQ ID NO: 189579 - DNA, 25 bp, Artificial
  probe
  misc_feature (1)..(25): SEQ ID NO: 3369; WAN024F2F_at; Start 91; Stop 115
ggactcgactctctccttcaagaaa

SEQ ID NO: 189580 - DNA, 25 bp, Artificial
  probe
  misc_feature (1)..(25): SEQ ID NO: 3369; WAN024F2F_at; Start 424; Stop 448
tcgtaaggttcgcttgatgtaccaa

SEQ ID NO: 189581 - DNA, 25 bp, Artificial
  probe
  misc_feature (1)..(25): SEQ ID NO: 3369; WAN024F2F_at; Start 191; Stop 215
cagaggcaggagaatttgttacaat

SEQ ID NO: 189582 - DNA, 25 bp, Artificial
  probe
  misc_feature (1)..(25): SEQ ID NO: 3369; WAN024F2F_at; Start 81; Stop 105
tgaggagttcggactcgactctctc

SEQ ID NO: 189583 - DNA, 25 bp, Artificial
  probe
  misc_feature (1)..(25): SEQ ID NO: 3369; WAN024F2F_at; Start 462; Stop 486
tcggtagaatcagtaaactgggatc

SEQ ID NO: 189584 - DNA, 25 bp, Artificial
  probe
  misc_feature (1)..(25): SEQ ID NO: 3369; WAN024F2F_at; Start 460; Stop 484
tttcggtagaatcagtaaactggga

SEQ ID NO: 189585 - DNA, 25 bp, Artificial
  probe
  misc_feature (1)..(25): SEQ ID NO: 4116; WAN024F2G_at; Start 212; Stop 236
tctgtaatcaattcatttggaccaa

SEQ ID NO: 189586 - DNA, 25 bp, Artificial
  probe
  misc_feature (1)..(25): SEQ ID NO: 4116; WAN024F2G_at; Start 108; Stop 132
taccgtaacagtgacggcagacacc

SEQ ID NO: 189587 - DNA, 25 bp, Artificial
  probe
  misc_feature (1)..(25): SEQ ID NO: 4116; WAN024F2G_at; Start 291; Stop 315
tgagacgctcttcgagagactcgat

SEQ ID NO: 189588 - DNA, 25 bp, Artificial
  probe
  misc_feature (1)..(25): SEQ ID NO: 4116; WAN024F2G_at; Start 313; Stop 337
gatcatctcttttccttctgcgata

SEQ ID NO: 189589 - DNA, 25 bp, Artificial
  probe
  misc_feature (1)..(25): SEQ ID NO: 4116; WAN024F2G_at; Start 408; Stop 432
ccaaacgacgagtcaagtaacctga

SEQ ID NO: 189590 - DNA, 25 bp, Artificial
  probe
  misc_feature (1)..(25): SEQ ID NO: 4116; WAN024F2G_at; Start 349; Stop 373
gagaccacggtcagttccacagtcg

SEQ ID NO: 189591 - DNA, 25 bp, Artificial
  probe
  misc_feature (1)..(25): SEQ ID NO: 4116; WAN024F2G_at; Start 384; Stop 408
tgataacgtcttgggcaacgtcgac

SEQ ID NO: 189592 - DNA, 25 bp, Artificial
  probe
  misc_feature (1)..(25): SEQ ID NO: 4116; WAN024F2G_at; Start 299; Stop 323
tcttcgagagactcgatcatctctt

SEQ ID NO: 189593 - DNA, 25 bp, Artificial
  probe
  misc_feature (1)..(25): SEQ ID NO: 4116; WAN024F2G_at; Start 185; Stop 209
gcattgacaatttcacgcgccttgt

SEQ ID NO: 189594 - DNA, 25 bp, Artificial
  probe
  misc_feature (1)..(25): SEQ ID NO: 4116; WAN024F2G_at; Start 30; Stop 54
caggttccccgatagattgggcagc

SEQ ID NO: 189595 - DNA, 25 bp, Artificial
  probe
  misc_feature (1)..(25): SEQ ID NO: 4116; WAN024F2G_at; Start 148; Stop 172
tgtaaatacagaacggatagtcact

SEQ ID NO: 189596 - DNA, 25 bp, Artificial
  probe
  misc_feature (1)..(25): SEQ ID NO: 4116; WAN024F2G_at; Start 40; Stop 64
gatagattgggcagcgattgtacca

SEQ ID NO: 189597 - DNA, 25 bp, Artificial
  probe
  misc_feature (1)..(25): SEQ ID NO: 4116; WAN024F2G_at; Start 82; Stop 106
aaccgcatcaccagtcgccaagttg

SEQ ID NO: 189598 - DNA, 25 bp, Artificial
  probe
  misc_feature (1)..(25): SEQ ID NO: 4116; WAN024F2G_at; Start 163; Stop 187
gatagtcacttcttccacaccagca

SEQ ID NO: 189599 - DNA, 25 bp, Artificial
  probe
  misc_feature (1)..(25): SEQ ID NO: 4116; WAN024F2G_at; Start 237; Stop 261
taatcactgcaccagtttctggatg

SEQ ID NO: 189600 - DNA, 25 bp, Artificial
  probe
  misc_feature (1)..(25): SEQ ID NO: 4116; WAN024F2G_at; Start 281; Stop 305
taacgaccgttgagacgctcttcga

SEQ ID NO: 189601 - DNA, 25 bp, Artificial
  probe
  misc_feature (1)..(25): SEQ ID NO: 4116; WAN024F2G_at; Start 225; Stop 249
catttggaccaataatcactgcacc

SEQ ID NO: 189602 - DNA, 25 bp, Artificial
  probe
  misc_feature (1)..(25): SEQ ID NO: 4116; WAN024F2G_at; Start 53; Stop 77
gcgattgtaccaactgcttcaccaa

SEQ ID NO: 189603 - DNA, 25 bp, Artificial
  probe
  misc_feature (1)..(25): SEQ ID NO: 4116; WAN024F2G_at; Start 325; Stop 349
tccttctgcgatagaacggatcaag

SEQ ID NO: 189604 - DNA, 25 bp, Artificial
  probe
  misc_feature (1)..(25): SEQ ID NO: 4116; WAN024F2G_at; Start 16; Stop 40
tgtaagctgtgtaccaggttccccg

SEQ ID NO: 189605 - DNA, 25 bp, Artificial
  probe
  misc_feature (1)..(25): SEQ ID NO: 4116; WAN024F2G_at; Start 170; Stop 194
acttcttccacaccagcattgacaa

SEQ ID NO: 189606 - DNA, 25 bp, Artificial
  probe
  misc_feature (1)..(25): SEQ ID NO: 4116; WAN024F2G_at; Start 96; Stop 120
tcgccaagttgataccgtaacagtg

SEQ ID NO: 189607 - DNA, 25 bp, Artificial
  probe
  misc_feature (1)..(25): SEQ ID NO: 4116; WAN024F2G_at; Start 336; Stop 360
tagaacggatcaagagaccacggtc

SEQ ID NO: 189608 - DNA, 25 bp, Artificial
  probe
  misc_feature (1)..(25): SEQ ID NO: 4116; WAN024F2G_at; Start 135; Stop 159
gacgagtgttacatgtaaatacaga

SEQ ID NO: 189609 - DNA, 25 bp, Artificial
  probe
  misc_feature (1)..(25): SEQ ID NO: 4116; WAN024F2G_at; Start 368; Stop 392
cagtcgtcctcacggatgataacgt

SEQ ID NO: 189610 - DNA, 25 bp, Artificial
  probe
  misc_feature (1)..(25): SEQ ID NO: 4116; WAN024F2G_at; Start 2; Stop 26
tggaaggtacgcattgtaagctgtg

SEQ ID NO: 189611 - DNA, 25 bp, Artificial
  probe
  misc_feature (1)..(25): SEQ ID NO: 4116; WAN024F2G_at; Start 395; Stop 419
tgggcaacgtcgaccaaacgacgag

SEQ ID NO: 189612 - DNA, 25 bp, Artificial
  probe
  misc_feature (1)..(25): SEQ ID NO: 4116; WAN024F2G_at; Start 198; Stop 222
cacgcgccttgtcttctgtaatcaa

SEQ ID NO: 189613 - DNA, 25 bp, Artificial
  probe
  misc_feature (1)..(25): SEQ ID NO: 4116; WAN024F2G_at; Start 359; Stop 383
tcagttccacagtcgtcctcacgga

SEQ ID NO: 189614 - DNA, 25 bp, Artificial
  probe
  misc_feature (1)..(25): SEQ ID NO: 4116; WAN024F2G_at; Start 258; Stop 282
gatgtttaacagttttcttagtgta

SEQ ID NO: 189615 - DNA, 25 bp, Artificial
  probe
  misc_feature (1)..(25): SEQ ID NO: 4116; WAN024F2G_at; Start 273; Stop 297
tcttagtgtaacgaccgttgagacg

SEQ ID NO: 189616 - DNA, 25 bp, Artificial
  probe
  misc_feature (1)..(25): SEQ ID NO: 4116; WAN024F2G_at; Start 59; Stop 83
gtaccaactgcttcaccaacttcaa

SEQ ID NO: 189617 - DNA, 25 bp, Artificial
  probe
  misc_feature (1)..(25): SEQ ID NO: 4116; WAN024F2G_at; Start 246; Stop 270
caccagtttctggatgtttaacagt

SEQ ID NO: 189618 - DNA, 25 bp, Artificial
  probe
  misc_feature (1)..(25): SEQ ID NO: 4116; WAN024F2G_at; Start 378; Stop 402
cacggatgataacgtcttgggcaac

SEQ ID NO: 189619 - DNA, 25 bp, Artificial
  probe
  misc_feature (1)..(25): SEQ ID NO: 4090; WAN024F2H_at; Start 301; Stop 325
gagtccttcacgttctggtttcaag

SEQ ID NO: 189620 - DNA, 25 bp, Artificial
  probe
  misc_feature (1)..(25): SEQ ID NO: 4090; WAN024F2H_at; Start 170; Stop 194
tcacgacgaactttcgtacgcgtta

SEQ ID NO: 189621 - DNA, 25 bp, Artificial
  probe
  misc_feature (1)..(25): SEQ ID NO: 4090; WAN024F2H_at; Start 154; Stop 178
gatatgtcccatacgctcacgacga

SEQ ID NO: 189622 - DNA, 25 bp, Artificial
  probe
  misc_feature (1)..(25): SEQ ID NO: 4090; WAN024F2H_at; Start 45; Stop 69
caaagtagataacttcctcgagggc

SEQ ID NO: 189623 - DNA, 25 bp, Artificial
  probe
  misc_feature (1)..(25): SEQ ID NO: 4090; WAN024F2H_at; Start 26; Stop 50
tcaatcaccacataagccgcaaagt

SEQ ID NO: 189624 - DNA, 25 bp, Artificial
  probe
  misc_feature (1)..(25): SEQ ID NO: 4090; WAN024F2H_at; Start 81; Stop 105
tatcaagggtcaagcccatacggct

SEQ ID NO: 189625 - DNA, 25 bp, Artificial
  probe
  misc_feature (1)..(25): SEQ ID NO: 4090; WAN024F2H_at; Start 99; Stop 123
tacggcttggaatccccttgaagta

SEQ ID NO: 189626 - DNA, 25 bp, Artificial
  probe
  misc_feature (1)..(25): SEQ ID NO: 4090; WAN024F2H_at; Start 4; Stop 28
ctcaagtggtgtatccttaggatca

SEQ ID NO: 189627 - DNA, 25 bp, Artificial
  probe
  misc_feature (1)..(25): SEQ ID NO: 4090; WAN024F2H_at; Start 21; Stop 45
taggatcaatcaccacataagccgc

SEQ ID NO: 189628 - DNA, 25 bp, Artificial
  probe
  misc_feature (1)..(25): SEQ ID NO: 4090; WAN024F2H_at; Start 263; Stop 287
tcccagtcttttgtaggaccaaaga

SEQ ID NO: 189629 - DNA, 25 bp, Artificial
  probe
  misc_feature (1)..(25): SEQ ID NO: 4090; WAN024F2H_at; Start 286; Stop 310
gatcacttcatcaaagagtccttca

SEQ ID NO: 189630 - DNA, 25 bp, Artificial
  probe
  misc_feature (1)..(25): SEQ ID NO: 4090; WAN024F2H_at; Start 294; Stop 318
catcaaagagtccttcacgttctgg

SEQ ID NO: 189631 - DNA, 25 bp, Artificial
  probe
  misc_feature (1)..(25): SEQ ID NO: 4090; WAN024F2H_at; Start 340; Stop 364
tgtttcaggttttttgacttctcca

SEQ ID NO: 189632 - DNA, 25 bp, Artificial
  probe
  misc_feature (1)..(25): SEQ ID NO: 4090; WAN024F2H_at; Start 62; Stop 86
tcgagggcacgagggctcatatcaa

SEQ ID NO: 189633 - DNA, 25 bp, Artificial
  probe
  misc_feature (1)..(25): SEQ ID NO: 4090; WAN024F2H_at; Start 188; Stop 212
cgcgttacttcaaccccacagcggt

SEQ ID NO: 189634 - DNA, 25 bp, Artificial
  probe
  misc_feature (1)..(25): SEQ ID NO: 4090; WAN024F2H_at; Start 274; Stop 298
tgtaggaccaaagatcacttcatca

SEQ ID NO: 189635 - DNA, 25 bp, Artificial
  probe
  misc_feature (1)..(25): SEQ ID NO: 4090; WAN024F2H_at; Start 124; Stop 148
ccagatgtgagatacaggagctttc

SEQ ID NO: 189636 - DNA, 25 bp, Artificial
  probe
  misc_feature (1)..(25): SEQ ID NO: 4090; WAN024F2H_at; Start 132; Stop 156
gagatacaggagctttcaattcgat

SEQ ID NO: 189637 - DNA, 25 bp, Artificial
  probe
  misc_feature (1)..(25): SEQ ID NO: 4090; WAN024F2H_at; Start 351; Stop 375
ttttgacttctccataagaccatga

SEQ ID NO: 189638 - DNA, 25 bp, Artificial
  probe
  misc_feature (1)..(25): SEQ ID NO: 4090; WAN024F2H_at; Start 255; Stop 279
aagcacattcccagtcttttgtagg

SEQ ID NO: 189639 - DNA, 25 bp, Artificial
  probe
  misc_feature (1)..(25): SEQ ID NO: 4090; WAN024F2H_at; Start 69; Stop 93
cacgagggctcatatcaagggtcaa

SEQ ID NO: 189640 - DNA, 25 bp, Artificial
  probe
  misc_feature (1)..(25): SEQ ID NO: 4090; WAN024F2H_at; Start 50; Stop 74
tagataacttcctcgagggcacgag

SEQ ID NO: 189641 - DNA, 25 bp, Artificial
  probe
  misc_feature (1)..(25): SEQ ID NO: 4090; WAN024F2H_at; Start 204; Stop 228
cacagcggtcacaaacaattcctct

SEQ ID NO: 189642 - DNA, 25 bp, Artificial
  probe
  misc_feature (1)..(25): SEQ ID NO: 4090; WAN024F2H_at; Start 94; Stop 118
gcccatacggcttggaatccccttg

SEQ ID NO: 189643 - DNA, 25 bp, Artificial
  probe
  misc_feature (1)..(25): SEQ ID NO: 4090; WAN024F2H_at; Start 309; Stop 333
cacgttctggtttcaaggtacgata

SEQ ID NO: 189644 - DNA, 25 bp, Artificial
  probe
  misc_feature (1)..(25): SEQ ID NO: 4090; WAN024F2H_at; Start 114; Stop 138
ccttgaagtaccagatgtgagatac

SEQ ID NO: 189645 - DNA, 25 bp, Artificial
  probe
  misc_feature (1)..(25): SEQ ID NO: 4090; WAN024F2H_at; Start 230; Stop 254
taacgaatgcgtttgtacttaccac

SEQ ID NO: 189646 - DNA, 25 bp, Artificial
  probe
  misc_feature (1)..(25): SEQ ID NO: 4090; WAN024F2H_at; Start 244; Stop 268
gtacttaccacaagcacattcccag

SEQ ID NO: 189647 - DNA, 25 bp, Artificial
  probe
  misc_feature (1)..(25): SEQ ID NO: 4090; WAN024F2H_at; Start 36; Stop 60
cataagccgcaaagtagataacttc

SEQ ID NO: 189648 - DNA, 25 bp, Artificial
  probe
  misc_feature (1)..(25): SEQ ID NO: 4090; WAN024F2H_at; Start 216; Stop 240
aaacaattcctctgtaacgaatgcg

SEQ ID NO: 189649 - DNA, 25 bp, Artificial
  probe
  misc_feature (1)..(25): SEQ ID NO: 4090; WAN024F2H_at; Start 163; Stop 187
catacgctcacgacgaactttcgta

SEQ ID NO: 189650 - DNA, 25 bp, Artificial
  probe
  misc_feature (1)..(25): SEQ ID NO: 4090; WAN024F2H_at; Start 141; Stop 165
gagctttcaattcgatatgtcccat

SEQ ID NO: 189651 - DNA, 25 bp, Artificial
  probe
  misc_feature (1)..(25): SEQ ID NO: 4090; WAN024F2H_at; Start 108; Stop 132
gaatccccttgaagtaccagatgtg

SEQ ID NO: 189652 - DNA, 25 bp, Artificial
  probe
  misc_feature (1)..(25): SEQ ID NO: 4090; WAN024F2H_at; Start 322; Stop 346
caaggtacgataattgattgtttca

SEQ ID NO: 189653 - DNA, 25 bp, Artificial
  probe
  misc_feature (1)..(25): SEQ ID NO: 2044; WAN024F2I_at; Start 148; Stop 172
tatttagctggaacaccttctgtca

SEQ ID NO: 189654 - DNA, 25 bp, Artificial
  probe
  misc_feature (1)..(25): SEQ ID NO: 2044; WAN024F2I_at; Start 199; Stop 223
tatggtagcccctctggcatgatat

SEQ ID NO: 189655 - DNA, 25 bp, Artificial
  probe
  misc_feature (1)..(25): SEQ ID NO: 2044; WAN024F2I_at; Start 186; Stop 210
tggttcttgcaagtatggtagcccc

SEQ ID NO: 189656 - DNA, 25 bp, Artificial
  probe
  misc_feature (1)..(25): SEQ ID NO: 2044; WAN024F2I_at; Start 239; Stop 263
taccaactgttgtaagcaagacctt

SEQ ID NO: 189657 - DNA, 25 bp, Artificial
  probe
  misc_feature (1)..(25): SEQ ID NO: 2044; WAN024F2I_at; Start 303; Stop 327
tgttgcgataccaacacgtgagtgg

SEQ ID NO: 189658 - DNA, 25 bp, Artificial
  probe
  misc_feature (1)..(25): SEQ ID NO: 2044; WAN024F2I_at; Start 2; Stop 26
tgcggtcaagtagggcagaagtttc

SEQ ID NO: 189659 - DNA, 25 bp, Artificial
  probe
  misc_feature (1)..(25): SEQ ID NO: 2044; WAN024F2I_at; Start 193; Stop 217
tgcaagtatggtagcccctctggca

SEQ ID NO: 189660 - DNA, 25 bp, Artificial
  probe
  misc_feature (1)..(25): SEQ ID NO: 2044; WAN024F2I_at; Start 279; Stop 303
tgtccaaggcttgttgaggctgtct

SEQ ID NO: 189661 - DNA, 25 bp, Artificial
  probe
  misc_feature (1)..(25): SEQ ID NO: 2044; WAN024F2I_at; Start 227; Stop 251
tgaagagaattttaccaactgttgt

SEQ ID NO: 189662 - DNA, 25 bp, Artificial
  probe
  misc_feature (1)..(25): SEQ ID NO: 2044; WAN024F2I_at; Start 156; Stop 180
tggaacaccttctgtcaagttggca

SEQ ID NO: 189663 - DNA, 25 bp, Artificial
  probe
  misc_feature (1)..(25): SEQ ID NO: 2044; WAN024F2I_at; Start 294; Stop 318
gaggctgtctgttgcgataccaaca

SEQ ID NO: 189664 - DNA, 25 bp, Artificial
  probe
  misc_feature (1)..(25): SEQ ID NO: 2044; WAN024F2I_at; Start 40; Stop 64
cgtttgaagatttcagcgatgatat

SEQ ID NO: 189665 - DNA, 25 bp, Artificial
  probe
  misc_feature (1)..(25): SEQ ID NO: 2044; WAN024F2I_at; Start 219; Stop 243
gatatcgttgaagagaattttacca

SEQ ID NO: 189666 - DNA, 25 bp, Artificial
  probe
  misc_feature (1)..(25): SEQ ID NO: 2044; WAN024F2I_at; Start 161; Stop 185
caccttctgtcaagttggcattgtt

SEQ ID NO: 189667 - DNA, 25 bp, Artificial
  probe
  misc_feature (1)..(25): SEQ ID NO: 2044; WAN024F2I_at; Start 309; Stop 333
gataccaacacgtgagtggaggtga

SEQ ID NO: 189668 - DNA, 25 bp, Artificial
  probe
  misc_feature (1)..(25): SEQ ID NO: 2044; WAN024F2I_at; Start 78; Stop 102
cttcttgaatggagggttgagctca

SEQ ID NO: 189669 - DNA, 25 bp, Artificial
  probe
  misc_feature (1)..(25): SEQ ID NO: 2044; WAN024F2I_at; Start 211; Stop 235
tctggcatgatatcgttgaagagaa

SEQ ID NO: 189670 - DNA, 25 bp, Artificial
  probe
  misc_feature (1)..(25): SEQ ID NO: 2044; WAN024F2I_at; Start 206; Stop 230
gcccctctggcatgatatcgttgaa

SEQ ID NO: 189671 - DNA, 25 bp, Artificial
  probe
  misc_feature (1)..(25): SEQ ID NO: 2044; WAN024F2I_at; Start 92; Stop 116
ggttgagctcaagattgctgatagc

SEQ ID NO: 189672 - DNA, 25 bp, Artificial
  probe
  misc_feature (1)..(25): SEQ ID NO: 2044; WAN024F2I_at; Start 190; Stop 214
tcttgcaagtatggtagcccctctg

SEQ ID NO: 189673 - DNA, 25 bp, Artificial
  probe
  misc_feature (1)..(25): SEQ ID NO: 2044; WAN024F2I_at; Start 85; Stop 109
aatggagggttgagctcaagattgc

SEQ ID NO: 189674 - DNA, 25 bp, Artificial
  probe
  misc_feature (1)..(25): SEQ ID NO: 2044; WAN024F2I_at; Start 271; Stop 295
tgctcttctgtccaaggcttgttga

SEQ ID NO: 189675 - DNA, 25 bp, Artificial
  probe
  misc_feature (1)..(25): SEQ ID NO: 2044; WAN024F2I_at; Start 98; Stop 122
gctcaagattgctgatagcttcctt

SEQ ID NO: 189676 - DNA, 25 bp, Artificial
  probe
  misc_feature (1)..(25): SEQ ID NO: 2044; WAN024F2I_at; Start 15; Stop 39
ggcagaagtttctgtcgtacggaaa

SEQ ID NO: 189677 - DNA, 25 bp, Artificial
  probe
  misc_feature (1)..(25): SEQ ID NO: 2044; WAN024F2I_at; Start 129; Stop 153
tccaccaagtggcaagaagtattta

SEQ ID NO: 189678 - DNA, 25 bp, Artificial
  probe
  misc_feature (1)..(25): SEQ ID NO: 2044; WAN024F2I_at; Start 263; Stop 287
tatgtctttgctcttctgtccaagg

SEQ ID NO: 189679 - DNA, 25 bp, Artificial
  probe
  misc_feature (1)..(25): SEQ ID NO: 2044; WAN024F2I_at; Start 102; Stop 126
aagattgctgatagcttccttgata

SEQ ID NO: 189680 - DNA, 25 bp, Artificial
  probe
  misc_feature (1)..(25): SEQ ID NO: 2044; WAN024F2I_at; Start 249; Stop 273
tgtaagcaagaccttatgtctttgc

SEQ ID NO: 189681 - DNA, 25 bp, Artificial
  probe
  misc_feature (1)..(25): SEQ ID NO: 2044; WAN024F2I_at; Start 32; Stop 56
tacggaaacgtttgaagatttcagc

SEQ ID NO: 189682 - DNA, 25 bp, Artificial
  probe
  misc_feature (1)..(25): SEQ ID NO: 2044; WAN024F2I_at; Start 140; Stop 164
gcaagaagtatttagctggaacacc

SEQ ID NO: 189683 - DNA, 25 bp, Artificial
  probe
  misc_feature (1)..(25): SEQ ID NO: 2044; WAN024F2I_at; Start 290; Stop 314
tgttgaggctgtctgttgcgatacc

SEQ ID NO: 189684 - DNA, 25 bp, Artificial
  probe
  misc_feature (1)..(25): SEQ ID NO: 2044; WAN024F2I_at; Start 172; Stop 196
aagttggcattgtttggttcttgca

SEQ ID NO: 189685 - DNA, 25 bp, Artificial
  probe
  misc_feature (1)..(25): SEQ ID NO: 2044; WAN024F2I_at; Start 75; Stop 99
tttcttcttgaatggagggttgagc

SEQ ID NO: 189686 - DNA, 25 bp, Artificial
  probe
  misc_feature (1)..(25): SEQ ID NO: 2044; WAN024F2I_at; Start 25; Stop 49
tctgtcgtacggaaacgtttgaaga

SEQ ID NO: 189687 - DNA, 25 bp, Artificial
  probe
  misc_feature (1)..(25): SEQ ID NO: 4148; WAN024F2J_at; Start 302; Stop 326
ggcacaccacattggtacatcttaa

SEQ ID NO: 189688 - DNA, 25 bp, Artificial
  probe
  misc_feature (1)..(25): SEQ ID NO: 4148; WAN024F2J_at; Start 142; Stop 166
aagcactgggtgttctttaatcact

SEQ ID NO: 189689 - DNA, 25 bp, Artificial
  probe
  misc_feature (1)..(25): SEQ ID NO: 4148; WAN024F2J_at; Start 317; Stop 341
tacatcttaagagttggaccaacgg

SEQ ID NO: 189690 - DNA, 25 bp, Artificial
  probe
  misc_feature (1)..(25): SEQ ID NO: 4148; WAN024F2J_at; Start 276; Stop 300
taaagagttcaatcgccatttcacg

SEQ ID NO: 189691 - DNA, 25 bp, Artificial
  probe
  misc_feature (1)..(25): SEQ ID NO: 4148; WAN024F2J_at; Start 226; Stop 250
gacgttttgcacgatatcacgggca

SEQ ID NO: 189692 - DNA, 25 bp, Artificial
  probe
  misc_feature (1)..(25): SEQ ID NO: 4148; WAN024F2J_at; Start 311; Stop 335
cattggtacatcttaagagttggac

SEQ ID NO: 189693 - DNA, 25 bp, Artificial
  probe
  misc_feature (1)..(25): SEQ ID NO: 4148; WAN024F2J_at; Start 124; Stop 148
ggtcggtgcgcggttcaaaagcact

SEQ ID NO: 189694 - DNA, 25 bp, Artificial
  probe
  misc_feature (1)..(25): SEQ ID NO: 4148; WAN024F2J_at; Start 238; Stop 262
gatatcacgggcaacgatttcacgc

SEQ ID NO: 189695 - DNA, 25 bp, Artificial
  probe
  misc_feature (1)..(25): SEQ ID NO: 4148; WAN024F2J_at; Start 88; Stop 112
gactggctcgaaggcttggataccc

SEQ ID NO: 189696 - DNA, 25 bp, Artificial
  probe
  misc_feature (1)..(25): SEQ ID NO: 4148; WAN024F2J_at; Start 64; Stop 88
gcgaagagccttaccatcaatcaag

SEQ ID NO: 189697 - DNA, 25 bp, Artificial
  probe
  misc_feature (1)..(25): SEQ ID NO: 4148; WAN024F2J_at; Start 205; Stop 229
caccaagcgtttagctgctttgacg

SEQ ID NO: 189698 - DNA, 25 bp, Artificial
  probe
  misc_feature (1)..(25): SEQ ID NO: 4148; WAN024F2J_at; Start 216; Stop 240
tagctgctttgacgttttgcacgat

SEQ ID NO: 189699 - DNA, 25 bp, Artificial
  probe
  misc_feature (1)..(25): SEQ ID NO: 4148; WAN024F2J_at; Start 258; Stop 282
cacgcatgacaaatggtttaaagag

SEQ ID NO: 189700 - DNA, 25 bp, Artificial
  probe
  misc_feature (1)..(25): SEQ ID NO: 4148; WAN024F2J_at; Start 78; Stop 102
catcaatcaagactggctcgaaggc

SEQ ID NO: 189701 - DNA, 25 bp, Artificial
  probe
  misc_feature (1)..(25): SEQ ID NO: 4148; WAN024F2J_at; Start 69; Stop 93
gagccttaccatcaatcaagactgg

SEQ ID NO: 189702 - DNA, 25 bp, Artificial
  probe
  misc_feature (1)..(25): SEQ ID NO: 4148; WAN024F2J_at; Start 194; Stop 218
tctccgcgttccaccaagcgtttag

SEQ ID NO: 189703 - DNA, 25 bp, Artificial
  probe
  misc_feature (1)..(25): SEQ ID NO: 4148; WAN024F2J_at; Start 267; Stop 291
caaatggtttaaagagttcaatcgc

SEQ ID NO: 189704 - DNA, 25 bp, Artificial
  probe
  misc_feature (1)..(25): SEQ ID NO: 4148; WAN024F2J_at; Start 97; Stop 121
gaaggcttggatacccaaacggtga

SEQ ID NO: 189705 - DNA, 25 bp, Artificial
  probe
  misc_feature (1)..(25): SEQ ID NO: 4148; WAN024F2J_at; Start 44; Stop 68
tcacagacaagtgggtgcaagcgaa

SEQ ID NO: 189706 - DNA, 25 bp, Artificial
  probe
  misc_feature (1)..(25): SEQ ID NO: 4148; WAN024F2J_at; Start 30; Stop 54
cagcattgtaggcttcacagacaag

SEQ ID NO: 189707 - DNA, 25 bp, Artificial
  probe
  misc_feature (1)..(25): SEQ ID NO: 4148; WAN024F2J_at; Start 175; Stop 199
gatatcccagatacgctcatctccg

SEQ ID NO: 189708 - DNA, 25 bp, Artificial
  probe
  misc_feature (1)..(25): SEQ ID NO: 4148; WAN024F2J_at; Start 2; Stop 26
tggatggccatttggtccccgtcaa

SEQ ID NO: 189709 - DNA, 25 bp, Artificial
  probe
  misc_feature (1)..(25): SEQ ID NO: 4148; WAN024F2J_at; Start 57; Stop 81
ggtgcaagcgaagagccttaccatc

SEQ ID NO: 189710 - DNA, 25 bp, Artificial
  probe
  misc_feature (1)..(25): SEQ ID NO: 4148; WAN024F2J_at; Start 152; Stop 176
tgttctttaatcacttcttcaagga

SEQ ID NO: 189711 - DNA, 25 bp, Artificial
  probe
  misc_feature (1)..(25): SEQ ID NO: 4148; WAN024F2J_at; Start 38; Stop 62
taggcttcacagacaagtgggtgca

SEQ ID NO: 189712 - DNA, 25 bp, Artificial
  probe
  misc_feature (1)..(25): SEQ ID NO: 4148; WAN024F2J_at; Start 324; Stop 348
taagagttggaccaacggcgataac

SEQ ID NO: 189713 - DNA, 25 bp, Artificial
  probe
  misc_feature (1)..(25): SEQ ID NO: 4148; WAN024F2J_at; Start 50; Stop 74
acaagtgggtgcaagcgaagagcct

SEQ ID NO: 189714 - DNA, 25 bp, Artificial
  probe
  misc_feature (1)..(25): SEQ ID NO: 4148; WAN024F2J_at; Start 252; Stop 276
cgatttcacgcatgacaaatggttt

SEQ ID NO: 189715 - DNA, 25 bp, Artificial
  probe
  misc_feature (1)..(25): SEQ ID NO: 4148; WAN024F2J_at; Start 14; Stop 38
tggtccccgtcaaagtcagcattgt

SEQ ID NO: 189716 - DNA, 25 bp, Artificial
  probe
  misc_feature (1)..(25): SEQ ID NO: 4148; WAN024F2J_at; Start 111; Stop 135
ccaaacggtgaagggtcggtgcgcg

SEQ ID NO: 189717 - DNA, 25 bp, Artificial
  probe
  misc_feature (1)..(25): SEQ ID NO: 4148; WAN024F2J_at; Start 245; Stop 269
cgggcaacgatttcacgcatgacaa

SEQ ID NO: 189718 - DNA, 25 bp, Artificial
  probe
  misc_feature (1)..(25): SEQ ID NO: 4148; WAN024F2J_at; Start 132; Stop 156
cgcggttcaaaagcactgggtgttc

SEQ ID NO: 189719 - DNA, 25 bp, Artificial
  probe
  misc_feature (1)..(25): SEQ ID NO: 4148; WAN024F2J_at; Start 199; Stop 223
gcgttccaccaagcgtttagctgct

SEQ ID NO: 189720 - DNA, 25 bp, Artificial
  probe
  misc_feature (1)..(25): SEQ ID NO: 4148; WAN024F2J_at; Start 24; Stop 48
caaagtcagcattgtaggcttcaca

SEQ ID NO: 189721 - DNA, 25 bp, Artificial
  probe
  misc_feature (1)..(25): SEQ ID NO: 557; WAN024F2K_at; Start 6; Stop 30
tgcgtcagtaaggacacgagttgtt

SEQ ID NO: 189722 - DNA, 25 bp, Artificial
  probe
  misc_feature (1)..(25): SEQ ID NO: 557; WAN024F2K_at; Start 204; Stop 228
tggatccatgacacggactttacgg

SEQ ID NO: 189723 - DNA, 25 bp, Artificial
  probe
  misc_feature (1)..(25): SEQ ID NO: 557; WAN024F2K_at; Start 112; Stop 136
gctggaactccacctgcgataagga

SEQ ID NO: 189724 - DNA, 25 bp, Artificial
  probe
  misc_feature (1)..(25): SEQ ID NO: 557; WAN024F2K_at; Start 134; Stop 158
ggacatctttgttggcatctgtaaa

SEQ ID NO: 189725 - DNA, 25 bp, Artificial
  probe
  misc_feature (1)..(25): SEQ ID NO: 557; WAN024F2K_at; Start 54; Stop 78
gaaactgtttgtttcaagtgaggct

SEQ ID NO: 189726 - DNA, 25 bp, Artificial
  probe
  misc_feature (1)..(25): SEQ ID NO: 557; WAN024F2K_at; Start 142; Stop 166
ttgttggcatctgtaaagtcattga

SEQ ID NO: 189727 - DNA, 25 bp, Artificial
  probe
  misc_feature (1)..(25): SEQ ID NO: 557; WAN024F2K_at; Start 183; Stop 207
catgagaagatctgtatcacctgga

SEQ ID NO: 189728 - DNA, 25 bp, Artificial
  probe
  misc_feature (1)..(25): SEQ ID NO: 557; WAN024F2K_at; Start 199; Stop 223
tcacctggatccatgacacggactt

SEQ ID NO: 189729 - DNA, 25 bp, Artificial
  probe
  misc_feature (1)..(25): SEQ ID NO: 557; WAN024F2K_at; Start 18; Stop 42
gacacgagttgtttcctggaaggaa

SEQ ID NO: 189730 - DNA, 25 bp, Artificial
  probe
  misc_feature (1)..(25): SEQ ID NO: 557; WAN024F2K_at; Start 208; Stop 232
tccatgacacggactttacggatca

SEQ ID NO: 189731 - DNA, 25 bp, Artificial
  probe
  misc_feature (1)..(25): SEQ ID NO: 557; WAN024F2K_at; Start 188; Stop 212
gaagatctgtatcacctggatccat

SEQ ID NO: 189732 - DNA, 25 bp, Artificial
  probe
  misc_feature (1)..(25): SEQ ID NO: 557; WAN024F2K_at; Start 40; Stop 64
gaagccgctgacaagaaactgtttg

SEQ ID NO: 189733 - DNA, 25 bp, Artificial
  probe
  misc_feature (1)..(25): SEQ ID NO: 557; WAN024F2K_at; Start 37; Stop 61
aaggaagccgctgacaagaaactgt

SEQ ID NO: 189734 - DNA, 25 bp, Artificial
  probe
  misc_feature (1)..(25): SEQ ID NO: 557; WAN024F2K_at; Start 67; Stop 91
tcaagtgaggctttggtaattccca

SEQ ID NO: 189735 - DNA, 25 bp, Artificial
  probe
  misc_feature (1)..(25): SEQ ID NO: 557; WAN024F2K_at; Start 164; Stop 188
tgatatccatgagggtacccatgag

SEQ ID NO: 189736 - DNA, 25 bp, Artificial
  probe
  misc_feature (1)..(25): SEQ ID NO: 557; WAN024F2K_at; Start 87; Stop 111
tcccataaggactgggcgacctgtc

SEQ ID NO: 189737 - DNA, 25 bp, Artificial
  probe
  misc_feature (1)..(25): SEQ ID NO: 557; WAN024F2K_at; Start 1; Stop 25
atagctgcgtcagtaaggacacgag

SEQ ID NO: 189738 - DNA, 25 bp, Artificial
  probe
  misc_feature (1)..(25): SEQ ID NO: 557; WAN024F2K_at; Start 96; Stop 120
gactgggcgacctgtcgctggaact

SEQ ID NO: 189739 - DNA, 25 bp, Artificial
  probe
  misc_feature (1)..(25): SEQ ID NO: 557; WAN024F2K_at; Start 148; Stop 172
gcatctgtaaagtcattgatatcca

SEQ ID NO: 189740 - DNA, 25 bp, Artificial
  probe
  misc_feature (1)..(25): SEQ ID NO: 557; WAN024F2K_at; Start 120; Stop 144
tccacctgcgataaggacatctttg

SEQ ID NO: 189741 - DNA, 25 bp, Artificial
  probe
  misc_feature (1)..(25): SEQ ID NO: 557; WAN024F2K_at; Start 80; Stop 104
tggtaattcccataaggactgggcg

SEQ ID NO: 189742 - DNA, 25 bp, Artificial
  probe
  misc_feature (1)..(25): SEQ ID NO: 557; WAN024F2K_at; Start 179; Stop 203
tacccatgagaagatctgtatcacc

SEQ ID NO: 189743 - DNA, 25 bp, Artificial
  probe
  misc_feature (1)..(25): SEQ ID NO: 557; WAN024F2K_at; Start 213; Stop 237
gacacggactttacggatcatttga

SEQ ID NO: 189744 - DNA, 25 bp, Artificial
  probe
  misc_feature (1)..(25): SEQ ID NO: 557; WAN024F2K_at; Start 128; Stop 152
cgataaggacatctttgttggcatc

SEQ ID NO: 189745 - DNA, 25 bp, Artificial
  probe
  misc_feature (1)..(25): SEQ ID NO: 557; WAN024F2K_at; Start 99; Stop 123
tgggcgacctgtcgctggaactcca

SEQ ID NO: 189746 - DNA, 25 bp, Artificial
  probe
  misc_feature (1)..(25): SEQ ID NO: 557; WAN024F2K_at; Start 83; Stop 107
taattcccataaggactgggcgacc

SEQ ID NO: 189747 - DNA, 25 bp, Artificial
  probe
  misc_feature (1)..(25): SEQ ID NO: 557; WAN024F2K_at; Start 173; Stop 197
tgagggtacccatgagaagatctgt

SEQ ID NO: 189748 - DNA, 25 bp, Artificial
  probe
  misc_feature (1)..(25): SEQ ID NO: 557; WAN024F2K_at; Start 31; Stop 55
tcctggaaggaagccgctgacaaga

SEQ ID NO: 189749 - DNA, 25 bp, Artificial
  probe
  misc_feature (1)..(25): SEQ ID NO: 557; WAN024F2K_at; Start 115; Stop 139
ggaactccacctgcgataaggacat

SEQ ID NO: 189750 - DNA, 25 bp, Artificial
  probe
  misc_feature (1)..(25): SEQ ID NO: 557; WAN024F2K_at; Start 73; Stop 97
gaggctttggtaattcccataagga

SEQ ID NO: 189751 - DNA, 25 bp, Artificial
  probe
  misc_feature (1)..(25): SEQ ID NO: 557; WAN024F2K_at; Start 27; Stop 51
tgtttcctggaaggaagccgctgac

SEQ ID NO: 189752 - DNA, 25 bp, Artificial
  probe
  misc_feature (1)..(25): SEQ ID NO: 557; WAN024F2K_at; Start 195; Stop 219
tgtatcacctggatccatgacacgg

SEQ ID NO: 189753 - DNA, 25 bp, Artificial
  probe
  misc_feature (1)..(25): SEQ ID NO: 557; WAN024F2K_at; Start 160; Stop 184
tcattgatatccatgagggtaccca

SEQ ID NO: 189754 - DNA, 25 bp, Artificial
  probe
  misc_feature (1)..(25): SEQ ID NO: 557; WAN024F2K_at; Start 43; Stop 67
gccgctgacaagaaactgtttgttt

SEQ ID NO: 189755 - DNA, 25 bp, Artificial
  probe
  misc_feature (1)..(25): SEQ ID NO: 3101; WAN024F2L_at; Start 140; Stop 164
tccacagtttcaacggcagtatcca

SEQ ID NO: 189756 - DNA, 25 bp, Artificial
  probe
  misc_feature (1)..(25): SEQ ID NO: 3101; WAN024F2L_at; Start 237; Stop 261
catgtggttcaaggttacggtaacg

SEQ ID NO: 189757 - DNA, 25 bp, Artificial
  probe
  misc_feature (1)..(25): SEQ ID NO: 3101; WAN024F2L_at; Start 28; Stop 52
tcagcttctttcttttattttacca

SEQ ID NO: 189758 - DNA, 25 bp, Artificial
  probe
  misc_feature (1)..(25): SEQ ID NO: 3101; WAN024F2L_at; Start 265; Stop 289
cataccagtaccagctgggatgatc

SEQ ID NO: 189759 - DNA, 25 bp, Artificial
  probe
  misc_feature (1)..(25): SEQ ID NO: 3101; WAN024F2L_at; Start 309; Stop 333
ctttaagtccaaggagatggtcttt

SEQ ID NO: 189760 - DNA, 25 bp, Artificial
  probe
  misc_feature (1)..(25): SEQ ID NO: 3101; WAN024F2L_at; Start 87; Stop 111
agagaatgagagaaccctcgggttc

SEQ ID NO: 189761 - DNA, 25 bp, Artificial
  probe
  misc_feature (1)..(25): SEQ ID NO: 3101; WAN024F2L_at; Start 134; Stop 158
gtttcttccacagtttcaacggcag

SEQ ID NO: 189762 - DNA, 25 bp, Artificial
  probe
  misc_feature (1)..(25): SEQ ID NO: 3101; WAN024F2L_at; Start 186; Stop 210
catttccttcttcctctactggagg

SEQ ID NO: 189763 - DNA, 25 bp, Artificial
  probe
  misc_feature (1)..(25): SEQ ID NO: 3101; WAN024F2L_at; Start 154; Stop 178
ggcagtatccacaactacttctgtt

SEQ ID NO: 189764 - DNA, 25 bp, Artificial
  probe
  misc_feature (1)..(25): SEQ ID NO: 3101; WAN024F2L_at; Start 201; Stop 225
ctactggaggattaaggtattcttc

SEQ ID NO: 189765 - DNA, 25 bp, Artificial
  probe
  misc_feature (1)..(25): SEQ ID NO: 3101; WAN024F2L_at; Start 295; Stop 319
gatgataacattttctttaagtcca

SEQ ID NO: 189766 - DNA, 25 bp, Artificial
  probe
  misc_feature (1)..(25): SEQ ID NO: 3101; WAN024F2L_at; Start 214; Stop 238
aaggtattcttcttcgttgacagca

SEQ ID NO: 189767 - DNA, 25 bp, Artificial
  probe
  misc_feature (1)..(25): SEQ ID NO: 3101; WAN024F2L_at; Start 286; Stop 310
gatcttaccgatgataacattttct

SEQ ID NO: 189768 - DNA, 25 bp, Artificial
  probe
  misc_feature (1)..(25): SEQ ID NO: 3101; WAN024F2L_at; Start 107; Stop 131
ggttctctcattctctcttattcta

SEQ ID NO: 189769 - DNA, 25 bp, Artificial
  probe
  misc_feature (1)..(25): SEQ ID NO: 3101; WAN024F2L_at; Start 13; Stop 37
tacccgtctcctttgtcagcttctt

SEQ ID NO: 189770 - DNA, 25 bp, Artificial
  probe
  misc_feature (1)..(25): SEQ ID NO: 3101; WAN024F2L_at; Start 232; Stop 256
gacagcatgtggttcaaggttacgg

SEQ ID NO: 189771 - DNA, 25 bp, Artificial
  probe
  misc_feature (1)..(25): SEQ ID NO: 3101; WAN024F2L_at; Start 169; Stop 193
tacttctgttgtttcttcatttcct

SEQ ID NO: 189772 - DNA, 25 bp, Artificial
  probe
  misc_feature (1)..(25): SEQ ID NO: 3101; WAN024F2L_at; Start 83; Stop 107
gaagagagaatgagagaaccctcgg

SEQ ID NO: 189773 - DNA, 25 bp, Artificial
  probe
  misc_feature (1)..(25): SEQ ID NO: 3101; WAN024F2L_at; Start 256; Stop 280
gtaacgggccataccagtaccagct

SEQ ID NO: 189774 - DNA, 25 bp, Artificial
  probe
  misc_feature (1)..(25): SEQ ID NO: 3101; WAN024F2L_at; Start 120; Stop 144
tctcttattctactgtttcttccac

SEQ ID NO: 189775 - DNA, 25 bp, Artificial
  probe
  misc_feature (1)..(25): SEQ ID NO: 3101; WAN024F2L_at; Start 261; Stop 285
gggccataccagtaccagctgggat

SEQ ID NO: 189776 - DNA, 25 bp, Artificial
  probe
  misc_feature (1)..(25): SEQ ID NO: 3101; WAN024F2L_at; Start 147; Stop 171
tttcaacggcagtatccacaactac

SEQ ID NO: 189777 - DNA, 25 bp, Artificial
  probe
  misc_feature (1)..(25): SEQ ID NO: 3101; WAN024F2L_at; Start 1; Stop 25
atgtttgttccatacccgtctcctt

SEQ ID NO: 189778 - DNA, 25 bp, Artificial
  probe
  misc_feature (1)..(25): SEQ ID NO: 3101; WAN024F2L_at; Start 7; Stop 31
gttccatacccgtctcctttgtcag

SEQ ID NO: 189779 - DNA, 25 bp, Artificial
  probe
  misc_feature (1)..(25): SEQ ID NO: 3101; WAN024F2L_at; Start 218; Stop 242
tattcttcttcgttgacagcatgtg

SEQ ID NO: 189780 - DNA, 25 bp, Artificial
  probe
  misc_feature (1)..(25): SEQ ID NO: 3101; WAN024F2L_at; Start 102; Stop 126
cctcgggttctctcattctctctta

SEQ ID NO: 189781 - DNA, 25 bp, Artificial
  probe
  misc_feature (1)..(25): SEQ ID NO: 3101; WAN024F2L_at; Start 64; Stop 88
aaaatggagaaagttttcagaagag

SEQ ID NO: 189782 - DNA, 25 bp, Artificial
  probe
  misc_feature (1)..(25): SEQ ID NO: 3101; WAN024F2L_at; Start 79; Stop 103
ttcagaagagagaatgagagaaccc

SEQ ID NO: 189783 - DNA, 25 bp, Artificial
  probe
  misc_feature (1)..(25): SEQ ID NO: 3101; WAN024F2L_at; Start 48; Stop 72
taccacatttcgtggaaaaatggag

SEQ ID NO: 189784 - DNA, 25 bp, Artificial
  probe
  misc_feature (1)..(25): SEQ ID NO: 3101; WAN024F2L_at; Start 306; Stop 330
tttctttaagtccaaggagatggtc

SEQ ID NO: 189785 - DNA, 25 bp, Artificial
  probe
  misc_feature (1)..(25): SEQ ID NO: 3101; WAN024F2L_at; Start 224; Stop 248
tcttcgttgacagcatgtggttcaa

SEQ ID NO: 189786 - DNA, 25 bp, Artificial
  probe
  misc_feature (1)..(25): SEQ ID NO: 3101; WAN024F2L_at; Start 198; Stop 222
cctctactggaggattaaggtattc

SEQ ID NO: 189787 - DNA, 25 bp, Artificial
  probe
  misc_feature (1)..(25): SEQ ID NO: 3101; WAN024F2L_at; Start 273; Stop 297
taccagctgggatgatcttaccgat

SEQ ID NO: 189788 - DNA, 25 bp, Artificial
  probe
  misc_feature (1)..(25): SEQ ID NO: 3101; WAN024F2L_at; Start 278; Stop 302
gctgggatgatcttaccgatgataa

SEQ ID NO: 189789 - DNA, 25 bp, Artificial
  probe
  misc_feature (1)..(25): SEQ ID NO: 3145; WAN024F2M-3_at; Start 1507; Stop 1531
gacaggtcgcccagtccttatggga

SEQ ID NO: 189790 - DNA, 25 bp, Artificial
  probe
  misc_feature (1)..(25): SEQ ID NO: 3145; WAN024F2M-3_at; Start 1418; Stop 1442
gatacagatcttctcatgggtaccc

SEQ ID NO: 189791 - DNA, 25 bp, Artificial
  probe
  misc_feature (1)..(25): SEQ ID NO: 3145; WAN024F2M-3_at; Start 1799; Stop 1823
gatactgccgttgaaactgtggaag

SEQ ID NO: 189792 - DNA, 25 bp, Artificial
  probe
  misc_feature (1)..(25): SEQ ID NO: 3145; WAN024F2M-3_at; Start 1287; Stop 1311
tgtcagttgaaacgtaccttctcgg

SEQ ID NO: 189793 - DNA, 25 bp, Artificial
  probe
  misc_feature (1)..(25): SEQ ID NO: 3145; WAN024F2M-3_at; Start 1013; Stop 1037
cagggtcttcctcgtgtccaagaaa

SEQ ID NO: 189794 - DNA, 25 bp, Artificial
  probe
  misc_feature (1)..(25): SEQ ID NO: 3145; WAN024F2M-3_at; Start 261; Stop 285
ttacagctgaatggcgtgctgcccg

SEQ ID NO: 189795 - DNA, 25 bp, Artificial
  probe
  misc_feature (1)..(25): SEQ ID NO: 3145; WAN024F2M-3_at; Start 1393; Stop 1417
taaagtccgtgtcatggatccaggt

SEQ ID NO: 189796 - DNA, 25 bp, Artificial
  probe
  misc_feature (1)..(25): SEQ ID NO: 3145; WAN024F2M-3_at; Start 227; Stop 251
ggtatgatcacagacgacgagcgtt

SEQ ID NO: 189797 - DNA, 25 bp, Artificial
  probe
  misc_feature (1)..(25): SEQ ID NO: 3145; WAN024F2M-3_at; Start 763; Stop 787
tacagaagacaaggcgcgtgaaatt

SEQ ID NO: 189798 - DNA, 25 bp, Artificial
  probe
  misc_feature (1)..(25): SEQ ID NO: 3145; WAN024F2M-3_at; Start 1603; Stop 1627
tactgacgcagctatccgtggtaag

SEQ ID NO: 189799 - DNA, 25 bp, Artificial
  probe
  misc_feature (1)..(25): SEQ ID NO: 3145; WAN024F2M-3_at; Start 599; Stop 623
cgtgaggacgactgtggaactgacc

SEQ ID NO: 189800 - DNA, 25 bp, Artificial
  probe
  misc_feature (1)..(25): SEQ ID NO: 3145; WAN024F2M-3_at; Start 1527; Stop 1551
tgggaattaccaaagcctcacttga

SEQ ID NO: 189801 - DNA, 25 bp, Artificial
  probe
  misc_feature (1)..(25): SEQ ID NO: 3145; WAN024F2M-3_at; Start 339; Stop 363
ttatgatgatggactctggagcccg

SEQ ID NO: 189802 - DNA, 25 bp, Artificial
  probe
  misc_feature (1)..(25): SEQ ID NO: 3145; WAN024F2M-3_at; Start 499; Stop 523
tcacggtgctcgtaaaggtatgacc

SEQ ID NO: 189803 - DNA, 25 bp, Artificial
  probe
  misc_feature (1)..(25): SEQ ID NO: 3145; WAN024F2M-3_at; Start 866; Stop 890
tacggtatcaacttggcgactggtg

SEQ ID NO: 189804 - DNA, 25 bp, Artificial
  probe
  misc_feature (1)..(25): SEQ ID NO: 3145; WAN024F2M-3_at; Start 111; Stop 135
caactcttgcaggattgacagtggg

SEQ ID NO: 189805 - DNA, 25 bp, Artificial
  probe
  misc_feature (1)..(25): SEQ ID NO: 3145; WAN024F2M-3_at; Start 673; Stop 697
tctcgaagagcgtctcaacggtcgt

SEQ ID NO: 189806 - DNA, 25 bp, Artificial
  probe
  misc_feature (1)..(25): SEQ ID NO: 3145; WAN024F2M-3_at; Start 515; Stop 539
ggtatgaccgatacggcccttaaga

SEQ ID NO: 189807 - DNA, 25 bp, Artificial
  probe
  misc_feature (1)..(25): SEQ ID NO: 3145; WAN024F2M-3_at; Start 75; Stop 99
tacttgaccgcatgaagaacctcgg

SEQ ID NO: 189808 - DNA, 25 bp, Artificial
  probe
  misc_feature (1)..(25): SEQ ID NO: 3145; WAN024F2M-3_at; Start 1112; Stop 1136
gatgcatcaactcgtaccaagaaag

SEQ ID NO: 189809 - DNA, 25 bp, Artificial
  probe
  misc_feature (1)..(25): SEQ ID NO: 3145; WAN024F2M-3_at; Start 482; Stop 506
gaaatgttcttctcaactcacggtg

SEQ ID NO: 189810 - DNA, 25 bp, Artificial
  probe
  misc_feature (1)..(25): SEQ ID NO: 3145; WAN024F2M-3_at; Start 397; Stop 421
tatgcgtggtctgatggctgctccg

SEQ ID NO: 189811 - DNA, 25 bp, Artificial
  probe
  misc_feature (1)..(25): SEQ ID NO: 3145; WAN024F2M-3_at; Start 1474; Stop 1498
caaagatgtccttatcgcaggtgga

SEQ ID NO: 189812 - DNA, 25 bp, Artificial
  probe
  misc_feature (1)..(25): SEQ ID NO: 3145; WAN024F2M-3_at; Start 1219; Stop 1243
agcgcgtggtgctgctctgacagaa

SEQ ID NO: 189813 - DNA, 25 bp, Artificial
  probe
  misc_feature (1)..(25): SEQ ID NO: 3145; WAN024F2M-3_at; Start 964; Stop 988
aatgcgtaccttccacacaggtggg

SEQ ID NO: 189814 - DNA, 25 bp, Artificial
  probe
  misc_feature (1)..(25): SEQ ID NO: 3145; WAN024F2M-3_at; Start 1179; Stop 1203
catttacagctcgtatgcgtgtcga

SEQ ID NO: 189815 - DNA, 25 bp, Artificial
  probe
  misc_feature (1)..(25): SEQ ID NO: 3145; WAN024F2M-3_at; Start 1703; Stop 1727
taccgtaaccttgaaccacatgctg

SEQ ID NO: 189816 - DNA, 25 bp, Artificial
  probe
  misc_feature (1)..(25): SEQ ID NO: 3145; WAN024F2M-3_at; Start 1665; Stop 1689
tcggtaagatcatcccagctggtac

SEQ ID NO: 189817 - DNA, 25 bp, Artificial
  probe
  misc_feature (1)..(25): SEQ ID NO: 3145; WAN024F2M-3_at; Start 1721; Stop 1745
catgctgtcaacgaagaagaatacc

SEQ ID NO: 189818 - DNA, 25 bp, Artificial
  probe
  misc_feature (1)..(25): SEQ ID NO: 3145; WAN024F2M-3_at; Start 275; Stop 299
cgtgctgcccgtgaaaaacttgaga

SEQ ID NO: 189819 - DNA, 25 bp, Artificial
  probe
  misc_feature (1)..(25): SEQ ID NO: 3145; WAN024F2M-3_at; Start 134; Stop 158
ggtattgccgatatcccagtcgttg

SEQ ID NO: 189820 - DNA, 25 bp, Artificial
  probe
  misc_feature (1)..(25): SEQ ID NO: 3145; WAN024F2M-3_at; Start 584; Stop 608
caagacgttatcatccgtgaggacg

SEQ ID NO: 189821 - DNA, 25 bp, Artificial
  probe
  misc_feature (1)..(25): SEQ ID NO: 3145; WAN024F2M-3_at; Start 1378; Stop 1402
tcgtcaaatgatccgtaaagtccgt

SEQ ID NO: 189822 - DNA, 25 bp, Artificial
  probe
  misc_feature (1)..(25): SEQ ID NO: 3145; WAN024F2M-3_at; Start 1680; Stop 1704
cagctggtactggtatggcccgtta

SEQ ID NO: 189823 - DNA, 25 bp, Artificial
  probe
  misc_feature (1)..(25): SEQ ID NO: 4230; WAN024F2M-5_at; Start 1121; Stop 1145
aaatcgttgcccgtgatatcgtgca

SEQ ID NO: 189824 - DNA, 25 bp, Artificial
  probe
  misc_feature (1)..(25): SEQ ID NO: 4230; WAN024F2M-5_at; Start 261; Stop 285
tcgtcgtgagcgtatgggacatatc

SEQ ID NO: 189825 - DNA, 25 bp, Artificial
  probe
  misc_feature (1)..(25): SEQ ID NO: 4230; WAN024F2M-5_at; Start 1137; Stop 1161
tatcgtgcaaaacgtcaaagcagct

SEQ ID NO: 189826 - DNA, 25 bp, Artificial
  probe
  misc_feature (1)..(25): SEQ ID NO: 4230; WAN024F2M-5_at; Start 1426; Stop 1450
gctgctgagcacatcttgaacccga

SEQ ID NO: 189827 - DNA, 25 bp, Artificial
  probe
  misc_feature (1)..(25): SEQ ID NO: 4230; WAN024F2M-5_at; Start 912; Stop 936
tccaatcacaggaccaggtagccgt

SEQ ID NO: 189828 - DNA, 25 bp, Artificial
  probe
  misc_feature (1)..(25): SEQ ID NO: 4230; WAN024F2M-5_at; Start 516; Stop 540
tgcggaagccatccaagaccttttg

SEQ ID NO: 189829 - DNA, 25 bp, Artificial
  probe
  misc_feature (1)..(25): SEQ ID NO: 4230; WAN024F2M-5_at; Start 1614; Stop 1638
tggtatcgcaacagacagcctcaac

SEQ ID NO: 189830 - DNA, 25 bp, Artificial
  probe
  misc_feature (1)..(25): SEQ ID NO: 4230; WAN024F2M-5_at; Start 760; Stop 784
gacttgaatgacctttaccgccgtg

SEQ ID NO: 189831 - DNA, 25 bp, Artificial
  probe
  misc_feature (1)..(25): SEQ ID NO: 4230; WAN024F2M-5_at; Start 1697; Stop 1721
tcttcaacgatatcatgccagaggg

SEQ ID NO: 189832 - DNA, 25 bp, Artificial
  probe
  misc_feature (1)..(25): SEQ ID NO: 4230; WAN024F2M-5_at; Start 444; Stop 468
tatcatgacagagcgcgaataccga

SEQ ID NO: 189833 - DNA, 25 bp, Artificial
  probe
  misc_feature (1)..(25): SEQ ID NO: 4230; WAN024F2M-5_at; Start 707; Stop 731
caccagatcttcgtccaatgttgca

SEQ ID NO: 189834 - DNA, 25 bp, Artificial
  probe
  misc_feature (1)..(25): SEQ ID NO: 4230; WAN024F2M-5_at; Start 892; Stop 916
gacaatggtcgtcgtggtcgtccaa

SEQ ID NO: 189835 - DNA, 25 bp, Artificial
  probe
  misc_feature (1)..(25): SEQ ID NO: 4230; WAN024F2M-5_at; Start 742; Stop 766
ggccgttttgcctcatctgacttga

SEQ ID NO: 189836 - DNA, 25 bp, Artificial
  probe
  misc_feature (1)..(25): SEQ ID NO: 4230; WAN024F2M-5_at; Start 928; Stop 952
ggtagccgtccattgaaatcattga

SEQ ID NO: 189837 - DNA, 25 bp, Artificial
  probe
  misc_feature (1)..(25): SEQ ID NO: 4230; WAN024F2M-5_at; Start 1776; Stop 1800
taaatacttcttgccacttggtgga

SEQ ID NO: 189838 - DNA, 25 bp, Artificial
  probe
  misc_feature (1)..(25): SEQ ID NO: 4230; WAN024F2M-5_at; Start 1752; Stop 1776
caacttgacagaaggtgttccagct

SEQ ID NO: 189839 - DNA, 25 bp, Artificial
  probe
  misc_feature (1)..(25): SEQ ID NO: 4230; WAN024F2M-5_at; Start 1504; Stop 1528
tacttgaccatggaagaagctggtc

SEQ ID NO: 189840 - DNA, 25 bp, Artificial
  probe
  misc_feature (1)..(25): SEQ ID NO: 4230; WAN024F2M-5_at; Start 1000; Stop 1024
ggtaaacgtgttgacttctcaggac

SEQ ID NO: 189841 - DNA, 25 bp, Artificial
  probe
  misc_feature (1)..(25): SEQ ID NO: 4230; WAN024F2M-5_at; Start 1222; Stop 1246
gaacacccagtgcttttgaaccgcg

SEQ ID NO: 189842 - DNA, 25 bp, Artificial
  probe
  misc_feature (1)..(25): SEQ ID NO: 4230; WAN024F2M-5_at; Start 115; Stop 139
ttgaaaccagaacgtgaaggactct

SEQ ID NO: 189843 - DNA, 25 bp, Artificial
  probe
  misc_feature (1)..(25): SEQ ID NO: 4230; WAN024F2M-5_at; Start 1547; Stop 1571
tcttcaaagaccgtgacgaagcggt

SEQ ID NO: 189844 - DNA, 25 bp, Artificial
  probe
  misc_feature (1)..(25): SEQ ID NO: 4230; WAN024F2M-5_at; Start 1297; Stop 1321
gatggtaaggctcttcgcttgcacc

SEQ ID NO: 189845 - DNA, 25 bp, Artificial
  probe
  misc_feature (1)..(25): SEQ ID NO: 4230; WAN024F2M-5_at; Start 1368; Stop 1392
ggccatccacgtaccactttcagaa

SEQ ID NO: 189846 - DNA, 25 bp, Artificial
  probe
  misc_feature (1)..(25): SEQ ID NO: 4230; WAN024F2M-5_at; Start 347; Stop 371
tgacccttgatatgagccctcgtgc

SEQ ID NO: 189847 - DNA, 25 bp, Artificial
  probe
  misc_feature (1)..(25): SEQ ID NO: 4230; WAN024F2M-5_at; Start 291; Stop 315
gaaagctcctgtatctcacatctgg

SEQ ID NO: 189848 - DNA, 25 bp, Artificial
  probe
  misc_feature (1)..(25): SEQ ID NO: 4230; WAN024F2M-5_at; Start 417; Stop 441
taaggatacaccacttgagcacaag

SEQ ID NO: 189849 - DNA, 25 bp, Artificial
  probe
  misc_feature (1)..(25): SEQ ID NO: 4230; WAN024F2M-5_at; Start 1402; Stop 1426
gcagaagctcgtatcctcatgctag

SEQ ID NO: 189850 - DNA, 25 bp, Artificial
  probe
  misc_feature (1)..(25): SEQ ID NO: 4230; WAN024F2M-5_at; Start 977; Stop 1001
gacgcttccgtcaaaacttgctcgg

SEQ ID NO: 189851 - DNA, 25 bp, Artificial
  probe
  misc_feature (1)..(25): SEQ ID NO: 4230; WAN024F2M-5_at; Start 1387; Stop 1411
tcagaagaagcacaagcagaagctc

SEQ ID NO: 189852 - DNA, 25 bp, Artificial
  probe
  misc_feature (1)..(25): SEQ ID NO: 4230; WAN024F2M-5_at; Start 1634; Stop 1658
tcaacaagccttggacagaagagca

SEQ ID NO: 189853 - DNA, 25 bp, Artificial
  probe
  misc_feature (1)..(25): SEQ ID NO: 4230; WAN024F2M-5_at; Start 1161; Stop 1185
taaacgcttggtggaacgcggagat

SEQ ID NO: 189854 - DNA, 25 bp, Artificial
  probe
  misc_feature (1)..(25): SEQ ID NO: 4230; WAN024F2M-5_at; Start 1264; Stop 1288
ttgggtatccaagccttcgagccag

SEQ ID NO: 189855 - DNA, 25 bp, Artificial
  probe
  misc_feature (1)..(25): SEQ ID NO: 4230; WAN024F2M-5_at; Start 159; Stop 183
tcctacaaaagactgggaatgtgct

SEQ ID NO: 189856 - DNA, 25 bp, Artificial
  probe
  misc_feature (1)..(25): SEQ ID NO: 4230; WAN024F2M-5_at; Start 1464; Stop 1488
ggtagttactccatctcaggacatg

SEQ ID NO: 189857 - DNA, 25 bp, Artificial
  probe
  misc_feature (1)..(25): SEQ ID NO: 5304; WAN024F2N_at; Start 24; Stop 48
cagacttggcagaaatgagggtata

SEQ ID NO: 189858 - DNA, 25 bp, Artificial
  probe
  misc_feature (1)..(25): SEQ ID NO: 5304; WAN024F2N_at; Start 168; Stop 192
cgtggtaaggattgctagcatcgat

SEQ ID NO: 189859 - DNA, 25 bp, Artificial
  probe
  misc_feature (1)..(25): SEQ ID NO: 5304; WAN024F2N_at; Start 28; Stop 52
cttggcagaaatgagggtatatggc

SEQ ID NO: 189860 - DNA, 25 bp, Artificial
  probe
  misc_feature (1)..(25): SEQ ID NO: 5304; WAN024F2N_at; Start 121; Stop 145
catgtccaggtctttcatgatggag

SEQ ID NO: 189861 - DNA, 25 bp, Artificial
  probe
  misc_feature (1)..(25): SEQ ID NO: 5304; WAN024F2N_at; Start 97; Stop 121
aagcgtcaagtgaggaatatcttcc

SEQ ID NO: 189862 - DNA, 25 bp, Artificial
  probe
  misc_feature (1)..(25): SEQ ID NO: 5304; WAN024F2N_at; Start 8; Stop 32
ttttcacgactgtcctcagacttgg

SEQ ID NO: 189863 - DNA, 25 bp, Artificial
  probe
  misc_feature (1)..(25): SEQ ID NO: 5304; WAN024F2N_at; Start 207; Stop 231
ggtccacatgcttgctttcttccaa

SEQ ID NO: 189864 - DNA, 25 bp, Artificial
  probe
  misc_feature (1)..(25): SEQ ID NO: 5304; WAN024F2N_at; Start 18; Stop 42
tgtcctcagacttggcagaaatgag

SEQ ID NO: 189865 - DNA, 25 bp, Artificial
  probe
  misc_feature (1)..(25): SEQ ID NO: 5304; WAN024F2N_at; Start 2; Stop 26
tgcaagttttcacgactgtcctcag

SEQ ID NO: 189866 - DNA, 25 bp, Artificial
  probe
  misc_feature (1)..(25): SEQ ID NO: 5304; WAN024F2N_at; Start 67; Stop 91
gaaatcctccaccaaatccgcttta

SEQ ID NO: 189867 - DNA, 25 bp, Artificial
  probe
  misc_feature (1)..(25): SEQ ID NO: 5304; WAN024F2N_at; Start 107; Stop 131
tgaggaatatcttccatgtccaggt

SEQ ID NO: 189868 - DNA, 25 bp, Artificial
  probe
  misc_feature (1)..(25): SEQ ID NO: 5304; WAN024F2N_at; Start 198; Stop 222
gaaccagaaggtccacatgcttgct

SEQ ID NO: 189869 - DNA, 25 bp, Artificial
  probe
  misc_feature (1)..(25): SEQ ID NO: 5304; WAN024F2N_at; Start 75; Stop 99
ccaccaaatccgctttattataaag

SEQ ID NO: 189870 - DNA, 25 bp, Artificial
  probe
  misc_feature (1)..(25): SEQ ID NO: 5304; WAN024F2N_at; Start 135; Stop 159
tcatgatggagagaaccgttttttc

SEQ ID NO: 189871 - DNA, 25 bp, Artificial
  probe
  misc_feature (1)..(25): SEQ ID NO: 5304; WAN024F2N_at; Start 103; Stop 127
caagtgaggaatatcttccatgtcc

SEQ ID NO: 189872 - DNA, 25 bp, Artificial
  probe
  misc_feature (1)..(25): SEQ ID NO: 5304; WAN024F2N_at; Start 158; Stop 182
tcatgctcctcgtggtaaggattgc

SEQ ID NO: 189873 - DNA, 25 bp, Artificial
  probe
  misc_feature (1)..(25): SEQ ID NO: 5304; WAN024F2N_at; Start 53; Stop 77
gtttgggtaggcgtgaaatcctcca

SEQ ID NO: 189874 - DNA, 25 bp, Artificial
  probe
  misc_feature (1)..(25): SEQ ID NO: 5304; WAN024F2N_at; Start 111; Stop 135
gaatatcttccatgtccaggtcttt

SEQ ID NO: 189875 - DNA, 25 bp, Artificial
  probe
  misc_feature (1)..(25): SEQ ID NO: 5304; WAN024F2N_at; Start 57; Stop 81
gggtaggcgtgaaatcctccaccaa

SEQ ID NO: 189876 - DNA, 25 bp, Artificial
  probe
  misc_feature (1)..(25): SEQ ID NO: 5304; WAN024F2N_at; Start 163; Stop 187
ctcctcgtggtaaggattgctagca

SEQ ID NO: 189877 - DNA, 25 bp, Artificial
  probe
  misc_feature (1)..(25): SEQ ID NO: 5304; WAN024F2N_at; Start 131; Stop 155
tctttcatgatggagagaaccgttt

SEQ ID NO: 189878 - DNA, 25 bp, Artificial
  probe
  misc_feature (1)..(25): SEQ ID NO: 5304; WAN024F2N_at; Start 62; Stop 86
ggcgtgaaatcctccaccaaatccg

SEQ ID NO: 189879 - DNA, 25 bp, Artificial
  probe
  misc_feature (1)..(25): SEQ ID NO: 5304; WAN024F2N_at; Start 201; Stop 225
ccagaaggtccacatgcttgctttc

SEQ ID NO: 189880 - DNA, 25 bp, Artificial
  probe
  misc_feature (1)..(25): SEQ ID NO: 5304; WAN024F2N_at; Start 180; Stop 204
tgctagcatcgataacatgaaccag

SEQ ID NO: 189881 - DNA, 25 bp, Artificial
  probe
  misc_feature (1)..(25): SEQ ID NO: 5304; WAN024F2N_at; Start 148; Stop 172
aaccgttttttcatgctcctcgtgg

SEQ ID NO: 189882 - DNA, 25 bp, Artificial
  probe
  misc_feature (1)..(25): SEQ ID NO: 5304; WAN024F2N_at; Start 186; Stop 210
catcgataacatgaaccagaaggtc

SEQ ID NO: 189883 - DNA, 25 bp, Artificial
  probe
  misc_feature (1)..(25): SEQ ID NO: 5304; WAN024F2N_at; Start 151; Stop 175
cgttttttcatgctcctcgtggtaa

SEQ ID NO: 189884 - DNA, 25 bp, Artificial
  probe
  misc_feature (1)..(25): SEQ ID NO: 5304; WAN024F2N_at; Start 190; Stop 214
gataacatgaaccagaaggtccaca

SEQ ID NO: 189885 - DNA, 25 bp, Artificial
  probe
  misc_feature (1)..(25): SEQ ID NO: 5304; WAN024F2N_at; Start 12; Stop 36
cacgactgtcctcagacttggcaga

SEQ ID NO: 189886 - DNA, 25 bp, Artificial
  probe
  misc_feature (1)..(25): SEQ ID NO: 5304; WAN024F2N_at; Start 213; Stop 237
catgcttgctttcttccaaggttga

SEQ ID NO: 189887 - DNA, 25 bp, Artificial
  probe
  misc_feature (1)..(25): SEQ ID NO: 5304; WAN024F2N_at; Start 126; Stop 150
ccaggtctttcatgatggagagaac

SEQ ID NO: 189888 - DNA, 25 bp, Artificial
  probe
  misc_feature (1)..(25): SEQ ID NO: 5304; WAN024F2N_at; Start 89; Stop 113
ttattataaagcgtcaagtgaggaa

SEQ ID NO: 189889 - DNA, 25 bp, Artificial
  probe
  misc_feature (1)..(25): SEQ ID NO: 5304; WAN024F2N_at; Start 33; Stop 57
cagaaatgagggtatatggcgtttg

SEQ ID NO: 189890 - DNA, 25 bp, Artificial
  probe
  misc_feature (1)..(25): SEQ ID NO: 5304; WAN024F2N_at; Start 145; Stop 169
gagaaccgttttttcatgctcctcg

SEQ ID NO: 189891 - DNA, 25 bp, Artificial
  probe
  misc_feature (1)..(25): SEQ ID NO: 5162; WAN024F2O_at; Start 209; Stop 233
cagagccgacgaaggtcttggaatc

SEQ ID NO: 189892 - DNA, 25 bp, Artificial
  probe
  misc_feature (1)..(25): SEQ ID NO: 5162; WAN024F2O_at; Start 119; Stop 143
tgacattctgccttggggtcagacg

SEQ ID NO: 189893 - DNA, 25 bp, Artificial
  probe
  misc_feature (1)..(25): SEQ ID NO: 5162; WAN024F2O_at; Start 196; Stop 220
tcttccaacttaccagagccgacga

SEQ ID NO: 189894 - DNA, 25 bp, Artificial
  probe
  misc_feature (1)..(25): SEQ ID NO: 5162; WAN024F2O_at; Start 99; Stop 123
accgagaacttcctctagattgaca

SEQ ID NO: 189895 - DNA, 25 bp, Artificial
  probe
  misc_feature (1)..(25): SEQ ID NO: 5162; WAN024F2O_at; Start 111; Stop 135
ctctagattgacattctgccttggg

SEQ ID NO: 189896 - DNA, 25 bp, Artificial
  probe
  misc_feature (1)..(25): SEQ ID NO: 5162; WAN024F2O_at; Start 233; Stop 257
catatttttcacgtttttgtctgta

SEQ ID NO: 189897 - DNA, 25 bp, Artificial
  probe
  misc_feature (1)..(25): SEQ ID NO: 5162; WAN024F2O_at; Start 88; Stop 112
atgaccttaacaccgagaacttcct

SEQ ID NO: 189898 - DNA, 25 bp, Artificial
  probe
  misc_feature (1)..(25): SEQ ID NO: 5162; WAN024F2O_at; Start 175; Stop 199
gcatccaccataagcgcaatctctt

SEQ ID NO: 189899 - DNA, 25 bp, Artificial
  probe
  misc_feature (1)..(25): SEQ ID NO: 5162; WAN024F2O_at; Start 156; Stop 180
gacagtagtgatttcttctgcatcc

SEQ ID NO: 189900 - DNA, 25 bp, Artificial
  probe
  misc_feature (1)..(25): SEQ ID NO: 5162; WAN024F2O_at; Start 80; Stop 104
tacggtcaatgaccttaacaccgag

SEQ ID NO: 189901 - DNA, 25 bp, Artificial
  probe
  misc_feature (1)..(25): SEQ ID NO: 5162; WAN024F2O_at; Start 69; Stop 93
aatcaactgcatacggtcaatgacc

SEQ ID NO: 189902 - DNA, 25 bp, Artificial
  probe
  misc_feature (1)..(25): SEQ ID NO: 5162; WAN024F2O_at; Start 187; Stop 211
agcgcaatctcttccaacttaccag

SEQ ID NO: 189903 - DNA, 25 bp, Artificial
  probe
  misc_feature (1)..(25): SEQ ID NO: 5162; WAN024F2O_at; Start 214; Stop 238
ccgacgaaggtcttggaatcatatt

SEQ ID NO: 189904 - DNA, 25 bp, Artificial
  probe
  misc_feature (1)..(25): SEQ ID NO: 5162; WAN024F2O_at; Start 46; Stop 70
gcccgcatggcaaagatatccaaaa

SEQ ID NO: 189905 - DNA, 25 bp, Artificial
  probe
  misc_feature (1)..(25): SEQ ID NO: 5162; WAN024F2O_at; Start 146; Stop 170
tgttgacgatgacagtagtgatttc

SEQ ID NO: 189906 - DNA, 25 bp, Artificial
  probe
  misc_feature (1)..(25): SEQ ID NO: 5162; WAN024F2O_at; Start 150; Stop 174
gacgatgacagtagtgatttcttct

SEQ ID NO: 189907 - DNA, 25 bp, Artificial
  probe
  misc_feature (1)..(25): SEQ ID NO: 5162; WAN024F2O_at; Start 53; Stop 77
tggcaaagatatccaaaatcaactg

SEQ ID NO: 189908 - DNA, 25 bp, Artificial
  probe
  misc_feature (1)..(25): SEQ ID NO: 5162; WAN024F2O_at; Start 12; Stop 36
taggtggacttggagcttcccttca

SEQ ID NO: 189909 - DNA, 25 bp, Artificial
  probe
  misc_feature (1)..(25): SEQ ID NO: 5162; WAN024F2O_at; Start 201; Stop 225
caacttaccagagccgacgaaggtc

SEQ ID NO: 189910 - DNA, 25 bp, Artificial
  probe
  misc_feature (1)..(25): SEQ ID NO: 5162; WAN024F2O_at; Start 60; Stop 84
gatatccaaaatcaactgcatacgg

SEQ ID NO: 189911 - DNA, 25 bp, Artificial
  probe
  misc_feature (1)..(25): SEQ ID NO: 5162; WAN024F2O_at; Start 39; Stop 63
gcttcgagcccgcatggcaaagata

SEQ ID NO: 189912 - DNA, 25 bp, Artificial
  probe
  misc_feature (1)..(25): SEQ ID NO: 5162; WAN024F2O_at; Start 164; Stop 188
tgatttcttctgcatccaccataag

SEQ ID NO: 189913 - DNA, 25 bp, Artificial
  probe
  misc_feature (1)..(25): SEQ ID NO: 5162; WAN024F2O_at; Start 160; Stop 184
gtagtgatttcttctgcatccacca

SEQ ID NO: 189914 - DNA, 25 bp, Artificial
  probe
  misc_feature (1)..(25): SEQ ID NO: 5162; WAN024F2O_at; Start 42; Stop 66
tcgagcccgcatggcaaagatatcc

SEQ ID NO: 189915 - DNA, 25 bp, Artificial
  probe
  misc_feature (1)..(25): SEQ ID NO: 5162; WAN024F2O_at; Start 169; Stop 193
tcttctgcatccaccataagcgcaa

SEQ ID NO: 189916 - DNA, 25 bp, Artificial
  probe
  misc_feature (1)..(25): SEQ ID NO: 5162; WAN024F2O_at; Start 104; Stop 128
gaacttcctctagattgacattctg

SEQ ID NO: 189917 - DNA, 25 bp, Artificial
  probe
  misc_feature (1)..(25): SEQ ID NO: 5162; WAN024F2O_at; Start 205; Stop 229
ttaccagagccgacgaaggtcttgg

SEQ ID NO: 189918 - DNA, 25 bp, Artificial
  probe
  misc_feature (1)..(25): SEQ ID NO: 5162; WAN024F2O_at; Start 33; Stop 57
ttcatggcttcgagcccgcatggca

SEQ ID NO: 189919 - DNA, 25 bp, Artificial
  probe
  misc_feature (1)..(25): SEQ ID NO: 5162; WAN024F2O_at; Start 16; Stop 40
tggacttggagcttcccttcatggc

SEQ ID NO: 189920 - DNA, 25 bp, Artificial
  probe
  misc_feature (1)..(25): SEQ ID NO: 5162; WAN024F2O_at; Start 23; Stop 47
ggagcttcccttcatggcttcgagc

SEQ ID NO: 189921 - DNA, 25 bp, Artificial
  probe
  misc_feature (1)..(25): SEQ ID NO: 5162; WAN024F2O_at; Start 84; Stop 108
gtcaatgaccttaacaccgagaact

SEQ ID NO: 189922 - DNA, 25 bp, Artificial
  probe
  misc_feature (1)..(25): SEQ ID NO: 5162; WAN024F2O_at; Start 9; Stop 33
ggctaggtggacttggagcttccct

SEQ ID NO: 189923 - DNA, 25 bp, Artificial
  probe
  misc_feature (1)..(25): SEQ ID NO: 5162; WAN024F2O_at; Start 221; Stop 245
aggtcttggaatcatatttttcacg

SEQ ID NO: 189924 - DNA, 25 bp, Artificial
  probe
  misc_feature (1)..(25): SEQ ID NO: 5162; WAN024F2O_at; Start 65; Stop 89
ccaaaatcaactgcatacggtcaat

SEQ ID NO: 189925 - DNA, 25 bp, Artificial
  probe
  misc_feature (1)..(25): SEQ ID NO: 1829; WAN024F2P_at; Start 618; Stop 642
tactaatgctgggaaatcaactatc

SEQ ID NO: 189926 - DNA, 25 bp, Artificial
  probe
  misc_feature (1)..(25): SEQ ID NO: 1829; WAN024F2P_at; Start 64; Stop 88
gacagttttgacctctccatggaag

SEQ ID NO: 189927 - DNA, 25 bp, Artificial
  probe
  misc_feature (1)..(25): SEQ ID NO: 1829; WAN024F2P_at; Start 656; Stop 680
ccagtaagacccagtatgaagcaga

SEQ ID NO: 189928 - DNA, 25 bp, Artificial
  probe
  misc_feature (1)..(25): SEQ ID NO: 1829; WAN024F2P_at; Start 255; Stop 279
gaccccaaggcagaatgtcaatcta

SEQ ID NO: 189929 - DNA, 25 bp, Artificial
  probe
  misc_feature (1)..(25): SEQ ID NO: 1829; WAN024F2P_at; Start 449; Stop 473
gaattggttcccgtggtcctggtga

SEQ ID NO: 189930 - DNA, 25 bp, Artificial
  probe
  misc_feature (1)..(25): SEQ ID NO: 1829; WAN024F2P_at; Start 540; Stop 564
ggtggttgagaaaaatcgtgcgact

SEQ ID NO: 189931 - DNA, 25 bp, Artificial
  probe
  misc_feature (1)..(25): SEQ ID NO: 1829; WAN024F2P_at; Start 127; Stop 151
gtagatagctacagacaaaaacgtg

SEQ ID NO: 189932 - DNA, 25 bp, Artificial
  probe
  misc_feature (1)..(25): SEQ ID NO: 1829; WAN024F2P_at; Start 886; Stop 910
gaaaaaacggttctctccatcatga

SEQ ID NO: 189933 - DNA, 25 bp, Artificial
  probe
  misc_feature (1)..(25): SEQ ID NO: 1829; WAN024F2P_at; Start 1182; Stop 1206
gattacaggctacatttccgagaaa

SEQ ID NO: 189934 - DNA, 25 bp, Artificial
  probe
  misc_feature (1)..(25): SEQ ID NO: 1829; WAN024F2P_at; Start 422; Stop 446
ggattatgctcagccgtcaggcagg

SEQ ID NO: 189935 - DNA, 25 bp, Artificial
  probe
  misc_feature (1)..(25): SEQ ID NO: 1829; WAN024F2P_at; Start 690; Stop 714
tgcgactctggatgcgacaaccaag

SEQ ID NO: 189936 - DNA, 25 bp, Artificial
  probe
  misc_feature (1)..(25): SEQ ID NO: 1829; WAN024F2P_at; Start 871; Stop 895
taccacgaggagcatgaaaaaacgg

SEQ ID NO: 189937 - DNA, 25 bp, Artificial
  probe
  misc_feature (1)..(25): SEQ ID NO: 1829; WAN024F2P_at; Start 209; Stop 233
tggtggatgcagaagaaatcactac

SEQ ID NO: 189938 - DNA, 25 bp, Artificial
  probe
  misc_feature (1)..(25): SEQ ID NO: 1829; WAN024F2P_at; Start 155; Stop 179
aatatgattccaagaccttcgtcgg

SEQ ID NO: 189939 - DNA, 25 bp, Artificial
  probe
  misc_feature (1)..(25): SEQ ID NO: 1829; WAN024F2P_at; Start 820; Stop 844
gaaagcaagcatgtggaccttctgg

SEQ ID NO: 189940 - DNA, 25 bp, Artificial
  probe
  misc_feature (1)..(25): SEQ ID NO: 1829; WAN024F2P_at; Start 328; Stop 352
gatatctttgccatgcgggctcgaa

SEQ ID NO: 189941 - DNA, 25 bp, Artificial
  probe
  misc_feature (1)..(25): SEQ ID NO: 1829; WAN024F2P_at; Start 1024; Stop 1048
gacagtcgtgaaaacttgcaagcat

SEQ ID NO: 189942 - DNA, 25 bp, Artificial
  probe
  misc_feature (1)..(25): SEQ ID NO: 1829; WAN024F2P_at; Start 498; Stop 522
tagcgttcgcaatcaaatcacggat

SEQ ID NO: 189943 - DNA, 25 bp, Artificial
  probe
  misc_feature (1)..(25): SEQ ID NO: 1829; WAN024F2P_at; Start 1158; Stop 1182
tgattatcaggaagacggcgaagtg

SEQ ID NO: 189944 - DNA, 25 bp, Artificial
  probe
  misc_feature (1)..(25): SEQ ID NO: 1829; WAN024F2P_at; Start 673; Stop 697
gaagcagatgagctctttgcgactc

SEQ ID NO: 189945 - DNA, 25 bp, Artificial
  probe
  misc_feature (1)..(25): SEQ ID NO: 1829; WAN024F2P_at; Start 792; Stop 816
ggtgtccagtttcaagtcaaccttg

SEQ ID NO: 189946 - DNA, 25 bp, Artificial
  probe
  misc_feature (1)..(25): SEQ ID NO: 1829; WAN024F2P_at; Start 856; Stop 880
gatgctagcaatccttaccacgagg

SEQ ID NO: 189947 - DNA, 25 bp, Artificial
  probe
  misc_feature (1)..(25): SEQ ID NO: 1829; WAN024F2P_at; Start 710; Stop 734
ccaagagtattcatctgggaggcaa

SEQ ID NO: 189948 - DNA, 25 bp, Artificial
  probe
  misc_feature (1)..(25): SEQ ID NO: 1829; WAN024F2P_at; Start 558; Stop 582
tgcgactgtcagagaaaaacgtttg

SEQ ID NO: 189949 - DNA, 25 bp, Artificial
  probe
  misc_feature (1)..(25): SEQ ID NO: 1829; WAN024F2P_at; Start 1009; Stop 1033
tctgccaagtctgaggacagtcgtg

SEQ ID NO: 189950 - DNA, 25 bp, Artificial
  probe
  misc_feature (1)..(25): SEQ ID NO: 1829; WAN024F2P_at; Start 1086; Stop 1110
taccctgcgagtgcctttttcaaag

SEQ ID NO: 189951 - DNA, 25 bp, Artificial
  probe
  misc_feature (1)..(25): SEQ ID NO: 1829; WAN024F2P_at; Start 743; Stop 767
taactttgacagataccgttggctt

SEQ ID NO: 189952 - DNA, 25 bp, Artificial
  probe
  misc_feature (1)..(25): SEQ ID NO: 1829; WAN024F2P_at; Start 923; Stop 947
tggaagatattcctcacttgacgct

SEQ ID NO: 189953 - DNA, 25 bp, Artificial
  probe
  misc_feature (1)..(25): SEQ ID NO: 1829; WAN024F2P_at; Start 170; Stop 194
ccttcgtcggctctggtaagttgga

SEQ ID NO: 189954 - DNA, 25 bp, Artificial
  probe
  misc_feature (1)..(25): SEQ ID NO: 1829; WAN024F2P_at; Start 768; Stop 792
tatccaagatttgccgacagagttg

SEQ ID NO: 189955 - DNA, 25 bp, Artificial
  probe
  misc_feature (1)..(25): SEQ ID NO: 1829; WAN024F2P_at; Start 484; Stop 508
gagctgaaccgtcgtagcgttcgca

SEQ ID NO: 189956 - DNA, 25 bp, Artificial
  probe
  misc_feature (1)..(25): SEQ ID NO: 1829; WAN024F2P_at; Start 353; Stop 377
gccatgaagggaagctccaagtcca

SEQ ID NO: 189957 - DNA, 25 bp, Artificial
  probe
  misc_feature (1)..(25): SEQ ID NO: 1829; WAN024F2P_at; Start 1070; Stop 1094
aaatttttgaagcatttaccctgcg

SEQ ID NO: 189958 - DNA, 25 bp, Artificial
  probe
  misc_feature (1)..(25): SEQ ID NO: 1829; WAN024F2P_at; Start 91; Stop 115
ttggctagtttagcgaaaacggcag

SEQ ID NO: 189959 - DNA, 25 bp, Artificial
  probe
  misc_feature (1)..(25): SEQ ID NO: 7724; WAN024F2Q_at; Start 54; Stop 78
tattgtgcaattctattttaccaag

SEQ ID NO: 189960 - DNA, 25 bp, Artificial
  probe
  misc_feature (1)..(25): SEQ ID NO: 7724; WAN024F2Q_at; Start 16; Stop 40
tatagtgaatatgcatgggatagcc

SEQ ID NO: 189961 - DNA, 25 bp, Artificial
  probe
  misc_feature (1)..(25): SEQ ID NO: 7724; WAN024F2Q_at; Start 57; Stop 81
tgtgcaattctattttaccaagact

SEQ ID NO: 189962 - DNA, 25 bp, Artificial
  probe
  misc_feature (1)..(25): SEQ ID NO: 7724; WAN024F2Q_at; Start 65; Stop 89
tctattttaccaagactatcgcaac

SEQ ID NO: 189963 - DNA, 25 bp, Artificial
  probe
  misc_feature (1)..(25): SEQ ID NO: 7724; WAN024F2Q_at; Start 137; Stop 161
gactattgtcccagactcttttctt

SEQ ID NO: 189964 - DNA, 25 bp, Artificial
  probe
  misc_feature (1)..(25): SEQ ID NO: 7724; WAN024F2Q_at; Start 29; Stop 53
catgggatagcctttctaaatggtt

SEQ ID NO: 189965 - DNA, 25 bp, Artificial
  probe
  misc_feature (1)..(25): SEQ ID NO: 7724; WAN024F2Q_at; Start 86; Stop 110
caaccatgcaaaaaagcaacggcaa

SEQ ID NO: 189966 - DNA, 25 bp, Artificial
  probe
  misc_feature (1)..(25): SEQ ID NO: 7724; WAN024F2Q_at; Start 25; Stop 49
tatgcatgggatagcctttctaaat

SEQ ID NO: 189967 - DNA, 25 bp, Artificial
  probe
  misc_feature (1)..(25): SEQ ID NO: 7724; WAN024F2Q_at; Start 69; Stop 93
ttttaccaagactatcgcaaccatg

SEQ ID NO: 189968 - DNA, 25 bp, Artificial
  probe
  misc_feature (1)..(25): SEQ ID NO: 7724; WAN024F2Q_at; Start 6; Stop 30
tgatttgtgttatagtgaatatgca

SEQ ID NO: 189969 - DNA, 25 bp, Artificial
  probe
  misc_feature (1)..(25): SEQ ID NO: 7724; WAN024F2Q_at; Start 107; Stop 131
gcaaatccgttgctttttttggaga

SEQ ID NO: 189970 - DNA, 25 bp, Artificial
  probe
  misc_feature (1)..(25): SEQ ID NO: 7724; WAN024F2Q_at; Start 18; Stop 42
tagtgaatatgcatgggatagcctt

SEQ ID NO: 189971 - DNA, 25 bp, Artificial
  probe
  misc_feature (1)..(25): SEQ ID NO: 7724; WAN024F2Q_at; Start 23; Stop 47
aatatgcatgggatagcctttctaa

SEQ ID NO: 189972 - DNA, 25 bp, Artificial
  probe
  misc_feature (1)..(25): SEQ ID NO: 7724; WAN024F2Q_at; Start 28; Stop 52
gcatgggatagcctttctaaatggt

SEQ ID NO: 189973 - DNA, 25 bp, Artificial
  probe
  misc_feature (1)..(25): SEQ ID NO: 7724; WAN024F2Q_at; Start 89; Stop 113
ccatgcaaaaaagcaacggcaaatc

SEQ ID NO: 189974 - DNA, 25 bp, Artificial
  probe
  misc_feature (1)..(25): SEQ ID NO: 7724; WAN024F2Q_at; Start 67; Stop 91
tattttaccaagactatcgcaacca

SEQ ID NO: 189975 - DNA, 25 bp, Artificial
  probe
  misc_feature (1)..(25): SEQ ID NO: 7724; WAN024F2Q_at; Start 122; Stop 146
tttttggagataagagactattgtc

SEQ ID NO: 189976 - DNA, 25 bp, Artificial
  probe
  misc_feature (1)..(25): SEQ ID NO: 7724; WAN024F2Q_at; Start 124; Stop 148
tttggagataagagactattgtccc

SEQ ID NO: 189977 - DNA, 25 bp, Artificial
  probe
  misc_feature (1)..(25): SEQ ID NO: 7724; WAN024F2Q_at; Start 126; Stop 150
tggagataagagactattgtcccag

SEQ ID NO: 189978 - DNA, 25 bp, Artificial
  probe
  misc_feature (1)..(25): SEQ ID NO: 7724; WAN024F2Q_at; Start 62; Stop 86
aattctattttaccaagactatcgc

SEQ ID NO: 189979 - DNA, 25 bp, Artificial
  probe
  misc_feature (1)..(25): SEQ ID NO: 7724; WAN024F2Q_at; Start 92; Stop 116
tgcaaaaaagcaacggcaaatccgt

SEQ ID NO: 189980 - DNA, 25 bp, Artificial
  probe
  misc_feature (1)..(25): SEQ ID NO: 7724; WAN024F2Q_at; Start 132; Stop 156
taagagactattgtcccagactctt

SEQ ID NO: 189981 - DNA, 25 bp, Artificial
  probe
  misc_feature (1)..(25): SEQ ID NO: 7724; WAN024F2Q_at; Start 128; Stop 152
gagataagagactattgtcccagac

SEQ ID NO: 189982 - DNA, 25 bp, Artificial
  probe
  misc_feature (1)..(25): SEQ ID NO: 7724; WAN024F2Q_at; Start 72; Stop 96
taccaagactatcgcaaccatgcaa

SEQ ID NO: 189983 - DNA, 25 bp, Artificial
  probe
  misc_feature (1)..(25): SEQ ID NO: 7724; WAN024F2Q_at; Start 141; Stop 165
attgtcccagactcttttctttgta

SEQ ID NO: 189984 - DNA, 25 bp, Artificial
  probe
  misc_feature (1)..(25): SEQ ID NO: 7724; WAN024F2Q_at; Start 20; Stop 44
gtgaatatgcatgggatagcctttc

SEQ ID NO: 189985 - DNA, 25 bp, Artificial
  probe
  misc_feature (1)..(25): SEQ ID NO: 7724; WAN024F2Q_at; Start 97; Stop 121
aaaagcaacggcaaatccgttgctt

SEQ ID NO: 189986 - DNA, 25 bp, Artificial
  probe
  misc_feature (1)..(25): SEQ ID NO: 7724; WAN024F2Q_at; Start 71; Stop 95
ttaccaagactatcgcaaccatgca

SEQ ID NO: 189987 - DNA, 25 bp, Artificial
  probe
  misc_feature (1)..(25): SEQ ID NO: 7724; WAN024F2Q_at; Start 43; Stop 67
tctaaatggtttattgtgcaattct

SEQ ID NO: 189988 - DNA, 25 bp, Artificial
  probe
  misc_feature (1)..(25): SEQ ID NO: 7724; WAN024F2Q_at; Start 75; Stop 99
caagactatcgcaaccatgcaaaaa

SEQ ID NO: 189989 - DNA, 25 bp, Artificial
  probe
  misc_feature (1)..(25): SEQ ID NO: 7724; WAN024F2Q_at; Start 130; Stop 154
gataagagactattgtcccagactc

SEQ ID NO: 189990 - DNA, 25 bp, Artificial
  probe
  misc_feature (1)..(25): SEQ ID NO: 7724; WAN024F2Q_at; Start 134; Stop 158
agagactattgtcccagactctttt

SEQ ID NO: 189991 - DNA, 25 bp, Artificial
  probe
  misc_feature (1)..(25): SEQ ID NO: 7724; WAN024F2Q_at; Start 22; Stop 46
gaatatgcatgggatagcctttcta

SEQ ID NO: 189992 - DNA, 25 bp, Artificial
  probe
  misc_feature (1)..(25): SEQ ID NO: 7724; WAN024F2Q_at; Start 31; Stop 55
tgggatagcctttctaaatggttta

SEQ ID NO: 189993 - DNA, 25 bp, Artificial
  probe
  misc_feature (1)..(25): SEQ ID NO: 6710; WAN024F2R_at; Start 56; Stop 80
tcttgccgcaagaccatctcgtctt

SEQ ID NO: 189994 - DNA, 25 bp, Artificial
  probe
  misc_feature (1)..(25): SEQ ID NO: 6710; WAN024F2R_at; Start 55; Stop 79
ttcttgccgcaagaccatctcgtct

SEQ ID NO: 189995 - DNA, 25 bp, Artificial
  probe
  misc_feature (1)..(25): SEQ ID NO: 6710; WAN024F2R_at; Start 39; Stop 63
actagaaatcagttctttcttgccg

SEQ ID NO: 189996 - DNA, 25 bp, Artificial
  probe
  misc_feature (1)..(25): SEQ ID NO: 6710; WAN024F2R_at; Start 45; Stop 69
aatcagttctttcttgccgcaagac

SEQ ID NO: 189997 - DNA, 25 bp, Artificial
  probe
  misc_feature (1)..(25): SEQ ID NO: 6710; WAN024F2R_at; Start 44; Stop 68
aaatcagttctttcttgccgcaaga

SEQ ID NO: 189998 - DNA, 25 bp, Artificial
  probe
  misc_feature (1)..(25): SEQ ID NO: 6710; WAN024F2R_at; Start 50; Stop 74
gttctttcttgccgcaagaccatct

SEQ ID NO: 189999 - DNA, 25 bp, Artificial
  probe
  misc_feature (1)..(25): SEQ ID NO: 6710; WAN024F2R_at; Start 48; Stop 72
cagttctttcttgccgcaagaccat

SEQ ID NO: 190000 - DNA, 25 bp, Artificial
  probe
  misc_feature (1)..(25): SEQ ID NO: 6710; WAN024F2R_at; Start 93; Stop 117
agtggtgaataccgatgaaaaggag

SEQ ID NO: 190001 - DNA, 25 bp, Artificial
  probe
  misc_feature (1)..(25): SEQ ID NO: 6710; WAN024F2R_at; Start 60; Stop 84
gccgcaagaccatctcgtctttact

SEQ ID NO: 190002 - DNA, 25 bp, Artificial
  probe
  misc_feature (1)..(25): SEQ ID NO: 6710; WAN024F2R_at; Start 63; Stop 87
gcaagaccatctcgtctttactatt

SEQ ID NO: 190003 - DNA, 25 bp, Artificial
  probe
  misc_feature (1)..(25): SEQ ID NO: 6710; WAN024F2R_at; Start 43; Stop 67
gaaatcagttctttcttgccgcaag

SEQ ID NO: 190004 - DNA, 25 bp, Artificial
  probe
  misc_feature (1)..(25): SEQ ID NO: 6710; WAN024F2R_at; Start 92; Stop 116
aagtggtgaataccgatgaaaagga

SEQ ID NO: 190005 - DNA, 25 bp, Artificial
  probe
  misc_feature (1)..(25): SEQ ID NO: 6710; WAN024F2R_at; Start 53; Stop 77
ctttcttgccgcaagaccatctcgt

SEQ ID NO: 190006 - DNA, 25 bp, Artificial
  probe
  misc_feature (1)..(25): SEQ ID NO: 6710; WAN024F2R_at; Start 59; Stop 83
tgccgcaagaccatctcgtctttac

SEQ ID NO: 190007 - DNA, 25 bp, Artificial
  probe
  misc_feature (1)..(25): SEQ ID NO: 6710; WAN024F2R_at; Start 91; Stop 115
aaagtggtgaataccgatgaaaagg

SEQ ID NO: 190008 - DNA, 25 bp, Artificial
  probe
  misc_feature (1)..(25): SEQ ID NO: 6710; WAN024F2R_at; Start 58; Stop 82
ttgccgcaagaccatctcgtcttta

SEQ ID NO: 190009 - DNA, 25 bp, Artificial
  probe
  misc_feature (1)..(25): SEQ ID NO: 6710; WAN024F2R_at; Start 47; Stop 71
tcagttctttcttgccgcaagacca

SEQ ID NO: 190010 - DNA, 25 bp, Artificial
  probe
  misc_feature (1)..(25): SEQ ID NO: 6710; WAN024F2R_at; Start 54; Stop 78
tttcttgccgcaagaccatctcgtc

SEQ ID NO: 190011 - DNA, 25 bp, Artificial
  probe
  misc_feature (1)..(25): SEQ ID NO: 6710; WAN024F2R_at; Start 96; Stop 120
ggtgaataccgatgaaaaggaggta

SEQ ID NO: 190012 - DNA, 25 bp, Artificial
  probe
  misc_feature (1)..(25): SEQ ID NO: 6710; WAN024F2R_at; Start 95; Stop 119
tggtgaataccgatgaaaaggaggt

SEQ ID NO: 190013 - DNA, 25 bp, Artificial
  probe
  misc_feature (1)..(25): SEQ ID NO: 6710; WAN024F2R_at; Start 62; Stop 86
cgcaagaccatctcgtctttactat

SEQ ID NO: 190014 - DNA, 25 bp, Artificial
  probe
  misc_feature (1)..(25): SEQ ID NO: 6710; WAN024F2R_at; Start 61; Stop 85
ccgcaagaccatctcgtctttacta

SEQ ID NO: 190015 - DNA, 25 bp, Artificial
  probe
  misc_feature (1)..(25): SEQ ID NO: 6710; WAN024F2R_at; Start 51; Stop 75
ttctttcttgccgcaagaccatctc

SEQ ID NO: 190016 - DNA, 25 bp, Artificial
  probe
  misc_feature (1)..(25): SEQ ID NO: 6710; WAN024F2R_at; Start 40; Stop 64
ctagaaatcagttctttcttgccgc

SEQ ID NO: 190017 - DNA, 25 bp, Artificial
  probe
  misc_feature (1)..(25): SEQ ID NO: 6710; WAN024F2R_at; Start 57; Stop 81
cttgccgcaagaccatctcgtcttt

SEQ ID NO: 190018 - DNA, 25 bp, Artificial
  probe
  misc_feature (1)..(25): SEQ ID NO: 6710; WAN024F2R_at; Start 42; Stop 66
agaaatcagttctttcttgccgcaa

SEQ ID NO: 190019 - DNA, 25 bp, Artificial
  probe
  misc_feature (1)..(25): SEQ ID NO: 6710; WAN024F2R_at; Start 94; Stop 118
gtggtgaataccgatgaaaaggagg

SEQ ID NO: 190020 - DNA, 25 bp, Artificial
  probe
  misc_feature (1)..(25): SEQ ID NO: 6710; WAN024F2R_at; Start 52; Stop 76
tctttcttgccgcaagaccatctcg

SEQ ID NO: 190021 - DNA, 25 bp, Artificial
  probe
  misc_feature (1)..(25): SEQ ID NO: 6710; WAN024F2R_at; Start 46; Stop 70
atcagttctttcttgccgcaagacc

SEQ ID NO: 190022 - DNA, 25 bp, Artificial
  probe
  misc_feature (1)..(25): SEQ ID NO: 6710; WAN024F2R_at; Start 41; Stop 65
tagaaatcagttctttcttgccgca

SEQ ID NO: 190023 - DNA, 25 bp, Artificial
  probe
  misc_feature (1)..(25): SEQ ID NO: 6710; WAN024F2R_at; Start 49; Stop 73
agttctttcttgccgcaagaccatc

SEQ ID NO: 190024 - DNA, 25 bp, Artificial
  probe
  misc_feature (1)..(25): SEQ ID NO: 1826; WAN024F2S_at; Start 128; Stop 152
acttgacgcttacctctcagatgac

SEQ ID NO: 190025 - DNA, 25 bp, Artificial
  probe
  misc_feature (1)..(25): SEQ ID NO: 1826; WAN024F2S_at; Start 70; Stop 94
tctcttattatatttcagcaggttg

SEQ ID NO: 190026 - DNA, 25 bp, Artificial
  probe
  misc_feature (1)..(25): SEQ ID NO: 1826; WAN024F2S_at; Start 24; Stop 48
tagagattcccaattgcggaactct

SEQ ID NO: 190027 - DNA, 25 bp, Artificial
  probe
  misc_feature (1)..(25): SEQ ID NO: 1826; WAN024F2S_at; Start 11; Stop 35
gaaaacaaaaagctagagattccca

SEQ ID NO: 190028 - DNA, 25 bp, Artificial
  probe
  misc_feature (1)..(25): SEQ ID NO: 1826; WAN024F2S_at; Start 147; Stop 171
gatgacatctcttataacccaaaca

SEQ ID NO: 190029 - DNA, 25 bp, Artificial
  probe
  misc_feature (1)..(25): SEQ ID NO: 1826; WAN024F2S_at; Start 132; Stop 156
gacgcttacctctcagatgacatct

SEQ ID NO: 190030 - DNA, 25 bp, Artificial
  probe
  misc_feature (1)..(25): SEQ ID NO: 1826; WAN024F2S_at; Start 2; Stop 26
tgattctcagaaaacaaaaagctag

SEQ ID NO: 190031 - DNA, 25 bp, Artificial
  probe
  misc_feature (1)..(25): SEQ ID NO: 1826; WAN024F2S_at; Start 184; Stop 208
cccaaagacagatttcatatcaatc

SEQ ID NO: 190032 - DNA, 25 bp, Artificial
  probe
  misc_feature (1)..(25): SEQ ID NO: 1826; WAN024F2S_at; Start 152; Stop 176
catctcttataacccaaacaaacct

SEQ ID NO: 190033 - DNA, 25 bp, Artificial
  probe
  misc_feature (1)..(25): SEQ ID NO: 1826; WAN024F2S_at; Start 18; Stop 42
aaaagctagagattcccaattgcgg

SEQ ID NO: 190034 - DNA, 25 bp, Artificial
  probe
  misc_feature (1)..(25): SEQ ID NO: 1826; WAN024F2S_at; Start 78; Stop 102
tatatttcagcaggttgttggccat

SEQ ID NO: 190035 - DNA, 25 bp, Artificial
  probe
  misc_feature (1)..(25): SEQ ID NO: 1826; WAN024F2S_at; Start 124; Stop 148
tctcacttgacgcttacctctcaga

SEQ ID NO: 190036 - DNA, 25 bp, Artificial
  probe
  misc_feature (1)..(25): SEQ ID NO: 1826; WAN024F2S_at; Start 119; Stop 143
tcaattctcacttgacgcttacctc

SEQ ID NO: 190037 - DNA, 25 bp, Artificial
  probe
  misc_feature (1)..(25): SEQ ID NO: 1826; WAN024F2S_at; Start 130; Stop 154
ttgacgcttacctctcagatgacat

SEQ ID NO: 190038 - DNA, 25 bp, Artificial
  probe
  misc_feature (1)..(25): SEQ ID NO: 1826; WAN024F2S_at; Start 75; Stop 99
tattatatttcagcaggttgttggc

SEQ ID NO: 190039 - DNA, 25 bp, Artificial
  probe
  misc_feature (1)..(25): SEQ ID NO: 1826; WAN024F2S_at; Start 190; Stop 214
gacagatttcatatcaatcttacgt

SEQ ID NO: 190040 - DNA, 25 bp, Artificial
  probe
  misc_feature (1)..(25): SEQ ID NO: 1826; WAN024F2S_at; Start 216; Stop 240
tagcgaaaatttgtctacccttgga

SEQ ID NO: 190041 - DNA, 25 bp, Artificial
  probe
  misc_feature (1)..(25): SEQ ID NO: 1826; WAN024F2S_at; Start 196; Stop 220
tttcatatcaatcttacgtttagcg

SEQ ID NO: 190042 - DNA, 25 bp, Artificial
  probe
  misc_feature (1)..(25): SEQ ID NO: 1826; WAN024F2S_at; Start 20; Stop 44
aagctagagattcccaattgcggaa

SEQ ID NO: 190043 - DNA, 25 bp, Artificial
  probe
  misc_feature (1)..(25): SEQ ID NO: 1826; WAN024F2S_at; Start 149; Stop 173
tgacatctcttataacccaaacaaa

SEQ ID NO: 190044 - DNA, 25 bp, Artificial
  probe
  misc_feature (1)..(25): SEQ ID NO: 1826; WAN024F2S_at; Start 13; Stop 37
aaacaaaaagctagagattcccaat

SEQ ID NO: 190045 - DNA, 25 bp, Artificial
  probe
  misc_feature (1)..(25): SEQ ID NO: 1826; WAN024F2S_at; Start 17; Stop 41
aaaaagctagagattcccaattgcg

SEQ ID NO: 190046 - DNA, 25 bp, Artificial
  probe
  misc_feature (1)..(25): SEQ ID NO: 1826; WAN024F2S_at; Start 26; Stop 50
gagattcccaattgcggaactctag

SEQ ID NO: 190047 - DNA, 25 bp, Artificial
  probe
  misc_feature (1)..(25): SEQ ID NO: 1826; WAN024F2S_at; Start 8; Stop 32
tcagaaaacaaaaagctagagattc

SEQ ID NO: 190048 - DNA, 25 bp, Artificial
  probe
  misc_feature (1)..(25): SEQ ID NO: 1826; WAN024F2S_at; Start 204; Stop 228
caatcttacgtttagcgaaaatttg

SEQ ID NO: 190049 - DNA, 25 bp, Artificial
  probe
  misc_feature (1)..(25): SEQ ID NO: 1826; WAN024F2S_at; Start 57; Stop 81
aattttgcctctttctcttattata

SEQ ID NO: 190050 - DNA, 25 bp, Artificial
  probe
  misc_feature (1)..(25): SEQ ID NO: 1826; WAN024F2S_at; Start 80; Stop 104
tatttcagcaggttgttggccatga

SEQ ID NO: 190051 - DNA, 25 bp, Artificial
  probe
  misc_feature (1)..(25): SEQ ID NO: 1826; WAN024F2S_at; Start 82; Stop 106
tttcagcaggttgttggccatgagt

SEQ ID NO: 190052 - DNA, 25 bp, Artificial
  probe
  misc_feature (1)..(25): SEQ ID NO: 1826; WAN024F2S_at; Start 22; Stop 46
gctagagattcccaattgcggaact

SEQ ID NO: 190053 - DNA, 25 bp, Artificial
  probe
  misc_feature (1)..(25): SEQ ID NO: 1826; WAN024F2S_at; Start 19; Stop 43
aaagctagagattcccaattgcgga

SEQ ID NO: 190054 - DNA, 25 bp, Artificial
  probe
  misc_feature (1)..(25): SEQ ID NO: 1826; WAN024F2S_at; Start 126; Stop 150
tcacttgacgcttacctctcagatg

SEQ ID NO: 190055 - DNA, 25 bp, Artificial
  probe
  misc_feature (1)..(25): SEQ ID NO: 1826; WAN024F2S_at; Start 199; Stop 223
catatcaatcttacgtttagcgaaa

SEQ ID NO: 190056 - DNA, 25 bp, Artificial
  probe
  misc_feature (1)..(25): SEQ ID NO: 1826; WAN024F2S_at; Start 135; Stop 159
gcttacctctcagatgacatctctt

SEQ ID NO: 190057 - DNA, 25 bp, Artificial
  probe
  misc_feature (1)..(25): SEQ ID NO: 1826; WAN024F2S_at; Start 83; Stop 107
ttcagcaggttgttggccatgagta

SEQ ID NO: 190058 - DNA, 25 bp, Artificial
  probe
  misc_feature (1)..(25): SEQ ID NO: 5423; WAN024F2T_at; Start 50; Stop 74
caaagaaaagagtctgggacaatag

SEQ ID NO: 190059 - DNA, 25 bp, Artificial
  probe
  misc_feature (1)..(25): SEQ ID NO: 5423; WAN024F2T_at; Start 46; Stop 70
tatacaaagaaaagagtctgggaca

SEQ ID NO: 190060 - DNA, 25 bp, Artificial
  probe
  misc_feature (1)..(25): SEQ ID NO: 5423; WAN024F2T_at; Start 2; Stop 26
tgctttctctacaaaatagtataga

SEQ ID NO: 190061 - DNA, 25 bp, Artificial
  probe
  misc_feature (1)..(25): SEQ ID NO: 5423; WAN024F2T_at; Start 170; Stop 194
gaaaggctatcccatgcatattcac

SEQ ID NO: 190062 - DNA, 25 bp, Artificial
  probe
  misc_feature (1)..(25): SEQ ID NO: 5423; WAN024F2T_at; Start 135; Stop 159
tcttggtaaaatagaattgcccaat

SEQ ID NO: 190063 - DNA, 25 bp, Artificial
  probe
  misc_feature (1)..(25): SEQ ID NO: 5423; WAN024F2T_at; Start 67; Stop 91
gacaatagtctcttatctccaaaaa

SEQ ID NO: 190064 - DNA, 25 bp, Artificial
  probe
  misc_feature (1)..(25): SEQ ID NO: 5423; WAN024F2T_at; Start 168; Stop 192
tagaaaggctatcccatgcatattc

SEQ ID NO: 190065 - DNA, 25 bp, Artificial
  probe
  misc_feature (1)..(25): SEQ ID NO: 5423; WAN024F2T_at; Start 65; Stop 89
gggacaatagtctcttatctccaaa

SEQ ID NO: 190066 - DNA, 25 bp, Artificial
  probe
  misc_feature (1)..(25): SEQ ID NO: 5423; WAN024F2T_at; Start 161; Stop 185
aaccatttagaaaggctatcccatg

SEQ ID NO: 190067 - DNA, 25 bp, Artificial
  probe
  misc_feature (1)..(25): SEQ ID NO: 5423; WAN024F2T_at; Start 11; Stop 35
tacaaaatagtatagacaataacac

SEQ ID NO: 190068 - DNA, 25 bp, Artificial
  probe
  misc_feature (1)..(25): SEQ ID NO: 5423; WAN024F2T_at; Start 52; Stop 76
aagaaaagagtctgggacaatagtc

SEQ ID NO: 190069 - DNA, 25 bp, Artificial
  probe
  misc_feature (1)..(25): SEQ ID NO: 5423; WAN024F2T_at; Start 59; Stop 83
gagtctgggacaatagtctcttatc

SEQ ID NO: 190070 - DNA, 25 bp, Artificial
  probe
  misc_feature (1)..(25): SEQ ID NO: 5423; WAN024F2T_at; Start 138; Stop 162
tggtaaaatagaattgcccaataaa

SEQ ID NO: 190071 - DNA, 25 bp, Artificial
  probe
  misc_feature (1)..(25): SEQ ID NO: 5423; WAN024F2T_at; Start 141; Stop 165
taaaatagaattgcccaataaacca

SEQ ID NO: 190072 - DNA, 25 bp, Artificial
  probe
  misc_feature (1)..(25): SEQ ID NO: 5423; WAN024F2T_at; Start 133; Stop 157
agtcttggtaaaatagaattgccca

SEQ ID NO: 190073 - DNA, 25 bp, Artificial
  probe
  misc_feature (1)..(25): SEQ ID NO: 5423; WAN024F2T_at; Start 62; Stop 86
tctgggacaatagtctcttatctcc

SEQ ID NO: 190074 - DNA, 25 bp, Artificial
  probe
  misc_feature (1)..(25): SEQ ID NO: 5423; WAN024F2T_at; Start 173; Stop 197
aggctatcccatgcatattcactat

SEQ ID NO: 190075 - DNA, 25 bp, Artificial
  probe
  misc_feature (1)..(25): SEQ ID NO: 5423; WAN024F2T_at; Start 45; Stop 69
ttatacaaagaaaagagtctgggac

SEQ ID NO: 190076 - DNA, 25 bp, Artificial
  probe
  misc_feature (1)..(25): SEQ ID NO: 5423; WAN024F2T_at; Start 48; Stop 72
tacaaagaaaagagtctgggacaat

SEQ ID NO: 190077 - DNA, 25 bp, Artificial
  probe
  misc_feature (1)..(25): SEQ ID NO: 5423; WAN024F2T_at; Start 23; Stop 47
tagacaataacactatacaatttta

SEQ ID NO: 190078 - DNA, 25 bp, Artificial
  probe
  misc_feature (1)..(25): SEQ ID NO: 5423; WAN024F2T_at; Start 162; Stop 186
accatttagaaaggctatcccatgc

SEQ ID NO: 190079 - DNA, 25 bp, Artificial
  probe
  misc_feature (1)..(25): SEQ ID NO: 5423; WAN024F2T_at; Start 172; Stop 196
aaggctatcccatgcatattcacta

SEQ ID NO: 190080 - DNA, 25 bp, Artificial
  probe
  misc_feature (1)..(25): SEQ ID NO: 5423; WAN024F2T_at; Start 159; Stop 183
taaaccatttagaaaggctatccca

SEQ ID NO: 190081 - DNA, 25 bp, Artificial
  probe
  misc_feature (1)..(25): SEQ ID NO: 5423; WAN024F2T_at; Start 132; Stop 156
tagtcttggtaaaatagaattgccc

SEQ ID NO: 190082 - DNA, 25 bp, Artificial
  probe
  misc_feature (1)..(25): SEQ ID NO: 5423; WAN024F2T_at; Start 164; Stop 188
catttagaaaggctatcccatgcat

SEQ ID NO: 190083 - DNA, 25 bp, Artificial
  probe
  misc_feature (1)..(25): SEQ ID NO: 5423; WAN024F2T_at; Start 77; Stop 101
tcttatctccaaaaaaagcaacgga

SEQ ID NO: 190084 - DNA, 25 bp, Artificial
  probe
  misc_feature (1)..(25): SEQ ID NO: 5423; WAN024F2T_at; Start 90; Stop 114
aaaagcaacggatttgccgttgctt

SEQ ID NO: 190085 - DNA, 25 bp, Artificial
  probe
  misc_feature (1)..(25): SEQ ID NO: 5423; WAN024F2T_at; Start 147; Stop 171
agaattgcccaataaaccatttaga

SEQ ID NO: 190086 - DNA, 25 bp, Artificial
  probe
  misc_feature (1)..(25): SEQ ID NO: 5423; WAN024F2T_at; Start 30; Stop 54
taacactatacaattttatacaaag

SEQ ID NO: 190087 - DNA, 25 bp, Artificial
  probe
  misc_feature (1)..(25): SEQ ID NO: 5423; WAN024F2T_at; Start 123; Stop 147
tggttacgatagtcttggtaaaata

SEQ ID NO: 190088 - DNA, 25 bp, Artificial
  probe
  misc_feature (1)..(25): SEQ ID NO: 5423; WAN024F2T_at; Start 55; Stop 79
aaaagagtctgggacaatagtctct

SEQ ID NO: 190089 - DNA, 25 bp, Artificial
  probe
  misc_feature (1)..(25): SEQ ID NO: 5423; WAN024F2T_at; Start 146; Stop 170
tagaattgcccaataaaccatttag

SEQ ID NO: 190090 - DNA, 25 bp, Artificial
  probe
  misc_feature (1)..(25): SEQ ID NO: 5423; WAN024F2T_at; Start 82; Stop 106
tctccaaaaaaagcaacggatttgc

SEQ ID NO: 190091 - DNA, 25 bp, Artificial
  probe
  misc_feature (1)..(25): SEQ ID NO: 5423; WAN024F2T_at; Start 166; Stop 190
tttagaaaggctatcccatgcatat

SEQ ID NO: 190092 - DNA, 25 bp, Artificial
  probe
  misc_feature (1)..(25): SEQ ID NO: 3333; WAN024F2U_at; Start 1503; Stop 1527
caaggctgcttataatcttcaaatc

SEQ ID NO: 190093 - DNA, 25 bp, Artificial
  probe
  misc_feature (1)..(25): SEQ ID NO: 3333; WAN024F2U_at; Start 1668; Stop 1692
cctccttcgtttagatgaaaaggag

SEQ ID NO: 190094 - DNA, 25 bp, Artificial
  probe
  misc_feature (1)..(25): SEQ ID NO: 3333; WAN024F2U_at; Start 70; Stop 94
cgagcctgtgtcgtgctcaatcttt

SEQ ID NO: 190095 - DNA, 25 bp, Artificial
  probe
  misc_feature (1)..(25): SEQ ID NO: 3333; WAN024F2U_at; Start 436; Stop 460
ccgacggctgaagacttcctggaaa

SEQ ID NO: 190096 - DNA, 25 bp, Artificial
  probe
  misc_feature (1)..(25): SEQ ID NO: 3333; WAN024F2U_at; Start 1522; Stop 1546
caaatcgctacggaaaaccaatttg

SEQ ID NO: 190097 - DNA, 25 bp, Artificial
  probe
  misc_feature (1)..(25): SEQ ID NO: 3333; WAN024F2U_at; Start 118; Stop 142
ctactagcctgtcaacagaaaggaa

SEQ ID NO: 190098 - DNA, 25 bp, Artificial
  probe
  misc_feature (1)..(25): SEQ ID NO: 3333; WAN024F2U_at; Start 2077; Stop 2101
aatctgaggggcaagcgtcaagtga

SEQ ID NO: 190099 - DNA, 25 bp, Artificial
  probe
  misc_feature (1)..(25): SEQ ID NO: 3333; WAN024F2U_at; Start 66; Stop 90
gaaacgagcctgtgtcgtgctcaat

SEQ ID NO: 190100 - DNA, 25 bp, Artificial
  probe
  misc_feature (1)..(25): SEQ ID NO: 3333; WAN024F2U_at; Start 1617; Stop 1641
gcatgacttgaagacagttgtcgca

SEQ ID NO: 190101 - DNA, 25 bp, Artificial
  probe
  misc_feature (1)..(25): SEQ ID NO: 3333; WAN024F2U_at; Start 1433; Stop 1457
gtttttccaaaaccgatccagatgc

SEQ ID NO: 190102 - DNA, 25 bp, Artificial
  probe
  misc_feature (1)..(25): SEQ ID NO: 3333; WAN024F2U_at; Start 1447; Stop 1471
gatccagatgccacttttatgcgga

SEQ ID NO: 190103 - DNA, 25 bp, Artificial
  probe
  misc_feature (1)..(25): SEQ ID NO: 3333; WAN024F2U_at; Start 1598; Stop 1622
cattccttgaaacctatccgcatga

SEQ ID NO: 190104 - DNA, 25 bp, Artificial
  probe
  misc_feature (1)..(25): SEQ ID NO: 3333; WAN024F2U_at; Start 1379; Stop 1403
cagtacgtgctgaaaaatatgagaa

SEQ ID NO: 190105 - DNA, 25 bp, Artificial
  probe
  misc_feature (1)..(25): SEQ ID NO: 3333; WAN024F2U_at; Start 1575; Stop 1599
gacagataccaagactcttctgcca

SEQ ID NO: 190106 - DNA, 25 bp, Artificial
  probe
  misc_feature (1)..(25): SEQ ID NO: 3333; WAN024F2U_at; Start 1455; Stop 1479
tgccacttttatgcggatgaaggaa

SEQ ID NO: 190107 - DNA, 25 bp, Artificial
  probe
  misc_feature (1)..(25): SEQ ID NO: 3333; WAN024F2U_at; Start 1451; Stop 1475
cagatgccacttttatgcggatgaa

SEQ ID NO: 190108 - DNA, 25 bp, Artificial
  probe
  misc_feature (1)..(25): SEQ ID NO: 3333; WAN024F2U_at; Start 1663; Stop 1687
gagaacctccttcgtttagatgaaa

SEQ ID NO: 190109 - DNA, 25 bp, Artificial
  probe
  misc_feature (1)..(25): SEQ ID NO: 3333; WAN024F2U_at; Start 1518; Stop 1542
tcttcaaatcgctacggaaaaccaa

SEQ ID NO: 190110 - DNA, 25 bp, Artificial
  probe
  misc_feature (1)..(25): SEQ ID NO: 3333; WAN024F2U_at; Start 1649; Stop 1673
gatatggaagtgaagagaacctcct

SEQ ID NO: 190111 - DNA, 25 bp, Artificial
  probe
  misc_feature (1)..(25): SEQ ID NO: 3333; WAN024F2U_at; Start 125; Stop 149
cctgtcaacagaaaggaaaagaagc

SEQ ID NO: 190112 - DNA, 25 bp, Artificial
  probe
  misc_feature (1)..(25): SEQ ID NO: 3333; WAN024F2U_at; Start 1552; Stop 1576
cactatgatgtcttttcaaatccga

SEQ ID NO: 190113 - DNA, 25 bp, Artificial
  probe
  misc_feature (1)..(25): SEQ ID NO: 3333; WAN024F2U_at; Start 1364; Stop 1388
taaaggaggatttttcagtacgtgc

SEQ ID NO: 190114 - DNA, 25 bp, Artificial
  probe
  misc_feature (1)..(25): SEQ ID NO: 3333; WAN024F2U_at; Start 1612; Stop 1636
tatccgcatgacttgaagacagttg

SEQ ID NO: 190115 - DNA, 25 bp, Artificial
  probe
  misc_feature (1)..(25): SEQ ID NO: 3333; WAN024F2U_at; Start 672; Stop 696
ccacggcattcctcttcaaatcaaa

SEQ ID NO: 190116 - DNA, 25 bp, Artificial
  probe
  misc_feature (1)..(25): SEQ ID NO: 3333; WAN024F2U_at; Start 1638; Stop 1662
cgcagatgctggatatggaagtgaa

SEQ ID NO: 190117 - DNA, 25 bp, Artificial
  probe
  misc_feature (1)..(25): SEQ ID NO: 3333; WAN024F2U_at; Start 1510; Stop 1534
gcttataatcttcaaatcgctacgg

SEQ ID NO: 190118 - DNA, 25 bp, Artificial
  probe
  misc_feature (1)..(25): SEQ ID NO: 3333; WAN024F2U_at; Start 1629; Stop 1653
gacagttgtcgcagatgctggatat

SEQ ID NO: 190119 - DNA, 25 bp, Artificial
  probe
  misc_feature (1)..(25): SEQ ID NO: 3333; WAN024F2U_at; Start 1625; Stop 1649
tgaagacagttgtcgcagatgctgg

SEQ ID NO: 190120 - DNA, 25 bp, Artificial
  probe
  misc_feature (1)..(25): SEQ ID NO: 3333; WAN024F2U_at; Start 1606; Stop 1630
gaaacctatccgcatgacttgaaga

SEQ ID NO: 190121 - DNA, 25 bp, Artificial
  probe
  misc_feature (1)..(25): SEQ ID NO: 3333; WAN024F2U_at; Start 1584; Stop 1608
caagactcttctgccattccttgaa

SEQ ID NO: 190122 - DNA, 25 bp, Artificial
  probe
  misc_feature (1)..(25): SEQ ID NO: 3333; WAN024F2U_at; Start 1392; Stop 1416
aaaatatgagaactatcaggagaca

SEQ ID NO: 190123 - DNA, 25 bp, Artificial
  probe
  misc_feature (1)..(25): SEQ ID NO: 3333; WAN024F2U_at; Start 1537; Stop 1561
aaccaatttgttcttcactatgatg

SEQ ID NO: 190124 - DNA, 25 bp, Artificial
  probe
  misc_feature (1)..(25): SEQ ID NO: 3333; WAN024F2U_at; Start 1567; Stop 1591
tcaaatccgacagataccaagactc

SEQ ID NO: 190125 - DNA, 25 bp, Artificial
  probe
  misc_feature (1)..(25): SEQ ID NO: 3333; WAN024F2U_at; Start 442; Stop 466
gctgaagacttcctggaaaacccta

SEQ ID NO: 190126 - DNA, 25 bp, Artificial
  probe
  misc_feature (1)..(25): SEQ ID NO: 1246; WAN024F2V_at; Start 2; Stop 26
tgaatgaacgttaccagtgtttaaa

SEQ ID NO: 190127 - DNA, 25 bp, Artificial
  probe
  misc_feature (1)..(25): SEQ ID NO: 1246; WAN024F2V_at; Start 88; Stop 112
attgatatgaaatctgtctttgggc

SEQ ID NO: 190128 - DNA, 25 bp, Artificial
  probe
  misc_feature (1)..(25): SEQ ID NO: 1246; WAN024F2V_at; Start 72; Stop 96
tttcgctaaacgtaagattgatatg

SEQ ID NO: 190129 - DNA, 25 bp, Artificial
  probe
  misc_feature (1)..(25): SEQ ID NO: 1246; WAN024F2V_at; Start 40; Stop 64
caggcacttttatcttccaagggta

SEQ ID NO: 190130 - DNA, 25 bp, Artificial
  probe
  misc_feature (1)..(25): SEQ ID NO: 1246; WAN024F2V_at; Start 190; Stop 214
ctcatggccaacaacctgctgaaat

SEQ ID NO: 190131 - DNA, 25 bp, Artificial
  probe
  misc_feature (1)..(25): SEQ ID NO: 1246; WAN024F2V_at; Start 42; Stop 66
ggcacttttatcttccaagggtaga

SEQ ID NO: 190132 - DNA, 25 bp, Artificial
  probe
  misc_feature (1)..(25): SEQ ID NO: 1246; WAN024F2V_at; Start 221; Stop 245
agagaaagaggcaaaattaactaat

SEQ ID NO: 190133 - DNA, 25 bp, Artificial
  probe
  misc_feature (1)..(25): SEQ ID NO: 1246; WAN024F2V_at; Start 138; Stop 162
gagatgtcatctgagaggtaagcgt

SEQ ID NO: 190134 - DNA, 25 bp, Artificial
  probe
  misc_feature (1)..(25): SEQ ID NO: 1246; WAN024F2V_at; Start 39; Stop 63
tcaggcacttttatcttccaagggt

SEQ ID NO: 190135 - DNA, 25 bp, Artificial
  probe
  misc_feature (1)..(25): SEQ ID NO: 1246; WAN024F2V_at; Start 136; Stop 160
aagagatgtcatctgagaggtaagc

SEQ ID NO: 190136 - DNA, 25 bp, Artificial
  probe
  misc_feature (1)..(25): SEQ ID NO: 1246; WAN024F2V_at; Start 34; Stop 58
gaatatcaggcacttttatcttcca

SEQ ID NO: 190137 - DNA, 25 bp, Artificial
  probe
  misc_feature (1)..(25): SEQ ID NO: 1246; WAN024F2V_at; Start 204; Stop 228
cctgctgaaatataataagagaaag

SEQ ID NO: 190138 - DNA, 25 bp, Artificial
  probe
  misc_feature (1)..(25): SEQ ID NO: 1246; WAN024F2V_at; Start 214; Stop 238
tataataagagaaagaggcaaaatt

SEQ ID NO: 190139 - DNA, 25 bp, Artificial
  probe
  misc_feature (1)..(25): SEQ ID NO: 1246; WAN024F2V_at; Start 144; Stop 168
tcatctgagaggtaagcgtcaagtg

SEQ ID NO: 190140 - DNA, 25 bp, Artificial
  probe
  misc_feature (1)..(25): SEQ ID NO: 1246; WAN024F2V_at; Start 208; Stop 232
ctgaaatataataagagaaagaggc

SEQ ID NO: 190141 - DNA, 25 bp, Artificial
  probe
  misc_feature (1)..(25): SEQ ID NO: 1246; WAN024F2V_at; Start 129; Stop 153
gggttataagagatgtcatctgaga

SEQ ID NO: 190142 - DNA, 25 bp, Artificial
  probe
  misc_feature (1)..(25): SEQ ID NO: 1246; WAN024F2V_at; Start 210; Stop 234
gaaatataataagagaaagaggcaa

SEQ ID NO: 190143 - DNA, 25 bp, Artificial
  probe
  misc_feature (1)..(25): SEQ ID NO: 1246; WAN024F2V_at; Start 194; Stop 218
tggccaacaacctgctgaaatataa

SEQ ID NO: 190144 - DNA, 25 bp, Artificial
  probe
  misc_feature (1)..(25): SEQ ID NO: 1246; WAN024F2V_at; Start 192; Stop 216
catggccaacaacctgctgaaatat

SEQ ID NO: 190145 - DNA, 25 bp, Artificial
  probe
  misc_feature (1)..(25): SEQ ID NO: 1246; WAN024F2V_at; Start 196; Stop 220
gccaacaacctgctgaaatataata

SEQ ID NO: 190146 - DNA, 25 bp, Artificial
  probe
  misc_feature (1)..(25): SEQ ID NO: 1246; WAN024F2V_at; Start 23; Stop 47
taaaaactaaagaatatcaggcact

SEQ ID NO: 190147 - DNA, 25 bp, Artificial
  probe
  misc_feature (1)..(25): SEQ ID NO: 1246; WAN024F2V_at; Start 142; Stop 166
tgtcatctgagaggtaagcgtcaag

SEQ ID NO: 190148 - DNA, 25 bp, Artificial
  probe
  misc_feature (1)..(25): SEQ ID NO: 1246; WAN024F2V_at; Start 37; Stop 61
tatcaggcacttttatcttccaagg

SEQ ID NO: 190149 - DNA, 25 bp, Artificial
  probe
  misc_feature (1)..(25): SEQ ID NO: 1246; WAN024F2V_at; Start 201; Stop 225
caacctgctgaaatataataagaga

SEQ ID NO: 190150 - DNA, 25 bp, Artificial
  probe
  misc_feature (1)..(25): SEQ ID NO: 1246; WAN024F2V_at; Start 75; Stop 99
cgctaaacgtaagattgatatgaaa

SEQ ID NO: 190151 - DNA, 25 bp, Artificial
  probe
  misc_feature (1)..(25): SEQ ID NO: 1246; WAN024F2V_at; Start 188; Stop 212
tactcatggccaacaacctgctgaa

SEQ ID NO: 190152 - DNA, 25 bp, Artificial
  probe
  misc_feature (1)..(25): SEQ ID NO: 1246; WAN024F2V_at; Start 198; Stop 222
caacaacctgctgaaatataataag

SEQ ID NO: 190153 - DNA, 25 bp, Artificial
  probe
  misc_feature (1)..(25): SEQ ID NO: 1246; WAN024F2V_at; Start 55; Stop 79
tccaagggtagacaaattttcgcta

SEQ ID NO: 190154 - DNA, 25 bp, Artificial
  probe
  misc_feature (1)..(25): SEQ ID NO: 1246; WAN024F2V_at; Start 82; Stop 106
cgtaagattgatatgaaatctgtct

SEQ ID NO: 190155 - DNA, 25 bp, Artificial
  probe
  misc_feature (1)..(25): SEQ ID NO: 1246; WAN024F2V_at; Start 44; Stop 68
cacttttatcttccaagggtagaca

SEQ ID NO: 190156 - DNA, 25 bp, Artificial
  probe
  misc_feature (1)..(25): SEQ ID NO: 1246; WAN024F2V_at; Start 67; Stop 91
caaattttcgctaaacgtaagattg

SEQ ID NO: 190157 - DNA, 25 bp, Artificial
  probe
  misc_feature (1)..(25): SEQ ID NO: 1246; WAN024F2V_at; Start 140; Stop 164
gatgtcatctgagaggtaagcgtca

SEQ ID NO: 190158 - DNA, 25 bp, Artificial
  probe
  misc_feature (1)..(25): SEQ ID NO: 1246; WAN024F2V_at; Start 145; Stop 169
catctgagaggtaagcgtcaagtga

SEQ ID NO: 190159 - DNA, 25 bp, Artificial
  probe
  misc_feature (1)..(25): SEQ ID NO: 1246; WAN024F2V_at; Start 91; Stop 115
gatatgaaatctgtctttgggcaga

SEQ ID NO: 190160 - DNA, 25 bp, Artificial
  probe
  misc_feature (1)..(25): SEQ ID NO: 1965; WAN024F2W_at; Start 173; Stop 197
ttgtatctactcttctatttgccta

SEQ ID NO: 190161 - DNA, 25 bp, Artificial
  probe
  misc_feature (1)..(25): SEQ ID NO: 1965; WAN024F2W_at; Start 192; Stop 216
tgcctattcacaagggattttctct

SEQ ID NO: 190162 - DNA, 25 bp, Artificial
  probe
  misc_feature (1)..(25): SEQ ID NO: 1965; WAN024F2W_at; Start 166; Stop 190
aaaatgcttgtatctactcttctat

SEQ ID NO: 190163 - DNA, 25 bp, Artificial
  probe
  misc_feature (1)..(25): SEQ ID NO: 1965; WAN024F2W_at; Start 213; Stop 237
ctctggtcgaaaaattgaaaaatgg

SEQ ID NO: 190164 - DNA, 25 bp, Artificial
  probe
  misc_feature (1)..(25): SEQ ID NO: 1965; WAN024F2W_at; Start 196; Stop 220
tattcacaagggattttctctggtc

SEQ ID NO: 190165 - DNA, 25 bp, Artificial
  probe
  misc_feature (1)..(25): SEQ ID NO: 1965; WAN024F2W_at; Start 174; Stop 198
tgtatctactcttctatttgcctat

SEQ ID NO: 190166 - DNA, 25 bp, Artificial
  probe
  misc_feature (1)..(25): SEQ ID NO: 1965; WAN024F2W_at; Start 176; Stop 200
tatctactcttctatttgcctattc

SEQ ID NO: 190167 - DNA, 25 bp, Artificial
  probe
  misc_feature (1)..(25): SEQ ID NO: 1965; WAN024F2W_at; Start 183; Stop 207
tcttctatttgcctattcacaaggg

SEQ ID NO: 190168 - DNA, 25 bp, Artificial
  probe
  misc_feature (1)..(25): SEQ ID NO: 1965; WAN024F2W_at; Start 175; Stop 199
gtatctactcttctatttgcctatt

SEQ ID NO: 190169 - DNA, 25 bp, Artificial
  probe
  misc_feature (1)..(25): SEQ ID NO: 1965; WAN024F2W_at; Start 206; Stop 230
ggattttctctggtcgaaaaattga

SEQ ID NO: 190170 - DNA, 25 bp, Artificial
  probe
  misc_feature (1)..(25): SEQ ID NO: 1965; WAN024F2W_at; Start 193; Stop 217
gcctattcacaagggattttctctg

SEQ ID NO: 190171 - DNA, 25 bp, Artificial
  probe
  misc_feature (1)..(25): SEQ ID NO: 1965; WAN024F2W_at; Start 179; Stop 203
ctactcttctatttgcctattcaca

SEQ ID NO: 190172 - DNA, 25 bp, Artificial
  probe
  misc_feature (1)..(25): SEQ ID NO: 1965; WAN024F2W_at; Start 197; Stop 221
attcacaagggattttctctggtcg

SEQ ID NO: 190173 - DNA, 25 bp, Artificial
  probe
  misc_feature (1)..(25): SEQ ID NO: 1965; WAN024F2W_at; Start 198; Stop 222
ttcacaagggattttctctggtcga

SEQ ID NO: 190174 - DNA, 25 bp, Artificial
  probe
  misc_feature (1)..(25): SEQ ID NO: 1965; WAN024F2W_at; Start 191; Stop 215
ttgcctattcacaagggattttctc

SEQ ID NO: 190175 - DNA, 25 bp, Artificial
  probe
  misc_feature (1)..(25): SEQ ID NO: 1965; WAN024F2W_at; Start 199; Stop 223
tcacaagggattttctctggtcgaa

SEQ ID NO: 190176 - DNA, 25 bp, Artificial
  probe
  misc_feature (1)..(25): SEQ ID NO: 1965; WAN024F2W_at; Start 187; Stop 211
ctatttgcctattcacaagggattt

SEQ ID NO: 190177 - DNA, 25 bp, Artificial
  probe
  misc_feature (1)..(25): SEQ ID NO: 1965; WAN024F2W_at; Start 207; Stop 231
gattttctctggtcgaaaaattgaa

SEQ ID NO: 190178 - DNA, 25 bp, Artificial
  probe
  misc_feature (1)..(25): SEQ ID NO: 1965; WAN024F2W_at; Start 195; Stop 219
ctattcacaagggattttctctggt

SEQ ID NO: 190179 - DNA, 25 bp, Artificial
  probe
  misc_feature (1)..(25): SEQ ID NO: 1965; WAN024F2W_at; Start 212; Stop 236
tctctggtcgaaaaattgaaaaatg

SEQ ID NO: 190180 - DNA, 25 bp, Artificial
  probe
  misc_feature (1)..(25): SEQ ID NO: 1965; WAN024F2W_at; Start 190; Stop 214
tttgcctattcacaagggattttct

SEQ ID NO: 190181 - DNA, 25 bp, Artificial
  probe
  misc_feature (1)..(25): SEQ ID NO: 1965; WAN024F2W_at; Start 185; Stop 209
ttctatttgcctattcacaagggat

SEQ ID NO: 190182 - DNA, 25 bp, Artificial
  probe
  misc_feature (1)..(25): SEQ ID NO: 1965; WAN024F2W_at; Start 188; Stop 212
tatttgcctattcacaagggatttt

SEQ ID NO: 190183 - DNA, 25 bp, Artificial
  probe
  misc_feature (1)..(25): SEQ ID NO: 1965; WAN024F2W_at; Start 189; Stop 213
atttgcctattcacaagggattttc

SEQ ID NO: 190184 - DNA, 25 bp, Artificial
  probe
  misc_feature (1)..(25): SEQ ID NO: 1965; WAN024F2W_at; Start 184; Stop 208
cttctatttgcctattcacaaggga

SEQ ID NO: 190185 - DNA, 25 bp, Artificial
  probe
  misc_feature (1)..(25): SEQ ID NO: 1965; WAN024F2W_at; Start 200; Stop 224
cacaagggattttctctggtcgaaa

SEQ ID NO: 190186 - DNA, 25 bp, Artificial
  probe
  misc_feature (1)..(25): SEQ ID NO: 1965; WAN024F2W_at; Start 181; Stop 205
actcttctatttgcctattcacaag

SEQ ID NO: 190187 - DNA, 25 bp, Artificial
  probe
  misc_feature (1)..(25): SEQ ID NO: 1965; WAN024F2W_at; Start 171; Stop 195
gcttgtatctactcttctatttgcc

SEQ ID NO: 190188 - DNA, 25 bp, Artificial
  probe
  misc_feature (1)..(25): SEQ ID NO: 1965; WAN024F2W_at; Start 178; Stop 202
tctactcttctatttgcctattcac

SEQ ID NO: 190189 - DNA, 25 bp, Artificial
  probe
  misc_feature (1)..(25): SEQ ID NO: 1965; WAN024F2W_at; Start 165; Stop 189
taaaatgcttgtatctactcttcta

SEQ ID NO: 190190 - DNA, 25 bp, Artificial
  probe
  misc_feature (1)..(25): SEQ ID NO: 1965; WAN024F2W_at; Start 186; Stop 210
tctatttgcctattcacaagggatt

SEQ ID NO: 190191 - DNA, 25 bp, Artificial
  probe
  misc_feature (1)..(25): SEQ ID NO: 1965; WAN024F2W_at; Start 180; Stop 204
tactcttctatttgcctattcacaa

SEQ ID NO: 190192 - DNA, 25 bp, Artificial
  probe
  misc_feature (1)..(25): SEQ ID NO: 1965; WAN024F2W_at; Start 214; Stop 238
tctggtcgaaaaattgaaaaatgga

SEQ ID NO: 190193 - DNA, 25 bp, Artificial
  probe
  misc_feature (1)..(25): SEQ ID NO: 1965; WAN024F2W_at; Start 167; Stop 191
aaatgcttgtatctactcttctatt

SEQ ID NO: 190194 - DNA, 25 bp, Artificial
  probe
  misc_feature (1)..(25): SEQ ID NO: 2211; WAN024F2X_at; Start 51; Stop 75
tgaagccaatgccaacaagtatagt

SEQ ID NO: 190195 - DNA, 25 bp, Artificial
  probe
  misc_feature (1)..(25): SEQ ID NO: 2211; WAN024F2X_at; Start 57; Stop 81
caatgccaacaagtatagttttgtg

SEQ ID NO: 190196 - DNA, 25 bp, Artificial
  probe
  misc_feature (1)..(25): SEQ ID NO: 2211; WAN024F2X_at; Start 84; Stop 108
gaagaaaacgacagagaaattctcc

SEQ ID NO: 190197 - DNA, 25 bp, Artificial
  probe
  misc_feature (1)..(25): SEQ ID NO: 2211; WAN024F2X_at; Start 90; Stop 114
aacgacagagaaattctccgccaaa

SEQ ID NO: 190198 - DNA, 25 bp, Artificial
  probe
  misc_feature (1)..(25): SEQ ID NO: 2211; WAN024F2X_at; Start 88; Stop 112
aaaacgacagagaaattctccgcca

SEQ ID NO: 190199 - DNA, 25 bp, Artificial
  probe
  misc_feature (1)..(25): SEQ ID NO: 2211; WAN024F2X_at; Start 7; Stop 31
gagttagtgaccttagattgtttgt

SEQ ID NO: 190200 - DNA, 25 bp, Artificial
  probe
  misc_feature (1)..(25): SEQ ID NO: 2211; WAN024F2X_at; Start 2; Stop 26
tggaagagttagtgaccttagattg

SEQ ID NO: 190201 - DNA, 25 bp, Artificial
  probe
  misc_feature (1)..(25): SEQ ID NO: 2211; WAN024F2X_at; Start 41; Stop 65
gaactaagattgaagccaatgccaa

SEQ ID NO: 190202 - DNA, 25 bp, Artificial
  probe
  misc_feature (1)..(25): SEQ ID NO: 2211; WAN024F2X_at; Start 55; Stop 79
gccaatgccaacaagtatagttttg

SEQ ID NO: 190203 - DNA, 25 bp, Artificial
  probe
  misc_feature (1)..(25): SEQ ID NO: 2211; WAN024F2X_at; Start 95; Stop 119
cagagaaattctccgccaaacttca

SEQ ID NO: 190204 - DNA, 25 bp, Artificial
  probe
  misc_feature (1)..(25): SEQ ID NO: 2211; WAN024F2X_at; Start 48; Stop 72
gattgaagccaatgccaacaagtat

SEQ ID NO: 190205 - DNA, 25 bp, Artificial
  probe
  misc_feature (1)..(25): SEQ ID NO: 2211; WAN024F2X_at; Start 52; Stop 76
gaagccaatgccaacaagtatagtt

SEQ ID NO: 190206 - DNA, 25 bp, Artificial
  probe
  misc_feature (1)..(25): SEQ ID NO: 2211; WAN024F2X_at; Start 107; Stop 131
ccgccaaacttcaagaacagataca

SEQ ID NO: 190207 - DNA, 25 bp, Artificial
  probe
  misc_feature (1)..(25): SEQ ID NO: 2211; WAN024F2X_at; Start 4; Stop 28
gaagagttagtgaccttagattgtt

SEQ ID NO: 190208 - DNA, 25 bp, Artificial
  probe
  misc_feature (1)..(25): SEQ ID NO: 2211; WAN024F2X_at; Start 104; Stop 128
tctccgccaaacttcaagaacagat

SEQ ID NO: 190209 - DNA, 25 bp, Artificial
  probe
  misc_feature (1)..(25): SEQ ID NO: 2211; WAN024F2X_at; Start 15; Stop 39
gaccttagattgtttgtttattgac

SEQ ID NO: 190210 - DNA, 25 bp, Artificial
  probe
  misc_feature (1)..(25): SEQ ID NO: 2211; WAN024F2X_at; Start 75; Stop 99
ttttgtgtggaagaaaacgacagag

SEQ ID NO: 190211 - DNA, 25 bp, Artificial
  probe
  misc_feature (1)..(25): SEQ ID NO: 2211; WAN024F2X_at; Start 42; Stop 66
aactaagattgaagccaatgccaac

SEQ ID NO: 190212 - DNA, 25 bp, Artificial
  probe
  misc_feature (1)..(25): SEQ ID NO: 2211; WAN024F2X_at; Start 85; Stop 109
aagaaaacgacagagaaattctccg

SEQ ID NO: 190213 - DNA, 25 bp, Artificial
  probe
  misc_feature (1)..(25): SEQ ID NO: 2211; WAN024F2X_at; Start 102; Stop 126
attctccgccaaacttcaagaacag

SEQ ID NO: 190214 - DNA, 25 bp, Artificial
  probe
  misc_feature (1)..(25): SEQ ID NO: 2211; WAN024F2X_at; Start 43; Stop 67
actaagattgaagccaatgccaaca

SEQ ID NO: 190215 - DNA, 25 bp, Artificial
  probe
  misc_feature (1)..(25): SEQ ID NO: 2211; WAN024F2X_at; Start 61; Stop 85
gccaacaagtatagttttgtgtgga

SEQ ID NO: 190216 - DNA, 25 bp, Artificial
  probe
  misc_feature (1)..(25): SEQ ID NO: 2211; WAN024F2X_at; Start 53; Stop 77
aagccaatgccaacaagtatagttt

SEQ ID NO: 190217 - DNA, 25 bp, Artificial
  probe
  misc_feature (1)..(25): SEQ ID NO: 2211; WAN024F2X_at; Start 66; Stop 90
caagtatagttttgtgtggaagaaa

SEQ ID NO: 190218 - DNA, 25 bp, Artificial
  probe
  misc_feature (1)..(25): SEQ ID NO: 2211; WAN024F2X_at; Start 93; Stop 117
gacagagaaattctccgccaaactt

SEQ ID NO: 190219 - DNA, 25 bp, Artificial
  probe
  misc_feature (1)..(25): SEQ ID NO: 2211; WAN024F2X_at; Start 78; Stop 102
tgtgtggaagaaaacgacagagaaa

SEQ ID NO: 190220 - DNA, 25 bp, Artificial
  probe
  misc_feature (1)..(25): SEQ ID NO: 2211; WAN024F2X_at; Start 87; Stop 111
gaaaacgacagagaaattctccgcc

SEQ ID NO: 190221 - DNA, 25 bp, Artificial
  probe
  misc_feature (1)..(25): SEQ ID NO: 2211; WAN024F2X_at; Start 99; Stop 123
gaaattctccgccaaacttcaagaa

SEQ ID NO: 190222 - DNA, 25 bp, Artificial
  probe
  misc_feature (1)..(25): SEQ ID NO: 2211; WAN024F2X_at; Start 76; Stop 100
tttgtgtggaagaaaacgacagaga

SEQ ID NO: 190223 - DNA, 25 bp, Artificial
  probe
  misc_feature (1)..(25): SEQ ID NO: 2211; WAN024F2X_at; Start 45; Stop 69
taagattgaagccaatgccaacaag

SEQ ID NO: 190224 - DNA, 25 bp, Artificial
  probe
  misc_feature (1)..(25): SEQ ID NO: 2211; WAN024F2X_at; Start 72; Stop 96
tagttttgtgtggaagaaaacgaca

SEQ ID NO: 190225 - DNA, 25 bp, Artificial
  probe
  misc_feature (1)..(25): SEQ ID NO: 2211; WAN024F2X_at; Start 106; Stop 130
tccgccaaacttcaagaacagatac

SEQ ID NO: 190226 - DNA, 25 bp, Artificial
  probe
  misc_feature (1)..(25): SEQ ID NO: 2211; WAN024F2X_at; Start 82; Stop 106
tggaagaaaacgacagagaaattct

SEQ ID NO: 190227 - DNA, 25 bp, Artificial
  probe
  misc_feature (1)..(25): SEQ ID NO: 2211; WAN024F2X_at; Start 80; Stop 104
tgtggaagaaaacgacagagaaatt

SEQ ID NO: 190228 - DNA, 25 bp, Artificial
  probe
  misc_feature (1)..(25): SEQ ID NO: 2077; WAN024F2Y_at; Start 42; Stop 66
cctcattcatgaaaaagaagtccat

SEQ ID NO: 190229 - DNA, 25 bp, Artificial
  probe
  misc_feature (1)..(25): SEQ ID NO: 2077; WAN024F2Y_at; Start 115; Stop 139
cacctctttcgtacatgtaggaaac

SEQ ID NO: 190230 - DNA, 25 bp, Artificial
  probe
  misc_feature (1)..(25): SEQ ID NO: 2077; WAN024F2Y_at; Start 30; Stop 54
cctgctcttttacctcattcatgaa

SEQ ID NO: 190231 - DNA, 25 bp, Artificial
  probe
  misc_feature (1)..(25): SEQ ID NO: 2077; WAN024F2Y_at; Start 135; Stop 159
gaaactattttcctcacaaataatc

SEQ ID NO: 190232 - DNA, 25 bp, Artificial
  probe
  misc_feature (1)..(25): SEQ ID NO: 2077; WAN024F2Y_at; Start 72; Stop 96
gagaattatcaactcacgcatcgac

SEQ ID NO: 190233 - DNA, 25 bp, Artificial
  probe
  misc_feature (1)..(25): SEQ ID NO: 2077; WAN024F2Y_at; Start 2; Stop 26
tgctcagaatgattgtctctaaaca

SEQ ID NO: 190234 - DNA, 25 bp, Artificial
  probe
  misc_feature (1)..(25): SEQ ID NO: 2077; WAN024F2Y_at; Start 8; Stop 32
gaatgattgtctctaaacaatacct

SEQ ID NO: 190235 - DNA, 25 bp, Artificial
  probe
  misc_feature (1)..(25): SEQ ID NO: 2077; WAN024F2Y_at; Start 55; Stop 79
aaagaagtccataccctgagaatta

SEQ ID NO: 190236 - DNA, 25 bp, Artificial
  probe
  misc_feature (1)..(25): SEQ ID NO: 2077; WAN024F2Y_at; Start 78; Stop 102
tatcaactcacgcatcgactaccta

SEQ ID NO: 190237 - DNA, 25 bp, Artificial
  probe
  misc_feature (1)..(25): SEQ ID NO: 2077; WAN024F2Y_at; Start 40; Stop 64
tacctcattcatgaaaaagaagtcc

SEQ ID NO: 190238 - DNA, 25 bp, Artificial
  probe
  misc_feature (1)..(25): SEQ ID NO: 2077; WAN024F2Y_at; Start 45; Stop 69
cattcatgaaaaagaagtccatacc

SEQ ID NO: 190239 - DNA, 25 bp, Artificial
  probe
  misc_feature (1)..(25): SEQ ID NO: 2077; WAN024F2Y_at; Start 61; Stop 85
gtccataccctgagaattatcaact

SEQ ID NO: 190240 - DNA, 25 bp, Artificial
  probe
  misc_feature (1)..(25): SEQ ID NO: 2077; WAN024F2Y_at; Start 80; Stop 104
tcaactcacgcatcgactacctaaa

SEQ ID NO: 190241 - DNA, 25 bp, Artificial
  probe
  misc_feature (1)..(25): SEQ ID NO: 2077; WAN024F2Y_at; Start 23; Stop 47
aacaatacctgctcttttacctcat

SEQ ID NO: 190242 - DNA, 25 bp, Artificial
  probe
  misc_feature (1)..(25): SEQ ID NO: 2077; WAN024F2Y_at; Start 74; Stop 98
gaattatcaactcacgcatcgacta

SEQ ID NO: 190243 - DNA, 25 bp, Artificial
  probe
  misc_feature (1)..(25): SEQ ID NO: 2077; WAN024F2Y_at; Start 15; Stop 39
tgtctctaaacaatacctgctcttt

SEQ ID NO: 190244 - DNA, 25 bp, Artificial
  probe
  misc_feature (1)..(25): SEQ ID NO: 2077; WAN024F2Y_at; Start 89; Stop 113
gcatcgactacctaaaccaactcga

SEQ ID NO: 190245 - DNA, 25 bp, Artificial
  probe
  misc_feature (1)..(25): SEQ ID NO: 2077; WAN024F2Y_at; Start 52; Stop 76
gaaaaagaagtccataccctgagaa

SEQ ID NO: 190246 - DNA, 25 bp, Artificial
  probe
  misc_feature (1)..(25): SEQ ID NO: 2077; WAN024F2Y_at; Start 53; Stop 77
aaaaagaagtccataccctgagaat

SEQ ID NO: 190247 - DNA, 25 bp, Artificial
  probe
  misc_feature (1)..(25): SEQ ID NO: 2077; WAN024F2Y_at; Start 48; Stop 72
tcatgaaaaagaagtccataccctg

SEQ ID NO: 190248 - DNA, 25 bp, Artificial
  probe
  misc_feature (1)..(25): SEQ ID NO: 2077; WAN024F2Y_at; Start 51; Stop 75
tgaaaaagaagtccataccctgaga

SEQ ID NO: 190249 - DNA, 25 bp, Artificial
  probe
  misc_feature (1)..(25): SEQ ID NO: 2077; WAN024F2Y_at; Start 70; Stop 94
ctgagaattatcaactcacgcatcg

SEQ ID NO: 190250 - DNA, 25 bp, Artificial
  probe
  misc_feature (1)..(25): SEQ ID NO: 2077; WAN024F2Y_at; Start 28; Stop 52
tacctgctcttttacctcattcatg

SEQ ID NO: 190251 - DNA, 25 bp, Artificial
  probe
  misc_feature (1)..(25): SEQ ID NO: 2077; WAN024F2Y_at; Start 128; Stop 152
catgtaggaaactattttcctcaca

SEQ ID NO: 190252 - DNA, 25 bp, Artificial
  probe
  misc_feature (1)..(25): SEQ ID NO: 2077; WAN024F2Y_at; Start 149; Stop 173
cacaaataatctcattactaactaa

SEQ ID NO: 190253 - DNA, 25 bp, Artificial
  probe
  misc_feature (1)..(25): SEQ ID NO: 2077; WAN024F2Y_at; Start 123; Stop 147
tcgtacatgtaggaaactattttcc

SEQ ID NO: 190254 - DNA, 25 bp, Artificial
  probe
  misc_feature (1)..(25): SEQ ID NO: 2077; WAN024F2Y_at; Start 107; Stop 131
aactcgaccacctctttcgtacatg

SEQ ID NO: 190255 - DNA, 25 bp, Artificial
  probe
  misc_feature (1)..(25): SEQ ID NO: 2077; WAN024F2Y_at; Start 112; Stop 136
gaccacctctttcgtacatgtagga

SEQ ID NO: 190256 - DNA, 25 bp, Artificial
  probe
  misc_feature (1)..(25): SEQ ID NO: 2077; WAN024F2Y_at; Start 142; Stop 166
ttttcctcacaaataatctcattac

SEQ ID NO: 190257 - DNA, 25 bp, Artificial
  probe
  misc_feature (1)..(25): SEQ ID NO: 2077; WAN024F2Y_at; Start 110; Stop 134
tcgaccacctctttcgtacatgtag

SEQ ID NO: 190258 - DNA, 25 bp, Artificial
  probe
  misc_feature (1)..(25): SEQ ID NO: 2077; WAN024F2Y_at; Start 12; Stop 36
gattgtctctaaacaatacctgctc

SEQ ID NO: 190259 - DNA, 25 bp, Artificial
  probe
  misc_feature (1)..(25): SEQ ID NO: 2077; WAN024F2Y_at; Start 58; Stop 82
gaagtccataccctgagaattatca

SEQ ID NO: 190260 - DNA, 25 bp, Artificial
  probe
  misc_feature (1)..(25): SEQ ID NO: 2077; WAN024F2Y_at; Start 66; Stop 90
taccctgagaattatcaactcacgc

SEQ ID NO: 190261 - DNA, 25 bp, Artificial
  probe
  misc_feature (1)..(25): SEQ ID NO: 2077; WAN024F2Y_at; Start 117; Stop 141
cctctttcgtacatgtaggaaacta

SEQ ID NO: 190262 - DNA, 25 bp, Artificial
  probe
  misc_feature (1)..(25): SEQ ID NO: 5819; WAN024F2Z_at; Start 179; Stop 203
gtcgttccaaggtaacaagtctaga

SEQ ID NO: 190263 - DNA, 25 bp, Artificial
  probe
  misc_feature (1)..(25): SEQ ID NO: 5819; WAN024F2Z_at; Start 181; Stop 205
cgttccaaggtaacaagtctagatc

SEQ ID NO: 190264 - DNA, 25 bp, Artificial
  probe
  misc_feature (1)..(25): SEQ ID NO: 5819; WAN024F2Z_at; Start 22; Stop 46
ccgctatatattatggtatcgaatc

SEQ ID NO: 190265 - DNA, 25 bp, Artificial
  probe
  misc_feature (1)..(25): SEQ ID NO: 5819; WAN024F2Z_at; Start 191; Stop 215
taacaagtctagatcagattgaagc

SEQ ID NO: 190266 - DNA, 25 bp, Artificial
  probe
  misc_feature (1)..(25): SEQ ID NO: 5819; WAN024F2Z_at; Start 81; Stop 105
tgattacaaacagaatatgaaagct

SEQ ID NO: 190267 - DNA, 25 bp, Artificial
  probe
  misc_feature (1)..(25): SEQ ID NO: 5819; WAN024F2Z_at; Start 307; Stop 331
catgtacgaaagaggtggtcgagtt

SEQ ID NO: 190268 - DNA, 25 bp, Artificial
  probe
  misc_feature (1)..(25): SEQ ID NO: 5819; WAN024F2Z_at; Start 297; Stop 321
tagtttcctacatgtacgaaagagg

SEQ ID NO: 190269 - DNA, 25 bp, Artificial
  probe
  misc_feature (1)..(25): SEQ ID NO: 5819; WAN024F2Z_at; Start 205; Stop 229
cagattgaagctgataaaacgatac

SEQ ID NO: 190270 - DNA, 25 bp, Artificial
  probe
  misc_feature (1)..(25): SEQ ID NO: 5819; WAN024F2Z_at; Start 30; Stop 54
tattatggtatcgaatcttcatcag

SEQ ID NO: 190271 - DNA, 25 bp, Artificial
  probe
  misc_feature (1)..(25): SEQ ID NO: 5819; WAN024F2Z_at; Start 85; Stop 109
tacaaacagaatatgaaagcttttt

SEQ ID NO: 190272 - DNA, 25 bp, Artificial
  probe
  misc_feature (1)..(25): SEQ ID NO: 5819; WAN024F2Z_at; Start 18; Stop 42
caatccgctatatattatggtatcg

SEQ ID NO: 190273 - DNA, 25 bp, Artificial
  probe
  misc_feature (1)..(25): SEQ ID NO: 5819; WAN024F2Z_at; Start 13; Stop 37
tatttcaatccgctatatattatgg

SEQ ID NO: 190274 - DNA, 25 bp, Artificial
  probe
  misc_feature (1)..(25): SEQ ID NO: 5819; WAN024F2Z_at; Start 194; Stop 218
caagtctagatcagattgaagctga

SEQ ID NO: 190275 - DNA, 25 bp, Artificial
  probe
  misc_feature (1)..(25): SEQ ID NO: 5819; WAN024F2Z_at; Start 111; Stop 135
tatcactattgaaaaatttatacga

SEQ ID NO: 190276 - DNA, 25 bp, Artificial
  probe
  misc_feature (1)..(25): SEQ ID NO: 5819; WAN024F2Z_at; Start 99; Stop 123
gaaagctttttatatcactattgaa

SEQ ID NO: 190277 - DNA, 25 bp, Artificial
  probe
  misc_feature (1)..(25): SEQ ID NO: 5819; WAN024F2Z_at; Start 46; Stop 70
cttcatcagaatgataaaattaatc

SEQ ID NO: 190278 - DNA, 25 bp, Artificial
  probe
  misc_feature (1)..(25): SEQ ID NO: 5819; WAN024F2Z_at; Start 233; Stop 257
gaaaatattcaagtgagctaaaaaa

SEQ ID NO: 190279 - DNA, 25 bp, Artificial
  probe
  misc_feature (1)..(25): SEQ ID NO: 5819; WAN024F2Z_at; Start 303; Stop 327
cctacatgtacgaaagaggtggtcg

SEQ ID NO: 190280 - DNA, 25 bp, Artificial
  probe
  misc_feature (1)..(25): SEQ ID NO: 5819; WAN024F2Z_at; Start 279; Stop 303
gattatttgtgaggaaaatagtttc

SEQ ID NO: 190281 - DNA, 25 bp, Artificial
  probe
  misc_feature (1)..(25): SEQ ID NO: 5819; WAN024F2Z_at; Start 271; Stop 295
tataatgagattatttgtgaggaaa

SEQ ID NO: 190282 - DNA, 25 bp, Artificial
  probe
  misc_feature (1)..(25): SEQ ID NO: 5819; WAN024F2Z_at; Start 40; Stop 64
tcgaatcttcatcagaatgataaaa

SEQ ID NO: 190283 - DNA, 25 bp, Artificial
  probe
  misc_feature (1)..(25): SEQ ID NO: 5819; WAN024F2Z_at; Start 302; Stop 326
tcctacatgtacgaaagaggtggtc

SEQ ID NO: 190284 - DNA, 25 bp, Artificial
  probe
  misc_feature (1)..(25): SEQ ID NO: 5819; WAN024F2Z_at; Start 214; Stop 238
gctgataaaacgatacaaagaaaat

SEQ ID NO: 190285 - DNA, 25 bp, Artificial
  probe
  misc_feature (1)..(25): SEQ ID NO: 5819; WAN024F2Z_at; Start 227; Stop 251
tacaaagaaaatattcaagtgagct

SEQ ID NO: 190286 - DNA, 25 bp, Artificial
  probe
  misc_feature (1)..(25): SEQ ID NO: 5819; WAN024F2Z_at; Start 305; Stop 329
tacatgtacgaaagaggtggtcgag

SEQ ID NO: 190287 - DNA, 25 bp, Artificial
  probe
  misc_feature (1)..(25): SEQ ID NO: 5819; WAN024F2Z_at; Start 35; Stop 59
tggtatcgaatcttcatcagaatga

SEQ ID NO: 190288 - DNA, 25 bp, Artificial
  probe
  misc_feature (1)..(25): SEQ ID NO: 5819; WAN024F2Z_at; Start 175; Stop 199
tcaagtcgttccaaggtaacaagtc

SEQ ID NO: 190289 - DNA, 25 bp, Artificial
  probe
  misc_feature (1)..(25): SEQ ID NO: 5819; WAN024F2Z_at; Start 334; Stop 358
tttaggtagtcggtgcgtgagttga

SEQ ID NO: 190290 - DNA, 25 bp, Artificial
  probe
  misc_feature (1)..(25): SEQ ID NO: 5819; WAN024F2Z_at; Start 211; Stop 235
gaagctgataaaacgatacaaagaa

SEQ ID NO: 190291 - DNA, 25 bp, Artificial
  probe
  misc_feature (1)..(25): SEQ ID NO: 5819; WAN024F2Z_at; Start 292; Stop 316
gaaaatagtttcctacatgtacgaa

SEQ ID NO: 190292 - DNA, 25 bp, Artificial
  probe
  misc_feature (1)..(25): SEQ ID NO: 5819; WAN024F2Z_at; Start 183; Stop 207
ttccaaggtaacaagtctagatcag

SEQ ID NO: 190293 - DNA, 25 bp, Artificial
  probe
  misc_feature (1)..(25): SEQ ID NO: 5819; WAN024F2Z_at; Start 325; Stop 349
tcgagttggtttaggtagtcggtgc

SEQ ID NO: 190294 - DNA, 25 bp, Artificial
  probe
  misc_feature (1)..(25): SEQ ID NO: 5819; WAN024F2Z_at; Start 185; Stop 209
ccaaggtaacaagtctagatcagat

SEQ ID NO: 190295 - DNA, 25 bp, Artificial
  probe
  misc_feature (1)..(25): SEQ ID NO: 5819; WAN024F2Z_at; Start 171; Stop 195
tatttcaagtcgttccaaggtaaca

SEQ ID NO: 190296 - DNA, 25 bp, Artificial
  probe
  misc_feature (1)..(25): SEQ ID NO: 340; WAN024F32_at; Start 55; Stop 79
gatatattatatcccatagttaagg

SEQ ID NO: 190297 - DNA, 25 bp, Artificial
  probe
  misc_feature (1)..(25): SEQ ID NO: 340; WAN024F32_at; Start 280; Stop 304
gcaattgatagcagtgaagcaatgt

SEQ ID NO: 190298 - DNA, 25 bp, Artificial
  probe
  misc_feature (1)..(25): SEQ ID NO: 340; WAN024F32_at; Start 127; Stop 151
tctttagttgacaaagatgccatga

SEQ ID NO: 190299 - DNA, 25 bp, Artificial
  probe
  misc_feature (1)..(25): SEQ ID NO: 340; WAN024F32_at; Start 27; Stop 51
cctaatcagtttgttcacatttacc

SEQ ID NO: 190300 - DNA, 25 bp, Artificial
  probe
  misc_feature (1)..(25): SEQ ID NO: 340; WAN024F32_at; Start 71; Stop 95
tagttaaggttggtcatacagatga

SEQ ID NO: 190301 - DNA, 25 bp, Artificial
  probe
  misc_feature (1)..(25): SEQ ID NO: 340; WAN024F32_at; Start 277; Stop 301
tcggcaattgatagcagtgaagcaa

SEQ ID NO: 190302 - DNA, 25 bp, Artificial
  probe
  misc_feature (1)..(25): SEQ ID NO: 340; WAN024F32_at; Start 66; Stop 90
tcccatagttaaggttggtcataca

SEQ ID NO: 190303 - DNA, 25 bp, Artificial
  probe
  misc_feature (1)..(25): SEQ ID NO: 340; WAN024F32_at; Start 39; Stop 63
gttcacatttaccttcgatatatta

SEQ ID NO: 190304 - DNA, 25 bp, Artificial
  probe
  misc_feature (1)..(25): SEQ ID NO: 340; WAN024F32_at; Start 209; Stop 233
ccgatattctatacgtaaatggtac

SEQ ID NO: 190305 - DNA, 25 bp, Artificial
  probe
  misc_feature (1)..(25): SEQ ID NO: 340; WAN024F32_at; Start 275; Stop 299
tttcggcaattgatagcagtgaagc

SEQ ID NO: 190306 - DNA, 25 bp, Artificial
  probe
  misc_feature (1)..(25): SEQ ID NO: 340; WAN024F32_at; Start 132; Stop 156
agttgacaaagatgccatgaaaaaa

SEQ ID NO: 190307 - DNA, 25 bp, Artificial
  probe
  misc_feature (1)..(25): SEQ ID NO: 340; WAN024F32_at; Start 328; Stop 352
gagttactagataaatctcaacctt

SEQ ID NO: 190308 - DNA, 25 bp, Artificial
  probe
  misc_feature (1)..(25): SEQ ID NO: 340; WAN024F32_at; Start 34; Stop 58
agtttgttcacatttaccttcgata

SEQ ID NO: 190309 - DNA, 25 bp, Artificial
  probe
  misc_feature (1)..(25): SEQ ID NO: 340; WAN024F32_at; Start 130; Stop 154
ttagttgacaaagatgccatgaaaa

SEQ ID NO: 190310 - DNA, 25 bp, Artificial
  probe
  misc_feature (1)..(25): SEQ ID NO: 340; WAN024F32_at; Start 286; Stop 310
gatagcagtgaagcaatgttgctac

SEQ ID NO: 190311 - DNA, 25 bp, Artificial
  probe
  misc_feature (1)..(25): SEQ ID NO: 340; WAN024F32_at; Start 206; Stop 230
tcaccgatattctatacgtaaatgg

SEQ ID NO: 190312 - DNA, 25 bp, Artificial
  probe
  misc_feature (1)..(25): SEQ ID NO: 340; WAN024F32_at; Start 326; Stop 350
tagagttactagataaatctcaacc

SEQ ID NO: 190313 - DNA, 25 bp, Artificial
  probe
  misc_feature (1)..(25): SEQ ID NO: 340; WAN024F32_at; Start 263; Stop 287
ttgtttcaatagtttcggcaattga

SEQ ID NO: 190314 - DNA, 25 bp, Artificial
  probe
  misc_feature (1)..(25): SEQ ID NO: 340; WAN024F32_at; Start 272; Stop 296
tagtttcggcaattgatagcagtga

SEQ ID NO: 190315 - DNA, 25 bp, Artificial
  probe
  misc_feature (1)..(25): SEQ ID NO: 340; WAN024F32_at; Start 69; Stop 93
catagttaaggttggtcatacagat

SEQ ID NO: 190316 - DNA, 25 bp, Artificial
  probe
  misc_feature (1)..(25): SEQ ID NO: 340; WAN024F32_at; Start 213; Stop 237
tattctatacgtaaatggtactgct

SEQ ID NO: 190317 - DNA, 25 bp, Artificial
  probe
  misc_feature (1)..(25): SEQ ID NO: 340; WAN024F32_at; Start 77; Stop 101
aggttggtcatacagatgattatag

SEQ ID NO: 190318 - DNA, 25 bp, Artificial
  probe
  misc_feature (1)..(25): SEQ ID NO: 340; WAN024F32_at; Start 283; Stop 307
attgatagcagtgaagcaatgttgc

SEQ ID NO: 190319 - DNA, 25 bp, Artificial
  probe
  misc_feature (1)..(25): SEQ ID NO: 340; WAN024F32_at; Start 269; Stop 293
caatagtttcggcaattgatagcag

SEQ ID NO: 190320 - DNA, 25 bp, Artificial
  probe
  misc_feature (1)..(25): SEQ ID NO: 340; WAN024F32_at; Start 223; Stop 247
gtaaatggtactgctattctttatc

SEQ ID NO: 190321 - DNA, 25 bp, Artificial
  probe
  misc_feature (1)..(25): SEQ ID NO: 340; WAN024F32_at; Start 194; Stop 218
tagatgaaaatatcaccgatattct

SEQ ID NO: 190322 - DNA, 25 bp, Artificial
  probe
  misc_feature (1)..(25): SEQ ID NO: 340; WAN024F32_at; Start 217; Stop 241
ctatacgtaaatggtactgctattc

SEQ ID NO: 190323 - DNA, 25 bp, Artificial
  probe
  misc_feature (1)..(25): SEQ ID NO: 340; WAN024F32_at; Start 62; Stop 86
tatatcccatagttaaggttggtca

SEQ ID NO: 190324 - DNA, 25 bp, Artificial
  probe
  misc_feature (1)..(25): SEQ ID NO: 340; WAN024F32_at; Start 289; Stop 313
agcagtgaagcaatgttgctaccta

SEQ ID NO: 190325 - DNA, 25 bp, Artificial
  probe
  misc_feature (1)..(25): SEQ ID NO: 340; WAN024F32_at; Start 220; Stop 244
tacgtaaatggtactgctattcttt

SEQ ID NO: 190326 - DNA, 25 bp, Artificial
  probe
  misc_feature (1)..(25): SEQ ID NO: 340; WAN024F32_at; Start 341; Stop 365
aatctcaaccttttgaagaagaata

SEQ ID NO: 190327 - DNA, 25 bp, Artificial
  probe
  misc_feature (1)..(25): SEQ ID NO: 340; WAN024F32_at; Start 188; Stop 212
taaatatagatgaaaatatcaccga

SEQ ID NO: 190328 - DNA, 25 bp, Artificial
  probe
  misc_feature (1)..(25): SEQ ID NO: 340; WAN024F32_at; Start 163; Stop 187
gtaactgtaataggatattttgaaa

SEQ ID NO: 190329 - DNA, 25 bp, Artificial
  probe
  misc_feature (1)..(25): SEQ ID NO: 340; WAN024F32_at; Start 315; Stop 339
cattaatgttttagagttactagat

SEQ ID NO: 190330 - DNA, 25 bp, Artificial
  probe
  misc_feature (1)..(25): SEQ ID NO: 6299; WAN024F33_at; Start 134; Stop 158
gcaaatctcaagcttctagtcagaa

SEQ ID NO: 190331 - DNA, 25 bp, Artificial
  probe
  misc_feature (1)..(25): SEQ ID NO: 6299; WAN024F33_at; Start 516; Stop 540
aaaggcagcccagtggctcttggac

SEQ ID NO: 190332 - DNA, 25 bp, Artificial
  probe
  misc_feature (1)..(25): SEQ ID NO: 6299; WAN024F33_at; Start 367; Stop 391
gaaactcaggctaagctctaccaag

SEQ ID NO: 190333 - DNA, 25 bp, Artificial
  probe
  misc_feature (1)..(25): SEQ ID NO: 6299; WAN024F33_at; Start 115; Stop 139
ccggaaggaactgtaggtagcaaat

SEQ ID NO: 190334 - DNA, 25 bp, Artificial
  probe
  misc_feature (1)..(25): SEQ ID NO: 6299; WAN024F33_at; Start 576; Stop 600
taaaggcaaggaaaaggagactggc

SEQ ID NO: 190335 - DNA, 25 bp, Artificial
  probe
  misc_feature (1)..(25): SEQ ID NO: 6299; WAN024F33_at; Start 342; Stop 366
ccaatacagtgggtttaggagttat

SEQ ID NO: 190336 - DNA, 25 bp, Artificial
  probe
  misc_feature (1)..(25): SEQ ID NO: 6299; WAN024F33_at; Start 503; Stop 527
tagttactgaagaaaaggcagccca

SEQ ID NO: 190337 - DNA, 25 bp, Artificial
  probe
  misc_feature (1)..(25): SEQ ID NO: 6299; WAN024F33_at; Start 588; Stop 612
aaaggagactggctacatggcagaa

SEQ ID NO: 190338 - DNA, 25 bp, Artificial
  probe
  misc_feature (1)..(25): SEQ ID NO: 6299; WAN024F33_at; Start 183; Stop 207
gagctattatagtatccaagggaaa

SEQ ID NO: 190339 - DNA, 25 bp, Artificial
  probe
  misc_feature (1)..(25): SEQ ID NO: 6299; WAN024F33_at; Start 621; Stop 645
tctccgctacgttggaaaagaagcc

SEQ ID NO: 190340 - DNA, 25 bp, Artificial
  probe
  misc_feature (1)..(25): SEQ ID NO: 6299; WAN024F33_at; Start 258; Stop 282
caatccaggagaaaatccaacagcc

SEQ ID NO: 190341 - DNA, 25 bp, Artificial
  probe
  misc_feature (1)..(25): SEQ ID NO: 6299; WAN024F33_at; Start 312; Stop 336
tatgcaggctgagggctatccaatc

SEQ ID NO: 190342 - DNA, 25 bp, Artificial
  probe
  misc_feature (1)..(25): SEQ ID NO: 6299; WAN024F33_at; Start 244; Stop 268
ttgtcaaaagattacaatccaggag

SEQ ID NO: 190343 - DNA, 25 bp, Artificial
  probe
  misc_feature (1)..(25): SEQ ID NO: 6299; WAN024F33_at; Start 531; Stop 555
gctcttggaccatgcggctgactat

SEQ ID NO: 190344 - DNA, 25 bp, Artificial
  probe
  misc_feature (1)..(25): SEQ ID NO: 6299; WAN024F33_at; Start 431; Stop 455
actcagcacgcccaggttacagtga

SEQ ID NO: 190345 - DNA, 25 bp, Artificial
  probe
  misc_feature (1)..(25): SEQ ID NO: 6299; WAN024F33_at; Start 446; Stop 470
gttacagtgaacaccagacgggtct

SEQ ID NO: 190346 - DNA, 25 bp, Artificial
  probe
  misc_feature (1)..(25): SEQ ID NO: 6299; WAN024F33_at; Start 42; Stop 66
gacccttgcagcttgttcgcaagaa

SEQ ID NO: 190347 - DNA, 25 bp, Artificial
  probe
  misc_feature (1)..(25): SEQ ID NO: 6299; WAN024F33_at; Start 643; Stop 667
gccaaagaaattgctgcaagtggtc

SEQ ID NO: 190348 - DNA, 25 bp, Artificial
  probe
  misc_feature (1)..(25): SEQ ID NO: 6299; WAN024F33_at; Start 280; Stop 304
gccaaggcagagttgctcaaactaa

SEQ ID NO: 190349 - DNA, 25 bp, Artificial
  probe
  misc_feature (1)..(25): SEQ ID NO: 6299; WAN024F33_at; Start 603; Stop 627
catggcagaagaatggcatctccgc

SEQ ID NO: 190350 - DNA, 25 bp, Artificial
  probe
  misc_feature (1)..(25): SEQ ID NO: 6299; WAN024F33_at; Start 150; Stop 174
tagtcagaaaaaggcagaagttagc

SEQ ID NO: 190351 - DNA, 25 bp, Artificial
  probe
  misc_feature (1)..(25): SEQ ID NO: 6299; WAN024F33_at; Start 460; Stop 484
cagacgggtcttgcttttgatttga

SEQ ID NO: 190352 - DNA, 25 bp, Artificial
  probe
  misc_feature (1)..(25): SEQ ID NO: 6299; WAN024F33_at; Start 561; Stop 585
tgttgttcgctatcttaaaggcaag

SEQ ID NO: 190353 - DNA, 25 bp, Artificial
  probe
  misc_feature (1)..(25): SEQ ID NO: 6299; WAN024F33_at; Start 388; Stop 412
caagactatgtcaatcaagatggta

SEQ ID NO: 190354 - DNA, 25 bp, Artificial
  probe
  misc_feature (1)..(25): SEQ ID NO: 6299; WAN024F33_at; Start 28; Stop 52
ggtttactagcattgacccttgcag

SEQ ID NO: 190355 - DNA, 25 bp, Artificial
  probe
  misc_feature (1)..(25): SEQ ID NO: 6299; WAN024F33_at; Start 415; Stop 439
gaagcagcagatcgctactcagcac

SEQ ID NO: 190356 - DNA, 25 bp, Artificial
  probe
  misc_feature (1)..(25): SEQ ID NO: 6299; WAN024F33_at; Start 100; Stop 124
gagcaaagcagtcaaccggaaggaa

SEQ ID NO: 190357 - DNA, 25 bp, Artificial
  probe
  misc_feature (1)..(25): SEQ ID NO: 6299; WAN024F33_at; Start 163; Stop 187
gcagaagttagcaataaagggagct

SEQ ID NO: 190358 - DNA, 25 bp, Artificial
  probe
  misc_feature (1)..(25): SEQ ID NO: 6299; WAN024F33_at; Start 297; Stop 321
caaactaatcgcagctatgcaggct

SEQ ID NO: 190359 - DNA, 25 bp, Artificial
  probe
  misc_feature (1)..(25): SEQ ID NO: 6299; WAN024F33_at; Start 198; Stop 222
ccaagggaaatacgatgagattatc

SEQ ID NO: 190360 - DNA, 25 bp, Artificial
  probe
  misc_feature (1)..(25): SEQ ID NO: 6299; WAN024F33_at; Start 399; Stop 423
caatcaagatggtaaggaagcagca

SEQ ID NO: 190361 - DNA, 25 bp, Artificial
  probe
  misc_feature (1)..(25): SEQ ID NO: 6299; WAN024F33_at; Start 546; Stop 570
ggctgactatggctttgttgttcgc

SEQ ID NO: 190362 - DNA, 25 bp, Artificial
  probe
  misc_feature (1)..(25): SEQ ID NO: 6299; WAN024F33_at; Start 85; Stop 109
aacactcaaaaaacggagcaaagca

SEQ ID NO: 190363 - DNA, 25 bp, Artificial
  probe
  misc_feature (1)..(25): SEQ ID NO: 6299; WAN024F33_at; Start 328; Stop 352
tatccaatcagtgaccaatacagtg

SEQ ID NO: 190364 - DNA, 25 bp, Artificial
  probe
  misc_feature (1)..(25): SEQ ID NO: 2758; WAN024F34_at; Start 382; Stop 406
tttcttctgggcagctccttgagac

SEQ ID NO: 190365 - DNA, 25 bp, Artificial
  probe
  misc_feature (1)..(25): SEQ ID NO: 2758; WAN024F34_at; Start 68; Stop 92
aaggccaagcctgtctggtgttcgc

SEQ ID NO: 190366 - DNA, 25 bp, Artificial
  probe
  misc_feature (1)..(25): SEQ ID NO: 2758; WAN024F34_at; Start 436; Stop 460
tgtctgttctgtcttagtttctcca

SEQ ID NO: 190367 - DNA, 25 bp, Artificial
  probe
  misc_feature (1)..(25): SEQ ID NO: 2758; WAN024F34_at; Start 57; Stop 81
caatcacatcaaaggccaagcctgt

SEQ ID NO: 190368 - DNA, 25 bp, Artificial
  probe
  misc_feature (1)..(25): SEQ ID NO: 2758; WAN024F34_at; Start 52; Stop 76
agtcccaatcacatcaaaggccaag

SEQ ID NO: 190369 - DNA, 25 bp, Artificial
  probe
  misc_feature (1)..(25): SEQ ID NO: 2758; WAN024F34_at; Start 166; Stop 190
ggtctgagtttcataacttctaaaa

SEQ ID NO: 190370 - DNA, 25 bp, Artificial
  probe
  misc_feature (1)..(25): SEQ ID NO: 2758; WAN024F34_at; Start 387; Stop 411
tctgggcagctccttgagacttact

SEQ ID NO: 190371 - DNA, 25 bp, Artificial
  probe
  misc_feature (1)..(25): SEQ ID NO: 2758; WAN024F34_at; Start 411; Stop 435
taccgactgttccatcagctttggc

SEQ ID NO: 190372 - DNA, 25 bp, Artificial
  probe
  misc_feature (1)..(25): SEQ ID NO: 2758; WAN024F34_at; Start 262; Stop 286
ggctgttggattttcccctggatta

SEQ ID NO: 190373 - DNA, 25 bp, Artificial
  probe
  misc_feature (1)..(25): SEQ ID NO: 2758; WAN024F34_at; Start 397; Stop 421
tccttgagacttactaccgactgtt

SEQ ID NO: 190374 - DNA, 25 bp, Artificial
  probe
  misc_feature (1)..(25): SEQ ID NO: 2758; WAN024F34_at; Start 72; Stop 96
ccaagcctgtctggtgttcgctata

SEQ ID NO: 190375 - DNA, 25 bp, Artificial
  probe
  misc_feature (1)..(25): SEQ ID NO: 2758; WAN024F34_at; Start 443; Stop 467
tctgtcttagtttctccatcttcat

SEQ ID NO: 190376 - DNA, 25 bp, Artificial
  probe
  misc_feature (1)..(25): SEQ ID NO: 2758; WAN024F34_at; Start 309; Stop 333
gtttgttggctacgatgatttcatc

SEQ ID NO: 190377 - DNA, 25 bp, Artificial
  probe
  misc_feature (1)..(25): SEQ ID NO: 2758; WAN024F34_at; Start 240; Stop 264
tgagtttgaccaactctgccttggc

SEQ ID NO: 190378 - DNA, 25 bp, Artificial
  probe
  misc_feature (1)..(25): SEQ ID NO: 2758; WAN024F34_at; Start 179; Stop 203
taacttctaaaaccactgtaatgat

SEQ ID NO: 190379 - DNA, 25 bp, Artificial
  probe
  misc_feature (1)..(25): SEQ ID NO: 2758; WAN024F34_at; Start 12; Stop 36
gccattgggctgctttttcttctgt

SEQ ID NO: 190380 - DNA, 25 bp, Artificial
  probe
  misc_feature (1)..(25): SEQ ID NO: 2758; WAN024F34_at; Start 370; Stop 394
gaccacttctgctttcttctgggca

SEQ ID NO: 190381 - DNA, 25 bp, Artificial
  probe
  misc_feature (1)..(25): SEQ ID NO: 2758; WAN024F34_at; Start 356; Stop 380
taatcacctttattgaccacttctg

SEQ ID NO: 190382 - DNA, 25 bp, Artificial
  probe
  misc_feature (1)..(25): SEQ ID NO: 2758; WAN024F34_at; Start 330; Stop 354
catcgtatttcccttgaatgctgta

SEQ ID NO: 190383 - DNA, 25 bp, Artificial
  probe
  misc_feature (1)..(25): SEQ ID NO: 2758; WAN024F34_at; Start 287; Stop 311
tagtctttagacaatggatagtgtt

SEQ ID NO: 190384 - DNA, 25 bp, Artificial
  probe
  misc_feature (1)..(25): SEQ ID NO: 2758; WAN024F34_at; Start 392; Stop 416
gcagctccttgagacttactaccga

SEQ ID NO: 190385 - DNA, 25 bp, Artificial
  probe
  misc_feature (1)..(25): SEQ ID NO: 2758; WAN024F34_at; Start 63; Stop 87
catcaaaggccaagcctgtctggtg

SEQ ID NO: 190386 - DNA, 25 bp, Artificial
  probe
  misc_feature (1)..(25): SEQ ID NO: 2758; WAN024F34_at; Start 247; Stop 271
gaccaactctgccttggctgttgga

SEQ ID NO: 190387 - DNA, 25 bp, Artificial
  probe
  misc_feature (1)..(25): SEQ ID NO: 2758; WAN024F34_at; Start 339; Stop 363
tcccttgaatgctgtagtaatcacc

SEQ ID NO: 190388 - DNA, 25 bp, Artificial
  probe
  misc_feature (1)..(25): SEQ ID NO: 2758; WAN024F34_at; Start 254; Stop 278
tctgccttggctgttggattttccc

SEQ ID NO: 190389 - DNA, 25 bp, Artificial
  probe
  misc_feature (1)..(25): SEQ ID NO: 2758; WAN024F34_at; Start 418; Stop 442
tgttccatcagctttggctgtctgt

SEQ ID NO: 190390 - DNA, 25 bp, Artificial
  probe
  misc_feature (1)..(25): SEQ ID NO: 2758; WAN024F34_at; Start 322; Stop 346
gatgatttcatcgtatttcccttga

SEQ ID NO: 190391 - DNA, 25 bp, Artificial
  probe
  misc_feature (1)..(25): SEQ ID NO: 2758; WAN024F34_at; Start 404; Stop 428
gacttactaccgactgttccatcag

SEQ ID NO: 190392 - DNA, 25 bp, Artificial
  probe
  misc_feature (1)..(25): SEQ ID NO: 2758; WAN024F34_at; Start 428; Stop 452
gctttggctgtctgttctgtcttag

SEQ ID NO: 190393 - DNA, 25 bp, Artificial
  probe
  misc_feature (1)..(25): SEQ ID NO: 2758; WAN024F34_at; Start 233; Stop 257
gctttgatgagtttgaccaactctg

SEQ ID NO: 190394 - DNA, 25 bp, Artificial
  probe
  misc_feature (1)..(25): SEQ ID NO: 2758; WAN024F34_at; Start 48; Stop 72
catcagtcccaatcacatcaaaggc

SEQ ID NO: 190395 - DNA, 25 bp, Artificial
  probe
  misc_feature (1)..(25): SEQ ID NO: 2758; WAN024F34_at; Start 298; Stop 322
caatggatagtgtttgttggctacg

SEQ ID NO: 190396 - DNA, 25 bp, Artificial
  probe
  misc_feature (1)..(25): SEQ ID NO: 2758; WAN024F34_at; Start 275; Stop 299
tcccctggattatagtctttagaca

SEQ ID NO: 190397 - DNA, 25 bp, Artificial
  probe
  misc_feature (1)..(25): SEQ ID NO: 2758; WAN024F34_at; Start 349; Stop 373
gctgtagtaatcacctttattgacc

SEQ ID NO: 190398 - DNA, 25 bp, Artificial
  probe
  misc_feature (1)..(25): SEQ ID NO: 1152; WAN024F35_at; Start 509; Stop 533
cagaagaaaaagcagcccaatggct

SEQ ID NO: 190399 - DNA, 25 bp, Artificial
  probe
  misc_feature (1)..(25): SEQ ID NO: 1152; WAN024F35_at; Start 690; Stop 714
ctttgaaggcggagactacgtcgat

SEQ ID NO: 190400 - DNA, 25 bp, Artificial
  probe
  misc_feature (1)..(25): SEQ ID NO: 1152; WAN024F35_at; Start 557; Stop 581
gctttgttgtccgttatctcaaagg

SEQ ID NO: 190401 - DNA, 25 bp, Artificial
  probe
  misc_feature (1)..(25): SEQ ID NO: 1152; WAN024F35_at; Start 452; Stop 476
gcgaacaccagacaggcttggcctt

SEQ ID NO: 190402 - DNA, 25 bp, Artificial
  probe
  misc_feature (1)..(25): SEQ ID NO: 1152; WAN024F35_at; Start 482; Stop 506
tgattgggactgatggtgatttggt

SEQ ID NO: 190403 - DNA, 25 bp, Artificial
  probe
  misc_feature (1)..(25): SEQ ID NO: 1152; WAN024F35_at; Start 160; Stop 184
aaagcagaagtggtcaataaaggtg

SEQ ID NO: 190404 - DNA, 25 bp, Artificial
  probe
  misc_feature (1)..(25): SEQ ID NO: 1152; WAN024F35_at; Start 95; Stop 119
agacagaacagacagccaaagctga

SEQ ID NO: 190405 - DNA, 25 bp, Artificial
  probe
  misc_feature (1)..(25): SEQ ID NO: 1152; WAN024F35_at; Start 467; Stop 491
gcttggcctttgatgtgattgggac

SEQ ID NO: 190406 - DNA, 25 bp, Artificial
  probe
  misc_feature (1)..(25): SEQ ID NO: 1152; WAN024F35_at; Start 553; Stop 577
tatggctttgttgtccgttatctca

SEQ ID NO: 190407 - DNA, 25 bp, Artificial
  probe
  misc_feature (1)..(25): SEQ ID NO: 1152; WAN024F35_at; Start 356; Stop 380
ttagaagttatgaaactcagaccaa

SEQ ID NO: 190408 - DNA, 25 bp, Artificial
  probe
  misc_feature (1)..(25): SEQ ID NO: 1152; WAN024F35_at; Start 93; Stop 117
taagacagaacagacagccaaagct

SEQ ID NO: 190409 - DNA, 25 bp, Artificial
  probe
  misc_feature (1)..(25): SEQ ID NO: 1152; WAN024F35_at; Start 166; Stop 190
gaagtggtcaataaaggtgattact

SEQ ID NO: 190410 - DNA, 25 bp, Artificial
  probe
  misc_feature (1)..(25): SEQ ID NO: 1152; WAN024F35_at; Start 547; Stop 571
gctgattatggctttgttgtccgtt

SEQ ID NO: 190411 - DNA, 25 bp, Artificial
  probe
  misc_feature (1)..(25): SEQ ID NO: 1152; WAN024F35_at; Start 173; Stop 197
tcaataaaggtgattactacagcat

SEQ ID NO: 190412 - DNA, 25 bp, Artificial
  probe
  misc_feature (1)..(25): SEQ ID NO: 1152; WAN024F35_at; Start 97; Stop 121
acagaacagacagccaaagctgatg

SEQ ID NO: 190413 - DNA, 25 bp, Artificial
  probe
  misc_feature (1)..(25): SEQ ID NO: 1152; WAN024F35_at; Start 470; Stop 494
tggcctttgatgtgattgggactga

SEQ ID NO: 190414 - DNA, 25 bp, Artificial
  probe
  misc_feature (1)..(25): SEQ ID NO: 1152; WAN024F35_at; Start 698; Stop 722
gcggagactacgtcgattaactaat

SEQ ID NO: 190415 - DNA, 25 bp, Artificial
  probe
  misc_feature (1)..(25): SEQ ID NO: 1152; WAN024F35_at; Start 544; Stop 568
gcagctgattatggctttgttgtcc

SEQ ID NO: 190416 - DNA, 25 bp, Artificial
  probe
  misc_feature (1)..(25): SEQ ID NO: 1152; WAN024F35_at; Start 354; Stop 378
ttttagaagttatgaaactcagacc

SEQ ID NO: 190417 - DNA, 25 bp, Artificial
  probe
  misc_feature (1)..(25): SEQ ID NO: 1152; WAN024F35_at; Start 459; Stop 483
ccagacaggcttggcctttgatgtg

SEQ ID NO: 190418 - DNA, 25 bp, Artificial
  probe
  misc_feature (1)..(25): SEQ ID NO: 1152; WAN024F35_at; Start 474; Stop 498
ctttgatgtgattgggactgatggt

SEQ ID NO: 190419 - DNA, 25 bp, Artificial
  probe
  misc_feature (1)..(25): SEQ ID NO: 1152; WAN024F35_at; Start 340; Stop 364
gatcattacagtggttttagaagtt

SEQ ID NO: 190420 - DNA, 25 bp, Artificial
  probe
  misc_feature (1)..(25): SEQ ID NO: 1152; WAN024F35_at; Start 171; Stop 195
ggtcaataaaggtgattactacagc

SEQ ID NO: 190421 - DNA, 25 bp, Artificial
  probe
  misc_feature (1)..(25): SEQ ID NO: 1152; WAN024F35_at; Start 697; Stop 721
ggcggagactacgtcgattaactaa

SEQ ID NO: 190422 - DNA, 25 bp, Artificial
  probe
  misc_feature (1)..(25): SEQ ID NO: 1152; WAN024F35_at; Start 693; Stop 717
tgaaggcggagactacgtcgattaa

SEQ ID NO: 190423 - DNA, 25 bp, Artificial
  probe
  misc_feature (1)..(25): SEQ ID NO: 1152; WAN024F35_at; Start 464; Stop 488
caggcttggcctttgatgtgattgg

SEQ ID NO: 190424 - DNA, 25 bp, Artificial
  probe
  misc_feature (1)..(25): SEQ ID NO: 1152; WAN024F35_at; Start 163; Stop 187
gcagaagtggtcaataaaggtgatt

SEQ ID NO: 190425 - DNA, 25 bp, Artificial
  probe
  misc_feature (1)..(25): SEQ ID NO: 1152; WAN024F35_at; Start 448; Stop 472
tatagcgaacaccagacaggcttgg

SEQ ID NO: 190426 - DNA, 25 bp, Artificial
  probe
  misc_feature (1)..(25): SEQ ID NO: 1152; WAN024F35_at; Start 472; Stop 496
gcctttgatgtgattgggactgatg

SEQ ID NO: 190427 - DNA, 25 bp, Artificial
  probe
  misc_feature (1)..(25): SEQ ID NO: 1152; WAN024F35_at; Start 449; Stop 473
atagcgaacaccagacaggcttggc

SEQ ID NO: 190428 - DNA, 25 bp, Artificial
  probe
  misc_feature (1)..(25): SEQ ID NO: 1152; WAN024F35_at; Start 454; Stop 478
gaacaccagacaggcttggcctttg

SEQ ID NO: 190429 - DNA, 25 bp, Artificial
  probe
  misc_feature (1)..(25): SEQ ID NO: 1152; WAN024F35_at; Start 689; Stop 713
gctttgaaggcggagactacgtcga

SEQ ID NO: 190430 - DNA, 25 bp, Artificial
  probe
  misc_feature (1)..(25): SEQ ID NO: 1152; WAN024F35_at; Start 457; Stop 481
caccagacaggcttggcctttgatg

SEQ ID NO: 190431 - DNA, 25 bp, Artificial
  probe
  misc_feature (1)..(25): SEQ ID NO: 1152; WAN024F35_at; Start 695; Stop 719
aaggcggagactacgtcgattaact

SEQ ID NO: 190432 - DNA, 25 bp, Artificial
  probe
  misc_feature (1)..(25): SEQ ID NO: 7469; WAN024F36_at; Start 74; Stop 98
tcagcaatggtacgaacttgacggc

SEQ ID NO: 190433 - DNA, 25 bp, Artificial
  probe
  misc_feature (1)..(25): SEQ ID NO: 7469; WAN024F36_at; Start 16; Stop 40
aactgctttttcaggagttgtcaga

SEQ ID NO: 190434 - DNA, 25 bp, Artificial
  probe
  misc_feature (1)..(25): SEQ ID NO: 7469; WAN024F36_at; Start 151; Stop 175
gctggttggcaagcggtcatatcca

SEQ ID NO: 190435 - DNA, 25 bp, Artificial
  probe
  misc_feature (1)..(25): SEQ ID NO: 7469; WAN024F36_at; Start 158; Stop 182
ggcaagcggtcatatccatagatac

SEQ ID NO: 190436 - DNA, 25 bp, Artificial
  probe
  misc_feature (1)..(25): SEQ ID NO: 7469; WAN024F36_at; Start 115; Stop 139
agtcaattcaccagctgtaccatcg

SEQ ID NO: 190437 - DNA, 25 bp, Artificial
  probe
  misc_feature (1)..(25): SEQ ID NO: 7469; WAN024F36_at; Start 107; Stop 131
tgtatcacagtcaattcaccagctg

SEQ ID NO: 190438 - DNA, 25 bp, Artificial
  probe
  misc_feature (1)..(25): SEQ ID NO: 7469; WAN024F36_at; Start 178; Stop 202
gatacgagcgatttcttcaaagaga

SEQ ID NO: 190439 - DNA, 25 bp, Artificial
  probe
  misc_feature (1)..(25): SEQ ID NO: 7469; WAN024F36_at; Start 138; Stop 162
cgtcttttggaaggctggttggcaa

SEQ ID NO: 190440 - DNA, 25 bp, Artificial
  probe
  misc_feature (1)..(25): SEQ ID NO: 7469; WAN024F36_at; Start 3; Stop 27
gagctgtgaactcaactgctttttc

SEQ ID NO: 190441 - DNA, 25 bp, Artificial
  probe
  misc_feature (1)..(25): SEQ ID NO: 7469; WAN024F36_at; Start 92; Stop 116
tgacggcggagtttttgtatcacag

SEQ ID NO: 190442 - DNA, 25 bp, Artificial
  probe
  misc_feature (1)..(25): SEQ ID NO: 7469; WAN024F36_at; Start 191; Stop 215
tcttcaaagagatcagcttcgattg

SEQ ID NO: 190443 - DNA, 25 bp, Artificial
  probe
  misc_feature (1)..(25): SEQ ID NO: 7469; WAN024F36_at; Start 214; Stop 238
tgtgatatcccaacgacgacgtggt

SEQ ID NO: 190444 - DNA, 25 bp, Artificial
  probe
  misc_feature (1)..(25): SEQ ID NO: 7469; WAN024F36_at; Start 238; Stop 262
tacgctgactgtaaagctgtctgca

SEQ ID NO: 190445 - DNA, 25 bp, Artificial
  probe
  misc_feature (1)..(25): SEQ ID NO: 7469; WAN024F36_at; Start 59; Stop 83
gtcaaacctgctccttcagcaatgg

SEQ ID NO: 190446 - DNA, 25 bp, Artificial
  probe
  misc_feature (1)..(25): SEQ ID NO: 7469; WAN024F36_at; Start 331; Stop 355
gaggacacggttaacatcagcaagg

SEQ ID NO: 190447 - DNA, 25 bp, Artificial
  probe
  misc_feature (1)..(25): SEQ ID NO: 7469; WAN024F36_at; Start 77; Stop 101
gcaatggtacgaacttgacggcgga

SEQ ID NO: 190448 - DNA, 25 bp, Artificial
  probe
  misc_feature (1)..(25): SEQ ID NO: 7469; WAN024F36_at; Start 271; Stop 295
aagaccaaagccaagacgacggaag

SEQ ID NO: 190449 - DNA, 25 bp, Artificial
  probe
  misc_feature (1)..(25): SEQ ID NO: 7469; WAN024F36_at; Start 314; Stop 338
taagacagctcagttccgaggacac

SEQ ID NO: 190450 - DNA, 25 bp, Artificial
  probe
  misc_feature (1)..(25): SEQ ID NO: 7469; WAN024F36_at; Start 321; Stop 345
gctcagttccgaggacacggttaac

SEQ ID NO: 190451 - DNA, 25 bp, Artificial
  probe
  misc_feature (1)..(25): SEQ ID NO: 7469; WAN024F36_at; Start 42; Stop 66
cataggtgatgatttctgtcaaacc

SEQ ID NO: 190452 - DNA, 25 bp, Artificial
  probe
  misc_feature (1)..(25): SEQ ID NO: 7469; WAN024F36_at; Start 302; Stop 326
tctacatcagcataagacagctcag

SEQ ID NO: 190453 - DNA, 25 bp, Artificial
  probe
  misc_feature (1)..(25): SEQ ID NO: 7469; WAN024F36_at; Start 291; Stop 315
ggaagacgtcttctacatcagcata

SEQ ID NO: 190454 - DNA, 25 bp, Artificial
  probe
  misc_feature (1)..(25): SEQ ID NO: 7469; WAN024F36_at; Start 253; Stop 277
gctgtctgcatttccagaaagacca

SEQ ID NO: 190455 - DNA, 25 bp, Artificial
  probe
  misc_feature (1)..(25): SEQ ID NO: 7469; WAN024F36_at; Start 219; Stop 243
tatcccaacgacgacgtggtacgct

SEQ ID NO: 190456 - DNA, 25 bp, Artificial
  probe
  misc_feature (1)..(25): SEQ ID NO: 7469; WAN024F36_at; Start 227; Stop 251
cgacgacgtggtacgctgactgtaa

SEQ ID NO: 190457 - DNA, 25 bp, Artificial
  probe
  misc_feature (1)..(25): SEQ ID NO: 7469; WAN024F36_at; Start 165; Stop 189
ggtcatatccatagatacgagcgat

SEQ ID NO: 190458 - DNA, 25 bp, Artificial
  probe
  misc_feature (1)..(25): SEQ ID NO: 7469; WAN024F36_at; Start 244; Stop 268
gactgtaaagctgtctgcatttcca

SEQ ID NO: 190459 - DNA, 25 bp, Artificial
  probe
  misc_feature (1)..(25): SEQ ID NO: 7469; WAN024F36_at; Start 27; Stop 51
caggagttgtcagagcataggtgat

SEQ ID NO: 190460 - DNA, 25 bp, Artificial
  probe
  misc_feature (1)..(25): SEQ ID NO: 7469; WAN024F36_at; Start 201; Stop 225
gatcagcttcgattgtgatatccca

SEQ ID NO: 190461 - DNA, 25 bp, Artificial
  probe
  misc_feature (1)..(25): SEQ ID NO: 7469; WAN024F36_at; Start 276; Stop 300
caaagccaagacgacggaagacgtc

SEQ ID NO: 190462 - DNA, 25 bp, Artificial
  probe
  misc_feature (1)..(25): SEQ ID NO: 7469; WAN024F36_at; Start 264; Stop 288
ttccagaaagaccaaagccaagacg

SEQ ID NO: 190463 - DNA, 25 bp, Artificial
  probe
  misc_feature (1)..(25): SEQ ID NO: 7469; WAN024F36_at; Start 336; Stop 360
cacggttaacatcagcaagggttga

SEQ ID NO: 190464 - DNA, 25 bp, Artificial
  probe
  misc_feature (1)..(25): SEQ ID NO: 7469; WAN024F36_at; Start 49; Stop 73
gatgatttctgtcaaacctgctcct

SEQ ID NO: 190465 - DNA, 25 bp, Artificial
  probe
  misc_feature (1)..(25): SEQ ID NO: 7469; WAN024F36_at; Start 130; Stop 154
tgtaccatcgtcttttggaaggctg

SEQ ID NO: 190466 - DNA, 25 bp, Artificial
  probe
  misc_feature (1)..(25): SEQ ID NO: 2123; WAN024F37_at; Start 1831; Stop 1855
gatttccaaacagcagcagttccag

SEQ ID NO: 190467 - DNA, 25 bp, Artificial
  probe
  misc_feature (1)..(25): SEQ ID NO: 2123; WAN024F37_at; Start 1632; Stop 1656
tgtggatcgttcagtcctccgtcaa

SEQ ID NO: 190468 - DNA, 25 bp, Artificial
  probe
  misc_feature (1)..(25): SEQ ID NO: 2123; WAN024F37_at; Start 2026; Stop 2050
gccaaggcttacgatattccagaaa

SEQ ID NO: 190469 - DNA, 25 bp, Artificial
  probe
  misc_feature (1)..(25): SEQ ID NO: 2123; WAN024F37_at; Start 2190; Stop 2214
tgtagatgctatccaagctgccggc

SEQ ID NO: 190470 - DNA, 25 bp, Artificial
  probe
  misc_feature (1)..(25): SEQ ID NO: 2123; WAN024F37_at; Start 112; Stop 136
ccagctgctggtctctcaaaaattg

SEQ ID NO: 190471 - DNA, 25 bp, Artificial
  probe
  misc_feature (1)..(25): SEQ ID NO: 2123; WAN024F37_at; Start 279; Stop 303
tccaggagctcgtatcgctgataac

SEQ ID NO: 190472 - DNA, 25 bp, Artificial
  probe
  misc_feature (1)..(25): SEQ ID NO: 2123; WAN024F37_at; Start 838; Stop 862
actgacatccgtgtgcgtgaagcgc

SEQ ID NO: 190473 - DNA, 25 bp, Artificial
  probe
  misc_feature (1)..(25): SEQ ID NO: 2123; WAN024F37_at; Start 1044; Stop 1068
tatccgtaagacaagtggtcgcctg

SEQ ID NO: 190474 - DNA, 25 bp, Artificial
  probe
  misc_feature (1)..(25): SEQ ID NO: 2123; WAN024F37_at; Start 1616; Stop 1640
tcatgtggccaatgactgtggatcg

SEQ ID NO: 190475 - DNA, 25 bp, Artificial
  probe
  misc_feature (1)..(25): SEQ ID NO: 2123; WAN024F37_at; Start 261; Stop 285
caaggtcatggtggctcttccagga

SEQ ID NO: 190476 - DNA, 25 bp, Artificial
  probe
  misc_feature (1)..(25): SEQ ID NO: 2123; WAN024F37_at; Start 437; Stop 461
ccgtgccaggtgaggaagtcttttc

SEQ ID NO: 190477 - DNA, 25 bp, Artificial
  probe
  misc_feature (1)..(25): SEQ ID NO: 2123; WAN024F37_at; Start 2008; Stop 2032
caagtgcatccagtcactgccaagg

SEQ ID NO: 190478 - DNA, 25 bp, Artificial
  probe
  misc_feature (1)..(25): SEQ ID NO: 2123; WAN024F37_at; Start 220; Stop 244
cgtcagatcgtttgtggtgccccaa

SEQ ID NO: 190479 - DNA, 25 bp, Artificial
  probe
  misc_feature (1)..(25): SEQ ID NO: 2123; WAN024F37_at; Start 155; Stop 179
cttgcgaagatgtgccagagactca

SEQ ID NO: 190480 - DNA, 25 bp, Artificial
  probe
  misc_feature (1)..(25): SEQ ID NO: 2123; WAN024F37_at; Start 379; Stop 403
tctgactcagttgtgcctaaggaat

SEQ ID NO: 190481 - DNA, 25 bp, Artificial
  probe
  misc_feature (1)..(25): SEQ ID NO: 2123; WAN024F37_at; Start 244; Stop 268
aatgtgcgtgctgggatcaaggtca

SEQ ID NO: 190482 - DNA, 25 bp, Artificial
  probe
  misc_feature (1)..(25): SEQ ID NO: 2123; WAN024F37_at; Start 41; Stop 65
ttgatgtgccatcacaagagttggc

SEQ ID NO: 190483 - DNA, 25 bp, Artificial
  probe
  misc_feature (1)..(25): SEQ ID NO: 2123; WAN024F37_at; Start 1282; Stop 1306
tatgctgatgtagaagacgtcttcc

SEQ ID NO: 190484 - DNA, 25 bp, Artificial
  probe
  misc_feature (1)..(25): SEQ ID NO: 2123; WAN024F37_at; Start 396; Stop 420
taaggaattcgcagatggcatccaa

SEQ ID NO: 190485 - DNA, 25 bp, Artificial
  probe
  misc_feature (1)..(25): SEQ ID NO: 2123; WAN024F37_at; Start 1953; Stop 1977
tccaggtcgtacagccgtgatttca

SEQ ID NO: 190486 - DNA, 25 bp, Artificial
  probe
  misc_feature (1)..(25): SEQ ID NO: 2123; WAN024F37_at; Start 1360; Stop 1384
ccacgtcgtcgttgggatatcacaa

SEQ ID NO: 190487 - DNA, 25 bp, Artificial
  probe
  misc_feature (1)..(25): SEQ ID NO: 2123; WAN024F37_at; Start 1331; Stop 1355
gaaatgcagacagctttacagtcag

SEQ ID NO: 190488 - DNA, 25 bp, Artificial
  probe
  misc_feature (1)..(25): SEQ ID NO: 2123; WAN024F37_at; Start 1125; Stop 1149
taatgaagcccttgatgcggcagct

SEQ ID NO: 190489 - DNA, 25 bp, Artificial
  probe
  misc_feature (1)..(25): SEQ ID NO: 2123; WAN024F37_at; Start 2205; Stop 2229
agctgccggcgtgaaacgtttgaca

SEQ ID NO: 190490 - DNA, 25 bp, Artificial
  probe
  misc_feature (1)..(25): SEQ ID NO: 2123; WAN024F37_at; Start 2324; Stop 2348
gcttaacggacgaagaagtcgcacg

SEQ ID NO: 190491 - DNA, 25 bp, Artificial
  probe
  misc_feature (1)..(25): SEQ ID NO: 2123; WAN024F37_at; Start 127; Stop 151
tcaaaaattgtcgtcggtgaggtct

SEQ ID NO: 190492 - DNA, 25 bp, Artificial
  probe
  misc_feature (1)..(25): SEQ ID NO: 2123; WAN024F37_at; Start 1228; Stop 1252
gaagtttcttcaacccttgctgatg

SEQ ID NO: 190493 - DNA, 25 bp, Artificial
  probe
  misc_feature (1)..(25): SEQ ID NO: 2123; WAN024F37_at; Start 95; Stop 119
tagagggtgtcgaatcaccagctgc

SEQ ID NO: 190494 - DNA, 25 bp, Artificial
  probe
  misc_feature (1)..(25): SEQ ID NO: 2123; WAN024F37_at; Start 1867; Stop 1891
tatgctaagggaatccttgaagccc

SEQ ID NO: 190495 - DNA, 25 bp, Artificial
  probe
  misc_feature (1)..(25): SEQ ID NO: 2123; WAN024F37_at; Start 2341; Stop 2365
gtcgcacgctatatggaaaaaatcc

SEQ ID NO: 190496 - DNA, 25 bp, Artificial
  probe
  misc_feature (1)..(25): SEQ ID NO: 2123; WAN024F37_at; Start 422; Stop 446
tcttgcctgaagatgccgtgccagg

SEQ ID NO: 190497 - DNA, 25 bp, Artificial
  probe
  misc_feature (1)..(25): SEQ ID NO: 2123; WAN024F37_at; Start 2156; Stop 2180
ttctcctcaaggcagaagtgactca

SEQ ID NO: 190498 - DNA, 25 bp, Artificial
  probe
  misc_feature (1)..(25): SEQ ID NO: 2123; WAN024F37_at; Start 1904; Stop 1928
tgggactccaagtaacctatacagc

SEQ ID NO: 190499 - DNA, 25 bp, Artificial
  probe
  misc_feature (1)..(25): SEQ ID NO: 2123; WAN024F37_at; Start 204; Stop 228
tggcgaagaagaagagcgtcagatc

SEQ ID NO: 190500 - DNA, 25 bp, Artificial
  probe
  misc_feature (1)..(25): SEQ ID NO: 4259; WAN024F38_at; Start 158; Stop 182
gctctgaattgaaaggtgtcctgaa

SEQ ID NO: 190501 - DNA, 25 bp, Artificial
  probe
  misc_feature (1)..(25): SEQ ID NO: 4259; WAN024F38_at; Start 50; Stop 74
tatcagactctaataactctttttt

SEQ ID NO: 190502 - DNA, 25 bp, Artificial
  probe
  misc_feature (1)..(25): SEQ ID NO: 4259; WAN024F38_at; Start 10; Stop 34
gatacgttttgtaaatatacaggag

SEQ ID NO: 190503 - DNA, 25 bp, Artificial
  probe
  misc_feature (1)..(25): SEQ ID NO: 4259; WAN024F38_at; Start 220; Stop 244
gaaagtctcttagtatactctaaag

SEQ ID NO: 190504 - DNA, 25 bp, Artificial
  probe
  misc_feature (1)..(25): SEQ ID NO: 4259; WAN024F38_at; Start 126; Stop 150
caactcttctgaatcagaattagat

SEQ ID NO: 190505 - DNA, 25 bp, Artificial
  probe
  misc_feature (1)..(25): SEQ ID NO: 4259; WAN024F38_at; Start 37; Stop 61
gagataattataatatcagactcta

SEQ ID NO: 190506 - DNA, 25 bp, Artificial
  probe
  misc_feature (1)..(25): SEQ ID NO: 4259; WAN024F38_at; Start 75; Stop 99
tataacacctccatcatcagcatta

SEQ ID NO: 190507 - DNA, 25 bp, Artificial
  probe
  misc_feature (1)..(25): SEQ ID NO: 4259; WAN024F38_at; Start 204; Stop 228
actagaaatgatacttgaaagtctc

SEQ ID NO: 190508 - DNA, 25 bp, Artificial
  probe
  misc_feature (1)..(25): SEQ ID NO: 4259; WAN024F38_at; Start 168; Stop 192
gaaaggtgtcctgaaagatatatca

SEQ ID NO: 190509 - DNA, 25 bp, Artificial
  probe
  misc_feature (1)..(25): SEQ ID NO: 4259; WAN024F38_at; Start 120; Stop 144
cttaaacaactcttctgaatcagaa

SEQ ID NO: 190510 - DNA, 25 bp, Artificial
  probe
  misc_feature (1)..(25): SEQ ID NO: 4259; WAN024F38_at; Start 140; Stop 164
cagaattagatatttctagctctga

SEQ ID NO: 190511 - DNA, 25 bp, Artificial
  probe
  misc_feature (1)..(25): SEQ ID NO: 4259; WAN024F38_at; Start 226; Stop 250
ctcttagtatactctaaagtcttag

SEQ ID NO: 190512 - DNA, 25 bp, Artificial
  probe
  misc_feature (1)..(25): SEQ ID NO: 4259; WAN024F38_at; Start 70; Stop 94
ttttttataacacctccatcatcag

SEQ ID NO: 190513 - DNA, 25 bp, Artificial
  probe
  misc_feature (1)..(25): SEQ ID NO: 4259; WAN024F38_at; Start 208; Stop 232
gaaatgatacttgaaagtctcttag

SEQ ID NO: 190514 - DNA, 25 bp, Artificial
  probe
  misc_feature (1)..(25): SEQ ID NO: 4259; WAN024F38_at; Start 156; Stop 180
tagctctgaattgaaaggtgtcctg

SEQ ID NO: 190515 - DNA, 25 bp, Artificial
  probe
  misc_feature (1)..(25): SEQ ID NO: 4259; WAN024F38_at; Start 201; Stop 225
tctactagaaatgatacttgaaagt

SEQ ID NO: 190516 - DNA, 25 bp, Artificial
  probe
  misc_feature (1)..(25): SEQ ID NO: 4259; WAN024F38_at; Start 233; Stop 257
tatactctaaagtcttagagttatg

SEQ ID NO: 190517 - DNA, 25 bp, Artificial
  probe
  misc_feature (1)..(25): SEQ ID NO: 4259; WAN024F38_at; Start 1; Stop 25
gtgtccacagatacgttttgtaaat

SEQ ID NO: 190518 - DNA, 25 bp, Artificial
  probe
  misc_feature (1)..(25): SEQ ID NO: 4259; WAN024F38_at; Start 99; Stop 123
actttgcctatcaattcctttctta

SEQ ID NO: 190519 - DNA, 25 bp, Artificial
  probe
  misc_feature (1)..(25): SEQ ID NO: 4259; WAN024F38_at; Start 160; Stop 184
tctgaattgaaaggtgtcctgaaag

SEQ ID NO: 190520 - DNA, 25 bp, Artificial
  probe
  misc_feature (1)..(25): SEQ ID NO: 4259; WAN024F38_at; Start 88; Stop 112
tcatcagcattactttgcctatcaa

SEQ ID NO: 190521 - DNA, 25 bp, Artificial
  probe
  misc_feature (1)..(25): SEQ ID NO: 4259; WAN024F38_at; Start 5; Stop 29
ccacagatacgttttgtaaatatac

SEQ ID NO: 190522 - DNA, 25 bp, Artificial
  probe
  misc_feature (1)..(25): SEQ ID NO: 4259; WAN024F38_at; Start 175; Stop 199
gtcctgaaagatatatcaacattat

SEQ ID NO: 190523 - DNA, 25 bp, Artificial
  probe
  misc_feature (1)..(25): SEQ ID NO: 4259; WAN024F38_at; Start 80; Stop 104
cacctccatcatcagcattactttg

SEQ ID NO: 190524 - DNA, 25 bp, Artificial
  probe
  misc_feature (1)..(25): SEQ ID NO: 4259; WAN024F38_at; Start 113; Stop 137
ttcctttcttaaacaactcttctga

SEQ ID NO: 190525 - DNA, 25 bp, Artificial
  probe
  misc_feature (1)..(25): SEQ ID NO: 4259; WAN024F38_at; Start 45; Stop 69
tataatatcagactctaataactct

SEQ ID NO: 190526 - DNA, 25 bp, Artificial
  probe
  misc_feature (1)..(25): SEQ ID NO: 4259; WAN024F38_at; Start 84; Stop 108
tccatcatcagcattactttgccta

SEQ ID NO: 190527 - DNA, 25 bp, Artificial
  probe
  misc_feature (1)..(25): SEQ ID NO: 4259; WAN024F38_at; Start 154; Stop 178
tctagctctgaattgaaaggtgtcc

SEQ ID NO: 190528 - DNA, 25 bp, Artificial
  probe
  misc_feature (1)..(25): SEQ ID NO: 4259; WAN024F38_at; Start 184; Stop 208
gatatatcaacattatttctactag

SEQ ID NO: 190529 - DNA, 25 bp, Artificial
  probe
  misc_feature (1)..(25): SEQ ID NO: 4259; WAN024F38_at; Start 172; Stop 196
ggtgtcctgaaagatatatcaacat

SEQ ID NO: 190530 - DNA, 25 bp, Artificial
  probe
  misc_feature (1)..(25): SEQ ID NO: 4259; WAN024F38_at; Start 27; Stop 51
tacaggagaagagataattataata

SEQ ID NO: 190531 - DNA, 25 bp, Artificial
  probe
  misc_feature (1)..(25): SEQ ID NO: 4259; WAN024F38_at; Start 19; Stop 43
tgtaaatatacaggagaagagataa

SEQ ID NO: 190532 - DNA, 25 bp, Artificial
  probe
  misc_feature (1)..(25): SEQ ID NO: 4259; WAN024F38_at; Start 92; Stop 116
cagcattactttgcctatcaattcc

SEQ ID NO: 190533 - DNA, 25 bp, Artificial
  probe
  misc_feature (1)..(25): SEQ ID NO: 4259; WAN024F38_at; Start 163; Stop 187
gaattgaaaggtgtcctgaaagata

SEQ ID NO: 190534 - DNA, 25 bp, Artificial
  probe
  misc_feature (1)..(25): SEQ ID NO: 1164; WAN024F39_at; Start 365; Stop 389
tagatgttgctgagagtaacggctc

SEQ ID NO: 190535 - DNA, 25 bp, Artificial
  probe
  misc_feature (1)..(25): SEQ ID NO: 1164; WAN024F39_at; Start 572; Stop 596
gagcttaccagacattaaaattaat

SEQ ID NO: 190536 - DNA, 25 bp, Artificial
  probe
  misc_feature (1)..(25): SEQ ID NO: 1164; WAN024F39_at; Start 436; Stop 460
ggacagatattacaccaagtttcaa

SEQ ID NO: 190537 - DNA, 25 bp, Artificial
  probe
  misc_feature (1)..(25): SEQ ID NO: 1164; WAN024F39_at; Start 544; Stop 568
aagtacaaaacaacggattatcaag

SEQ ID NO: 190538 - DNA, 25 bp, Artificial
  probe
  misc_feature (1)..(25): SEQ ID NO: 1164; WAN024F39_at; Start 166; Stop 190
ttgtttaagaaaggaattgataggc

SEQ ID NO: 190539 - DNA, 25 bp, Artificial
  probe
  misc_feature (1)..(25): SEQ ID NO: 1164; WAN024F39_at; Start 649; Stop 673
cgcctttttgaagctaatagtttag

SEQ ID NO: 190540 - DNA, 25 bp, Artificial
  probe
  misc_feature (1)..(25): SEQ ID NO: 1164; WAN024F39_at; Start 513; Stop 537
taaaattgaagatgtacttgaaggg

SEQ ID NO: 190541 - DNA, 25 bp, Artificial
  probe
  misc_feature (1)..(25): SEQ ID NO: 1164; WAN024F39_at; Start 485; Stop 509
cagaggctcagttgatggaggcaac

SEQ ID NO: 190542 - DNA, 25 bp, Artificial
  probe
  misc_feature (1)..(25): SEQ ID NO: 1164; WAN024F39_at; Start 116; Stop 140
ggacacctttcaattcagagctaga

SEQ ID NO: 190543 - DNA, 25 bp, Artificial
  probe
  misc_feature (1)..(25): SEQ ID NO: 1164; WAN024F39_at; Start 131; Stop 155
cagagctagaaatatctaattctga

SEQ ID NO: 190544 - DNA, 25 bp, Artificial
  probe
  misc_feature (1)..(25): SEQ ID NO: 1164; WAN024F39_at; Start 465; Stop 489
caattcactcaaagatattgcagag

SEQ ID NO: 190545 - DNA, 25 bp, Artificial
  probe
  misc_feature (1)..(25): SEQ ID NO: 1164; WAN024F39_at; Start 189; Stop 213
gcaaagtaatgctgatgatggaggt

SEQ ID NO: 190546 - DNA, 25 bp, Artificial
  probe
  misc_feature (1)..(25): SEQ ID NO: 1164; WAN024F39_at; Start 8; Stop 32
aaatatttatatatgcaggagtgcg

SEQ ID NO: 190547 - DNA, 25 bp, Artificial
  probe
  misc_feature (1)..(25): SEQ ID NO: 1164; WAN024F39_at; Start 283; Stop 307
tctgtggacacaaaaaactttattg

SEQ ID NO: 190548 - DNA, 25 bp, Artificial
  probe
  misc_feature (1)..(25): SEQ ID NO: 1164; WAN024F39_at; Start 319; Stop 343
gggtggagccatctttttcgattag

SEQ ID NO: 190549 - DNA, 25 bp, Artificial
  probe
  misc_feature (1)..(25): SEQ ID NO: 1164; WAN024F39_at; Start 451; Stop 475
caagtttcaattaccaattcactca

SEQ ID NO: 190550 - DNA, 25 bp, Artificial
  probe
  misc_feature (1)..(25): SEQ ID NO: 1164; WAN024F39_at; Start 53; Stop 77
tagagtatactaagagactttcaag

SEQ ID NO: 190551 - DNA, 25 bp, Artificial
  probe
  misc_feature (1)..(25): SEQ ID NO: 1164; WAN024F39_at; Start 559; Stop 583
gattatcaagaaagagcttaccaga

SEQ ID NO: 190552 - DNA, 25 bp, Artificial
  probe
  misc_feature (1)..(25): SEQ ID NO: 1164; WAN024F39_at; Start 28; Stop 52
gtgcgaaatcataactctaagactt

SEQ ID NO: 190553 - DNA, 25 bp, Artificial
  probe
  misc_feature (1)..(25): SEQ ID NO: 1164; WAN024F39_at; Start 393; Stop 417
taatgtgtcagaatatcttagagat

SEQ ID NO: 190554 - DNA, 25 bp, Artificial
  probe
  misc_feature (1)..(25): SEQ ID NO: 1164; WAN024F39_at; Start 476; Stop 500
aagatattgcagaggctcagttgat

SEQ ID NO: 190555 - DNA, 25 bp, Artificial
  probe
  misc_feature (1)..(25): SEQ ID NO: 1164; WAN024F39_at; Start 326; Stop 350
gccatctttttcgattagctggaaa

SEQ ID NO: 190556 - DNA, 25 bp, Artificial
  probe
  misc_feature (1)..(25): SEQ ID NO: 1164; WAN024F39_at; Start 151; Stop 175
tctgattcagaagagttgtttaaga

SEQ ID NO: 190557 - DNA, 25 bp, Artificial
  probe
  misc_feature (1)..(25): SEQ ID NO: 1164; WAN024F39_at; Start 607; Stop 631
tatgattccgaacattttgagaaga

SEQ ID NO: 190558 - DNA, 25 bp, Artificial
  probe
  misc_feature (1)..(25): SEQ ID NO: 1164; WAN024F39_at; Start 498; Stop 522
gatggaggcaacttataaaattgaa

SEQ ID NO: 190559 - DNA, 25 bp, Artificial
  probe
  misc_feature (1)..(25): SEQ ID NO: 1164; WAN024F39_at; Start 378; Stop 402
gagtaacggctctgataatgtgtca

SEQ ID NO: 190560 - DNA, 25 bp, Artificial
  probe
  misc_feature (1)..(25): SEQ ID NO: 1164; WAN024F39_at; Start 99; Stop 123
tgttgatatatctttcaggacacct

SEQ ID NO: 190561 - DNA, 25 bp, Artificial
  probe
  misc_feature (1)..(25): SEQ ID NO: 1164; WAN024F39_at; Start 629; Stop 653
agatgtattgggagaaaaaacgcct

SEQ ID NO: 190562 - DNA, 25 bp, Artificial
  probe
  misc_feature (1)..(25): SEQ ID NO: 1164; WAN024F39_at; Start 272; Stop 296
tacaaaacgtatctgtggacacaaa

SEQ ID NO: 190563 - DNA, 25 bp, Artificial
  probe
  misc_feature (1)..(25): SEQ ID NO: 1164; WAN024F39_at; Start 199; Stop 223
gctgatgatggaggtgttataaaaa

SEQ ID NO: 190564 - DNA, 25 bp, Artificial
  probe
  misc_feature (1)..(25): SEQ ID NO: 1164; WAN024F39_at; Start 21; Stop 45
tgcaggagtgcgaaatcataactct

SEQ ID NO: 190565 - DNA, 25 bp, Artificial
  probe
  misc_feature (1)..(25): SEQ ID NO: 1164; WAN024F39_at; Start 341; Stop 365
tagctggaaagtttgttgtaacatt

SEQ ID NO: 190566 - DNA, 25 bp, Artificial
  probe
  misc_feature (1)..(25): SEQ ID NO: 1164; WAN024F39_at; Start 179; Stop 203
gaattgataggcaaagtaatgctga

SEQ ID NO: 190567 - DNA, 25 bp, Artificial
  probe
  misc_feature (1)..(25): SEQ ID NO: 1164; WAN024F39_at; Start 256; Stop 280
tcttctcctgtatatttacaaaacg

SEQ ID NO: 190568 - DNA, 25 bp, Artificial
  probe
  misc_feature (1)..(25): SEQ ID NO: 7576; WAN024F3A_at; Start 241; Stop 265
gaaaataaaatcctaatagtactca

SEQ ID NO: 190569 - DNA, 25 bp, Artificial
  probe
  misc_feature (1)..(25): SEQ ID NO: 7576; WAN024F3A_at; Start 168; Stop 192
caaaaacagccataagagtcacctc

SEQ ID NO: 190570 - DNA, 25 bp, Artificial
  probe
  misc_feature (1)..(25): SEQ ID NO: 7576; WAN024F3A_at; Start 10; Stop 34
caagcgactactttgaagttggaac

SEQ ID NO: 190571 - DNA, 25 bp, Artificial
  probe
  misc_feature (1)..(25): SEQ ID NO: 7576; WAN024F3A_at; Start 206; Stop 230
ggctgattataacaagaatagctga

SEQ ID NO: 190572 - DNA, 25 bp, Artificial
  probe
  misc_feature (1)..(25): SEQ ID NO: 7576; WAN024F3A_at; Start 173; Stop 197
acagccataagagtcacctccttga

SEQ ID NO: 190573 - DNA, 25 bp, Artificial
  probe
  misc_feature (1)..(25): SEQ ID NO: 7576; WAN024F3A_at; Start 192; Stop 216
ccttgattcctataggctgattata

SEQ ID NO: 190574 - DNA, 25 bp, Artificial
  probe
  misc_feature (1)..(25): SEQ ID NO: 7576; WAN024F3A_at; Start 292; Stop 316
cgctccggaatgtacgaggtaaata

SEQ ID NO: 190575 - DNA, 25 bp, Artificial
  probe
  misc_feature (1)..(25): SEQ ID NO: 7576; WAN024F3A_at; Start 254; Stop 278
taatagtactcattttgtatgtggc

SEQ ID NO: 190576 - DNA, 25 bp, Artificial
  probe
  misc_feature (1)..(25): SEQ ID NO: 7576; WAN024F3A_at; Start 276; Stop 300
ggctaatattccgtctcgctccgga

SEQ ID NO: 190577 - DNA, 25 bp, Artificial
  probe
  misc_feature (1)..(25): SEQ ID NO: 7576; WAN024F3A_at; Start 125; Stop 149
gaaaagacatcaagtacttctacca

SEQ ID NO: 190578 - DNA, 25 bp, Artificial
  probe
  misc_feature (1)..(25): SEQ ID NO: 7576; WAN024F3A_at; Start 19; Stop 43
actttgaagttggaacatctcctcg

SEQ ID NO: 190579 - DNA, 25 bp, Artificial
  probe
  misc_feature (1)..(25): SEQ ID NO: 7576; WAN024F3A_at; Start 279; Stop 303
taatattccgtctcgctccggaatg

SEQ ID NO: 190580 - DNA, 25 bp, Artificial
  probe
  misc_feature (1)..(25): SEQ ID NO: 7576; WAN024F3A_at; Start 269; Stop 293
tgtatgtggctaatattccgtctcg

SEQ ID NO: 190581 - DNA, 25 bp, Artificial
  probe
  misc_feature (1)..(25): SEQ ID NO: 7576; WAN024F3A_at; Start 63; Stop 87
caaactgactcttgtctttaagacg

SEQ ID NO: 190582 - DNA, 25 bp, Artificial
  probe
  misc_feature (1)..(25): SEQ ID NO: 7576; WAN024F3A_at; Start 1; Stop 25
ttgcgtcgtcaagcgactactttga

SEQ ID NO: 190583 - DNA, 25 bp, Artificial
  probe
  misc_feature (1)..(25): SEQ ID NO: 7576; WAN024F3A_at; Start 112; Stop 136
cccattaaaagaagaaaagacatca

SEQ ID NO: 190584 - DNA, 25 bp, Artificial
  probe
  misc_feature (1)..(25): SEQ ID NO: 7576; WAN024F3A_at; Start 299; Stop 323
gaatgtacgaggtaaatagagttta

SEQ ID NO: 190585 - DNA, 25 bp, Artificial
  probe
  misc_feature (1)..(25): SEQ ID NO: 7576; WAN024F3A_at; Start 47; Stop 71
tgagagcgttccataacaaactgac

SEQ ID NO: 190586 - DNA, 25 bp, Artificial
  probe
  misc_feature (1)..(25): SEQ ID NO: 7576; WAN024F3A_at; Start 90; Stop 114
tacacaagaaaaactcactatcccc

SEQ ID NO: 190587 - DNA, 25 bp, Artificial
  probe
  misc_feature (1)..(25): SEQ ID NO: 7576; WAN024F3A_at; Start 154; Stop 178
tccatccaaagacacaaaaacagcc

SEQ ID NO: 190588 - DNA, 25 bp, Artificial
  probe
  misc_feature (1)..(25): SEQ ID NO: 7576; WAN024F3A_at; Start 130; Stop 154
gacatcaagtacttctaccacaatt

SEQ ID NO: 190589 - DNA, 25 bp, Artificial
  probe
  misc_feature (1)..(25): SEQ ID NO: 7576; WAN024F3A_at; Start 159; Stop 183
ccaaagacacaaaaacagccataag

SEQ ID NO: 190590 - DNA, 25 bp, Artificial
  probe
  misc_feature (1)..(25): SEQ ID NO: 7576; WAN024F3A_at; Start 187; Stop 211
cacctccttgattcctataggctga

SEQ ID NO: 190591 - DNA, 25 bp, Artificial
  probe
  misc_feature (1)..(25): SEQ ID NO: 7576; WAN024F3A_at; Start 38; Stop 62
tcctcgaactgagagcgttccataa

SEQ ID NO: 190592 - DNA, 25 bp, Artificial
  probe
  misc_feature (1)..(25): SEQ ID NO: 7576; WAN024F3A_at; Start 24; Stop 48
gaagttggaacatctcctcgaactg

SEQ ID NO: 190593 - DNA, 25 bp, Artificial
  probe
  misc_feature (1)..(25): SEQ ID NO: 7576; WAN024F3A_at; Start 145; Stop 169
taccacaattccatccaaagacaca

SEQ ID NO: 190594 - DNA, 25 bp, Artificial
  probe
  misc_feature (1)..(25): SEQ ID NO: 7576; WAN024F3A_at; Start 102; Stop 126
actcactatccccattaaaagaaga

SEQ ID NO: 190595 - DNA, 25 bp, Artificial
  probe
  misc_feature (1)..(25): SEQ ID NO: 7576; WAN024F3A_at; Start 183; Stop 207
gagtcacctccttgattcctatagg

SEQ ID NO: 190596 - DNA, 25 bp, Artificial
  probe
  misc_feature (1)..(25): SEQ ID NO: 7576; WAN024F3A_at; Start 52; Stop 76
gcgttccataacaaactgactcttg

SEQ ID NO: 190597 - DNA, 25 bp, Artificial
  probe
  misc_feature (1)..(25): SEQ ID NO: 7576; WAN024F3A_at; Start 75; Stop 99
tgtctttaagacgtttacacaagaa

SEQ ID NO: 190598 - DNA, 25 bp, Artificial
  probe
  misc_feature (1)..(25): SEQ ID NO: 7576; WAN024F3A_at; Start 30; Stop 54
ggaacatctcctcgaactgagagcg

SEQ ID NO: 190599 - DNA, 25 bp, Artificial
  probe
  misc_feature (1)..(25): SEQ ID NO: 7576; WAN024F3A_at; Start 218; Stop 242
caagaatagctgaaattgtacacga

SEQ ID NO: 190600 - DNA, 25 bp, Artificial
  probe
  misc_feature (1)..(25): SEQ ID NO: 7576; WAN024F3A_at; Start 287; Stop 311
cgtctcgctccggaatgtacgaggt

SEQ ID NO: 190601 - DNA, 25 bp, Artificial
  probe
  misc_feature (1)..(25): SEQ ID NO: 7576; WAN024F3A_at; Start 226; Stop 250
gctgaaattgtacacgaaaataaaa

SEQ ID NO: 190602 - DNA, 25 bp, Artificial
  probe
  misc_feature (1)..(25): SEQ ID NO: 3570; WAN024F3B_at; Start 225; Stop 249
gacattgacgaactccgttttgaaa

SEQ ID NO: 190603 - DNA, 25 bp, Artificial
  probe
  misc_feature (1)..(25): SEQ ID NO: 3570; WAN024F3B_at; Start 301; Stop 325
gatagctgttattttttggtactgg

SEQ ID NO: 190604 - DNA, 25 bp, Artificial
  probe
  misc_feature (1)..(25): SEQ ID NO: 3570; WAN024F3B_at; Start 804; Stop 828
ccaacttgaaaaatcgtctgtgaca

SEQ ID NO: 190605 - DNA, 25 bp, Artificial
  probe
  misc_feature (1)..(25): SEQ ID NO: 3570; WAN024F3B_at; Start 682; Stop 706
caatggaggtatctacaagaaattc

SEQ ID NO: 190606 - DNA, 25 bp, Artificial
  probe
  misc_feature (1)..(25): SEQ ID NO: 3570; WAN024F3B_at; Start 439; Stop 463
tggttcttctttgaggaagcgattc

SEQ ID NO: 190607 - DNA, 25 bp, Artificial
  probe
  misc_feature (1)..(25): SEQ ID NO: 3570; WAN024F3B_at; Start 525; Stop 549
gcaactgtcctttgattcttttgat

SEQ ID NO: 190608 - DNA, 25 bp, Artificial
  probe
  misc_feature (1)..(25): SEQ ID NO: 3570; WAN024F3B_at; Start 144; Stop 168
caatgaacaagggaaaattcagtat

SEQ ID NO: 190609 - DNA, 25 bp, Artificial
  probe
  misc_feature (1)..(25): SEQ ID NO: 3570; WAN024F3B_at; Start 28; Stop 52
tctcagttcgaggagatgttccaac

SEQ ID NO: 190610 - DNA, 25 bp, Artificial
  probe
  misc_feature (1)..(25): SEQ ID NO: 3570; WAN024F3B_at; Start 512; Stop 536
tgcaggaaagtatgcaactgtcctt

SEQ ID NO: 190611 - DNA, 25 bp, Artificial
  probe
  misc_feature (1)..(25): SEQ ID NO: 3570; WAN024F3B_at; Start 711; Stop 735
gatttcaactgctaaagtggcactg

SEQ ID NO: 190612 - DNA, 25 bp, Artificial
  probe
  misc_feature (1)..(25): SEQ ID NO: 3570; WAN024F3B_at; Start 240; Stop 264
cgttttgaaatctcattttcgtggg

SEQ ID NO: 190613 - DNA, 25 bp, Artificial
  probe
  misc_feature (1)..(25): SEQ ID NO: 3570; WAN024F3B_at; Start 132; Stop 156
taagaattttatcaatgaacaaggg

SEQ ID NO: 190614 - DNA, 25 bp, Artificial
  probe
  misc_feature (1)..(25): SEQ ID NO: 3570; WAN024F3B_at; Start 791; Stop 815
tatccaatatgatccaacttgaaaa

SEQ ID NO: 190615 - DNA, 25 bp, Artificial
  probe
  misc_feature (1)..(25): SEQ ID NO: 3570; WAN024F3B_at; Start 724; Stop 748
aaagtggcactgttaatccaagagg

SEQ ID NO: 190616 - DNA, 25 bp, Artificial
  probe
  misc_feature (1)..(25): SEQ ID NO: 3570; WAN024F3B_at; Start 42; Stop 66
gatgttccaacttcaaagtagtcgc

SEQ ID NO: 190617 - DNA, 25 bp, Artificial
  probe
  misc_feature (1)..(25): SEQ ID NO: 3570; WAN024F3B_at; Start 394; Stop 418
gaagcccatttagagatttctcgtt

SEQ ID NO: 190618 - DNA, 25 bp, Artificial
  probe
  misc_feature (1)..(25): SEQ ID NO: 3570; WAN024F3B_at; Start 263; Stop 287
gggaggcagctatcggtatctttcc

SEQ ID NO: 190619 - DNA, 25 bp, Artificial
  probe
  misc_feature (1)..(25): SEQ ID NO: 3570; WAN024F3B_at; Start 381; Stop 405
ggaacgccagatggaagcccattta

SEQ ID NO: 190620 - DNA, 25 bp, Artificial
  probe
  misc_feature (1)..(25): SEQ ID NO: 3570; WAN024F3B_at; Start 3; Stop 27
caagagtcagtttgttatggaacgc

SEQ ID NO: 190621 - DNA, 25 bp, Artificial
  probe
  misc_feature (1)..(25): SEQ ID NO: 3570; WAN024F3B_at; Start 164; Stop 188
agtattttccttcctatgattatgg

SEQ ID NO: 190622 - DNA, 25 bp, Artificial
  probe
  misc_feature (1)..(25): SEQ ID NO: 3570; WAN024F3B_at; Start 873; Stop 897
tcccgaattttatagtagattgaaa

SEQ ID NO: 190623 - DNA, 25 bp, Artificial
  probe
  misc_feature (1)..(25): SEQ ID NO: 3570; WAN024F3B_at; Start 352; Stop 376
gctggtttaaccattcgaagaatag

SEQ ID NO: 190624 - DNA, 25 bp, Artificial
  probe
  misc_feature (1)..(25): SEQ ID NO: 3570; WAN024F3B_at; Start 855; Stop 879
tatggcttccttttctaatcccgaa

SEQ ID NO: 190625 - DNA, 25 bp, Artificial
  probe
  misc_feature (1)..(25): SEQ ID NO: 3570; WAN024F3B_at; Start 210; Stop 234
aaaacggagtttccagacattgacg

SEQ ID NO: 190626 - DNA, 25 bp, Artificial
  probe
  misc_feature (1)..(25): SEQ ID NO: 3570; WAN024F3B_at; Start 65; Stop 89
gcttgacgacgcaagaaaaattaca

SEQ ID NO: 190627 - DNA, 25 bp, Artificial
  probe
  misc_feature (1)..(25): SEQ ID NO: 3570; WAN024F3B_at; Start 340; Stop 364
gattggaaagaagctggtttaacca

SEQ ID NO: 190628 - DNA, 25 bp, Artificial
  probe
  misc_feature (1)..(25): SEQ ID NO: 3570; WAN024F3B_at; Start 181; Stop 205
gattatggttggaagcagttgccac

SEQ ID NO: 190629 - DNA, 25 bp, Artificial
  probe
  misc_feature (1)..(25): SEQ ID NO: 3570; WAN024F3B_at; Start 740; Stop 764
tccaagaggagttaggcaagcaaga

SEQ ID NO: 190630 - DNA, 25 bp, Artificial
  probe
  misc_feature (1)..(25): SEQ ID NO: 3570; WAN024F3B_at; Start 55; Stop 79
caaagtagtcgcttgacgacgcaag

SEQ ID NO: 190631 - DNA, 25 bp, Artificial
  probe
  misc_feature (1)..(25): SEQ ID NO: 3570; WAN024F3B_at; Start 320; Stop 344
tactggatttggatgaaggagattg

SEQ ID NO: 190632 - DNA, 25 bp, Artificial
  probe
  misc_feature (1)..(25): SEQ ID NO: 3570; WAN024F3B_at; Start 275; Stop 299
tcggtatctttcctatgcacttaga

SEQ ID NO: 190633 - DNA, 25 bp, Artificial
  probe
  misc_feature (1)..(25): SEQ ID NO: 3570; WAN024F3B_at; Start 195; Stop 219
gcagttgccacctgaaaaacggagt

SEQ ID NO: 190634 - DNA, 25 bp, Artificial
  probe
  misc_feature (1)..(25): SEQ ID NO: 3570; WAN024F3B_at; Start 288; Stop 312
tatgcacttagatgatagctgttat

SEQ ID NO: 190635 - DNA, 25 bp, Artificial
  probe
  misc_feature (1)..(25): SEQ ID NO: 3570; WAN024F3B_at; Start 18; Stop 42
tatggaacgctctcagttcgaggag

SEQ ID NO: 190636 - DNA, 25 bp, Artificial
  probe
  misc_feature (1)..(25): SEQ ID NO: 4388; WAN024F3C_at; Start 77; Stop 101
ctttggatggaattgtggtagaagt

SEQ ID NO: 190637 - DNA, 25 bp, Artificial
  probe
  misc_feature (1)..(25): SEQ ID NO: 4388; WAN024F3C_at; Start 49; Stop 73
gaggtgactcttatggctgtttttg

SEQ ID NO: 190638 - DNA, 25 bp, Artificial
  probe
  misc_feature (1)..(25): SEQ ID NO: 4388; WAN024F3C_at; Start 28; Stop 52
aatcagcctataggaatcaaggagg

SEQ ID NO: 190639 - DNA, 25 bp, Artificial
  probe
  misc_feature (1)..(25): SEQ ID NO: 4388; WAN024F3C_at; Start 30; Stop 54
tcagcctataggaatcaaggaggtg

SEQ ID NO: 190640 - DNA, 25 bp, Artificial
  probe
  misc_feature (1)..(25): SEQ ID NO: 4388; WAN024F3C_at; Start 36; Stop 60
tataggaatcaaggaggtgactctt

SEQ ID NO: 190641 - DNA, 25 bp, Artificial
  probe
  misc_feature (1)..(25): SEQ ID NO: 4388; WAN024F3C_at; Start 72; Stop 96
tgtgtctttggatggaattgtggta

SEQ ID NO: 190642 - DNA, 25 bp, Artificial
  probe
  misc_feature (1)..(25): SEQ ID NO: 4388; WAN024F3C_at; Start 19; Stop 43
tcttgttataatcagcctataggaa

SEQ ID NO: 190643 - DNA, 25 bp, Artificial
  probe
  misc_feature (1)..(25): SEQ ID NO: 4388; WAN024F3C_at; Start 35; Stop 59
ctataggaatcaaggaggtgactct

SEQ ID NO: 190644 - DNA, 25 bp, Artificial
  probe
  misc_feature (1)..(25): SEQ ID NO: 4388; WAN024F3C_at; Start 45; Stop 69
caaggaggtgactcttatggctgtt

SEQ ID NO: 190645 - DNA, 25 bp, Artificial
  probe
  misc_feature (1)..(25): SEQ ID NO: 4388; WAN024F3C_at; Start 64; Stop 88
gctgtttttgtgtctttggatggaa

SEQ ID NO: 190646 - DNA, 25 bp, Artificial
  probe
  misc_feature (1)..(25): SEQ ID NO: 4388; WAN024F3C_at; Start 42; Stop 66
aatcaaggaggtgactcttatggct

SEQ ID NO: 190647 - DNA, 25 bp, Artificial
  probe
  misc_feature (1)..(25): SEQ ID NO: 4388; WAN024F3C_at; Start 34; Stop 58
cctataggaatcaaggaggtgactc

SEQ ID NO: 190648 - DNA, 25 bp, Artificial
  probe
  misc_feature (1)..(25): SEQ ID NO: 4388; WAN024F3C_at; Start 44; Stop 68
tcaaggaggtgactcttatggctgt

SEQ ID NO: 190649 - DNA, 25 bp, Artificial
  probe
  misc_feature (1)..(25): SEQ ID NO: 4388; WAN024F3C_at; Start 129; Stop 153
ggatagtgagtttttcttgtgtata

SEQ ID NO: 190650 - DNA, 25 bp, Artificial
  probe
  misc_feature (1)..(25): SEQ ID NO: 4388; WAN024F3C_at; Start 21; Stop 45
ttgttataatcagcctataggaatc

SEQ ID NO: 190651 - DNA, 25 bp, Artificial
  probe
  misc_feature (1)..(25): SEQ ID NO: 4388; WAN024F3C_at; Start 115; Stop 139
tcttcttttaatggggatagtgagt

SEQ ID NO: 190652 - DNA, 25 bp, Artificial
  probe
  misc_feature (1)..(25): SEQ ID NO: 4388; WAN024F3C_at; Start 41; Stop 65
gaatcaaggaggtgactcttatggc

SEQ ID NO: 190653 - DNA, 25 bp, Artificial
  probe
  misc_feature (1)..(25): SEQ ID NO: 4388; WAN024F3C_at; Start 76; Stop 100
tctttggatggaattgtggtagaag

SEQ ID NO: 190654 - DNA, 25 bp, Artificial
  probe
  misc_feature (1)..(25): SEQ ID NO: 4388; WAN024F3C_at; Start 105; Stop 129
tgatgtcttttcttcttttaatggg

SEQ ID NO: 190655 - DNA, 25 bp, Artificial
  probe
  misc_feature (1)..(25): SEQ ID NO: 4388; WAN024F3C_at; Start 32; Stop 56
agcctataggaatcaaggaggtgac

SEQ ID NO: 190656 - DNA, 25 bp, Artificial
  probe
  misc_feature (1)..(25): SEQ ID NO: 4388; WAN024F3C_at; Start 27; Stop 51
taatcagcctataggaatcaaggag

SEQ ID NO: 190657 - DNA, 25 bp, Artificial
  probe
  misc_feature (1)..(25): SEQ ID NO: 4388; WAN024F3C_at; Start 60; Stop 84
tatggctgtttttgtgtctttggat

SEQ ID NO: 190658 - DNA, 25 bp, Artificial
  probe
  misc_feature (1)..(25): SEQ ID NO: 4388; WAN024F3C_at; Start 63; Stop 87
ggctgtttttgtgtctttggatgga

SEQ ID NO: 190659 - DNA, 25 bp, Artificial
  probe
  misc_feature (1)..(25): SEQ ID NO: 4388; WAN024F3C_at; Start 70; Stop 94
tttgtgtctttggatggaattgtgg

SEQ ID NO: 190660 - DNA, 25 bp, Artificial
  probe
  misc_feature (1)..(25): SEQ ID NO: 4388; WAN024F3C_at; Start 58; Stop 82
cttatggctgtttttgtgtctttgg

SEQ ID NO: 190661 - DNA, 25 bp, Artificial
  probe
  misc_feature (1)..(25): SEQ ID NO: 4388; WAN024F3C_at; Start 51; Stop 75
ggtgactcttatggctgtttttgtg

SEQ ID NO: 190662 - DNA, 25 bp, Artificial
  probe
  misc_feature (1)..(25): SEQ ID NO: 4388; WAN024F3C_at; Start 33; Stop 57
gcctataggaatcaaggaggtgact

SEQ ID NO: 190663 - DNA, 25 bp, Artificial
  probe
  misc_feature (1)..(25): SEQ ID NO: 4388; WAN024F3C_at; Start 47; Stop 71
aggaggtgactcttatggctgtttt

SEQ ID NO: 190664 - DNA, 25 bp, Artificial
  probe
  misc_feature (1)..(25): SEQ ID NO: 4388; WAN024F3C_at; Start 23; Stop 47
gttataatcagcctataggaatcaa

SEQ ID NO: 190665 - DNA, 25 bp, Artificial
  probe
  misc_feature (1)..(25): SEQ ID NO: 4388; WAN024F3C_at; Start 38; Stop 62
taggaatcaaggaggtgactcttat

SEQ ID NO: 190666 - DNA, 25 bp, Artificial
  probe
  misc_feature (1)..(25): SEQ ID NO: 4388; WAN024F3C_at; Start 31; Stop 55
cagcctataggaatcaaggaggtga

SEQ ID NO: 190667 - DNA, 25 bp, Artificial
  probe
  misc_feature (1)..(25): SEQ ID NO: 4388; WAN024F3C_at; Start 54; Stop 78
gactcttatggctgtttttgtgtct

SEQ ID NO: 190668 - DNA, 25 bp, Artificial
  probe
  misc_feature (1)..(25): SEQ ID NO: 4388; WAN024F3C_at; Start 74; Stop 98
tgtctttggatggaattgtggtaga

SEQ ID NO: 190669 - DNA, 25 bp, Artificial
  probe
  misc_feature (1)..(25): SEQ ID NO: 4388; WAN024F3C_at; Start 25; Stop 49
tataatcagcctataggaatcaagg

SEQ ID NO: 190670 - DNA, 25 bp, Artificial
  probe
  misc_feature (1)..(25): SEQ ID NO: 7691; WAN024F3D_at; Start 24; Stop 48
ggcctctagcatttctttactcatg

SEQ ID NO: 190671 - DNA, 25 bp, Artificial
  probe
  misc_feature (1)..(25): SEQ ID NO: 7691; WAN024F3D_at; Start 15; Stop 39
aatgcggaaggcctctagcatttct

SEQ ID NO: 190672 - DNA, 25 bp, Artificial
  probe
  misc_feature (1)..(25): SEQ ID NO: 7691; WAN024F3D_at; Start 20; Stop 44
ggaaggcctctagcatttctttact

SEQ ID NO: 190673 - DNA, 25 bp, Artificial
  probe
  misc_feature (1)..(25): SEQ ID NO: 7691; WAN024F3D_at; Start 29; Stop 53
ctagcatttctttactcatgttttc

SEQ ID NO: 190674 - DNA, 25 bp, Artificial
  probe
  misc_feature (1)..(25): SEQ ID NO: 7691; WAN024F3D_at; Start 22; Stop 46
aaggcctctagcatttctttactca

SEQ ID NO: 190675 - DNA, 25 bp, Artificial
  probe
  misc_feature (1)..(25): SEQ ID NO: 7691; WAN024F3D_at; Start 62; Stop 86
tgaatcctcaaaagctatcctttct

SEQ ID NO: 190676 - DNA, 25 bp, Artificial
  probe
  misc_feature (1)..(25): SEQ ID NO: 7691; WAN024F3D_at; Start 12; Stop 36
caaaatgcggaaggcctctagcatt

SEQ ID NO: 190677 - DNA, 25 bp, Artificial
  probe
  misc_feature (1)..(25): SEQ ID NO: 7691; WAN024F3D_at; Start 4; Stop 28
tcttcttccaaaatgcggaaggcct

SEQ ID NO: 190678 - DNA, 25 bp, Artificial
  probe
  misc_feature (1)..(25): SEQ ID NO: 7691; WAN024F3D_at; Start 52; Stop 76
tcttcacttttgaatcctcaaaagc

SEQ ID NO: 190679 - DNA, 25 bp, Artificial
  probe
  misc_feature (1)..(25): SEQ ID NO: 7691; WAN024F3D_at; Start 9; Stop 33
ttccaaaatgcggaaggcctctagc

SEQ ID NO: 190680 - DNA, 25 bp, Artificial
  probe
  misc_feature (1)..(25): SEQ ID NO: 7691; WAN024F3D_at; Start 61; Stop 85
ttgaatcctcaaaagctatcctttc

SEQ ID NO: 190681 - DNA, 25 bp, Artificial
  probe
  misc_feature (1)..(25): SEQ ID NO: 7691; WAN024F3D_at; Start 41; Stop 65
tactcatgttttcttcacttttgaa

SEQ ID NO: 190682 - DNA, 25 bp, Artificial
  probe
  misc_feature (1)..(25): SEQ ID NO: 7691; WAN024F3D_at; Start 63; Stop 87
gaatcctcaaaagctatcctttctt

SEQ ID NO: 190683 - DNA, 25 bp, Artificial
  probe
  misc_feature (1)..(25): SEQ ID NO: 7691; WAN024F3D_at; Start 3; Stop 27
gtcttcttccaaaatgcggaaggcc

SEQ ID NO: 190684 - DNA, 25 bp, Artificial
  probe
  misc_feature (1)..(25): SEQ ID NO: 7691; WAN024F3D_at; Start 44; Stop 68
tcatgttttcttcacttttgaatcc

SEQ ID NO: 190685 - DNA, 25 bp, Artificial
  probe
  misc_feature (1)..(25): SEQ ID NO: 7691; WAN024F3D_at; Start 69; Stop 93
tcaaaagctatcctttctttttcta

SEQ ID NO: 190686 - DNA, 25 bp, Artificial
  probe
  misc_feature (1)..(25): SEQ ID NO: 7691; WAN024F3D_at; Start 1; Stop 25
ttgtcttcttccaaaatgcggaagg

SEQ ID NO: 190687 - DNA, 25 bp, Artificial
  probe
  misc_feature (1)..(25): SEQ ID NO: 7691; WAN024F3D_at; Start 16; Stop 40
atgcggaaggcctctagcatttctt

SEQ ID NO: 190688 - DNA, 25 bp, Artificial
  probe
  misc_feature (1)..(25): SEQ ID NO: 7691; WAN024F3D_at; Start 56; Stop 80
cacttttgaatcctcaaaagctatc

SEQ ID NO: 190689 - DNA, 25 bp, Artificial
  probe
  misc_feature (1)..(25): SEQ ID NO: 7691; WAN024F3D_at; Start 5; Stop 29
cttcttccaaaatgcggaaggcctc

SEQ ID NO: 190690 - DNA, 25 bp, Artificial
  probe
  misc_feature (1)..(25): SEQ ID NO: 7691; WAN024F3D_at; Start 17; Stop 41
tgcggaaggcctctagcatttcttt

SEQ ID NO: 190691 - DNA, 25 bp, Artificial
  probe
  misc_feature (1)..(25): SEQ ID NO: 7691; WAN024F3D_at; Start 33; Stop 57
catttctttactcatgttttcttca

SEQ ID NO: 190692 - DNA, 25 bp, Artificial
  probe
  misc_feature (1)..(25): SEQ ID NO: 7691; WAN024F3D_at; Start 11; Stop 35
ccaaaatgcggaaggcctctagcat

SEQ ID NO: 190693 - DNA, 25 bp, Artificial
  probe
  misc_feature (1)..(25): SEQ ID NO: 7691; WAN024F3D_at; Start 60; Stop 84
tttgaatcctcaaaagctatccttt

SEQ ID NO: 190694 - DNA, 25 bp, Artificial
  probe
  misc_feature (1)..(25): SEQ ID NO: 7691; WAN024F3D_at; Start 19; Stop 43
cggaaggcctctagcatttctttac

SEQ ID NO: 190695 - DNA, 25 bp, Artificial
  probe
  misc_feature (1)..(25): SEQ ID NO: 7691; WAN024F3D_at; Start 26; Stop 50
cctctagcatttctttactcatgtt

SEQ ID NO: 190696 - DNA, 25 bp, Artificial
  probe
  misc_feature (1)..(25): SEQ ID NO: 7691; WAN024F3D_at; Start 64; Stop 88
aatcctcaaaagctatcctttcttt

SEQ ID NO: 190697 - DNA, 25 bp, Artificial
  probe
  misc_feature (1)..(25): SEQ ID NO: 7691; WAN024F3D_at; Start 18; Stop 42
gcggaaggcctctagcatttcttta

SEQ ID NO: 190698 - DNA, 25 bp, Artificial
  probe
  misc_feature (1)..(25): SEQ ID NO: 7691; WAN024F3D_at; Start 48; Stop 72
gttttcttcacttttgaatcctcaa

SEQ ID NO: 190699 - DNA, 25 bp, Artificial
  probe
  misc_feature (1)..(25): SEQ ID NO: 7691; WAN024F3D_at; Start 2; Stop 26
tgtcttcttccaaaatgcggaaggc

SEQ ID NO: 190700 - DNA, 25 bp, Artificial
  probe
  misc_feature (1)..(25): SEQ ID NO: 7691; WAN024F3D_at; Start 10; Stop 34
tccaaaatgcggaaggcctctagca

SEQ ID NO: 190701 - DNA, 25 bp, Artificial
  probe
  misc_feature (1)..(25): SEQ ID NO: 7691; WAN024F3D_at; Start 21; Stop 45
gaaggcctctagcatttctttactc

SEQ ID NO: 190702 - DNA, 25 bp, Artificial
  probe
  misc_feature (1)..(25): SEQ ID NO: 7691; WAN024F3D_at; Start 25; Stop 49
gcctctagcatttctttactcatgt

SEQ ID NO: 190703 - DNA, 25 bp, Artificial
  probe
  misc_feature (1)..(25): SEQ ID NO: 7691; WAN024F3D_at; Start 6; Stop 30
ttcttccaaaatgcggaaggcctct

SEQ ID NO: 190704 - DNA, 25 bp, Artificial
  probe
  misc_feature (1)..(25): SEQ ID NO: 5570; WAN024F3E_at; Start 70; Stop 94
gatttcttgctcatgttctttgtaa

SEQ ID NO: 190705 - DNA, 25 bp, Artificial
  probe
  misc_feature (1)..(25): SEQ ID NO: 5570; WAN024F3E_at; Start 109; Stop 133
ggcacgtgtttgcttgcgcattttt

SEQ ID NO: 190706 - DNA, 25 bp, Artificial
  probe
  misc_feature (1)..(25): SEQ ID NO: 5570; WAN024F3E_at; Start 37; Stop 61
gcggttgtcaaagcgttctactgta

SEQ ID NO: 190707 - DNA, 25 bp, Artificial
  probe
  misc_feature (1)..(25): SEQ ID NO: 5570; WAN024F3E_at; Start 2; Stop 26
tgggcttcgatgctaccaaggttga

SEQ ID NO: 190708 - DNA, 25 bp, Artificial
  probe
  misc_feature (1)..(25): SEQ ID NO: 5570; WAN024F3E_at; Start 101; Stop 125
taagtgatggcacgtgtttgcttgc

SEQ ID NO: 190709 - DNA, 25 bp, Artificial
  probe
  misc_feature (1)..(25): SEQ ID NO: 5570; WAN024F3E_at; Start 166; Stop 190
tacacgaccaaactcagctggtgct

SEQ ID NO: 190710 - DNA, 25 bp, Artificial
  probe
  misc_feature (1)..(25): SEQ ID NO: 5570; WAN024F3E_at; Start 49; Stop 73
gcgttctactgtaccagacatgatt

SEQ ID NO: 190711 - DNA, 25 bp, Artificial
  probe
  misc_feature (1)..(25): SEQ ID NO: 5570; WAN024F3E_at; Start 158; Stop 182
tgggctgctacacgaccaaactcag

SEQ ID NO: 190712 - DNA, 25 bp, Artificial
  probe
  misc_feature (1)..(25): SEQ ID NO: 5570; WAN024F3E_at; Start 163; Stop 187
tgctacacgaccaaactcagctggt

SEQ ID NO: 190713 - DNA, 25 bp, Artificial
  probe
  misc_feature (1)..(25): SEQ ID NO: 5570; WAN024F3E_at; Start 152; Stop 176
gcagattgggctgctacacgaccaa

SEQ ID NO: 190714 - DNA, 25 bp, Artificial
  probe
  misc_feature (1)..(25): SEQ ID NO: 5570; WAN024F3E_at; Start 42; Stop 66
tgtcaaagcgttctactgtaccaga

SEQ ID NO: 190715 - DNA, 25 bp, Artificial
  probe
  misc_feature (1)..(25): SEQ ID NO: 5570; WAN024F3E_at; Start 119; Stop 143
tgcttgcgcattttttccatgatgg

SEQ ID NO: 190716 - DNA, 25 bp, Artificial
  probe
  misc_feature (1)..(25): SEQ ID NO: 5570; WAN024F3E_at; Start 33; Stop 57
taaagcggttgtcaaagcgttctac

SEQ ID NO: 190717 - DNA, 25 bp, Artificial
  probe
  misc_feature (1)..(25): SEQ ID NO: 5570; WAN024F3E_at; Start 123; Stop 147
tgcgcattttttccatgatggtttg

SEQ ID NO: 190718 - DNA, 25 bp, Artificial
  probe
  misc_feature (1)..(25): SEQ ID NO: 5570; WAN024F3E_at; Start 15; Stop 39
taccaaggttgacatagataaagcg

SEQ ID NO: 190719 - DNA, 25 bp, Artificial
  probe
  misc_feature (1)..(25): SEQ ID NO: 5570; WAN024F3E_at; Start 60; Stop 84
taccagacatgatttcttgctcatg

SEQ ID NO: 190720 - DNA, 25 bp, Artificial
  probe
  misc_feature (1)..(25): SEQ ID NO: 5570; WAN024F3E_at; Start 46; Stop 70
aaagcgttctactgtaccagacatg

SEQ ID NO: 190721 - DNA, 25 bp, Artificial
  probe
  misc_feature (1)..(25): SEQ ID NO: 5570; WAN024F3E_at; Start 134; Stop 158
tccatgatggtttgtttggcagatt

SEQ ID NO: 190722 - DNA, 25 bp, Artificial
  probe
  misc_feature (1)..(25): SEQ ID NO: 5570; WAN024F3E_at; Start 155; Stop 179
gattgggctgctacacgaccaaact

SEQ ID NO: 190723 - DNA, 25 bp, Artificial
  probe
  misc_feature (1)..(25): SEQ ID NO: 5570; WAN024F3E_at; Start 180; Stop 204
cagctggtgcttcttcaaacttgat

SEQ ID NO: 190724 - DNA, 25 bp, Artificial
  probe
  misc_feature (1)..(25): SEQ ID NO: 5570; WAN024F3E_at; Start 5; Stop 29
gcttcgatgctaccaaggttgacat

SEQ ID NO: 190725 - DNA, 25 bp, Artificial
  probe
  misc_feature (1)..(25): SEQ ID NO: 5570; WAN024F3E_at; Start 29; Stop 53
tagataaagcggttgtcaaagcgtt

SEQ ID NO: 190726 - DNA, 25 bp, Artificial
  probe
  misc_feature (1)..(25): SEQ ID NO: 5570; WAN024F3E_at; Start 17; Stop 41
ccaaggttgacatagataaagcggt

SEQ ID NO: 190727 - DNA, 25 bp, Artificial
  probe
  misc_feature (1)..(25): SEQ ID NO: 5570; WAN024F3E_at; Start 204; Stop 228
ttttgtctccaagttcataagctga

SEQ ID NO: 190728 - DNA, 25 bp, Artificial
  probe
  misc_feature (1)..(25): SEQ ID NO: 5570; WAN024F3E_at; Start 146; Stop 170
tgtttggcagattgggctgctacac

SEQ ID NO: 190729 - DNA, 25 bp, Artificial
  probe
  misc_feature (1)..(25): SEQ ID NO: 5570; WAN024F3E_at; Start 201; Stop 225
tgattttgtctccaagttcataagc

SEQ ID NO: 190730 - DNA, 25 bp, Artificial
  probe
  misc_feature (1)..(25): SEQ ID NO: 5570; WAN024F3E_at; Start 78; Stop 102
gctcatgttctttgtaagtattgta

SEQ ID NO: 190731 - DNA, 25 bp, Artificial
  probe
  misc_feature (1)..(25): SEQ ID NO: 5570; WAN024F3E_at; Start 185; Stop 209
ggtgcttcttcaaacttgattttgt

SEQ ID NO: 190732 - DNA, 25 bp, Artificial
  probe
  misc_feature (1)..(25): SEQ ID NO: 5570; WAN024F3E_at; Start 21; Stop 45
ggttgacatagataaagcggttgtc

SEQ ID NO: 190733 - DNA, 25 bp, Artificial
  probe
  misc_feature (1)..(25): SEQ ID NO: 5570; WAN024F3E_at; Start 105; Stop 129
tgatggcacgtgtttgcttgcgcat

SEQ ID NO: 190734 - DNA, 25 bp, Artificial
  probe
  misc_feature (1)..(25): SEQ ID NO: 5570; WAN024F3E_at; Start 92; Stop 116
taagtattgtaagtgatggcacgtg

SEQ ID NO: 190735 - DNA, 25 bp, Artificial
  probe
  misc_feature (1)..(25): SEQ ID NO: 5570; WAN024F3E_at; Start 55; Stop 79
tactgtaccagacatgatttcttgc

SEQ ID NO: 190736 - DNA, 25 bp, Artificial
  probe
  misc_feature (1)..(25): SEQ ID NO: 5570; WAN024F3E_at; Start 174; Stop 198
caaactcagctggtgcttcttcaaa

SEQ ID NO: 190737 - DNA, 25 bp, Artificial
  probe
  misc_feature (1)..(25): SEQ ID NO: 5570; WAN024F3E_at; Start 9; Stop 33
cgatgctaccaaggttgacatagat

SEQ ID NO: 190738 - DNA, 25 bp, Artificial
  probe
  misc_feature (1)..(25): SEQ ID NO: 5714; WAN024F3F_at; Start 254; Stop 278
cgtccaacgattgtaccgatagcat

SEQ ID NO: 190739 - DNA, 25 bp, Artificial
  probe
  misc_feature (1)..(25): SEQ ID NO: 5714; WAN024F3F_at; Start 9; Stop 33
gacgaccaatggcaagagaaagctt

SEQ ID NO: 190740 - DNA, 25 bp, Artificial
  probe
  misc_feature (1)..(25): SEQ ID NO: 5714; WAN024F3F_at; Start 280; Stop 304
cacgtttggattgtggctacgaaca

SEQ ID NO: 190741 - DNA, 25 bp, Artificial
  probe
  misc_feature (1)..(25): SEQ ID NO: 5714; WAN024F3F_at; Start 498; Stop 522
aaacttctccaggaatttggtcttg

SEQ ID NO: 190742 - DNA, 25 bp, Artificial
  probe
  misc_feature (1)..(25): SEQ ID NO: 5714; WAN024F3F_at; Start 478; Stop 502
gatacgatcatgagaagcaaaaact

SEQ ID NO: 190743 - DNA, 25 bp, Artificial
  probe
  misc_feature (1)..(25): SEQ ID NO: 5714; WAN024F3F_at; Start 312; Stop 336
tcgtacggtcacctgcttcacgagc

SEQ ID NO: 190744 - DNA, 25 bp, Artificial
  probe
  misc_feature (1)..(25): SEQ ID NO: 5714; WAN024F3F_at; Start 300; Stop 324
gaacagcaaccttcgtacggtcacc

SEQ ID NO: 190745 - DNA, 25 bp, Artificial
  probe
  misc_feature (1)..(25): SEQ ID NO: 5714; WAN024F3F_at; Start 459; Stop 483
ccttgtaaacataaacttcgatacg

SEQ ID NO: 190746 - DNA, 25 bp, Artificial
  probe
  misc_feature (1)..(25): SEQ ID NO: 5714; WAN024F3F_at; Start 198; Stop 222
catcgtaacgagctgggtggaattt

SEQ ID NO: 190747 - DNA, 25 bp, Artificial
  probe
  misc_feature (1)..(25): SEQ ID NO: 5714; WAN024F3F_at; Start 21; Stop 45
caagagaaagcttgttatctggaac

SEQ ID NO: 190748 - DNA, 25 bp, Artificial
  probe
  misc_feature (1)..(25): SEQ ID NO: 5714; WAN024F3F_at; Start 92; Stop 116
tcaacctcagcaggagcgatggcat

SEQ ID NO: 190749 - DNA, 25 bp, Artificial
  probe
  misc_feature (1)..(25): SEQ ID NO: 5714; WAN024F3F_at; Start 77; Stop 101
tcaaagataacttggtcaacctcag

SEQ ID NO: 190750 - DNA, 25 bp, Artificial
  probe
  misc_feature (1)..(25): SEQ ID NO: 5714; WAN024F3F_at; Start 108; Stop 132
cgatggcattgtagataaattcagc

SEQ ID NO: 190751 - DNA, 25 bp, Artificial
  probe
  misc_feature (1)..(25): SEQ ID NO: 5714; WAN024F3F_at; Start 123; Stop 147
taaattcagctggatctgctaccca

SEQ ID NO: 190752 - DNA, 25 bp, Artificial
  probe
  misc_feature (1)..(25): SEQ ID NO: 5714; WAN024F3F_at; Start 36; Stop 60
tatctggaacaaccaccaaggcacg

SEQ ID NO: 190753 - DNA, 25 bp, Artificial
  probe
  misc_feature (1)..(25): SEQ ID NO: 5714; WAN024F3F_at; Start 186; Stop 210
ggtcatttttagcatcgtaacgagc

SEQ ID NO: 190754 - DNA, 25 bp, Artificial
  probe
  misc_feature (1)..(25): SEQ ID NO: 5714; WAN024F3F_at; Start 290; Stop 314
ttgtggctacgaacagcaaccttcg

SEQ ID NO: 190755 - DNA, 25 bp, Artificial
  probe
  misc_feature (1)..(25): SEQ ID NO: 5714; WAN024F3F_at; Start 134; Stop 158
ggatctgctacccactcgataacat

SEQ ID NO: 190756 - DNA, 25 bp, Artificial
  probe
  misc_feature (1)..(25): SEQ ID NO: 5714; WAN024F3F_at; Start 2; Stop 26
tgtccacgacgaccaatggcaagag

SEQ ID NO: 190757 - DNA, 25 bp, Artificial
  probe
  misc_feature (1)..(25): SEQ ID NO: 5714; WAN024F3F_at; Start 265; Stop 289
tgtaccgatagcatccacgtttgga

SEQ ID NO: 190758 - DNA, 25 bp, Artificial
  probe
  misc_feature (1)..(25): SEQ ID NO: 5714; WAN024F3F_at; Start 172; Stop 196
gattggtaccatgcggtcattttta

SEQ ID NO: 190759 - DNA, 25 bp, Artificial
  probe
  misc_feature (1)..(25): SEQ ID NO: 5714; WAN024F3F_at; Start 162; Stop 186
tattttcttcgattggtaccatgcg

SEQ ID NO: 190760 - DNA, 25 bp, Artificial
  probe
  misc_feature (1)..(25): SEQ ID NO: 5714; WAN024F3F_at; Start 392; Stop 416
aaacgtttgatcatttctggatggc

SEQ ID NO: 190761 - DNA, 25 bp, Artificial
  probe
  misc_feature (1)..(25): SEQ ID NO: 5714; WAN024F3F_at; Start 46; Stop 70
aaccaccaaggcacgtttgctgtcg

SEQ ID NO: 190762 - DNA, 25 bp, Artificial
  probe
  misc_feature (1)..(25): SEQ ID NO: 5714; WAN024F3F_at; Start 332; Stop 356
cgagccacgctcatgatttcaacag

SEQ ID NO: 190763 - DNA, 25 bp, Artificial
  probe
  misc_feature (1)..(25): SEQ ID NO: 5714; WAN024F3F_at; Start 426; Stop 450
caaagacgttcacaccacgagggtt

SEQ ID NO: 190764 - DNA, 25 bp, Artificial
  probe
  misc_feature (1)..(25): SEQ ID NO: 5714; WAN024F3F_at; Start 402; Stop 426
tcatttctggatggctacggctaac

SEQ ID NO: 190765 - DNA, 25 bp, Artificial
  probe
  misc_feature (1)..(25): SEQ ID NO: 5714; WAN024F3F_at; Start 231; Stop 255
tcttcttgatattagcaccaccacg

SEQ ID NO: 190766 - DNA, 25 bp, Artificial
  probe
  misc_feature (1)..(25): SEQ ID NO: 5714; WAN024F3F_at; Start 351; Stop 375
caacagttccatcataaacttctgg

SEQ ID NO: 190767 - DNA, 25 bp, Artificial
  probe
  misc_feature (1)..(25): SEQ ID NO: 5714; WAN024F3F_at; Start 209; Stop 233
gctgggtggaatttgctagtaatct

SEQ ID NO: 190768 - DNA, 25 bp, Artificial
  probe
  misc_feature (1)..(25): SEQ ID NO: 5714; WAN024F3F_at; Start 365; Stop 389
taaacttctggaatttcttgctcca

SEQ ID NO: 190769 - DNA, 25 bp, Artificial
  probe
  misc_feature (1)..(25): SEQ ID NO: 5714; WAN024F3F_at; Start 411; Stop 435
gatggctacggctaacaaagacgtt

SEQ ID NO: 190770 - DNA, 25 bp, Artificial
  probe
  misc_feature (1)..(25): SEQ ID NO: 5714; WAN024F3F_at; Start 441; Stop 465
cacgagggttgtcttcaaccttgta

SEQ ID NO: 190771 - DNA, 25 bp, Artificial
  probe
  misc_feature (1)..(25): SEQ ID NO: 5714; WAN024F3F_at; Start 242; Stop 266
ttagcaccaccacgtccaacgattg

SEQ ID NO: 190772 - DNA, 25 bp, Artificial
  probe
  misc_feature (1)..(25): SEQ ID NO: 5525; WAN024F3G_at; Start 144; Stop 168
cagcttttattcttctacagtatcg

SEQ ID NO: 190773 - DNA, 25 bp, Artificial
  probe
  misc_feature (1)..(25): SEQ ID NO: 5525; WAN024F3G_at; Start 65; Stop 89
cacgcttatcaatcacttcgttaga

SEQ ID NO: 190774 - DNA, 25 bp, Artificial
  probe
  misc_feature (1)..(25): SEQ ID NO: 5525; WAN024F3G_at; Start 193; Stop 217
gcagcgtcttccatggcttcaaatt

SEQ ID NO: 190775 - DNA, 25 bp, Artificial
  probe
  misc_feature (1)..(25): SEQ ID NO: 5525; WAN024F3G_at; Start 90; Stop 114
cacaacagacttgcgcaaagggatt

SEQ ID NO: 190776 - DNA, 25 bp, Artificial
  probe
  misc_feature (1)..(25): SEQ ID NO: 5525; WAN024F3G_at; Start 86; Stop 110
tagacacaacagacttgcgcaaagg

SEQ ID NO: 190777 - DNA, 25 bp, Artificial
  probe
  misc_feature (1)..(25): SEQ ID NO: 5525; WAN024F3G_at; Start 73; Stop 97
tcaatcacttcgttagacacaacag

SEQ ID NO: 190778 - DNA, 25 bp, Artificial
  probe
  misc_feature (1)..(25): SEQ ID NO: 5525; WAN024F3G_at; Start 190; Stop 214
gaagcagcgtcttccatggcttcaa

SEQ ID NO: 190779 - DNA, 25 bp, Artificial
  probe
  misc_feature (1)..(25): SEQ ID NO: 5525; WAN024F3G_at; Start 16; Stop 40
ggatcaataaagacttgtccttcct

SEQ ID NO: 190780 - DNA, 25 bp, Artificial
  probe
  misc_feature (1)..(25): SEQ ID NO: 5525; WAN024F3G_at; Start 53; Stop 77
tgcggagcaaatcacgcttatcaat

SEQ ID NO: 190781 - DNA, 25 bp, Artificial
  probe
  misc_feature (1)..(25): SEQ ID NO: 5525; WAN024F3G_at; Start 139; Stop 163
tctagcagcttttattcttctacag

SEQ ID NO: 190782 - DNA, 25 bp, Artificial
  probe
  misc_feature (1)..(25): SEQ ID NO: 5525; WAN024F3G_at; Start 199; Stop 223
tcttccatggcttcaaattcgctag

SEQ ID NO: 190783 - DNA, 25 bp, Artificial
  probe
  misc_feature (1)..(25): SEQ ID NO: 5525; WAN024F3G_at; Start 208; Stop 232
gcttcaaattcgctagcagacttga

SEQ ID NO: 190784 - DNA, 25 bp, Artificial
  probe
  misc_feature (1)..(25): SEQ ID NO: 5525; WAN024F3G_at; Start 41; Stop 65
tgttcttgacaatgcggagcaaatc

SEQ ID NO: 190785 - DNA, 25 bp, Artificial
  probe
  misc_feature (1)..(25): SEQ ID NO: 5525; WAN024F3G_at; Start 159; Stop 183
tacagtatcgttttctacttccaac

SEQ ID NO: 190786 - DNA, 25 bp, Artificial
  probe
  misc_feature (1)..(25): SEQ ID NO: 5525; WAN024F3G_at; Start 1; Stop 25
ttggccttgcccgtaggatcaataa

SEQ ID NO: 190787 - DNA, 25 bp, Artificial
  probe
  misc_feature (1)..(25): SEQ ID NO: 5525; WAN024F3G_at; Start 46; Stop 70
ttgacaatgcggagcaaatcacgct

SEQ ID NO: 190788 - DNA, 25 bp, Artificial
  probe
  misc_feature (1)..(25): SEQ ID NO: 5525; WAN024F3G_at; Start 204; Stop 228
catggcttcaaattcgctagcagac

SEQ ID NO: 190789 - DNA, 25 bp, Artificial
  probe
  misc_feature (1)..(25): SEQ ID NO: 5525; WAN024F3G_at; Start 8; Stop 32
tgcccgtaggatcaataaagacttg

SEQ ID NO: 190790 - DNA, 25 bp, Artificial
  probe
  misc_feature (1)..(25): SEQ ID NO: 5525; WAN024F3G_at; Start 186; Stop 210
tactgaagcagcgtcttccatggct

SEQ ID NO: 190791 - DNA, 25 bp, Artificial
  probe
  misc_feature (1)..(25): SEQ ID NO: 5525; WAN024F3G_at; Start 59; Stop 83
gcaaatcacgcttatcaatcacttc

SEQ ID NO: 190792 - DNA, 25 bp, Artificial
  probe
  misc_feature (1)..(25): SEQ ID NO: 5525; WAN024F3G_at; Start 213; Stop 237
aaattcgctagcagacttgatatcg

SEQ ID NO: 190793 - DNA, 25 bp, Artificial
  probe
  misc_feature (1)..(25): SEQ ID NO: 5525; WAN024F3G_at; Start 128; Stop 152
tctttccctcctctagcagctttta

SEQ ID NO: 190794 - DNA, 25 bp, Artificial
  probe
  misc_feature (1)..(25): SEQ ID NO: 5525; WAN024F3G_at; Start 27; Stop 51
gacttgtccttccttgttcttgaca

SEQ ID NO: 190795 - DNA, 25 bp, Artificial
  probe
  misc_feature (1)..(25): SEQ ID NO: 5525; WAN024F3G_at; Start 174; Stop 198
tacttccaactctactgaagcagcg

SEQ ID NO: 190796 - DNA, 25 bp, Artificial
  probe
  misc_feature (1)..(25): SEQ ID NO: 5525; WAN024F3G_at; Start 121; Stop 145
gttttcatctttccctcctctagca

SEQ ID NO: 190797 - DNA, 25 bp, Artificial
  probe
  misc_feature (1)..(25): SEQ ID NO: 5525; WAN024F3G_at; Start 81; Stop 105
ttcgttagacacaacagacttgcgc

SEQ ID NO: 190798 - DNA, 25 bp, Artificial
  probe
  misc_feature (1)..(25): SEQ ID NO: 5525; WAN024F3G_at; Start 4; Stop 28
gccttgcccgtaggatcaataaaga

SEQ ID NO: 190799 - DNA, 25 bp, Artificial
  probe
  misc_feature (1)..(25): SEQ ID NO: 5525; WAN024F3G_at; Start 219; Stop 243
gctagcagacttgatatcgatacgg

SEQ ID NO: 190800 - DNA, 25 bp, Artificial
  probe
  misc_feature (1)..(25): SEQ ID NO: 5525; WAN024F3G_at; Start 97; Stop 121
gacttgcgcaaagggatttttcttg

SEQ ID NO: 190801 - DNA, 25 bp, Artificial
  probe
  misc_feature (1)..(25): SEQ ID NO: 5525; WAN024F3G_at; Start 48; Stop 72
gacaatgcggagcaaatcacgctta

SEQ ID NO: 190802 - DNA, 25 bp, Artificial
  probe
  misc_feature (1)..(25): SEQ ID NO: 5525; WAN024F3G_at; Start 178; Stop 202
tccaactctactgaagcagcgtctt

SEQ ID NO: 190803 - DNA, 25 bp, Artificial
  probe
  misc_feature (1)..(25): SEQ ID NO: 5525; WAN024F3G_at; Start 37; Stop 61
tccttgttcttgacaatgcggagca

SEQ ID NO: 190804 - DNA, 25 bp, Artificial
  probe
  misc_feature (1)..(25): SEQ ID NO: 5525; WAN024F3G_at; Start 11; Stop 35
ccgtaggatcaataaagacttgtcc

SEQ ID NO: 190805 - DNA, 25 bp, Artificial
  probe
  misc_feature (1)..(25): SEQ ID NO: 5525; WAN024F3G_at; Start 222; Stop 246
agcagacttgatatcgatacggtaa

SEQ ID NO: 190806 - DNA, 25 bp, Artificial
  probe
  misc_feature (1)..(25): SEQ ID NO: 1598; WAN024F3H_at; Start 455; Stop 479
tcaaccttggtagcatcgaagccca

SEQ ID NO: 190807 - DNA, 25 bp, Artificial
  probe
  misc_feature (1)..(25): SEQ ID NO: 1598; WAN024F3H_at; Start 656; Stop 680
ctgttgaaatcatgagcgtggctcg

SEQ ID NO: 190808 - DNA, 25 bp, Artificial
  probe
  misc_feature (1)..(25): SEQ ID NO: 1598; WAN024F3H_at; Start 1035; Stop 1059
gactggttaccgtatcgatatcaag

SEQ ID NO: 190809 - DNA, 25 bp, Artificial
  probe
  misc_feature (1)..(25): SEQ ID NO: 1598; WAN024F3H_at; Start 482; Stop 506
tgtcaaaacaagaccaaattcctgg

SEQ ID NO: 190810 - DNA, 25 bp, Artificial
  probe
  misc_feature (1)..(25): SEQ ID NO: 1598; WAN024F3H_at; Start 683; Stop 707
aagcaggtgaccgtacgaaggttgc

SEQ ID NO: 190811 - DNA, 25 bp, Artificial
  probe
  misc_feature (1)..(25): SEQ ID NO: 1598; WAN024F3H_at; Start 1005; Stop 1029
tggacaaaacgtgcgcttggcggct

SEQ ID NO: 190812 - DNA, 25 bp, Artificial
  probe
  misc_feature (1)..(25): SEQ ID NO: 1598; WAN024F3H_at; Start 556; Stop 580
gaagacaaccctcgtggtgtgaacg

SEQ ID NO: 190813 - DNA, 25 bp, Artificial
  probe
  misc_feature (1)..(25): SEQ ID NO: 1598; WAN024F3H_at; Start 788; Stop 812
gcaaattccacccagctcgttacga

SEQ ID NO: 190814 - DNA, 25 bp, Artificial
  probe
  misc_feature (1)..(25): SEQ ID NO: 1598; WAN024F3H_at; Start 299; Stop 323
ctgagtttggtcgtgtagcagccca

SEQ ID NO: 190815 - DNA, 25 bp, Artificial
  probe
  misc_feature (1)..(25): SEQ ID NO: 1598; WAN024F3H_at; Start 746; Stop 770
caatcgttggacgtggtggtgctaa

SEQ ID NO: 190816 - DNA, 25 bp, Artificial
  probe
  misc_feature (1)..(25): SEQ ID NO: 1598; WAN024F3H_at; Start 804; Stop 828
tcgttacgatgctaaaaatgaccgc

SEQ ID NO: 190817 - DNA, 25 bp, Artificial
  probe
  misc_feature (1)..(25): SEQ ID NO: 1598; WAN024F3H_at; Start 224; Stop 248
tcagcttgaaagatgctcttgccat

SEQ ID NO: 190818 - DNA, 25 bp, Artificial
  probe
  misc_feature (1)..(25): SEQ ID NO: 1598; WAN024F3H_at; Start 990; Stop 1014
tgccattggtcgtcgtggacaaaac

SEQ ID NO: 190819 - DNA, 25 bp, Artificial
  probe
  misc_feature (1)..(25): SEQ ID NO: 1598; WAN024F3H_at; Start 77; Stop 101
cagtagtagagtcgcttcgttccgc

SEQ ID NO: 190820 - DNA, 25 bp, Artificial
  probe
  misc_feature (1)..(25): SEQ ID NO: 1598; WAN024F3H_at; Start 724; Stop 748
ccaaacgtggatgctatcggtacaa

SEQ ID NO: 190821 - DNA, 25 bp, Artificial
  probe
  misc_feature (1)..(25): SEQ ID NO: 1598; WAN024F3H_at; Start 279; Stop 303
caagtttgaagaagcaccagctgag

SEQ ID NO: 190822 - DNA, 25 bp, Artificial
  probe
  misc_feature (1)..(25): SEQ ID NO: 1598; WAN024F3H_at; Start 820; Stop 844
aatgaccgcatggtaccaatcgaag

SEQ ID NO: 190823 - DNA, 25 bp, Artificial
  probe
  misc_feature (1)..(25): SEQ ID NO: 1598; WAN024F3H_at; Start 948; Stop 972
caaacgtgccttggtggttgttcca

SEQ ID NO: 190824 - DNA, 25 bp, Artificial
  probe
  misc_feature (1)..(25): SEQ ID NO: 1598; WAN024F3H_at; Start 115; Stop 139
tatggtcagtcagacagcgtagcta

SEQ ID NO: 190825 - DNA, 25 bp, Artificial
  probe
  misc_feature (1)..(25): SEQ ID NO: 1598; WAN024F3H_at; Start 61; Stop 85
gaagatatcatcgacgcagtagtag

SEQ ID NO: 190826 - DNA, 25 bp, Artificial
  probe
  misc_feature (1)..(25): SEQ ID NO: 1598; WAN024F3H_at; Start 420; Stop 444
tacagtagaacgctttgacaaccgc

SEQ ID NO: 190827 - DNA, 25 bp, Artificial
  probe
  misc_feature (1)..(25): SEQ ID NO: 1598; WAN024F3H_at; Start 698; Stop 722
cgaaggttgctgttcgtagccacaa

SEQ ID NO: 190828 - DNA, 25 bp, Artificial
  probe
  misc_feature (1)..(25): SEQ ID NO: 1598; WAN024F3H_at; Start 1085; Stop 1109
aagacgctgcttcagtagagttgga

SEQ ID NO: 190829 - DNA, 25 bp, Artificial
  probe
  misc_feature (1)..(25): SEQ ID NO: 1598; WAN024F3H_at; Start 94; Stop 118
cgttccgcttatcgcagacgctatg

SEQ ID NO: 190830 - DNA, 25 bp, Artificial
  probe
  misc_feature (1)..(25): SEQ ID NO: 1598; WAN024F3H_at; Start 208; Stop 232
gatagccgtttggaaatcagcttga

SEQ ID NO: 190831 - DNA, 25 bp, Artificial
  probe
  misc_feature (1)..(25): SEQ ID NO: 1598; WAN024F3H_at; Start 6; Stop 30
taaagaaatgctagaggccttccgc

SEQ ID NO: 190832 - DNA, 25 bp, Artificial
  probe
  misc_feature (1)..(25): SEQ ID NO: 1598; WAN024F3H_at; Start 141; Stop 165
tgacttcaacgaaaaaacaggtgac

SEQ ID NO: 190833 - DNA, 25 bp, Artificial
  probe
  misc_feature (1)..(25): SEQ ID NO: 1598; WAN024F3H_at; Start 900; Stop 924
catcgctcctgctgaggttgaccaa

SEQ ID NO: 190834 - DNA, 25 bp, Artificial
  probe
  misc_feature (1)..(25): SEQ ID NO: 1598; WAN024F3H_at; Start 348; Stop 372
aaaaatgcgcaagcaaacacgtgcc

SEQ ID NO: 190835 - DNA, 25 bp, Artificial
  probe
  misc_feature (1)..(25): SEQ ID NO: 1598; WAN024F3H_at; Start 1019; Stop 1043
gcttggcggctcacttgactggtta

SEQ ID NO: 190836 - DNA, 25 bp, Artificial
  probe
  misc_feature (1)..(25): SEQ ID NO: 1598; WAN024F3H_at; Start 403; Stop 427
caagaaatcatgtctggtacagtag

SEQ ID NO: 190837 - DNA, 25 bp, Artificial
  probe
  misc_feature (1)..(25): SEQ ID NO: 1598; WAN024F3H_at; Start 334; Stop 358
caaaccatcatggaaaaaatgcgca

SEQ ID NO: 190838 - DNA, 25 bp, Artificial
  probe
  misc_feature (1)..(25): SEQ ID NO: 1598; WAN024F3H_at; Start 1070; Stop 1094
aatttgaagccatggaagacgctgc

SEQ ID NO: 190839 - DNA, 25 bp, Artificial
  probe
  misc_feature (1)..(25): SEQ ID NO: 1598; WAN024F3H_at; Start 858; Stop 882
tatcgagtgggtagcagatccagct

SEQ ID NO: 190840 - DNA, 25 bp, Artificial
  probe
  misc_feature (1)..(25): SEQ ID NO: 699; WAN024F3I_at; Start 8; Stop 32
caagaaaaatccctttgcgcaagtc

SEQ ID NO: 190841 - DNA, 25 bp, Artificial
  probe
  misc_feature (1)..(25): SEQ ID NO: 699; WAN024F3I_at; Start 24; Stop 48
gcgcaagtctgttgtgtctaacgaa

SEQ ID NO: 190842 - DNA, 25 bp, Artificial
  probe
  misc_feature (1)..(25): SEQ ID NO: 699; WAN024F3I_at; Start 275; Stop 299
gagagttgggacttgaataactaat

SEQ ID NO: 190843 - DNA, 25 bp, Artificial
  probe
  misc_feature (1)..(25): SEQ ID NO: 699; WAN024F3I_at; Start 207; Stop 231
tagcatggaagtggaagaaagcttt

SEQ ID NO: 190844 - DNA, 25 bp, Artificial
  probe
  misc_feature (1)..(25): SEQ ID NO: 699; WAN024F3I_at; Start 246; Stop 270
cgcttatgtggatcacaaagtgaaa

SEQ ID NO: 190845 - DNA, 25 bp, Artificial
  probe
  misc_feature (1)..(25): SEQ ID NO: 699; WAN024F3I_at; Start 129; Stop 153
tggccgcggcgcttatatcaaacta

SEQ ID NO: 190846 - DNA, 25 bp, Artificial
  probe
  misc_feature (1)..(25): SEQ ID NO: 699; WAN024F3I_at; Start 15; Stop 39
aatccctttgcgcaagtctgttgtg

SEQ ID NO: 190847 - DNA, 25 bp, Artificial
  probe
  misc_feature (1)..(25): SEQ ID NO: 699; WAN024F3I_at; Start 258; Stop 282
tcacaaagtgaaaagaagagagttg

SEQ ID NO: 190848 - DNA, 25 bp, Artificial
  probe
  misc_feature (1)..(25): SEQ ID NO: 699; WAN024F3I_at; Start 232; Stop 256
tatgacgagttgatcgcttatgtgg

SEQ ID NO: 190849 - DNA, 25 bp, Artificial
  probe
  misc_feature (1)..(25): SEQ ID NO: 699; WAN024F3I_at; Start 186; Stop 210
gaaggtctttaaccgcagctttagc

SEQ ID NO: 190850 - DNA, 25 bp, Artificial
  probe
  misc_feature (1)..(25): SEQ ID NO: 699; WAN024F3I_at; Start 214; Stop 238
gaagtggaagaaagcttttatgacg

SEQ ID NO: 190851 - DNA, 25 bp, Artificial
  probe
  misc_feature (1)..(25): SEQ ID NO: 699; WAN024F3I_at; Start 190; Stop 214
gtctttaaccgcagctttagcatgg

SEQ ID NO: 190852 - DNA, 25 bp, Artificial
  probe
  misc_feature (1)..(25): SEQ ID NO: 699; WAN024F3I_at; Start 238; Stop 262
gagttgatcgcttatgtggatcaca

SEQ ID NO: 190853 - DNA, 25 bp, Artificial
  probe
  misc_feature (1)..(25): SEQ ID NO: 699; WAN024F3I_at; Start 103; Stop 127
tttattgatcctacgggcaaggcca

SEQ ID NO: 190854 - DNA, 25 bp, Artificial
  probe
  misc_feature (1)..(25): SEQ ID NO: 699; WAN024F3I_at; Start 181; Stop 205
aagaagaaggtctttaaccgcagct

SEQ ID NO: 190855 - DNA, 25 bp, Artificial
  probe
  misc_feature (1)..(25): SEQ ID NO: 699; WAN024F3I_at; Start 159; Stop 183
tgcagaagccctagaggcgaaaaag

SEQ ID NO: 190856 - DNA, 25 bp, Artificial
  probe
  misc_feature (1)..(25): SEQ ID NO: 699; WAN024F3I_at; Start 146; Stop 170
tcaaactagacaatgcagaagccct

SEQ ID NO: 190857 - DNA, 25 bp, Artificial
  probe
  misc_feature (1)..(25): SEQ ID NO: 699; WAN024F3I_at; Start 198; Stop 222
ccgcagctttagcatggaagtggaa

SEQ ID NO: 190858 - DNA, 25 bp, Artificial
  probe
  misc_feature (1)..(25): SEQ ID NO: 699; WAN024F3I_at; Start 51; Stop 75
gattgataagcgtgatttgctccgc

SEQ ID NO: 190859 - DNA, 25 bp, Artificial
  probe
  misc_feature (1)..(25): SEQ ID NO: 699; WAN024F3I_at; Start 37; Stop 61
gtgtctaacgaagtgattgataagc

SEQ ID NO: 190860 - DNA, 25 bp, Artificial
  probe
  misc_feature (1)..(25): SEQ ID NO: 699; WAN024F3I_at; Start 154; Stop 178
gacaatgcagaagccctagaggcga

SEQ ID NO: 190861 - DNA, 25 bp, Artificial
  probe
  misc_feature (1)..(25): SEQ ID NO: 699; WAN024F3I_at; Start 134; Stop 158
gcggcgcttatatcaaactagacaa

SEQ ID NO: 190862 - DNA, 25 bp, Artificial
  probe
  misc_feature (1)..(25): SEQ ID NO: 699; WAN024F3I_at; Start 195; Stop 219
taaccgcagctttagcatggaagtg

SEQ ID NO: 190863 - DNA, 25 bp, Artificial
  probe
  misc_feature (1)..(25): SEQ ID NO: 699; WAN024F3I_at; Start 28; Stop 52
aagtctgttgtgtctaacgaagtga

SEQ ID NO: 190864 - DNA, 25 bp, Artificial
  probe
  misc_feature (1)..(25): SEQ ID NO: 699; WAN024F3I_at; Start 224; Stop 248
aaagcttttatgacgagttgatcgc

SEQ ID NO: 190865 - DNA, 25 bp, Artificial
  probe
  misc_feature (1)..(25): SEQ ID NO: 699; WAN024F3I_at; Start 152; Stop 176
tagacaatgcagaagccctagaggc

SEQ ID NO: 190866 - DNA, 25 bp, Artificial
  probe
  misc_feature (1)..(25): SEQ ID NO: 699; WAN024F3I_at; Start 55; Stop 79
gataagcgtgatttgctccgcattg

SEQ ID NO: 190867 - DNA, 25 bp, Artificial
  probe
  misc_feature (1)..(25): SEQ ID NO: 699; WAN024F3I_at; Start 139; Stop 163
gcttatatcaaactagacaatgcag

SEQ ID NO: 190868 - DNA, 25 bp, Artificial
  probe
  misc_feature (1)..(25): SEQ ID NO: 699; WAN024F3I_at; Start 110; Stop 134
atcctacgggcaaggccaatggccg

SEQ ID NO: 190869 - DNA, 25 bp, Artificial
  probe
  misc_feature (1)..(25): SEQ ID NO: 699; WAN024F3I_at; Start 131; Stop 155
gccgcggcgcttatatcaaactaga

SEQ ID NO: 190870 - DNA, 25 bp, Artificial
  probe
  misc_feature (1)..(25): SEQ ID NO: 699; WAN024F3I_at; Start 169; Stop 193
ctagaggcgaaaaagaagaaggtct

SEQ ID NO: 190871 - DNA, 25 bp, Artificial
  probe
  misc_feature (1)..(25): SEQ ID NO: 699; WAN024F3I_at; Start 11; Stop 35
gaaaaatccctttgcgcaagtctgt

SEQ ID NO: 190872 - DNA, 25 bp, Artificial
  probe
  misc_feature (1)..(25): SEQ ID NO: 699; WAN024F3I_at; Start 272; Stop 296
gaagagagttgggacttgaataact

SEQ ID NO: 190873 - DNA, 25 bp, Artificial
  probe
  misc_feature (1)..(25): SEQ ID NO: 699; WAN024F3I_at; Start 201; Stop 225
cagctttagcatggaagtggaagaa

SEQ ID NO: 190874 - DNA, 25 bp, Artificial
  probe
  misc_feature (1)..(25): SEQ ID NO: 5815; WAN024F3J_at; Start 64; Stop 88
gccatctttcaatggtacgttgaag

SEQ ID NO: 190875 - DNA, 25 bp, Artificial
  probe
  misc_feature (1)..(25): SEQ ID NO: 5815; WAN024F3J_at; Start 84; Stop 108
tgaagtcaacacgaacgaggacttt

SEQ ID NO: 190876 - DNA, 25 bp, Artificial
  probe
  misc_feature (1)..(25): SEQ ID NO: 5815; WAN024F3J_at; Start 134; Stop 158
acagtaagttttgccatgttacaaa

SEQ ID NO: 190877 - DNA, 25 bp, Artificial
  probe
  misc_feature (1)..(25): SEQ ID NO: 5815; WAN024F3J_at; Start 118; Stop 142
caagtcaacgtctttaacagtaagt

SEQ ID NO: 190878 - DNA, 25 bp, Artificial
  probe
  misc_feature (1)..(25): SEQ ID NO: 5815; WAN024F3J_at; Start 174; Stop 198
tttattcgaaactattatatcacac

SEQ ID NO: 190879 - DNA, 25 bp, Artificial
  probe
  misc_feature (1)..(25): SEQ ID NO: 5815; WAN024F3J_at; Start 61; Stop 85
tacgccatctttcaatggtacgttg

SEQ ID NO: 190880 - DNA, 25 bp, Artificial
  probe
  misc_feature (1)..(25): SEQ ID NO: 5815; WAN024F3J_at; Start 2; Stop 26
tgttcgatgatgtacttaatagttg

SEQ ID NO: 190881 - DNA, 25 bp, Artificial
  probe
  misc_feature (1)..(25): SEQ ID NO: 5815; WAN024F3J_at; Start 217; Stop 241
gatttcacaagatttttcgatattt

SEQ ID NO: 190882 - DNA, 25 bp, Artificial
  probe
  misc_feature (1)..(25): SEQ ID NO: 5815; WAN024F3J_at; Start 54; Stop 78
tagtgattacgccatctttcaatgg

SEQ ID NO: 190883 - DNA, 25 bp, Artificial
  probe
  misc_feature (1)..(25): SEQ ID NO: 5815; WAN024F3J_at; Start 126; Stop 150
cgtctttaacagtaagttttgccat

SEQ ID NO: 190884 - DNA, 25 bp, Artificial
  probe
  misc_feature (1)..(25): SEQ ID NO: 5815; WAN024F3J_at; Start 76; Stop 100
tggtacgttgaagtcaacacgaacg

SEQ ID NO: 190885 - DNA, 25 bp, Artificial
  probe
  misc_feature (1)..(25): SEQ ID NO: 5815; WAN024F3J_at; Start 45; Stop 69
ggttatcgttagtgattacgccatc

SEQ ID NO: 190886 - DNA, 25 bp, Artificial
  probe
  misc_feature (1)..(25): SEQ ID NO: 5815; WAN024F3J_at; Start 12; Stop 36
tgtacttaatagttggaagagctgc

SEQ ID NO: 190887 - DNA, 25 bp, Artificial
  probe
  misc_feature (1)..(25): SEQ ID NO: 5815; WAN024F3J_at; Start 27; Stop 51
gaagagctgctgtgatacggttatc

SEQ ID NO: 190888 - DNA, 25 bp, Artificial
  probe
  misc_feature (1)..(25): SEQ ID NO: 5815; WAN024F3J_at; Start 69; Stop 93
ctttcaatggtacgttgaagtcaac

SEQ ID NO: 190889 - DNA, 25 bp, Artificial
  probe
  misc_feature (1)..(25): SEQ ID NO: 5815; WAN024F3J_at; Start 18; Stop 42
taatagttggaagagctgctgtgat

SEQ ID NO: 190890 - DNA, 25 bp, Artificial
  probe
  misc_feature (1)..(25): SEQ ID NO: 5815; WAN024F3J_at; Start 30; Stop 54
gagctgctgtgatacggttatcgtt

SEQ ID NO: 190891 - DNA, 25 bp, Artificial
  probe
  misc_feature (1)..(25): SEQ ID NO: 5815; WAN024F3J_at; Start 20; Stop 44
atagttggaagagctgctgtgatac

SEQ ID NO: 190892 - DNA, 25 bp, Artificial
  probe
  misc_feature (1)..(25): SEQ ID NO: 5815; WAN024F3J_at; Start 42; Stop 66
tacggttatcgttagtgattacgcc

SEQ ID NO: 190893 - DNA, 25 bp, Artificial
  probe
  misc_feature (1)..(25): SEQ ID NO: 5815; WAN024F3J_at; Start 51; Stop 75
cgttagtgattacgccatctttcaa

SEQ ID NO: 190894 - DNA, 25 bp, Artificial
  probe
  misc_feature (1)..(25): SEQ ID NO: 5815; WAN024F3J_at; Start 200; Stop 224
ttggaaatataaggaaagatttcac

SEQ ID NO: 190895 - DNA, 25 bp, Artificial
  probe
  misc_feature (1)..(25): SEQ ID NO: 5815; WAN024F3J_at; Start 194; Stop 218
cacactttggaaatataaggaaaga

SEQ ID NO: 190896 - DNA, 25 bp, Artificial
  probe
  misc_feature (1)..(25): SEQ ID NO: 5815; WAN024F3J_at; Start 128; Stop 152
tctttaacagtaagttttgccatgt

SEQ ID NO: 190897 - DNA, 25 bp, Artificial
  probe
  misc_feature (1)..(25): SEQ ID NO: 5815; WAN024F3J_at; Start 81; Stop 105
cgttgaagtcaacacgaacgaggac

SEQ ID NO: 190898 - DNA, 25 bp, Artificial
  probe
  misc_feature (1)..(25): SEQ ID NO: 5815; WAN024F3J_at; Start 145; Stop 169
tgccatgttacaaaaactcctttat

SEQ ID NO: 190899 - DNA, 25 bp, Artificial
  probe
  misc_feature (1)..(25): SEQ ID NO: 5815; WAN024F3J_at; Start 6; Stop 30
cgatgatgtacttaatagttggaag

SEQ ID NO: 190900 - DNA, 25 bp, Artificial
  probe
  misc_feature (1)..(25): SEQ ID NO: 5815; WAN024F3J_at; Start 212; Stop 236
ggaaagatttcacaagatttttcga

SEQ ID NO: 190901 - DNA, 25 bp, Artificial
  probe
  misc_feature (1)..(25): SEQ ID NO: 5815; WAN024F3J_at; Start 79; Stop 103
tacgttgaagtcaacacgaacgagg

SEQ ID NO: 190902 - DNA, 25 bp, Artificial
  probe
  misc_feature (1)..(25): SEQ ID NO: 5815; WAN024F3J_at; Start 14; Stop 38
tacttaatagttggaagagctgctg

SEQ ID NO: 190903 - DNA, 25 bp, Artificial
  probe
  misc_feature (1)..(25): SEQ ID NO: 5815; WAN024F3J_at; Start 113; Stop 137
cctttcaagtcaacgtctttaacag

SEQ ID NO: 190904 - DNA, 25 bp, Artificial
  probe
  misc_feature (1)..(25): SEQ ID NO: 5815; WAN024F3J_at; Start 72; Stop 96
tcaatggtacgttgaagtcaacacg

SEQ ID NO: 190905 - DNA, 25 bp, Artificial
  probe
  misc_feature (1)..(25): SEQ ID NO: 5815; WAN024F3J_at; Start 58; Stop 82
gattacgccatctttcaatggtacg

SEQ ID NO: 190906 - DNA, 25 bp, Artificial
  probe
  misc_feature (1)..(25): SEQ ID NO: 5815; WAN024F3J_at; Start 189; Stop 213
tatatcacactttggaaatataagg

SEQ ID NO: 190907 - DNA, 25 bp, Artificial
  probe
  misc_feature (1)..(25): SEQ ID NO: 5815; WAN024F3J_at; Start 35; Stop 59
gctgtgatacggttatcgttagtga

SEQ ID NO: 190908 - DNA, 25 bp, Artificial
  probe
  misc_feature (1)..(25): SEQ ID NO: 5848; WAN024F3K_at; Start 217; Stop 241
tggaaatctgggttttcaaatacac

SEQ ID NO: 190909 - DNA, 25 bp, Artificial
  probe
  misc_feature (1)..(25): SEQ ID NO: 5848; WAN024F3K_at; Start 380; Stop 404
cagcaaatgcgttagcttcttttga

SEQ ID NO: 190910 - DNA, 25 bp, Artificial
  probe
  misc_feature (1)..(25): SEQ ID NO: 5848; WAN024F3K_at; Start 59; Stop 83
caagaagttccattgatgctccacc

SEQ ID NO: 190911 - DNA, 25 bp, Artificial
  probe
  misc_feature (1)..(25): SEQ ID NO: 5848; WAN024F3K_at; Start 264; Stop 288
tgttttggcaccagtcaaagcttcg

SEQ ID NO: 190912 - DNA, 25 bp, Artificial
  probe
  misc_feature (1)..(25): SEQ ID NO: 5848; WAN024F3K_at; Start 198; Stop 222
cacaccgattgtaccagcttggaaa

SEQ ID NO: 190913 - DNA, 25 bp, Artificial
  probe
  misc_feature (1)..(25): SEQ ID NO: 5848; WAN024F3K_at; Start 168; Stop 192
aactcctggttgtttcacgatagcg

SEQ ID NO: 190914 - DNA, 25 bp, Artificial
  probe
  misc_feature (1)..(25): SEQ ID NO: 5848; WAN024F3K_at; Start 306; Stop 330
ttttggaccgatgtcaagaccaagg

SEQ ID NO: 190915 - DNA, 25 bp, Artificial
  probe
  misc_feature (1)..(25): SEQ ID NO: 5848; WAN024F3K_at; Start 186; Stop 210
gatagcgtccatcacaccgattgta

SEQ ID NO: 190916 - DNA, 25 bp, Artificial
  probe
  misc_feature (1)..(25): SEQ ID NO: 5848; WAN024F3K_at; Start 175; Stop 199
ggttgtttcacgatagcgtccatca

SEQ ID NO: 190917 - DNA, 25 bp, Artificial
  probe
  misc_feature (1)..(25): SEQ ID NO: 5848; WAN024F3K_at; Start 109; Stop 133
tctgcacggccaaggttaatcgctg

SEQ ID NO: 190918 - DNA, 25 bp, Artificial
  probe
  misc_feature (1)..(25): SEQ ID NO: 5848; WAN024F3K_at; Start 92; Stop 116
taatccatgagaacttgtctgcacg

SEQ ID NO: 190919 - DNA, 25 bp, Artificial
  probe
  misc_feature (1)..(25): SEQ ID NO: 5848; WAN024F3K_at; Start 8; Stop 32
taaaatcttatttttctgtcaaggc

SEQ ID NO: 190920 - DNA, 25 bp, Artificial
  probe
  misc_feature (1)..(25): SEQ ID NO: 5848; WAN024F3K_at; Start 297; Stop 321
ggcgatagattttggaccgatgtca

SEQ ID NO: 190921 - DNA, 25 bp, Artificial
  probe
  misc_feature (1)..(25): SEQ ID NO: 5848; WAN024F3K_at; Start 125; Stop 149
taatcgctgcggcagctgagtcacc

SEQ ID NO: 190922 - DNA, 25 bp, Artificial
  probe
  misc_feature (1)..(25): SEQ ID NO: 5848; WAN024F3K_at; Start 71; Stop 95
ttgatgctccaccacccgtactaat

SEQ ID NO: 190923 - DNA, 25 bp, Artificial
  probe
  misc_feature (1)..(25): SEQ ID NO: 5848; WAN024F3K_at; Start 371; Stop 395
cagtgtaaccagcaaatgcgttagc

SEQ ID NO: 190924 - DNA, 25 bp, Artificial
  probe
  misc_feature (1)..(25): SEQ ID NO: 5848; WAN024F3K_at; Start 366; Stop 390
cacttcagtgtaaccagcaaatgcg

SEQ ID NO: 190925 - DNA, 25 bp, Artificial
  probe
  misc_feature (1)..(25): SEQ ID NO: 5848; WAN024F3K_at; Start 290; Stop 314
caaatttggcgatagattttggacc

SEQ ID NO: 190926 - DNA, 25 bp, Artificial
  probe
  misc_feature (1)..(25): SEQ ID NO: 5848; WAN024F3K_at; Start 325; Stop 349
ccaaggaagccttcagaaactgctt

SEQ ID NO: 190927 - DNA, 25 bp, Artificial
  probe
  misc_feature (1)..(25): SEQ ID NO: 5848; WAN024F3K_at; Start 279; Stop 303
caaagcttcgtcaaatttggcgata

SEQ ID NO: 190928 - DNA, 25 bp, Artificial
  probe
  misc_feature (1)..(25): SEQ ID NO: 5848; WAN024F3K_at; Start 119; Stop 143
caaggttaatcgctgcggcagctga

SEQ ID NO: 190929 - DNA, 25 bp, Artificial
  probe
  misc_feature (1)..(25): SEQ ID NO: 5848; WAN024F3K_at; Start 340; Stop 364
gaaactgcttcaccttcagtgtcac

SEQ ID NO: 190930 - DNA, 25 bp, Artificial
  probe
  misc_feature (1)..(25): SEQ ID NO: 5848; WAN024F3K_at; Start 97; Stop 121
catgagaacttgtctgcacggccaa

SEQ ID NO: 190931 - DNA, 25 bp, Artificial
  probe
  misc_feature (1)..(25): SEQ ID NO: 5848; WAN024F3K_at; Start 355; Stop 379
tcagtgtcacgcacttcagtgtaac

SEQ ID NO: 190932 - DNA, 25 bp, Artificial
  probe
  misc_feature (1)..(25): SEQ ID NO: 5848; WAN024F3K_at; Start 33; Stop 57
tgcaagtcctggaagaaccttacct

SEQ ID NO: 190933 - DNA, 25 bp, Artificial
  probe
  misc_feature (1)..(25): SEQ ID NO: 5848; WAN024F3K_at; Start 80; Stop 104
caccacccgtactaatccatgagaa

SEQ ID NO: 190934 - DNA, 25 bp, Artificial
  probe
  misc_feature (1)..(25): SEQ ID NO: 5848; WAN024F3K_at; Start 41; Stop 65
ctggaagaaccttaccttcaagaag

SEQ ID NO: 190935 - DNA, 25 bp, Artificial
  probe
  misc_feature (1)..(25): SEQ ID NO: 5848; WAN024F3K_at; Start 270; Stop 294
ggcaccagtcaaagcttcgtcaaat

SEQ ID NO: 190936 - DNA, 25 bp, Artificial
  probe
  misc_feature (1)..(25): SEQ ID NO: 5848; WAN024F3K_at; Start 315; Stop 339
gatgtcaagaccaaggaagccttca

SEQ ID NO: 190937 - DNA, 25 bp, Artificial
  probe
  misc_feature (1)..(25): SEQ ID NO: 5848; WAN024F3K_at; Start 152; Stop 176
caccgatgattgatttaactcctgg

SEQ ID NO: 190938 - DNA, 25 bp, Artificial
  probe
  misc_feature (1)..(25): SEQ ID NO: 5848; WAN024F3K_at; Start 139; Stop 163
gctgagtcaccaccaccgatgattg

SEQ ID NO: 190939 - DNA, 25 bp, Artificial
  probe
  misc_feature (1)..(25): SEQ ID NO: 5848; WAN024F3K_at; Start 22; Stop 46
tctgtcaaggctgcaagtcctggaa

SEQ ID NO: 190940 - DNA, 25 bp, Artificial
  probe
  misc_feature (1)..(25): SEQ ID NO: 5848; WAN024F3K_at; Start 233; Stop 257
caaatacacccataggtccgttcca

SEQ ID NO: 190941 - DNA, 25 bp, Artificial
  probe
  misc_feature (1)..(25): SEQ ID NO: 5848; WAN024F3K_at; Start 209; Stop 233
taccagcttggaaatctgggttttc

SEQ ID NO: 190942 - DNA, 25 bp, Artificial
  probe
  misc_feature (1)..(25): SEQ ID NO: 2752; WAN024F3L_at; Start 259; Stop 283
caagatgttgttttcccaggtgtca

SEQ ID NO: 190943 - DNA, 25 bp, Artificial
  probe
  misc_feature (1)..(25): SEQ ID NO: 2752; WAN024F3L_at; Start 874; Stop 898
gaaggcttccttggtcttgacatcg

SEQ ID NO: 190944 - DNA, 25 bp, Artificial
  probe
  misc_feature (1)..(25): SEQ ID NO: 2752; WAN024F3L_at; Start 742; Stop 766
gacaaattggatgttgcgaaagctc

SEQ ID NO: 190945 - DNA, 25 bp, Artificial
  probe
  misc_feature (1)..(25): SEQ ID NO: 2752; WAN024F3L_at; Start 588; Stop 612
cgtggctatccttggtggttcaaaa

SEQ ID NO: 190946 - DNA, 25 bp, Artificial
  probe
  misc_feature (1)..(25): SEQ ID NO: 2752; WAN024F3L_at; Start 715; Stop 739
gaaatcggtaactcacttgtagaag

SEQ ID NO: 190947 - DNA, 25 bp, Artificial
  probe
  misc_feature (1)..(25): SEQ ID NO: 2752; WAN024F3L_at; Start 1040; Stop 1064
gagttaaatcaatcatcggtggtgg

SEQ ID NO: 190948 - DNA, 25 bp, Artificial
  probe
  misc_feature (1)..(25): SEQ ID NO: 2752; WAN024F3L_at; Start 469; Stop 493
cgtgcacacgcatctaacgttggta

SEQ ID NO: 190949 - DNA, 25 bp, Artificial
  probe
  misc_feature (1)..(25): SEQ ID NO: 2752; WAN024F3L_at; Start 1104; Stop 1128
caagttctcatggattagtacgggt

SEQ ID NO: 190950 - DNA, 25 bp, Artificial
  probe
  misc_feature (1)..(25): SEQ ID NO: 2752; WAN024F3L_at; Start 809; Stop 833
caaaagaagctaacgcatttgctgg

SEQ ID NO: 190951 - DNA, 25 bp, Artificial
  probe
  misc_feature (1)..(25): SEQ ID NO: 2752; WAN024F3L_at; Start 100; Stop 124
gataaccgtatcacagcagctcttc

SEQ ID NO: 190952 - DNA, 25 bp, Artificial
  probe
  misc_feature (1)..(25): SEQ ID NO: 2752; WAN024F3L_at; Start 990; Stop 1014
tttccaagctggtacaatcggtgtg

SEQ ID NO: 190953 - DNA, 25 bp, Artificial
  probe
  misc_feature (1)..(25): SEQ ID NO: 2752; WAN024F3L_at; Start 85; Stop 109
ggcgtaatcactaacgataaccgta

SEQ ID NO: 190954 - DNA, 25 bp, Artificial
  probe
  misc_feature (1)..(25): SEQ ID NO: 2752; WAN024F3L_at; Start 65; Stop 89
tcaacgtaccattgaaagatggcgt

SEQ ID NO: 190955 - DNA, 25 bp, Artificial
  probe
  misc_feature (1)..(25): SEQ ID NO: 2752; WAN024F3L_at; Start 794; Stop 818
tcttgccagttgactcaaaagaagc

SEQ ID NO: 190956 - DNA, 25 bp, Artificial
  probe
  misc_feature (1)..(25): SEQ ID NO: 2752; WAN024F3L_at; Start 607; Stop 631
tcaaaagtttcagacaagatcggtg

SEQ ID NO: 190957 - DNA, 25 bp, Artificial
  probe
  misc_feature (1)..(25): SEQ ID NO: 2752; WAN024F3L_at; Start 666; Stop 690
ccttatcggtggtgggatgacttac

SEQ ID NO: 190958 - DNA, 25 bp, Artificial
  probe
  misc_feature (1)..(25): SEQ ID NO: 2752; WAN024F3L_at; Start 1018; Stop 1042
gacgctatcgtgaaacaaccaggag

SEQ ID NO: 190959 - DNA, 25 bp, Artificial
  probe
  misc_feature (1)..(25): SEQ ID NO: 2752; WAN024F3L_at; Start 394; Stop 418
gatcctgaacttggtaaatactggg

SEQ ID NO: 190960 - DNA, 25 bp, Artificial
  probe
  misc_feature (1)..(25): SEQ ID NO: 2752; WAN024F3L_at; Start 699; Stop 723
caaagcacaaggtatcgaaatcggt

SEQ ID NO: 190961 - DNA, 25 bp, Artificial
  probe
  misc_feature (1)..(25): SEQ ID NO: 2752; WAN024F3L_at; Start 443; Stop 467
taaacgatgcattcggtacagctca

SEQ ID NO: 190962 - DNA, 25 bp, Artificial
  probe
  misc_feature (1)..(25): SEQ ID NO: 2752; WAN024F3L_at; Start 494; Stop 518
tctcagcaaacgttgaaaaagcagt

SEQ ID NO: 190963 - DNA, 25 bp, Artificial
  probe
  misc_feature (1)..(25): SEQ ID NO: 2752; WAN024F3L_at; Start 1002; Stop 1026
tacaatcggtgtgatggacgctatc

SEQ ID NO: 190964 - DNA, 25 bp, Artificial
  probe
  misc_feature (1)..(25): SEQ ID NO: 2752; WAN024F3L_at; Start 408; Stop 432
taaatactgggcatcacttggagat

SEQ ID NO: 190965 - DNA, 25 bp, Artificial
  probe
  misc_feature (1)..(25): SEQ ID NO: 2752; WAN024F3L_at; Start 922; Stop 946
gacgaagctttgactggtgccaaaa

SEQ ID NO: 190966 - DNA, 25 bp, Artificial
  probe
  misc_feature (1)..(25): SEQ ID NO: 2752; WAN024F3L_at; Start 138; Stop 162
catcatcgaacaaggtggacgtgca

SEQ ID NO: 190967 - DNA, 25 bp, Artificial
  probe
  misc_feature (1)..(25): SEQ ID NO: 2752; WAN024F3L_at; Start 238; Stop 262
gacttggcagcaaaacttggtcaag

SEQ ID NO: 190968 - DNA, 25 bp, Artificial
  probe
  misc_feature (1)..(25): SEQ ID NO: 2752; WAN024F3L_at; Start 824; Stop 848
catttgctggttacactgaagtgcg

SEQ ID NO: 190969 - DNA, 25 bp, Artificial
  probe
  misc_feature (1)..(25): SEQ ID NO: 2752; WAN024F3L_at; Start 1079; Stop 1103
cagcgattaaccttggccgtgcaga

SEQ ID NO: 190970 - DNA, 25 bp, Artificial
  probe
  misc_feature (1)..(25): SEQ ID NO: 2752; WAN024F3L_at; Start 273; Stop 297
cccaggtgtcactcgtggtgctgaa

SEQ ID NO: 190971 - DNA, 25 bp, Artificial
  probe
  misc_feature (1)..(25): SEQ ID NO: 2752; WAN024F3L_at; Start 208; Stop 232
gctggtaaatcacttgctcctgtag

SEQ ID NO: 190972 - DNA, 25 bp, Artificial
  probe
  misc_feature (1)..(25): SEQ ID NO: 2752; WAN024F3L_at; Start 568; Stop 592
gaaactccagaacgtccattcgtgg

SEQ ID NO: 190973 - DNA, 25 bp, Artificial
  probe
  misc_feature (1)..(25): SEQ ID NO: 2752; WAN024F3L_at; Start 891; Stop 915
tgacatcggtccaaaatctatcgcc

SEQ ID NO: 190974 - DNA, 25 bp, Artificial
  probe
  misc_feature (1)..(25): SEQ ID NO: 2752; WAN024F3L_at; Start 1129; Stop 1153
ggtggagcatcaatggaacttcttg

SEQ ID NO: 190975 - DNA, 25 bp, Artificial
  probe
  misc_feature (1)..(25): SEQ ID NO: 2752; WAN024F3L_at; Start 428; Stop 452
gagatggtatcttcgtaaacgatgc

SEQ ID NO: 190976 - DNA, 25 bp, Artificial
  probe
  misc_feature (1)..(25): SEQ ID NO: 5723; WAN024F3M_at; Start 19; Stop 43
gtctggaacgtttacgacaagtcca

SEQ ID NO: 190977 - DNA, 25 bp, Artificial
  probe
  misc_feature (1)..(25): SEQ ID NO: 5723; WAN024F3M_at; Start 290; Stop 314
tacaagtattgagctgggacagtct

SEQ ID NO: 190978 - DNA, 25 bp, Artificial
  probe
  misc_feature (1)..(25): SEQ ID NO: 5723; WAN024F3M_at; Start 239; Stop 263
tattggtcataagtttctgtattca

SEQ ID NO: 190979 - DNA, 25 bp, Artificial
  probe
  misc_feature (1)..(25): SEQ ID NO: 5723; WAN024F3M_at; Start 45; Stop 69
tttccatcgttgctggtttaccaga

SEQ ID NO: 190980 - DNA, 25 bp, Artificial
  probe
  misc_feature (1)..(25): SEQ ID NO: 5723; WAN024F3M_at; Start 34; Stop 58
gacaagtccagtttccatcgttgct

SEQ ID NO: 190981 - DNA, 25 bp, Artificial
  probe
  misc_feature (1)..(25): SEQ ID NO: 5723; WAN024F3M_at; Start 255; Stop 279
ctgtattcatgaagtatgctgtgtc

SEQ ID NO: 190982 - DNA, 25 bp, Artificial
  probe
  misc_feature (1)..(25): SEQ ID NO: 5723; WAN024F3M_at; Start 368; Stop 392
gaaccagtacggacatcacgcaatt

SEQ ID NO: 190983 - DNA, 25 bp, Artificial
  probe
  misc_feature (1)..(25): SEQ ID NO: 5723; WAN024F3M_at; Start 134; Stop 158
ggaacggtgacaccgatcacttcag

SEQ ID NO: 190984 - DNA, 25 bp, Artificial
  probe
  misc_feature (1)..(25): SEQ ID NO: 5723; WAN024F3M_at; Start 195; Stop 219
ggatgtaaagcaattcgttttcaac

SEQ ID NO: 190985 - DNA, 25 bp, Artificial
  probe
  misc_feature (1)..(25): SEQ ID NO: 5723; WAN024F3M_at; Start 4; Stop 28
tcctgcttcgatgaagtctggaacg

SEQ ID NO: 190986 - DNA, 25 bp, Artificial
  probe
  misc_feature (1)..(25): SEQ ID NO: 5723; WAN024F3M_at; Start 225; Stop 249
ctacagggatttcgtattggtcata

SEQ ID NO: 190987 - DNA, 25 bp, Artificial
  probe
  misc_feature (1)..(25): SEQ ID NO: 5723; WAN024F3M_at; Start 399; Stop 423
gcatgatcgtgtttcctttacctgg

SEQ ID NO: 190988 - DNA, 25 bp, Artificial
  probe
  misc_feature (1)..(25): SEQ ID NO: 5723; WAN024F3M_at; Start 210; Stop 234
cgttttcaacattgactacagggat

SEQ ID NO: 190989 - DNA, 25 bp, Artificial
  probe
  misc_feature (1)..(25): SEQ ID NO: 5723; WAN024F3M_at; Start 444; Stop 468
aaacgcgaatcaatttgccgtcagc

SEQ ID NO: 190990 - DNA, 25 bp, Artificial
  probe
  misc_feature (1)..(25): SEQ ID NO: 5723; WAN024F3M_at; Start 95; Stop 119
gatggttgagtttcagcaactgtca

SEQ ID NO: 190991 - DNA, 25 bp, Artificial
  probe
  misc_feature (1)..(25): SEQ ID NO: 5723; WAN024F3M_at; Start 470; Stop 494
gtttcaaaggtcataccagctttta

SEQ ID NO: 190992 - DNA, 25 bp, Artificial
  probe
  misc_feature (1)..(25): SEQ ID NO: 5723; WAN024F3M_at; Start 271; Stop 295
tgctgtgtcatccattttgtacaag

SEQ ID NO: 190993 - DNA, 25 bp, Artificial
  probe
  misc_feature (1)..(25): SEQ ID NO: 5723; WAN024F3M_at; Start 355; Stop 379
tgtgtcaaatgtagaaccagtacgg

SEQ ID NO: 190994 - DNA, 25 bp, Artificial
  probe
  misc_feature (1)..(25): SEQ ID NO: 5723; WAN024F3M_at; Start 383; Stop 407
tcacgcaatttcatacgcatgatcg

SEQ ID NO: 190995 - DNA, 25 bp, Artificial
  probe
  misc_feature (1)..(25): SEQ ID NO: 5723; WAN024F3M_at; Start 160; Stop 184
tccgtagaattggattttcacatca

SEQ ID NO: 190996 - DNA, 25 bp, Artificial
  probe
  misc_feature (1)..(25): SEQ ID NO: 5723; WAN024F3M_at; Start 123; Stop 147
caacagtagtaggaacggtgacacc

SEQ ID NO: 190997 - DNA, 25 bp, Artificial
  probe
  misc_feature (1)..(25): SEQ ID NO: 5723; WAN024F3M_at; Start 309; Stop 333
cagtctcgataatagcttgttcaaa

SEQ ID NO: 190998 - DNA, 25 bp, Artificial
  probe
  misc_feature (1)..(25): SEQ ID NO: 5723; WAN024F3M_at; Start 429; Stop 453
ggtgactagcttccaaaacgcgaat

SEQ ID NO: 190999 - DNA, 25 bp, Artificial
  probe
  misc_feature (1)..(25): SEQ ID NO: 5723; WAN024F3M_at; Start 148; Stop 172
gatcacttcagttccgtagaattgg

SEQ ID NO: 191000 - DNA, 25 bp, Artificial
  probe
  misc_feature (1)..(25): SEQ ID NO: 5723; WAN024F3M_at; Start 459; Stop 483
tgccgtcagctgtttcaaaggtcat

SEQ ID NO: 191001 - DNA, 25 bp, Artificial
  probe
  misc_feature (1)..(25): SEQ ID NO: 5723; WAN024F3M_at; Start 329; Stop 353
tcaaatttttcctctggacggtagc

SEQ ID NO: 191002 - DNA, 25 bp, Artificial
  probe
  misc_feature (1)..(25): SEQ ID NO: 5723; WAN024F3M_at; Start 60; Stop 84
gtttaccagaacctgtaacagtagc

SEQ ID NO: 191003 - DNA, 25 bp, Artificial
  probe
  misc_feature (1)..(25): SEQ ID NO: 5723; WAN024F3M_at; Start 339; Stop 363
cctctggacggtagcttgtgtcaaa

SEQ ID NO: 191004 - DNA, 25 bp, Artificial
  probe
  misc_feature (1)..(25): SEQ ID NO: 5723; WAN024F3M_at; Start 107; Stop 131
tcagcaactgtcaactcaacagtag

SEQ ID NO: 191005 - DNA, 25 bp, Artificial
  probe
  misc_feature (1)..(25): SEQ ID NO: 5723; WAN024F3M_at; Start 300; Stop 324
gagctgggacagtctcgataatagc

SEQ ID NO: 191006 - DNA, 25 bp, Artificial
  probe
  misc_feature (1)..(25): SEQ ID NO: 5723; WAN024F3M_at; Start 172; Stop 196
gattttcacatcagagttttcaagg

SEQ ID NO: 191007 - DNA, 25 bp, Artificial
  probe
  misc_feature (1)..(25): SEQ ID NO: 5723; WAN024F3M_at; Start 75; Stop 99
taacagtagcacctttgatagatgg

SEQ ID NO: 191008 - DNA, 25 bp, Artificial
  probe
  misc_feature (1)..(25): SEQ ID NO: 5723; WAN024F3M_at; Start 183; Stop 207
cagagttttcaaggatgtaaagcaa

SEQ ID NO: 191009 - DNA, 25 bp, Artificial
  probe
  misc_feature (1)..(25): SEQ ID NO: 5723; WAN024F3M_at; Start 414; Stop 438
ctttacctggtttgtggtgactagc

SEQ ID NO: 191010 - DNA, 25 bp, Artificial
  probe
  misc_feature (1)..(25): SEQ ID NO: 1835; WAN024F3N_at; Start 420; Stop 444
tatcaaaggtgctactgttacaggt

SEQ ID NO: 191011 - DNA, 25 bp, Artificial
  probe
  misc_feature (1)..(25): SEQ ID NO: 1835; WAN024F3N_at; Start 334; Stop 358
gtgaaaatccaattctacggaactg

SEQ ID NO: 191012 - DNA, 25 bp, Artificial
  probe
  misc_feature (1)..(25): SEQ ID NO: 1835; WAN024F3N_at; Start 20; Stop 44
taaaagctggtatgacctttgaaac

SEQ ID NO: 191013 - DNA, 25 bp, Artificial
  probe
  misc_feature (1)..(25): SEQ ID NO: 1835; WAN024F3N_at; Start 511; Stop 535
caaaaactcgttatcaacactgcag

SEQ ID NO: 191014 - DNA, 25 bp, Artificial
  probe
  misc_feature (1)..(25): SEQ ID NO: 1835; WAN024F3N_at; Start 73; Stop 97
gaagctagtcaccacaaaccaggta

SEQ ID NO: 191015 - DNA, 25 bp, Artificial
  probe
  misc_feature (1)..(25): SEQ ID NO: 1835; WAN024F3N_at; Start 471; Stop 495
tggacttgtcgtaaacgttccagac

SEQ ID NO: 191016 - DNA, 25 bp, Artificial
  probe
  misc_feature (1)..(25): SEQ ID NO: 1835; WAN024F3N_at; Start 482; Stop 506
taaacgttccagacttcatcgaagc

SEQ ID NO: 191017 - DNA, 25 bp, Artificial
  probe
  misc_feature (1)..(25): SEQ ID NO: 1835; WAN024F3N_at; Start 435; Stop 459
tgttacaggttctggtaaaccagca

SEQ ID NO: 191018 - DNA, 25 bp, Artificial
  probe
  misc_feature (1)..(25): SEQ ID NO: 1835; WAN024F3N_at; Start 496; Stop 520
ttcatcgaagcaggacaaaaactcg

SEQ ID NO: 191019 - DNA, 25 bp, Artificial
  probe
  misc_feature (1)..(25): SEQ ID NO: 1835; WAN024F3N_at; Start 30; Stop 54
tatgacctttgaaacagctgacggc

SEQ ID NO: 191020 - DNA, 25 bp, Artificial
  probe
  misc_feature (1)..(25): SEQ ID NO: 1835; WAN024F3N_at; Start 107; Stop 131
cgatcatgcgtatgaaattgcgtga

SEQ ID NO: 191021 - DNA, 25 bp, Artificial
  probe
  misc_feature (1)..(25): SEQ ID NO: 1835; WAN024F3N_at; Start 138; Stop 162
tactggttctacatttgacacaagc

SEQ ID NO: 191022 - DNA, 25 bp, Artificial
  probe
  misc_feature (1)..(25): SEQ ID NO: 1835; WAN024F3N_at; Start 122; Stop 146
aattgcgtgatgtccgtactggttc

SEQ ID NO: 191023 - DNA, 25 bp, Artificial
  probe
  misc_feature (1)..(25): SEQ ID NO: 1835; WAN024F3N_at; Start 60; Stop 84
gattcgcgttttggaagctagtcac

SEQ ID NO: 191024 - DNA, 25 bp, Artificial
  probe
  misc_feature (1)..(25): SEQ ID NO: 1835; WAN024F3N_at; Start 380; Stop 404
ctactactgttgagttgacagttgc

SEQ ID NO: 191025 - DNA, 25 bp, Artificial
  probe
  misc_feature (1)..(25): SEQ ID NO: 1835; WAN024F3N_at; Start 524; Stop 548
tcaacactgcagaaggaacttacgt

SEQ ID NO: 191026 - DNA, 25 bp, Artificial
  probe
  misc_feature (1)..(25): SEQ ID NO: 1835; WAN024F3N_at; Start 201; Stop 225
gactgtcccagctcaatacttgtac

SEQ ID NO: 191027 - DNA, 25 bp, Artificial
  probe
  misc_feature (1)..(25): SEQ ID NO: 1835; WAN024F3N_at; Start 187; Stop 211
caagctattatcgagactgtcccag

SEQ ID NO: 191028 - DNA, 25 bp, Artificial
  probe
  misc_feature (1)..(25): SEQ ID NO: 1835; WAN024F3N_at; Start 542; Stop 566
cttacgtttctcgtgcctaactaat

SEQ ID NO: 191029 - DNA, 25 bp, Artificial
  probe
  misc_feature (1)..(25): SEQ ID NO: 1835; WAN024F3N_at; Start 406; Stop 430
gaaactcaaccatctatcaaaggtg

SEQ ID NO: 191030 - DNA, 25 bp, Artificial
  probe
  misc_feature (1)..(25): SEQ ID NO: 1835; WAN024F3N_at; Start 235; Stop 259
gacacagcatacttcatgaatacag

SEQ ID NO: 191031 - DNA, 25 bp, Artificial
  probe
  misc_feature (1)..(25): SEQ ID NO: 1835; WAN024F3N_at; Start 349; Stop 373
tacggaactgaagtgatcggtgtca

SEQ ID NO: 191032 - DNA, 25 bp, Artificial
  probe
  misc_feature (1)..(25): SEQ ID NO: 1835; WAN024F3N_at; Start 92; Stop 116
caggtaaaggaaacacgatcatgcg

SEQ ID NO: 191033 - DNA, 25 bp, Artificial
  probe
  misc_feature (1)..(25): SEQ ID NO: 1835; WAN024F3N_at; Start 44; Stop 68
cagctgacggcaaattgattcgcgt

SEQ ID NO: 191034 - DNA, 25 bp, Artificial
  probe
  misc_feature (1)..(25): SEQ ID NO: 1835; WAN024F3N_at; Start 168; Stop 192
tccagaggaaaaatttgaacaagct

SEQ ID NO: 191035 - DNA, 25 bp, Artificial
  probe
  misc_feature (1)..(25): SEQ ID NO: 1835; WAN024F3N_at; Start 318; Stop 342
ccttgaaaactctgatgtgaaaatc

SEQ ID NO: 191036 - DNA, 25 bp, Artificial
  probe
  misc_feature (1)..(25): SEQ ID NO: 1835; WAN024F3N_at; Start 277; Stop 301
gaaatccctgtagtcaatgttgaaa

SEQ ID NO: 191037 - DNA, 25 bp, Artificial
  probe
  misc_feature (1)..(25): SEQ ID NO: 1835; WAN024F3N_at; Start 298; Stop 322
gaaaacgaattgctttacatccttg

SEQ ID NO: 191038 - DNA, 25 bp, Artificial
  probe
  misc_feature (1)..(25): SEQ ID NO: 1835; WAN024F3N_at; Start 457; Stop 481
gcaacgatggaaactggacttgtcg

SEQ ID NO: 191039 - DNA, 25 bp, Artificial
  probe
  misc_feature (1)..(25): SEQ ID NO: 1835; WAN024F3N_at; Start 445; Stop 469
tctggtaaaccagcaacgatggaaa

SEQ ID NO: 191040 - DNA, 25 bp, Artificial
  probe
  misc_feature (1)..(25): SEQ ID NO: 1835; WAN024F3N_at; Start 153; Stop 177
tgacacaagctaccgtccagaggaa

SEQ ID NO: 191041 - DNA, 25 bp, Artificial
  probe
  misc_feature (1)..(25): SEQ ID NO: 1835; WAN024F3N_at; Start 219; Stop 243
cttgtacaaaatggatgacacagca

SEQ ID NO: 191042 - DNA, 25 bp, Artificial
  probe
  misc_feature (1)..(25): SEQ ID NO: 1835; WAN024F3N_at; Start 395; Stop 419
tgacagttgctgaaactcaaccatc

SEQ ID NO: 191043 - DNA, 25 bp, Artificial
  probe
  misc_feature (1)..(25): SEQ ID NO: 1835; WAN024F3N_at; Start 367; Stop 391
ggtgtcaccgttcctactactgttg

SEQ ID NO: 191044 - DNA, 25 bp, Artificial
  probe
  misc_feature (1)..(25): SEQ ID NO: 2540; WAN024F3O_at; Start 276; Stop 300
tatggctgatgtagaactcgctgct

SEQ ID NO: 191045 - DNA, 25 bp, Artificial
  probe
  misc_feature (1)..(25): SEQ ID NO: 2540; WAN024F3O_at; Start 152; Stop 176
gcatttatcttaaaaacgtggacga

SEQ ID NO: 191046 - DNA, 25 bp, Artificial
  probe
  misc_feature (1)..(25): SEQ ID NO: 2540; WAN024F3O_at; Start 319; Stop 343
ggtatcgtcccagataaaacaccaa

SEQ ID NO: 191047 - DNA, 25 bp, Artificial
  probe
  misc_feature (1)..(25): SEQ ID NO: 2540; WAN024F3O_at; Start 24; Stop 48
cgaaatcgttatcgccccacgtgta

SEQ ID NO: 191048 - DNA, 25 bp, Artificial
  probe
  misc_feature (1)..(25): SEQ ID NO: 2540; WAN024F3O_at; Start 162; Stop 186
taaaaacgtggacgaagaactcaca

SEQ ID NO: 191049 - DNA, 25 bp, Artificial
  probe
  misc_feature (1)..(25): SEQ ID NO: 2540; WAN024F3O_at; Start 249; Stop 273
gaaagctgtcaaagatgccgtccgt

SEQ ID NO: 191050 - DNA, 25 bp, Artificial
  probe
  misc_feature (1)..(25): SEQ ID NO: 2540; WAN024F3O_at; Start 266; Stop 290
ccgtccgtaatatggctgatgtaga

SEQ ID NO: 191051 - DNA, 25 bp, Artificial
  probe
  misc_feature (1)..(25): SEQ ID NO: 2540; WAN024F3O_at; Start 52; Stop 76
gaaaaaatcattgctatcgctactg

SEQ ID NO: 191052 - DNA, 25 bp, Artificial
  probe
  misc_feature (1)..(25): SEQ ID NO: 2540; WAN024F3O_at; Start 356; Stop 380
aagatctatttgacgaggacttcct

SEQ ID NO: 191053 - DNA, 25 bp, Artificial
  probe
  misc_feature (1)..(25): SEQ ID NO: 2540; WAN024F3O_at; Start 143; Stop 167
tcggccgtggcatttatcttaaaaa

SEQ ID NO: 191054 - DNA, 25 bp, Artificial
  probe
  misc_feature (1)..(25): SEQ ID NO: 2540; WAN024F3O_at; Start 65; Stop 89
ctatcgctactgcaaaggtagaggg

SEQ ID NO: 191055 - DNA, 25 bp, Artificial
  probe
  misc_feature (1)..(25): SEQ ID NO: 2540; WAN024F3O_at; Start 13; Stop 37
gaacaacttggcgaaatcgttatcg

SEQ ID NO: 191056 - DNA, 25 bp, Artificial
  probe
  misc_feature (1)..(25): SEQ ID NO: 2540; WAN024F3O_at; Start 112; Stop 136
tcagtgtctgataccctttcaaaac

SEQ ID NO: 191057 - DNA, 25 bp, Artificial
  probe
  misc_feature (1)..(25): SEQ ID NO: 2540; WAN024F3O_at; Start 33; Stop 57
tatcgccccacgtgtacttgaaaaa

SEQ ID NO: 191058 - DNA, 25 bp, Artificial
  probe
  misc_feature (1)..(25): SEQ ID NO: 2540; WAN024F3O_at; Start 170; Stop 194
tggacgaagaactcacagcagatat

SEQ ID NO: 191059 - DNA, 25 bp, Artificial
  probe
  misc_feature (1)..(25): SEQ ID NO: 2540; WAN024F3O_at; Start 312; Stop 336
cgttgcaggtatcgtcccagataaa

SEQ ID NO: 191060 - DNA, 25 bp, Artificial
  probe
  misc_feature (1)..(25): SEQ ID NO: 2540; WAN024F3O_at; Start 131; Stop 155
caaaactttcactcggccgtggcat

SEQ ID NO: 191061 - DNA, 25 bp, Artificial
  probe
  misc_feature (1)..(25): SEQ ID NO: 2540; WAN024F3O_at; Start 331; Stop 355
gataaaacaccaaaaccagaattga

SEQ ID NO: 191062 - DNA, 25 bp, Artificial
  probe
  misc_feature (1)..(25): SEQ ID NO: 2540; WAN024F3O_at; Start 127; Stop 151
ctttcaaaactttcactcggccgtg

SEQ ID NO: 191063 - DNA, 25 bp, Artificial
  probe
  misc_feature (1)..(25): SEQ ID NO: 2540; WAN024F3O_at; Start 37; Stop 61
gccccacgtgtacttgaaaaaatca

SEQ ID NO: 191064 - DNA, 25 bp, Artificial
  probe
  misc_feature (1)..(25): SEQ ID NO: 2540; WAN024F3O_at; Start 233; Stop 257
tagcggttgctatccagaaagctgt

SEQ ID NO: 191065 - DNA, 25 bp, Artificial
  probe
  misc_feature (1)..(25): SEQ ID NO: 2540; WAN024F3O_at; Start 258; Stop 282
caaagatgccgtccgtaatatggct

SEQ ID NO: 191066 - DNA, 25 bp, Artificial
  probe
  misc_feature (1)..(25): SEQ ID NO: 2540; WAN024F3O_at; Start 91; Stop 115
gttcactctttttcaaacagatcag

SEQ ID NO: 191067 - DNA, 25 bp, Artificial
  probe
  misc_feature (1)..(25): SEQ ID NO: 2540; WAN024F3O_at; Start 104; Stop 128
caaacagatcagtgtctgataccct

SEQ ID NO: 191068 - DNA, 25 bp, Artificial
  probe
  misc_feature (1)..(25): SEQ ID NO: 2540; WAN024F3O_at; Start 178; Stop 202
gaactcacagcagatatctatctct

SEQ ID NO: 191069 - DNA, 25 bp, Artificial
  probe
  misc_feature (1)..(25): SEQ ID NO: 2540; WAN024F3O_at; Start 245; Stop 269
tccagaaagctgtcaaagatgccgt

SEQ ID NO: 191070 - DNA, 25 bp, Artificial
  probe
  misc_feature (1)..(25): SEQ ID NO: 2540; WAN024F3O_at; Start 221; Stop 245
aagttcctaaggtagcggttgctat

SEQ ID NO: 191071 - DNA, 25 bp, Artificial
  probe
  misc_feature (1)..(25): SEQ ID NO: 2540; WAN024F3O_at; Start 199; Stop 223
ctctaccttgagtacggagtaaaag

SEQ ID NO: 191072 - DNA, 25 bp, Artificial
  probe
  misc_feature (1)..(25): SEQ ID NO: 2540; WAN024F3O_at; Start 2; Stop 26
tgggaattgaagaacaacttggcga

SEQ ID NO: 191073 - DNA, 25 bp, Artificial
  probe
  misc_feature (1)..(25): SEQ ID NO: 2540; WAN024F3O_at; Start 289; Stop 313
gaactcgctgctatcaatattcacg

SEQ ID NO: 191074 - DNA, 25 bp, Artificial
  probe
  misc_feature (1)..(25): SEQ ID NO: 2540; WAN024F3O_at; Start 192; Stop 216
tatctatctctaccttgagtacgga

SEQ ID NO: 191075 - DNA, 25 bp, Artificial
  probe
  misc_feature (1)..(25): SEQ ID NO: 2540; WAN024F3O_at; Start 346; Stop 370
ccagaattgaaagatctatttgacg

SEQ ID NO: 191076 - DNA, 25 bp, Artificial
  probe
  misc_feature (1)..(25): SEQ ID NO: 2540; WAN024F3O_at; Start 306; Stop 330
tattcacgttgcaggtatcgtccca

SEQ ID NO: 191077 - DNA, 25 bp, Artificial
  probe
  misc_feature (1)..(25): SEQ ID NO: 2540; WAN024F3O_at; Start 297; Stop 321
tgctatcaatattcacgttgcaggt

SEQ ID NO: 191078 - DNA, 25 bp, Artificial
  probe
  misc_feature (1)..(25): SEQ ID NO: 5966; WAN024F3P_at; Start 187; Stop 211
tctggtgttcaagctaaaaaggaag

SEQ ID NO: 191079 - DNA, 25 bp, Artificial
  probe
  misc_feature (1)..(25): SEQ ID NO: 5966; WAN024F3P_at; Start 288; Stop 312
ccttcgcttgggagtctttgaaatc

SEQ ID NO: 191080 - DNA, 25 bp, Artificial
  probe
  misc_feature (1)..(25): SEQ ID NO: 5966; WAN024F3P_at; Start 13; Stop 37
tcctcaatgactagtccactattag

SEQ ID NO: 191081 - DNA, 25 bp, Artificial
  probe
  misc_feature (1)..(25): SEQ ID NO: 5966; WAN024F3P_at; Start 107; Stop 131
aaactgcttgtcgtttcgcctatac

SEQ ID NO: 191082 - DNA, 25 bp, Artificial
  probe
  misc_feature (1)..(25): SEQ ID NO: 5966; WAN024F3P_at; Start 410; Stop 434
tgctcagccagtttgtaacagaaga

SEQ ID NO: 191083 - DNA, 25 bp, Artificial
  probe
  misc_feature (1)..(25): SEQ ID NO: 5966; WAN024F3P_at; Start 250; Stop 274
tggaccattgaacgcttaacgctcg

SEQ ID NO: 191084 - DNA, 25 bp, Artificial
  probe
  misc_feature (1)..(25): SEQ ID NO: 5966; WAN024F3P_at; Start 47; Stop 71
gccaactccgtaaatgcgcttttca

SEQ ID NO: 191085 - DNA, 25 bp, Artificial
  probe
  misc_feature (1)..(25): SEQ ID NO: 5966; WAN024F3P_at; Start 396; Stop 420
ttttatcaatggactgctcagccag

SEQ ID NO: 191086 - DNA, 25 bp, Artificial
  probe
  misc_feature (1)..(25): SEQ ID NO: 5966; WAN024F3P_at; Start 336; Stop 360
ggttgctgttaatgaagctatcgag

SEQ ID NO: 191087 - DNA, 25 bp, Artificial
  probe
  misc_feature (1)..(25): SEQ ID NO: 5966; WAN024F3P_at; Start 371; Stop 395
acttctccgatcaaaaatctgcccg

SEQ ID NO: 191088 - DNA, 25 bp, Artificial
  probe
  misc_feature (1)..(25): SEQ ID NO: 5966; WAN024F3P_at; Start 94; Stop 118
ggtacggatgtcgaaactgcttgtc

SEQ ID NO: 191089 - DNA, 25 bp, Artificial
  probe
  misc_feature (1)..(25): SEQ ID NO: 5966; WAN024F3P_at; Start 150; Stop 174
ggatgtacaacttccagcctttttg

SEQ ID NO: 191090 - DNA, 25 bp, Artificial
  probe
  misc_feature (1)..(25): SEQ ID NO: 5966; WAN024F3P_at; Start 239; Stop 263
taaaagcaggttggaccattgaacg

SEQ ID NO: 191091 - DNA, 25 bp, Artificial
  probe
  misc_feature (1)..(25): SEQ ID NO: 5966; WAN024F3P_at; Start 71; Stop 95
aagctctcatgagccttgagttcgg

SEQ ID NO: 191092 - DNA, 25 bp, Artificial
  probe
  misc_feature (1)..(25): SEQ ID NO: 5966; WAN024F3P_at; Start 119; Stop 143
gtttcgcctatactcatgatcgtga

SEQ ID NO: 191093 - DNA, 25 bp, Artificial
  probe
  misc_feature (1)..(25): SEQ ID NO: 5966; WAN024F3P_at; Start 418; Stop 442
cagtttgtaacagaagaacaataac

SEQ ID NO: 191094 - DNA, 25 bp, Artificial
  probe
  misc_feature (1)..(25): SEQ ID NO: 5966; WAN024F3P_at; Start 357; Stop 381
cgagcttgcaaaggacttctccgat

SEQ ID NO: 191095 - DNA, 25 bp, Artificial
  probe
  misc_feature (1)..(25): SEQ ID NO: 5966; WAN024F3P_at; Start 77; Stop 101
tcatgagccttgagttcggtacgga

SEQ ID NO: 191096 - DNA, 25 bp, Artificial
  probe
  misc_feature (1)..(25): SEQ ID NO: 5966; WAN024F3P_at; Start 40; Stop 64
tctagacgccaactccgtaaatgcg

SEQ ID NO: 191097 - DNA, 25 bp, Artificial
  probe
  misc_feature (1)..(25): SEQ ID NO: 5966; WAN024F3P_at; Start 162; Stop 186
tccagcctttttgatagacctcgtt

SEQ ID NO: 191098 - DNA, 25 bp, Artificial
  probe
  misc_feature (1)..(25): SEQ ID NO: 5966; WAN024F3P_at; Start 385; Stop 409
aaatctgcccgttttatcaatggac

SEQ ID NO: 191099 - DNA, 25 bp, Artificial
  probe
  misc_feature (1)..(25): SEQ ID NO: 5966; WAN024F3P_at; Start 293; Stop 317
gcttgggagtctttgaaatcacttc

SEQ ID NO: 191100 - DNA, 25 bp, Artificial
  probe
  misc_feature (1)..(25): SEQ ID NO: 5966; WAN024F3P_at; Start 306; Stop 330
tgaaatcacttcatttgacactcct

SEQ ID NO: 191101 - DNA, 25 bp, Artificial
  probe
  misc_feature (1)..(25): SEQ ID NO: 5966; WAN024F3P_at; Start 214; Stop 238
ctagataagcaaatcactcagcatt

SEQ ID NO: 191102 - DNA, 25 bp, Artificial
  probe
  misc_feature (1)..(25): SEQ ID NO: 5966; WAN024F3P_at; Start 351; Stop 375
agctatcgagcttgcaaaggacttc

SEQ ID NO: 191103 - DNA, 25 bp, Artificial
  probe
  misc_feature (1)..(25): SEQ ID NO: 5966; WAN024F3P_at; Start 32; Stop 56
tattagaatctagacgccaactccg

SEQ ID NO: 191104 - DNA, 25 bp, Artificial
  probe
  misc_feature (1)..(25): SEQ ID NO: 5966; WAN024F3P_at; Start 259; Stop 283
gaacgcttaacgctcgtggagagaa

SEQ ID NO: 191105 - DNA, 25 bp, Artificial
  probe
  misc_feature (1)..(25): SEQ ID NO: 5966; WAN024F3P_at; Start 83; Stop 107
gccttgagttcggtacggatgtcga

SEQ ID NO: 191106 - DNA, 25 bp, Artificial
  probe
  misc_feature (1)..(25): SEQ ID NO: 5966; WAN024F3P_at; Start 266; Stop 290
taacgctcgtggagagaaacctcct

SEQ ID NO: 191107 - DNA, 25 bp, Artificial
  probe
  misc_feature (1)..(25): SEQ ID NO: 5966; WAN024F3P_at; Start 176; Stop 200
tagacctcgtttctggtgttcaagc

SEQ ID NO: 191108 - DNA, 25 bp, Artificial
  probe
  misc_feature (1)..(25): SEQ ID NO: 5966; WAN024F3P_at; Start 59; Stop 83
aatgcgcttttcaagctctcatgag

SEQ ID NO: 191109 - DNA, 25 bp, Artificial
  probe
  misc_feature (1)..(25): SEQ ID NO: 5966; WAN024F3P_at; Start 228; Stop 252
cactcagcatttaaaagcaggttgg

SEQ ID NO: 191110 - DNA, 25 bp, Artificial
  probe
  misc_feature (1)..(25): SEQ ID NO: 5966; WAN024F3P_at; Start 24; Stop 48
tagtccactattagaatctagacgc

SEQ ID NO: 191111 - DNA, 25 bp, Artificial
  probe
  misc_feature (1)..(25): SEQ ID NO: 5966; WAN024F3P_at; Start 277; Stop 301
gagagaaacctccttcgcttgggag

SEQ ID NO: 191112 - DNA, 25 bp, Artificial
  probe
  misc_feature (1)..(25): SEQ ID NO: 1947; WAN024F3Q_at; Start 202; Stop 226
gatggtatgcttacagcctggacac

SEQ ID NO: 191113 - DNA, 25 bp, Artificial
  probe
  misc_feature (1)..(25): SEQ ID NO: 1947; WAN024F3Q_at; Start 103; Stop 127
tcccatatcaatcgtcaaagccaag

SEQ ID NO: 191114 - DNA, 25 bp, Artificial
  probe
  misc_feature (1)..(25): SEQ ID NO: 1947; WAN024F3Q_at; Start 118; Stop 142
caaagccaagcgttcttgggcagaa

SEQ ID NO: 191115 - DNA, 25 bp, Artificial
  probe
  misc_feature (1)..(25): SEQ ID NO: 1947; WAN024F3Q_at; Start 167; Stop 191
ggacagatacgttcacttcccagat

SEQ ID NO: 191116 - DNA, 25 bp, Artificial
  probe
  misc_feature (1)..(25): SEQ ID NO: 1947; WAN024F3Q_at; Start 26; Stop 50
gatgccagtttcttttggtaaccag

SEQ ID NO: 191117 - DNA, 25 bp, Artificial
  probe
  misc_feature (1)..(25): SEQ ID NO: 1947; WAN024F3Q_at; Start 175; Stop 199
acgttcacttcccagatccttctga

SEQ ID NO: 191118 - DNA, 25 bp, Artificial
  probe
  misc_feature (1)..(25): SEQ ID NO: 1947; WAN024F3Q_at; Start 210; Stop 234
gcttacagcctggacactgggaaaa

SEQ ID NO: 191119 - DNA, 25 bp, Artificial
  probe
  misc_feature (1)..(25): SEQ ID NO: 1947; WAN024F3Q_at; Start 187; Stop 211
cagatccttctgatagatggtatgc

SEQ ID NO: 191120 - DNA, 25 bp, Artificial
  probe
  misc_feature (1)..(25): SEQ ID NO: 1947; WAN024F3Q_at; Start 63; Stop 87
gatccttgctttcaatccctgtaaa

SEQ ID NO: 191121 - DNA, 25 bp, Artificial
  probe
  misc_feature (1)..(25): SEQ ID NO: 1947; WAN024F3Q_at; Start 112; Stop 136
aatcgtcaaagccaagcgttcttgg

SEQ ID NO: 191122 - DNA, 25 bp, Artificial
  probe
  misc_feature (1)..(25): SEQ ID NO: 1947; WAN024F3Q_at; Start 198; Stop 222
gatagatggtatgcttacagcctgg

SEQ ID NO: 191123 - DNA, 25 bp, Artificial
  probe
  misc_feature (1)..(25): SEQ ID NO: 1947; WAN024F3Q_at; Start 147; Stop 171
gaaaggtatagctacagtgcggaca

SEQ ID NO: 191124 - DNA, 25 bp, Artificial
  probe
  misc_feature (1)..(25): SEQ ID NO: 1947; WAN024F3Q_at; Start 97; Stop 121
gaaggttcccatatcaatcgtcaaa

SEQ ID NO: 191125 - DNA, 25 bp, Artificial
  probe
  misc_feature (1)..(25): SEQ ID NO: 1947; WAN024F3Q_at; Start 192; Stop 216
ccttctgatagatggtatgcttaca

SEQ ID NO: 191126 - DNA, 25 bp, Artificial
  probe
  misc_feature (1)..(25): SEQ ID NO: 1947; WAN024F3Q_at; Start 207; Stop 231
tatgcttacagcctggacactggga

SEQ ID NO: 191127 - DNA, 25 bp, Artificial
  probe
  misc_feature (1)..(25): SEQ ID NO: 1947; WAN024F3Q_at; Start 47; Stop 71
ccagggaaatgcaagggatccttgc

SEQ ID NO: 191128 - DNA, 25 bp, Artificial
  probe
  misc_feature (1)..(25): SEQ ID NO: 1947; WAN024F3Q_at; Start 144; Stop 168
tacgaaaggtatagctacagtgcgg

SEQ ID NO: 191129 - DNA, 25 bp, Artificial
  probe
  misc_feature (1)..(25): SEQ ID NO: 1947; WAN024F3Q_at; Start 131; Stop 155
tcttgggcagaaatacgaaaggtat

SEQ ID NO: 191130 - DNA, 25 bp, Artificial
  probe
  misc_feature (1)..(25): SEQ ID NO: 1947; WAN024F3Q_at; Start 75; Stop 99
caatccctgtaaacaattctttgaa

SEQ ID NO: 191131 - DNA, 25 bp, Artificial
  probe
  misc_feature (1)..(25): SEQ ID NO: 1947; WAN024F3Q_at; Start 88; Stop 112
caattctttgaaggttcccatatca

SEQ ID NO: 191132 - DNA, 25 bp, Artificial
  probe
  misc_feature (1)..(25): SEQ ID NO: 1947; WAN024F3Q_at; Start 44; Stop 68
taaccagggaaatgcaagggatcct

SEQ ID NO: 191133 - DNA, 25 bp, Artificial
  probe
  misc_feature (1)..(25): SEQ ID NO: 1947; WAN024F3Q_at; Start 157; Stop 181
gctacagtgcggacagatacgttca

SEQ ID NO: 191134 - DNA, 25 bp, Artificial
  probe
  misc_feature (1)..(25): SEQ ID NO: 1947; WAN024F3Q_at; Start 57; Stop 81
gcaagggatccttgctttcaatccc

SEQ ID NO: 191135 - DNA, 25 bp, Artificial
  probe
  misc_feature (1)..(25): SEQ ID NO: 1947; WAN024F3Q_at; Start 213; Stop 237
tacagcctggacactgggaaaataa

SEQ ID NO: 191136 - DNA, 25 bp, Artificial
  probe
  misc_feature (1)..(25): SEQ ID NO: 1947; WAN024F3Q_at; Start 3; Stop 27
gcagacctgttttttcacgcataga

SEQ ID NO: 191137 - DNA, 25 bp, Artificial
  probe
  misc_feature (1)..(25): SEQ ID NO: 1947; WAN024F3Q_at; Start 37; Stop 61
cttttggtaaccagggaaatgcaag

SEQ ID NO: 191138 - DNA, 25 bp, Artificial
  probe
  misc_feature (1)..(25): SEQ ID NO: 1947; WAN024F3Q_at; Start 153; Stop 177
tatagctacagtgcggacagatacg

SEQ ID NO: 191139 - DNA, 25 bp, Artificial
  probe
  misc_feature (1)..(25): SEQ ID NO: 1947; WAN024F3Q_at; Start 8; Stop 32
cctgttttttcacgcatagatgcca

SEQ ID NO: 191140 - DNA, 25 bp, Artificial
  probe
  misc_feature (1)..(25): SEQ ID NO: 1947; WAN024F3Q_at; Start 108; Stop 132
tatcaatcgtcaaagccaagcgttc

SEQ ID NO: 191141 - DNA, 25 bp, Artificial
  probe
  misc_feature (1)..(25): SEQ ID NO: 1947; WAN024F3Q_at; Start 128; Stop 152
cgttcttgggcagaaatacgaaagg

SEQ ID NO: 191142 - DNA, 25 bp, Artificial
  probe
  misc_feature (1)..(25): SEQ ID NO: 1947; WAN024F3Q_at; Start 123; Stop 147
ccaagcgttcttgggcagaaatacg

SEQ ID NO: 191143 - DNA, 25 bp, Artificial
  probe
  misc_feature (1)..(25): SEQ ID NO: 1947; WAN024F3Q_at; Start 69; Stop 93
tgctttcaatccctgtaaacaattc

SEQ ID NO: 191144 - DNA, 25 bp, Artificial
  probe
  misc_feature (1)..(25): SEQ ID NO: 1947; WAN024F3Q_at; Start 161; Stop 185
cagtgcggacagatacgttcacttc

SEQ ID NO: 191145 - DNA, 25 bp, Artificial
  probe
  misc_feature (1)..(25): SEQ ID NO: 1947; WAN024F3Q_at; Start 14; Stop 38
ttttcacgcatagatgccagtttct

SEQ ID NO: 191146 - DNA, 25 bp, Artificial
  probe
  misc_feature (1)..(25): SEQ ID NO: 5035; WAN024F3R_at; Start 22; Stop 46
gacaccaggataagcacctgctgta

SEQ ID NO: 191147 - DNA, 25 bp, Artificial
  probe
  misc_feature (1)..(25): SEQ ID NO: 5035; WAN024F3R_at; Start 232; Stop 256
tgcaccatcatcacgaaaagaacgg

SEQ ID NO: 191148 - DNA, 25 bp, Artificial
  probe
  misc_feature (1)..(25): SEQ ID NO: 5035; WAN024F3R_at; Start 160; Stop 184
caaactcttgcctttttggatacca

SEQ ID NO: 191149 - DNA, 25 bp, Artificial
  probe
  misc_feature (1)..(25): SEQ ID NO: 5035; WAN024F3R_at; Start 32; Stop 56
taagcacctgctgtattgataaagg

SEQ ID NO: 191150 - DNA, 25 bp, Artificial
  probe
  misc_feature (1)..(25): SEQ ID NO: 5035; WAN024F3R_at; Start 94; Stop 118
caaccgcagtgcctttcggtagcct

SEQ ID NO: 191151 - DNA, 25 bp, Artificial
  probe
  misc_feature (1)..(25): SEQ ID NO: 5035; WAN024F3R_at; Start 80; Stop 104
tcagcctgtttcatcaaccgcagtg

SEQ ID NO: 191152 - DNA, 25 bp, Artificial
  probe
  misc_feature (1)..(25): SEQ ID NO: 5035; WAN024F3R_at; Start 173; Stop 197
ttttggataccaaccactgttacag

SEQ ID NO: 191153 - DNA, 25 bp, Artificial
  probe
  misc_feature (1)..(25): SEQ ID NO: 5035; WAN024F3R_at; Start 178; Stop 202
gataccaaccactgttacagcttgg

SEQ ID NO: 191154 - DNA, 25 bp, Artificial
  probe
  misc_feature (1)..(25): SEQ ID NO: 5035; WAN024F3R_at; Start 119; Stop 143
tctggatgtggttggccaaaattcc

SEQ ID NO: 191155 - DNA, 25 bp, Artificial
  probe
  misc_feature (1)..(25): SEQ ID NO: 5035; WAN024F3R_at; Start 186; Stop 210
ccactgttacagcttggtctccaag

SEQ ID NO: 191156 - DNA, 25 bp, Artificial
  probe
  misc_feature (1)..(25): SEQ ID NO: 5035; WAN024F3R_at; Start 190; Stop 214
tgttacagcttggtctccaagccaa

SEQ ID NO: 191157 - DNA, 25 bp, Artificial
  probe
  misc_feature (1)..(25): SEQ ID NO: 5035; WAN024F3R_at; Start 209; Stop 233
agccaaccaataccaccaacaactg

SEQ ID NO: 191158 - DNA, 25 bp, Artificial
  probe
  misc_feature (1)..(25): SEQ ID NO: 5035; WAN024F3R_at; Start 55; Stop 79
ggtcacaactggacggccaaatttc

SEQ ID NO: 191159 - DNA, 25 bp, Artificial
  probe
  misc_feature (1)..(25): SEQ ID NO: 5035; WAN024F3R_at; Start 19; Stop 43
tccgacaccaggataagcacctgct

SEQ ID NO: 191160 - DNA, 25 bp, Artificial
  probe
  misc_feature (1)..(25): SEQ ID NO: 5035; WAN024F3R_at; Start 38; Stop 62
cctgctgtattgataaaggtcacaa

SEQ ID NO: 191161 - DNA, 25 bp, Artificial
  probe
  misc_feature (1)..(25): SEQ ID NO: 5035; WAN024F3R_at; Start 225; Stop 249
caacaactgcaccatcatcacgaaa

SEQ ID NO: 191162 - DNA, 25 bp, Artificial
  probe
  misc_feature (1)..(25): SEQ ID NO: 5035; WAN024F3R_at; Start 51; Stop 75
taaaggtcacaactggacggccaaa

SEQ ID NO: 191163 - DNA, 25 bp, Artificial
  probe
  misc_feature (1)..(25): SEQ ID NO: 5035; WAN024F3R_at; Start 64; Stop 88
tggacggccaaatttctcagcctgt

SEQ ID NO: 191164 - DNA, 25 bp, Artificial
  probe
  misc_feature (1)..(25): SEQ ID NO: 5035; WAN024F3R_at; Start 242; Stop 266
tcacgaaaagaacggtcaccatgta

SEQ ID NO: 191165 - DNA, 25 bp, Artificial
  probe
  misc_feature (1)..(25): SEQ ID NO: 5035; WAN024F3R_at; Start 88; Stop 112
tttcatcaaccgcagtgcctttcgg

SEQ ID NO: 191166 - DNA, 25 bp, Artificial
  probe
  misc_feature (1)..(25): SEQ ID NO: 5035; WAN024F3R_at; Start 239; Stop 263
tcatcacgaaaagaacggtcaccat

SEQ ID NO: 191167 - DNA, 25 bp, Artificial
  probe
  misc_feature (1)..(25): SEQ ID NO: 5035; WAN024F3R_at; Start 138; Stop 162
aattccgtttgaggttgtcttgcaa

SEQ ID NO: 191168 - DNA, 25 bp, Artificial
  probe
  misc_feature (1)..(25): SEQ ID NO: 5035; WAN024F3R_at; Start 125; Stop 149
tgtggttggccaaaattccgtttga

SEQ ID NO: 191169 - DNA, 25 bp, Artificial
  probe
  misc_feature (1)..(25): SEQ ID NO: 5035; WAN024F3R_at; Start 68; Stop 92
cggccaaatttctcagcctgtttca

SEQ ID NO: 191170 - DNA, 25 bp, Artificial
  probe
  misc_feature (1)..(25): SEQ ID NO: 5035; WAN024F3R_at; Start 48; Stop 72
tgataaaggtcacaactggacggcc

SEQ ID NO: 191171 - DNA, 25 bp, Artificial
  probe
  misc_feature (1)..(25): SEQ ID NO: 5035; WAN024F3R_at; Start 168; Stop 192
tgcctttttggataccaaccactgt

SEQ ID NO: 191172 - DNA, 25 bp, Artificial
  probe
  misc_feature (1)..(25): SEQ ID NO: 5035; WAN024F3R_at; Start 13; Stop 37
ttccgctccgacaccaggataagca

SEQ ID NO: 191173 - DNA, 25 bp, Artificial
  probe
  misc_feature (1)..(25): SEQ ID NO: 5035; WAN024F3R_at; Start 113; Stop 137
tagccttctggatgtggttggccaa

SEQ ID NO: 191174 - DNA, 25 bp, Artificial
  probe
  misc_feature (1)..(25): SEQ ID NO: 5035; WAN024F3R_at; Start 100; Stop 124
cagtgcctttcggtagccttctgga

SEQ ID NO: 191175 - DNA, 25 bp, Artificial
  probe
  misc_feature (1)..(25): SEQ ID NO: 5035; WAN024F3R_at; Start 147; Stop 171
tgaggttgtcttgcaaactcttgcc

SEQ ID NO: 191176 - DNA, 25 bp, Artificial
  probe
  misc_feature (1)..(25): SEQ ID NO: 5035; WAN024F3R_at; Start 197; Stop 221
gcttggtctccaagccaaccaatac

SEQ ID NO: 191177 - DNA, 25 bp, Artificial
  probe
  misc_feature (1)..(25): SEQ ID NO: 5035; WAN024F3R_at; Start 105; Stop 129
cctttcggtagccttctggatgtgg

SEQ ID NO: 191178 - DNA, 25 bp, Artificial
  probe
  misc_feature (1)..(25): SEQ ID NO: 5035; WAN024F3R_at; Start 60; Stop 84
caactggacggccaaatttctcagc

SEQ ID NO: 191179 - DNA, 25 bp, Artificial
  probe
  misc_feature (1)..(25): SEQ ID NO: 5035; WAN024F3R_at; Start 1; Stop 25
ttgaccacgttcttccgctccgaca

SEQ ID NO: 191180 - DNA, 25 bp, Artificial
  probe
  misc_feature (1)..(25): SEQ ID NO: 5481; WAN024F3S_at; Start 120; Stop 144
taggctagcaatcgtatctggtaag

SEQ ID NO: 191181 - DNA, 25 bp, Artificial
  probe
  misc_feature (1)..(25): SEQ ID NO: 5481; WAN024F3S_at; Start 237; Stop 261
ttcaatcacacgacgcccagcaaaa

SEQ ID NO: 191182 - DNA, 25 bp, Artificial
  probe
  misc_feature (1)..(25): SEQ ID NO: 5481; WAN024F3S_at; Start 325; Stop 349
ccaccagtcgttggatctgtcaaaa

SEQ ID NO: 191183 - DNA, 25 bp, Artificial
  probe
  misc_feature (1)..(25): SEQ ID NO: 5481; WAN024F3S_at; Start 186; Stop 210
taggaattctgccttttggaaatcc

SEQ ID NO: 191184 - DNA, 25 bp, Artificial
  probe
  misc_feature (1)..(25): SEQ ID NO: 5481; WAN024F3S_at; Start 305; Stop 329
tagcgaaagaagctgtcacaccacc

SEQ ID NO: 191185 - DNA, 25 bp, Artificial
  probe
  misc_feature (1)..(25): SEQ ID NO: 5481; WAN024F3S_at; Start 95; Stop 119
taggactccctccatgcaatctgac

SEQ ID NO: 191186 - DNA, 25 bp, Artificial
  probe
  misc_feature (1)..(25): SEQ ID NO: 5481; WAN024F3S_at; Start 216; Stop 240
caagctttcacgaaccgtattttca

SEQ ID NO: 191187 - DNA, 25 bp, Artificial
  probe
  misc_feature (1)..(25): SEQ ID NO: 5481; WAN024F3S_at; Start 298; Stop 322
ccttccatagcgaaagaagctgtca

SEQ ID NO: 191188 - DNA, 25 bp, Artificial
  probe
  misc_feature (1)..(25): SEQ ID NO: 5481; WAN024F3S_at; Start 15; Stop 39
caaaaatgcctgtcgcaaagtccaa

SEQ ID NO: 191189 - DNA, 25 bp, Artificial
  probe
  misc_feature (1)..(25): SEQ ID NO: 5481; WAN024F3S_at; Start 141; Stop 165
taagtctcttcttttgacaatagca

SEQ ID NO: 191190 - DNA, 25 bp, Artificial
  probe
  misc_feature (1)..(25): SEQ ID NO: 5481; WAN024F3S_at; Start 29; Stop 53
gcaaagtccaaggttgtcaagcgac

SEQ ID NO: 191191 - DNA, 25 bp, Artificial
  probe
  misc_feature (1)..(25): SEQ ID NO: 5481; WAN024F3S_at; Start 155; Stop 179
tgacaatagcatccacaaagccatg

SEQ ID NO: 191192 - DNA, 25 bp, Artificial
  probe
  misc_feature (1)..(25): SEQ ID NO: 5481; WAN024F3S_at; Start 254; Stop 278
cagcaaaaccaaccaagctctgtgg

SEQ ID NO: 191193 - DNA, 25 bp, Artificial
  probe
  misc_feature (1)..(25): SEQ ID NO: 5481; WAN024F3S_at; Start 168; Stop 192
cacaaagccatgttctaataggaat

SEQ ID NO: 191194 - DNA, 25 bp, Artificial
  probe
  misc_feature (1)..(25): SEQ ID NO: 5481; WAN024F3S_at; Start 80; Stop 104
tttgcaatattcatctaggactccc

SEQ ID NO: 191195 - DNA, 25 bp, Artificial
  probe
  misc_feature (1)..(25): SEQ ID NO: 5481; WAN024F3S_at; Start 287; Stop 311
gaatgatatcgccttccatagcgaa

SEQ ID NO: 191196 - DNA, 25 bp, Artificial
  probe
  misc_feature (1)..(25): SEQ ID NO: 5481; WAN024F3S_at; Start 105; Stop 129
tccatgcaatctgactaggctagca

SEQ ID NO: 191197 - DNA, 25 bp, Artificial
  probe
  misc_feature (1)..(25): SEQ ID NO: 5481; WAN024F3S_at; Start 204; Stop 228
gaaatcctcaggcaagctttcacga

SEQ ID NO: 191198 - DNA, 25 bp, Artificial
  probe
  misc_feature (1)..(25): SEQ ID NO: 5481; WAN024F3S_at; Start 232; Stop 256
gtattttcaatcacacgacgcccag

SEQ ID NO: 191199 - DNA, 25 bp, Artificial
  probe
  misc_feature (1)..(25): SEQ ID NO: 5481; WAN024F3S_at; Start 116; Stop 140
tgactaggctagcaatcgtatctgg

SEQ ID NO: 191200 - DNA, 25 bp, Artificial
  probe
  misc_feature (1)..(25): SEQ ID NO: 5481; WAN024F3S_at; Start 313; Stop 337
gaagctgtcacaccaccagtcgttg

SEQ ID NO: 191201 - DNA, 25 bp, Artificial
  probe
  misc_feature (1)..(25): SEQ ID NO: 5481; WAN024F3S_at; Start 128; Stop 152
caatcgtatctggtaagtctcttct

SEQ ID NO: 191202 - DNA, 25 bp, Artificial
  probe
  misc_feature (1)..(25): SEQ ID NO: 5481; WAN024F3S_at; Start 37; Stop 61
caaggttgtcaagcgactctgctca

SEQ ID NO: 191203 - DNA, 25 bp, Artificial
  probe
  misc_feature (1)..(25): SEQ ID NO: 5481; WAN024F3S_at; Start 174; Stop 198
gccatgttctaataggaattctgcc

SEQ ID NO: 191204 - DNA, 25 bp, Artificial
  probe
  misc_feature (1)..(25): SEQ ID NO: 5481; WAN024F3S_at; Start 336; Stop 360
tggatctgtcaaaatggtcaggtaa

SEQ ID NO: 191205 - DNA, 25 bp, Artificial
  probe
  misc_feature (1)..(25): SEQ ID NO: 5481; WAN024F3S_at; Start 54; Stop 78
tctgctcacgcgcttctctgactat

SEQ ID NO: 191206 - DNA, 25 bp, Artificial
  probe
  misc_feature (1)..(25): SEQ ID NO: 5481; WAN024F3S_at; Start 211; Stop 235
tcaggcaagctttcacgaaccgtat

SEQ ID NO: 191207 - DNA, 25 bp, Artificial
  probe
  misc_feature (1)..(25): SEQ ID NO: 5481; WAN024F3S_at; Start 62; Stop 86
cgcgcttctctgactatttttgcaa

SEQ ID NO: 191208 - DNA, 25 bp, Artificial
  probe
  misc_feature (1)..(25): SEQ ID NO: 5481; WAN024F3S_at; Start 43; Stop 67
tgtcaagcgactctgctcacgcgct

SEQ ID NO: 191209 - DNA, 25 bp, Artificial
  probe
  misc_feature (1)..(25): SEQ ID NO: 5481; WAN024F3S_at; Start 197; Stop 221
ccttttggaaatcctcaggcaagct

SEQ ID NO: 191210 - DNA, 25 bp, Artificial
  probe
  misc_feature (1)..(25): SEQ ID NO: 5481; WAN024F3S_at; Start 6; Stop 30
taaattcatcaaaaatgcctgtcgc

SEQ ID NO: 191211 - DNA, 25 bp, Artificial
  probe
  misc_feature (1)..(25): SEQ ID NO: 5481; WAN024F3S_at; Start 276; Stop 300
tggttcagccagaatgatatcgcct

SEQ ID NO: 191212 - DNA, 25 bp, Artificial
  probe
  misc_feature (1)..(25): SEQ ID NO: 5481; WAN024F3S_at; Start 265; Stop 289
accaagctctgtggttcagccagaa

SEQ ID NO: 191213 - DNA, 25 bp, Artificial
  probe
  misc_feature (1)..(25): SEQ ID NO: 5481; WAN024F3S_at; Start 21; Stop 45
tgcctgtcgcaaagtccaaggttgt

SEQ ID NO: 191214 - DNA, 25 bp, Artificial
  probe
  misc_feature (1)..(25): SEQ ID NO: 1220; WAN024F3T_at; Start 520; Stop 544
gaaggctttgcttccattttatgga

SEQ ID NO: 191215 - DNA, 25 bp, Artificial
  probe
  misc_feature (1)..(25): SEQ ID NO: 1220; WAN024F3T_at; Start 402; Stop 426
gaaagttcctattatcgccattatt

SEQ ID NO: 191216 - DNA, 25 bp, Artificial
  probe
  misc_feature (1)..(25): SEQ ID NO: 1220; WAN024F3T_at; Start 318; Stop 342
agcaggtgcttatcctggtgtcgga

SEQ ID NO: 191217 - DNA, 25 bp, Artificial
  probe
  misc_feature (1)..(25): SEQ ID NO: 1220; WAN024F3T_at; Start 237; Stop 261
tccagaaggctaccgaaaggcactg

SEQ ID NO: 191218 - DNA, 25 bp, Artificial
  probe
  misc_feature (1)..(25): SEQ ID NO: 1220; WAN024F3T_at; Start 483; Stop 507
gatgctggaaaattctatctatgcc

SEQ ID NO: 191219 - DNA, 25 bp, Artificial
  probe
  misc_feature (1)..(25): SEQ ID NO: 1220; WAN024F3T_at; Start 10; Stop 34
gcaaaaatagtcagagaagcgcgtg

SEQ ID NO: 191220 - DNA, 25 bp, Artificial
  probe
  misc_feature (1)..(25): SEQ ID NO: 1220; WAN024F3T_at; Start 732; Stop 756
gctggaagaacgctatcaacgattt

SEQ ID NO: 191221 - DNA, 25 bp, Artificial
  probe
  misc_feature (1)..(25): SEQ ID NO: 1220; WAN024F3T_at; Start 252; Stop 276
aaaggcactgcggttgatgaaacag

SEQ ID NO: 191222 - DNA, 25 bp, Artificial
  probe
  misc_feature (1)..(25): SEQ ID NO: 1220; WAN024F3T_at; Start 450; Stop 474
ggctctggctctagctgtcgcggac

SEQ ID NO: 191223 - DNA, 25 bp, Artificial
  probe
  misc_feature (1)..(25): SEQ ID NO: 1220; WAN024F3T_at; Start 87; Stop 111
tatccaattacatggtgaccgttct

SEQ ID NO: 191224 - DNA, 25 bp, Artificial
  probe
  misc_feature (1)..(25): SEQ ID NO: 1220; WAN024F3T_at; Start 219; Stop 243
gaattttggccaaccacatccagaa

SEQ ID NO: 191225 - DNA, 25 bp, Artificial
  probe
  misc_feature (1)..(25): SEQ ID NO: 1220; WAN024F3T_at; Start 682; Stop 706
gaactccaaacggagctggctagac

SEQ ID NO: 191226 - DNA, 25 bp, Artificial
  probe
  misc_feature (1)..(25): SEQ ID NO: 1220; WAN024F3T_at; Start 597; Stop 621
tgaactgttagaaatggacgtggtg

SEQ ID NO: 191227 - DNA, 25 bp, Artificial
  probe
  misc_feature (1)..(25): SEQ ID NO: 1220; WAN024F3T_at; Start 536; Stop 560
ttttatggaaggacggtactcgcgc

SEQ ID NO: 191228 - DNA, 25 bp, Artificial
  probe
  misc_feature (1)..(25): SEQ ID NO: 1220; WAN024F3T_at; Start 665; Stop 689
ttaagagtgtcaaaaaagaactcca

SEQ ID NO: 191229 - DNA, 25 bp, Artificial
  probe
  misc_feature (1)..(25): SEQ ID NO: 1220; WAN024F3T_at; Start 614; Stop 638
acgtggtggataaggtgatttctga

SEQ ID NO: 191230 - DNA, 25 bp, Artificial
  probe
  misc_feature (1)..(25): SEQ ID NO: 1220; WAN024F3T_at; Start 373; Stop 397
gctcgcaatctcatggaaatgagtg

SEQ ID NO: 191231 - DNA, 25 bp, Artificial
  probe
  misc_feature (1)..(25): SEQ ID NO: 1220; WAN024F3T_at; Start 579; Stop 603
gatgaaaatcacttcgcatgaactg

SEQ ID NO: 191232 - DNA, 25 bp, Artificial
  probe
  misc_feature (1)..(25): SEQ ID NO: 1220; WAN024F3T_at; Start 64; Stop 88
gcgacaggcatttttgatgaattta

SEQ ID NO: 191233 - DNA, 25 bp, Artificial
  probe
  misc_feature (1)..(25): SEQ ID NO: 1220; WAN024F3T_at; Start 141; Stop 165
tattggttggcttggagaccaagct

SEQ ID NO: 191234 - DNA, 25 bp, Artificial
  probe
  misc_feature (1)..(25): SEQ ID NO: 1220; WAN024F3T_at; Start 33; Stop 57
tgagcagagtcgcttgacaaccttg

SEQ ID NO: 191235 - DNA, 25 bp, Artificial
  probe
  misc_feature (1)..(25): SEQ ID NO: 1220; WAN024F3T_at; Start 105; Stop 129
ccgttcttttcgtgatgatggtgca

SEQ ID NO: 191236 - DNA, 25 bp, Artificial
  probe
  misc_feature (1)..(25): SEQ ID NO: 1220; WAN024F3T_at; Start 282; Stop 306
gaaatttggccgtccagttgtgacc

SEQ ID NO: 191237 - DNA, 25 bp, Artificial
  probe
  misc_feature (1)..(25): SEQ ID NO: 1220; WAN024F3T_at; Start 500; Stop 524
tctatgccattctcagtccagaagg

SEQ ID NO: 191238 - DNA, 25 bp, Artificial
  probe
  misc_feature (1)..(25): SEQ ID NO: 1220; WAN024F3T_at; Start 48; Stop 72
gacaaccttggactttgcgacaggc

SEQ ID NO: 191239 - DNA, 25 bp, Artificial
  probe
  misc_feature (1)..(25): SEQ ID NO: 1220; WAN024F3T_at; Start 388; Stop 412
gaaatgagtgacctgaaagttccta

SEQ ID NO: 191240 - DNA, 25 bp, Artificial
  probe
  misc_feature (1)..(25): SEQ ID NO: 1220; WAN024F3T_at; Start 563; Stop 587
tggaagcagcagaactgatgaaaat

SEQ ID NO: 191241 - DNA, 25 bp, Artificial
  probe
  misc_feature (1)..(25): SEQ ID NO: 1220; WAN024F3T_at; Start 470; Stop 494
cggaccgtgtctggatgctggaaaa

SEQ ID NO: 191242 - DNA, 25 bp, Artificial
  probe
  misc_feature (1)..(25): SEQ ID NO: 1220; WAN024F3T_at; Start 269; Stop 293
tgaaacaggctgagaaatttggccg

SEQ ID NO: 191243 - DNA, 25 bp, Artificial
  probe
  misc_feature (1)..(25): SEQ ID NO: 1220; WAN024F3T_at; Start 423; Stop 447
tattatcggtgaaggtggttcaggc

SEQ ID NO: 191244 - DNA, 25 bp, Artificial
  probe
  misc_feature (1)..(25): SEQ ID NO: 1220; WAN024F3T_at; Start 178; Stop 202
ggtatccaaaaaggcaagagtttgc

SEQ ID NO: 191245 - DNA, 25 bp, Artificial
  probe
  misc_feature (1)..(25): SEQ ID NO: 1220; WAN024F3T_at; Start 698; Stop 722
tggctagactttcacaaaaaccgct

SEQ ID NO: 191246 - DNA, 25 bp, Artificial
  probe
  misc_feature (1)..(25): SEQ ID NO: 1220; WAN024F3T_at; Start 712; Stop 736
caaaaaccgctagaagagttgctgg

SEQ ID NO: 191247 - DNA, 25 bp, Artificial
  probe
  misc_feature (1)..(25): SEQ ID NO: 1220; WAN024F3T_at; Start 199; Stop 223
ttgcaagacaacctcaaacggaatt

SEQ ID NO: 191248 - DNA, 25 bp, Artificial
  probe
  misc_feature (1)..(25): SEQ ID NO: 2504; WAN024F3U_at; Start 363; Stop 387
taaaggtcagactgtggctcttggg

SEQ ID NO: 191249 - DNA, 25 bp, Artificial
  probe
  misc_feature (1)..(25): SEQ ID NO: 2504; WAN024F3U_at; Start 73; Stop 97
gctaagccagaggttccagatgaat

SEQ ID NO: 191250 - DNA, 25 bp, Artificial
  probe
  misc_feature (1)..(25): SEQ ID NO: 2504; WAN024F3U_at; Start 668; Stop 692
ttctggctgaaccacagagcttggt

SEQ ID NO: 191251 - DNA, 25 bp, Artificial
  probe
  misc_feature (1)..(25): SEQ ID NO: 2504; WAN024F3U_at; Start 836; Stop 860
tagtcagattgcatggagggagtcc

SEQ ID NO: 191252 - DNA, 25 bp, Artificial
  probe
  misc_feature (1)..(25): SEQ ID NO: 2504; WAN024F3U_at; Start 459; Stop 483
gtatgcgactgtcgaaaaattgcca

SEQ ID NO: 191253 - DNA, 25 bp, Artificial
  probe
  misc_feature (1)..(25): SEQ ID NO: 2504; WAN024F3U_at; Start 59; Stop 83
gggaaaaacctcaagctaagccaga

SEQ ID NO: 191254 - DNA, 25 bp, Artificial
  probe
  misc_feature (1)..(25): SEQ ID NO: 2504; WAN024F3U_at; Start 264; Stop 288
caaggatcccttgcatttccctggt

SEQ ID NO: 191255 - DNA, 25 bp, Artificial
  probe
  misc_feature (1)..(25): SEQ ID NO: 2504; WAN024F3U_at; Start 742; Stop 766
cctgaggatttccaaaaggcagaat

SEQ ID NO: 191256 - DNA, 25 bp, Artificial
  probe
  misc_feature (1)..(25): SEQ ID NO: 2504; WAN024F3U_at; Start 778; Stop 802
catggctttgtggatgctattgtca

SEQ ID NO: 191257 - DNA, 25 bp, Artificial
  probe
  misc_feature (1)..(25): SEQ ID NO: 2504; WAN024F3U_at; Start 806; Stop 830
gaagagacttaccagatacgattgc

SEQ ID NO: 191258 - DNA, 25 bp, Artificial
  probe
  misc_feature (1)..(25): SEQ ID NO: 2504; WAN024F3U_at; Start 492; Stop 516
attcacagcctctggtggagcccgt

SEQ ID NO: 191259 - DNA, 25 bp, Artificial
  probe
  misc_feature (1)..(25): SEQ ID NO: 2504; WAN024F3U_at; Start 608; Stop 632
ttttgacagatccaacgactggtgg

SEQ ID NO: 191260 - DNA, 25 bp, Artificial
  probe
  misc_feature (1)..(25): SEQ ID NO: 2504; WAN024F3U_at; Start 651; Stop 675
tatggaaggcgatatcattctggct

SEQ ID NO: 191261 - DNA, 25 bp, Artificial
  probe
  misc_feature (1)..(25): SEQ ID NO: 2504; WAN024F3U_at; Start 723; Stop 747
tacggttcgtgaaagcttgcctgag

SEQ ID NO: 191262 - DNA, 25 bp, Artificial
  probe
  misc_feature (1)..(25): SEQ ID NO: 2504; WAN024F3U_at; Start 109; Stop 133
tgtccaggctgtaagcataccatct

SEQ ID NO: 191263 - DNA, 25 bp, Artificial
  probe
  misc_feature (1)..(25): SEQ ID NO: 2504; WAN024F3U_at; Start 35; Stop 59
gaatcaatcccaatcgttcggttag

SEQ ID NO: 191264 - DNA, 25 bp, Artificial
  probe
  misc_feature (1)..(25): SEQ ID NO: 2504; WAN024F3U_at; Start 581; Stop 605
caaatgctggtctcttttacctgac

SEQ ID NO: 191265 - DNA, 25 bp, Artificial
  probe
  misc_feature (1)..(25): SEQ ID NO: 2504; WAN024F3U_at; Start 153; Stop 177
tgaacgtatctgtccgcactgtagc

SEQ ID NO: 191266 - DNA, 25 bp, Artificial
  probe
  misc_feature (1)..(25): SEQ ID NO: 2504; WAN024F3U_at; Start 620; Stop 644
caacgactggtggtgtgacagcttc

SEQ ID NO: 191267 - DNA, 25 bp, Artificial
  probe
  misc_feature (1)..(25): SEQ ID NO: 2504; WAN024F3U_at; Start 305; Stop 329
catctatgcgtgaaaaaacaggtct

SEQ ID NO: 191268 - DNA, 25 bp, Artificial
  probe
  misc_feature (1)..(25): SEQ ID NO: 2504; WAN024F3U_at; Start 345; Stop 369
gacaggaactgctcttattaaaggt

SEQ ID NO: 191269 - DNA, 25 bp, Artificial
  probe
  misc_feature (1)..(25): SEQ ID NO: 2504; WAN024F3U_at; Start 187; Stop 211
cgtatttctgcccaagaacgcttgg

SEQ ID NO: 191270 - DNA, 25 bp, Artificial
  probe
  misc_feature (1)..(25): SEQ ID NO: 2504; WAN024F3U_at; Start 531; Stop 555
catgagtctcatgcagatggctaag

SEQ ID NO: 191271 - DNA, 25 bp, Artificial
  probe
  misc_feature (1)..(25): SEQ ID NO: 2504; WAN024F3U_at; Start 636; Stop 660
gacagcttctttcgctatggaaggc

SEQ ID NO: 191272 - DNA, 25 bp, Artificial
  probe
  misc_feature (1)..(25): SEQ ID NO: 2504; WAN024F3U_at; Start 408; Stop 432
catggcttctatgggtacggttgta

SEQ ID NO: 191273 - DNA, 25 bp, Artificial
  probe
  misc_feature (1)..(25): SEQ ID NO: 2504; WAN024F3U_at; Start 135; Stop 159
tcagaaggatctgggaagtgaacgt

SEQ ID NO: 191274 - DNA, 25 bp, Artificial
  probe
  misc_feature (1)..(25): SEQ ID NO: 2504; WAN024F3U_at; Start 818; Stop 842
cagatacgattgctagcctagtcag

SEQ ID NO: 191275 - DNA, 25 bp, Artificial
  probe
  misc_feature (1)..(25): SEQ ID NO: 2504; WAN024F3U_at; Start 94; Stop 118
gaattattttcccagtgtccaggct

SEQ ID NO: 191276 - DNA, 25 bp, Artificial
  probe
  misc_feature (1)..(25): SEQ ID NO: 2504; WAN024F3U_at; Start 329; Stop 353
tgcatgaagccgttgtgacaggaac

SEQ ID NO: 191277 - DNA, 25 bp, Artificial
  probe
  misc_feature (1)..(25): SEQ ID NO: 2504; WAN024F3U_at; Start 248; Stop 272
ttacagggattgaaagcaaggatcc

SEQ ID NO: 191278 - DNA, 25 bp, Artificial
  probe
  misc_feature (1)..(25): SEQ ID NO: 2504; WAN024F3U_at; Start 511; Stop 535
gcccgtatgcaggaaggaatcatga

SEQ ID NO: 191279 - DNA, 25 bp, Artificial
  probe
  misc_feature (1)..(25): SEQ ID NO: 2504; WAN024F3U_at; Start 211; Stop 235
gctttgacgattgatatgggaacct

SEQ ID NO: 191280 - DNA, 25 bp, Artificial
  probe
  misc_feature (1)..(25): SEQ ID NO: 2504; WAN024F3U_at; Start 283; Stop 307
cctggttaccaaaagaaactggcat

SEQ ID NO: 191281 - DNA, 25 bp, Artificial
  probe
  misc_feature (1)..(25): SEQ ID NO: 2504; WAN024F3U_at; Start 476; Stop 500
aattgccagttgtcctattcacagc

SEQ ID NO: 191282 - DNA, 25 bp, Artificial
  probe
  misc_feature (1)..(25): SEQ ID NO: 3041; WAN024F3V_at; Start 86; Stop 110
ttctcatagccaacaaactctgccg

SEQ ID NO: 191283 - DNA, 25 bp, Artificial
  probe
  misc_feature (1)..(25): SEQ ID NO: 3041; WAN024F3V_at; Start 18; Stop 42
gagtattcatctccatgaaatagaa

SEQ ID NO: 191284 - DNA, 25 bp, Artificial
  probe
  misc_feature (1)..(25): SEQ ID NO: 3041; WAN024F3V_at; Start 266; Stop 290
tcaatgtgccgagctggatagataa

SEQ ID NO: 191285 - DNA, 25 bp, Artificial
  probe
  misc_feature (1)..(25): SEQ ID NO: 3041; WAN024F3V_at; Start 192; Stop 216
tattcctttgaagagaacaatcccg

SEQ ID NO: 191286 - DNA, 25 bp, Artificial
  probe
  misc_feature (1)..(25): SEQ ID NO: 3041; WAN024F3V_at; Start 233; Stop 257
acatgtccatgctcatcacctagga

SEQ ID NO: 191287 - DNA, 25 bp, Artificial
  probe
  misc_feature (1)..(25): SEQ ID NO: 3041; WAN024F3V_at; Start 186; Stop 210
tttggttattcctttgaagagaaca

SEQ ID NO: 191288 - DNA, 25 bp, Artificial
  probe
  misc_feature (1)..(25): SEQ ID NO: 3041; WAN024F3V_at; Start 110; Stop 134
gctcgaacagcagcagcacctattt

SEQ ID NO: 191289 - DNA, 25 bp, Artificial
  probe
  misc_feature (1)..(25): SEQ ID NO: 3041; WAN024F3V_at; Start 245; Stop 269
tcatcacctaggatttgaacctcaa

SEQ ID NO: 191290 - DNA, 25 bp, Artificial
  probe
  misc_feature (1)..(25): SEQ ID NO: 3041; WAN024F3V_at; Start 261; Stop 285
gaacctcaatgtgccgagctggata

SEQ ID NO: 191291 - DNA, 25 bp, Artificial
  probe
  misc_feature (1)..(25): SEQ ID NO: 3041; WAN024F3V_at; Start 100; Stop 124
aaactctgccgctcgaacagcagca

SEQ ID NO: 191292 - DNA, 25 bp, Artificial
  probe
  misc_feature (1)..(25): SEQ ID NO: 3041; WAN024F3V_at; Start 142; Stop 166
cagcgtttttccgattgcaatcgag

SEQ ID NO: 191293 - DNA, 25 bp, Artificial
  probe
  misc_feature (1)..(25): SEQ ID NO: 3041; WAN024F3V_at; Start 223; Stop 247
caagtgaatcacatgtccatgctca

SEQ ID NO: 191294 - DNA, 25 bp, Artificial
  probe
  misc_feature (1)..(25): SEQ ID NO: 3041; WAN024F3V_at; Start 125; Stop 149
gcacctatttcatgacgcagcgttt

SEQ ID NO: 191295 - DNA, 25 bp, Artificial
  probe
  misc_feature (1)..(25): SEQ ID NO: 3041; WAN024F3V_at; Start 60; Stop 84
caagaagaaattcaatggttcctgc

SEQ ID NO: 191296 - DNA, 25 bp, Artificial
  probe
  misc_feature (1)..(25): SEQ ID NO: 3041; WAN024F3V_at; Start 198; Stop 222
tttgaagagaacaatcccgttcacc

SEQ ID NO: 191297 - DNA, 25 bp, Artificial
  probe
  misc_feature (1)..(25): SEQ ID NO: 3041; WAN024F3V_at; Start 76; Stop 100
ggttcctgcattctcatagccaaca

SEQ ID NO: 191298 - DNA, 25 bp, Artificial
  probe
  misc_feature (1)..(25): SEQ ID NO: 3041; WAN024F3V_at; Start 122; Stop 146
gcagcacctatttcatgacgcagcg

SEQ ID NO: 191299 - DNA, 25 bp, Artificial
  probe
  misc_feature (1)..(25): SEQ ID NO: 3041; WAN024F3V_at; Start 151; Stop 175
tccgattgcaatcgagggactttct

SEQ ID NO: 191300 - DNA, 25 bp, Artificial
  probe
  misc_feature (1)..(25): SEQ ID NO: 3041; WAN024F3V_at; Start 204; Stop 228
gagaacaatcccgttcacccaagtg

SEQ ID NO: 191301 - DNA, 25 bp, Artificial
  probe
  misc_feature (1)..(25): SEQ ID NO: 3041; WAN024F3V_at; Start 72; Stop 96
caatggttcctgcattctcatagcc

SEQ ID NO: 191302 - DNA, 25 bp, Artificial
  probe
  misc_feature (1)..(25): SEQ ID NO: 3041; WAN024F3V_at; Start 137; Stop 161
tgacgcagcgtttttccgattgcaa

SEQ ID NO: 191303 - DNA, 25 bp, Artificial
  probe
  misc_feature (1)..(25): SEQ ID NO: 3041; WAN024F3V_at; Start 12; Stop 36
gaacacgagtattcatctccatgaa

SEQ ID NO: 191304 - DNA, 25 bp, Artificial
  probe
  misc_feature (1)..(25): SEQ ID NO: 3041; WAN024F3V_at; Start 130; Stop 154
tatttcatgacgcagcgtttttccg

SEQ ID NO: 191305 - DNA, 25 bp, Artificial
  probe
  misc_feature (1)..(25): SEQ ID NO: 3041; WAN024F3V_at; Start 92; Stop 116
tagccaacaaactctgccgctcgaa

SEQ ID NO: 191306 - DNA, 25 bp, Artificial
  probe
  misc_feature (1)..(25): SEQ ID NO: 3041; WAN024F3V_at; Start 214; Stop 238
ccgttcacccaagtgaatcacatgt

SEQ ID NO: 191307 - DNA, 25 bp, Artificial
  probe
  misc_feature (1)..(25): SEQ ID NO: 3041; WAN024F3V_at; Start 240; Stop 264
catgctcatcacctaggatttgaac

SEQ ID NO: 191308 - DNA, 25 bp, Artificial
  probe
  misc_feature (1)..(25): SEQ ID NO: 3041; WAN024F3V_at; Start 114; Stop 138
gaacagcagcagcacctatttcatg

SEQ ID NO: 191309 - DNA, 25 bp, Artificial
  probe
  misc_feature (1)..(25): SEQ ID NO: 3041; WAN024F3V_at; Start 253; Stop 277
taggatttgaacctcaatgtgccga

SEQ ID NO: 191310 - DNA, 25 bp, Artificial
  probe
  misc_feature (1)..(25): SEQ ID NO: 3041; WAN024F3V_at; Start 48; Stop 72
tacttgcttcatcaagaagaaattc

SEQ ID NO: 191311 - DNA, 25 bp, Artificial
  probe
  misc_feature (1)..(25): SEQ ID NO: 3041; WAN024F3V_at; Start 206; Stop 230
gaacaatcccgttcacccaagtgaa

SEQ ID NO: 191312 - DNA, 25 bp, Artificial
  probe
  misc_feature (1)..(25): SEQ ID NO: 3041; WAN024F3V_at; Start 2; Stop 26
tgttctacctgaacacgagtattca

SEQ ID NO: 191313 - DNA, 25 bp, Artificial
  probe
  misc_feature (1)..(25): SEQ ID NO: 3041; WAN024F3V_at; Start 258; Stop 282
tttgaacctcaatgtgccgagctgg

SEQ ID NO: 191314 - DNA, 25 bp, Artificial
  probe
  misc_feature (1)..(25): SEQ ID NO: 3041; WAN024F3V_at; Start 158; Stop 182
gcaatcgagggactttcttccaaaa

SEQ ID NO: 191315 - DNA, 25 bp, Artificial
  probe
  misc_feature (1)..(25): SEQ ID NO: 3041; WAN024F3V_at; Start 154; Stop 178
gattgcaatcgagggactttcttcc

SEQ ID NO: 191316 - DNA, 25 bp, Artificial
  probe
  misc_feature (1)..(25): SEQ ID NO: 3081; WAN024F3W_at; Start 598; Stop 622
gaacgggttatctatccagctcggc

SEQ ID NO: 191317 - DNA, 25 bp, Artificial
  probe
  misc_feature (1)..(25): SEQ ID NO: 3081; WAN024F3W_at; Start 1041; Stop 1065
taactttgctccaagtccaggtaag

SEQ ID NO: 191318 - DNA, 25 bp, Artificial
  probe
  misc_feature (1)..(25): SEQ ID NO: 3081; WAN024F3W_at; Start 762; Stop 786
aataggtgctgctgctgttcgagcg

SEQ ID NO: 191319 - DNA, 25 bp, Artificial
  probe
  misc_feature (1)..(25): SEQ ID NO: 3081; WAN024F3W_at; Start 1012; Stop 1036
tgtcgtatcaatgcagaaaacccag

SEQ ID NO: 191320 - DNA, 25 bp, Artificial
  probe
  misc_feature (1)..(25): SEQ ID NO: 3081; WAN024F3W_at; Start 538; Stop 562
gcctttgaaactgcctctagtgagg

SEQ ID NO: 191321 - DNA, 25 bp, Artificial
  probe
  misc_feature (1)..(25): SEQ ID NO: 3081; WAN024F3W_at; Start 982; Stop 1006
gatattgtcctacgcggtcatgcca

SEQ ID NO: 191322 - DNA, 25 bp, Artificial
  probe
  misc_feature (1)..(25): SEQ ID NO: 3081; WAN024F3W_at; Start 734; Stop 758
ttgcaatcggaaaaacgctgcgtca

SEQ ID NO: 191323 - DNA, 25 bp, Artificial
  probe
  misc_feature (1)..(25): SEQ ID NO: 3081; WAN024F3W_at; Start 265; Stop 289
tccaaatttgcgaccatgtgtgaag

SEQ ID NO: 191324 - DNA, 25 bp, Artificial
  probe
  misc_feature (1)..(25): SEQ ID NO: 3081; WAN024F3W_at; Start 1186; Stop 1210
gaaaatcgttttgacgccttgatga

SEQ ID NO: 191325 - DNA, 25 bp, Artificial
  probe
  misc_feature (1)..(25): SEQ ID NO: 3081; WAN024F3W_at; Start 997; Stop 1021
ggtcatgccatcgagtgtcgtatca

SEQ ID NO: 191326 - DNA, 25 bp, Artificial
  probe
  misc_feature (1)..(25): SEQ ID NO: 3081; WAN024F3W_at; Start 362; Stop 386
ctcagatgattaaagcaggtgtgcc

SEQ ID NO: 191327 - DNA, 25 bp, Artificial
  probe
  misc_feature (1)..(25): SEQ ID NO: 3081; WAN024F3W_at; Start 23; Stop 47
ccaatcgtggtgaaattgcggttcg

SEQ ID NO: 191328 - DNA, 25 bp, Artificial
  probe
  misc_feature (1)..(25): SEQ ID NO: 3081; WAN024F3W_at; Start 465; Stop 489
tatgctcaaggcttcagcaggtgga

SEQ ID NO: 191329 - DNA, 25 bp, Artificial
  probe
  misc_feature (1)..(25): SEQ ID NO: 3081; WAN024F3W_at; Start 613; Stop 637
ccagctcggcacattgaggttcaaa

SEQ ID NO: 191330 - DNA, 25 bp, Artificial
  probe
  misc_feature (1)..(25): SEQ ID NO: 3081; WAN024F3W_at; Start 392; Stop 416
taccaggttcagatggagaagtgca

SEQ ID NO: 191331 - DNA, 25 bp, Artificial
  probe
  misc_feature (1)..(25): SEQ ID NO: 3081; WAN024F3W_at; Start 523; Stop 547
gatgacctcgtttctgcctttgaaa

SEQ ID NO: 191332 - DNA, 25 bp, Artificial
  probe
  misc_feature (1)..(25): SEQ ID NO: 3081; WAN024F3W_at; Start 719; Stop 743
aagaaagtccctcgattgcaatcgg

SEQ ID NO: 191333 - DNA, 25 bp, Artificial
  probe
  misc_feature (1)..(25): SEQ ID NO: 3081; WAN024F3W_at; Start 42; Stop 66
ggttcgtattatccgtgcggcacgt

SEQ ID NO: 191334 - DNA, 25 bp, Artificial
  probe
  misc_feature (1)..(25): SEQ ID NO: 3081; WAN024F3W_at; Start 98; Stop 122
caactgctgataaggaagctcttca

SEQ ID NO: 191335 - DNA, 25 bp, Artificial
  probe
  misc_feature (1)..(25): SEQ ID NO: 3081; WAN024F3W_at; Start 1071; Stop 1095
taatctctatctgccaagtggtgga

SEQ ID NO: 191336 - DNA, 25 bp, Artificial
  probe
  misc_feature (1)..(25): SEQ ID NO: 3081; WAN024F3W_at; Start 1247; Stop 1271
gagtgcagaccaatgcagatttcca

SEQ ID NO: 191337 - DNA, 25 bp, Artificial
  probe
  misc_feature (1)..(25): SEQ ID NO: 3081; WAN024F3W_at; Start 215; Stop 239
tgactgaggcagaagctattcaccc

SEQ ID NO: 191338 - DNA, 25 bp, Artificial
  probe
  misc_feature (1)..(25): SEQ ID NO: 3081; WAN024F3W_at; Start 296; Stop 320
gtatcaagtttatcggtccatctgg

SEQ ID NO: 191339 - DNA, 25 bp, Artificial
  probe
  misc_feature (1)..(25): SEQ ID NO: 3081; WAN024F3W_at; Start 749; Stop 773
cgctgcgtcatgaaataggtgctgc

SEQ ID NO: 191340 - DNA, 25 bp, Artificial
  probe
  misc_feature (1)..(25): SEQ ID NO: 3081; WAN024F3W_at; Start 150; Stop 174
tattggtcctggcaaggcaacagag

SEQ ID NO: 191341 - DNA, 25 bp, Artificial
  probe
  misc_feature (1)..(25): SEQ ID NO: 3081; WAN024F3W_at; Start 953; Stop 977
caggtcagcctttgtctgttaagca

SEQ ID NO: 191342 - DNA, 25 bp, Artificial
  probe
  misc_feature (1)..(25): SEQ ID NO: 3081; WAN024F3W_at; Start 1161; Stop 1185
gattgccaaaatcatagtacacggc

SEQ ID NO: 191343 - DNA, 25 bp, Artificial
  probe
  misc_feature (1)..(25): SEQ ID NO: 3081; WAN024F3W_at; Start 555; Stop 579
tagtgaggccaaggccaattatggc

SEQ ID NO: 191344 - DNA, 25 bp, Artificial
  probe
  misc_feature (1)..(25): SEQ ID NO: 3081; WAN024F3W_at; Start 795; Stop 819
tgttggctatgagaatgcaggaacc

SEQ ID NO: 191345 - DNA, 25 bp, Artificial
  probe
  misc_feature (1)..(25): SEQ ID NO: 3081; WAN024F3W_at; Start 937; Stop 961
cagatttgcattgcggcaggtcagc

SEQ ID NO: 191346 - DNA, 25 bp, Artificial
  probe
  misc_feature (1)..(25): SEQ ID NO: 3081; WAN024F3W_at; Start 579; Stop 603
caatggtgccatgtacatagaacgg

SEQ ID NO: 191347 - DNA, 25 bp, Artificial
  probe
  misc_feature (1)..(25): SEQ ID NO: 3081; WAN024F3W_at; Start 1209; Stop 1233
gaaaatgcaacgtgccctctatgaa

SEQ ID NO: 191348 - DNA, 25 bp, Artificial
  probe
  misc_feature (1)..(25): SEQ ID NO: 3081; WAN024F3W_at; Start 407; Stop 431
gagaagtgcataactctgaagaagc

SEQ ID NO: 191349 - DNA, 25 bp, Artificial
  probe
  misc_feature (1)..(25): SEQ ID NO: 3081; WAN024F3W_at; Start 634; Stop 658
caaatcctaggtgatgagcatggac

SEQ ID NO: 191350 - DNA, 25 bp, Artificial
  probe
  misc_feature (1)..(25): SEQ ID NO: 5376; WAN024F3X_at; Start 24; Stop 48
tctggtgtatttccgattggagatg

SEQ ID NO: 191351 - DNA, 25 bp, Artificial
  probe
  misc_feature (1)..(25): SEQ ID NO: 5376; WAN024F3X_at; Start 63; Stop 87
gttaccactactcgatttagtttca

SEQ ID NO: 191352 - DNA, 25 bp, Artificial
  probe
  misc_feature (1)..(25): SEQ ID NO: 5376; WAN024F3X_at; Start 67; Stop 91
ccactactcgatttagtttcattct

SEQ ID NO: 191353 - DNA, 25 bp, Artificial
  probe
  misc_feature (1)..(25): SEQ ID NO: 5376; WAN024F3X_at; Start 42; Stop 66
ggagatgttactccataacctgtta

SEQ ID NO: 191354 - DNA, 25 bp, Artificial
  probe
  misc_feature (1)..(25): SEQ ID NO: 5376; WAN024F3X_at; Start 31; Stop 55
tatttccgattggagatgttactcc

SEQ ID NO: 191355 - DNA, 25 bp, Artificial
  probe
  misc_feature (1)..(25): SEQ ID NO: 5376; WAN024F3X_at; Start 21; Stop 45
tcttctggtgtatttccgattggag

SEQ ID NO: 191356 - DNA, 25 bp, Artificial
  probe
  misc_feature (1)..(25): SEQ ID NO: 5376; WAN024F3X_at; Start 159; Stop 183
tcttggcctgctaaaaatactgtca

SEQ ID NO: 191357 - DNA, 25 bp, Artificial
  probe
  misc_feature (1)..(25): SEQ ID NO: 5376; WAN024F3X_at; Start 165; Stop 189
cctgctaaaaatactgtcaaatctg

SEQ ID NO: 191358 - DNA, 25 bp, Artificial
  probe
  misc_feature (1)..(25): SEQ ID NO: 5376; WAN024F3X_at; Start 80; Stop 104
tagtttcattcttttcacctctagc

SEQ ID NO: 191359 - DNA, 25 bp, Artificial
  probe
  misc_feature (1)..(25): SEQ ID NO: 5376; WAN024F3X_at; Start 208; Stop 232
caaattctttcatcggaatctgagc

SEQ ID NO: 191360 - DNA, 25 bp, Artificial
  probe
  misc_feature (1)..(25): SEQ ID NO: 5376; WAN024F3X_at; Start 45; Stop 69
gatgttactccataacctgttacca

SEQ ID NO: 191361 - DNA, 25 bp, Artificial
  probe
  misc_feature (1)..(25): SEQ ID NO: 5376; WAN024F3X_at; Start 3; Stop 27
gctaaactattccaaaattcttctg

SEQ ID NO: 191362 - DNA, 25 bp, Artificial
  probe
  misc_feature (1)..(25): SEQ ID NO: 5376; WAN024F3X_at; Start 37; Stop 61
cgattggagatgttactccataacc

SEQ ID NO: 191363 - DNA, 25 bp, Artificial
  probe
  misc_feature (1)..(25): SEQ ID NO: 5376; WAN024F3X_at; Start 114; Stop 138
atacttaagccaccatcaatggcaa

SEQ ID NO: 191364 - DNA, 25 bp, Artificial
  probe
  misc_feature (1)..(25): SEQ ID NO: 5376; WAN024F3X_at; Start 15; Stop 39
caaaattcttctggtgtatttccga

SEQ ID NO: 191365 - DNA, 25 bp, Artificial
  probe
  misc_feature (1)..(25): SEQ ID NO: 5376; WAN024F3X_at; Start 181; Stop 205
tcaaatctgcaacctgctctgcctg

SEQ ID NO: 191366 - DNA, 25 bp, Artificial
  probe
  misc_feature (1)..(25): SEQ ID NO: 5376; WAN024F3X_at; Start 89; Stop 113
tcttttcacctctagctttcgctac

SEQ ID NO: 191367 - DNA, 25 bp, Artificial
  probe
  misc_feature (1)..(25): SEQ ID NO: 5376; WAN024F3X_at; Start 109; Stop 133
gctacatacttaagccaccatcaat

SEQ ID NO: 191368 - DNA, 25 bp, Artificial
  probe
  misc_feature (1)..(25): SEQ ID NO: 5376; WAN024F3X_at; Start 173; Stop 197
aaatactgtcaaatctgcaacctgc

SEQ ID NO: 191369 - DNA, 25 bp, Artificial
  probe
  misc_feature (1)..(25): SEQ ID NO: 5376; WAN024F3X_at; Start 58; Stop 82
aacctgttaccactactcgatttag

SEQ ID NO: 191370 - DNA, 25 bp, Artificial
  probe
  misc_feature (1)..(25): SEQ ID NO: 5376; WAN024F3X_at; Start 99; Stop 123
tctagctttcgctacatacttaagc

SEQ ID NO: 191371 - DNA, 25 bp, Artificial
  probe
  misc_feature (1)..(25): SEQ ID NO: 5376; WAN024F3X_at; Start 213; Stop 237
tctttcatcggaatctgagctagtg

SEQ ID NO: 191372 - DNA, 25 bp, Artificial
  probe
  misc_feature (1)..(25): SEQ ID NO: 5376; WAN024F3X_at; Start 55; Stop 79
cataacctgttaccactactcgatt

SEQ ID NO: 191373 - DNA, 25 bp, Artificial
  probe
  misc_feature (1)..(25): SEQ ID NO: 5376; WAN024F3X_at; Start 147; Stop 171
ccagttagataatcttggcctgcta

SEQ ID NO: 191374 - DNA, 25 bp, Artificial
  probe
  misc_feature (1)..(25): SEQ ID NO: 5376; WAN024F3X_at; Start 196; Stop 220
gctctgcctgcccaaattctttcat

SEQ ID NO: 191375 - DNA, 25 bp, Artificial
  probe
  misc_feature (1)..(25): SEQ ID NO: 5376; WAN024F3X_at; Start 162; Stop 186
tggcctgctaaaaatactgtcaaat

SEQ ID NO: 191376 - DNA, 25 bp, Artificial
  probe
  misc_feature (1)..(25): SEQ ID NO: 5376; WAN024F3X_at; Start 150; Stop 174
gttagataatcttggcctgctaaaa

SEQ ID NO: 191377 - DNA, 25 bp, Artificial
  probe
  misc_feature (1)..(25): SEQ ID NO: 5376; WAN024F3X_at; Start 86; Stop 110
cattcttttcacctctagctttcgc

SEQ ID NO: 191378 - DNA, 25 bp, Artificial
  probe
  misc_feature (1)..(25): SEQ ID NO: 5376; WAN024F3X_at; Start 156; Stop 180
taatcttggcctgctaaaaatactg

SEQ ID NO: 191379 - DNA, 25 bp, Artificial
  probe
  misc_feature (1)..(25): SEQ ID NO: 5376; WAN024F3X_at; Start 177; Stop 201
actgtcaaatctgcaacctgctctg

SEQ ID NO: 191380 - DNA, 25 bp, Artificial
  probe
  misc_feature (1)..(25): SEQ ID NO: 5376; WAN024F3X_at; Start 103; Stop 127
gctttcgctacatacttaagccacc

SEQ ID NO: 191381 - DNA, 25 bp, Artificial
  probe
  misc_feature (1)..(25): SEQ ID NO: 5376; WAN024F3X_at; Start 201; Stop 225
gcctgcccaaattctttcatcggaa

SEQ ID NO: 191382 - DNA, 25 bp, Artificial
  probe
  misc_feature (1)..(25): SEQ ID NO: 5376; WAN024F3X_at; Start 170; Stop 194
taaaaatactgtcaaatctgcaacc

SEQ ID NO: 191383 - DNA, 25 bp, Artificial
  probe
  misc_feature (1)..(25): SEQ ID NO: 5376; WAN024F3X_at; Start 216; Stop 240
ttcatcggaatctgagctagtgtag

SEQ ID NO: 191384 - DNA, 25 bp, Artificial
  probe
  misc_feature (1)..(25): SEQ ID NO: 2381; WAN024F3Y_at; Start 181; Stop 205
ggtaaagcttttggaagagtcattg

SEQ ID NO: 191385 - DNA, 25 bp, Artificial
  probe
  misc_feature (1)..(25): SEQ ID NO: 2381; WAN024F3Y_at; Start 5; Stop 29
caaaaggtgtgatagaagcttctgt

SEQ ID NO: 191386 - DNA, 25 bp, Artificial
  probe
  misc_feature (1)..(25): SEQ ID NO: 2381; WAN024F3Y_at; Start 75; Stop 99
gaaggcatccccaatcgcatcattt

SEQ ID NO: 191387 - DNA, 25 bp, Artificial
  probe
  misc_feature (1)..(25): SEQ ID NO: 2381; WAN024F3Y_at; Start 2; Stop 26
tggcaaaaggtgtgatagaagcttc

SEQ ID NO: 191388 - DNA, 25 bp, Artificial
  probe
  misc_feature (1)..(25): SEQ ID NO: 2381; WAN024F3Y_at; Start 138; Stop 162
gtttgcaccaaaacgcatggctaca

SEQ ID NO: 191389 - DNA, 25 bp, Artificial
  probe
  misc_feature (1)..(25): SEQ ID NO: 2381; WAN024F3Y_at; Start 174; Stop 198
catatttggtaaagcttttggaaga

SEQ ID NO: 191390 - DNA, 25 bp, Artificial
  probe
  misc_feature (1)..(25): SEQ ID NO: 2381; WAN024F3Y_at; Start 124; Stop 148
gatttacaaacaccgtttgcaccaa

SEQ ID NO: 191391 - DNA, 25 bp, Artificial
  probe
  misc_feature (1)..(25): SEQ ID NO: 2381; WAN024F3Y_at; Start 57; Stop 81
accaaacttaatggagcggaaggca

SEQ ID NO: 191392 - DNA, 25 bp, Artificial
  probe
  misc_feature (1)..(25): SEQ ID NO: 2381; WAN024F3Y_at; Start 59; Stop 83
caaacttaatggagcggaaggcatc

SEQ ID NO: 191393 - DNA, 25 bp, Artificial
  probe
  misc_feature (1)..(25): SEQ ID NO: 2381; WAN024F3Y_at; Start 17; Stop 41
tagaagcttctgttcctcccaccaa

SEQ ID NO: 191394 - DNA, 25 bp, Artificial
  probe
  misc_feature (1)..(25): SEQ ID NO: 2381; WAN024F3Y_at; Start 119; Stop 143
tgatagatttacaaacaccgtttgc

SEQ ID NO: 191395 - DNA, 25 bp, Artificial
  probe
  misc_feature (1)..(25): SEQ ID NO: 2381; WAN024F3Y_at; Start 63; Stop 87
cttaatggagcggaaggcatcccca

SEQ ID NO: 191396 - DNA, 25 bp, Artificial
  probe
  misc_feature (1)..(25): SEQ ID NO: 2381; WAN024F3Y_at; Start 95; Stop 119
catttgatgaagagcaggcagtatt

SEQ ID NO: 191397 - DNA, 25 bp, Artificial
  probe
  misc_feature (1)..(25): SEQ ID NO: 2381; WAN024F3Y_at; Start 187; Stop 211
gcttttggaagagtcattggtttga

SEQ ID NO: 191398 - DNA, 25 bp, Artificial
  probe
  misc_feature (1)..(25): SEQ ID NO: 2381; WAN024F3Y_at; Start 200; Stop 224
tcattggtttgacacgtttgggtcc

SEQ ID NO: 191399 - DNA, 25 bp, Artificial
  probe
  misc_feature (1)..(25): SEQ ID NO: 2381; WAN024F3Y_at; Start 39; Stop 63
caacatcacatcttggaaaccaaac

SEQ ID NO: 191400 - DNA, 25 bp, Artificial
  probe
  misc_feature (1)..(25): SEQ ID NO: 2381; WAN024F3Y_at; Start 159; Stop 183
tacattcccagaagccatatttggt

SEQ ID NO: 191401 - DNA, 25 bp, Artificial
  probe
  misc_feature (1)..(25): SEQ ID NO: 2381; WAN024F3Y_at; Start 49; Stop 73
tcttggaaaccaaacttaatggagc

SEQ ID NO: 191402 - DNA, 25 bp, Artificial
  probe
  misc_feature (1)..(25): SEQ ID NO: 2381; WAN024F3Y_at; Start 92; Stop 116
catcatttgatgaagagcaggcagt

SEQ ID NO: 191403 - DNA, 25 bp, Artificial
  probe
  misc_feature (1)..(25): SEQ ID NO: 2381; WAN024F3Y_at; Start 82; Stop 106
tccccaatcgcatcatttgatgaag

SEQ ID NO: 191404 - DNA, 25 bp, Artificial
  probe
  misc_feature (1)..(25): SEQ ID NO: 2381; WAN024F3Y_at; Start 210; Stop 234
gacacgtttgggtcctttttcatga

SEQ ID NO: 191405 - DNA, 25 bp, Artificial
  probe
  misc_feature (1)..(25): SEQ ID NO: 2381; WAN024F3Y_at; Start 15; Stop 39
gatagaagcttctgttcctcccacc

SEQ ID NO: 191406 - DNA, 25 bp, Artificial
  probe
  misc_feature (1)..(25): SEQ ID NO: 2381; WAN024F3Y_at; Start 108; Stop 132
gcaggcagtattgatagatttacaa

SEQ ID NO: 191407 - DNA, 25 bp, Artificial
  probe
  misc_feature (1)..(25): SEQ ID NO: 2381; WAN024F3Y_at; Start 33; Stop 57
tcccaccaacatcacatcttggaaa

SEQ ID NO: 191408 - DNA, 25 bp, Artificial
  probe
  misc_feature (1)..(25): SEQ ID NO: 2381; WAN024F3Y_at; Start 52; Stop 76
tggaaaccaaacttaatggagcgga

SEQ ID NO: 191409 - DNA, 25 bp, Artificial
  probe
  misc_feature (1)..(25): SEQ ID NO: 2381; WAN024F3Y_at; Start 165; Stop 189
cccagaagccatatttggtaaagct

SEQ ID NO: 191410 - DNA, 25 bp, Artificial
  probe
  misc_feature (1)..(25): SEQ ID NO: 2381; WAN024F3Y_at; Start 12; Stop 36
tgtgatagaagcttctgttcctccc

SEQ ID NO: 191411 - DNA, 25 bp, Artificial
  probe
  misc_feature (1)..(25): SEQ ID NO: 2381; WAN024F3Y_at; Start 65; Stop 89
taatggagcggaaggcatccccaat

SEQ ID NO: 191412 - DNA, 25 bp, Artificial
  probe
  misc_feature (1)..(25): SEQ ID NO: 2381; WAN024F3Y_at; Start 102; Stop 126
tgaagagcaggcagtattgatagat

SEQ ID NO: 191413 - DNA, 25 bp, Artificial
  probe
  misc_feature (1)..(25): SEQ ID NO: 2381; WAN024F3Y_at; Start 146; Stop 170
caaaacgcatggctacattcccaga

SEQ ID NO: 191414 - DNA, 25 bp, Artificial
  probe
  misc_feature (1)..(25): SEQ ID NO: 2381; WAN024F3Y_at; Start 141; Stop 165
tgcaccaaaacgcatggctacattc

SEQ ID NO: 191415 - DNA, 25 bp, Artificial
  probe
  misc_feature (1)..(25): SEQ ID NO: 2381; WAN024F3Y_at; Start 149; Stop 173
aacgcatggctacattcccagaagc

SEQ ID NO: 191416 - DNA, 25 bp, Artificial
  probe
  misc_feature (1)..(25): SEQ ID NO: 2381; WAN024F3Y_at; Start 70; Stop 94
gagcggaaggcatccccaatcgcat

SEQ ID NO: 191417 - DNA, 25 bp, Artificial
  probe
  misc_feature (1)..(25): SEQ ID NO: 2381; WAN024F3Y_at; Start 78; Stop 102
ggcatccccaatcgcatcatttgat

SEQ ID NO: 191418 - DNA, 25 bp, Artificial
  probe
  misc_feature (1)..(25): SEQ ID NO: 857; WAN024F3Z_at; Start 330; Stop 354
ggtcaatctgactggtgcctttaat

SEQ ID NO: 191419 - DNA, 25 bp, Artificial
  probe
  misc_feature (1)..(25): SEQ ID NO: 857; WAN024F3Z_at; Start 544; Stop 568
gctccaggaatgattgagtctgata

SEQ ID NO: 191420 - DNA, 25 bp, Artificial
  probe
  misc_feature (1)..(25): SEQ ID NO: 857; WAN024F3Z_at; Start 659; Stop 683
tgacagtatttttagcaggccaaga

SEQ ID NO: 191421 - DNA, 25 bp, Artificial
  probe
  misc_feature (1)..(25): SEQ ID NO: 857; WAN024F3Z_at; Start 24; Stop 48
ctttattacaggttcgagtcgtgga

SEQ ID NO: 191422 - DNA, 25 bp, Artificial
  probe
  misc_feature (1)..(25): SEQ ID NO: 857; WAN024F3Z_at; Start 75; Stop 99
tgctcaagcaggagccaacattgtc

SEQ ID NO: 191423 - DNA, 25 bp, Artificial
  probe
  misc_feature (1)..(25): SEQ ID NO: 857; WAN024F3Z_at; Start 586; Stop 610
gataagattaaggaagctacactag

SEQ ID NO: 191424 - DNA, 25 bp, Artificial
  probe
  misc_feature (1)..(25): SEQ ID NO: 857; WAN024F3Z_at; Start 357; Stop 381
gacacaatcagtcttgaaaccgatg

SEQ ID NO: 191425 - DNA, 25 bp, Artificial
  probe
  misc_feature (1)..(25): SEQ ID NO: 857; WAN024F3Z_at; Start 527; Stop 551
tacgagtcaatgtgattgctccagg

SEQ ID NO: 191426 - DNA, 25 bp, Artificial
  probe
  misc_feature (1)..(25): SEQ ID NO: 857; WAN024F3Z_at; Start 247; Stop 271
gatgttttggtcaacaatgcaggga

SEQ ID NO: 191427 - DNA, 25 bp, Artificial
  probe
  misc_feature (1)..(25): SEQ ID NO: 857; WAN024F3Z_at; Start 601; Stop 625
gctacactagctcagattccgatga

SEQ ID NO: 191428 - DNA, 25 bp, Artificial
  probe
  misc_feature (1)..(25): SEQ ID NO: 857; WAN024F3Z_at; Start 159; Stop 183
caaggtggttcccatttcaggagat

SEQ ID NO: 191429 - DNA, 25 bp, Artificial
  probe
  misc_feature (1)..(25): SEQ ID NO: 857; WAN024F3Z_at; Start 315; Stop 339
tgaaaaagtgctcaaggtcaatctg

SEQ ID NO: 191430 - DNA, 25 bp, Artificial
  probe
  misc_feature (1)..(25): SEQ ID NO: 857; WAN024F3Z_at; Start 388; Stop 412
gccagagaaggtgctatcattaata

SEQ ID NO: 191431 - DNA, 25 bp, Artificial
  probe
  misc_feature (1)..(25): SEQ ID NO: 857; WAN024F3Z_at; Start 671; Stop 695
tagcaggccaagattatctaactgg

SEQ ID NO: 191432 - DNA, 25 bp, Artificial
  probe
  misc_feature (1)..(25): SEQ ID NO: 857; WAN024F3Z_at; Start 169; Stop 193
cccatttcaggagatgtatcagatt

SEQ ID NO: 191433 - DNA, 25 bp, Artificial
  probe
  misc_feature (1)..(25): SEQ ID NO: 857; WAN024F3Z_at; Start 62; Stop 86
tcgcccacaagtttgctcaagcagg

SEQ ID NO: 191434 - DNA, 25 bp, Artificial
  probe
  misc_feature (1)..(25): SEQ ID NO: 857; WAN024F3Z_at; Start 199; Stop 223
gacgctaagcgtatgattgatcaag

SEQ ID NO: 191435 - DNA, 25 bp, Artificial
  probe
  misc_feature (1)..(25): SEQ ID NO: 857; WAN024F3Z_at; Start 343; Stop 367
ggtgcctttaatatgacacaatcag

SEQ ID NO: 191436 - DNA, 25 bp, Artificial
  probe
  misc_feature (1)..(25): SEQ ID NO: 857; WAN024F3Z_at; Start 618; Stop 642
tccgatgaaagaatttgggcaggca

SEQ ID NO: 191437 - DNA, 25 bp, Artificial
  probe
  misc_feature (1)..(25): SEQ ID NO: 857; WAN024F3Z_at; Start 90; Stop 114
caacattgtcttaaacagtcgtggg

SEQ ID NO: 191438 - DNA, 25 bp, Artificial
  probe
  misc_feature (1)..(25): SEQ ID NO: 857; WAN024F3Z_at; Start 46; Stop 70
ggaattggtcttgccatcgcccaca

SEQ ID NO: 191439 - DNA, 25 bp, Artificial
  probe
  misc_feature (1)..(25): SEQ ID NO: 857; WAN024F3Z_at; Start 131; Stop 155
tgctcgctgagttttcaaactatgg

SEQ ID NO: 191440 - DNA, 25 bp, Artificial
  probe
  misc_feature (1)..(25): SEQ ID NO: 857; WAN024F3Z_at; Start 513; Stop 537
cgctagtcggaatatacgagtcaat

SEQ ID NO: 191441 - DNA, 25 bp, Artificial
  probe
  misc_feature (1)..(25): SEQ ID NO: 857; WAN024F3Z_at; Start 503; Stop 527
cacgcgaggtcgctagtcggaatat

SEQ ID NO: 191442 - DNA, 25 bp, Artificial
  probe
  misc_feature (1)..(25): SEQ ID NO: 857; WAN024F3Z_at; Start 215; Stop 239
ttgatcaagctattgcagaactggg

SEQ ID NO: 191443 - DNA, 25 bp, Artificial
  probe
  misc_feature (1)..(25): SEQ ID NO: 857; WAN024F3Z_at; Start 372; Stop 396
gaaaccgatgatgaaagccagagaa

SEQ ID NO: 191444 - DNA, 25 bp, Artificial
  probe
  misc_feature (1)..(25): SEQ ID NO: 857; WAN024F3Z_at; Start 487; Stop 511
tttaccaagtctgtggcacgcgagg

SEQ ID NO: 191445 - DNA, 25 bp, Artificial
  probe
  misc_feature (1)..(25): SEQ ID NO: 857; WAN024F3Z_at; Start 185; Stop 209
tatcagattttgcagacgctaagcg

SEQ ID NO: 191446 - DNA, 25 bp, Artificial
  probe
  misc_feature (1)..(25): SEQ ID NO: 857; WAN024F3Z_at; Start 300; Stop 324
gacagaagcagattttgaaaaagtg

SEQ ID NO: 191447 - DNA, 25 bp, Artificial
  probe
  misc_feature (1)..(25): SEQ ID NO: 857; WAN024F3Z_at; Start 641; Stop 665
cagagcaggttgcagatttgacagt

SEQ ID NO: 191448 - DNA, 25 bp, Artificial
  probe
  misc_feature (1)..(25): SEQ ID NO: 857; WAN024F3Z_at; Start 146; Stop 170
caaactatggtatcaaggtggttcc

SEQ ID NO: 191449 - DNA, 25 bp, Artificial
  probe
  misc_feature (1)..(25): SEQ ID NO: 857; WAN024F3Z_at; Start 457; Stop 481
tatgctgcttctaaggctggcttga

SEQ ID NO: 191450 - DNA, 25 bp, Artificial
  probe
  misc_feature (1)..(25): SEQ ID NO: 857; WAN024F3Z_at; Start 116; Stop 140
caatctcagaagaattgctcgctga

SEQ ID NO: 191451 - DNA, 25 bp, Artificial
  probe
  misc_feature (1)..(25): SEQ ID NO: 857; WAN024F3Z_at; Start 469; Stop 493
aaggctggcttgattggctttacca

SEQ ID NO: 191452 - DNA, 25 bp, Artificial
  probe
  misc_feature (1)..(25): SEQ ID NO: 854; WAN024F42_at; Start 144; Stop 168
gcataatgcggcagaaatccaagat

SEQ ID NO: 191453 - DNA, 25 bp, Artificial
  probe
  misc_feature (1)..(25): SEQ ID NO: 854; WAN024F42_at; Start 1041; Stop 1065
tatcgtcaccatcgaagctatgcgt

SEQ ID NO: 191454 - DNA, 25 bp, Artificial
  probe
  misc_feature (1)..(25): SEQ ID NO: 854; WAN024F42_at; Start 563; Stop 587
tgggaggaacagaagcttctatcac

SEQ ID NO: 191455 - DNA, 25 bp, Artificial
  probe
  misc_feature (1)..(25): SEQ ID NO: 854; WAN024F42_at; Start 78; Stop 102
tagtttagcaactgggaaaatcggc

SEQ ID NO: 191456 - DNA, 25 bp, Artificial
  probe
  misc_feature (1)..(25): SEQ ID NO: 854; WAN024F42_at; Start 517; Stop 541
gatgccttccgctccattaagtttg

SEQ ID NO: 191457 - DNA, 25 bp, Artificial
  probe
  misc_feature (1)..(25): SEQ ID NO: 854; WAN024F42_at; Start 349; Stop 373
gatcaggtacttcgccttcatgaaa

SEQ ID NO: 191458 - DNA, 25 bp, Artificial
  probe
  misc_feature (1)..(25): SEQ ID NO: 854; WAN024F42_at; Start 973; Stop 997
gaagtacctgtatcatcaaccaagt

SEQ ID NO: 191459 - DNA, 25 bp, Artificial
  probe
  misc_feature (1)..(25): SEQ ID NO: 854; WAN024F42_at; Start 721; Stop 745
gaaagtcttgaacacgctgaaaaac

SEQ ID NO: 191460 - DNA, 25 bp, Artificial
  probe
  misc_feature (1)..(25): SEQ ID NO: 854; WAN024F42_at; Start 276; Stop 300
tgtagaggctcttaatagggatcgt

SEQ ID NO: 191461 - DNA, 25 bp, Artificial
  probe
  misc_feature (1)..(25): SEQ ID NO: 854; WAN024F42_at; Start 739; Stop 763
gaaaaacgtggagctactatcctgg

SEQ ID NO: 191462 - DNA, 25 bp, Artificial
  probe
  misc_feature (1)..(25): SEQ ID NO: 854; WAN024F42_at; Start 756; Stop 780
tatcctggctgaagtggttggttac

SEQ ID NO: 191463 - DNA, 25 bp, Artificial
  probe
  misc_feature (1)..(25): SEQ ID NO: 854; WAN024F42_at; Start 43; Stop 67
tctccaatcggaaatacaccagaag

SEQ ID NO: 191464 - DNA, 25 bp, Artificial
  probe
  misc_feature (1)..(25): SEQ ID NO: 854; WAN024F42_at; Start 935; Stop 959
aaggagaaagtggtgctatcgtagc

SEQ ID NO: 191465 - DNA, 25 bp, Artificial
  probe
  misc_feature (1)..(25): SEQ ID NO: 854; WAN024F42_at; Start 778; Stop 802
tacggaaatacttgtgatgcctacc

SEQ ID NO: 191466 - DNA, 25 bp, Artificial
  probe
  misc_feature (1)..(25): SEQ ID NO: 854; WAN024F42_at; Start 703; Stop 727
tcagggatgttggttctagaaagtc

SEQ ID NO: 191467 - DNA, 25 bp, Artificial
  probe
  misc_feature (1)..(25): SEQ ID NO: 854; WAN024F42_at; Start 823; Stop 847
gaaggtcagggagctatcaaggcca

SEQ ID NO: 191468 - DNA, 25 bp, Artificial
  probe
  misc_feature (1)..(25): SEQ ID NO: 854; WAN024F42_at; Start 1068; Stop 1092
taactttgtaccaatgacagctggg

SEQ ID NO: 191469 - DNA, 25 bp, Artificial
  probe
  misc_feature (1)..(25): SEQ ID NO: 854; WAN024F42_at; Start 810; Stop 834
ttctccacatccagaaggtcaggga

SEQ ID NO: 191470 - DNA, 25 bp, Artificial
  probe
  misc_feature (1)..(25): SEQ ID NO: 854; WAN024F42_at; Start 1186; Stop 1210
tttggaggccacaatgcagttcttg

SEQ ID NO: 191471 - DNA, 25 bp, Artificial
  probe
  misc_feature (1)..(25): SEQ ID NO: 854; WAN024F42_at; Start 229; Stop 253
tatgccttgtatgcagcccaagagg

SEQ ID NO: 191472 - DNA, 25 bp, Artificial
  probe
  misc_feature (1)..(25): SEQ ID NO: 854; WAN024F42_at; Start 262; Stop 286
catgccaatcttgatgtagaggctc

SEQ ID NO: 191473 - DNA, 25 bp, Artificial
  probe
  misc_feature (1)..(25): SEQ ID NO: 854; WAN024F42_at; Start 843; Stop 867
ggccatcaaactagccttggaagaa

SEQ ID NO: 191474 - DNA, 25 bp, Artificial
  probe
  misc_feature (1)..(25): SEQ ID NO: 854; WAN024F42_at; Start 865; Stop 889
gaagctgagatttctccagagcaag

SEQ ID NO: 191475 - DNA, 25 bp, Artificial
  probe
  misc_feature (1)..(25): SEQ ID NO: 854; WAN024F42_at; Start 1202; Stop 1226
cagttcttgctttcaaacgttggga

SEQ ID NO: 191476 - DNA, 25 bp, Artificial
  probe
  misc_feature (1)..(25): SEQ ID NO: 854; WAN024F42_at; Start 93; Stop 117
gaaaatcggcattggtggcattaca

SEQ ID NO: 191477 - DNA, 25 bp, Artificial
  probe
  misc_feature (1)..(25): SEQ ID NO: 854; WAN024F42_at; Start 950; Stop 974
ctatcgtagctgttcttggtaagga

SEQ ID NO: 191478 - DNA, 25 bp, Artificial
  probe
  misc_feature (1)..(25): SEQ ID NO: 854; WAN024F42_at; Start 910; Stop 934
ggaacgtcaactcctgccaatgaaa

SEQ ID NO: 191479 - DNA, 25 bp, Artificial
  probe
  misc_feature (1)..(25): SEQ ID NO: 854; WAN024F42_at; Start 419; Stop 443
caaatatggcttctgggaatgtagc

SEQ ID NO: 191480 - DNA, 25 bp, Artificial
  probe
  misc_feature (1)..(25): SEQ ID NO: 854; WAN024F42_at; Start 1023; Stop 1047
tgcgggtgcagtagaagctatcgtc

SEQ ID NO: 191481 - DNA, 25 bp, Artificial
  probe
  misc_feature (1)..(25): SEQ ID NO: 854; WAN024F42_at; Start 633; Stop 657
tacagaggatccaactcgtgcttcg

SEQ ID NO: 191482 - DNA, 25 bp, Artificial
  probe
  misc_feature (1)..(25): SEQ ID NO: 854; WAN024F42_at; Start 435; Stop 459
gaatgtagccatgcgttttggtgca

SEQ ID NO: 191483 - DNA, 25 bp, Artificial
  probe
  misc_feature (1)..(25): SEQ ID NO: 854; WAN024F42_at; Start 366; Stop 390
tcatgaaaaaggacccaaacgtgtc

SEQ ID NO: 191484 - DNA, 25 bp, Artificial
  probe
  misc_feature (1)..(25): SEQ ID NO: 854; WAN024F42_at; Start 1083; Stop 1107
gacagctgggacaagtgaagtatca

SEQ ID NO: 191485 - DNA, 25 bp, Artificial
  probe
  misc_feature (1)..(25): SEQ ID NO: 854; WAN024F42_at; Start 616; Stop 640
ttaacagctctctctactacagagg

SEQ ID NO: 191486 - DNA, 25 bp, Artificial
  probe
  misc_feature (1)..(25): SEQ ID NO: 4243; WAN024F43_at; Start 114; Stop 138
caatgaccaatacaagatctcggaa

SEQ ID NO: 191487 - DNA, 25 bp, Artificial
  probe
  misc_feature (1)..(25): SEQ ID NO: 4243; WAN024F43_at; Start 126; Stop 150
caagatctcggaaaatatgaccata

SEQ ID NO: 191488 - DNA, 25 bp, Artificial
  probe
  misc_feature (1)..(25): SEQ ID NO: 4243; WAN024F43_at; Start 37; Stop 61
tgtgtctattttcctactaaactta

SEQ ID NO: 191489 - DNA, 25 bp, Artificial
  probe
  misc_feature (1)..(25): SEQ ID NO: 4243; WAN024F43_at; Start 86; Stop 110
ggctttctctaaaagaaaatgagcg

SEQ ID NO: 191490 - DNA, 25 bp, Artificial
  probe
  misc_feature (1)..(25): SEQ ID NO: 4243; WAN024F43_at; Start 120; Stop 144
ccaatacaagatctcggaaaatatg

SEQ ID NO: 191491 - DNA, 25 bp, Artificial
  probe
  misc_feature (1)..(25): SEQ ID NO: 4243; WAN024F43_at; Start 73; Stop 97
tccataaaaaacaggctttctctaa

SEQ ID NO: 191492 - DNA, 25 bp, Artificial
  probe
  misc_feature (1)..(25): SEQ ID NO: 4243; WAN024F43_at; Start 188; Stop 212
taggctgcaaaaaacaagcccagtc

SEQ ID NO: 191493 - DNA, 25 bp, Artificial
  probe
  misc_feature (1)..(25): SEQ ID NO: 4243; WAN024F43_at; Start 207; Stop 231
ccagtccaatataaatcagaagtga

SEQ ID NO: 191494 - DNA, 25 bp, Artificial
  probe
  misc_feature (1)..(25): SEQ ID NO: 4243; WAN024F43_at; Start 131; Stop 155
tctcggaaaatatgaccataaaagg

SEQ ID NO: 191495 - DNA, 25 bp, Artificial
  probe
  misc_feature (1)..(25): SEQ ID NO: 4243; WAN024F43_at; Start 111; Stop 135
taacaatgaccaatacaagatctcg

SEQ ID NO: 191496 - DNA, 25 bp, Artificial
  probe
  misc_feature (1)..(25): SEQ ID NO: 4243; WAN024F43_at; Start 178; Stop 202
tgggacaagataggctgcaaaaaac

SEQ ID NO: 191497 - DNA, 25 bp, Artificial
  probe
  misc_feature (1)..(25): SEQ ID NO: 4243; WAN024F43_at; Start 100; Stop 124
gaaaatgagcgtaacaatgaccaat

SEQ ID NO: 191498 - DNA, 25 bp, Artificial
  probe
  misc_feature (1)..(25): SEQ ID NO: 4243; WAN024F43_at; Start 1; Stop 25
gtgtacatactcttattataccaaa

SEQ ID NO: 191499 - DNA, 25 bp, Artificial
  probe
  misc_feature (1)..(25): SEQ ID NO: 4243; WAN024F43_at; Start 68; Stop 92
taacatccataaaaaacaggctttc

SEQ ID NO: 191500 - DNA, 25 bp, Artificial
  probe
  misc_feature (1)..(25): SEQ ID NO: 4243; WAN024F43_at; Start 140; Stop 164
atatgaccataaaaggaaacttcct

SEQ ID NO: 191501 - DNA, 25 bp, Artificial
  probe
  misc_feature (1)..(25): SEQ ID NO: 4243; WAN024F43_at; Start 124; Stop 148
tacaagatctcggaaaatatgacca

SEQ ID NO: 191502 - DNA, 25 bp, Artificial
  probe
  misc_feature (1)..(25): SEQ ID NO: 4243; WAN024F43_at; Start 205; Stop 229
gcccagtccaatataaatcagaagt

SEQ ID NO: 191503 - DNA, 25 bp, Artificial
  probe
  misc_feature (1)..(25): SEQ ID NO: 4243; WAN024F43_at; Start 181; Stop 205
gacaagataggctgcaaaaaacaag

SEQ ID NO: 191504 - DNA, 25 bp, Artificial
  probe
  misc_feature (1)..(25): SEQ ID NO: 4243; WAN024F43_at; Start 186; Stop 210
gataggctgcaaaaaacaagcccag

SEQ ID NO: 191505 - DNA, 25 bp, Artificial
  probe
  misc_feature (1)..(25): SEQ ID NO: 4243; WAN024F43_at; Start 51; Stop 75
tactaaacttatcatcataacatcc

SEQ ID NO: 191506 - DNA, 25 bp, Artificial
  probe
  misc_feature (1)..(25): SEQ ID NO: 4243; WAN024F43_at; Start 191; Stop 215
gctgcaaaaaacaagcccagtccaa

SEQ ID NO: 191507 - DNA, 25 bp, Artificial
  probe
  misc_feature (1)..(25): SEQ ID NO: 4243; WAN024F43_at; Start 32; Stop 56
tcttttgtgtctattttcctactaa

SEQ ID NO: 191508 - DNA, 25 bp, Artificial
  probe
  misc_feature (1)..(25): SEQ ID NO: 4243; WAN024F43_at; Start 98; Stop 122
aagaaaatgagcgtaacaatgacca

SEQ ID NO: 191509 - DNA, 25 bp, Artificial
  probe
  misc_feature (1)..(25): SEQ ID NO: 4243; WAN024F43_at; Start 166; Stop 190
cttaaccgaatttgggacaagatag

SEQ ID NO: 191510 - DNA, 25 bp, Artificial
  probe
  misc_feature (1)..(25): SEQ ID NO: 4243; WAN024F43_at; Start 202; Stop 226
caagcccagtccaatataaatcaga

SEQ ID NO: 191511 - DNA, 25 bp, Artificial
  probe
  misc_feature (1)..(25): SEQ ID NO: 4243; WAN024F43_at; Start 193; Stop 217
tgcaaaaaacaagcccagtccaata

SEQ ID NO: 191512 - DNA, 25 bp, Artificial
  probe
  misc_feature (1)..(25): SEQ ID NO: 4243; WAN024F43_at; Start 117; Stop 141
tgaccaatacaagatctcggaaaat

SEQ ID NO: 191513 - DNA, 25 bp, Artificial
  probe
  misc_feature (1)..(25): SEQ ID NO: 4243; WAN024F43_at; Start 105; Stop 129
tgagcgtaacaatgaccaatacaag

SEQ ID NO: 191514 - DNA, 25 bp, Artificial
  probe
  misc_feature (1)..(25): SEQ ID NO: 4243; WAN024F43_at; Start 66; Stop 90
cataacatccataaaaaacaggctt

SEQ ID NO: 191515 - DNA, 25 bp, Artificial
  probe
  misc_feature (1)..(25): SEQ ID NO: 4243; WAN024F43_at; Start 63; Stop 87
catcataacatccataaaaaacagg

SEQ ID NO: 191516 - DNA, 25 bp, Artificial
  probe
  misc_feature (1)..(25): SEQ ID NO: 4243; WAN024F43_at; Start 173; Stop 197
gaatttgggacaagataggctgcaa

SEQ ID NO: 191517 - DNA, 25 bp, Artificial
  probe
  misc_feature (1)..(25): SEQ ID NO: 4243; WAN024F43_at; Start 71; Stop 95
catccataaaaaacaggctttctct

SEQ ID NO: 191518 - DNA, 25 bp, Artificial
  probe
  misc_feature (1)..(25): SEQ ID NO: 4243; WAN024F43_at; Start 171; Stop 195
ccgaatttgggacaagataggctgc

SEQ ID NO: 191519 - DNA, 25 bp, Artificial
  probe
  misc_feature (1)..(25): SEQ ID NO: 4243; WAN024F43_at; Start 183; Stop 207
caagataggctgcaaaaaacaagcc

SEQ ID NO: 191520 - DNA, 25 bp, Artificial
  probe
  misc_feature (1)..(25): SEQ ID NO: 2660; WAN024F44_at; Start 156; Stop 180
taaaaagtcaactaattcttgctgc

SEQ ID NO: 191521 - DNA, 25 bp, Artificial
  probe
  misc_feature (1)..(25): SEQ ID NO: 2660; WAN024F44_at; Start 215; Stop 239
caagaacagctcctaacaaattaat

SEQ ID NO: 191522 - DNA, 25 bp, Artificial
  probe
  misc_feature (1)..(25): SEQ ID NO: 2660; WAN024F44_at; Start 114; Stop 138
aatcagcaaatctagcccaaatagg

SEQ ID NO: 191523 - DNA, 25 bp, Artificial
  probe
  misc_feature (1)..(25): SEQ ID NO: 2660; WAN024F44_at; Start 143; Stop 167
agaaggatggcaataaaaagtcaac

SEQ ID NO: 191524 - DNA, 25 bp, Artificial
  probe
  misc_feature (1)..(25): SEQ ID NO: 2660; WAN024F44_at; Start 180; Stop 204
cagcgtatttttgatgaacaagtta

SEQ ID NO: 191525 - DNA, 25 bp, Artificial
  probe
  misc_feature (1)..(25): SEQ ID NO: 2660; WAN024F44_at; Start 203; Stop 227
tatctgacaaaacaagaacagctcc

SEQ ID NO: 191526 - DNA, 25 bp, Artificial
  probe
  misc_feature (1)..(25): SEQ ID NO: 2660; WAN024F44_at; Start 85; Stop 109
tcgcgcacgtattttttcaagggta

SEQ ID NO: 191527 - DNA, 25 bp, Artificial
  probe
  misc_feature (1)..(25): SEQ ID NO: 2660; WAN024F44_at; Start 191; Stop 215
tgatgaacaagttatctgacaaaac

SEQ ID NO: 191528 - DNA, 25 bp, Artificial
  probe
  misc_feature (1)..(25): SEQ ID NO: 2660; WAN024F44_at; Start 223; Stop 247
gctcctaacaaattaattaagagta

SEQ ID NO: 191529 - DNA, 25 bp, Artificial
  probe
  misc_feature (1)..(25): SEQ ID NO: 2660; WAN024F44_at; Start 127; Stop 151
agcccaaataggaaaaagaaggatg

SEQ ID NO: 191530 - DNA, 25 bp, Artificial
  probe
  misc_feature (1)..(25): SEQ ID NO: 2660; WAN024F44_at; Start 207; Stop 231
tgacaaaacaagaacagctcctaac

SEQ ID NO: 191531 - DNA, 25 bp, Artificial
  probe
  misc_feature (1)..(25): SEQ ID NO: 2660; WAN024F44_at; Start 36; Stop 60
taaaatagtcaccaacactgtcttt

SEQ ID NO: 191532 - DNA, 25 bp, Artificial
  probe
  misc_feature (1)..(25): SEQ ID NO: 2660; WAN024F44_at; Start 82; Stop 106
aaatcgcgcacgtattttttcaagg

SEQ ID NO: 191533 - DNA, 25 bp, Artificial
  probe
  misc_feature (1)..(25): SEQ ID NO: 2660; WAN024F44_at; Start 65; Stop 89
tgtccagcatagcaagaaaatcgcg

SEQ ID NO: 191534 - DNA, 25 bp, Artificial
  probe
  misc_feature (1)..(25): SEQ ID NO: 2660; WAN024F44_at; Start 163; Stop 187
tcaactaattcttgctgcagcgtat

SEQ ID NO: 191535 - DNA, 25 bp, Artificial
  probe
  misc_feature (1)..(25): SEQ ID NO: 2660; WAN024F44_at; Start 116; Stop 140
tcagcaaatctagcccaaataggaa

SEQ ID NO: 191536 - DNA, 25 bp, Artificial
  probe
  misc_feature (1)..(25): SEQ ID NO: 2660; WAN024F44_at; Start 56; Stop 80
tcttttttctgtccagcatagcaag

SEQ ID NO: 191537 - DNA, 25 bp, Artificial
  probe
  misc_feature (1)..(25): SEQ ID NO: 2660; WAN024F44_at; Start 49; Stop 73
aacactgtcttttttctgtccagca

SEQ ID NO: 191538 - DNA, 25 bp, Artificial
  probe
  misc_feature (1)..(25): SEQ ID NO: 2660; WAN024F44_at; Start 176; Stop 200
gctgcagcgtatttttgatgaacaa

SEQ ID NO: 191539 - DNA, 25 bp, Artificial
  probe
  misc_feature (1)..(25): SEQ ID NO: 2660; WAN024F44_at; Start 69; Stop 93
cagcatagcaagaaaatcgcgcacg

SEQ ID NO: 191540 - DNA, 25 bp, Artificial
  probe
  misc_feature (1)..(25): SEQ ID NO: 2660; WAN024F44_at; Start 71; Stop 95
gcatagcaagaaaatcgcgcacgta

SEQ ID NO: 191541 - DNA, 25 bp, Artificial
  probe
  misc_feature (1)..(25): SEQ ID NO: 2660; WAN024F44_at; Start 101; Stop 125
tcaagggtaaaaaaatcagcaaatc

SEQ ID NO: 191542 - DNA, 25 bp, Artificial
  probe
  misc_feature (1)..(25): SEQ ID NO: 2660; WAN024F44_at; Start 33; Stop 57
tgctaaaatagtcaccaacactgtc

SEQ ID NO: 191543 - DNA, 25 bp, Artificial
  probe
  misc_feature (1)..(25): SEQ ID NO: 2660; WAN024F44_at; Start 231; Stop 255
caaattaattaagagtaacatactg

SEQ ID NO: 191544 - DNA, 25 bp, Artificial
  probe
  misc_feature (1)..(25): SEQ ID NO: 2660; WAN024F44_at; Start 26; Stop 50
gaagtgttgctaaaatagtcaccaa

SEQ ID NO: 191545 - DNA, 25 bp, Artificial
  probe
  misc_feature (1)..(25): SEQ ID NO: 2660; WAN024F44_at; Start 160; Stop 184
aagtcaactaattcttgctgcagcg

SEQ ID NO: 191546 - DNA, 25 bp, Artificial
  probe
  misc_feature (1)..(25): SEQ ID NO: 2660; WAN024F44_at; Start 2; Stop 26
tggtcattggatttcttaagaaaag

SEQ ID NO: 191547 - DNA, 25 bp, Artificial
  probe
  misc_feature (1)..(25): SEQ ID NO: 2660; WAN024F44_at; Start 11; Stop 35
gatttcttaagaaaagaagtgttgc

SEQ ID NO: 191548 - DNA, 25 bp, Artificial
  probe
  misc_feature (1)..(25): SEQ ID NO: 2660; WAN024F44_at; Start 147; Stop 171
ggatggcaataaaaagtcaactaat

SEQ ID NO: 191549 - DNA, 25 bp, Artificial
  probe
  misc_feature (1)..(25): SEQ ID NO: 2660; WAN024F44_at; Start 74; Stop 98
tagcaagaaaatcgcgcacgtattt

SEQ ID NO: 191550 - DNA, 25 bp, Artificial
  probe
  misc_feature (1)..(25): SEQ ID NO: 2660; WAN024F44_at; Start 63; Stop 87
tctgtccagcatagcaagaaaatcg

SEQ ID NO: 191551 - DNA, 25 bp, Artificial
  probe
  misc_feature (1)..(25): SEQ ID NO: 2660; WAN024F44_at; Start 194; Stop 218
tgaacaagttatctgacaaaacaag

SEQ ID NO: 191552 - DNA, 25 bp, Artificial
  probe
  misc_feature (1)..(25): SEQ ID NO: 2660; WAN024F44_at; Start 131; Stop 155
caaataggaaaaagaaggatggcaa

SEQ ID NO: 191553 - DNA, 25 bp, Artificial
  probe
  misc_feature (1)..(25): SEQ ID NO: 2660; WAN024F44_at; Start 67; Stop 91
tccagcatagcaagaaaatcgcgca

SEQ ID NO: 191554 - DNA, 25 bp, Artificial
  probe
  misc_feature (1)..(25): SEQ ID NO: 5601; WAN024F45_at; Start 9; Stop 33
aagggagagagaagatgaaatcaat

SEQ ID NO: 191555 - DNA, 25 bp, Artificial
  probe
  misc_feature (1)..(25): SEQ ID NO: 5601; WAN024F45_at; Start 10; Stop 34
agggagagagaagatgaaatcaatg

SEQ ID NO: 191556 - DNA, 25 bp, Artificial
  probe
  misc_feature (1)..(25): SEQ ID NO: 5601; WAN024F45_at; Start 11; Stop 35
gggagagagaagatgaaatcaatga

SEQ ID NO: 191557 - DNA, 25 bp, Artificial
  probe
  misc_feature (1)..(25): SEQ ID NO: 5601; WAN024F45_at; Start 13; Stop 37
gagagagaagatgaaatcaatgaga

SEQ ID NO: 191558 - DNA, 25 bp, Artificial
  probe
  misc_feature (1)..(25): SEQ ID NO: 5601; WAN024F45_at; Start 12; Stop 36
ggagagagaagatgaaatcaatgag

SEQ ID NO: 191559 - DNA, 25 bp, Artificial
  probe
  misc_feature (1)..(25): SEQ ID NO: 5601; WAN024F45_at; Start 8; Stop 32
gaagggagagagaagatgaaatcaa

SEQ ID NO: 191560 - DNA, 25 bp, Artificial
  probe
  misc_feature (1)..(25): SEQ ID NO: 952; WAN024F46_at; Start 50; Stop 74
tgagtagctgtttcctatggaagga

SEQ ID NO: 191561 - DNA, 25 bp, Artificial
  probe
  misc_feature (1)..(25): SEQ ID NO: 952; WAN024F46_at; Start 280; Stop 304
ttgttcatcaaaaatacgctgcagc

SEQ ID NO: 191562 - DNA, 25 bp, Artificial
  probe
  misc_feature (1)..(25): SEQ ID NO: 952; WAN024F46_at; Start 311; Stop 335
tagttgactttttattgccatcctt

SEQ ID NO: 191563 - DNA, 25 bp, Artificial
  probe
  misc_feature (1)..(25): SEQ ID NO: 952; WAN024F46_at; Start 593; Stop 617
tggtcattgttacgctcattttctt

SEQ ID NO: 191564 - DNA, 25 bp, Artificial
  probe
  misc_feature (1)..(25): SEQ ID NO: 952; WAN024F46_at; Start 189; Stop 213
tgtcctagccagtaagaagtcggtg

SEQ ID NO: 191565 - DNA, 25 bp, Artificial
  probe
  misc_feature (1)..(25): SEQ ID NO: 952; WAN024F46_at; Start 196; Stop 220
gccagtaagaagtcggtgaagcttt

SEQ ID NO: 191566 - DNA, 25 bp, Artificial
  probe
  misc_feature (1)..(25): SEQ ID NO: 952; WAN024F46_at; Start 95; Stop 119
aaagtacagcttttttcatcggaag

SEQ ID NO: 191567 - DNA, 25 bp, Artificial
  probe
  misc_feature (1)..(25): SEQ ID NO: 952; WAN024F46_at; Start 63; Stop 87
cctatggaaggaatgcatcttgtcc

SEQ ID NO: 191568 - DNA, 25 bp, Artificial
  probe
  misc_feature (1)..(25): SEQ ID NO: 952; WAN024F46_at; Start 140; Stop 164
tctgtgctggagtaaattatcttta

SEQ ID NO: 191569 - DNA, 25 bp, Artificial
  probe
  misc_feature (1)..(25): SEQ ID NO: 952; WAN024F46_at; Start 111; Stop 135
catcggaagcatggttttcgtttca

SEQ ID NO: 191570 - DNA, 25 bp, Artificial
  probe
  misc_feature (1)..(25): SEQ ID NO: 952; WAN024F46_at; Start 457; Stop 481
ttcttaagaaatccaatgaccattg

SEQ ID NO: 191571 - DNA, 25 bp, Artificial
  probe
  misc_feature (1)..(25): SEQ ID NO: 952; WAN024F46_at; Start 474; Stop 498
gaccattgtctcacttctgatttat

SEQ ID NO: 191572 - DNA, 25 bp, Artificial
  probe
  misc_feature (1)..(25): SEQ ID NO: 952; WAN024F46_at; Start 169; Stop 193
cgtaagcaagaagtccatagtgtcc

SEQ ID NO: 191573 - DNA, 25 bp, Artificial
  probe
  misc_feature (1)..(25): SEQ ID NO: 952; WAN024F46_at; Start 294; Stop 318
tacgctgcagcaagaattagttgac

SEQ ID NO: 191574 - DNA, 25 bp, Artificial
  probe
  misc_feature (1)..(25): SEQ ID NO: 952; WAN024F46_at; Start 578; Stop 602
tccgagatcttgtattggtcattgt

SEQ ID NO: 191575 - DNA, 25 bp, Artificial
  probe
  misc_feature (1)..(25): SEQ ID NO: 952; WAN024F46_at; Start 233; Stop 257
tactcttaattaatttgttaggagc

SEQ ID NO: 191576 - DNA, 25 bp, Artificial
  probe
  misc_feature (1)..(25): SEQ ID NO: 952; WAN024F46_at; Start 329; Stop 353
catccttctttttcctatttgggct

SEQ ID NO: 191577 - DNA, 25 bp, Artificial
  probe
  misc_feature (1)..(25): SEQ ID NO: 952; WAN024F46_at; Start 40; Stop 64
caaatcagtttgagtagctgtttcc

SEQ ID NO: 191578 - DNA, 25 bp, Artificial
  probe
  misc_feature (1)..(25): SEQ ID NO: 952; WAN024F46_at; Start 371; Stop 395
tacccttgaaaaaatacgtgcgcga

SEQ ID NO: 191579 - DNA, 25 bp, Artificial
  probe
  misc_feature (1)..(25): SEQ ID NO: 952; WAN024F46_at; Start 525; Stop 549
ctatcttgtcccaaattcggttaag

SEQ ID NO: 191580 - DNA, 25 bp, Artificial
  probe
  misc_feature (1)..(25): SEQ ID NO: 952; WAN024F46_at; Start 501; Stop 525
tggactgggcttgttttttgcagcc

SEQ ID NO: 191581 - DNA, 25 bp, Artificial
  probe
  misc_feature (1)..(25): SEQ ID NO: 952; WAN024F46_at; Start 513; Stop 537
gttttttgcagcctatcttgtccca

SEQ ID NO: 191582 - DNA, 25 bp, Artificial
  probe
  misc_feature (1)..(25): SEQ ID NO: 952; WAN024F46_at; Start 342; Stop 366
cctatttgggctagatttgctgatt

SEQ ID NO: 191583 - DNA, 25 bp, Artificial
  probe
  misc_feature (1)..(25): SEQ ID NO: 952; WAN024F46_at; Start 431; Stop 455
tggtgactattttagcaacacttct

SEQ ID NO: 191584 - DNA, 25 bp, Artificial
  probe
  misc_feature (1)..(25): SEQ ID NO: 952; WAN024F46_at; Start 251; Stop 275
taggagctgttcttgttttgtcaga

SEQ ID NO: 191585 - DNA, 25 bp, Artificial
  probe
  misc_feature (1)..(25): SEQ ID NO: 952; WAN024F46_at; Start 265; Stop 289
gttttgtcagataacttgttcatca

SEQ ID NO: 191586 - DNA, 25 bp, Artificial
  probe
  misc_feature (1)..(25): SEQ ID NO: 952; WAN024F46_at; Start 208; Stop 232
tcggtgaagcttttttacagtatgt

SEQ ID NO: 191587 - DNA, 25 bp, Artificial
  probe
  misc_feature (1)..(25): SEQ ID NO: 952; WAN024F46_at; Start 551; Stop 575
aggaagtttccttttatggtcatat

SEQ ID NO: 191588 - DNA, 25 bp, Artificial
  probe
  misc_feature (1)..(25): SEQ ID NO: 952; WAN024F46_at; Start 414; Stop 438
cagaaaaaagacagtgttggtgact

SEQ ID NO: 191589 - DNA, 25 bp, Artificial
  probe
  misc_feature (1)..(25): SEQ ID NO: 952; WAN024F46_at; Start 80; Stop 104
tcttgtcctttaaacaaagtacagc

SEQ ID NO: 191590 - DNA, 25 bp, Artificial
  probe
  misc_feature (1)..(25): SEQ ID NO: 952; WAN024F46_at; Start 565; Stop 589
tatggtcatattttccgagatcttg

SEQ ID NO: 191591 - DNA, 25 bp, Artificial
  probe
  misc_feature (1)..(25): SEQ ID NO: 952; WAN024F46_at; Start 178; Stop 202
gaagtccatagtgtcctagccagta

SEQ ID NO: 191592 - DNA, 25 bp, Artificial
  probe
  misc_feature (1)..(25): SEQ ID NO: 952; WAN024F46_at; Start 385; Stop 409
tacgtgcgcgattttcttgctatgc

SEQ ID NO: 191593 - DNA, 25 bp, Artificial
  probe
  misc_feature (1)..(25): SEQ ID NO: 952; WAN024F46_at; Start 127; Stop 151
ttcgtttcaggaatctgtgctggag

SEQ ID NO: 191594 - DNA, 25 bp, Artificial
  probe
  misc_feature (1)..(25): SEQ ID NO: 5284; WAN024F47_at; Start 209; Stop 233
gctaccaaggcaaccgcatcttcaa

SEQ ID NO: 191595 - DNA, 25 bp, Artificial
  probe
  misc_feature (1)..(25): SEQ ID NO: 5284; WAN024F47_at; Start 256; Stop 280
caaggcagagtattctccaagagac

SEQ ID NO: 191596 - DNA, 25 bp, Artificial
  probe
  misc_feature (1)..(25): SEQ ID NO: 5284; WAN024F47_at; Start 276; Stop 300
gagacaaaccagcaaccatatcagg

SEQ ID NO: 191597 - DNA, 25 bp, Artificial
  probe
  misc_feature (1)..(25): SEQ ID NO: 5284; WAN024F47_at; Start 194; Stop 218
taggctccacgcttagctaccaagg

SEQ ID NO: 191598 - DNA, 25 bp, Artificial
  probe
  misc_feature (1)..(25): SEQ ID NO: 5284; WAN024F47_at; Start 124; Stop 148
aatgacctctactggcgtattgaga

SEQ ID NO: 191599 - DNA, 25 bp, Artificial
  probe
  misc_feature (1)..(25): SEQ ID NO: 5284; WAN024F47_at; Start 166; Stop 190
agagtcagcaggagccgcttcttcc

SEQ ID NO: 191600 - DNA, 25 bp, Artificial
  probe
  misc_feature (1)..(25): SEQ ID NO: 5284; WAN024F47_at; Start 144; Stop 168
tgagaactgctaccatcttgccaga

SEQ ID NO: 191601 - DNA, 25 bp, Artificial
  probe
  misc_feature (1)..(25): SEQ ID NO: 5284; WAN024F47_at; Start 221; Stop 245
accgcatcttcaaaatccaaggcgc

SEQ ID NO: 191602 - DNA, 25 bp, Artificial
  probe
  misc_feature (1)..(25): SEQ ID NO: 5284; WAN024F47_at; Start 217; Stop 241
ggcaaccgcatcttcaaaatccaag

SEQ ID NO: 191603 - DNA, 25 bp, Artificial
  probe
  misc_feature (1)..(25): SEQ ID NO: 5284; WAN024F47_at; Start 1; Stop 25
ttgcaaaagttcaaccgctcgatca

SEQ ID NO: 191604 - DNA, 25 bp, Artificial
  probe
  misc_feature (1)..(25): SEQ ID NO: 5284; WAN024F47_at; Start 263; Stop 287
gagtattctccaagagacaaaccag

SEQ ID NO: 191605 - DNA, 25 bp, Artificial
  probe
  misc_feature (1)..(25): SEQ ID NO: 5284; WAN024F47_at; Start 300; Stop 324
gctgatagcccttttcttgcaataa

SEQ ID NO: 191606 - DNA, 25 bp, Artificial
  probe
  misc_feature (1)..(25): SEQ ID NO: 5284; WAN024F47_at; Start 250; Stop 274
tgccaccaaggcagagtattctcca

SEQ ID NO: 191607 - DNA, 25 bp, Artificial
  probe
  misc_feature (1)..(25): SEQ ID NO: 5284; WAN024F47_at; Start 133; Stop 157
tactggcgtattgagaactgctacc

SEQ ID NO: 191608 - DNA, 25 bp, Artificial
  probe
  misc_feature (1)..(25): SEQ ID NO: 5284; WAN024F47_at; Start 116; Stop 140
gcttcttcaatgacctctactggcg

SEQ ID NO: 191609 - DNA, 25 bp, Artificial
  probe
  misc_feature (1)..(25): SEQ ID NO: 5284; WAN024F47_at; Start 8; Stop 32
agttcaaccgctcgatcaactgcaa

SEQ ID NO: 191610 - DNA, 25 bp, Artificial
  probe
  misc_feature (1)..(25): SEQ ID NO: 5284; WAN024F47_at; Start 35; Stop 59
acttctccagcaatgacgatttgtg

SEQ ID NO: 191611 - DNA, 25 bp, Artificial
  probe
  misc_feature (1)..(25): SEQ ID NO: 5284; WAN024F47_at; Start 284; Stop 308
ccagcaaccatatcaggctgatagc

SEQ ID NO: 191612 - DNA, 25 bp, Artificial
  probe
  misc_feature (1)..(25): SEQ ID NO: 5284; WAN024F47_at; Start 141; Stop 165
tattgagaactgctaccatcttgcc

SEQ ID NO: 191613 - DNA, 25 bp, Artificial
  probe
  misc_feature (1)..(25): SEQ ID NO: 5284; WAN024F47_at; Start 182; Stop 206
gcttcttccatataggctccacgct

SEQ ID NO: 191614 - DNA, 25 bp, Artificial
  probe
  misc_feature (1)..(25): SEQ ID NO: 5284; WAN024F47_at; Start 173; Stop 197
gcaggagccgcttcttccatatagg

SEQ ID NO: 191615 - DNA, 25 bp, Artificial
  probe
  misc_feature (1)..(25): SEQ ID NO: 5284; WAN024F47_at; Start 41; Stop 65
ccagcaatgacgatttgtgcaggtg

SEQ ID NO: 191616 - DNA, 25 bp, Artificial
  probe
  misc_feature (1)..(25): SEQ ID NO: 5284; WAN024F47_at; Start 69; Stop 93
tatagttggctggagtaaccactcc

SEQ ID NO: 191617 - DNA, 25 bp, Artificial
  probe
  misc_feature (1)..(25): SEQ ID NO: 5284; WAN024F47_at; Start 93; Stop 117
caagttcagaagctttttgacaggc

SEQ ID NO: 191618 - DNA, 25 bp, Artificial
  probe
  misc_feature (1)..(25): SEQ ID NO: 5284; WAN024F47_at; Start 101; Stop 125
gaagctttttgacaggcttcttcaa

SEQ ID NO: 191619 - DNA, 25 bp, Artificial
  probe
  misc_feature (1)..(25): SEQ ID NO: 5284; WAN024F47_at; Start 49; Stop 73
gacgatttgtgcaggtgtgttatag

SEQ ID NO: 191620 - DNA, 25 bp, Artificial
  probe
  misc_feature (1)..(25): SEQ ID NO: 5284; WAN024F47_at; Start 202; Stop 226
acgcttagctaccaaggcaaccgca

SEQ ID NO: 191621 - DNA, 25 bp, Artificial
  probe
  misc_feature (1)..(25): SEQ ID NO: 5284; WAN024F47_at; Start 161; Stop 185
ttgccagagtcagcaggagccgctt

SEQ ID NO: 191622 - DNA, 25 bp, Artificial
  probe
  misc_feature (1)..(25): SEQ ID NO: 5284; WAN024F47_at; Start 294; Stop 318
tatcaggctgatagcccttttcttg

SEQ ID NO: 191623 - DNA, 25 bp, Artificial
  probe
  misc_feature (1)..(25): SEQ ID NO: 5284; WAN024F47_at; Start 154; Stop 178
taccatcttgccagagtcagcagga

SEQ ID NO: 191624 - DNA, 25 bp, Artificial
  probe
  misc_feature (1)..(25): SEQ ID NO: 5284; WAN024F47_at; Start 54; Stop 78
tttgtgcaggtgtgttatagttggc

SEQ ID NO: 191625 - DNA, 25 bp, Artificial
  probe
  misc_feature (1)..(25): SEQ ID NO: 5284; WAN024F47_at; Start 269; Stop 293
tctccaagagacaaaccagcaacca

SEQ ID NO: 191626 - DNA, 25 bp, Artificial
  probe
  misc_feature (1)..(25): SEQ ID NO: 5284; WAN024F47_at; Start 28; Stop 52
tgcaaccacttctccagcaatgacg

SEQ ID NO: 191627 - DNA, 25 bp, Artificial
  probe
  misc_feature (1)..(25): SEQ ID NO: 5284; WAN024F47_at; Start 81; Stop 105
gagtaaccactccaagttcagaagc

SEQ ID NO: 191628 - DNA, 25 bp, Artificial
  probe
  misc_feature (1)..(25): SEQ ID NO: 1433; WAN024F48_at; Start 319; Stop 343
gatgcggttgccttggtagctaagc

SEQ ID NO: 191629 - DNA, 25 bp, Artificial
  probe
  misc_feature (1)..(25): SEQ ID NO: 1433; WAN024F48_at; Start 523; Stop 547
gatcgagcggttgaacttttgcaag

SEQ ID NO: 191630 - DNA, 25 bp, Artificial
  probe
  misc_feature (1)..(25): SEQ ID NO: 1433; WAN024F48_at; Start 436; Stop 460
caaaaagcttctgaacttggagtgg

SEQ ID NO: 191631 - DNA, 25 bp, Artificial
  probe
  misc_feature (1)..(25): SEQ ID NO: 1433; WAN024F48_at; Start 617; Stop 641
ctagccagaaactagctgaaactct

SEQ ID NO: 191632 - DNA, 25 bp, Artificial
  probe
  misc_feature (1)..(25): SEQ ID NO: 1433; WAN024F48_at; Start 553; Stop 577
ggtgccaaacgcttgattcctctta

SEQ ID NO: 191633 - DNA, 25 bp, Artificial
  probe
  misc_feature (1)..(25): SEQ ID NO: 1433; WAN024F48_at; Start 350; Stop 374
cctatatggaagaagcggctcctgc

SEQ ID NO: 191634 - DNA, 25 bp, Artificial
  probe
  misc_feature (1)..(25): SEQ ID NO: 1433; WAN024F48_at; Start 394; Stop 418
gcagttctcaatacgccagtagagg

SEQ ID NO: 191635 - DNA, 25 bp, Artificial
  probe
  misc_feature (1)..(25): SEQ ID NO: 1433; WAN024F48_at; Start 535; Stop 559
gaacttttgcaagaagcaggtgcca

SEQ ID NO: 191636 - DNA, 25 bp, Artificial
  probe
  misc_feature (1)..(25): SEQ ID NO: 1433; WAN024F48_at; Start 675; Stop 699
cctagtcggcaatacagaagctgct

SEQ ID NO: 191637 - DNA, 25 bp, Artificial
  probe
  misc_feature (1)..(25): SEQ ID NO: 1433; WAN024F48_at; Start 661; Stop 685
gattttacttgtcccctagtcggca

SEQ ID NO: 191638 - DNA, 25 bp, Artificial
  probe
  misc_feature (1)..(25): SEQ ID NO: 1433; WAN024F48_at; Start 51; Stop 75
gatgggacgggatttctatgatcag

SEQ ID NO: 191639 - DNA, 25 bp, Artificial
  probe
  misc_feature (1)..(25): SEQ ID NO: 1433; WAN024F48_at; Start 273; Stop 297
tggagaatactctgccttggtggca

SEQ ID NO: 191640 - DNA, 25 bp, Artificial
  probe
  misc_feature (1)..(25): SEQ ID NO: 1433; WAN024F48_at; Start 31; Stop 55
caaggtgcccagtatctagggatgg

SEQ ID NO: 191641 - DNA, 25 bp, Artificial
  probe
  misc_feature (1)..(25): SEQ ID NO: 1433; WAN024F48_at; Start 883; Stop 907
gaagatcaagcgagtttagtagcac

SEQ ID NO: 191642 - DNA, 25 bp, Artificial
  probe
  misc_feature (1)..(25): SEQ ID NO: 1433; WAN024F48_at; Start 224; Stop 248
tattgcaagaaaagggctatcagcc

SEQ ID NO: 191643 - DNA, 25 bp, Artificial
  probe
  misc_feature (1)..(25): SEQ ID NO: 1433; WAN024F48_at; Start 731; Stop 755
tgacgcgtcaggtcaaggaacccgt

SEQ ID NO: 191644 - DNA, 25 bp, Artificial
  probe
  misc_feature (1)..(25): SEQ ID NO: 1433; WAN024F48_at; Start 197; Stop 221
tagcgacttcggttgctatctaccg

SEQ ID NO: 191645 - DNA, 25 bp, Artificial
  probe
  misc_feature (1)..(25): SEQ ID NO: 1433; WAN024F48_at; Start 157; Stop 181
gacaaactcaatcagacccgctata

SEQ ID NO: 191646 - DNA, 25 bp, Artificial
  probe
  misc_feature (1)..(25): SEQ ID NO: 1433; WAN024F48_at; Start 694; Stop 718
gctgctgtgatgcaaaaagaggaca

SEQ ID NO: 191647 - DNA, 25 bp, Artificial
  probe
  misc_feature (1)..(25): SEQ ID NO: 1433; WAN024F48_at; Start 335; Stop 359
tagctaagcgtggagcctatatgga

SEQ ID NO: 191648 - DNA, 25 bp, Artificial
  probe
  misc_feature (1)..(25): SEQ ID NO: 1433; WAN024F48_at; Start 783; Stop 807
gcaagaagcaggcataagcaacttt

SEQ ID NO: 191649 - DNA, 25 bp, Artificial
  probe
  misc_feature (1)..(25): SEQ ID NO: 1433; WAN024F48_at; Start 800; Stop 824
gcaactttatcgagattggaccggg

SEQ ID NO: 191650 - DNA, 25 bp, Artificial
  probe
  misc_feature (1)..(25): SEQ ID NO: 1433; WAN024F48_at; Start 712; Stop 736
gaggacattgctcagctcttgacgc

SEQ ID NO: 191651 - DNA, 25 bp, Artificial
  probe
  misc_feature (1)..(25): SEQ ID NO: 1433; WAN024F48_at; Start 379; Stop 403
tctggcaagatggtagcagttctca

SEQ ID NO: 191652 - DNA, 25 bp, Artificial
  probe
  misc_feature (1)..(25): SEQ ID NO: 1433; WAN024F48_at; Start 455; Stop 479
gagtggttactccagccaactataa

SEQ ID NO: 191653 - DNA, 25 bp, Artificial
  probe
  misc_feature (1)..(25): SEQ ID NO: 1433; WAN024F48_at; Start 178; Stop 202
tatacgcaaccagccattctagcga

SEQ ID NO: 191654 - DNA, 25 bp, Artificial
  probe
  misc_feature (1)..(25): SEQ ID NO: 1433; WAN024F48_at; Start 490; Stop 514
caaatcgtcattgctggagaagtgg

SEQ ID NO: 191655 - DNA, 25 bp, Artificial
  probe
  misc_feature (1)..(25): SEQ ID NO: 1433; WAN024F48_at; Start 567; Stop 591
gattcctcttaaggtgtcaggtccc

SEQ ID NO: 191656 - DNA, 25 bp, Artificial
  probe
  misc_feature (1)..(25): SEQ ID NO: 1433; WAN024F48_at; Start 409; Stop 433
ccagtagaggtcattgaagaagcct

SEQ ID NO: 191657 - DNA, 25 bp, Artificial
  probe
  misc_feature (1)..(25): SEQ ID NO: 1433; WAN024F48_at; Start 475; Stop 499
tataacacacctgcacaaatcgtca

SEQ ID NO: 191658 - DNA, 25 bp, Artificial
  probe
  misc_feature (1)..(25): SEQ ID NO: 1433; WAN024F48_at; Start 364; Stop 388
gcggctcctgctgactctggcaaga

SEQ ID NO: 191659 - DNA, 25 bp, Artificial
  probe
  misc_feature (1)..(25): SEQ ID NO: 1433; WAN024F48_at; Start 16; Stop 40
tttttatttgctggtcaaggtgccc

SEQ ID NO: 191660 - DNA, 25 bp, Artificial
  probe
  misc_feature (1)..(25): SEQ ID NO: 1433; WAN024F48_at; Start 306; Stop 330
cttggattttgaagatgcggttgcc

SEQ ID NO: 191661 - DNA, 25 bp, Artificial
  probe
  misc_feature (1)..(25): SEQ ID NO: 1433; WAN024F48_at; Start 868; Stop 892
cacttagctcatgtggaagatcaag

SEQ ID NO: 191662 - DNA, 25 bp, Artificial
  probe
  misc_feature (1)..(25): SEQ ID NO: 2682; WAN024F49_at; Start 40; Stop 64
tccttattgccatcttcctcatggg

SEQ ID NO: 191663 - DNA, 25 bp, Artificial
  probe
  misc_feature (1)..(25): SEQ ID NO: 2682; WAN024F49_at; Start 309; Stop 333
tttggcgcagaagctgagtccctgc

SEQ ID NO: 191664 - DNA, 25 bp, Artificial
  probe
  misc_feature (1)..(25): SEQ ID NO: 2682; WAN024F49_at; Start 28; Stop 52
cgcttgacgatgtccttattgccat

SEQ ID NO: 191665 - DNA, 25 bp, Artificial
  probe
  misc_feature (1)..(25): SEQ ID NO: 2682; WAN024F49_at; Start 295; Stop 319
tttttaaagtgcaatttggcgcaga

SEQ ID NO: 191666 - DNA, 25 bp, Artificial
  probe
  misc_feature (1)..(25): SEQ ID NO: 2682; WAN024F49_at; Start 129; Stop 153
tagggtcggatccatggaatgtcct

SEQ ID NO: 191667 - DNA, 25 bp, Artificial
  probe
  misc_feature (1)..(25): SEQ ID NO: 2682; WAN024F49_at; Start 144; Stop 168
ggaatgtccttctacgcgaacattg

SEQ ID NO: 191668 - DNA, 25 bp, Artificial
  probe
  misc_feature (1)..(25): SEQ ID NO: 2682; WAN024F49_at; Start 161; Stop 185
gaacattgctccaaaaaaagatacg

SEQ ID NO: 191669 - DNA, 25 bp, Artificial
  probe
  misc_feature (1)..(25): SEQ ID NO: 2682; WAN024F49_at; Start 63; Stop 87
ggccaccacgatatcaaaacggtca

SEQ ID NO: 191670 - DNA, 25 bp, Artificial
  probe
  misc_feature (1)..(25): SEQ ID NO: 2682; WAN024F49_at; Start 59; Stop 83
catgggccaccacgatatcaaaacg

SEQ ID NO: 191671 - DNA, 25 bp, Artificial
  probe
  misc_feature (1)..(25): SEQ ID NO: 2682; WAN024F49_at; Start 141; Stop 165
catggaatgtccttctacgcgaaca

SEQ ID NO: 191672 - DNA, 25 bp, Artificial
  probe
  misc_feature (1)..(25): SEQ ID NO: 2682; WAN024F49_at; Start 20; Stop 44
caatcacgcgcttgacgatgtcctt

SEQ ID NO: 191673 - DNA, 25 bp, Artificial
  probe
  misc_feature (1)..(25): SEQ ID NO: 2682; WAN024F49_at; Start 68; Stop 92
ccacgatatcaaaacggtcaatagg

SEQ ID NO: 191674 - DNA, 25 bp, Artificial
  probe
  misc_feature (1)..(25): SEQ ID NO: 2682; WAN024F49_at; Start 18; Stop 42
tccaatcacgcgcttgacgatgtcc

SEQ ID NO: 191675 - DNA, 25 bp, Artificial
  probe
  misc_feature (1)..(25): SEQ ID NO: 2682; WAN024F49_at; Start 137; Stop 161
gatccatggaatgtccttctacgcg

SEQ ID NO: 191676 - DNA, 25 bp, Artificial
  probe
  misc_feature (1)..(25): SEQ ID NO: 2682; WAN024F49_at; Start 5; Stop 29
tgtcgccaggcattccaatcacgcg

SEQ ID NO: 191677 - DNA, 25 bp, Artificial
  probe
  misc_feature (1)..(25): SEQ ID NO: 2682; WAN024F49_at; Start 1; Stop 25
atggtgtcgccaggcattccaatca

SEQ ID NO: 191678 - DNA, 25 bp, Artificial
  probe
  misc_feature (1)..(25): SEQ ID NO: 2682; WAN024F49_at; Start 299; Stop 323
taaagtgcaatttggcgcagaagct

SEQ ID NO: 191679 - DNA, 25 bp, Artificial
  probe
  misc_feature (1)..(25): SEQ ID NO: 2682; WAN024F49_at; Start 13; Stop 37
ggcattccaatcacgcgcttgacga

SEQ ID NO: 191680 - DNA, 25 bp, Artificial
  probe
  misc_feature (1)..(25): SEQ ID NO: 2682; WAN024F49_at; Start 154; Stop 178
tctacgcgaacattgctccaaaaaa

SEQ ID NO: 191681 - DNA, 25 bp, Artificial
  probe
  misc_feature (1)..(25): SEQ ID NO: 2682; WAN024F49_at; Start 318; Stop 342
gaagctgagtccctgcataccatag

SEQ ID NO: 191682 - DNA, 25 bp, Artificial
  probe
  misc_feature (1)..(25): SEQ ID NO: 2682; WAN024F49_at; Start 122; Stop 146
catccgctagggtcggatccatgga

SEQ ID NO: 191683 - DNA, 25 bp, Artificial
  probe
  misc_feature (1)..(25): SEQ ID NO: 2682; WAN024F49_at; Start 24; Stop 48
cacgcgcttgacgatgtccttattg

SEQ ID NO: 191684 - DNA, 25 bp, Artificial
  probe
  misc_feature (1)..(25): SEQ ID NO: 2682; WAN024F49_at; Start 61; Stop 85
tgggccaccacgatatcaaaacggt

SEQ ID NO: 191685 - DNA, 25 bp, Artificial
  probe
  misc_feature (1)..(25): SEQ ID NO: 2682; WAN024F49_at; Start 312; Stop 336
ggcgcagaagctgagtccctgcata

SEQ ID NO: 191686 - DNA, 25 bp, Artificial
  probe
  misc_feature (1)..(25): SEQ ID NO: 2682; WAN024F49_at; Start 55; Stop 79
tcctcatgggccaccacgatatcaa

SEQ ID NO: 191687 - DNA, 25 bp, Artificial
  probe
  misc_feature (1)..(25): SEQ ID NO: 2682; WAN024F49_at; Start 251; Stop 275
aattcataacttacctttctaagcg

SEQ ID NO: 191688 - DNA, 25 bp, Artificial
  probe
  misc_feature (1)..(25): SEQ ID NO: 2682; WAN024F49_at; Start 126; Stop 150
cgctagggtcggatccatggaatgt

SEQ ID NO: 191689 - DNA, 25 bp, Artificial
  probe
  misc_feature (1)..(25): SEQ ID NO: 2682; WAN024F49_at; Start 306; Stop 330
caatttggcgcagaagctgagtccc

SEQ ID NO: 191690 - DNA, 25 bp, Artificial
  probe
  misc_feature (1)..(25): SEQ ID NO: 2682; WAN024F49_at; Start 304; Stop 328
tgcaatttggcgcagaagctgagtc

SEQ ID NO: 191691 - DNA, 25 bp, Artificial
  probe
  misc_feature (1)..(25): SEQ ID NO: 2682; WAN024F49_at; Start 9; Stop 33
gccaggcattccaatcacgcgcttg

SEQ ID NO: 191692 - DNA, 25 bp, Artificial
  probe
  misc_feature (1)..(25): SEQ ID NO: 2682; WAN024F49_at; Start 33; Stop 57
gacgatgtccttattgccatcttcc

SEQ ID NO: 191693 - DNA, 25 bp, Artificial
  probe
  misc_feature (1)..(25): SEQ ID NO: 2682; WAN024F49_at; Start 132; Stop 156
ggtcggatccatggaatgtccttct

SEQ ID NO: 191694 - DNA, 25 bp, Artificial
  probe
  misc_feature (1)..(25): SEQ ID NO: 2682; WAN024F49_at; Start 150; Stop 174
tccttctacgcgaacattgctccaa

SEQ ID NO: 191695 - DNA, 25 bp, Artificial
  probe
  misc_feature (1)..(25): SEQ ID NO: 2682; WAN024F49_at; Start 44; Stop 68
tattgccatcttcctcatgggccac

SEQ ID NO: 191696 - DNA, 25 bp, Artificial
  probe
  misc_feature (1)..(25): SEQ ID NO: 2404; WAN024F4A_at; Start 555; Stop 579
gattgatgcctttaccagtgctaaa

SEQ ID NO: 191697 - DNA, 25 bp, Artificial
  probe
  misc_feature (1)..(25): SEQ ID NO: 2404; WAN024F4A_at; Start 671; Stop 695
cagtttcttctgtcattgcgcgtga

SEQ ID NO: 191698 - DNA, 25 bp, Artificial
  probe
  misc_feature (1)..(25): SEQ ID NO: 2404; WAN024F4A_at; Start 265; Stop 289
ggttcctactttggtgggcttgcag

SEQ ID NO: 191699 - DNA, 25 bp, Artificial
  probe
  misc_feature (1)..(25): SEQ ID NO: 2404; WAN024F4A_at; Start 51; Stop 75
tgaacactatcaaaccagtctggct

SEQ ID NO: 191700 - DNA, 25 bp, Artificial
  probe
  misc_feature (1)..(25): SEQ ID NO: 2404; WAN024F4A_at; Start 486; Stop 510
taaggttgccctccataatcaggct

SEQ ID NO: 191701 - DNA, 25 bp, Artificial
  probe
  misc_feature (1)..(25): SEQ ID NO: 2404; WAN024F4A_at; Start 796; Stop 820
caagcctatggtatgcagggactca

SEQ ID NO: 191702 - DNA, 25 bp, Artificial
  probe
  misc_feature (1)..(25): SEQ ID NO: 2404; WAN024F4A_at; Start 181; Stop 205
tacgccagtttctttggctatcaag

SEQ ID NO: 191703 - DNA, 25 bp, Artificial
  probe
  misc_feature (1)..(25): SEQ ID NO: 2404; WAN024F4A_at; Start 347; Stop 371
gggattctaagactctgaccgacca

SEQ ID NO: 191704 - DNA, 25 bp, Artificial
  probe
  misc_feature (1)..(25): SEQ ID NO: 2404; WAN024F4A_at; Start 286; Stop 310
gcagttgtggctgcctttgtcacac

SEQ ID NO: 191705 - DNA, 25 bp, Artificial
  probe
  misc_feature (1)..(25): SEQ ID NO: 2404; WAN024F4A_at; Start 722; Stop 746
tgggacgagaactgggttatcagct

SEQ ID NO: 191706 - DNA, 25 bp, Artificial
  probe
  misc_feature (1)..(25): SEQ ID NO: 2404; WAN024F4A_at; Start 310; Stop 334
cctgaccagcacgactttttacgaa

SEQ ID NO: 191707 - DNA, 25 bp, Artificial
  probe
  misc_feature (1)..(25): SEQ ID NO: 2404; WAN024F4A_at; Start 213; Stop 237
gcaaaccagcggacaaaatcttcct

SEQ ID NO: 191708 - DNA, 25 bp, Artificial
  probe
  misc_feature (1)..(25): SEQ ID NO: 2404; WAN024F4A_at; Start 687; Stop 711
tgcgcgtgatctctttctggaaaat

SEQ ID NO: 191709 - DNA, 25 bp, Artificial
  probe
  misc_feature (1)..(25): SEQ ID NO: 2404; WAN024F4A_at; Start 363; Stop 387
gaccgaccaaaagatccgtcagatt

SEQ ID NO: 191710 - DNA, 25 bp, Artificial
  probe
  misc_feature (1)..(25): SEQ ID NO: 2404; WAN024F4A_at; Start 431; Stop 455
tctcacccagcaagtacaacgaggt

SEQ ID NO: 191711 - DNA, 25 bp, Artificial
  probe
  misc_feature (1)..(25): SEQ ID NO: 2404; WAN024F4A_at; Start 20; Stop 44
caccaagcgaaaaggatattcaggc

SEQ ID NO: 191712 - DNA, 25 bp, Artificial
  probe
  misc_feature (1)..(25): SEQ ID NO: 2404; WAN024F4A_at; Start 624; Stop 648
tcctatcagcttagaagaaaaggct

SEQ ID NO: 191713 - DNA, 25 bp, Artificial
  probe
  misc_feature (1)..(25): SEQ ID NO: 2404; WAN024F4A_at; Start 231; Stop 255
tcttcctttaattgggacagatgag

SEQ ID NO: 191714 - DNA, 25 bp, Artificial
  probe
  misc_feature (1)..(25): SEQ ID NO: 2404; WAN024F4A_at; Start 749; Stop 773
caagtggagctggaacggcttctga

SEQ ID NO: 191715 - DNA, 25 bp, Artificial
  probe
  misc_feature (1)..(25): SEQ ID NO: 2404; WAN024F4A_at; Start 582; Stop 606
ttatgacaagtacttggcacaagag

SEQ ID NO: 191716 - DNA, 25 bp, Artificial
  probe
  misc_feature (1)..(25): SEQ ID NO: 2404; WAN024F4A_at; Start 66; Stop 90
cagtctggctcctagcaagaatccc

SEQ ID NO: 191717 - DNA, 25 bp, Artificial
  probe
  misc_feature (1)..(25): SEQ ID NO: 2404; WAN024F4A_at; Start 781; Stop 805
gctagccagattttgcaagcctatg

SEQ ID NO: 191718 - DNA, 25 bp, Artificial
  probe
  misc_feature (1)..(25): SEQ ID NO: 2404; WAN024F4A_at; Start 248; Stop 272
cagatgaggtgggaaatggttccta

SEQ ID NO: 191719 - DNA, 25 bp, Artificial
  probe
  misc_feature (1)..(25): SEQ ID NO: 2404; WAN024F4A_at; Start 766; Stop 790
gcttctgacaaggtggctagccaga

SEQ ID NO: 191720 - DNA, 25 bp, Artificial
  probe
  misc_feature (1)..(25): SEQ ID NO: 2404; WAN024F4A_at; Start 445; Stop 469
tacaacgaggtcatcggagaccgct

SEQ ID NO: 191721 - DNA, 25 bp, Artificial
  probe
  misc_feature (1)..(25): SEQ ID NO: 2404; WAN024F4A_at; Start 609; Stop 633
caatcgtttcagcaatcctatcagc

SEQ ID NO: 191722 - DNA, 25 bp, Artificial
  probe
  misc_feature (1)..(25): SEQ ID NO: 2404; WAN024F4A_at; Start 80; Stop 104
gcaagaatccctatatccgctactt

SEQ ID NO: 191723 - DNA, 25 bp, Artificial
  probe
  misc_feature (1)..(25): SEQ ID NO: 2404; WAN024F4A_at; Start 521; Stop 545
tccttcaaaaaggtgttcagcctga

SEQ ID NO: 191724 - DNA, 25 bp, Artificial
  probe
  misc_feature (1)..(25): SEQ ID NO: 2404; WAN024F4A_at; Start 639; Stop 663
agaaaaggctgagggcaaatacttg

SEQ ID NO: 191725 - DNA, 25 bp, Artificial
  probe
  misc_feature (1)..(25): SEQ ID NO: 2404; WAN024F4A_at; Start 123; Stop 147
aacggtttctatctatacttctgga

SEQ ID NO: 191726 - DNA, 25 bp, Artificial
  probe
  misc_feature (1)..(25): SEQ ID NO: 2404; WAN024F4A_at; Start 145; Stop 169
ggaaaaatcttgcttcagggtgaag

SEQ ID NO: 191727 - DNA, 25 bp, Artificial
  probe
  misc_feature (1)..(25): SEQ ID NO: 2404; WAN024F4A_at; Start 4; Stop 28
gcaagtatcacactcacaccaagcg

SEQ ID NO: 191728 - DNA, 25 bp, Artificial
  probe
  misc_feature (1)..(25): SEQ ID NO: 2404; WAN024F4A_at; Start 540; Stop 564
gcctgagaaaattgtgattgatgcc

SEQ ID NO: 191729 - DNA, 25 bp, Artificial
  probe
  misc_feature (1)..(25): SEQ ID NO: 2404; WAN024F4A_at; Start 197; Stop 221
gctatcaagctgtagagcaaaccag

SEQ ID NO: 191730 - DNA, 25 bp, Artificial
  probe
  misc_feature (1)..(25): SEQ ID NO: 1462; WAN024F4B_at; Start 152; Stop 176
atgcttatcgccgggttcatttaga

SEQ ID NO: 191731 - DNA, 25 bp, Artificial
  probe
  misc_feature (1)..(25): SEQ ID NO: 1462; WAN024F4B_at; Start 151; Stop 175
tatgcttatcgccgggttcatttag

SEQ ID NO: 191732 - DNA, 25 bp, Artificial
  probe
  misc_feature (1)..(25): SEQ ID NO: 1462; WAN024F4B_at; Start 75; Stop 99
acagctagacaaaacagataaagac

SEQ ID NO: 191733 - DNA, 25 bp, Artificial
  probe
  misc_feature (1)..(25): SEQ ID NO: 1462; WAN024F4B_at; Start 149; Stop 173
attatgcttatcgccgggttcattt

SEQ ID NO: 191734 - DNA, 25 bp, Artificial
  probe
  misc_feature (1)..(25): SEQ ID NO: 1462; WAN024F4B_at; Start 78; Stop 102
gctagacaaaacagataaagaccaa

SEQ ID NO: 191735 - DNA, 25 bp, Artificial
  probe
  misc_feature (1)..(25): SEQ ID NO: 1462; WAN024F4B_at; Start 154; Stop 178
gcttatcgccgggttcatttagaac

SEQ ID NO: 191736 - DNA, 25 bp, Artificial
  probe
  misc_feature (1)..(25): SEQ ID NO: 1462; WAN024F4B_at; Start 88; Stop 112
acagataaagaccaagagcttaaaa

SEQ ID NO: 191737 - DNA, 25 bp, Artificial
  probe
  misc_feature (1)..(25): SEQ ID NO: 1462; WAN024F4B_at; Start 155; Stop 179
cttatcgccgggttcatttagaact

SEQ ID NO: 191738 - DNA, 25 bp, Artificial
  probe
  misc_feature (1)..(25): SEQ ID NO: 1462; WAN024F4B_at; Start 153; Stop 177
tgcttatcgccgggttcatttagaa

SEQ ID NO: 191739 - DNA, 25 bp, Artificial
  probe
  misc_feature (1)..(25): SEQ ID NO: 1462; WAN024F4B_at; Start 77; Stop 101
agctagacaaaacagataaagacca

SEQ ID NO: 191740 - DNA, 25 bp, Artificial
  probe
  misc_feature (1)..(25): SEQ ID NO: 1462; WAN024F4B_at; Start 84; Stop 108
caaaacagataaagaccaagagctt

SEQ ID NO: 191741 - DNA, 25 bp, Artificial
  probe
  misc_feature (1)..(25): SEQ ID NO: 1462; WAN024F4B_at; Start 148; Stop 172
aattatgcttatcgccgggttcatt

SEQ ID NO: 191742 - DNA, 25 bp, Artificial
  probe
  misc_feature (1)..(25): SEQ ID NO: 1462; WAN024F4B_at; Start 156; Stop 180
ttatcgccgggttcatttagaacta

SEQ ID NO: 191743 - DNA, 25 bp, Artificial
  probe
  misc_feature (1)..(25): SEQ ID NO: 1462; WAN024F4B_at; Start 159; Stop 183
tcgccgggttcatttagaactaaga

SEQ ID NO: 191744 - DNA, 25 bp, Artificial
  probe
  misc_feature (1)..(25): SEQ ID NO: 1462; WAN024F4B_at; Start 150; Stop 174
ttatgcttatcgccgggttcattta

SEQ ID NO: 191745 - DNA, 25 bp, Artificial
  probe
  misc_feature (1)..(25): SEQ ID NO: 1462; WAN024F4B_at; Start 157; Stop 181
tatcgccgggttcatttagaactaa

SEQ ID NO: 191746 - DNA, 25 bp, Artificial
  probe
  misc_feature (1)..(25): SEQ ID NO: 1462; WAN024F4B_at; Start 147; Stop 171
aaattatgcttatcgccgggttcat

SEQ ID NO: 191747 - DNA, 25 bp, Artificial
  probe
  misc_feature (1)..(25): SEQ ID NO: 1462; WAN024F4B_at; Start 74; Stop 98
aacagctagacaaaacagataaaga

SEQ ID NO: 191748 - DNA, 25 bp, Artificial
  probe
  misc_feature (1)..(25): SEQ ID NO: 1462; WAN024F4B_at; Start 82; Stop 106
gacaaaacagataaagaccaagagc

SEQ ID NO: 191749 - DNA, 25 bp, Artificial
  probe
  misc_feature (1)..(25): SEQ ID NO: 1462; WAN024F4B_at; Start 158; Stop 182
atcgccgggttcatttagaactaag

SEQ ID NO: 191750 - DNA, 25 bp, Artificial
  probe
  misc_feature (1)..(25): SEQ ID NO: 1462; WAN024F4B_at; Start 80; Stop 104
tagacaaaacagataaagaccaaga

SEQ ID NO: 191751 - DNA, 25 bp, Artificial
  probe
  misc_feature (1)..(25): SEQ ID NO: 1462; WAN024F4B_at; Start 76; Stop 100
cagctagacaaaacagataaagacc

SEQ ID NO: 191752 - DNA, 25 bp, Artificial
  probe
  misc_feature (1)..(25): SEQ ID NO: 1462; WAN024F4B_at; Start 81; Stop 105
agacaaaacagataaagaccaagag

SEQ ID NO: 191753 - DNA, 25 bp, Artificial
  probe
  misc_feature (1)..(25): SEQ ID NO: 1462; WAN024F4B_at; Start 83; Stop 107
acaaaacagataaagaccaagagct

SEQ ID NO: 191754 - DNA, 25 bp, Artificial
  probe
  misc_feature (1)..(25): SEQ ID NO: 1462; WAN024F4B_at; Start 79; Stop 103
ctagacaaaacagataaagaccaag

SEQ ID NO: 191755 - DNA, 25 bp, Artificial
  probe
  misc_feature (1)..(25): SEQ ID NO: 7047; WAN024F4C_at; Start 96; Stop 120
gattgaacgagctcttgaagttgta

SEQ ID NO: 191756 - DNA, 25 bp, Artificial
  probe
  misc_feature (1)..(25): SEQ ID NO: 7047; WAN024F4C_at; Start 99; Stop 123
tgaacgagctcttgaagttgtagag

SEQ ID NO: 191757 - DNA, 25 bp, Artificial
  probe
  misc_feature (1)..(25): SEQ ID NO: 7047; WAN024F4C_at; Start 95; Stop 119
tgattgaacgagctcttgaagttgt

SEQ ID NO: 191758 - DNA, 25 bp, Artificial
  probe
  misc_feature (1)..(25): SEQ ID NO: 7047; WAN024F4C_at; Start 91; Stop 115
gtggtgattgaacgagctcttgaag

SEQ ID NO: 191759 - DNA, 25 bp, Artificial
  probe
  misc_feature (1)..(25): SEQ ID NO: 7047; WAN024F4C_at; Start 101; Stop 125
aacgagctcttgaagttgtagagaa

SEQ ID NO: 191760 - DNA, 25 bp, Artificial
  probe
  misc_feature (1)..(25): SEQ ID NO: 7047; WAN024F4C_at; Start 90; Stop 114
tgtggtgattgaacgagctcttgaa

SEQ ID NO: 191761 - DNA, 25 bp, Artificial
  probe
  misc_feature (1)..(25): SEQ ID NO: 7047; WAN024F4C_at; Start 102; Stop 126
acgagctcttgaagttgtagagaaa

SEQ ID NO: 191762 - DNA, 25 bp, Artificial
  probe
  misc_feature (1)..(25): SEQ ID NO: 7047; WAN024F4C_at; Start 106; Stop 130
gctcttgaagttgtagagaaagagt

SEQ ID NO: 191763 - DNA, 25 bp, Artificial
  probe
  misc_feature (1)..(25): SEQ ID NO: 7047; WAN024F4C_at; Start 104; Stop 128
gagctcttgaagttgtagagaaaga

SEQ ID NO: 191764 - DNA, 25 bp, Artificial
  probe
  misc_feature (1)..(25): SEQ ID NO: 7047; WAN024F4C_at; Start 97; Stop 121
attgaacgagctcttgaagttgtag

SEQ ID NO: 191765 - DNA, 25 bp, Artificial
  probe
  misc_feature (1)..(25): SEQ ID NO: 7047; WAN024F4C_at; Start 94; Stop 118
gtgattgaacgagctcttgaagttg

SEQ ID NO: 191766 - DNA, 25 bp, Artificial
  probe
  misc_feature (1)..(25): SEQ ID NO: 7047; WAN024F4C_at; Start 105; Stop 129
agctcttgaagttgtagagaaagag

SEQ ID NO: 191767 - DNA, 25 bp, Artificial
  probe
  misc_feature (1)..(25): SEQ ID NO: 7047; WAN024F4C_at; Start 108; Stop 132
tcttgaagttgtagagaaagagtta

SEQ ID NO: 191768 - DNA, 25 bp, Artificial
  probe
  misc_feature (1)..(25): SEQ ID NO: 7047; WAN024F4C_at; Start 107; Stop 131
ctcttgaagttgtagagaaagagtt

SEQ ID NO: 191769 - DNA, 25 bp, Artificial
  probe
  misc_feature (1)..(25): SEQ ID NO: 7047; WAN024F4C_at; Start 100; Stop 124
gaacgagctcttgaagttgtagaga

SEQ ID NO: 191770 - DNA, 25 bp, Artificial
  probe
  misc_feature (1)..(25): SEQ ID NO: 7047; WAN024F4C_at; Start 92; Stop 116
tggtgattgaacgagctcttgaagt

SEQ ID NO: 191771 - DNA, 25 bp, Artificial
  probe
  misc_feature (1)..(25): SEQ ID NO: 7047; WAN024F4C_at; Start 98; Stop 122
ttgaacgagctcttgaagttgtaga

SEQ ID NO: 191772 - DNA, 25 bp, Artificial
  probe
  misc_feature (1)..(25): SEQ ID NO: 7047; WAN024F4C_at; Start 103; Stop 127
cgagctcttgaagttgtagagaaag

SEQ ID NO: 191773 - DNA, 25 bp, Artificial
  probe
  misc_feature (1)..(25): SEQ ID NO: 7047; WAN024F4C_at; Start 93; Stop 117
ggtgattgaacgagctcttgaagtt

SEQ ID NO: 191774 - DNA, 25 bp, Artificial
  probe
  misc_feature (1)..(25): SEQ ID NO: 6946; WAN024F4D_at; Start 1077; Stop 1101
aagagaggaattaggtaataatgac

SEQ ID NO: 191775 - DNA, 25 bp, Artificial
  probe
  misc_feature (1)..(25): SEQ ID NO: 6946; WAN024F4D_at; Start 768; Stop 792
tgatgaagagaactatcaaggaaat

SEQ ID NO: 191776 - DNA, 25 bp, Artificial
  probe
  misc_feature (1)..(25): SEQ ID NO: 6946; WAN024F4D_at; Start 39; Stop 63
tgcaatctttgctcatgaagcaaca

SEQ ID NO: 191777 - DNA, 25 bp, Artificial
  probe
  misc_feature (1)..(25): SEQ ID NO: 6946; WAN024F4D_at; Start 982; Stop 1006
gaagcaaaaggtaaagatgttatct

SEQ ID NO: 191778 - DNA, 25 bp, Artificial
  probe
  misc_feature (1)..(25): SEQ ID NO: 6946; WAN024F4D_at; Start 943; Stop 967
gacgctaaaaataatgaaatgtatc

SEQ ID NO: 191779 - DNA, 25 bp, Artificial
  probe
  misc_feature (1)..(25): SEQ ID NO: 6946; WAN024F4D_at; Start 994; Stop 1018
aaagatgttatcttctgtggtcgtc

SEQ ID NO: 191780 - DNA, 25 bp, Artificial
  probe
  misc_feature (1)..(25): SEQ ID NO: 6946; WAN024F4D_at; Start 35; Stop 59
caggtgcaatctttgctcatgaagc

SEQ ID NO: 191781 - DNA, 25 bp, Artificial
  probe
  misc_feature (1)..(25): SEQ ID NO: 6946; WAN024F4D_at; Start 20; Stop 44
tcggagctggattgtcaggtgcaat

SEQ ID NO: 191782 - DNA, 25 bp, Artificial
  probe
  misc_feature (1)..(25): SEQ ID NO: 6946; WAN024F4D_at; Start 753; Stop 777
tgagcatgaagttcttgatgaagag

SEQ ID NO: 191783 - DNA, 25 bp, Artificial
  probe
  misc_feature (1)..(25): SEQ ID NO: 6946; WAN024F4D_at; Start 6; Stop 30
cgattatcttattgtcggagctgga

SEQ ID NO: 191784 - DNA, 25 bp, Artificial
  probe
  misc_feature (1)..(25): SEQ ID NO: 6946; WAN024F4D_at; Start 928; Stop 952
tactacccaatcaacgacgctaaaa

SEQ ID NO: 191785 - DNA, 25 bp, Artificial
  probe
  misc_feature (1)..(25): SEQ ID NO: 6946; WAN024F4D_at; Start 756; Stop 780
gcatgaagttcttgatgaagagaac

SEQ ID NO: 191786 - DNA, 25 bp, Artificial
  probe
  misc_feature (1)..(25): SEQ ID NO: 6946; WAN024F4D_at; Start 120; Stop 144
ctattgtgagaacgttgaaggaatc

SEQ ID NO: 191787 - DNA, 25 bp, Artificial
  probe
  misc_feature (1)..(25): SEQ ID NO: 6946; WAN024F4D_at; Start 1033; Stop 1057
tattatgatatgcacgtagtaatcg

SEQ ID NO: 191788 - DNA, 25 bp, Artificial
  probe
  misc_feature (1)..(25): SEQ ID NO: 6946; WAN024F4D_at; Start 1007; Stop 1031
tctgtggtcgtcttgcagattataa

SEQ ID NO: 191789 - DNA, 25 bp, Artificial
  probe
  misc_feature (1)..(25): SEQ ID NO: 6946; WAN024F4D_at; Start 49; Stop 73
gctcatgaagcaacaaaacaaggaa

SEQ ID NO: 191790 - DNA, 25 bp, Artificial
  probe
  misc_feature (1)..(25): SEQ ID NO: 6946; WAN024F4D_at; Start 919; Stop 943
gatgaaccatactacccaatcaacg

SEQ ID NO: 191791 - DNA, 25 bp, Artificial
  probe
  misc_feature (1)..(25): SEQ ID NO: 6946; WAN024F4D_at; Start 12; Stop 36
tcttattgtcggagctggattgtca

SEQ ID NO: 191792 - DNA, 25 bp, Artificial
  probe
  misc_feature (1)..(25): SEQ ID NO: 6946; WAN024F4D_at; Start 1043; Stop 1067
tgcacgtagtaatcgaaagagctct

SEQ ID NO: 191793 - DNA, 25 bp, Artificial
  probe
  misc_feature (1)..(25): SEQ ID NO: 6946; WAN024F4D_at; Start 958; Stop 982
gaaatgtatcaaagatatttagaag

SEQ ID NO: 191794 - DNA, 25 bp, Artificial
  probe
  misc_feature (1)..(25): SEQ ID NO: 6946; WAN024F4D_at; Start 29; Stop 53
gattgtcaggtgcaatctttgctca

SEQ ID NO: 191795 - DNA, 25 bp, Artificial
  probe
  misc_feature (1)..(25): SEQ ID NO: 6946; WAN024F4D_at; Start 117; Stop 141
catctattgtgagaacgttgaagga

SEQ ID NO: 191796 - DNA, 25 bp, Artificial
  probe
  misc_feature (1)..(25): SEQ ID NO: 6946; WAN024F4D_at; Start 15; Stop 39
tattgtcggagctggattgtcaggt

SEQ ID NO: 191797 - DNA, 25 bp, Artificial
  probe
  misc_feature (1)..(25): SEQ ID NO: 6946; WAN024F4D_at; Start 915; Stop 939
tggagatgaaccatactacccaatc

SEQ ID NO: 191798 - DNA, 25 bp, Artificial
  probe
  misc_feature (1)..(25): SEQ ID NO: 6946; WAN024F4D_at; Start 141; Stop 165
aatcaatatccataagtatggtgcc

SEQ ID NO: 191799 - DNA, 25 bp, Artificial
  probe
  misc_feature (1)..(25): SEQ ID NO: 6946; WAN024F4D_at; Start 1063; Stop 1087
gctcttaatgtagtaagagaggaat

SEQ ID NO: 191800 - DNA, 25 bp, Artificial
  probe
  misc_feature (1)..(25): SEQ ID NO: 6946; WAN024F4D_at; Start 52; Stop 76
catgaagcaacaaaacaaggaaaaa

SEQ ID NO: 191801 - DNA, 25 bp, Artificial
  probe
  misc_feature (1)..(25): SEQ ID NO: 6946; WAN024F4D_at; Start 1011; Stop 1035
tggtcgtcttgcagattataaatat

SEQ ID NO: 191802 - DNA, 25 bp, Artificial
  probe
  misc_feature (1)..(25): SEQ ID NO: 6946; WAN024F4D_at; Start 1045; Stop 1069
cacgtagtaatcgaaagagctctta

SEQ ID NO: 191803 - DNA, 25 bp, Artificial
  probe
  misc_feature (1)..(25): SEQ ID NO: 6946; WAN024F4D_at; Start 1055; Stop 1079
tcgaaagagctcttaatgtagtaag

SEQ ID NO: 191804 - DNA, 25 bp, Artificial
  probe
  misc_feature (1)..(25): SEQ ID NO: 6946; WAN024F4D_at; Start 939; Stop 963
caacgacgctaaaaataatgaaatg

SEQ ID NO: 191805 - DNA, 25 bp, Artificial
  probe
  misc_feature (1)..(25): SEQ ID NO: 6946; WAN024F4D_at; Start 129; Stop 153
gaacgttgaaggaatcaatatccat

SEQ ID NO: 191806 - DNA, 25 bp, Artificial
  probe
  misc_feature (1)..(25): SEQ ID NO: 6946; WAN024F4D_at; Start 999; Stop 1023
tgttatcttctgtggtcgtcttgca

SEQ ID NO: 191807 - DNA, 25 bp, Artificial
  probe
  misc_feature (1)..(25): SEQ ID NO: 6946; WAN024F4D_at; Start 977; Stop 1001
tagaagaagcaaaaggtaaagatgt

SEQ ID NO: 191808 - DNA, 25 bp, Artificial
  probe
  misc_feature (1)..(25): SEQ ID NO: 7114; WAN024F4E_at; Start 276; Stop 300
tccgatcaacgatgaaaagaacaac

SEQ ID NO: 191809 - DNA, 25 bp, Artificial
  probe
  misc_feature (1)..(25): SEQ ID NO: 7114; WAN024F4E_at; Start 406; Stop 430
cgtgcacttagtgtagtaacgaatg

SEQ ID NO: 191810 - DNA, 25 bp, Artificial
  probe
  misc_feature (1)..(25): SEQ ID NO: 7114; WAN024F4E_at; Start 184; Stop 208
gagcacaagcactgtgagtatggta

SEQ ID NO: 191811 - DNA, 25 bp, Artificial
  probe
  misc_feature (1)..(25): SEQ ID NO: 7114; WAN024F4E_at; Start 402; Stop 426
tgaacgtgcacttagtgtagtaacg

SEQ ID NO: 191812 - DNA, 25 bp, Artificial
  probe
  misc_feature (1)..(25): SEQ ID NO: 7114; WAN024F4E_at; Start 198; Stop 222
tgagtatggtacacaaccgaagacg

SEQ ID NO: 191813 - DNA, 25 bp, Artificial
  probe
  misc_feature (1)..(25): SEQ ID NO: 7114; WAN024F4E_at; Start 193; Stop 217
cactgtgagtatggtacacaaccga

SEQ ID NO: 191814 - DNA, 25 bp, Artificial
  probe
  misc_feature (1)..(25): SEQ ID NO: 7114; WAN024F4E_at; Start 286; Stop 310
gatgaaaagaacaacactatgtttg

SEQ ID NO: 191815 - DNA, 25 bp, Artificial
  probe
  misc_feature (1)..(25): SEQ ID NO: 7114; WAN024F4E_at; Start 194; Stop 218
actgtgagtatggtacacaaccgaa

SEQ ID NO: 191816 - DNA, 25 bp, Artificial
  probe
  misc_feature (1)..(25): SEQ ID NO: 7114; WAN024F4E_at; Start 391; Stop 415
catgttgttattgaacgtgcactta

SEQ ID NO: 191817 - DNA, 25 bp, Artificial
  probe
  misc_feature (1)..(25): SEQ ID NO: 7114; WAN024F4E_at; Start 397; Stop 421
gttattgaacgtgcacttagtgtag

SEQ ID NO: 191818 - DNA, 25 bp, Artificial
  probe
  misc_feature (1)..(25): SEQ ID NO: 7114; WAN024F4E_at; Start 187; Stop 211
cacaagcactgtgagtatggtacac

SEQ ID NO: 191819 - DNA, 25 bp, Artificial
  probe
  misc_feature (1)..(25): SEQ ID NO: 7114; WAN024F4E_at; Start 189; Stop 213
caagcactgtgagtatggtacacaa

SEQ ID NO: 191820 - DNA, 25 bp, Artificial
  probe
  misc_feature (1)..(25): SEQ ID NO: 7114; WAN024F4E_at; Start 281; Stop 305
tcaacgatgaaaagaacaacactat

SEQ ID NO: 191821 - DNA, 25 bp, Artificial
  probe
  misc_feature (1)..(25): SEQ ID NO: 7114; WAN024F4E_at; Start 410; Stop 434
cacttagtgtagtaacgaatgagtt

SEQ ID NO: 191822 - DNA, 25 bp, Artificial
  probe
  misc_feature (1)..(25): SEQ ID NO: 7114; WAN024F4E_at; Start 11; Stop 35
ttgcaaataaagttgtcttcactgg

SEQ ID NO: 191823 - DNA, 25 bp, Artificial
  probe
  misc_feature (1)..(25): SEQ ID NO: 7114; WAN024F4E_at; Start 292; Stop 316
aagaacaacactatgtttgctaagt

SEQ ID NO: 191824 - DNA, 25 bp, Artificial
  probe
  misc_feature (1)..(25): SEQ ID NO: 7114; WAN024F4E_at; Start 279; Stop 303
gatcaacgatgaaaagaacaacact

SEQ ID NO: 191825 - DNA, 25 bp, Artificial
  probe
  misc_feature (1)..(25): SEQ ID NO: 7114; WAN024F4E_at; Start 8; Stop 32
taattgcaaataaagttgtcttcac

SEQ ID NO: 191826 - DNA, 25 bp, Artificial
  probe
  misc_feature (1)..(25): SEQ ID NO: 7114; WAN024F4E_at; Start 192; Stop 216
gcactgtgagtatggtacacaaccg

SEQ ID NO: 191827 - DNA, 25 bp, Artificial
  probe
  misc_feature (1)..(25): SEQ ID NO: 7114; WAN024F4E_at; Start 3; Stop 27
gcaaataattgcaaataaagttgtc

SEQ ID NO: 191828 - DNA, 25 bp, Artificial
  probe
  misc_feature (1)..(25): SEQ ID NO: 7114; WAN024F4E_at; Start 180; Stop 204
cattgagcacaagcactgtgagtat

SEQ ID NO: 191829 - DNA, 25 bp, Artificial
  probe
  misc_feature (1)..(25): SEQ ID NO: 7114; WAN024F4E_at; Start 277; Stop 301
ccgatcaacgatgaaaagaacaaca

SEQ ID NO: 191830 - DNA, 25 bp, Artificial
  probe
  misc_feature (1)..(25): SEQ ID NO: 7114; WAN024F4E_at; Start 408; Stop 432
tgcacttagtgtagtaacgaatgag

SEQ ID NO: 191831 - DNA, 25 bp, Artificial
  probe
  misc_feature (1)..(25): SEQ ID NO: 7114; WAN024F4E_at; Start 414; Stop 438
tagtgtagtaacgaatgagtttggt

SEQ ID NO: 191832 - DNA, 25 bp, Artificial
  probe
  misc_feature (1)..(25): SEQ ID NO: 7114; WAN024F4E_at; Start 264; Stop 288
tgaaccatattatccgatcaacgat

SEQ ID NO: 191833 - DNA, 25 bp, Artificial
  probe
  misc_feature (1)..(25): SEQ ID NO: 7114; WAN024F4E_at; Start 283; Stop 307
aacgatgaaaagaacaacactatgt

SEQ ID NO: 191834 - DNA, 25 bp, Artificial
  probe
  misc_feature (1)..(25): SEQ ID NO: 7114; WAN024F4E_at; Start 404; Stop 428
aacgtgcacttagtgtagtaacgaa

SEQ ID NO: 191835 - DNA, 25 bp, Artificial
  probe
  misc_feature (1)..(25): SEQ ID NO: 7114; WAN024F4E_at; Start 15; Stop 39
aaataaagttgtcttcactggaatg

SEQ ID NO: 191836 - DNA, 25 bp, Artificial
  probe
  misc_feature (1)..(25): SEQ ID NO: 7114; WAN024F4E_at; Start 196; Stop 220
tgtgagtatggtacacaaccgaaga

SEQ ID NO: 191837 - DNA, 25 bp, Artificial
  probe
  misc_feature (1)..(25): SEQ ID NO: 7114; WAN024F4E_at; Start 387; Stop 411
catgcatgttgttattgaacgtgca

SEQ ID NO: 191838 - DNA, 25 bp, Artificial
  probe
  misc_feature (1)..(25): SEQ ID NO: 7114; WAN024F4E_at; Start 13; Stop 37
gcaaataaagttgtcttcactggaa

SEQ ID NO: 191839 - DNA, 25 bp, Artificial
  probe
  misc_feature (1)..(25): SEQ ID NO: 7114; WAN024F4E_at; Start 289; Stop 313
gaaaagaacaacactatgtttgcta

SEQ ID NO: 191840 - DNA, 25 bp, Artificial
  probe
  misc_feature (1)..(25): SEQ ID NO: 7114; WAN024F4E_at; Start 394; Stop 418
gttgttattgaacgtgcacttagtg

SEQ ID NO: 191841 - DNA, 25 bp, Artificial
  probe
  misc_feature (1)..(25): SEQ ID NO: 7114; WAN024F4E_at; Start 417; Stop 441
tgtagtaacgaatgagtttggttac

SEQ ID NO: 191842 - DNA, 25 bp, Artificial
  probe
  misc_feature (1)..(25): SEQ ID NO: 6952; WAN024F4F_at; Start 569; Stop 593
caattgggggttacaacgttatcat

SEQ ID NO: 191843 - DNA, 25 bp, Artificial
  probe
  misc_feature (1)..(25): SEQ ID NO: 6952; WAN024F4F_at; Start 336; Stop 360
gaaagataagatagctgaacaaacg

SEQ ID NO: 191844 - DNA, 25 bp, Artificial
  probe
  misc_feature (1)..(25): SEQ ID NO: 6952; WAN024F4F_at; Start 112; Stop 136
ggtaatatctactgtgaggacgttg

SEQ ID NO: 191845 - DNA, 25 bp, Artificial
  probe
  misc_feature (1)..(25): SEQ ID NO: 6952; WAN024F4F_at; Start 347; Stop 371
tagctgaacaaacggctcatatgaa

SEQ ID NO: 191846 - DNA, 25 bp, Artificial
  probe
  misc_feature (1)..(25): SEQ ID NO: 6952; WAN024F4F_at; Start 143; Stop 167
tcaacgttcacaagtacggtgccca

SEQ ID NO: 191847 - DNA, 25 bp, Artificial
  probe
  misc_feature (1)..(25): SEQ ID NO: 6952; WAN024F4F_at; Start 246; Stop 270
tatagccaattacaagggcagtctt

SEQ ID NO: 191848 - DNA, 25 bp, Artificial
  probe
  misc_feature (1)..(25): SEQ ID NO: 6952; WAN024F4F_at; Start 141; Stop 165
tatcaacgttcacaagtacggtgcc

SEQ ID NO: 191849 - DNA, 25 bp, Artificial
  probe
  misc_feature (1)..(25): SEQ ID NO: 6952; WAN024F4F_at; Start 114; Stop 138
taatatctactgtgaggacgttgaa

SEQ ID NO: 191850 - DNA, 25 bp, Artificial
  probe
  misc_feature (1)..(25): SEQ ID NO: 6952; WAN024F4F_at; Start 119; Stop 143
tctactgtgaggacgttgaaggtat

SEQ ID NO: 191851 - DNA, 25 bp, Artificial
  probe
  misc_feature (1)..(25): SEQ ID NO: 6952; WAN024F4F_at; Start 234; Stop 258
tatcaactcgcctatagccaattac

SEQ ID NO: 191852 - DNA, 25 bp, Artificial
  probe
  misc_feature (1)..(25): SEQ ID NO: 6952; WAN024F4F_at; Start 91; Stop 115
gataagcgtaatcatattggtggta

SEQ ID NO: 191853 - DNA, 25 bp, Artificial
  probe
  misc_feature (1)..(25): SEQ ID NO: 6952; WAN024F4F_at; Start 573; Stop 597
tgggggttacaacgttatcatcgaa

SEQ ID NO: 191854 - DNA, 25 bp, Artificial
  probe
  misc_feature (1)..(25): SEQ ID NO: 6952; WAN024F4F_at; Start 240; Stop 264
ctcgcctatagccaattacaagggc

SEQ ID NO: 191855 - DNA, 25 bp, Artificial
  probe
  misc_feature (1)..(25): SEQ ID NO: 6952; WAN024F4F_at; Start 108; Stop 132
tggtggtaatatctactgtgaggac

SEQ ID NO: 191856 - DNA, 25 bp, Artificial
  probe
  misc_feature (1)..(25): SEQ ID NO: 6952; WAN024F4F_at; Start 243; Stop 267
gcctatagccaattacaagggcagt

SEQ ID NO: 191857 - DNA, 25 bp, Artificial
  probe
  misc_feature (1)..(25): SEQ ID NO: 6952; WAN024F4F_at; Start 136; Stop 160
gaaggtatcaacgttcacaagtacg

SEQ ID NO: 191858 - DNA, 25 bp, Artificial
  probe
  misc_feature (1)..(25): SEQ ID NO: 6952; WAN024F4F_at; Start 145; Stop 169
aacgttcacaagtacggtgcccaca

SEQ ID NO: 191859 - DNA, 25 bp, Artificial
  probe
  misc_feature (1)..(25): SEQ ID NO: 6952; WAN024F4F_at; Start 312; Stop 336
gggaaccaagactcctcaagaagtg

SEQ ID NO: 191860 - DNA, 25 bp, Artificial
  probe
  misc_feature (1)..(25): SEQ ID NO: 6952; WAN024F4F_at; Start 345; Stop 369
gatagctgaacaaacggctcatatg

SEQ ID NO: 191861 - DNA, 25 bp, Artificial
  probe
  misc_feature (1)..(25): SEQ ID NO: 6952; WAN024F4F_at; Start 99; Stop 123
taatcatattggtggtaatatctac

SEQ ID NO: 191862 - DNA, 25 bp, Artificial
  probe
  misc_feature (1)..(25): SEQ ID NO: 6952; WAN024F4F_at; Start 87; Stop 111
gattgataagcgtaatcatattggt

SEQ ID NO: 191863 - DNA, 25 bp, Artificial
  probe
  misc_feature (1)..(25): SEQ ID NO: 6952; WAN024F4F_at; Start 137; Stop 161
aaggtatcaacgttcacaagtacgg

SEQ ID NO: 191864 - DNA, 25 bp, Artificial
  probe
  misc_feature (1)..(25): SEQ ID NO: 6952; WAN024F4F_at; Start 483; Stop 507
agacctcccaccatttatcattaaa

SEQ ID NO: 191865 - DNA, 25 bp, Artificial
  probe
  misc_feature (1)..(25): SEQ ID NO: 6952; WAN024F4F_at; Start 249; Stop 273
agccaattacaagggcagtctttac

SEQ ID NO: 191866 - DNA, 25 bp, Artificial
  probe
  misc_feature (1)..(25): SEQ ID NO: 6952; WAN024F4F_at; Start 117; Stop 141
tatctactgtgaggacgttgaaggt

SEQ ID NO: 191867 - DNA, 25 bp, Artificial
  probe
  misc_feature (1)..(25): SEQ ID NO: 6952; WAN024F4F_at; Start 139; Stop 163
ggtatcaacgttcacaagtacggtg

SEQ ID NO: 191868 - DNA, 25 bp, Artificial
  probe
  misc_feature (1)..(25): SEQ ID NO: 6952; WAN024F4F_at; Start 146; Stop 170
acgttcacaagtacggtgcccacat

SEQ ID NO: 191869 - DNA, 25 bp, Artificial
  probe
  misc_feature (1)..(25): SEQ ID NO: 6952; WAN024F4F_at; Start 121; Stop 145
tactgtgaggacgttgaaggtatca

SEQ ID NO: 191870 - DNA, 25 bp, Artificial
  probe
  misc_feature (1)..(25): SEQ ID NO: 6952; WAN024F4F_at; Start 123; Stop 147
ctgtgaggacgttgaaggtatcaac

SEQ ID NO: 191871 - DNA, 25 bp, Artificial
  probe
  misc_feature (1)..(25): SEQ ID NO: 6952; WAN024F4F_at; Start 480; Stop 504
gacagacctcccaccatttatcatt

SEQ ID NO: 191872 - DNA, 25 bp, Artificial
  probe
  misc_feature (1)..(25): SEQ ID NO: 6952; WAN024F4F_at; Start 303; Stop 327
tgctatgtggggaaccaagactcct

SEQ ID NO: 191873 - DNA, 25 bp, Artificial
  probe
  misc_feature (1)..(25): SEQ ID NO: 6952; WAN024F4F_at; Start 93; Stop 117
taagcgtaatcatattggtggtaat

SEQ ID NO: 191874 - DNA, 25 bp, Artificial
  probe
  misc_feature (1)..(25): SEQ ID NO: 6952; WAN024F4F_at; Start 351; Stop 375
tgaacaaacggctcatatgaaagat

SEQ ID NO: 191875 - DNA, 25 bp, Artificial
  probe
  misc_feature (1)..(25): SEQ ID NO: 6952; WAN024F4F_at; Start 342; Stop 366
taagatagctgaacaaacggctcat

SEQ ID NO: 191876 - DNA, 25 bp, Artificial
  probe
  misc_feature (1)..(25): SEQ ID NO: 7316; WAN024F4G_at; Start 97; Stop 121
gactgtcttaggctgcagaccatac

SEQ ID NO: 191877 - DNA, 25 bp, Artificial
  probe
  misc_feature (1)..(25): SEQ ID NO: 7316; WAN024F4G_at; Start 123; Stop 147
caaattttttatgctcaatgatacg

SEQ ID NO: 191878 - DNA, 25 bp, Artificial
  probe
  misc_feature (1)..(25): SEQ ID NO: 7316; WAN024F4G_at; Start 181; Stop 205
tacagcatttccttggtgattttcc

SEQ ID NO: 191879 - DNA, 25 bp, Artificial
  probe
  misc_feature (1)..(25): SEQ ID NO: 7316; WAN024F4G_at; Start 94; Stop 118
tatgactgtcttaggctgcagacca

SEQ ID NO: 191880 - DNA, 25 bp, Artificial
  probe
  misc_feature (1)..(25): SEQ ID NO: 7316; WAN024F4G_at; Start 144; Stop 168
tacgagtataaggaatctcacgatc

SEQ ID NO: 191881 - DNA, 25 bp, Artificial
  probe
  misc_feature (1)..(25): SEQ ID NO: 7316; WAN024F4G_at; Start 105; Stop 129
taggctgcagaccatactcaaattt

SEQ ID NO: 191882 - DNA, 25 bp, Artificial
  probe
  misc_feature (1)..(25): SEQ ID NO: 7316; WAN024F4G_at; Start 61; Stop 85
tccacgtttccagtcagctggatat

SEQ ID NO: 191883 - DNA, 25 bp, Artificial
  probe
  misc_feature (1)..(25): SEQ ID NO: 7316; WAN024F4G_at; Start 184; Stop 208
agcatttccttggtgattttcctca

SEQ ID NO: 191884 - DNA, 25 bp, Artificial
  probe
  misc_feature (1)..(25): SEQ ID NO: 7316; WAN024F4G_at; Start 1; Stop 25
gtggtatttagaaaagatagcatta

SEQ ID NO: 191885 - DNA, 25 bp, Artificial
  probe
  misc_feature (1)..(25): SEQ ID NO: 7316; WAN024F4G_at; Start 210; Stop 234
caagcacttcgtgcttaaaacgtaa

SEQ ID NO: 191886 - DNA, 25 bp, Artificial
  probe
  misc_feature (1)..(25): SEQ ID NO: 7316; WAN024F4G_at; Start 85; Stop 109
ttcatgcgttatgactgtcttaggc

SEQ ID NO: 191887 - DNA, 25 bp, Artificial
  probe
  misc_feature (1)..(25): SEQ ID NO: 7316; WAN024F4G_at; Start 174; Stop 198
agttcactacagcatttccttggtg

SEQ ID NO: 191888 - DNA, 25 bp, Artificial
  probe
  misc_feature (1)..(25): SEQ ID NO: 7316; WAN024F4G_at; Start 16; Stop 40
gatagcattatttttctcatcatta

SEQ ID NO: 191889 - DNA, 25 bp, Artificial
  probe
  misc_feature (1)..(25): SEQ ID NO: 7316; WAN024F4G_at; Start 171; Stop 195
tatagttcactacagcatttccttg

SEQ ID NO: 191890 - DNA, 25 bp, Artificial
  probe
  misc_feature (1)..(25): SEQ ID NO: 7316; WAN024F4G_at; Start 132; Stop 156
tatgctcaatgatacgagtataagg

SEQ ID NO: 191891 - DNA, 25 bp, Artificial
  probe
  misc_feature (1)..(25): SEQ ID NO: 7316; WAN024F4G_at; Start 71; Stop 95
cagtcagctggatattcatgcgtta

SEQ ID NO: 191892 - DNA, 25 bp, Artificial
  probe
  misc_feature (1)..(25): SEQ ID NO: 7316; WAN024F4G_at; Start 39; Stop 63
taattggataatatggttcatctcc

SEQ ID NO: 191893 - DNA, 25 bp, Artificial
  probe
  misc_feature (1)..(25): SEQ ID NO: 7316; WAN024F4G_at; Start 30; Stop 54
tctcatcattaattggataatatgg

SEQ ID NO: 191894 - DNA, 25 bp, Artificial
  probe
  misc_feature (1)..(25): SEQ ID NO: 7316; WAN024F4G_at; Start 57; Stop 81
catctccacgtttccagtcagctgg

SEQ ID NO: 191895 - DNA, 25 bp, Artificial
  probe
  misc_feature (1)..(25): SEQ ID NO: 7316; WAN024F4G_at; Start 80; Stop 104
ggatattcatgcgttatgactgtct

SEQ ID NO: 191896 - DNA, 25 bp, Artificial
  probe
  misc_feature (1)..(25): SEQ ID NO: 7316; WAN024F4G_at; Start 161; Stop 185
tcacgatctgtatagttcactacag

SEQ ID NO: 191897 - DNA, 25 bp, Artificial
  probe
  misc_feature (1)..(25): SEQ ID NO: 7316; WAN024F4G_at; Start 152; Stop 176
taaggaatctcacgatctgtatagt

SEQ ID NO: 191898 - DNA, 25 bp, Artificial
  probe
  misc_feature (1)..(25): SEQ ID NO: 7316; WAN024F4G_at; Start 91; Stop 115
cgttatgactgtcttaggctgcaga

SEQ ID NO: 191899 - DNA, 25 bp, Artificial
  probe
  misc_feature (1)..(25): SEQ ID NO: 7316; WAN024F4G_at; Start 198; Stop 222
gattttcctcatcaagcacttcgtg

SEQ ID NO: 191900 - DNA, 25 bp, Artificial
  probe
  misc_feature (1)..(25): SEQ ID NO: 7316; WAN024F4G_at; Start 102; Stop 126
tcttaggctgcagaccatactcaaa

SEQ ID NO: 191901 - DNA, 25 bp, Artificial
  probe
  misc_feature (1)..(25): SEQ ID NO: 7316; WAN024F4G_at; Start 53; Stop 77
ggttcatctccacgtttccagtcag

SEQ ID NO: 191902 - DNA, 25 bp, Artificial
  probe
  misc_feature (1)..(25): SEQ ID NO: 7316; WAN024F4G_at; Start 156; Stop 180
gaatctcacgatctgtatagttcac

SEQ ID NO: 191903 - DNA, 25 bp, Artificial
  probe
  misc_feature (1)..(25): SEQ ID NO: 7316; WAN024F4G_at; Start 108; Stop 132
gctgcagaccatactcaaatttttt

SEQ ID NO: 191904 - DNA, 25 bp, Artificial
  probe
  misc_feature (1)..(25): SEQ ID NO: 7316; WAN024F4G_at; Start 69; Stop 93
tccagtcagctggatattcatgcgt

SEQ ID NO: 191905 - DNA, 25 bp, Artificial
  probe
  misc_feature (1)..(25): SEQ ID NO: 7316; WAN024F4G_at; Start 191; Stop 215
ccttggtgattttcctcatcaagca

SEQ ID NO: 191906 - DNA, 25 bp, Artificial
  probe
  misc_feature (1)..(25): SEQ ID NO: 7316; WAN024F4G_at; Start 75; Stop 99
cagctggatattcatgcgttatgac

SEQ ID NO: 191907 - DNA, 25 bp, Artificial
  probe
  misc_feature (1)..(25): SEQ ID NO: 7316; WAN024F4G_at; Start 147; Stop 171
gagtataaggaatctcacgatctgt

SEQ ID NO: 191908 - DNA, 25 bp, Artificial
  probe
  misc_feature (1)..(25): SEQ ID NO: 7316; WAN024F4G_at; Start 44; Stop 68
ggataatatggttcatctccacgtt

SEQ ID NO: 191909 - DNA, 25 bp, Artificial
  probe
  misc_feature (1)..(25): SEQ ID NO: 7316; WAN024F4G_at; Start 141; Stop 165
tgatacgagtataaggaatctcacg

SEQ ID NO: 191910 - DNA, 25 bp, Artificial
  probe
  misc_feature (1)..(25): SEQ ID NO: 6832; WAN024F4H_at; Start 801; Stop 825
gaatgctgtggtcaactatacagaa

SEQ ID NO: 191911 - DNA, 25 bp, Artificial
  probe
  misc_feature (1)..(25): SEQ ID NO: 6832; WAN024F4H_at; Start 210; Stop 234
ggactatgttaaccaattcactgag

SEQ ID NO: 191912 - DNA, 25 bp, Artificial
  probe
  misc_feature (1)..(25): SEQ ID NO: 6832; WAN024F4H_at; Start 585; Stop 609
cggtggctataacgtcatcattgaa

SEQ ID NO: 191913 - DNA, 25 bp, Artificial
  probe
  misc_feature (1)..(25): SEQ ID NO: 6832; WAN024F4H_at; Start 612; Stop 636
catgcttggcgatgtagaagtagag

SEQ ID NO: 191914 - DNA, 25 bp, Artificial
  probe
  misc_feature (1)..(25): SEQ ID NO: 6832; WAN024F4H_at; Start 506; Stop 530
catttattatcaagcgcctcccagt

SEQ ID NO: 191915 - DNA, 25 bp, Artificial
  probe
  misc_feature (1)..(25): SEQ ID NO: 6832; WAN024F4H_at; Start 206; Stop 230
tatgggactatgttaaccaattcac

SEQ ID NO: 191916 - DNA, 25 bp, Artificial
  probe
  misc_feature (1)..(25): SEQ ID NO: 6832; WAN024F4H_at; Start 315; Stop 339
cgctatgtggggaactaagacacca

SEQ ID NO: 191917 - DNA, 25 bp, Artificial
  probe
  misc_feature (1)..(25): SEQ ID NO: 6832; WAN024F4H_at; Start 347; Stop 371
tcaagaacaagattgcccagcaaac

SEQ ID NO: 191918 - DNA, 25 bp, Artificial
  probe
  misc_feature (1)..(25): SEQ ID NO: 6832; WAN024F4H_at; Start 867; Stop 891
cgagtatggtactcaaccaaagacg

SEQ ID NO: 191919 - DNA, 25 bp, Artificial
  probe
  misc_feature (1)..(25): SEQ ID NO: 6832; WAN024F4H_at; Start 513; Stop 537
tatcaagcgcctcccagtgcgtttg

SEQ ID NO: 191920 - DNA, 25 bp, Artificial
  probe
  misc_feature (1)..(25): SEQ ID NO: 6832; WAN024F4H_at; Start 195; Stop 219
caataaaaaagtatgggactatgtt

SEQ ID NO: 191921 - DNA, 25 bp, Artificial
  probe
  misc_feature (1)..(25): SEQ ID NO: 6832; WAN024F4H_at; Start 856; Stop 880
cacaagcatttcgagtatggtactc

SEQ ID NO: 191922 - DNA, 25 bp, Artificial
  probe
  misc_feature (1)..(25): SEQ ID NO: 6832; WAN024F4H_at; Start 246; Stop 270
tatcaactcgccagtggctaactac

SEQ ID NO: 191923 - DNA, 25 bp, Artificial
  probe
  misc_feature (1)..(25): SEQ ID NO: 6832; WAN024F4H_at; Start 594; Stop 618
taacgtcatcattgaaaacatgctt

SEQ ID NO: 191924 - DNA, 25 bp, Artificial
  probe
  misc_feature (1)..(25): SEQ ID NO: 6832; WAN024F4H_at; Start 485; Stop 509
gttctgcaacagaccttccgccatt

SEQ ID NO: 191925 - DNA, 25 bp, Artificial
  probe
  misc_feature (1)..(25): SEQ ID NO: 6832; WAN024F4H_at; Start 343; Stop 367
gaagtcaagaacaagattgcccagc

SEQ ID NO: 191926 - DNA, 25 bp, Artificial
  probe
  misc_feature (1)..(25): SEQ ID NO: 6832; WAN024F4H_at; Start 251; Stop 275
actcgccagtggctaactacaaggg

SEQ ID NO: 191927 - DNA, 25 bp, Artificial
  probe
  misc_feature (1)..(25): SEQ ID NO: 6832; WAN024F4H_at; Start 481; Stop 505
ggacgttctgcaacagaccttccgc

SEQ ID NO: 191928 - DNA, 25 bp, Artificial
  probe
  misc_feature (1)..(25): SEQ ID NO: 6832; WAN024F4H_at; Start 849; Stop 873
cattgagcacaagcatttcgagtat

SEQ ID NO: 191929 - DNA, 25 bp, Artificial
  probe
  misc_feature (1)..(25): SEQ ID NO: 6832; WAN024F4H_at; Start 219; Stop 243
taaccaattcactgagtttaacaac

SEQ ID NO: 191930 - DNA, 25 bp, Artificial
  probe
  misc_feature (1)..(25): SEQ ID NO: 6832; WAN024F4H_at; Start 363; Stop 387
ccagcaaacggctaatatgaaagat

SEQ ID NO: 191931 - DNA, 25 bp, Artificial
  probe
  misc_feature (1)..(25): SEQ ID NO: 6832; WAN024F4H_at; Start 521; Stop 545
gcctcccagtgcgtttgacctttga

SEQ ID NO: 191932 - DNA, 25 bp, Artificial
  probe
  misc_feature (1)..(25): SEQ ID NO: 6832; WAN024F4H_at; Start 861; Stop 885
gcatttcgagtatggtactcaacca

SEQ ID NO: 191933 - DNA, 25 bp, Artificial
  probe
  misc_feature (1)..(25): SEQ ID NO: 6832; WAN024F4H_at; Start 354; Stop 378
caagattgcccagcaaacggctaat

SEQ ID NO: 191934 - DNA, 25 bp, Artificial
  probe
  misc_feature (1)..(25): SEQ ID NO: 6832; WAN024F4H_at; Start 527; Stop 551
cagtgcgtttgacctttgataacaa

SEQ ID NO: 191935 - DNA, 25 bp, Artificial
  probe
  misc_feature (1)..(25): SEQ ID NO: 6832; WAN024F4H_at; Start 306; Stop 330
taccttctacgctatgtggggaact

SEQ ID NO: 191936 - DNA, 25 bp, Artificial
  probe
  misc_feature (1)..(25): SEQ ID NO: 6832; WAN024F4H_at; Start 494; Stop 518
cagaccttccgccatttattatcaa

SEQ ID NO: 191937 - DNA, 25 bp, Artificial
  probe
  misc_feature (1)..(25): SEQ ID NO: 6832; WAN024F4H_at; Start 357; Stop 381
gattgcccagcaaacggctaatatg

SEQ ID NO: 191938 - DNA, 25 bp, Artificial
  probe
  misc_feature (1)..(25): SEQ ID NO: 6832; WAN024F4H_at; Start 589; Stop 613
ggctataacgtcatcattgaaaaca

SEQ ID NO: 191939 - DNA, 25 bp, Artificial
  probe
  misc_feature (1)..(25): SEQ ID NO: 6832; WAN024F4H_at; Start 531; Stop 555
gcgtttgacctttgataacaactac

SEQ ID NO: 191940 - DNA, 25 bp, Artificial
  probe
  misc_feature (1)..(25): SEQ ID NO: 6832; WAN024F4H_at; Start 582; Stop 606
aatcggtggctataacgtcatcatt

SEQ ID NO: 191941 - DNA, 25 bp, Artificial
  probe
  misc_feature (1)..(25): SEQ ID NO: 6832; WAN024F4H_at; Start 490; Stop 514
gcaacagaccttccgccatttatta

SEQ ID NO: 191942 - DNA, 25 bp, Artificial
  probe
  misc_feature (1)..(25): SEQ ID NO: 6832; WAN024F4H_at; Start 524; Stop 548
tcccagtgcgtttgacctttgataa

SEQ ID NO: 191943 - DNA, 25 bp, Artificial
  probe
  misc_feature (1)..(25): SEQ ID NO: 6832; WAN024F4H_at; Start 260; Stop 284
tggctaactacaaggggagtcttta

SEQ ID NO: 191944 - DNA, 25 bp, Artificial
  probe
  misc_feature (1)..(25): SEQ ID NO: 5793; WAN024F4I_at; Start 7; Stop 31
gaagcggtccatactgagaagcaat

SEQ ID NO: 191945 - DNA, 25 bp, Artificial
  probe
  misc_feature (1)..(25): SEQ ID NO: 5793; WAN024F4I_at; Start 5; Stop 29
tagaagcggtccatactgagaagca

SEQ ID NO: 191946 - DNA, 25 bp, Artificial
  probe
  misc_feature (1)..(25): SEQ ID NO: 5793; WAN024F4I_at; Start 156; Stop 180
tattgaaaatatacttaaagacgta

SEQ ID NO: 191947 - DNA, 25 bp, Artificial
  probe
  misc_feature (1)..(25): SEQ ID NO: 5793; WAN024F4I_at; Start 235; Stop 259
gctaacaaagttgcttttacaggaa

SEQ ID NO: 191948 - DNA, 25 bp, Artificial
  probe
  misc_feature (1)..(25): SEQ ID NO: 5793; WAN024F4I_at; Start 1; Stop 25
ttgttagaagcggtccatactgaga

SEQ ID NO: 191949 - DNA, 25 bp, Artificial
  probe
  misc_feature (1)..(25): SEQ ID NO: 5793; WAN024F4I_at; Start 520; Stop 544
aatgctatcttttctaaataccacg

SEQ ID NO: 191950 - DNA, 25 bp, Artificial
  probe
  misc_feature (1)..(25): SEQ ID NO: 5793; WAN024F4I_at; Start 304; Stop 328
cgcagtttacgttttaagcacgaag

SEQ ID NO: 191951 - DNA, 25 bp, Artificial
  probe
  misc_feature (1)..(25): SEQ ID NO: 5793; WAN024F4I_at; Start 16; Stop 40
catactgagaagcaatgggaacgct

SEQ ID NO: 191952 - DNA, 25 bp, Artificial
  probe
  misc_feature (1)..(25): SEQ ID NO: 5793; WAN024F4I_at; Start 540; Stop 564
ccacgaagaagcttcacagaatgat

SEQ ID NO: 191953 - DNA, 25 bp, Artificial
  probe
  misc_feature (1)..(25): SEQ ID NO: 5793; WAN024F4I_at; Start 282; Stop 306
taagcatggtgagctagagtatcgc

SEQ ID NO: 191954 - DNA, 25 bp, Artificial
  probe
  misc_feature (1)..(25): SEQ ID NO: 5793; WAN024F4I_at; Start 322; Stop 346
cacgaagtgcttgatgaggaaaatc

SEQ ID NO: 191955 - DNA, 25 bp, Artificial
  probe
  misc_feature (1)..(25): SEQ ID NO: 5793; WAN024F4I_at; Start 208; Stop 232
gactatcgtgaagagctggaagcat

SEQ ID NO: 191956 - DNA, 25 bp, Artificial
  probe
  misc_feature (1)..(25): SEQ ID NO: 5793; WAN024F4I_at; Start 436; Stop 460
cctaagacagtcataacgcatgaat

SEQ ID NO: 191957 - DNA, 25 bp, Artificial
  probe
  misc_feature (1)..(25): SEQ ID NO: 5793; WAN024F4I_at; Start 171; Stop 195
taaagacgtagaagttgggctagga

SEQ ID NO: 191958 - DNA, 25 bp, Artificial
  probe
  misc_feature (1)..(25): SEQ ID NO: 5793; WAN024F4I_at; Start 111; Stop 135
taacgaccgttatcaagtgattcct

SEQ ID NO: 191959 - DNA, 25 bp, Artificial
  probe
  misc_feature (1)..(25): SEQ ID NO: 5793; WAN024F4I_at; Start 532; Stop 556
tctaaataccacgaagaagcttcac

SEQ ID NO: 191960 - DNA, 25 bp, Artificial
  probe
  misc_feature (1)..(25): SEQ ID NO: 5793; WAN024F4I_at; Start 24; Stop 48
gaagcaatgggaacgctcagcgaca

SEQ ID NO: 191961 - DNA, 25 bp, Artificial
  probe
  misc_feature (1)..(25): SEQ ID NO: 5793; WAN024F4I_at; Start 429; Stop 453
tctgcagcctaagacagtcataacg

SEQ ID NO: 191962 - DNA, 25 bp, Artificial
  probe
  misc_feature (1)..(25): SEQ ID NO: 5793; WAN024F4I_at; Start 286; Stop 310
catggtgagctagagtatcgcagtt

SEQ ID NO: 191963 - DNA, 25 bp, Artificial
  probe
  misc_feature (1)..(25): SEQ ID NO: 5793; WAN024F4I_at; Start 138; Stop 162
tggtggatacaatgtgattattgaa

SEQ ID NO: 191964 - DNA, 25 bp, Artificial
  probe
  misc_feature (1)..(25): SEQ ID NO: 5793; WAN024F4I_at; Start 301; Stop 325
tatcgcagtttacgttttaagcacg

SEQ ID NO: 191965 - DNA, 25 bp, Artificial
  probe
  misc_feature (1)..(25): SEQ ID NO: 5793; WAN024F4I_at; Start 199; Stop 223
gattgctttgactatcgtgaagagc

SEQ ID NO: 191966 - DNA, 25 bp, Artificial
  probe
  misc_feature (1)..(25): SEQ ID NO: 5793; WAN024F4I_at; Start 123; Stop 147
tcaagtgattcctattggtggatac

SEQ ID NO: 191967 - DNA, 25 bp, Artificial
  probe
  misc_feature (1)..(25): SEQ ID NO: 5793; WAN024F4I_at; Start 413; Stop 437
aaaaatttgagtatggtctgcagcc

SEQ ID NO: 191968 - DNA, 25 bp, Artificial
  probe
  misc_feature (1)..(25): SEQ ID NO: 5793; WAN024F4I_at; Start 291; Stop 315
tgagctagagtatcgcagtttacgt

SEQ ID NO: 191969 - DNA, 25 bp, Artificial
  probe
  misc_feature (1)..(25): SEQ ID NO: 5793; WAN024F4I_at; Start 421; Stop 445
gagtatggtctgcagcctaagacag

SEQ ID NO: 191970 - DNA, 25 bp, Artificial
  probe
  misc_feature (1)..(25): SEQ ID NO: 5793; WAN024F4I_at; Start 329; Stop 353
tgcttgatgaggaaaatcaccaagg

SEQ ID NO: 191971 - DNA, 25 bp, Artificial
  probe
  misc_feature (1)..(25): SEQ ID NO: 5793; WAN024F4I_at; Start 311; Stop 335
tacgttttaagcacgaagtgcttga

SEQ ID NO: 191972 - DNA, 25 bp, Artificial
  probe
  misc_feature (1)..(25): SEQ ID NO: 5793; WAN024F4I_at; Start 240; Stop 264
caaagttgcttttacaggaatgatt

SEQ ID NO: 191973 - DNA, 25 bp, Artificial
  probe
  misc_feature (1)..(25): SEQ ID NO: 5793; WAN024F4I_at; Start 188; Stop 212
ggctaggagtggattgctttgacta

SEQ ID NO: 191974 - DNA, 25 bp, Artificial
  probe
  misc_feature (1)..(25): SEQ ID NO: 5793; WAN024F4I_at; Start 335; Stop 359
atgaggaaaatcaccaaggaaatgc

SEQ ID NO: 191975 - DNA, 25 bp, Artificial
  probe
  misc_feature (1)..(25): SEQ ID NO: 5793; WAN024F4I_at; Start 203; Stop 227
gctttgactatcgtgaagagctgga

SEQ ID NO: 191976 - DNA, 25 bp, Artificial
  probe
  misc_feature (1)..(25): SEQ ID NO: 5793; WAN024F4I_at; Start 397; Stop 421
cgtatcattgagcataaaaaatttg

SEQ ID NO: 191977 - DNA, 25 bp, Artificial
  probe
  misc_feature (1)..(25): SEQ ID NO: 5793; WAN024F4I_at; Start 495; Stop 519
ttatccaattaatgatgagaaaaat

SEQ ID NO: 191978 - DNA, 25 bp, Artificial
  probe
  misc_feature (1)..(25): SEQ ID NO: 5823; WAN024F4J_at; Start 182; Stop 206
ctcaaaatggtgatgtacaggcgtc

SEQ ID NO: 191979 - DNA, 25 bp, Artificial
  probe
  misc_feature (1)..(25): SEQ ID NO: 5823; WAN024F4J_at; Start 216; Stop 240
atacgtttaccacctgtcagtttga

SEQ ID NO: 191980 - DNA, 25 bp, Artificial
  probe
  misc_feature (1)..(25): SEQ ID NO: 5823; WAN024F4J_at; Start 16; Stop 40
cattgtgtatttaaacacaaaaaca

SEQ ID NO: 191981 - DNA, 25 bp, Artificial
  probe
  misc_feature (1)..(25): SEQ ID NO: 5823; WAN024F4J_at; Start 140; Stop 164
ccactcgctccaaggatttccttta

SEQ ID NO: 191982 - DNA, 25 bp, Artificial
  probe
  misc_feature (1)..(25): SEQ ID NO: 5823; WAN024F4J_at; Start 184; Stop 208
caaaatggtgatgtacaggcgtcat

SEQ ID NO: 191983 - DNA, 25 bp, Artificial
  probe
  misc_feature (1)..(25): SEQ ID NO: 5823; WAN024F4J_at; Start 146; Stop 170
gctccaaggatttcctttaccagac

SEQ ID NO: 191984 - DNA, 25 bp, Artificial
  probe
  misc_feature (1)..(25): SEQ ID NO: 5823; WAN024F4J_at; Start 178; Stop 202
caagctcaaaatggtgatgtacagg

SEQ ID NO: 191985 - DNA, 25 bp, Artificial
  probe
  misc_feature (1)..(25): SEQ ID NO: 5823; WAN024F4J_at; Start 120; Stop 144
caaaagaagaagtcaaccttccact

SEQ ID NO: 191986 - DNA, 25 bp, Artificial
  probe
  misc_feature (1)..(25): SEQ ID NO: 5823; WAN024F4J_at; Start 33; Stop 57
caaaaacaccctgaaacatcagggt

SEQ ID NO: 191987 - DNA, 25 bp, Artificial
  probe
  misc_feature (1)..(25): SEQ ID NO: 5823; WAN024F4J_at; Start 215; Stop 239
aatacgtttaccacctgtcagtttg

SEQ ID NO: 191988 - DNA, 25 bp, Artificial
  probe
  misc_feature (1)..(25): SEQ ID NO: 5823; WAN024F4J_at; Start 183; Stop 207
tcaaaatggtgatgtacaggcgtca

SEQ ID NO: 191989 - DNA, 25 bp, Artificial
  probe
  misc_feature (1)..(25): SEQ ID NO: 5823; WAN024F4J_at; Start 198; Stop 222
acaggcgtcatacggaaaatacgtt

SEQ ID NO: 191990 - DNA, 25 bp, Artificial
  probe
  misc_feature (1)..(25): SEQ ID NO: 5823; WAN024F4J_at; Start 150; Stop 174
caaggatttcctttaccagacaatc

SEQ ID NO: 191991 - DNA, 25 bp, Artificial
  probe
  misc_feature (1)..(25): SEQ ID NO: 5823; WAN024F4J_at; Start 51; Stop 75
tcagggtgccattcttacatcaaat

SEQ ID NO: 191992 - DNA, 25 bp, Artificial
  probe
  misc_feature (1)..(25): SEQ ID NO: 5823; WAN024F4J_at; Start 197; Stop 221
tacaggcgtcatacggaaaatacgt

SEQ ID NO: 191993 - DNA, 25 bp, Artificial
  probe
  misc_feature (1)..(25): SEQ ID NO: 5823; WAN024F4J_at; Start 123; Stop 147
aagaagaagtcaaccttccactcgc

SEQ ID NO: 191994 - DNA, 25 bp, Artificial
  probe
  misc_feature (1)..(25): SEQ ID NO: 5823; WAN024F4J_at; Start 180; Stop 204
agctcaaaatggtgatgtacaggcg

SEQ ID NO: 191995 - DNA, 25 bp, Artificial
  probe
  misc_feature (1)..(25): SEQ ID NO: 5823; WAN024F4J_at; Start 45; Stop 69
gaaacatcagggtgccattcttaca

SEQ ID NO: 191996 - DNA, 25 bp, Artificial
  probe
  misc_feature (1)..(25): SEQ ID NO: 5823; WAN024F4J_at; Start 176; Stop 200
cccaagctcaaaatggtgatgtaca

SEQ ID NO: 191997 - DNA, 25 bp, Artificial
  probe
  misc_feature (1)..(25): SEQ ID NO: 5823; WAN024F4J_at; Start 192; Stop 216
tgatgtacaggcgtcatacggaaaa

SEQ ID NO: 191998 - DNA, 25 bp, Artificial
  probe
  misc_feature (1)..(25): SEQ ID NO: 5823; WAN024F4J_at; Start 42; Stop 66
cctgaaacatcagggtgccattctt

SEQ ID NO: 191999 - DNA, 25 bp, Artificial
  probe
  misc_feature (1)..(25): SEQ ID NO: 5823; WAN024F4J_at; Start 52; Stop 76
cagggtgccattcttacatcaaata

SEQ ID NO: 192000 - DNA, 25 bp, Artificial
  probe
  misc_feature (1)..(25): SEQ ID NO: 5823; WAN024F4J_at; Start 166; Stop 190
cagacaatcccccaagctcaaaatg

SEQ ID NO: 192001 - DNA, 25 bp, Artificial
  probe
  misc_feature (1)..(25): SEQ ID NO: 5823; WAN024F4J_at; Start 10; Stop 34
gattttcattgtgtatttaaacaca

SEQ ID NO: 192002 - DNA, 25 bp, Artificial
  probe
  misc_feature (1)..(25): SEQ ID NO: 5823; WAN024F4J_at; Start 189; Stop 213
tggtgatgtacaggcgtcatacgga

SEQ ID NO: 192003 - DNA, 25 bp, Artificial
  probe
  misc_feature (1)..(25): SEQ ID NO: 5823; WAN024F4J_at; Start 193; Stop 217
gatgtacaggcgtcatacggaaaat

SEQ ID NO: 192004 - DNA, 25 bp, Artificial
  probe
  misc_feature (1)..(25): SEQ ID NO: 5823; WAN024F4J_at; Start 138; Stop 162
ttccactcgctccaaggatttcctt

SEQ ID NO: 192005 - DNA, 25 bp, Artificial
  probe
  misc_feature (1)..(25): SEQ ID NO: 5823; WAN024F4J_at; Start 195; Stop 219
tgtacaggcgtcatacggaaaatac

SEQ ID NO: 192006 - DNA, 25 bp, Artificial
  probe
  misc_feature (1)..(25): SEQ ID NO: 5823; WAN024F4J_at; Start 187; Stop 211
aatggtgatgtacaggcgtcatacg

SEQ ID NO: 192007 - DNA, 25 bp, Artificial
  probe
  misc_feature (1)..(25): SEQ ID NO: 5823; WAN024F4J_at; Start 175; Stop 199
ccccaagctcaaaatggtgatgtac

SEQ ID NO: 192008 - DNA, 25 bp, Artificial
  probe
  misc_feature (1)..(25): SEQ ID NO: 5823; WAN024F4J_at; Start 125; Stop 149
gaagaagtcaaccttccactcgctc

SEQ ID NO: 192009 - DNA, 25 bp, Artificial
  probe
  misc_feature (1)..(25): SEQ ID NO: 5823; WAN024F4J_at; Start 31; Stop 55
cacaaaaacaccctgaaacatcagg

SEQ ID NO: 192010 - DNA, 25 bp, Artificial
  probe
  misc_feature (1)..(25): SEQ ID NO: 5823; WAN024F4J_at; Start 186; Stop 210
aaatggtgatgtacaggcgtcatac

SEQ ID NO: 192011 - DNA, 25 bp, Artificial
  probe
  misc_feature (1)..(25): SEQ ID NO: 5823; WAN024F4J_at; Start 49; Stop 73
catcagggtgccattcttacatcaa

SEQ ID NO: 192012 - DNA, 25 bp, Artificial
  probe
  misc_feature (1)..(25): SEQ ID NO: 3078; WAN024F4K_at; Start 743; Stop 767
tcttgattatcggaattgtgtatgt

SEQ ID NO: 192013 - DNA, 25 bp, Artificial
  probe
  misc_feature (1)..(25): SEQ ID NO: 3078; WAN024F4K_at; Start 551; Stop 575
cctatggagttattgcctatgtgca

SEQ ID NO: 192014 - DNA, 25 bp, Artificial
  probe
  misc_feature (1)..(25): SEQ ID NO: 3078; WAN024F4K_at; Start 99; Stop 123
ccagcagatgcatgaggatgtcaaa

SEQ ID NO: 192015 - DNA, 25 bp, Artificial
  probe
  misc_feature (1)..(25): SEQ ID NO: 3078; WAN024F4K_at; Start 882; Stop 906
taaaggaaatccttggagcgagtgg

SEQ ID NO: 192016 - DNA, 25 bp, Artificial
  probe
  misc_feature (1)..(25): SEQ ID NO: 3078; WAN024F4K_at; Start 57; Stop 81
tccggcctttatccaattttataga

SEQ ID NO: 192017 - DNA, 25 bp, Artificial
  probe
  misc_feature (1)..(25): SEQ ID NO: 3078; WAN024F4K_at; Start 93; Stop 117
tacaggccagcagatgcatgaggat

SEQ ID NO: 192018 - DNA, 25 bp, Artificial
  probe
  misc_feature (1)..(25): SEQ ID NO: 3078; WAN024F4K_at; Start 824; Stop 848
aacgtattttccgtatgacgcctgt

SEQ ID NO: 192019 - DNA, 25 bp, Artificial
  probe
  misc_feature (1)..(25): SEQ ID NO: 3078; WAN024F4K_at; Start 355; Stop 379
cttctaggtggagttatcttctatc

SEQ ID NO: 192020 - DNA, 25 bp, Artificial
  probe
  misc_feature (1)..(25): SEQ ID NO: 3078; WAN024F4K_at; Start 788; Stop 812
tgatgcaagtcagttatttcaaact

SEQ ID NO: 192021 - DNA, 25 bp, Artificial
  probe
  misc_feature (1)..(25): SEQ ID NO: 3078; WAN024F4K_at; Start 518; Stop 542
tagctagtatttccgttgtgattag

SEQ ID NO: 192022 - DNA, 25 bp, Artificial
  probe
  misc_feature (1)..(25): SEQ ID NO: 3078; WAN024F4K_at; Start 557; Stop 581
gagttattgcctatgtgcaaggtca

SEQ ID NO: 192023 - DNA, 25 bp, Artificial
  probe
  misc_feature (1)..(25): SEQ ID NO: 3078; WAN024F4K_at; Start 368; Stop 392
ttatcttctatcttttctatgagcg

SEQ ID NO: 192024 - DNA, 25 bp, Artificial
  probe
  misc_feature (1)..(25): SEQ ID NO: 3078; WAN024F4K_at; Start 565; Stop 589
gcctatgtgcaaggtcagatggata

SEQ ID NO: 192025 - DNA, 25 bp, Artificial
  probe
  misc_feature (1)..(25): SEQ ID NO: 3078; WAN024F4K_at; Start 872; Stop 896
gattgtctggtaaaggaaatccttg

SEQ ID NO: 192026 - DNA, 25 bp, Artificial
  probe
  misc_feature (1)..(25): SEQ ID NO: 3078; WAN024F4K_at; Start 66; Stop 90
tatccaattttatagaaaggcgcaa

SEQ ID NO: 192027 - DNA, 25 bp, Artificial
  probe
  misc_feature (1)..(25): SEQ ID NO: 3078; WAN024F4K_at; Start 900; Stop 924
cgagtggaaggttgacttcttcttt

SEQ ID NO: 192028 - DNA, 25 bp, Artificial
  probe
  misc_feature (1)..(25): SEQ ID NO: 3078; WAN024F4K_at; Start 341; Stop 365
aattagctcttcagcttctaggtgg

SEQ ID NO: 192029 - DNA, 25 bp, Artificial
  probe
  misc_feature (1)..(25): SEQ ID NO: 3078; WAN024F4K_at; Start 84; Stop 108
ggcgcaaattacaggccagcagatg

SEQ ID NO: 192030 - DNA, 25 bp, Artificial
  probe
  misc_feature (1)..(25): SEQ ID NO: 3078; WAN024F4K_at; Start 884; Stop 908
aaggaaatccttggagcgagtggaa

SEQ ID NO: 192031 - DNA, 25 bp, Artificial
  probe
  misc_feature (1)..(25): SEQ ID NO: 3078; WAN024F4K_at; Start 568; Stop 592
tatgtgcaaggtcagatggatattc

SEQ ID NO: 192032 - DNA, 25 bp, Artificial
  probe
  misc_feature (1)..(25): SEQ ID NO: 3078; WAN024F4K_at; Start 807; Stop 831
caaactgacaggtggtaaacgtatt

SEQ ID NO: 192033 - DNA, 25 bp, Artificial
  probe
  misc_feature (1)..(25): SEQ ID NO: 3078; WAN024F4K_at; Start 103; Stop 127
cagatgcatgaggatgtcaaacagc

SEQ ID NO: 192034 - DNA, 25 bp, Artificial
  probe
  misc_feature (1)..(25): SEQ ID NO: 3078; WAN024F4K_at; Start 802; Stop 826
tatttcaaactgacaggtggtaaac

SEQ ID NO: 192035 - DNA, 25 bp, Artificial
  probe
  misc_feature (1)..(25): SEQ ID NO: 3078; WAN024F4K_at; Start 753; Stop 777
cggaattgtgtatgtttttgaaaca

SEQ ID NO: 192036 - DNA, 25 bp, Artificial
  probe
  misc_feature (1)..(25): SEQ ID NO: 3078; WAN024F4K_at; Start 897; Stop 921
gagcgagtggaaggttgacttcttc

SEQ ID NO: 192037 - DNA, 25 bp, Artificial
  probe
  misc_feature (1)..(25): SEQ ID NO: 3078; WAN024F4K_at; Start 459; Stop 483
tcttttctggctagtcggtttttca

SEQ ID NO: 192038 - DNA, 25 bp, Artificial
  probe
  misc_feature (1)..(25): SEQ ID NO: 3078; WAN024F4K_at; Start 454; Stop 478
ttcgctcttttctggctagtcggtt

SEQ ID NO: 192039 - DNA, 25 bp, Artificial
  probe
  misc_feature (1)..(25): SEQ ID NO: 3078; WAN024F4K_at; Start 88; Stop 112
caaattacaggccagcagatgcatg

SEQ ID NO: 192040 - DNA, 25 bp, Artificial
  probe
  misc_feature (1)..(25): SEQ ID NO: 3078; WAN024F4K_at; Start 346; Stop 370
gctcttcagcttctaggtggagtta

SEQ ID NO: 192041 - DNA, 25 bp, Artificial
  probe
  misc_feature (1)..(25): SEQ ID NO: 3078; WAN024F4K_at; Start 80; Stop 104
gaaaggcgcaaattacaggccagca

SEQ ID NO: 192042 - DNA, 25 bp, Artificial
  probe
  misc_feature (1)..(25): SEQ ID NO: 3078; WAN024F4K_at; Start 351; Stop 375
tcagcttctaggtggagttatcttc

SEQ ID NO: 192043 - DNA, 25 bp, Artificial
  probe
  misc_feature (1)..(25): SEQ ID NO: 3078; WAN024F4K_at; Start 572; Stop 596
tgcaaggtcagatggatattcttct

SEQ ID NO: 192044 - DNA, 25 bp, Artificial
  probe
  misc_feature (1)..(25): SEQ ID NO: 3078; WAN024F4K_at; Start 76; Stop 100
tatagaaaggcgcaaattacaggcc

SEQ ID NO: 192045 - DNA, 25 bp, Artificial
  probe
  misc_feature (1)..(25): SEQ ID NO: 3078; WAN024F4K_at; Start 336; Stop 360
gcaaaaattagctcttcagcttcta

SEQ ID NO: 192046 - DNA, 25 bp, Artificial
  probe
  misc_feature (1)..(25): SEQ ID NO: 4067; WAN024F4L_at; Start 79; Stop 103
tacttaataaatactcgctatgtcc

SEQ ID NO: 192047 - DNA, 25 bp, Artificial
  probe
  misc_feature (1)..(25): SEQ ID NO: 4067; WAN024F4L_at; Start 86; Stop 110
taaatactcgctatgtcctgctccg

SEQ ID NO: 192048 - DNA, 25 bp, Artificial
  probe
  misc_feature (1)..(25): SEQ ID NO: 4067; WAN024F4L_at; Start 229; Stop 253
aatccgaccagcttgcacttgtcag

SEQ ID NO: 192049 - DNA, 25 bp, Artificial
  probe
  misc_feature (1)..(25): SEQ ID NO: 4067; WAN024F4L_at; Start 40; Stop 64
cctggtcaaaggcatagagatggcc

SEQ ID NO: 192050 - DNA, 25 bp, Artificial
  probe
  misc_feature (1)..(25): SEQ ID NO: 4067; WAN024F4L_at; Start 159; Stop 183
tcaatcgtttcgtggagtaagaccg

SEQ ID NO: 192051 - DNA, 25 bp, Artificial
  probe
  misc_feature (1)..(25): SEQ ID NO: 4067; WAN024F4L_at; Start 29; Stop 53
ggcattctgatcctggtcaaaggca

SEQ ID NO: 192052 - DNA, 25 bp, Artificial
  probe
  misc_feature (1)..(25): SEQ ID NO: 4067; WAN024F4L_at; Start 141; Stop 165
ggctttacgtcaagcatatcaatcg

SEQ ID NO: 192053 - DNA, 25 bp, Artificial
  probe
  misc_feature (1)..(25): SEQ ID NO: 4067; WAN024F4L_at; Start 220; Stop 244
tttaccacaaatccgaccagcttgc

SEQ ID NO: 192054 - DNA, 25 bp, Artificial
  probe
  misc_feature (1)..(25): SEQ ID NO: 4067; WAN024F4L_at; Start 204; Stop 228
gtcatatcttatctattttaccaca

SEQ ID NO: 192055 - DNA, 25 bp, Artificial
  probe
  misc_feature (1)..(25): SEQ ID NO: 4067; WAN024F4L_at; Start 112; Stop 136
ccaaagtcgcatcaacgtagatacc

SEQ ID NO: 192056 - DNA, 25 bp, Artificial
  probe
  misc_feature (1)..(25): SEQ ID NO: 4067; WAN024F4L_at; Start 8; Stop 32
gcgtttttgcgcattgtcaatggca

SEQ ID NO: 192057 - DNA, 25 bp, Artificial
  probe
  misc_feature (1)..(25): SEQ ID NO: 4067; WAN024F4L_at; Start 151; Stop 175
caagcatatcaatcgtttcgtggag

SEQ ID NO: 192058 - DNA, 25 bp, Artificial
  probe
  misc_feature (1)..(25): SEQ ID NO: 4067; WAN024F4L_at; Start 179; Stop 203
gaccgttacatgatgaaattctttt

SEQ ID NO: 192059 - DNA, 25 bp, Artificial
  probe
  misc_feature (1)..(25): SEQ ID NO: 4067; WAN024F4L_at; Start 172; Stop 196
ggagtaagaccgttacatgatgaaa

SEQ ID NO: 192060 - DNA, 25 bp, Artificial
  probe
  misc_feature (1)..(25): SEQ ID NO: 4067; WAN024F4L_at; Start 237; Stop 261
cagcttgcacttgtcagacaaatag

SEQ ID NO: 192061 - DNA, 25 bp, Artificial
  probe
  misc_feature (1)..(25): SEQ ID NO: 4067; WAN024F4L_at; Start 234; Stop 258
gaccagcttgcacttgtcagacaaa

SEQ ID NO: 192062 - DNA, 25 bp, Artificial
  probe
  misc_feature (1)..(25): SEQ ID NO: 4067; WAN024F4L_at; Start 56; Stop 80
gagatggcctttttcacttaattta

SEQ ID NO: 192063 - DNA, 25 bp, Artificial
  probe
  misc_feature (1)..(25): SEQ ID NO: 4067; WAN024F4L_at; Start 87; Stop 111
aaatactcgctatgtcctgctccgc

SEQ ID NO: 192064 - DNA, 25 bp, Artificial
  probe
  misc_feature (1)..(25): SEQ ID NO: 4067; WAN024F4L_at; Start 217; Stop 241
tattttaccacaaatccgaccagct

SEQ ID NO: 192065 - DNA, 25 bp, Artificial
  probe
  misc_feature (1)..(25): SEQ ID NO: 4067; WAN024F4L_at; Start 25; Stop 49
caatggcattctgatcctggtcaaa

SEQ ID NO: 192066 - DNA, 25 bp, Artificial
  probe
  misc_feature (1)..(25): SEQ ID NO: 4067; WAN024F4L_at; Start 154; Stop 178
gcatatcaatcgtttcgtggagtaa

SEQ ID NO: 192067 - DNA, 25 bp, Artificial
  probe
  misc_feature (1)..(25): SEQ ID NO: 4067; WAN024F4L_at; Start 166; Stop 190
tttcgtggagtaagaccgttacatg

SEQ ID NO: 192068 - DNA, 25 bp, Artificial
  probe
  misc_feature (1)..(25): SEQ ID NO: 4067; WAN024F4L_at; Start 16; Stop 40
gcgcattgtcaatggcattctgatc

SEQ ID NO: 192069 - DNA, 25 bp, Artificial
  probe
  misc_feature (1)..(25): SEQ ID NO: 4067; WAN024F4L_at; Start 22; Stop 46
tgtcaatggcattctgatcctggtc

SEQ ID NO: 192070 - DNA, 25 bp, Artificial
  probe
  misc_feature (1)..(25): SEQ ID NO: 4067; WAN024F4L_at; Start 138; Stop 162
tcaggctttacgtcaagcatatcaa

SEQ ID NO: 192071 - DNA, 25 bp, Artificial
  probe
  misc_feature (1)..(25): SEQ ID NO: 4067; WAN024F4L_at; Start 3; Stop 27
gccaagcgtttttgcgcattgtcaa

SEQ ID NO: 192072 - DNA, 25 bp, Artificial
  probe
  misc_feature (1)..(25): SEQ ID NO: 4067; WAN024F4L_at; Start 110; Stop 134
gcccaaagtcgcatcaacgtagata

SEQ ID NO: 192073 - DNA, 25 bp, Artificial
  probe
  misc_feature (1)..(25): SEQ ID NO: 4067; WAN024F4L_at; Start 42; Stop 66
tggtcaaaggcatagagatggcctt

SEQ ID NO: 192074 - DNA, 25 bp, Artificial
  probe
  misc_feature (1)..(25): SEQ ID NO: 4067; WAN024F4L_at; Start 193; Stop 217
gaaattcttttgtcatatcttatct

SEQ ID NO: 192075 - DNA, 25 bp, Artificial
  probe
  misc_feature (1)..(25): SEQ ID NO: 4067; WAN024F4L_at; Start 52; Stop 76
catagagatggcctttttcacttaa

SEQ ID NO: 192076 - DNA, 25 bp, Artificial
  probe
  misc_feature (1)..(25): SEQ ID NO: 4067; WAN024F4L_at; Start 225; Stop 249
cacaaatccgaccagcttgcacttg

SEQ ID NO: 192077 - DNA, 25 bp, Artificial
  probe
  misc_feature (1)..(25): SEQ ID NO: 4067; WAN024F4L_at; Start 107; Stop 131
tccgcccaaagtcgcatcaacgtag

SEQ ID NO: 192078 - DNA, 25 bp, Artificial
  probe
  misc_feature (1)..(25): SEQ ID NO: 4067; WAN024F4L_at; Start 146; Stop 170
tacgtcaagcatatcaatcgtttcg

SEQ ID NO: 192079 - DNA, 25 bp, Artificial
  probe
  misc_feature (1)..(25): SEQ ID NO: 4067; WAN024F4L_at; Start 34; Stop 58
tctgatcctggtcaaaggcatagag

SEQ ID NO: 192080 - DNA, 25 bp, Artificial
  probe
  misc_feature (1)..(25): SEQ ID NO: 2264; WAN024F4M_at; Start 148; Stop 172
ggcttcacttcacgcgcttgctcaa

SEQ ID NO: 192081 - DNA, 25 bp, Artificial
  probe
  misc_feature (1)..(25): SEQ ID NO: 2264; WAN024F4M_at; Start 366; Stop 390
tcccaagtcataacaaattccatca

SEQ ID NO: 192082 - DNA, 25 bp, Artificial
  probe
  misc_feature (1)..(25): SEQ ID NO: 2264; WAN024F4M_at; Start 322; Stop 346
taagaaaaaccacgctcacgctggt

SEQ ID NO: 192083 - DNA, 25 bp, Artificial
  probe
  misc_feature (1)..(25): SEQ ID NO: 2264; WAN024F4M_at; Start 287; Stop 311
gattcatccgcatgtccagtggcgc

SEQ ID NO: 192084 - DNA, 25 bp, Artificial
  probe
  misc_feature (1)..(25): SEQ ID NO: 2264; WAN024F4M_at; Start 44; Stop 68
gaatagcctggaaaatctgcttagc

SEQ ID NO: 192085 - DNA, 25 bp, Artificial
  probe
  misc_feature (1)..(25): SEQ ID NO: 2264; WAN024F4M_at; Start 251; Stop 275
gattaaccacttcataggctgtcag

SEQ ID NO: 192086 - DNA, 25 bp, Artificial
  probe
  misc_feature (1)..(25): SEQ ID NO: 2264; WAN024F4M_at; Start 176; Stop 200
tacgcgcaatctgtttagagaattt

SEQ ID NO: 192087 - DNA, 25 bp, Artificial
  probe
  misc_feature (1)..(25): SEQ ID NO: 2264; WAN024F4M_at; Start 263; Stop 287
cataggctgtcagactagcatcctg

SEQ ID NO: 192088 - DNA, 25 bp, Artificial
  probe
  misc_feature (1)..(25): SEQ ID NO: 2264; WAN024F4M_at; Start 390; Stop 414
aatttcctgaacaccagcttcgcgc

SEQ ID NO: 192089 - DNA, 25 bp, Artificial
  probe
  misc_feature (1)..(25): SEQ ID NO: 2264; WAN024F4M_at; Start 236; Stop 260
catgatagtcataatgattaaccac

SEQ ID NO: 192090 - DNA, 25 bp, Artificial
  probe
  misc_feature (1)..(25): SEQ ID NO: 2264; WAN024F4M_at; Start 59; Stop 83
tctgcttagcaggatgccccttctt

SEQ ID NO: 192091 - DNA, 25 bp, Artificial
  probe
  misc_feature (1)..(25): SEQ ID NO: 2264; WAN024F4M_at; Start 382; Stop 406
attccatcaatttcctgaacaccag

SEQ ID NO: 192092 - DNA, 25 bp, Artificial
  probe
  misc_feature (1)..(25): SEQ ID NO: 2264; WAN024F4M_at; Start 397; Stop 421
tgaacaccagcttcgcgcaaacgtg

SEQ ID NO: 192093 - DNA, 25 bp, Artificial
  probe
  misc_feature (1)..(25): SEQ ID NO: 2264; WAN024F4M_at; Start 101; Stop 125
gtttgaccaacttgataatctctgc

SEQ ID NO: 192094 - DNA, 25 bp, Artificial
  probe
  misc_feature (1)..(25): SEQ ID NO: 2264; WAN024F4M_at; Start 318; Stop 342
tttataagaaaaaccacgctcacgc

SEQ ID NO: 192095 - DNA, 25 bp, Artificial
  probe
  misc_feature (1)..(25): SEQ ID NO: 2264; WAN024F4M_at; Start 54; Stop 78
gaaaatctgcttagcaggatgcccc

SEQ ID NO: 192096 - DNA, 25 bp, Artificial
  probe
  misc_feature (1)..(25): SEQ ID NO: 2264; WAN024F4M_at; Start 302; Stop 326
ccagtggcgcatcctttttataaga

SEQ ID NO: 192097 - DNA, 25 bp, Artificial
  probe
  misc_feature (1)..(25): SEQ ID NO: 2264; WAN024F4M_at; Start 31; Stop 55
ttgacttcaattcgaatagcctgga

SEQ ID NO: 192098 - DNA, 25 bp, Artificial
  probe
  misc_feature (1)..(25): SEQ ID NO: 2264; WAN024F4M_at; Start 139; Stop 163
gtctcaatcggcttcacttcacgcg

SEQ ID NO: 192099 - DNA, 25 bp, Artificial
  probe
  misc_feature (1)..(25): SEQ ID NO: 2264; WAN024F4M_at; Start 126; Stop 150
taactcagtcgttgtctcaatcggc

SEQ ID NO: 192100 - DNA, 25 bp, Artificial
  probe
  misc_feature (1)..(25): SEQ ID NO: 2264; WAN024F4M_at; Start 92; Stop 116
ccttggcaggtttgaccaacttgat

SEQ ID NO: 192101 - DNA, 25 bp, Artificial
  probe
  misc_feature (1)..(25): SEQ ID NO: 2264; WAN024F4M_at; Start 16; Stop 40
gctcccagttcatcattgacttcaa

SEQ ID NO: 192102 - DNA, 25 bp, Artificial
  probe
  misc_feature (1)..(25): SEQ ID NO: 2264; WAN024F4M_at; Start 68; Stop 92
caggatgccccttcttcttgagttc

SEQ ID NO: 192103 - DNA, 25 bp, Artificial
  probe
  misc_feature (1)..(25): SEQ ID NO: 2264; WAN024F4M_at; Start 274; Stop 298
agactagcatcctgattcatccgca

SEQ ID NO: 192104 - DNA, 25 bp, Artificial
  probe
  misc_feature (1)..(25): SEQ ID NO: 2264; WAN024F4M_at; Start 160; Stop 184
cgcgcttgctcaatcttacgcgcaa

SEQ ID NO: 192105 - DNA, 25 bp, Artificial
  probe
  misc_feature (1)..(25): SEQ ID NO: 2264; WAN024F4M_at; Start 337; Stop 361
tcacgctggtccaattgaggactag

SEQ ID NO: 192106 - DNA, 25 bp, Artificial
  probe
  misc_feature (1)..(25): SEQ ID NO: 2264; WAN024F4M_at; Start 404; Stop 428
cagcttcgcgcaaacgtgcctgtaa

SEQ ID NO: 192107 - DNA, 25 bp, Artificial
  probe
  misc_feature (1)..(25): SEQ ID NO: 2264; WAN024F4M_at; Start 87; Stop 111
gagttccttggcaggtttgaccaac

SEQ ID NO: 192108 - DNA, 25 bp, Artificial
  probe
  misc_feature (1)..(25): SEQ ID NO: 2264; WAN024F4M_at; Start 346; Stop 370
tccaattgaggactagacactccca

SEQ ID NO: 192109 - DNA, 25 bp, Artificial
  probe
  misc_feature (1)..(25): SEQ ID NO: 2264; WAN024F4M_at; Start 76; Stop 100
cccttcttcttgagttccttggcag

SEQ ID NO: 192110 - DNA, 25 bp, Artificial
  probe
  misc_feature (1)..(25): SEQ ID NO: 2264; WAN024F4M_at; Start 114; Stop 138
gataatctctgctaactcagtcgtt

SEQ ID NO: 192111 - DNA, 25 bp, Artificial
  probe
  misc_feature (1)..(25): SEQ ID NO: 2264; WAN024F4M_at; Start 353; Stop 377
gaggactagacactcccaagtcata

SEQ ID NO: 192112 - DNA, 25 bp, Artificial
  probe
  misc_feature (1)..(25): SEQ ID NO: 2264; WAN024F4M_at; Start 170; Stop 194
caatcttacgcgcaatctgtttaga

SEQ ID NO: 192113 - DNA, 25 bp, Artificial
  probe
  misc_feature (1)..(25): SEQ ID NO: 2264; WAN024F4M_at; Start 10; Stop 34
tctgccgctcccagttcatcattga

SEQ ID NO: 192114 - DNA, 25 bp, Artificial
  probe
  misc_feature (1)..(25): SEQ ID NO: 1306; WAN024F4N_at; Start 145; Stop 169
ggccatctctatgcctttgaccagg

SEQ ID NO: 192115 - DNA, 25 bp, Artificial
  probe
  misc_feature (1)..(25): SEQ ID NO: 1306; WAN024F4N_at; Start 197; Stop 221
aacgcttggcaccttacattgagaa

SEQ ID NO: 192116 - DNA, 25 bp, Artificial
  probe
  misc_feature (1)..(25): SEQ ID NO: 1306; WAN024F4N_at; Start 373; Stop 397
gatgcgccactggacatgcggatga

SEQ ID NO: 192117 - DNA, 25 bp, Artificial
  probe
  misc_feature (1)..(25): SEQ ID NO: 1306; WAN024F4N_at; Start 343; Stop 367
cagcgtgagcgtggtttttcttata

SEQ ID NO: 192118 - DNA, 25 bp, Artificial
  probe
  misc_feature (1)..(25): SEQ ID NO: 1306; WAN024F4N_at; Start 36; Stop 60
ccacgaaacgattgatatgcttgac

SEQ ID NO: 192119 - DNA, 25 bp, Artificial
  probe
  misc_feature (1)..(25): SEQ ID NO: 1306; WAN024F4N_at; Start 742; Stop 766
cattccttagaagaccgcttgacca

SEQ ID NO: 192120 - DNA, 25 bp, Artificial
  probe
  misc_feature (1)..(25): SEQ ID NO: 1306; WAN024F4N_at; Start 806; Stop 830
aaggcttgcctttcatcccagatga

SEQ ID NO: 192121 - DNA, 25 bp, Artificial
  probe
  misc_feature (1)..(25): SEQ ID NO: 1306; WAN024F4N_at; Start 74; Stop 98
gtatctacgttgatgcgactttggg

SEQ ID NO: 192122 - DNA, 25 bp, Artificial
  probe
  misc_feature (1)..(25): SEQ ID NO: 1306; WAN024F4N_at; Start 129; Stop 153
taaattaagtgaaaaaggccatctc

SEQ ID NO: 192123 - DNA, 25 bp, Artificial
  probe
  misc_feature (1)..(25): SEQ ID NO: 1306; WAN024F4N_at; Start 791; Stop 815
cagttgaagttccaaaaggcttgcc

SEQ ID NO: 192124 - DNA, 25 bp, Artificial
  probe
  misc_feature (1)..(25): SEQ ID NO: 1306; WAN024F4N_at; Start 673; Stop 697
gcagatgagtccatccagcaggcta

SEQ ID NO: 192125 - DNA, 25 bp, Artificial
  probe
  misc_feature (1)..(25): SEQ ID NO: 1306; WAN024F4N_at; Start 19; Stop 43
catgtaacggtcttactccacgaaa

SEQ ID NO: 192126 - DNA, 25 bp, Artificial
  probe
  misc_feature (1)..(25): SEQ ID NO: 1306; WAN024F4N_at; Start 632; Stop 656
tccaggctattcgaattgaagtcaa

SEQ ID NO: 192127 - DNA, 25 bp, Artificial
  probe
  misc_feature (1)..(25): SEQ ID NO: 1306; WAN024F4N_at; Start 529; Stop 553
gaagtgaagccgattgagacaacga

SEQ ID NO: 192128 - DNA, 25 bp, Artificial
  probe
  misc_feature (1)..(25): SEQ ID NO: 1306; WAN024F4N_at; Start 182; Stop 206
ttgacaatgcgcaaaaacgcttggc

SEQ ID NO: 192129 - DNA, 25 bp, Artificial
  probe
  misc_feature (1)..(25): SEQ ID NO: 1306; WAN024F4N_at; Start 824; Stop 848
cagatgatctcaagcccaagatgga

SEQ ID NO: 192130 - DNA, 25 bp, Artificial
  probe
  misc_feature (1)..(25): SEQ ID NO: 1306; WAN024F4N_at; Start 385; Stop 409
gacatgcggatgaatcaggatgcta

SEQ ID NO: 192131 - DNA, 25 bp, Artificial
  probe
  misc_feature (1)..(25): SEQ ID NO: 1306; WAN024F4N_at; Start 874; Stop 898
ccaagtgcggaagagttagaagcca

SEQ ID NO: 192132 - DNA, 25 bp, Artificial
  probe
  misc_feature (1)..(25): SEQ ID NO: 1306; WAN024F4N_at; Start 761; Stop 785
tgaccaagcaattgttcaaggaagc

SEQ ID NO: 192133 - DNA, 25 bp, Artificial
  probe
  misc_feature (1)..(25): SEQ ID NO: 1306; WAN024F4N_at; Start 688; Stop 712
cagcaggctatggatatgttggctc

SEQ ID NO: 192134 - DNA, 25 bp, Artificial
  probe
  misc_feature (1)..(25): SEQ ID NO: 1306; WAN024F4N_at; Start 544; Stop 568
gagacaacgactgagttagcagaga

SEQ ID NO: 192135 - DNA, 25 bp, Artificial
  probe
  misc_feature (1)..(25): SEQ ID NO: 1306; WAN024F4N_at; Start 160; Stop 184
tttgaccaggatcagaatgccattg

SEQ ID NO: 192136 - DNA, 25 bp, Artificial
  probe
  misc_feature (1)..(25): SEQ ID NO: 1306; WAN024F4N_at; Start 907; Stop 931
tcgcactcagccaagttgcgcgtgg

SEQ ID NO: 192137 - DNA, 25 bp, Artificial
  probe
  misc_feature (1)..(25): SEQ ID NO: 1306; WAN024F4N_at; Start 310; Stop 334
tatgacttgggagtgtctagtcctc

SEQ ID NO: 192138 - DNA, 25 bp, Artificial
  probe
  misc_feature (1)..(25): SEQ ID NO: 1306; WAN024F4N_at; Start 361; Stop 385
tcttataaaaaggatgcgccactgg

SEQ ID NO: 192139 - DNA, 25 bp, Artificial
  probe
  misc_feature (1)..(25): SEQ ID NO: 1306; WAN024F4N_at; Start 515; Stop 539
ttgagcaagcgcgtgaagtgaagcc

SEQ ID NO: 192140 - DNA, 25 bp, Artificial
  probe
  misc_feature (1)..(25): SEQ ID NO: 1306; WAN024F4N_at; Start 838; Stop 862
cccaagatggaattggtgtcccgta

SEQ ID NO: 192141 - DNA, 25 bp, Artificial
  probe
  misc_feature (1)..(25): SEQ ID NO: 1306; WAN024F4N_at; Start 616; Stop 640
cctgctaagcagattttccaggcta

SEQ ID NO: 192142 - DNA, 25 bp, Artificial
  probe
  misc_feature (1)..(25): SEQ ID NO: 1306; WAN024F4N_at; Start 889; Stop 913
ttagaagccaataaccgctcgcact

SEQ ID NO: 192143 - DNA, 25 bp, Artificial
  probe
  misc_feature (1)..(25): SEQ ID NO: 1306; WAN024F4N_at; Start 706; Stop 730
ttggctctggatggtagaatttcag

SEQ ID NO: 192144 - DNA, 25 bp, Artificial
  probe
  misc_feature (1)..(25): SEQ ID NO: 1306; WAN024F4N_at; Start 852; Stop 876
ggtgtcccgtaagccaatcttgcca

SEQ ID NO: 192145 - DNA, 25 bp, Artificial
  probe
  misc_feature (1)..(25): SEQ ID NO: 1306; WAN024F4N_at; Start 587; Stop 611
ctgccaaggaactcaagaagaaggg

SEQ ID NO: 192146 - DNA, 25 bp, Artificial
  probe
  misc_feature (1)..(25): SEQ ID NO: 1306; WAN024F4N_at; Start 497; Stop 521
aacagattgcgcgtaagattgagca

SEQ ID NO: 192147 - DNA, 25 bp, Artificial
  probe
  misc_feature (1)..(25): SEQ ID NO: 1306; WAN024F4N_at; Start 572; Stop 596
tcaagttggtcaaacctgccaagga

SEQ ID NO: 192148 - DNA, 25 bp, Artificial
  probe
  misc_feature (1)..(25): SEQ ID NO: 3032; WAN024F4O_at; Start 12; Stop 36
taatgcagacatgtccagagtcttc

SEQ ID NO: 192149 - DNA, 25 bp, Artificial
  probe
  misc_feature (1)..(25): SEQ ID NO: 3032; WAN024F4O_at; Start 221; Stop 245
tcaccaaaagccaaagtccgtccat

SEQ ID NO: 192150 - DNA, 25 bp, Artificial
  probe
  misc_feature (1)..(25): SEQ ID NO: 3032; WAN024F4O_at; Start 226; Stop 250
aaaagccaaagtccgtccatctaag

SEQ ID NO: 192151 - DNA, 25 bp, Artificial
  probe
  misc_feature (1)..(25): SEQ ID NO: 3032; WAN024F4O_at; Start 2; Stop 26
tgttcatccttaatgcagacatgtc

SEQ ID NO: 192152 - DNA, 25 bp, Artificial
  probe
  misc_feature (1)..(25): SEQ ID NO: 3032; WAN024F4O_at; Start 19; Stop 43
gacatgtccagagtcttcaaagatc

SEQ ID NO: 192153 - DNA, 25 bp, Artificial
  probe
  misc_feature (1)..(25): SEQ ID NO: 3032; WAN024F4O_at; Start 212; Stop 236
gaatcgctatcaccaaaagccaaag

SEQ ID NO: 192154 - DNA, 25 bp, Artificial
  probe
  misc_feature (1)..(25): SEQ ID NO: 3032; WAN024F4O_at; Start 208; Stop 232
tgtagaatcgctatcaccaaaagcc

SEQ ID NO: 192155 - DNA, 25 bp, Artificial
  probe
  misc_feature (1)..(25): SEQ ID NO: 3032; WAN024F4O_at; Start 202; Stop 226
cgtttctgtagaatcgctatcacca

SEQ ID NO: 192156 - DNA, 25 bp, Artificial
  probe
  misc_feature (1)..(25): SEQ ID NO: 3032; WAN024F4O_at; Start 233; Stop 257
aaagtccgtccatctaagcctgtca

SEQ ID NO: 192157 - DNA, 25 bp, Artificial
  probe
  misc_feature (1)..(25): SEQ ID NO: 3032; WAN024F4O_at; Start 8; Stop 32
tccttaatgcagacatgtccagagt

SEQ ID NO: 192158 - DNA, 25 bp, Artificial
  probe
  misc_feature (1)..(25): SEQ ID NO: 3032; WAN024F4O_at; Start 72; Stop 96
caaattcctgcagtcgcttgacctt

SEQ ID NO: 192159 - DNA, 25 bp, Artificial
  probe
  misc_feature (1)..(25): SEQ ID NO: 3032; WAN024F4O_at; Start 32; Stop 56
tcttcaaagatcatggacttaggct

SEQ ID NO: 192160 - DNA, 25 bp, Artificial
  probe
  misc_feature (1)..(25): SEQ ID NO: 3032; WAN024F4O_at; Start 194; Stop 218
atttctgtcgtttctgtagaatcgc

SEQ ID NO: 192161 - DNA, 25 bp, Artificial
  probe
  misc_feature (1)..(25): SEQ ID NO: 3032; WAN024F4O_at; Start 80; Stop 104
tgcagtcgcttgaccttttctcgcc

SEQ ID NO: 192162 - DNA, 25 bp, Artificial
  probe
  misc_feature (1)..(25): SEQ ID NO: 3032; WAN024F4O_at; Start 5; Stop 29
tcatccttaatgcagacatgtccag

SEQ ID NO: 192163 - DNA, 25 bp, Artificial
  probe
  misc_feature (1)..(25): SEQ ID NO: 3032; WAN024F4O_at; Start 168; Stop 192
tcaaaaccacagcagacaggctcaa

SEQ ID NO: 192164 - DNA, 25 bp, Artificial
  probe
  misc_feature (1)..(25): SEQ ID NO: 3032; WAN024F4O_at; Start 23; Stop 47
tgtccagagtcttcaaagatcatgg

SEQ ID NO: 192165 - DNA, 25 bp, Artificial
  probe
  misc_feature (1)..(25): SEQ ID NO: 3032; WAN024F4O_at; Start 43; Stop 67
catggacttaggctgccaagctctc

SEQ ID NO: 192166 - DNA, 25 bp, Artificial
  probe
  misc_feature (1)..(25): SEQ ID NO: 3032; WAN024F4O_at; Start 138; Stop 162
catccagaccgttaagaaggtcttc

SEQ ID NO: 192167 - DNA, 25 bp, Artificial
  probe
  misc_feature (1)..(25): SEQ ID NO: 3032; WAN024F4O_at; Start 236; Stop 260
gtccgtccatctaagcctgtcatca

SEQ ID NO: 192168 - DNA, 25 bp, Artificial
  probe
  misc_feature (1)..(25): SEQ ID NO: 3032; WAN024F4O_at; Start 69; Stop 93
tttcaaattcctgcagtcgcttgac

SEQ ID NO: 192169 - DNA, 25 bp, Artificial
  probe
  misc_feature (1)..(25): SEQ ID NO: 3032; WAN024F4O_at; Start 16; Stop 40
gcagacatgtccagagtcttcaaag

SEQ ID NO: 192170 - DNA, 25 bp, Artificial
  probe
  misc_feature (1)..(25): SEQ ID NO: 3032; WAN024F4O_at; Start 87; Stop 111
gcttgaccttttctcgccccaggaa

SEQ ID NO: 192171 - DNA, 25 bp, Artificial
  probe
  misc_feature (1)..(25): SEQ ID NO: 3032; WAN024F4O_at; Start 35; Stop 59
tcaaagatcatggacttaggctgcc

SEQ ID NO: 192172 - DNA, 25 bp, Artificial
  probe
  misc_feature (1)..(25): SEQ ID NO: 3032; WAN024F4O_at; Start 129; Stop 153
caactttaacatccagaccgttaag

SEQ ID NO: 192173 - DNA, 25 bp, Artificial
  probe
  misc_feature (1)..(25): SEQ ID NO: 3032; WAN024F4O_at; Start 38; Stop 62
aagatcatggacttaggctgccaag

SEQ ID NO: 192174 - DNA, 25 bp, Artificial
  probe
  misc_feature (1)..(25): SEQ ID NO: 3032; WAN024F4O_at; Start 89; Stop 113
ttgaccttttctcgccccaggaaca

SEQ ID NO: 192175 - DNA, 25 bp, Artificial
  probe
  misc_feature (1)..(25): SEQ ID NO: 3032; WAN024F4O_at; Start 40; Stop 64
gatcatggacttaggctgccaagct

SEQ ID NO: 192176 - DNA, 25 bp, Artificial
  probe
  misc_feature (1)..(25): SEQ ID NO: 3032; WAN024F4O_at; Start 230; Stop 254
gccaaagtccgtccatctaagcctg

SEQ ID NO: 192177 - DNA, 25 bp, Artificial
  probe
  misc_feature (1)..(25): SEQ ID NO: 3032; WAN024F4O_at; Start 118; Stop 142
gctaagcaaatcaactttaacatcc

SEQ ID NO: 192178 - DNA, 25 bp, Artificial
  probe
  misc_feature (1)..(25): SEQ ID NO: 3032; WAN024F4O_at; Start 217; Stop 241
gctatcaccaaaagccaaagtccgt

SEQ ID NO: 192179 - DNA, 25 bp, Artificial
  probe
  misc_feature (1)..(25): SEQ ID NO: 3032; WAN024F4O_at; Start 124; Stop 148
caaatcaactttaacatccagaccg

SEQ ID NO: 192180 - DNA, 25 bp, Artificial
  probe
  misc_feature (1)..(25): SEQ ID NO: 3032; WAN024F4O_at; Start 166; Stop 190
gttcaaaaccacagcagacaggctc

SEQ ID NO: 192181 - DNA, 25 bp, Artificial
  probe
  misc_feature (1)..(25): SEQ ID NO: 3032; WAN024F4O_at; Start 241; Stop 265
tccatctaagcctgtcatcatttga

SEQ ID NO: 192182 - DNA, 25 bp, Artificial
  probe
  misc_feature (1)..(25): SEQ ID NO: 4209; WAN024F4P_at; Start 214; Stop 238
tggttcaaggatagctggttgtgct

SEQ ID NO: 192183 - DNA, 25 bp, Artificial
  probe
  misc_feature (1)..(25): SEQ ID NO: 4209; WAN024F4P_at; Start 204; Stop 228
caagcatcattggttcaaggatagc

SEQ ID NO: 192184 - DNA, 25 bp, Artificial
  probe
  misc_feature (1)..(25): SEQ ID NO: 4209; WAN024F4P_at; Start 31; Stop 55
tccttgagatgcagaacgaagaact

SEQ ID NO: 192185 - DNA, 25 bp, Artificial
  probe
  misc_feature (1)..(25): SEQ ID NO: 4209; WAN024F4P_at; Start 100; Stop 124
gatttggctgttaccgtgtgcttcc

SEQ ID NO: 192186 - DNA, 25 bp, Artificial
  probe
  misc_feature (1)..(25): SEQ ID NO: 4209; WAN024F4P_at; Start 116; Stop 140
tgtgcttccataccatctacacgtc

SEQ ID NO: 192187 - DNA, 25 bp, Artificial
  probe
  misc_feature (1)..(25): SEQ ID NO: 4209; WAN024F4P_at; Start 133; Stop 157
tacacgtccacgacgagcagttacg

SEQ ID NO: 192188 - DNA, 25 bp, Artificial
  probe
  misc_feature (1)..(25): SEQ ID NO: 4209; WAN024F4P_at; Start 188; Stop 212
ggaacagtgattgttacaagcatca

SEQ ID NO: 192189 - DNA, 25 bp, Artificial
  probe
  misc_feature (1)..(25): SEQ ID NO: 4209; WAN024F4P_at; Start 27; Stop 51
cacgtccttgagatgcagaacgaag

SEQ ID NO: 192190 - DNA, 25 bp, Artificial
  probe
  misc_feature (1)..(25): SEQ ID NO: 4209; WAN024F4P_at; Start 147; Stop 171
gagcagttacgtgacccataacatc

SEQ ID NO: 192191 - DNA, 25 bp, Artificial
  probe
  misc_feature (1)..(25): SEQ ID NO: 4209; WAN024F4P_at; Start 96; Stop 120
gaacgatttggctgttaccgtgtgc

SEQ ID NO: 192192 - DNA, 25 bp, Artificial
  probe
  misc_feature (1)..(25): SEQ ID NO: 4209; WAN024F4P_at; Start 70; Stop 94
catttcagcaagtggaacgtaagca

SEQ ID NO: 192193 - DNA, 25 bp, Artificial
  probe
  misc_feature (1)..(25): SEQ ID NO: 4209; WAN024F4P_at; Start 10; Stop 34
taccatcatgaatgtaccacgtcct

SEQ ID NO: 192194 - DNA, 25 bp, Artificial
  probe
  misc_feature (1)..(25): SEQ ID NO: 4209; WAN024F4P_at; Start 208; Stop 232
catcattggttcaaggatagctggt

SEQ ID NO: 192195 - DNA, 25 bp, Artificial
  probe
  misc_feature (1)..(25): SEQ ID NO: 4209; WAN024F4P_at; Start 55; Stop 79
tgttgcgtaaccgaacatttcagca

SEQ ID NO: 192196 - DNA, 25 bp, Artificial
  probe
  misc_feature (1)..(25): SEQ ID NO: 4209; WAN024F4P_at; Start 106; Stop 130
gctgttaccgtgtgcttccatacca

SEQ ID NO: 192197 - DNA, 25 bp, Artificial
  probe
  misc_feature (1)..(25): SEQ ID NO: 4209; WAN024F4P_at; Start 42; Stop 66
cagaacgaagaactgttgcgtaacc

SEQ ID NO: 192198 - DNA, 25 bp, Artificial
  probe
  misc_feature (1)..(25): SEQ ID NO: 4209; WAN024F4P_at; Start 125; Stop 149
ataccatctacacgtccacgacgag

SEQ ID NO: 192199 - DNA, 25 bp, Artificial
  probe
  misc_feature (1)..(25): SEQ ID NO: 4209; WAN024F4P_at; Start 91; Stop 115
agcacgaacgatttggctgttaccg

SEQ ID NO: 192200 - DNA, 25 bp, Artificial
  probe
  misc_feature (1)..(25): SEQ ID NO: 4209; WAN024F4P_at; Start 16; Stop 40
catgaatgtaccacgtccttgagat

SEQ ID NO: 192201 - DNA, 25 bp, Artificial
  probe
  misc_feature (1)..(25): SEQ ID NO: 4209; WAN024F4P_at; Start 154; Stop 178
tacgtgacccataacatcaccaagg

SEQ ID NO: 192202 - DNA, 25 bp, Artificial
  probe
  misc_feature (1)..(25): SEQ ID NO: 4209; WAN024F4P_at; Start 47; Stop 71
cgaagaactgttgcgtaaccgaaca

SEQ ID NO: 192203 - DNA, 25 bp, Artificial
  probe
  misc_feature (1)..(25): SEQ ID NO: 4209; WAN024F4P_at; Start 19; Stop 43
gaatgtaccacgtccttgagatgca

SEQ ID NO: 192204 - DNA, 25 bp, Artificial
  probe
  misc_feature (1)..(25): SEQ ID NO: 4209; WAN024F4P_at; Start 165; Stop 189
taacatcaccaaggttttcttctgg

SEQ ID NO: 192205 - DNA, 25 bp, Artificial
  probe
  misc_feature (1)..(25): SEQ ID NO: 4209; WAN024F4P_at; Start 24; Stop 48
taccacgtccttgagatgcagaacg

SEQ ID NO: 192206 - DNA, 25 bp, Artificial
  probe
  misc_feature (1)..(25): SEQ ID NO: 4209; WAN024F4P_at; Start 2; Stop 26
tggtcaaataccatcatgaatgtac

SEQ ID NO: 192207 - DNA, 25 bp, Artificial
  probe
  misc_feature (1)..(25): SEQ ID NO: 4209; WAN024F4P_at; Start 173; Stop 197
ccaaggttttcttctggaacagtga

SEQ ID NO: 192208 - DNA, 25 bp, Artificial
  probe
  misc_feature (1)..(25): SEQ ID NO: 4209; WAN024F4P_at; Start 157; Stop 181
gtgacccataacatcaccaaggttt

SEQ ID NO: 192209 - DNA, 25 bp, Artificial
  probe
  misc_feature (1)..(25): SEQ ID NO: 4209; WAN024F4P_at; Start 78; Stop 102
caagtggaacgtaagcacgaacgat

SEQ ID NO: 192210 - DNA, 25 bp, Artificial
  probe
  misc_feature (1)..(25): SEQ ID NO: 4209; WAN024F4P_at; Start 84; Stop 108
gaacgtaagcacgaacgatttggct

SEQ ID NO: 192211 - DNA, 25 bp, Artificial
  probe
  misc_feature (1)..(25): SEQ ID NO: 4209; WAN024F4P_at; Start 143; Stop 167
cgacgagcagttacgtgacccataa

SEQ ID NO: 192212 - DNA, 25 bp, Artificial
  probe
  misc_feature (1)..(25): SEQ ID NO: 4209; WAN024F4P_at; Start 74; Stop 98
tcagcaagtggaacgtaagcacgaa

SEQ ID NO: 192213 - DNA, 25 bp, Artificial
  probe
  misc_feature (1)..(25): SEQ ID NO: 4209; WAN024F4P_at; Start 109; Stop 133
gttaccgtgtgcttccataccatct

SEQ ID NO: 192214 - DNA, 25 bp, Artificial
  probe
  misc_feature (1)..(25): SEQ ID NO: 4209; WAN024F4P_at; Start 199; Stop 223
tgttacaagcatcattggttcaagg

SEQ ID NO: 192215 - DNA, 25 bp, Artificial
  probe
  misc_feature (1)..(25): SEQ ID NO: 4209; WAN024F4P_at; Start 36; Stop 60
gagatgcagaacgaagaactgttgc

SEQ ID NO: 192216 - DNA, 25 bp, Artificial
  probe
  misc_feature (1)..(25): SEQ ID NO: 5121; WAN024F4Q_at; Start 217; Stop 241
tttgttggcaaatacgatacgtgga

SEQ ID NO: 192217 - DNA, 25 bp, Artificial
  probe
  misc_feature (1)..(25): SEQ ID NO: 5121; WAN024F4Q_at; Start 267; Stop 291
aaactgtttcagtttgaggctcaac

SEQ ID NO: 192218 - DNA, 25 bp, Artificial
  probe
  misc_feature (1)..(25): SEQ ID NO: 5121; WAN024F4Q_at; Start 2; Stop 26
tgagcttggtcaaggtattcagctg

SEQ ID NO: 192219 - DNA, 25 bp, Artificial
  probe
  misc_feature (1)..(25): SEQ ID NO: 5121; WAN024F4Q_at; Start 245; Stop 269
ccgtactcagttgcttgacgccaaa

SEQ ID NO: 192220 - DNA, 25 bp, Artificial
  probe
  misc_feature (1)..(25): SEQ ID NO: 5121; WAN024F4Q_at; Start 90; Stop 114
tcaagtcaatgataccacggaagtc

SEQ ID NO: 192221 - DNA, 25 bp, Artificial
  probe
  misc_feature (1)..(25): SEQ ID NO: 5121; WAN024F4Q_at; Start 146; Stop 170
tgtgcatttgcttgaagacgatcgt

SEQ ID NO: 192222 - DNA, 25 bp, Artificial
  probe
  misc_feature (1)..(25): SEQ ID NO: 5121; WAN024F4Q_at; Start 240; Stop 264
gaactccgtactcagttgcttgacg

SEQ ID NO: 192223 - DNA, 25 bp, Artificial
  probe
  misc_feature (1)..(25): SEQ ID NO: 5121; WAN024F4Q_at; Start 224; Stop 248
gcaaatacgatacgtggaactccgt

SEQ ID NO: 192224 - DNA, 25 bp, Artificial
  probe
  misc_feature (1)..(25): SEQ ID NO: 5121; WAN024F4Q_at; Start 122; Stop 146
gaaccgattggcaattggattgggt

SEQ ID NO: 192225 - DNA, 25 bp, Artificial
  probe
  misc_feature (1)..(25): SEQ ID NO: 5121; WAN024F4Q_at; Start 70; Stop 94
gatttcagctttcatcttgatcaag

SEQ ID NO: 192226 - DNA, 25 bp, Artificial
  probe
  misc_feature (1)..(25): SEQ ID NO: 5121; WAN024F4Q_at; Start 12; Stop 36
caaggtattcagctgggatgtcttc

SEQ ID NO: 192227 - DNA, 25 bp, Artificial
  probe
  misc_feature (1)..(25): SEQ ID NO: 5121; WAN024F4Q_at; Start 202; Stop 226
accgattttgtccattttgttggca

SEQ ID NO: 192228 - DNA, 25 bp, Artificial
  probe
  misc_feature (1)..(25): SEQ ID NO: 5121; WAN024F4Q_at; Start 179; Stop 203
cttacagagtaaaggaagtcagcac

SEQ ID NO: 192229 - DNA, 25 bp, Artificial
  probe
  misc_feature (1)..(25): SEQ ID NO: 5121; WAN024F4Q_at; Start 168; Stop 192
cgtgaagtgtgcttacagagtaaag

SEQ ID NO: 192230 - DNA, 25 bp, Artificial
  probe
  misc_feature (1)..(25): SEQ ID NO: 5121; WAN024F4Q_at; Start 162; Stop 186
gacgatcgtgaagtgtgcttacaga

SEQ ID NO: 192231 - DNA, 25 bp, Artificial
  probe
  misc_feature (1)..(25): SEQ ID NO: 5121; WAN024F4Q_at; Start 254; Stop 278
gttgcttgacgccaaactgtttcag

SEQ ID NO: 192232 - DNA, 25 bp, Artificial
  probe
  misc_feature (1)..(25): SEQ ID NO: 5121; WAN024F4Q_at; Start 149; Stop 173
gcatttgcttgaagacgatcgtgaa

SEQ ID NO: 192233 - DNA, 25 bp, Artificial
  probe
  misc_feature (1)..(25): SEQ ID NO: 5121; WAN024F4Q_at; Start 272; Stop 296
gtttcagtttgaggctcaacacctg

SEQ ID NO: 192234 - DNA, 25 bp, Artificial
  probe
  misc_feature (1)..(25): SEQ ID NO: 5121; WAN024F4Q_at; Start 133; Stop 157
caattggattgggtgtgcatttgct

SEQ ID NO: 192235 - DNA, 25 bp, Artificial
  probe
  misc_feature (1)..(25): SEQ ID NO: 5121; WAN024F4Q_at; Start 38; Stop 62
tcaaggatatccgtaccaaggtcgt

SEQ ID NO: 192236 - DNA, 25 bp, Artificial
  probe
  misc_feature (1)..(25): SEQ ID NO: 5121; WAN024F4Q_at; Start 116; Stop 140
tcttcagaaccgattggcaattgga

SEQ ID NO: 192237 - DNA, 25 bp, Artificial
  probe
  misc_feature (1)..(25): SEQ ID NO: 5121; WAN024F4Q_at; Start 23; Stop 47
gctgggatgtcttcttcaaggatat

SEQ ID NO: 192238 - DNA, 25 bp, Artificial
  probe
  misc_feature (1)..(25): SEQ ID NO: 5121; WAN024F4Q_at; Start 232; Stop 256
gatacgtggaactccgtactcagtt

SEQ ID NO: 192239 - DNA, 25 bp, Artificial
  probe
  misc_feature (1)..(25): SEQ ID NO: 5121; WAN024F4Q_at; Start 193; Stop 217
gaagtcagcaccgattttgtccatt

SEQ ID NO: 192240 - DNA, 25 bp, Artificial
  probe
  misc_feature (1)..(25): SEQ ID NO: 5121; WAN024F4Q_at; Start 43; Stop 67
gatatccgtaccaaggtcgttagta

SEQ ID NO: 192241 - DNA, 25 bp, Artificial
  probe
  misc_feature (1)..(25): SEQ ID NO: 5121; WAN024F4Q_at; Start 84; Stop 108
tcttgatcaagtcaatgataccacg

SEQ ID NO: 192242 - DNA, 25 bp, Artificial
  probe
  misc_feature (1)..(25): SEQ ID NO: 5121; WAN024F4Q_at; Start 54; Stop 78
caaggtcgttagtatagatttcagc

SEQ ID NO: 192243 - DNA, 25 bp, Artificial
  probe
  misc_feature (1)..(25): SEQ ID NO: 5121; WAN024F4Q_at; Start 155; Stop 179
gcttgaagacgatcgtgaagtgtgc

SEQ ID NO: 192244 - DNA, 25 bp, Artificial
  probe
  misc_feature (1)..(25): SEQ ID NO: 5121; WAN024F4Q_at; Start 109; Stop 133
gaagtcatcttcagaaccgattggc

SEQ ID NO: 192245 - DNA, 25 bp, Artificial
  probe
  misc_feature (1)..(25): SEQ ID NO: 5121; WAN024F4Q_at; Start 6; Stop 30
cttggtcaaggtattcagctgggat

SEQ ID NO: 192246 - DNA, 25 bp, Artificial
  probe
  misc_feature (1)..(25): SEQ ID NO: 5121; WAN024F4Q_at; Start 17; Stop 41
tattcagctgggatgtcttcttcaa

SEQ ID NO: 192247 - DNA, 25 bp, Artificial
  probe
  misc_feature (1)..(25): SEQ ID NO: 5121; WAN024F4Q_at; Start 48; Stop 72
ccgtaccaaggtcgttagtatagat

SEQ ID NO: 192248 - DNA, 25 bp, Artificial
  probe
  misc_feature (1)..(25): SEQ ID NO: 5121; WAN024F4Q_at; Start 185; Stop 209
gagtaaaggaagtcagcaccgattt

SEQ ID NO: 192249 - DNA, 25 bp, Artificial
  probe
  misc_feature (1)..(25): SEQ ID NO: 5121; WAN024F4Q_at; Start 99; Stop 123
tgataccacggaagtcatcttcaga

SEQ ID NO: 192250 - DNA, 25 bp, Artificial
  probe
  misc_feature (1)..(25): SEQ ID NO: 2419; WAN024F4R_at; Start 1495; Stop 1519
tctggtggtaaaggtcaattcggtg

SEQ ID NO: 192251 - DNA, 25 bp, Artificial
  probe
  misc_feature (1)..(25): SEQ ID NO: 2419; WAN024F4R_at; Start 2009; Stop 2033
tatttgaccactacgaagatgtacc

SEQ ID NO: 192252 - DNA, 25 bp, Artificial
  probe
  misc_feature (1)..(25): SEQ ID NO: 2419; WAN024F4R_at; Start 347; Stop 371
ctgaaacagtttggcgtcaagcaac

SEQ ID NO: 192253 - DNA, 25 bp, Artificial
  probe
  misc_feature (1)..(25): SEQ ID NO: 2419; WAN024F4R_at; Start 1823; Stop 1847
tcactgttccagaagaaaaccttgg

SEQ ID NO: 192254 - DNA, 25 bp, Artificial
  probe
  misc_feature (1)..(25): SEQ ID NO: 2419; WAN024F4R_at; Start 1075; Stop 1099
gctaacagccgtcaagaaatcgaca

SEQ ID NO: 192255 - DNA, 25 bp, Artificial
  probe
  misc_feature (1)..(25): SEQ ID NO: 2419; WAN024F4R_at; Start 612; Stop 636
tgaccaagctcaagaataccgtgaa

SEQ ID NO: 192256 - DNA, 25 bp, Artificial
  probe
  misc_feature (1)..(25): SEQ ID NO: 2419; WAN024F4R_at; Start 1577; Stop 1601
caatcgtcggtggtgtggttcctcg

SEQ ID NO: 192257 - DNA, 25 bp, Artificial
  probe
  misc_feature (1)..(25): SEQ ID NO: 2419; WAN024F4R_at; Start 942; Stop 966
gatcatgactgacccattcgtaggt

SEQ ID NO: 192258 - DNA, 25 bp, Artificial
  probe
  misc_feature (1)..(25): SEQ ID NO: 2419; WAN024F4R_at; Start 1478; Stop 1502
gattcttcaaacgtcagtctggtgg

SEQ ID NO: 192259 - DNA, 25 bp, Artificial
  probe
  misc_feature (1)..(25): SEQ ID NO: 2419; WAN024F4R_at; Start 1975; Stop 1999
tctgcatctcaaggacgtggtacat

SEQ ID NO: 192260 - DNA, 25 bp, Artificial
  probe
  misc_feature (1)..(25): SEQ ID NO: 2419; WAN024F4R_at; Start 34; Stop 58
aatatcggtatcatggctcacgtcg

SEQ ID NO: 192261 - DNA, 25 bp, Artificial
  probe
  misc_feature (1)..(25): SEQ ID NO: 2419; WAN024F4R_at; Start 1114; Stop 1138
gatatcgctgctgccgttggtttga

SEQ ID NO: 192262 - DNA, 25 bp, Artificial
  probe
  misc_feature (1)..(25): SEQ ID NO: 2419; WAN024F4R_at; Start 1562; Stop 1586
tcgaattcgaaaacgcaatcgtcgg

SEQ ID NO: 192263 - DNA, 25 bp, Artificial
  probe
  misc_feature (1)..(25): SEQ ID NO: 2419; WAN024F4R_at; Start 1669; Stop 1693
ccaatggttgacgttaaagctaagc

SEQ ID NO: 192264 - DNA, 25 bp, Artificial
  probe
  misc_feature (1)..(25): SEQ ID NO: 2419; WAN024F4R_at; Start 323; Stop 347
cacaatcaggtgttgagcctcaaac

SEQ ID NO: 192265 - DNA, 25 bp, Artificial
  probe
  misc_feature (1)..(25): SEQ ID NO: 2419; WAN024F4R_at; Start 493; Stop 517
ccaatcggttctgaagatgacttcc

SEQ ID NO: 192266 - DNA, 25 bp, Artificial
  probe
  misc_feature (1)..(25): SEQ ID NO: 2419; WAN024F4R_at; Start 1436; Stop 1460
tatcttaccgtgaaacattccgcgc

SEQ ID NO: 192267 - DNA, 25 bp, Artificial
  probe
  misc_feature (1)..(25): SEQ ID NO: 2419; WAN024F4R_at; Start 1050; Stop 1074
tatcggacgtatccttcaaatgcac

SEQ ID NO: 192268 - DNA, 25 bp, Artificial
  probe
  misc_feature (1)..(25): SEQ ID NO: 2419; WAN024F4R_at; Start 1251; Stop 1275
tgaccaagacaagatgggtatcgcc

SEQ ID NO: 192269 - DNA, 25 bp, Artificial
  probe
  misc_feature (1)..(25): SEQ ID NO: 2419; WAN024F4R_at; Start 1949; Stop 1973
tgttcggttacgcaacagttcttcg

SEQ ID NO: 192270 - DNA, 25 bp, Artificial
  probe
  misc_feature (1)..(25): SEQ ID NO: 2419; WAN024F4R_at; Start 1192; Stop 1216
gagtcaatcaacgttccagaaccag

SEQ ID NO: 192271 - DNA, 25 bp, Artificial
  probe
  misc_feature (1)..(25): SEQ ID NO: 2419; WAN024F4R_at; Start 719; Stop 743
tgaaagctggtatccgtaaagcgac

SEQ ID NO: 192272 - DNA, 25 bp, Artificial
  probe
  misc_feature (1)..(25): SEQ ID NO: 2419; WAN024F4R_at; Start 227; Stop 251
gcgtaaacatcatcgacacaccagg

SEQ ID NO: 192273 - DNA, 25 bp, Artificial
  probe
  misc_feature (1)..(25): SEQ ID NO: 2419; WAN024F4R_at; Start 1265; Stop 1289
tgggtatcgcccttcaaaaattggc

SEQ ID NO: 192274 - DNA, 25 bp, Artificial
  probe
  misc_feature (1)..(25): SEQ ID NO: 2419; WAN024F4R_at; Start 1290; Stop 1314
tgaagaagatccaacattccgcgtt

SEQ ID NO: 192275 - DNA, 25 bp, Artificial
  probe
  misc_feature (1)..(25): SEQ ID NO: 2419; WAN024F4R_at; Start 1853; Stop 1877
ttatgggtcacgtaactgctcgtcg

SEQ ID NO: 192276 - DNA, 25 bp, Artificial
  probe
  misc_feature (1)..(25): SEQ ID NO: 2419; WAN024F4R_at; Start 1647; Stop 1671
taacggtgttcttgcaggttaccca

SEQ ID NO: 192277 - DNA, 25 bp, Artificial
  probe
  misc_feature (1)..(25): SEQ ID NO: 2419; WAN024F4R_at; Start 303; Stop 327
tgcggttaccgttcttgactcacaa

SEQ ID NO: 192278 - DNA, 25 bp, Artificial
  probe
  misc_feature (1)..(25): SEQ ID NO: 2419; WAN024F4R_at; Start 405; Stop 429
caaaatggacaaaatcggtgctgac

SEQ ID NO: 192279 - DNA, 25 bp, Artificial
  probe
  misc_feature (1)..(25): SEQ ID NO: 2419; WAN024F4R_at; Start 380; Stop 404
gagttccacgtatcgtatttgccaa

SEQ ID NO: 192280 - DNA, 25 bp, Artificial
  probe
  misc_feature (1)..(25): SEQ ID NO: 2419; WAN024F4R_at; Start 1090; Stop 1114
gaaatcgacactgtttactcaggtg

SEQ ID NO: 192281 - DNA, 25 bp, Artificial
  probe
  misc_feature (1)..(25): SEQ ID NO: 2419; WAN024F4R_at; Start 994; Stop 1018
ggtgttcttcaatcaggttcatacg

SEQ ID NO: 192282 - DNA, 25 bp, Artificial
  probe
  misc_feature (1)..(25): SEQ ID NO: 2419; WAN024F4R_at; Start 119; Stop 143
tcggtgaaactcacgaaggtgcgtc

SEQ ID NO: 192283 - DNA, 25 bp, Artificial
  probe
  misc_feature (1)..(25): SEQ ID NO: 2419; WAN024F4R_at; Start 143; Stop 167
cacaaatggactggatggagcaaga

SEQ ID NO: 192284 - DNA, 25 bp, Artificial
  probe
  misc_feature (1)..(25): SEQ ID NO: 3114; WAN024F4S_at; Start 258; Stop 282
ggttatcagcaccatctaggacaaa

SEQ ID NO: 192285 - DNA, 25 bp, Artificial
  probe
  misc_feature (1)..(25): SEQ ID NO: 3114; WAN024F4S_at; Start 117; Stop 141
tctcagagcggtgtgggtgagcatt

SEQ ID NO: 192286 - DNA, 25 bp, Artificial
  probe
  misc_feature (1)..(25): SEQ ID NO: 3114; WAN024F4S_at; Start 270; Stop 294
catctaggacaaaaattcccgcaga

SEQ ID NO: 192287 - DNA, 25 bp, Artificial
  probe
  misc_feature (1)..(25): SEQ ID NO: 3114; WAN024F4S_at; Start 285; Stop 309
ttcccgcagaatcatagccacggta

SEQ ID NO: 192288 - DNA, 25 bp, Artificial
  probe
  misc_feature (1)..(25): SEQ ID NO: 3114; WAN024F4S_at; Start 193; Stop 217
tgttccctcaacaccagctgtcttg

SEQ ID NO: 192289 - DNA, 25 bp, Artificial
  probe
  misc_feature (1)..(25): SEQ ID NO: 3114; WAN024F4S_at; Start 245; Stop 269
gccttcaccaaatggttatcagcac

SEQ ID NO: 192290 - DNA, 25 bp, Artificial
  probe
  misc_feature (1)..(25): SEQ ID NO: 3114; WAN024F4S_at; Start 342; Stop 366
cagttgcatttgtgtttccaacaac

SEQ ID NO: 192291 - DNA, 25 bp, Artificial
  probe
  misc_feature (1)..(25): SEQ ID NO: 3114; WAN024F4S_at; Start 266; Stop 290
gcaccatctaggacaaaaattcccg

SEQ ID NO: 192292 - DNA, 25 bp, Artificial
  probe
  misc_feature (1)..(25): SEQ ID NO: 3114; WAN024F4S_at; Start 179; Stop 203
tgtccgataccagttgttccctcaa

SEQ ID NO: 192293 - DNA, 25 bp, Artificial
  probe
  misc_feature (1)..(25): SEQ ID NO: 3114; WAN024F4S_at; Start 249; Stop 273
tcaccaaatggttatcagcaccatc

SEQ ID NO: 192294 - DNA, 25 bp, Artificial
  probe
  misc_feature (1)..(25): SEQ ID NO: 3114; WAN024F4S_at; Start 306; Stop 330
ggtattcaagcttttcaagcccttg

SEQ ID NO: 192295 - DNA, 25 bp, Artificial
  probe
  misc_feature (1)..(25): SEQ ID NO: 3114; WAN024F4S_at; Start 167; Stop 191
gcccaacgagtatgtccgataccag

SEQ ID NO: 192296 - DNA, 25 bp, Artificial
  probe
  misc_feature (1)..(25): SEQ ID NO: 3114; WAN024F4S_at; Start 189; Stop 213
cagttgttccctcaacaccagctgt

SEQ ID NO: 192297 - DNA, 25 bp, Artificial
  probe
  misc_feature (1)..(25): SEQ ID NO: 3114; WAN024F4S_at; Start 282; Stop 306
aaattcccgcagaatcatagccacg

SEQ ID NO: 192298 - DNA, 25 bp, Artificial
  probe
  misc_feature (1)..(25): SEQ ID NO: 3114; WAN024F4S_at; Start 174; Stop 198
gagtatgtccgataccagttgttcc

SEQ ID NO: 192299 - DNA, 25 bp, Artificial
  probe
  misc_feature (1)..(25): SEQ ID NO: 3114; WAN024F4S_at; Start 199; Stop 223
ctcaacaccagctgtcttggcagac

SEQ ID NO: 192300 - DNA, 25 bp, Artificial
  probe
  misc_feature (1)..(25): SEQ ID NO: 3114; WAN024F4S_at; Start 293; Stop 317
gaatcatagccacggtattcaagct

SEQ ID NO: 192301 - DNA, 25 bp, Artificial
  probe
  misc_feature (1)..(25): SEQ ID NO: 3114; WAN024F4S_at; Start 261; Stop 285
tatcagcaccatctaggacaaaaat

SEQ ID NO: 192302 - DNA, 25 bp, Artificial
  probe
  misc_feature (1)..(25): SEQ ID NO: 3114; WAN024F4S_at; Start 289; Stop 313
cgcagaatcatagccacggtattca

SEQ ID NO: 192303 - DNA, 25 bp, Artificial
  probe
  misc_feature (1)..(25): SEQ ID NO: 3114; WAN024F4S_at; Start 170; Stop 194
caacgagtatgtccgataccagttg

SEQ ID NO: 192304 - DNA, 25 bp, Artificial
  probe
  misc_feature (1)..(25): SEQ ID NO: 3114; WAN024F4S_at; Start 301; Stop 325
gccacggtattcaagcttttcaagc

SEQ ID NO: 192305 - DNA, 25 bp, Artificial
  probe
  misc_feature (1)..(25): SEQ ID NO: 3114; WAN024F4S_at; Start 339; Stop 363
tatcagttgcatttgtgtttccaac

SEQ ID NO: 192306 - DNA, 25 bp, Artificial
  probe
  misc_feature (1)..(25): SEQ ID NO: 3114; WAN024F4S_at; Start 355; Stop 379
gtttccaacaacaccaacaattcca

SEQ ID NO: 192307 - DNA, 25 bp, Artificial
  probe
  misc_feature (1)..(25): SEQ ID NO: 3114; WAN024F4S_at; Start 312; Stop 336
caagcttttcaagcccttgaatcaa

SEQ ID NO: 192308 - DNA, 25 bp, Artificial
  probe
  misc_feature (1)..(25): SEQ ID NO: 3114; WAN024F4S_at; Start 177; Stop 201
tatgtccgataccagttgttccctc

SEQ ID NO: 192309 - DNA, 25 bp, Artificial
  probe
  misc_feature (1)..(25): SEQ ID NO: 3114; WAN024F4S_at; Start 253; Stop 277
caaatggttatcagcaccatctagg

SEQ ID NO: 192310 - DNA, 25 bp, Artificial
  probe
  misc_feature (1)..(25): SEQ ID NO: 3114; WAN024F4S_at; Start 347; Stop 371
gcatttgtgtttccaacaacaccaa

SEQ ID NO: 192311 - DNA, 25 bp, Artificial
  probe
  misc_feature (1)..(25): SEQ ID NO: 3114; WAN024F4S_at; Start 325; Stop 349
cccttgaatcaaaatatcagttgca

SEQ ID NO: 192312 - DNA, 25 bp, Artificial
  probe
  misc_feature (1)..(25): SEQ ID NO: 3114; WAN024F4S_at; Start 274; Stop 298
taggacaaaaattcccgcagaatca

SEQ ID NO: 192313 - DNA, 25 bp, Artificial
  probe
  misc_feature (1)..(25): SEQ ID NO: 3114; WAN024F4S_at; Start 362; Stop 386
acaacaccaacaattccacacatag

SEQ ID NO: 192314 - DNA, 25 bp, Artificial
  probe
  misc_feature (1)..(25): SEQ ID NO: 3114; WAN024F4S_at; Start 320; Stop 344
tcaagcccttgaatcaaaatatcag

SEQ ID NO: 192315 - DNA, 25 bp, Artificial
  probe
  misc_feature (1)..(25): SEQ ID NO: 3114; WAN024F4S_at; Start 184; Stop 208
gataccagttgttccctcaacacca

SEQ ID NO: 192316 - DNA, 25 bp, Artificial
  probe
  misc_feature (1)..(25): SEQ ID NO: 3114; WAN024F4S_at; Start 297; Stop 321
catagccacggtattcaagcttttc

SEQ ID NO: 192317 - DNA, 25 bp, Artificial
  probe
  misc_feature (1)..(25): SEQ ID NO: 3114; WAN024F4S_at; Start 303; Stop 327
cacggtattcaagcttttcaagccc

SEQ ID NO: 192318 - DNA, 25 bp, Artificial
  probe
  misc_feature (1)..(25): SEQ ID NO: 2967; WAN024F4T_at; Start 98; Stop 122
gaatttttgtcctagatggtgctga

SEQ ID NO: 192319 - DNA, 25 bp, Artificial
  probe
  misc_feature (1)..(25): SEQ ID NO: 2967; WAN024F4T_at; Start 1031; Stop 1055
tcagccaatctggtgaaacagcgga

SEQ ID NO: 192320 - DNA, 25 bp, Artificial
  probe
  misc_feature (1)..(25): SEQ ID NO: 2967; WAN024F4T_at; Start 988; Stop 1012
tacggtatgccacttctcagcaaga

SEQ ID NO: 192321 - DNA, 25 bp, Artificial
  probe
  misc_feature (1)..(25): SEQ ID NO: 2967; WAN024F4T_at; Start 1490; Stop 1514
caggagaactcaagcacggaaccat

SEQ ID NO: 192322 - DNA, 25 bp, Artificial
  probe
  misc_feature (1)..(25): SEQ ID NO: 2967; WAN024F4T_at; Start 1255; Stop 1279
gcaaatggtaatgctaaagcgcaag

SEQ ID NO: 192323 - DNA, 25 bp, Artificial
  probe
  misc_feature (1)..(25): SEQ ID NO: 2967; WAN024F4T_at; Start 1148; Stop 1172
actataccatgctccttcacgcagg

SEQ ID NO: 192324 - DNA, 25 bp, Artificial
  probe
  misc_feature (1)..(25): SEQ ID NO: 2967; WAN024F4T_at; Start 875; Stop 899
gcatctacatccttgcagctggaac

SEQ ID NO: 192325 - DNA, 25 bp, Artificial
  probe
  misc_feature (1)..(25): SEQ ID NO: 2967; WAN024F4T_at; Start 168; Stop 192
caagacagctggtgttgagggaaca

SEQ ID NO: 192326 - DNA, 25 bp, Artificial
  probe
  misc_feature (1)..(25): SEQ ID NO: 2967; WAN024F4T_at; Start 154; Stop 178
gcagaattgtctgccaagacagctg

SEQ ID NO: 192327 - DNA, 25 bp, Artificial
  probe
  misc_feature (1)..(25): SEQ ID NO: 2967; WAN024F4T_at; Start 1204; Stop 1228
tatacagcgcaaatcgcagcccttg

SEQ ID NO: 192328 - DNA, 25 bp, Artificial
  probe
  misc_feature (1)..(25): SEQ ID NO: 2967; WAN024F4T_at; Start 1420; Stop 1444
tactacgtagccatggaagcaagtc

SEQ ID NO: 192329 - DNA, 25 bp, Artificial
  probe
  misc_feature (1)..(25): SEQ ID NO: 2967; WAN024F4T_at; Start 188; Stop 212
gaacaactggtatcggacatactcg

SEQ ID NO: 192330 - DNA, 25 bp, Artificial
  probe
  misc_feature (1)..(25): SEQ ID NO: 2967; WAN024F4T_at; Start 1654; Stop 1678
gataccgacgatatcgtccttacga

SEQ ID NO: 192331 - DNA, 25 bp, Artificial
  probe
  misc_feature (1)..(25): SEQ ID NO: 2967; WAN024F4T_at; Start 1456; Stop 1480
gagatttcttatatccagtgtgaag

SEQ ID NO: 192332 - DNA, 25 bp, Artificial
  probe
  misc_feature (1)..(25): SEQ ID NO: 2967; WAN024F4T_at; Start 74; Stop 98
aataccgtggctatgattctgcggg

SEQ ID NO: 192333 - DNA, 25 bp, Artificial
  probe
  misc_feature (1)..(25): SEQ ID NO: 2967; WAN024F4T_at; Start 1504; Stop 1528
cacggaaccattgccttgattgaag

SEQ ID NO: 192334 - DNA, 25 bp, Artificial
  probe
  misc_feature (1)..(25): SEQ ID NO: 2967; WAN024F4T_at; Start 1387; Stop 1411
cgtaacgccttttacatcggacgtg

SEQ ID NO: 192335 - DNA, 25 bp, Artificial
  probe
  misc_feature (1)..(25): SEQ ID NO: 2967; WAN024F4T_at; Start 890; Stop 914
cagctggaacatcttaccatgcagg

SEQ ID NO: 192336 - DNA, 25 bp, Artificial
  probe
  misc_feature (1)..(25): SEQ ID NO: 2967; WAN024F4T_at; Start 1088; Stop 1112
tgggaattccaagcttaacagtgac

SEQ ID NO: 192337 - DNA, 25 bp, Artificial
  probe
  misc_feature (1)..(25): SEQ ID NO: 2967; WAN024F4T_at; Start 1232; Stop 1256
tccttgcaaaagcagtcggagaagc

SEQ ID NO: 192338 - DNA, 25 bp, Artificial
  probe
  misc_feature (1)..(25): SEQ ID NO: 2967; WAN024F4T_at; Start 1297; Stop 1321
gaattgtcaatcgtagctcagtcta

SEQ ID NO: 192339 - DNA, 25 bp, Artificial
  probe
  misc_feature (1)..(25): SEQ ID NO: 2967; WAN024F4T_at; Start 852; Stop 876
taaggctgttcaagacgcagaccgc

SEQ ID NO: 192340 - DNA, 25 bp, Artificial
  probe
  misc_feature (1)..(25): SEQ ID NO: 2967; WAN024F4T_at; Start 716; Stop 740
acttgtcagatatcggtaagggaac

SEQ ID NO: 192341 - DNA, 25 bp, Artificial
  probe
  misc_feature (1)..(25): SEQ ID NO: 2967; WAN024F4T_at; Start 1434; Stop 1458
ggaagcaagtctcaaactcaaagag

SEQ ID NO: 192342 - DNA, 25 bp, Artificial
  probe
  misc_feature (1)..(25): SEQ ID NO: 2967; WAN024F4T_at; Start 1401; Stop 1425
catcggacgtggtcaagattactac

SEQ ID NO: 192343 - DNA, 25 bp, Artificial
  probe
  misc_feature (1)..(25): SEQ ID NO: 2967; WAN024F4T_at; Start 624; Stop 648
ccaagagttggtaatcgtcaaggct

SEQ ID NO: 192344 - DNA, 25 bp, Artificial
  probe
  misc_feature (1)..(25): SEQ ID NO: 2967; WAN024F4T_at; Start 940; Stop 964
gaattgacagatacaccagttgaac

SEQ ID NO: 192345 - DNA, 25 bp, Artificial
  probe
  misc_feature (1)..(25): SEQ ID NO: 2967; WAN024F4T_at; Start 1073; Stop 1097
tcaaggctaatgaaatgggaattcc

SEQ ID NO: 192346 - DNA, 25 bp, Artificial
  probe
  misc_feature (1)..(25): SEQ ID NO: 2967; WAN024F4T_at; Start 906; Stop 930
ccatgcaggatttgcttctaagaaa

SEQ ID NO: 192347 - DNA, 25 bp, Artificial
  probe
  misc_feature (1)..(25): SEQ ID NO: 2967; WAN024F4T_at; Start 1135; Stop 1159
tcacgtgaagccaactataccatgc

SEQ ID NO: 192348 - DNA, 25 bp, Artificial
  probe
  misc_feature (1)..(25): SEQ ID NO: 2967; WAN024F4T_at; Start 60; Stop 84
gcttgaaaagcttgaataccgtggc

SEQ ID NO: 192349 - DNA, 25 bp, Artificial
  probe
  misc_feature (1)..(25): SEQ ID NO: 2967; WAN024F4T_at; Start 1120; Stop 1144
ccaggttcaaccctctcacgtgaag

SEQ ID NO: 192350 - DNA, 25 bp, Artificial
  probe
  misc_feature (1)..(25): SEQ ID NO: 2967; WAN024F4T_at; Start 1189; Stop 1213
gcatcaactaaagcctatacagcgc

SEQ ID NO: 192351 - DNA, 25 bp, Artificial
  probe
  misc_feature (1)..(25): SEQ ID NO: 2967; WAN024F4T_at; Start 1048; Stop 1072
acagcggatagtcgtcaagttttgg

SEQ ID NO: 192352 - DNA, 25 bp, Artificial
  probe
  misc_feature (1)..(25): SEQ ID NO: 5073; WAN024F4U_at; Start 226; Stop 250
gctatcgttagcagaagtcaccaga

SEQ ID NO: 192353 - DNA, 25 bp, Artificial
  probe
  misc_feature (1)..(25): SEQ ID NO: 5073; WAN024F4U_at; Start 317; Stop 341
tgggtcacacgctcttgcttgtaaa

SEQ ID NO: 192354 - DNA, 25 bp, Artificial
  probe
  misc_feature (1)..(25): SEQ ID NO: 5073; WAN024F4U_at; Start 301; Stop 325
gaaccgacggttgtactgggtcaca

SEQ ID NO: 192355 - DNA, 25 bp, Artificial
  probe
  misc_feature (1)..(25): SEQ ID NO: 5073; WAN024F4U_at; Start 98; Stop 122
tgctctgtataacgtggcacttcag

SEQ ID NO: 192356 - DNA, 25 bp, Artificial
  probe
  misc_feature (1)..(25): SEQ ID NO: 5073; WAN024F4U_at; Start 144; Stop 168
tctcacctttaaggacattgaccaa

SEQ ID NO: 192357 - DNA, 25 bp, Artificial
  probe
  misc_feature (1)..(25): SEQ ID NO: 5073; WAN024F4U_at; Start 375; Stop 399
tgctcaagatgagaaagatgggaga

SEQ ID NO: 192358 - DNA, 25 bp, Artificial
  probe
  misc_feature (1)..(25): SEQ ID NO: 5073; WAN024F4U_at; Start 70; Stop 94
caaggttgccatcatttcagggcta

SEQ ID NO: 192359 - DNA, 25 bp, Artificial
  probe
  misc_feature (1)..(25): SEQ ID NO: 5073; WAN024F4U_at; Start 306; Stop 330
gacggttgtactgggtcacacgctc

SEQ ID NO: 192360 - DNA, 25 bp, Artificial
  probe
  misc_feature (1)..(25): SEQ ID NO: 5073; WAN024F4U_at; Start 354; Stop 378
tgctatccaacttgatccaaatgct

SEQ ID NO: 192361 - DNA, 25 bp, Artificial
  probe
  misc_feature (1)..(25): SEQ ID NO: 5073; WAN024F4U_at; Start 261; Stop 285
tatccgcatccgtcaccatggtacg

SEQ ID NO: 192362 - DNA, 25 bp, Artificial
  probe
  misc_feature (1)..(25): SEQ ID NO: 5073; WAN024F4U_at; Start 364; Stop 388
cttgatccaaatgctcaagatgaga

SEQ ID NO: 192363 - DNA, 25 bp, Artificial
  probe
  misc_feature (1)..(25): SEQ ID NO: 5073; WAN024F4U_at; Start 170; Stop 194
tgaggcagttcgtccaaacggacac

SEQ ID NO: 192364 - DNA, 25 bp, Artificial
  probe
  misc_feature (1)..(25): SEQ ID NO: 5073; WAN024F4U_at; Start 231; Stop 255
cgttagcagaagtcaccagacttcc

SEQ ID NO: 192365 - DNA, 25 bp, Artificial
  probe
  misc_feature (1)..(25): SEQ ID NO: 5073; WAN024F4U_at; Start 93; Stop 117
tatactgctctgtataacgtggcac

SEQ ID NO: 192366 - DNA, 25 bp, Artificial
  probe
  misc_feature (1)..(25): SEQ ID NO: 5073; WAN024F4U_at; Start 257; Stop 281
tttttatccgcatccgtcaccatgg

SEQ ID NO: 192367 - DNA, 25 bp, Artificial
  probe
  misc_feature (1)..(25): SEQ ID NO: 5073; WAN024F4U_at; Start 24; Stop 48
ccttgtagttgatgctggctggaga

SEQ ID NO: 192368 - DNA, 25 bp, Artificial
  probe
  misc_feature (1)..(25): SEQ ID NO: 5073; WAN024F4U_at; Start 175; Stop 199
cagttcgtccaaacggacacgtcgg

SEQ ID NO: 192369 - DNA, 25 bp, Artificial
  probe
  misc_feature (1)..(25): SEQ ID NO: 5073; WAN024F4U_at; Start 182; Stop 206
tccaaacggacacgtcggatgaaat

SEQ ID NO: 192370 - DNA, 25 bp, Artificial
  probe
  misc_feature (1)..(25): SEQ ID NO: 5073; WAN024F4U_at; Start 110; Stop 134
cgtggcacttcaggtcgtgtaccga

SEQ ID NO: 192371 - DNA, 25 bp, Artificial
  probe
  misc_feature (1)..(25): SEQ ID NO: 5073; WAN024F4U_at; Start 127; Stop 151
tgtaccgacaaaggacatctcacct

SEQ ID NO: 192372 - DNA, 25 bp, Artificial
  probe
  misc_feature (1)..(25): SEQ ID NO: 5073; WAN024F4U_at; Start 105; Stop 129
tataacgtggcacttcaggtcgtgt

SEQ ID NO: 192373 - DNA, 25 bp, Artificial
  probe
  misc_feature (1)..(25): SEQ ID NO: 5073; WAN024F4U_at; Start 196; Stop 220
tcggatgaaatttccaaccttggta

SEQ ID NO: 192374 - DNA, 25 bp, Artificial
  probe
  misc_feature (1)..(25): SEQ ID NO: 5073; WAN024F4U_at; Start 313; Stop 337
gtactgggtcacacgctcttgcttg

SEQ ID NO: 192375 - DNA, 25 bp, Artificial
  probe
  misc_feature (1)..(25): SEQ ID NO: 5073; WAN024F4U_at; Start 244; Stop 268
caccagacttccttttttatccgca

SEQ ID NO: 192376 - DNA, 25 bp, Artificial
  probe
  misc_feature (1)..(25): SEQ ID NO: 5073; WAN024F4U_at; Start 137; Stop 161
aaggacatctcacctttaaggacat

SEQ ID NO: 192377 - DNA, 25 bp, Artificial
  probe
  misc_feature (1)..(25): SEQ ID NO: 5073; WAN024F4U_at; Start 56; Stop 80
cctgcttgcaagagcaaggttgcca

SEQ ID NO: 192378 - DNA, 25 bp, Artificial
  probe
  misc_feature (1)..(25): SEQ ID NO: 5073; WAN024F4U_at; Start 67; Stop 91
gagcaaggttgccatcatttcaggg

SEQ ID NO: 192379 - DNA, 25 bp, Artificial
  probe
  misc_feature (1)..(25): SEQ ID NO: 5073; WAN024F4U_at; Start 118; Stop 142
ttcaggtcgtgtaccgacaaaggac

SEQ ID NO: 192380 - DNA, 25 bp, Artificial
  probe
  misc_feature (1)..(25): SEQ ID NO: 5073; WAN024F4U_at; Start 324; Stop 348
cacgctcttgcttgtaaatcactgg

SEQ ID NO: 192381 - DNA, 25 bp, Artificial
  probe
  misc_feature (1)..(25): SEQ ID NO: 5073; WAN024F4U_at; Start 327; Stop 351
gctcttgcttgtaaatcactggccc

SEQ ID NO: 192382 - DNA, 25 bp, Artificial
  probe
  misc_feature (1)..(25): SEQ ID NO: 5073; WAN024F4U_at; Start 189; Stop 213
ggacacgtcggatgaaatttccaac

SEQ ID NO: 192383 - DNA, 25 bp, Artificial
  probe
  misc_feature (1)..(25): SEQ ID NO: 5073; WAN024F4U_at; Start 14; Stop 38
gtgtcctcatccttgtagttgatgc

SEQ ID NO: 192384 - DNA, 25 bp, Artificial
  probe
  misc_feature (1)..(25): SEQ ID NO: 5073; WAN024F4U_at; Start 289; Stop 313
cttccaaatcttgaaccgacggttg

SEQ ID NO: 192385 - DNA, 25 bp, Artificial
  probe
  misc_feature (1)..(25): SEQ ID NO: 5073; WAN024F4U_at; Start 82; Stop 106
catttcagggctatactgctctgta

SEQ ID NO: 192386 - DNA, 25 bp, Artificial
  probe
  misc_feature (1)..(25): SEQ ID NO: 2089; WAN024F4V_at; Start 580; Stop 604
gtggagcatgttcttcctgaaaaga

SEQ ID NO: 192387 - DNA, 25 bp, Artificial
  probe
  misc_feature (1)..(25): SEQ ID NO: 2089; WAN024F4V_at; Start 337; Stop 361
aatttcatccgacgtgtccgtttgg

SEQ ID NO: 192388 - DNA, 25 bp, Artificial
  probe
  misc_feature (1)..(25): SEQ ID NO: 2089; WAN024F4V_at; Start 464; Stop 488
tggcaaccttgctcttgcaagcagg

SEQ ID NO: 192389 - DNA, 25 bp, Artificial
  probe
  misc_feature (1)..(25): SEQ ID NO: 2089; WAN024F4V_at; Start 565; Stop 589
gttgatcaggcctatgtggagcatg

SEQ ID NO: 192390 - DNA, 25 bp, Artificial
  probe
  misc_feature (1)..(25): SEQ ID NO: 2089; WAN024F4V_at; Start 294; Stop 318
tctggtgacttctgctaacgatagc

SEQ ID NO: 192391 - DNA, 25 bp, Artificial
  probe
  misc_feature (1)..(25): SEQ ID NO: 2089; WAN024F4V_at; Start 506; Stop 530
gcatcaactacaaggatgaggacac

SEQ ID NO: 192392 - DNA, 25 bp, Artificial
  probe
  misc_feature (1)..(25): SEQ ID NO: 2089; WAN024F4V_at; Start 536; Stop 560
tcagtcaaatgacggagaaaggtct

SEQ ID NO: 192393 - DNA, 25 bp, Artificial
  probe
  misc_feature (1)..(25): SEQ ID NO: 2089; WAN024F4V_at; Start 276; Stop 300
tgcggataaaaaaggaagtctggtg

SEQ ID NO: 192394 - DNA, 25 bp, Artificial
  probe
  misc_feature (1)..(25): SEQ ID NO: 2089; WAN024F4V_at; Start 259; Stop 283
cgtaccatggtgacggatgcggata

SEQ ID NO: 192395 - DNA, 25 bp, Artificial
  probe
  misc_feature (1)..(25): SEQ ID NO: 2089; WAN024F4V_at; Start 610; Stop 634
tataacctcgcctatctccgagagt

SEQ ID NO: 192396 - DNA, 25 bp, Artificial
  probe
  misc_feature (1)..(25): SEQ ID NO: 2089; WAN024F4V_at; Start 2; Stop 26
tgctgaaatgggaagacttgcctgt

SEQ ID NO: 192397 - DNA, 25 bp, Artificial
  probe
  misc_feature (1)..(25): SEQ ID NO: 2089; WAN024F4V_at; Start 381; Stop 405
caatgtccttaaaggtgagatgtcc

SEQ ID NO: 192398 - DNA, 25 bp, Artificial
  probe
  misc_feature (1)..(25): SEQ ID NO: 2089; WAN024F4V_at; Start 438; Stop 462
tacagagcagtatagccctgaaatg

SEQ ID NO: 192399 - DNA, 25 bp, Artificial
  probe
  misc_feature (1)..(25): SEQ ID NO: 2089; WAN024F4V_at; Start 68; Stop 92
tctctaaaaggaagggttcgctgat

SEQ ID NO: 192400 - DNA, 25 bp, Artificial
  probe
  misc_feature (1)..(25): SEQ ID NO: 2089; WAN024F4V_at; Start 156; Stop 180
tctcatcttgagcatttggatcaag

SEQ ID NO: 192401 - DNA, 25 bp, Artificial
  probe
  misc_feature (1)..(25): SEQ ID NO: 2089; WAN024F4V_at; Start 324; Stop 348
taccaaggttggaaatttcatccga

SEQ ID NO: 192402 - DNA, 25 bp, Artificial
  probe
  misc_feature (1)..(25): SEQ ID NO: 2089; WAN024F4V_at; Start 19; Stop 43
ttgcctgtggaaatgaaatcaagcg

SEQ ID NO: 192403 - DNA, 25 bp, Artificial
  probe
  misc_feature (1)..(25): SEQ ID NO: 2089; WAN024F4V_at; Start 100; Stop 124
cgttgcttggactgggttttggcct

SEQ ID NO: 192404 - DNA, 25 bp, Artificial
  probe
  misc_feature (1)..(25): SEQ ID NO: 2089; WAN024F4V_at; Start 450; Stop 474
tagccctgaaatgatggcaaccttg

SEQ ID NO: 192405 - DNA, 25 bp, Artificial
  probe
  misc_feature (1)..(25): SEQ ID NO: 2089; WAN024F4V_at; Start 552; Stop 576
gaaaggtctgtcagttgatcaggcc

SEQ ID NO: 192406 - DNA, 25 bp, Artificial
  probe
  misc_feature (1)..(25): SEQ ID NO: 2089; WAN024F4V_at; Start 423; Stop 447
tgaagtgccacgttatacagagcag

SEQ ID NO: 192407 - DNA, 25 bp, Artificial
  probe
  misc_feature (1)..(25): SEQ ID NO: 2089; WAN024F4V_at; Start 231; Stop 255
caaccgtcggttcaagatttggaag

SEQ ID NO: 192408 - DNA, 25 bp, Artificial
  probe
  misc_feature (1)..(25): SEQ ID NO: 2089; WAN024F4V_at; Start 38; Stop 62
caagcgaggttgagtcttactacca

SEQ ID NO: 192409 - DNA, 25 bp, Artificial
  probe
  misc_feature (1)..(25): SEQ ID NO: 2089; WAN024F4V_at; Start 204; Stop 228
ttacaagcaagagcgtgtgacccag

SEQ ID NO: 192410 - DNA, 25 bp, Artificial
  probe
  misc_feature (1)..(25): SEQ ID NO: 2089; WAN024F4V_at; Start 217; Stop 241
cgtgtgacccagtacaaccgtcggt

SEQ ID NO: 192411 - DNA, 25 bp, Artificial
  probe
  misc_feature (1)..(25): SEQ ID NO: 2089; WAN024F4V_at; Start 350; Stop 374
gtgtccgtttggacgaactgcctca

SEQ ID NO: 192412 - DNA, 25 bp, Artificial
  probe
  misc_feature (1)..(25): SEQ ID NO: 2089; WAN024F4V_at; Start 496; Stop 520
tctccagccagcatcaactacaagg

SEQ ID NO: 192413 - DNA, 25 bp, Artificial
  probe
  misc_feature (1)..(25): SEQ ID NO: 2089; WAN024F4V_at; Start 597; Stop 621
tgaaaagatgcgctataacctcgcc

SEQ ID NO: 192414 - DNA, 25 bp, Artificial
  probe
  misc_feature (1)..(25): SEQ ID NO: 2089; WAN024F4V_at; Start 651; Stop 675
catcaaaatcatgtttcaaaccgtg

SEQ ID NO: 192415 - DNA, 25 bp, Artificial
  probe
  misc_feature (1)..(25): SEQ ID NO: 2089; WAN024F4V_at; Start 55; Stop 79
tactaccagcttgtctctaaaagga

SEQ ID NO: 192416 - DNA, 25 bp, Artificial
  probe
  misc_feature (1)..(25): SEQ ID NO: 2089; WAN024F4V_at; Start 85; Stop 109
tcgctgattttcaagcgttgcttgg

SEQ ID NO: 192417 - DNA, 25 bp, Artificial
  probe
  misc_feature (1)..(25): SEQ ID NO: 2089; WAN024F4V_at; Start 193; Stop 217
gggccagtgatttacaagcaagagc

SEQ ID NO: 192418 - DNA, 25 bp, Artificial
  probe
  misc_feature (1)..(25): SEQ ID NO: 2089; WAN024F4V_at; Start 396; Stop 420
tgagatgtcctttgtcggtacacga

SEQ ID NO: 192419 - DNA, 25 bp, Artificial
  probe
  misc_feature (1)..(25): SEQ ID NO: 2089; WAN024F4V_at; Start 410; Stop 434
tcggtacacgacctgaagtgccacg

SEQ ID NO: 192420 - DNA, 25 bp, Artificial
  probe
  misc_feature (1)..(25): SEQ ID NO: 1525; WAN024F4W_at; Start 303; Stop 327
tattgcagatttgattgaaaagcct

SEQ ID NO: 192421 - DNA, 25 bp, Artificial
  probe
  misc_feature (1)..(25): SEQ ID NO: 1525; WAN024F4W_at; Start 567; Stop 591
gttgggacaacagcaaacattggct

SEQ ID NO: 192422 - DNA, 25 bp, Artificial
  probe
  misc_feature (1)..(25): SEQ ID NO: 1525; WAN024F4W_at; Start 278; Stop 302
gaaagacgattgatagcgcaaaagc

SEQ ID NO: 192423 - DNA, 25 bp, Artificial
  probe
  misc_feature (1)..(25): SEQ ID NO: 1525; WAN024F4W_at; Start 545; Stop 569
tgcaggcaaatggaaaaactatgtt

SEQ ID NO: 192424 - DNA, 25 bp, Artificial
  probe
  misc_feature (1)..(25): SEQ ID NO: 1525; WAN024F4W_at; Start 40; Stop 64
gaaaatgccttgtttgaaaatgcca

SEQ ID NO: 192425 - DNA, 25 bp, Artificial
  probe
  misc_feature (1)..(25): SEQ ID NO: 1525; WAN024F4W_at; Start 1026; Stop 1050
gatttcgccttcagatgttgctcaa

SEQ ID NO: 192426 - DNA, 25 bp, Artificial
  probe
  misc_feature (1)..(25): SEQ ID NO: 1525; WAN024F4W_at; Start 632; Stop 656
cagatggtttacaggctatggcagc

SEQ ID NO: 192427 - DNA, 25 bp, Artificial
  probe
  misc_feature (1)..(25): SEQ ID NO: 1525; WAN024F4W_at; Start 656; Stop 680
cttgtgaagctaaagtggtgacacc

SEQ ID NO: 192428 - DNA, 25 bp, Artificial
  probe
  misc_feature (1)..(25): SEQ ID NO: 1525; WAN024F4W_at; Start 1051; Stop 1075
gctattatcgctgtagatgcctatg

SEQ ID NO: 192429 - DNA, 25 bp, Artificial
  probe
  misc_feature (1)..(25): SEQ ID NO: 1525; WAN024F4W_at; Start 997; Stop 1021
ggtgagacaattcatcagatgccgt

SEQ ID NO: 192430 - DNA, 25 bp, Artificial
  probe
  misc_feature (1)..(25): SEQ ID NO: 1525; WAN024F4W_at; Start 475; Stop 499
gcccctaagcgtttattagcgtctg

SEQ ID NO: 192431 - DNA, 25 bp, Artificial
  probe
  misc_feature (1)..(25): SEQ ID NO: 1525; WAN024F4W_at; Start 772; Stop 796
ggttttactgcattgacaggtgaca

SEQ ID NO: 192432 - DNA, 25 bp, Artificial
  probe
  misc_feature (1)..(25): SEQ ID NO: 1525; WAN024F4W_at; Start 506; Stop 530
cagatggtttagcaacttgggttga

SEQ ID NO: 192433 - DNA, 25 bp, Artificial
  probe
  misc_feature (1)..(25): SEQ ID NO: 1525; WAN024F4W_at; Start 909; Stop 933
tggtatgccaacaactctaaaagaa

SEQ ID NO: 192434 - DNA, 25 bp, Artificial
  probe
  misc_feature (1)..(25): SEQ ID NO: 1525; WAN024F4W_at; Start 177; Stop 201
tctggcgctatttaatggtgaagct

SEQ ID NO: 192435 - DNA, 25 bp, Artificial
  probe
  misc_feature (1)..(25): SEQ ID NO: 1525; WAN024F4W_at; Start 671; Stop 695
tggtgacaccagcattagaaaatat

SEQ ID NO: 192436 - DNA, 25 bp, Artificial
  probe
  misc_feature (1)..(25): SEQ ID NO: 1525; WAN024F4W_at; Start 584; Stop 608
cattggctggagttgcaattgcgaa

SEQ ID NO: 192437 - DNA, 25 bp, Artificial
  probe
  misc_feature (1)..(25): SEQ ID NO: 1525; WAN024F4W_at; Start 388; Stop 412
tatacagatgaaggtgcatttgatc

SEQ ID NO: 192438 - DNA, 25 bp, Artificial
  probe
  misc_feature (1)..(25): SEQ ID NO: 1525; WAN024F4W_at; Start 230; Stop 254
ccttggctgagaaagaaaattgtga

SEQ ID NO: 192439 - DNA, 25 bp, Artificial
  probe
  misc_feature (1)..(25): SEQ ID NO: 1525; WAN024F4W_at; Start 809; Stop 833
cacatggtgaaaaagtagcttatgg

SEQ ID NO: 192440 - DNA, 25 bp, Artificial
  probe
  misc_feature (1)..(25): SEQ ID NO: 1525; WAN024F4W_at; Start 461; Stop 485
aagttatttcacaagcccctaagcg

SEQ ID NO: 192441 - DNA, 25 bp, Artificial
  probe
  misc_feature (1)..(25): SEQ ID NO: 1525; WAN024F4W_at; Start 319; Stop 343
gaaaagcctgttattattgctccaa

SEQ ID NO: 192442 - DNA, 25 bp, Artificial
  probe
  misc_feature (1)..(25): SEQ ID NO: 1525; WAN024F4W_at; Start 160; Stop 184
tatggtttccatattgttctggcgc

SEQ ID NO: 192443 - DNA, 25 bp, Artificial
  probe
  misc_feature (1)..(25): SEQ ID NO: 1525; WAN024F4W_at; Start 748; Stop 772
gctgcggcgcatgcaattcataatg

SEQ ID NO: 192444 - DNA, 25 bp, Artificial
  probe
  misc_feature (1)..(25): SEQ ID NO: 1525; WAN024F4W_at; Start 192; Stop 216
tggtgaagcttctgacaatgaaatc

SEQ ID NO: 192445 - DNA, 25 bp, Artificial
  probe
  misc_feature (1)..(25): SEQ ID NO: 1525; WAN024F4W_at; Start 982; Stop 1006
caagcaactatggagggtgagacaa

SEQ ID NO: 192446 - DNA, 25 bp, Artificial
  probe
  misc_feature (1)..(25): SEQ ID NO: 1525; WAN024F4W_at; Start 14; Stop 38
ctagtccttctagatatattcaggg

SEQ ID NO: 192447 - DNA, 25 bp, Artificial
  probe
  misc_feature (1)..(25): SEQ ID NO: 1525; WAN024F4W_at; Start 729; Stop 753
ttttgaaagtggaggattagctgcg

SEQ ID NO: 192448 - DNA, 25 bp, Artificial
  probe
  misc_feature (1)..(25): SEQ ID NO: 1525; WAN024F4W_at; Start 339; Stop 363
tccaacaattgcatcgaccgacgca

SEQ ID NO: 192449 - DNA, 25 bp, Artificial
  probe
  misc_feature (1)..(25): SEQ ID NO: 1525; WAN024F4W_at; Start 1011; Stop 1035
tcagatgccgtttaagatttcgcct

SEQ ID NO: 192450 - DNA, 25 bp, Artificial
  probe
  misc_feature (1)..(25): SEQ ID NO: 1525; WAN024F4W_at; Start 793; Stop 817
gacattcatcatttaacacatggtg

SEQ ID NO: 192451 - DNA, 25 bp, Artificial
  probe
  misc_feature (1)..(25): SEQ ID NO: 1525; WAN024F4W_at; Start 605; Stop 629
cgaagaaatgtgaagaaacgctgtt

SEQ ID NO: 192452 - DNA, 25 bp, Artificial
  probe
  misc_feature (1)..(25): SEQ ID NO: 1525; WAN024F4W_at; Start 216; Stop 240
caatcgagttgttgccttggctgag

SEQ ID NO: 192453 - DNA, 25 bp, Artificial
  probe
  misc_feature (1)..(25): SEQ ID NO: 1525; WAN024F4W_at; Start 354; Stop 378
gaccgacgcacctgtatctgcttta

SEQ ID NO: 192454 - DNA, 25 bp, Artificial
  probe
  misc_feature (1)..(25): SEQ ID NO: 5724; WAN024F4X_at; Start 97; Stop 121
ggcagggtctccactcaatacgtaa

SEQ ID NO: 192455 - DNA, 25 bp, Artificial
  probe
  misc_feature (1)..(25): SEQ ID NO: 5724; WAN024F4X_at; Start 98; Stop 122
gcagggtctccactcaatacgtaac

SEQ ID NO: 192456 - DNA, 25 bp, Artificial
  probe
  misc_feature (1)..(25): SEQ ID NO: 5724; WAN024F4X_at; Start 103; Stop 127
gtctccactcaatacgtaacctacg

SEQ ID NO: 192457 - DNA, 25 bp, Artificial
  probe
  misc_feature (1)..(25): SEQ ID NO: 5724; WAN024F4X_at; Start 19; Stop 43
gcgaaccaattcctcaacgatttca

SEQ ID NO: 192458 - DNA, 25 bp, Artificial
  probe
  misc_feature (1)..(25): SEQ ID NO: 5724; WAN024F4X_at; Start 241; Stop 265
agtaaatcccattctaacaccctct

SEQ ID NO: 192459 - DNA, 25 bp, Artificial
  probe
  misc_feature (1)..(25): SEQ ID NO: 5724; WAN024F4X_at; Start 29; Stop 53
tcctcaacgatttcatcacgctcat

SEQ ID NO: 192460 - DNA, 25 bp, Artificial
  probe
  misc_feature (1)..(25): SEQ ID NO: 5724; WAN024F4X_at; Start 78; Stop 102
tattataacgaggaacgtaggcagg

SEQ ID NO: 192461 - DNA, 25 bp, Artificial
  probe
  misc_feature (1)..(25): SEQ ID NO: 5724; WAN024F4X_at; Start 66; Stop 90
gatttcgtgcattattataacgagg

SEQ ID NO: 192462 - DNA, 25 bp, Artificial
  probe
  misc_feature (1)..(25): SEQ ID NO: 5724; WAN024F4X_at; Start 170; Stop 194
taaacatctgtcaaagtttcgctaa

SEQ ID NO: 192463 - DNA, 25 bp, Artificial
  probe
  misc_feature (1)..(25): SEQ ID NO: 5724; WAN024F4X_at; Start 110; Stop 134
ctcaatacgtaacctacgatttggt

SEQ ID NO: 192464 - DNA, 25 bp, Artificial
  probe
  misc_feature (1)..(25): SEQ ID NO: 5724; WAN024F4X_at; Start 24; Stop 48
ccaattcctcaacgatttcatcacg

SEQ ID NO: 192465 - DNA, 25 bp, Artificial
  probe
  misc_feature (1)..(25): SEQ ID NO: 5724; WAN024F4X_at; Start 88; Stop 112
aggaacgtaggcagggtctccactc

SEQ ID NO: 192466 - DNA, 25 bp, Artificial
  probe
  misc_feature (1)..(25): SEQ ID NO: 5724; WAN024F4X_at; Start 75; Stop 99
cattattataacgaggaacgtaggc

SEQ ID NO: 192467 - DNA, 25 bp, Artificial
  probe
  misc_feature (1)..(25): SEQ ID NO: 5724; WAN024F4X_at; Start 91; Stop 115
aacgtaggcagggtctccactcaat

SEQ ID NO: 192468 - DNA, 25 bp, Artificial
  probe
  misc_feature (1)..(25): SEQ ID NO: 5724; WAN024F4X_at; Start 159; Stop 183
tcaacgaagcataaacatctgtcaa

SEQ ID NO: 192469 - DNA, 25 bp, Artificial
  probe
  misc_feature (1)..(25): SEQ ID NO: 5724; WAN024F4X_at; Start 53; Stop 77
tacttacggatttgatttcgtgcat

SEQ ID NO: 192470 - DNA, 25 bp, Artificial
  probe
  misc_feature (1)..(25): SEQ ID NO: 5724; WAN024F4X_at; Start 85; Stop 109
acgaggaacgtaggcagggtctcca

SEQ ID NO: 192471 - DNA, 25 bp, Artificial
  probe
  misc_feature (1)..(25): SEQ ID NO: 5724; WAN024F4X_at; Start 227; Stop 251
cgtactgtttcttcagtaaatccca

SEQ ID NO: 192472 - DNA, 25 bp, Artificial
  probe
  misc_feature (1)..(25): SEQ ID NO: 5724; WAN024F4X_at; Start 177; Stop 201
ctgtcaaagtttcgctaatttcttt

SEQ ID NO: 192473 - DNA, 25 bp, Artificial
  probe
  misc_feature (1)..(25): SEQ ID NO: 5724; WAN024F4X_at; Start 155; Stop 179
tcgttcaacgaagcataaacatctg

SEQ ID NO: 192474 - DNA, 25 bp, Artificial
  probe
  misc_feature (1)..(25): SEQ ID NO: 5724; WAN024F4X_at; Start 83; Stop 107
taacgaggaacgtaggcagggtctc

SEQ ID NO: 192475 - DNA, 25 bp, Artificial
  probe
  misc_feature (1)..(25): SEQ ID NO: 5724; WAN024F4X_at; Start 14; Stop 38
tagtagcgaaccaattcctcaacga

SEQ ID NO: 192476 - DNA, 25 bp, Artificial
  probe
  misc_feature (1)..(25): SEQ ID NO: 5724; WAN024F4X_at; Start 45; Stop 69
cacgctcatacttacggatttgatt

SEQ ID NO: 192477 - DNA, 25 bp, Artificial
  probe
  misc_feature (1)..(25): SEQ ID NO: 5724; WAN024F4X_at; Start 144; Stop 168
tgtaacccttatcgttcaacgaagc

SEQ ID NO: 192478 - DNA, 25 bp, Artificial
  probe
  misc_feature (1)..(25): SEQ ID NO: 5724; WAN024F4X_at; Start 17; Stop 41
tagcgaaccaattcctcaacgattt

SEQ ID NO: 192479 - DNA, 25 bp, Artificial
  probe
  misc_feature (1)..(25): SEQ ID NO: 5724; WAN024F4X_at; Start 233; Stop 257
gtttcttcagtaaatcccattctaa

SEQ ID NO: 192480 - DNA, 25 bp, Artificial
  probe
  misc_feature (1)..(25): SEQ ID NO: 5724; WAN024F4X_at; Start 42; Stop 66
catcacgctcatacttacggatttg

SEQ ID NO: 192481 - DNA, 25 bp, Artificial
  probe
  misc_feature (1)..(25): SEQ ID NO: 5724; WAN024F4X_at; Start 71; Stop 95
cgtgcattattataacgaggaacgt

SEQ ID NO: 192482 - DNA, 25 bp, Artificial
  probe
  misc_feature (1)..(25): SEQ ID NO: 5724; WAN024F4X_at; Start 95; Stop 119
taggcagggtctccactcaatacgt

SEQ ID NO: 192483 - DNA, 25 bp, Artificial
  probe
  misc_feature (1)..(25): SEQ ID NO: 5724; WAN024F4X_at; Start 174; Stop 198
catctgtcaaagtttcgctaatttc

SEQ ID NO: 192484 - DNA, 25 bp, Artificial
  probe
  misc_feature (1)..(25): SEQ ID NO: 5724; WAN024F4X_at; Start 163; Stop 187
cgaagcataaacatctgtcaaagtt

SEQ ID NO: 192485 - DNA, 25 bp, Artificial
  probe
  misc_feature (1)..(25): SEQ ID NO: 5724; WAN024F4X_at; Start 51; Stop 75
catacttacggatttgatttcgtgc

SEQ ID NO: 192486 - DNA, 25 bp, Artificial
  probe
  misc_feature (1)..(25): SEQ ID NO: 5724; WAN024F4X_at; Start 37; Stop 61
gatttcatcacgctcatacttacgg

SEQ ID NO: 192487 - DNA, 25 bp, Artificial
  probe
  misc_feature (1)..(25): SEQ ID NO: 5724; WAN024F4X_at; Start 167; Stop 191
gcataaacatctgtcaaagtttcgc

SEQ ID NO: 192488 - DNA, 25 bp, Artificial
  probe
  misc_feature (1)..(25): SEQ ID NO: 2563; WAN024F4Y_at; Start 74; Stop 98
cagatgtttatgcttcgttgaacga

SEQ ID NO: 192489 - DNA, 25 bp, Artificial
  probe
  misc_feature (1)..(25): SEQ ID NO: 2563; WAN024F4Y_at; Start 85; Stop 109
gcttcgttgaacgataagggttaca

SEQ ID NO: 192490 - DNA, 25 bp, Artificial
  probe
  misc_feature (1)..(25): SEQ ID NO: 2563; WAN024F4Y_at; Start 137; Stop 161
tattgagtggagaccctgcctacgt

SEQ ID NO: 192491 - DNA, 25 bp, Artificial
  probe
  misc_feature (1)..(25): SEQ ID NO: 2563; WAN024F4Y_at; Start 178; Stop 202
gcacgaaatcaaatccgtaagtatg

SEQ ID NO: 192492 - DNA, 25 bp, Artificial
  probe
  misc_feature (1)..(25): SEQ ID NO: 2563; WAN024F4Y_at; Start 159; Stop 183
cgttcctcgttataataatgcacga

SEQ ID NO: 192493 - DNA, 25 bp, Artificial
  probe
  misc_feature (1)..(25): SEQ ID NO: 2563; WAN024F4Y_at; Start 52; Stop 76
aaagaaattagcgaaactttgacag

SEQ ID NO: 192494 - DNA, 25 bp, Artificial
  probe
  misc_feature (1)..(25): SEQ ID NO: 2563; WAN024F4Y_at; Start 215; Stop 239
tcgttgaggaattggttcgctacta

SEQ ID NO: 192495 - DNA, 25 bp, Artificial
  probe
  misc_feature (1)..(25): SEQ ID NO: 2563; WAN024F4Y_at; Start 248; Stop 272
gacaaggagtcgatctataactaat

SEQ ID NO: 192496 - DNA, 25 bp, Artificial
  probe
  misc_feature (1)..(25): SEQ ID NO: 2563; WAN024F4Y_at; Start 146; Stop 170
gagaccctgcctacgttcctcgtta

SEQ ID NO: 192497 - DNA, 25 bp, Artificial
  probe
  misc_feature (1)..(25): SEQ ID NO: 2563; WAN024F4Y_at; Start 71; Stop 95
tgacagatgtttatgcttcgttgaa

SEQ ID NO: 192498 - DNA, 25 bp, Artificial
  probe
  misc_feature (1)..(25): SEQ ID NO: 2563; WAN024F4Y_at; Start 243; Stop 267
caaaggacaaggagtcgatctataa

SEQ ID NO: 192499 - DNA, 25 bp, Artificial
  probe
  misc_feature (1)..(25): SEQ ID NO: 2563; WAN024F4Y_at; Start 151; Stop 175
cctgcctacgttcctcgttataata

SEQ ID NO: 192500 - DNA, 25 bp, Artificial
  probe
  misc_feature (1)..(25): SEQ ID NO: 2563; WAN024F4Y_at; Start 131; Stop 155
gttacgtattgagtggagaccctgc

SEQ ID NO: 192501 - DNA, 25 bp, Artificial
  probe
  misc_feature (1)..(25): SEQ ID NO: 2563; WAN024F4Y_at; Start 182; Stop 206
gaaatcaaatccgtaagtatgagcg

SEQ ID NO: 192502 - DNA, 25 bp, Artificial
  probe
  misc_feature (1)..(25): SEQ ID NO: 2563; WAN024F4Y_at; Start 66; Stop 90
aactttgacagatgtttatgcttcg

SEQ ID NO: 192503 - DNA, 25 bp, Artificial
  probe
  misc_feature (1)..(25): SEQ ID NO: 2563; WAN024F4Y_at; Start 126; Stop 150
cgtaggttacgtattgagtggagac

SEQ ID NO: 192504 - DNA, 25 bp, Artificial
  probe
  misc_feature (1)..(25): SEQ ID NO: 2563; WAN024F4Y_at; Start 195; Stop 219
taagtatgagcgtgatgaaatcgtt

SEQ ID NO: 192505 - DNA, 25 bp, Artificial
  probe
  misc_feature (1)..(25): SEQ ID NO: 2563; WAN024F4Y_at; Start 205; Stop 229
cgtgatgaaatcgttgaggaattgg

SEQ ID NO: 192506 - DNA, 25 bp, Artificial
  probe
  misc_feature (1)..(25): SEQ ID NO: 2563; WAN024F4Y_at; Start 2; Stop 26
tgggatttactgaagaaacagtacg

SEQ ID NO: 192507 - DNA, 25 bp, Artificial
  probe
  misc_feature (1)..(25): SEQ ID NO: 2563; WAN024F4Y_at; Start 174; Stop 198
taatgcacgaaatcaaatccgtaag

SEQ ID NO: 192508 - DNA, 25 bp, Artificial
  probe
  misc_feature (1)..(25): SEQ ID NO: 2563; WAN024F4Y_at; Start 141; Stop 165
gagtggagaccctgcctacgttcct

SEQ ID NO: 192509 - DNA, 25 bp, Artificial
  probe
  misc_feature (1)..(25): SEQ ID NO: 2563; WAN024F4Y_at; Start 201; Stop 225
tgagcgtgatgaaatcgttgaggaa

SEQ ID NO: 192510 - DNA, 25 bp, Artificial
  probe
  misc_feature (1)..(25): SEQ ID NO: 2563; WAN024F4Y_at; Start 154; Stop 178
gcctacgttcctcgttataataatg

SEQ ID NO: 192511 - DNA, 25 bp, Artificial
  probe
  misc_feature (1)..(25): SEQ ID NO: 2563; WAN024F4Y_at; Start 210; Stop 234
tgaaatcgttgaggaattggttcgc

SEQ ID NO: 192512 - DNA, 25 bp, Artificial
  probe
  misc_feature (1)..(25): SEQ ID NO: 2563; WAN024F4Y_at; Start 62; Stop 86
gcgaaactttgacagatgtttatgc

SEQ ID NO: 192513 - DNA, 25 bp, Artificial
  probe
  misc_feature (1)..(25): SEQ ID NO: 2563; WAN024F4Y_at; Start 186; Stop 210
tcaaatccgtaagtatgagcgtgat

SEQ ID NO: 192514 - DNA, 25 bp, Artificial
  probe
  misc_feature (1)..(25): SEQ ID NO: 2563; WAN024F4Y_at; Start 135; Stop 159
cgtattgagtggagaccctgcctac

SEQ ID NO: 192515 - DNA, 25 bp, Artificial
  probe
  misc_feature (1)..(25): SEQ ID NO: 2563; WAN024F4Y_at; Start 133; Stop 157
tacgtattgagtggagaccctgcct

SEQ ID NO: 192516 - DNA, 25 bp, Artificial
  probe
  misc_feature (1)..(25): SEQ ID NO: 2563; WAN024F4Y_at; Start 171; Stop 195
taataatgcacgaaatcaaatccgt

SEQ ID NO: 192517 - DNA, 25 bp, Artificial
  probe
  misc_feature (1)..(25): SEQ ID NO: 2563; WAN024F4Y_at; Start 241; Stop 265
ctcaaaggacaaggagtcgatctat

SEQ ID NO: 192518 - DNA, 25 bp, Artificial
  probe
  misc_feature (1)..(25): SEQ ID NO: 2563; WAN024F4Y_at; Start 192; Stop 216
ccgtaagtatgagcgtgatgaaatc

SEQ ID NO: 192519 - DNA, 25 bp, Artificial
  probe
  misc_feature (1)..(25): SEQ ID NO: 2563; WAN024F4Y_at; Start 119; Stop 143
accaaatcgtaggttacgtattgag

SEQ ID NO: 192520 - DNA, 25 bp, Artificial
  probe
  misc_feature (1)..(25): SEQ ID NO: 2563; WAN024F4Y_at; Start 213; Stop 237
aatcgttgaggaattggttcgctac

SEQ ID NO: 192521 - DNA, 25 bp, Artificial
  probe
  misc_feature (1)..(25): SEQ ID NO: 2563; WAN024F4Y_at; Start 55; Stop 79
gaaattagcgaaactttgacagatg

SEQ ID NO: 192522 - DNA, 25 bp, Artificial
  probe
  misc_feature (1)..(25): SEQ ID NO: 5569; WAN024F4Z_at; Start 64; Stop 88
caaggcttccaattcagtgtcggtc

SEQ ID NO: 192523 - DNA, 25 bp, Artificial
  probe
  misc_feature (1)..(25): SEQ ID NO: 5569; WAN024F4Z_at; Start 473; Stop 497
gcttgcactgcgaccttggcaggaa

SEQ ID NO: 192524 - DNA, 25 bp, Artificial
  probe
  misc_feature (1)..(25): SEQ ID NO: 5569; WAN024F4Z_at; Start 560; Stop 584
ttgccaattttagggaacttggtca

SEQ ID NO: 192525 - DNA, 25 bp, Artificial
  probe
  misc_feature (1)..(25): SEQ ID NO: 5569; WAN024F4Z_at; Start 450; Stop 474
ccaattcttggttttcagcacttgc

SEQ ID NO: 192526 - DNA, 25 bp, Artificial
  probe
  misc_feature (1)..(25): SEQ ID NO: 5569; WAN024F4Z_at; Start 464; Stop 488
tcagcacttgcttgcactgcgacct

SEQ ID NO: 192527 - DNA, 25 bp, Artificial
  probe
  misc_feature (1)..(25): SEQ ID NO: 5569; WAN024F4Z_at; Start 527; Stop 551
tccaagtccagcaccatctgctggg

SEQ ID NO: 192528 - DNA, 25 bp, Artificial
  probe
  misc_feature (1)..(25): SEQ ID NO: 5569; WAN024F4Z_at; Start 333; Stop 357
taagggccgacttgatatagttctc

SEQ ID NO: 192529 - DNA, 25 bp, Artificial
  probe
  misc_feature (1)..(25): SEQ ID NO: 5569; WAN024F4Z_at; Start 27; Stop 51
tcttggctctatttcgaatgatggc

SEQ ID NO: 192530 - DNA, 25 bp, Artificial
  probe
  misc_feature (1)..(25): SEQ ID NO: 5569; WAN024F4Z_at; Start 39; Stop 63
ttcgaatgatggctggattctccag

SEQ ID NO: 192531 - DNA, 25 bp, Artificial
  probe
  misc_feature (1)..(25): SEQ ID NO: 5569; WAN024F4Z_at; Start 633; Stop 657
catcagcagcgataatagcaagagc

SEQ ID NO: 192532 - DNA, 25 bp, Artificial
  probe
  misc_feature (1)..(25): SEQ ID NO: 5569; WAN024F4Z_at; Start 509; Stop 533
gcaactactaccttgccttccaagt

SEQ ID NO: 192533 - DNA, 25 bp, Artificial
  probe
  misc_feature (1)..(25): SEQ ID NO: 5569; WAN024F4Z_at; Start 595; Stop 619
gttcttggtttcaatggcttgaacc

SEQ ID NO: 192534 - DNA, 25 bp, Artificial
  probe
  misc_feature (1)..(25): SEQ ID NO: 5569; WAN024F4Z_at; Start 324; Stop 348
ccaacattttaagggccgacttgat

SEQ ID NO: 192535 - DNA, 25 bp, Artificial
  probe
  misc_feature (1)..(25): SEQ ID NO: 5569; WAN024F4Z_at; Start 400; Stop 424
gagctctgttgccttgtagcccaga

SEQ ID NO: 192536 - DNA, 25 bp, Artificial
  probe
  misc_feature (1)..(25): SEQ ID NO: 5569; WAN024F4Z_at; Start 4; Stop 28
ggcgttagcgcgtgtagcaaaaatc

SEQ ID NO: 192537 - DNA, 25 bp, Artificial
  probe
  misc_feature (1)..(25): SEQ ID NO: 5569; WAN024F4Z_at; Start 275; Stop 299
gtcatcttgacccacgaacaacgtt

SEQ ID NO: 192538 - DNA, 25 bp, Artificial
  probe
  misc_feature (1)..(25): SEQ ID NO: 5569; WAN024F4Z_at; Start 243; Stop 267
cctcatcatgataggcgatgtagag

SEQ ID NO: 192539 - DNA, 25 bp, Artificial
  probe
  misc_feature (1)..(25): SEQ ID NO: 5569; WAN024F4Z_at; Start 158; Stop 182
gtttcccaagacaggcctgcctgat

SEQ ID NO: 192540 - DNA, 25 bp, Artificial
  probe
  misc_feature (1)..(25): SEQ ID NO: 5569; WAN024F4Z_at; Start 610; Stop 634
ggcttgaaccaagccagcattgtca

SEQ ID NO: 192541 - DNA, 25 bp, Artificial
  probe
  misc_feature (1)..(25): SEQ ID NO: 5569; WAN024F4Z_at; Start 413; Stop 437
ttgtagcccagagccaacatggctt

SEQ ID NO: 192542 - DNA, 25 bp, Artificial
  probe
  misc_feature (1)..(25): SEQ ID NO: 5569; WAN024F4Z_at; Start 12; Stop 36
cgcgtgtagcaaaaatcttggctct

SEQ ID NO: 192543 - DNA, 25 bp, Artificial
  probe
  misc_feature (1)..(25): SEQ ID NO: 5569; WAN024F4Z_at; Start 74; Stop 98
aattcagtgtcggtcatctctgcga

SEQ ID NO: 192544 - DNA, 25 bp, Artificial
  probe
  misc_feature (1)..(25): SEQ ID NO: 5569; WAN024F4Z_at; Start 309; Stop 333
tctgctcctatttgaccaacatttt

SEQ ID NO: 192545 - DNA, 25 bp, Artificial
  probe
  misc_feature (1)..(25): SEQ ID NO: 5569; WAN024F4Z_at; Start 620; Stop 644
aagccagcattgtcatcagcagcga

SEQ ID NO: 192546 - DNA, 25 bp, Artificial
  probe
  misc_feature (1)..(25): SEQ ID NO: 5569; WAN024F4Z_at; Start 388; Stop 412
cttgattttcttgagctctgttgcc

SEQ ID NO: 192547 - DNA, 25 bp, Artificial
  probe
  misc_feature (1)..(25): SEQ ID NO: 5569; WAN024F4Z_at; Start 53; Stop 77
ggattctccagcaaggcttccaatt

SEQ ID NO: 192548 - DNA, 25 bp, Artificial
  probe
  misc_feature (1)..(25): SEQ ID NO: 5569; WAN024F4Z_at; Start 182; Stop 206
taggtttccatacacaacaactcaa

SEQ ID NO: 192549 - DNA, 25 bp, Artificial
  probe
  misc_feature (1)..(25): SEQ ID NO: 5569; WAN024F4Z_at; Start 359; Stop 383
gctgtatctgtcgttccttcaaaga

SEQ ID NO: 192550 - DNA, 25 bp, Artificial
  probe
  misc_feature (1)..(25): SEQ ID NO: 5569; WAN024F4Z_at; Start 126; Stop 150
cttctcggaaagcttggcgtttgtt

SEQ ID NO: 192551 - DNA, 25 bp, Artificial
  probe
  misc_feature (1)..(25): SEQ ID NO: 5569; WAN024F4Z_at; Start 169; Stop 193
caggcctgcctgataggtttccata

SEQ ID NO: 192552 - DNA, 25 bp, Artificial
  probe
  misc_feature (1)..(25): SEQ ID NO: 5569; WAN024F4Z_at; Start 233; Stop 257
tggccccactcctcatcatgatagg

SEQ ID NO: 192553 - DNA, 25 bp, Artificial
  probe
  misc_feature (1)..(25): SEQ ID NO: 5569; WAN024F4Z_at; Start 429; Stop 453
acatggcttccatagcttcttccaa

SEQ ID NO: 192554 - DNA, 25 bp, Artificial
  probe
  misc_feature (1)..(25): SEQ ID NO: 5569; WAN024F4Z_at; Start 348; Stop 372
tatagttctcagctgtatctgtcgt

SEQ ID NO: 192555 - DNA, 25 bp, Artificial
  probe
  misc_feature (1)..(25): SEQ ID NO: 5569; WAN024F4Z_at; Start 541; Stop 565
catctgctgggctgttttcttgcca

SEQ ID NO: 192556 - DNA, 25 bp, Artificial
  probe
  misc_feature (1)..(25): SEQ ID NO: 1303; WAN024F52_at; Start 347; Stop 371
cctatctttggtcttttgttgaggg

SEQ ID NO: 192557 - DNA, 25 bp, Artificial
  probe
  misc_feature (1)..(25): SEQ ID NO: 1303; WAN024F52_at; Start 10; Stop 34
cgttgttcgtgggtcaagatgacca

SEQ ID NO: 192558 - DNA, 25 bp, Artificial
  probe
  misc_feature (1)..(25): SEQ ID NO: 1303; WAN024F52_at; Start 508; Stop 532
gctgcagggctagttgatgaccacg

SEQ ID NO: 192559 - DNA, 25 bp, Artificial
  probe
  misc_feature (1)..(25): SEQ ID NO: 1303; WAN024F52_at; Start 448; Stop 472
gatctcaaaaaacgaggcttcaagt

SEQ ID NO: 192560 - DNA, 25 bp, Artificial
  probe
  misc_feature (1)..(25): SEQ ID NO: 1303; WAN024F52_at; Start 334; Stop 358
ggctcttttgatgcctatctttggt

SEQ ID NO: 192561 - DNA, 25 bp, Artificial
  probe
  misc_feature (1)..(25): SEQ ID NO: 1303; WAN024F52_at; Start 471; Stop 495
gttcacaggcccagtcgccgtattg

SEQ ID NO: 192562 - DNA, 25 bp, Artificial
  probe
  misc_feature (1)..(25): SEQ ID NO: 1303; WAN024F52_at; Start 126; Stop 150
tcaggcaggcctgtcttgggaaacg

SEQ ID NO: 192563 - DNA, 25 bp, Artificial
  probe
  misc_feature (1)..(25): SEQ ID NO: 1303; WAN024F52_at; Start 501; Stop 525
tctacaggctgcagggctagttgat

SEQ ID NO: 192564 - DNA, 25 bp, Artificial
  probe
  misc_feature (1)..(25): SEQ ID NO: 1303; WAN024F52_at; Start 386; Stop 410
acgatgttcctgattatcgccaagc

SEQ ID NO: 192565 - DNA, 25 bp, Artificial
  probe
  misc_feature (1)..(25): SEQ ID NO: 1303; WAN024F52_at; Start 116; Stop 140
tggaaacctatcaggcaggcctgtc

SEQ ID NO: 192566 - DNA, 25 bp, Artificial
  probe
  misc_feature (1)..(25): SEQ ID NO: 1303; WAN024F52_at; Start 516; Stop 540
gctagttgatgaccacgagaatgat

SEQ ID NO: 192567 - DNA, 25 bp, Artificial
  probe
  misc_feature (1)..(25): SEQ ID NO: 1303; WAN024F52_at; Start 282; Stop 306
ttttgctacacgcgctaacgcccaa

SEQ ID NO: 192568 - DNA, 25 bp, Artificial
  probe
  misc_feature (1)..(25): SEQ ID NO: 1303; WAN024F52_at; Start 491; Stop 515
tattgtcttttctacaggctgcagg

SEQ ID NO: 192569 - DNA, 25 bp, Artificial
  probe
  misc_feature (1)..(25): SEQ ID NO: 1303; WAN024F52_at; Start 495; Stop 519
gtcttttctacaggctgcagggcta

SEQ ID NO: 192570 - DNA, 25 bp, Artificial
  probe
  misc_feature (1)..(25): SEQ ID NO: 1303; WAN024F52_at; Start 412; Stop 436
ccagctaaaacacccttatctgaga

SEQ ID NO: 192571 - DNA, 25 bp, Artificial
  probe
  misc_feature (1)..(25): SEQ ID NO: 1303; WAN024F52_at; Start 41; Stop 65
tctacatcgcctatcatgatgagga

SEQ ID NO: 192572 - DNA, 25 bp, Artificial
  probe
  misc_feature (1)..(25): SEQ ID NO: 1303; WAN024F52_at; Start 99; Stop 123
gtttgagttgttgtgtatggaaacc

SEQ ID NO: 192573 - DNA, 25 bp, Artificial
  probe
  misc_feature (1)..(25): SEQ ID NO: 1303; WAN024F52_at; Start 526; Stop 550
gaccacgagaatgattgtgagtgga

SEQ ID NO: 192574 - DNA, 25 bp, Artificial
  probe
  misc_feature (1)..(25): SEQ ID NO: 1303; WAN024F52_at; Start 157; Stop 181
aacaaacgccaagctttccgagaag

SEQ ID NO: 192575 - DNA, 25 bp, Artificial
  probe
  misc_feature (1)..(25): SEQ ID NO: 1303; WAN024F52_at; Start 425; Stop 449
ccttatctgagaaattagccaaaga

SEQ ID NO: 192576 - DNA, 25 bp, Artificial
  probe
  misc_feature (1)..(25): SEQ ID NO: 1303; WAN024F52_at; Start 46; Stop 70
atcgcctatcatgatgaggagtggg

SEQ ID NO: 192577 - DNA, 25 bp, Artificial
  probe
  misc_feature (1)..(25): SEQ ID NO: 1303; WAN024F52_at; Start 440; Stop 464
tagccaaagatctcaaaaaacgagg

SEQ ID NO: 192578 - DNA, 25 bp, Artificial
  probe
  misc_feature (1)..(25): SEQ ID NO: 1303; WAN024F52_at; Start 474; Stop 498
cacaggcccagtcgccgtattgtct

SEQ ID NO: 192579 - DNA, 25 bp, Artificial
  probe
  misc_feature (1)..(25): SEQ ID NO: 1303; WAN024F52_at; Start 107; Stop 131
tgttgtgtatggaaacctatcaggc

SEQ ID NO: 192580 - DNA, 25 bp, Artificial
  probe
  misc_feature (1)..(25): SEQ ID NO: 1303; WAN024F52_at; Start 420; Stop 444
aacacccttatctgagaaattagcc

SEQ ID NO: 192581 - DNA, 25 bp, Artificial
  probe
  misc_feature (1)..(25): SEQ ID NO: 1303; WAN024F52_at; Start 512; Stop 536
cagggctagttgatgaccacgagaa

SEQ ID NO: 192582 - DNA, 25 bp, Artificial
  probe
  misc_feature (1)..(25): SEQ ID NO: 1303; WAN024F52_at; Start 112; Stop 136
tgtatggaaacctatcaggcaggcc

SEQ ID NO: 192583 - DNA, 25 bp, Artificial
  probe
  misc_feature (1)..(25): SEQ ID NO: 1303; WAN024F52_at; Start 482; Stop 506
cagtcgccgtattgtcttttctaca

SEQ ID NO: 192584 - DNA, 25 bp, Artificial
  probe
  misc_feature (1)..(25): SEQ ID NO: 1303; WAN024F52_at; Start 379; Stop 403
gtcgttaacgatgttcctgattatc

SEQ ID NO: 192585 - DNA, 25 bp, Artificial
  probe
  misc_feature (1)..(25): SEQ ID NO: 1303; WAN024F52_at; Start 522; Stop 546
tgatgaccacgagaatgattgtgag

SEQ ID NO: 192586 - DNA, 25 bp, Artificial
  probe
  misc_feature (1)..(25): SEQ ID NO: 1303; WAN024F52_at; Start 456; Stop 480
aaaacgaggcttcaagttcacaggc

SEQ ID NO: 192587 - DNA, 25 bp, Artificial
  probe
  misc_feature (1)..(25): SEQ ID NO: 1303; WAN024F52_at; Start 2; Stop 26
tgacaaaacgttgttcgtgggtcaa

SEQ ID NO: 192588 - DNA, 25 bp, Artificial
  probe
  misc_feature (1)..(25): SEQ ID NO: 1303; WAN024F52_at; Start 155; Stop 179
tcaacaaacgccaagctttccgaga

SEQ ID NO: 192589 - DNA, 25 bp, Artificial
  probe
  misc_feature (1)..(25): SEQ ID NO: 1303; WAN024F52_at; Start 463; Stop 487
ggcttcaagttcacaggcccagtcg

SEQ ID NO: 192590 - DNA, 25 bp, Artificial
  probe
  misc_feature (1)..(25): SEQ ID NO: 2779; WAN024F53_at; Start 133; Stop 157
cagatttatgtgcatcaggttgtgc

SEQ ID NO: 192591 - DNA, 25 bp, Artificial
  probe
  misc_feature (1)..(25): SEQ ID NO: 2779; WAN024F53_at; Start 124; Stop 148
caggaggctcagatttatgtgcatc

SEQ ID NO: 192592 - DNA, 25 bp, Artificial
  probe
  misc_feature (1)..(25): SEQ ID NO: 2779; WAN024F53_at; Start 360; Stop 384
ccagcagatggtgctggacttggaa

SEQ ID NO: 192593 - DNA, 25 bp, Artificial
  probe
  misc_feature (1)..(25): SEQ ID NO: 2779; WAN024F53_at; Start 174; Stop 198
gctttatggatttcgctcagaggat

SEQ ID NO: 192594 - DNA, 25 bp, Artificial
  probe
  misc_feature (1)..(25): SEQ ID NO: 2779; WAN024F53_at; Start 562; Stop 586
atcaagtcggcccttaaaatgttgg

SEQ ID NO: 192595 - DNA, 25 bp, Artificial
  probe
  misc_feature (1)..(25): SEQ ID NO: 2779; WAN024F53_at; Start 62; Stop 86
ccaatggtattggttatatcctgca

SEQ ID NO: 192596 - DNA, 25 bp, Artificial
  probe
  misc_feature (1)..(25): SEQ ID NO: 2779; WAN024F53_at; Start 147; Stop 171
tcaggttgtgcgtgaggacgcccat

SEQ ID NO: 192597 - DNA, 25 bp, Artificial
  probe
  misc_feature (1)..(25): SEQ ID NO: 2779; WAN024F53_at; Start 193; Stop 217
gaggatgagaaaaagctctttctta

SEQ ID NO: 192598 - DNA, 25 bp, Artificial
  probe
  misc_feature (1)..(25): SEQ ID NO: 2779; WAN024F53_at; Start 237; Stop 261
gattggtcctgtatcagctcttgct

SEQ ID NO: 192599 - DNA, 25 bp, Artificial
  probe
  misc_feature (1)..(25): SEQ ID NO: 2779; WAN024F53_at; Start 463; Stop 487
gaagctatggaagccatgttggctc

SEQ ID NO: 192600 - DNA, 25 bp, Artificial
  probe
  misc_feature (1)..(25): SEQ ID NO: 2779; WAN024F53_at; Start 76; Stop 100
tatatcctgcatgtggccaatcctt

SEQ ID NO: 192601 - DNA, 25 bp, Artificial
  probe
  misc_feature (1)..(25): SEQ ID NO: 2779; WAN024F53_at; Start 477; Stop 501
catgttggctctgggctacaaggca

SEQ ID NO: 192602 - DNA, 25 bp, Artificial
  probe
  misc_feature (1)..(25): SEQ ID NO: 2779; WAN024F53_at; Start 377; Stop 401
acttggaaggcaaggtagtagttgc

SEQ ID NO: 192603 - DNA, 25 bp, Artificial
  probe
  misc_feature (1)..(25): SEQ ID NO: 2779; WAN024F53_at; Start 535; Stop 559
ggaacgacagatacagctgagaact

SEQ ID NO: 192604 - DNA, 25 bp, Artificial
  probe
  misc_feature (1)..(25): SEQ ID NO: 2779; WAN024F53_at; Start 2; Stop 26
tgtacgcatatttaaaaggaatcat

SEQ ID NO: 192605 - DNA, 25 bp, Artificial
  probe
  misc_feature (1)..(25): SEQ ID NO: 2779; WAN024F53_at; Start 433; Stop 457
caagcaagtgctgaaaaccaagaat

SEQ ID NO: 192606 - DNA, 25 bp, Artificial
  probe
  misc_feature (1)..(25): SEQ ID NO: 2779; WAN024F53_at; Start 109; Stop 133
tcaggtcaggttaatcaggaggctc

SEQ ID NO: 192607 - DNA, 25 bp, Artificial
  probe
  misc_feature (1)..(25): SEQ ID NO: 2779; WAN024F53_at; Start 19; Stop 43
ggaatcattaccaaaattactgcca

SEQ ID NO: 192608 - DNA, 25 bp, Artificial
  probe
  misc_feature (1)..(25): SEQ ID NO: 2779; WAN024F53_at; Start 345; Stop 369
tggcaagaaaacagcccagcagatg

SEQ ID NO: 192609 - DNA, 25 bp, Artificial
  probe
  misc_feature (1)..(25): SEQ ID NO: 2779; WAN024F53_at; Start 160; Stop 184
gaggacgcccatttgctttatggat

SEQ ID NO: 192610 - DNA, 25 bp, Artificial
  probe
  misc_feature (1)..(25): SEQ ID NO: 2779; WAN024F53_at; Start 444; Stop 468
tgaaaaccaagaattggaagaagct

SEQ ID NO: 192611 - DNA, 25 bp, Artificial
  probe
  misc_feature (1)..(25): SEQ ID NO: 2779; WAN024F53_at; Start 519; Stop 543
caagaaattctttgaaggaacgaca

SEQ ID NO: 192612 - DNA, 25 bp, Artificial
  probe
  misc_feature (1)..(25): SEQ ID NO: 2779; WAN024F53_at; Start 264; Stop 288
tatcgctgctgatgacaatgctggc

SEQ ID NO: 192613 - DNA, 25 bp, Artificial
  probe
  misc_feature (1)..(25): SEQ ID NO: 2779; WAN024F53_at; Start 417; Stop 441
tgccaaggtcgcagtgcaagcaagt

SEQ ID NO: 192614 - DNA, 25 bp, Artificial
  probe
  misc_feature (1)..(25): SEQ ID NO: 2779; WAN024F53_at; Start 550; Stop 574
gctgagaactatatcaagtcggccc

SEQ ID NO: 192615 - DNA, 25 bp, Artificial
  probe
  misc_feature (1)..(25): SEQ ID NO: 2779; WAN024F53_at; Start 253; Stop 277
gctcttgctattatcgctgctgatg

SEQ ID NO: 192616 - DNA, 25 bp, Artificial
  probe
  misc_feature (1)..(25): SEQ ID NO: 2779; WAN024F53_at; Start 326; Stop 350
tgaccaagttccctaaaattggcaa

SEQ ID NO: 192617 - DNA, 25 bp, Artificial
  probe
  misc_feature (1)..(25): SEQ ID NO: 2779; WAN024F53_at; Start 223; Stop 247
atttcggtctctgggattggtcctg

SEQ ID NO: 192618 - DNA, 25 bp, Artificial
  probe
  misc_feature (1)..(25): SEQ ID NO: 2779; WAN024F53_at; Start 495; Stop 519
caaggcaacagagctcaagaaaatc

SEQ ID NO: 192619 - DNA, 25 bp, Artificial
  probe
  misc_feature (1)..(25): SEQ ID NO: 2779; WAN024F53_at; Start 40; Stop 64
gccaaatacattgttcttgaaacca

SEQ ID NO: 192620 - DNA, 25 bp, Artificial
  probe
  misc_feature (1)..(25): SEQ ID NO: 2779; WAN024F53_at; Start 279; Stop 303
caatgctggcttggttcaagccatt

SEQ ID NO: 192621 - DNA, 25 bp, Artificial
  probe
  misc_feature (1)..(25): SEQ ID NO: 2779; WAN024F53_at; Start 291; Stop 315
ggttcaagccattgaaaccaagaac

SEQ ID NO: 192622 - DNA, 25 bp, Artificial
  probe
  misc_feature (1)..(25): SEQ ID NO: 2779; WAN024F53_at; Start 94; Stop 118
aatccttatgcctattcaggtcagg

SEQ ID NO: 192623 - DNA, 25 bp, Artificial
  probe
  misc_feature (1)..(25): SEQ ID NO: 2779; WAN024F53_at; Start 486; Stop 510
tctgggctacaaggcaacagagctc

SEQ ID NO: 192624 - DNA, 25 bp, Artificial
  probe
  misc_feature (1)..(25): SEQ ID NO: 315; WAN024F54_at; Start 153; Stop 177
aaaaaatcttggcatcagctttgag

SEQ ID NO: 192625 - DNA, 25 bp, Artificial
  probe
  misc_feature (1)..(25): SEQ ID NO: 315; WAN024F54_at; Start 159; Stop 183
tcttggcatcagctttgagaaaatc

SEQ ID NO: 192626 - DNA, 25 bp, Artificial
  probe
  misc_feature (1)..(25): SEQ ID NO: 315; WAN024F54_at; Start 162; Stop 186
tggcatcagctttgagaaaatcacg

SEQ ID NO: 192627 - DNA, 25 bp, Artificial
  probe
  misc_feature (1)..(25): SEQ ID NO: 315; WAN024F54_at; Start 170; Stop 194
gctttgagaaaatcacgcgccacat

SEQ ID NO: 192628 - DNA, 25 bp, Artificial
  probe
  misc_feature (1)..(25): SEQ ID NO: 315; WAN024F54_at; Start 165; Stop 189
catcagctttgagaaaatcacgcgc

SEQ ID NO: 192629 - DNA, 25 bp, Artificial
  probe
  misc_feature (1)..(25): SEQ ID NO: 315; WAN024F54_at; Start 69; Stop 93
tacagcgattcatcacgatatcatc

SEQ ID NO: 192630 - DNA, 25 bp, Artificial
  probe
  misc_feature (1)..(25): SEQ ID NO: 315; WAN024F54_at; Start 134; Stop 158
tcaagtcctagctgtgcccaaaaaa

SEQ ID NO: 192631 - DNA, 25 bp, Artificial
  probe
  misc_feature (1)..(25): SEQ ID NO: 315; WAN024F54_at; Start 141; Stop 165
ctagctgtgcccaaaaaatcttggc

SEQ ID NO: 192632 - DNA, 25 bp, Artificial
  probe
  misc_feature (1)..(25): SEQ ID NO: 315; WAN024F54_at; Start 108; Stop 132
gcaaaatctctttcgcttctaaact

SEQ ID NO: 192633 - DNA, 25 bp, Artificial
  probe
  misc_feature (1)..(25): SEQ ID NO: 315; WAN024F54_at; Start 129; Stop 153
aactttcaagtcctagctgtgccca

SEQ ID NO: 192634 - DNA, 25 bp, Artificial
  probe
  misc_feature (1)..(25): SEQ ID NO: 315; WAN024F54_at; Start 114; Stop 138
tctctttcgcttctaaactttcaag

SEQ ID NO: 192635 - DNA, 25 bp, Artificial
  probe
  misc_feature (1)..(25): SEQ ID NO: 315; WAN024F54_at; Start 188; Stop 212
gccacatcgggcagaaattcactgc

SEQ ID NO: 192636 - DNA, 25 bp, Artificial
  probe
  misc_feature (1)..(25): SEQ ID NO: 315; WAN024F54_at; Start 34; Stop 58
tgcttcctcaatcaagcgagtatgt

SEQ ID NO: 192637 - DNA, 25 bp, Artificial
  probe
  misc_feature (1)..(25): SEQ ID NO: 315; WAN024F54_at; Start 178; Stop 202
aaaatcacgcgccacatcgggcaga

SEQ ID NO: 192638 - DNA, 25 bp, Artificial
  probe
  misc_feature (1)..(25): SEQ ID NO: 315; WAN024F54_at; Start 75; Stop 99
gattcatcacgatatcatcacatcc

SEQ ID NO: 192639 - DNA, 25 bp, Artificial
  probe
  misc_feature (1)..(25): SEQ ID NO: 315; WAN024F54_at; Start 37; Stop 61
ttcctcaatcaagcgagtatgttct

SEQ ID NO: 192640 - DNA, 25 bp, Artificial
  probe
  misc_feature (1)..(25): SEQ ID NO: 315; WAN024F54_at; Start 182; Stop 206
tcacgcgccacatcgggcagaaatt

SEQ ID NO: 192641 - DNA, 25 bp, Artificial
  probe
  misc_feature (1)..(25): SEQ ID NO: 315; WAN024F54_at; Start 148; Stop 172
tgcccaaaaaatcttggcatcagct

SEQ ID NO: 192642 - DNA, 25 bp, Artificial
  probe
  misc_feature (1)..(25): SEQ ID NO: 315; WAN024F54_at; Start 167; Stop 191
tcagctttgagaaaatcacgcgcca

SEQ ID NO: 192643 - DNA, 25 bp, Artificial
  probe
  misc_feature (1)..(25): SEQ ID NO: 315; WAN024F54_at; Start 196; Stop 220
gggcagaaattcactgcgacgataa

SEQ ID NO: 192644 - DNA, 25 bp, Artificial
  probe
  misc_feature (1)..(25): SEQ ID NO: 315; WAN024F54_at; Start 144; Stop 168
gctgtgcccaaaaaatcttggcatc

SEQ ID NO: 192645 - DNA, 25 bp, Artificial
  probe
  misc_feature (1)..(25): SEQ ID NO: 315; WAN024F54_at; Start 100; Stop 124
accatcacgcaaaatctctttcgct

SEQ ID NO: 192646 - DNA, 25 bp, Artificial
  probe
  misc_feature (1)..(25): SEQ ID NO: 315; WAN024F54_at; Start 173; Stop 197
ttgagaaaatcacgcgccacatcgg

SEQ ID NO: 192647 - DNA, 25 bp, Artificial
  probe
  misc_feature (1)..(25): SEQ ID NO: 315; WAN024F54_at; Start 136; Stop 160
aagtcctagctgtgcccaaaaaatc

SEQ ID NO: 192648 - DNA, 25 bp, Artificial
  probe
  misc_feature (1)..(25): SEQ ID NO: 315; WAN024F54_at; Start 16; Stop 40
tcagctacctttttcttatgcttcc

SEQ ID NO: 192649 - DNA, 25 bp, Artificial
  probe
  misc_feature (1)..(25): SEQ ID NO: 315; WAN024F54_at; Start 61; Stop 85
tctcttgatacagcgattcatcacg

SEQ ID NO: 192650 - DNA, 25 bp, Artificial
  probe
  misc_feature (1)..(25): SEQ ID NO: 315; WAN024F54_at; Start 56; Stop 80
tgttctctcttgatacagcgattca

SEQ ID NO: 192651 - DNA, 25 bp, Artificial
  probe
  misc_feature (1)..(25): SEQ ID NO: 315; WAN024F54_at; Start 51; Stop 75
gagtatgttctctcttgatacagcg

SEQ ID NO: 192652 - DNA, 25 bp, Artificial
  probe
  misc_feature (1)..(25): SEQ ID NO: 315; WAN024F54_at; Start 127; Stop 151
taaactttcaagtcctagctgtgcc

SEQ ID NO: 192653 - DNA, 25 bp, Artificial
  probe
  misc_feature (1)..(25): SEQ ID NO: 315; WAN024F54_at; Start 85; Stop 109
gatatcatcacatccaccatcacgc

SEQ ID NO: 192654 - DNA, 25 bp, Artificial
  probe
  misc_feature (1)..(25): SEQ ID NO: 315; WAN024F54_at; Start 29; Stop 53
tcttatgcttcctcaatcaagcgag

SEQ ID NO: 192655 - DNA, 25 bp, Artificial
  probe
  misc_feature (1)..(25): SEQ ID NO: 315; WAN024F54_at; Start 63; Stop 87
tcttgatacagcgattcatcacgat

SEQ ID NO: 192656 - DNA, 25 bp, Artificial
  probe
  misc_feature (1)..(25): SEQ ID NO: 315; WAN024F54_at; Start 192; Stop 216
catcgggcagaaattcactgcgacg

SEQ ID NO: 192657 - DNA, 25 bp, Artificial
  probe
  misc_feature (1)..(25): SEQ ID NO: 315; WAN024F54_at; Start 41; Stop 65
tcaatcaagcgagtatgttctctct

SEQ ID NO: 192658 - DNA, 25 bp, Artificial
  probe
  misc_feature (1)..(25): SEQ ID NO: 1625; WAN024F55_at; Start 395; Stop 419
gctgtatcaagagagaacatactcg

SEQ ID NO: 192659 - DNA, 25 bp, Artificial
  probe
  misc_feature (1)..(25): SEQ ID NO: 1625; WAN024F55_at; Start 3; Stop 27
gagtcaagaatttatcaatccaagt

SEQ ID NO: 192660 - DNA, 25 bp, Artificial
  probe
  misc_feature (1)..(25): SEQ ID NO: 1625; WAN024F55_at; Start 338; Stop 362
gtttagaagcgaaagagattttgcg

SEQ ID NO: 192661 - DNA, 25 bp, Artificial
  probe
  misc_feature (1)..(25): SEQ ID NO: 1625; WAN024F55_at; Start 316; Stop 340
tgggcacagctaggacttgaaagtt

SEQ ID NO: 192662 - DNA, 25 bp, Artificial
  probe
  misc_feature (1)..(25): SEQ ID NO: 1625; WAN024F55_at; Start 147; Stop 171
aatcatcccagtcaatcccaaggcg

SEQ ID NO: 192663 - DNA, 25 bp, Artificial
  probe
  misc_feature (1)..(25): SEQ ID NO: 1625; WAN024F55_at; Start 10; Stop 34
gaatttatcaatccaagtgatggcg

SEQ ID NO: 192664 - DNA, 25 bp, Artificial
  probe
  misc_feature (1)..(25): SEQ ID NO: 1625; WAN024F55_at; Start 386; Stop 410
tgatgaatcgctgtatcaagagaga

SEQ ID NO: 192665 - DNA, 25 bp, Artificial
  probe
  misc_feature (1)..(25): SEQ ID NO: 1625; WAN024F55_at; Start 164; Stop 188
ccaaggcggcaggtggcgaaatctt

SEQ ID NO: 192666 - DNA, 25 bp, Artificial
  probe
  misc_feature (1)..(25): SEQ ID NO: 1625; WAN024F55_at; Start 83; Stop 107
tgtctgaccgtgaagaaacaaccag

SEQ ID NO: 192667 - DNA, 25 bp, Artificial
  probe
  misc_feature (1)..(25): SEQ ID NO: 1625; WAN024F55_at; Start 345; Stop 369
agcgaaagagattttgcgtgatggt

SEQ ID NO: 192668 - DNA, 25 bp, Artificial
  probe
  misc_feature (1)..(25): SEQ ID NO: 1625; WAN024F55_at; Start 28; Stop 52
gatggcgtgattcgtcagtatctcg

SEQ ID NO: 192669 - DNA, 25 bp, Artificial
  probe
  misc_feature (1)..(25): SEQ ID NO: 1625; WAN024F55_at; Start 279; Stop 303
ggcgcgtgattttctcaaagctgat

SEQ ID NO: 192670 - DNA, 25 bp, Artificial
  probe
  misc_feature (1)..(25): SEQ ID NO: 1625; WAN024F55_at; Start 301; Stop 325
gatgccaagattttttgggcacagc

SEQ ID NO: 192671 - DNA, 25 bp, Artificial
  probe
  misc_feature (1)..(25): SEQ ID NO: 1625; WAN024F55_at; Start 138; Stop 162
gggctataaaatcatcccagtcaat

SEQ ID NO: 192672 - DNA, 25 bp, Artificial
  probe
  misc_feature (1)..(25): SEQ ID NO: 1625; WAN024F55_at; Start 223; Stop 247
ccttttcctgtagatattgtcaatg

SEQ ID NO: 192673 - DNA, 25 bp, Artificial
  probe
  misc_feature (1)..(25): SEQ ID NO: 1625; WAN024F55_at; Start 119; Stop 143
caaaggaaatgcaggctcggggcta

SEQ ID NO: 192674 - DNA, 25 bp, Artificial
  probe
  misc_feature (1)..(25): SEQ ID NO: 1625; WAN024F55_at; Start 376; Stop 400
gatgatatcgtgatgaatcgctgta

SEQ ID NO: 192675 - DNA, 25 bp, Artificial
  probe
  misc_feature (1)..(25): SEQ ID NO: 1625; WAN024F55_at; Start 272; Stop 296
ccgatgtggcgcgtgattttctcaa

SEQ ID NO: 192676 - DNA, 25 bp, Artificial
  probe
  misc_feature (1)..(25): SEQ ID NO: 1625; WAN024F55_at; Start 214; Stop 238
gctgaaattccttttcctgtagata

SEQ ID NO: 192677 - DNA, 25 bp, Artificial
  probe
  misc_feature (1)..(25): SEQ ID NO: 1625; WAN024F55_at; Start 36; Stop 60
gattcgtcagtatctcgcaacgagt

SEQ ID NO: 192678 - DNA, 25 bp, Artificial
  probe
  misc_feature (1)..(25): SEQ ID NO: 1625; WAN024F55_at; Start 237; Stop 261
tattgtcaatgtttatcgtcgcagt

SEQ ID NO: 192679 - DNA, 25 bp, Artificial
  probe
  misc_feature (1)..(25): SEQ ID NO: 1625; WAN024F55_at; Start 405; Stop 429
gagagaacatactcgcttgattgag

SEQ ID NO: 192680 - DNA, 25 bp, Artificial
  probe
  misc_feature (1)..(25): SEQ ID NO: 1625; WAN024F55_at; Start 56; Stop 80
cgagtaaaacccttgctgtggtggg

SEQ ID NO: 192681 - DNA, 25 bp, Artificial
  probe
  misc_feature (1)..(25): SEQ ID NO: 1625; WAN024F55_at; Start 46; Stop 70
tatctcgcaacgagtaaaacccttg

SEQ ID NO: 192682 - DNA, 25 bp, Artificial
  probe
  misc_feature (1)..(25): SEQ ID NO: 1625; WAN024F55_at; Start 286; Stop 310
gattttctcaaagctgatgccaaga

SEQ ID NO: 192683 - DNA, 25 bp, Artificial
  probe
  misc_feature (1)..(25): SEQ ID NO: 1625; WAN024F55_at; Start 414; Stop 438
tactcgcttgattgaggaagcataa

SEQ ID NO: 192684 - DNA, 25 bp, Artificial
  probe
  misc_feature (1)..(25): SEQ ID NO: 1625; WAN024F55_at; Start 324; Stop 348
gctaggacttgaaagtttagaagcg

SEQ ID NO: 192685 - DNA, 25 bp, Artificial
  probe
  misc_feature (1)..(25): SEQ ID NO: 1625; WAN024F55_at; Start 262; Stop 286
gaatttctgcccgatgtggcgcgtg

SEQ ID NO: 192686 - DNA, 25 bp, Artificial
  probe
  misc_feature (1)..(25): SEQ ID NO: 1625; WAN024F55_at; Start 199; Stop 223
gcttatgctagcctcgctgaaattc

SEQ ID NO: 192687 - DNA, 25 bp, Artificial
  probe
  misc_feature (1)..(25): SEQ ID NO: 1625; WAN024F55_at; Start 250; Stop 274
tatcgtcgcagtgaatttctgcccg

SEQ ID NO: 192688 - DNA, 25 bp, Artificial
  probe
  misc_feature (1)..(25): SEQ ID NO: 1625; WAN024F55_at; Start 22; Stop 46
ccaagtgatggcgtgattcgtcagt

SEQ ID NO: 192689 - DNA, 25 bp, Artificial
  probe
  misc_feature (1)..(25): SEQ ID NO: 1625; WAN024F55_at; Start 156; Stop 180
agtcaatcccaaggcggcaggtggc

SEQ ID NO: 192690 - DNA, 25 bp, Artificial
  probe
  misc_feature (1)..(25): SEQ ID NO: 1625; WAN024F55_at; Start 309; Stop 333
gattttttgggcacagctaggactt

SEQ ID NO: 192691 - DNA, 25 bp, Artificial
  probe
  misc_feature (1)..(25): SEQ ID NO: 1625; WAN024F55_at; Start 66; Stop 90
ccttgctgtggtgggtttgtctgac

SEQ ID NO: 192692 - DNA, 25 bp, Artificial
  probe
  misc_feature (1)..(25): SEQ ID NO: 5057; WAN024F56_at; Start 196; Stop 220
tcctgtccattgttggtaatcgcca

SEQ ID NO: 192693 - DNA, 25 bp, Artificial
  probe
  misc_feature (1)..(25): SEQ ID NO: 5057; WAN024F56_at; Start 226; Stop 250
tcacctgttgtgtcttcgcgcatac

SEQ ID NO: 192694 - DNA, 25 bp, Artificial
  probe
  misc_feature (1)..(25): SEQ ID NO: 5057; WAN024F56_at; Start 119; Stop 143
catggcttgcgaaccttgtctttgc

SEQ ID NO: 192695 - DNA, 25 bp, Artificial
  probe
  misc_feature (1)..(25): SEQ ID NO: 5057; WAN024F56_at; Start 106; Stop 130
gaaaaactccaaccatggcttgcga

SEQ ID NO: 192696 - DNA, 25 bp, Artificial
  probe
  misc_feature (1)..(25): SEQ ID NO: 5057; WAN024F56_at; Start 49; Stop 73
cagttgatttgcttgggtaatggct

SEQ ID NO: 192697 - DNA, 25 bp, Artificial
  probe
  misc_feature (1)..(25): SEQ ID NO: 5057; WAN024F56_at; Start 102; Stop 126
tgccgaaaaactccaaccatggctt

SEQ ID NO: 192698 - DNA, 25 bp, Artificial
  probe
  misc_feature (1)..(25): SEQ ID NO: 5057; WAN024F56_at; Start 213; Stop 237
aatcgccaatacctcacctgttgtg

SEQ ID NO: 192699 - DNA, 25 bp, Artificial
  probe
  misc_feature (1)..(25): SEQ ID NO: 5057; WAN024F56_at; Start 132; Stop 156
ccttgtctttgctggtttctctgta

SEQ ID NO: 192700 - DNA, 25 bp, Artificial
  probe
  misc_feature (1)..(25): SEQ ID NO: 5057; WAN024F56_at; Start 41; Stop 65
tagtccagcagttgatttgcttggg

SEQ ID NO: 192701 - DNA, 25 bp, Artificial
  probe
  misc_feature (1)..(25): SEQ ID NO: 5057; WAN024F56_at; Start 96; Stop 120
gcttgttgccgaaaaactccaacca

SEQ ID NO: 192702 - DNA, 25 bp, Artificial
  probe
  misc_feature (1)..(25): SEQ ID NO: 5057; WAN024F56_at; Start 203; Stop 227
cattgttggtaatcgccaatacctc

SEQ ID NO: 192703 - DNA, 25 bp, Artificial
  probe
  misc_feature (1)..(25): SEQ ID NO: 5057; WAN024F56_at; Start 31; Stop 55
ccagctcttgtagtccagcagttga

SEQ ID NO: 192704 - DNA, 25 bp, Artificial
  probe
  misc_feature (1)..(25): SEQ ID NO: 5057; WAN024F56_at; Start 222; Stop 246
tacctcacctgttgtgtcttcgcgc

SEQ ID NO: 192705 - DNA, 25 bp, Artificial
  probe
  misc_feature (1)..(25): SEQ ID NO: 5057; WAN024F56_at; Start 115; Stop 139
caaccatggcttgcgaaccttgtct

SEQ ID NO: 192706 - DNA, 25 bp, Artificial
  probe
  misc_feature (1)..(25): SEQ ID NO: 5057; WAN024F56_at; Start 179; Stop 203
tcttaaccagatggttttcctgtcc

SEQ ID NO: 192707 - DNA, 25 bp, Artificial
  probe
  misc_feature (1)..(25): SEQ ID NO: 5057; WAN024F56_at; Start 99; Stop 123
tgttgccgaaaaactccaaccatgg

SEQ ID NO: 192708 - DNA, 25 bp, Artificial
  probe
  misc_feature (1)..(25): SEQ ID NO: 5057; WAN024F56_at; Start 69; Stop 93
tggctcgttgcggttgctgggtaaa

SEQ ID NO: 192709 - DNA, 25 bp, Artificial
  probe
  misc_feature (1)..(25): SEQ ID NO: 5057; WAN024F56_at; Start 81; Stop 105
gttgctgggtaaagggcttgttgcc

SEQ ID NO: 192710 - DNA, 25 bp, Artificial
  probe
  misc_feature (1)..(25): SEQ ID NO: 5057; WAN024F56_at; Start 183; Stop 207
aaccagatggttttcctgtccattg

SEQ ID NO: 192711 - DNA, 25 bp, Artificial
  probe
  misc_feature (1)..(25): SEQ ID NO: 5057; WAN024F56_at; Start 234; Stop 258
tgtgtcttcgcgcatactaaagcta

SEQ ID NO: 192712 - DNA, 25 bp, Artificial
  probe
  misc_feature (1)..(25): SEQ ID NO: 5057; WAN024F56_at; Start 209; Stop 233
tggtaatcgccaatacctcacctgt

SEQ ID NO: 192713 - DNA, 25 bp, Artificial
  probe
  misc_feature (1)..(25): SEQ ID NO: 5057; WAN024F56_at; Start 154; Stop 178
gtattttttaattccaagaatgcca

SEQ ID NO: 192714 - DNA, 25 bp, Artificial
  probe
  misc_feature (1)..(25): SEQ ID NO: 5057; WAN024F56_at; Start 6; Stop 30
taaacattttcctgtcctcctcgga

SEQ ID NO: 192715 - DNA, 25 bp, Artificial
  probe
  misc_feature (1)..(25): SEQ ID NO: 5057; WAN024F56_at; Start 168; Stop 192
caagaatgccatcttaaccagatgg

SEQ ID NO: 192716 - DNA, 25 bp, Artificial
  probe
  misc_feature (1)..(25): SEQ ID NO: 5057; WAN024F56_at; Start 229; Stop 253
cctgttgtgtcttcgcgcatactaa

SEQ ID NO: 192717 - DNA, 25 bp, Artificial
  probe
  misc_feature (1)..(25): SEQ ID NO: 5057; WAN024F56_at; Start 141; Stop 165
tgctggtttctctgtattttttaat

SEQ ID NO: 192718 - DNA, 25 bp, Artificial
  probe
  misc_feature (1)..(25): SEQ ID NO: 5057; WAN024F56_at; Start 18; Stop 42
tgtcctcctcggaccagctcttgta

SEQ ID NO: 192719 - DNA, 25 bp, Artificial
  probe
  misc_feature (1)..(25): SEQ ID NO: 5057; WAN024F56_at; Start 237; Stop 261
gtcttcgcgcatactaaagctatga

SEQ ID NO: 192720 - DNA, 25 bp, Artificial
  probe
  misc_feature (1)..(25): SEQ ID NO: 5057; WAN024F56_at; Start 28; Stop 52
ggaccagctcttgtagtccagcagt

SEQ ID NO: 192721 - DNA, 25 bp, Artificial
  probe
  misc_feature (1)..(25): SEQ ID NO: 5057; WAN024F56_at; Start 113; Stop 137
tccaaccatggcttgcgaaccttgt

SEQ ID NO: 192722 - DNA, 25 bp, Artificial
  probe
  misc_feature (1)..(25): SEQ ID NO: 5057; WAN024F56_at; Start 36; Stop 60
tcttgtagtccagcagttgatttgc

SEQ ID NO: 192723 - DNA, 25 bp, Artificial
  probe
  misc_feature (1)..(25): SEQ ID NO: 5057; WAN024F56_at; Start 56; Stop 80
tttgcttgggtaatggctcgttgcg

SEQ ID NO: 192724 - DNA, 25 bp, Artificial
  probe
  misc_feature (1)..(25): SEQ ID NO: 5057; WAN024F56_at; Start 122; Stop 146
ggcttgcgaaccttgtctttgctgg

SEQ ID NO: 192725 - DNA, 25 bp, Artificial
  probe
  misc_feature (1)..(25): SEQ ID NO: 5057; WAN024F56_at; Start 20; Stop 44
tcctcctcggaccagctcttgtagt

SEQ ID NO: 192726 - DNA, 25 bp, Artificial
  probe
  misc_feature (1)..(25): SEQ ID NO: 4141; WAN024F57_at; Start 121; Stop 145
gcattcttggaattaaaaaatacag

SEQ ID NO: 192727 - DNA, 25 bp, Artificial
  probe
  misc_feature (1)..(25): SEQ ID NO: 4141; WAN024F57_at; Start 90; Stop 114
caatggacaggaaaaccatctggtt

SEQ ID NO: 192728 - DNA, 25 bp, Artificial
  probe
  misc_feature (1)..(25): SEQ ID NO: 4141; WAN024F57_at; Start 84; Stop 108
taccaacaatggacaggaaaaccat

SEQ ID NO: 192729 - DNA, 25 bp, Artificial
  probe
  misc_feature (1)..(25): SEQ ID NO: 4141; WAN024F57_at; Start 77; Stop 101
tggcgattaccaacaatggacagga

SEQ ID NO: 192730 - DNA, 25 bp, Artificial
  probe
  misc_feature (1)..(25): SEQ ID NO: 4141; WAN024F57_at; Start 74; Stop 98
tattggcgattaccaacaatggaca

SEQ ID NO: 192731 - DNA, 25 bp, Artificial
  probe
  misc_feature (1)..(25): SEQ ID NO: 4141; WAN024F57_at; Start 159; Stop 183
gacaaggttcgcaagccatggttgg

SEQ ID NO: 192732 - DNA, 25 bp, Artificial
  probe
  misc_feature (1)..(25): SEQ ID NO: 4141; WAN024F57_at; Start 141; Stop 165
tacagagaaaccagcaaagacaagg

SEQ ID NO: 192733 - DNA, 25 bp, Artificial
  probe
  misc_feature (1)..(25): SEQ ID NO: 4141; WAN024F57_at; Start 156; Stop 180
aaagacaaggttcgcaagccatggt

SEQ ID NO: 192734 - DNA, 25 bp, Artificial
  probe
  misc_feature (1)..(25): SEQ ID NO: 4141; WAN024F57_at; Start 79; Stop 103
gcgattaccaacaatggacaggaaa

SEQ ID NO: 192735 - DNA, 25 bp, Artificial
  probe
  misc_feature (1)..(25): SEQ ID NO: 4141; WAN024F57_at; Start 31; Stop 55
gcttttcatagctttagtatgcgcg

SEQ ID NO: 192736 - DNA, 25 bp, Artificial
  probe
  misc_feature (1)..(25): SEQ ID NO: 4141; WAN024F57_at; Start 48; Stop 72
tatgcgcgaagacacaacaggtgag

SEQ ID NO: 192737 - DNA, 25 bp, Artificial
  probe
  misc_feature (1)..(25): SEQ ID NO: 4141; WAN024F57_at; Start 99; Stop 123
ggaaaaccatctggttaagatggca

SEQ ID NO: 192738 - DNA, 25 bp, Artificial
  probe
  misc_feature (1)..(25): SEQ ID NO: 4141; WAN024F57_at; Start 23; Stop 47
atgacctggcttttcatagctttag

SEQ ID NO: 192739 - DNA, 25 bp, Artificial
  probe
  misc_feature (1)..(25): SEQ ID NO: 4141; WAN024F57_at; Start 65; Stop 89
caggtgaggtattggcgattaccaa

SEQ ID NO: 192740 - DNA, 25 bp, Artificial
  probe
  misc_feature (1)..(25): SEQ ID NO: 4141; WAN024F57_at; Start 137; Stop 161
aaaatacagagaaaccagcaaagac

SEQ ID NO: 192741 - DNA, 25 bp, Artificial
  probe
  misc_feature (1)..(25): SEQ ID NO: 4141; WAN024F57_at; Start 108; Stop 132
tctggttaagatggcattcttggaa

SEQ ID NO: 192742 - DNA, 25 bp, Artificial
  probe
  misc_feature (1)..(25): SEQ ID NO: 4141; WAN024F57_at; Start 151; Stop 175
ccagcaaagacaaggttcgcaagcc

SEQ ID NO: 192743 - DNA, 25 bp, Artificial
  probe
  misc_feature (1)..(25): SEQ ID NO: 4141; WAN024F57_at; Start 147; Stop 171
gaaaccagcaaagacaaggttcgca

SEQ ID NO: 192744 - DNA, 25 bp, Artificial
  probe
  misc_feature (1)..(25): SEQ ID NO: 4141; WAN024F57_at; Start 60; Stop 84
cacaacaggtgaggtattggcgatt

SEQ ID NO: 192745 - DNA, 25 bp, Artificial
  probe
  misc_feature (1)..(25): SEQ ID NO: 4141; WAN024F57_at; Start 36; Stop 60
tcatagctttagtatgcgcgaagac

SEQ ID NO: 192746 - DNA, 25 bp, Artificial
  probe
  misc_feature (1)..(25): SEQ ID NO: 4141; WAN024F57_at; Start 45; Stop 69
tagtatgcgcgaagacacaacaggt

SEQ ID NO: 192747 - DNA, 25 bp, Artificial
  probe
  misc_feature (1)..(25): SEQ ID NO: 4141; WAN024F57_at; Start 52; Stop 76
cgcgaagacacaacaggtgaggtat

SEQ ID NO: 192748 - DNA, 25 bp, Artificial
  probe
  misc_feature (1)..(25): SEQ ID NO: 4141; WAN024F57_at; Start 161; Stop 185
caaggttcgcaagccatggttggag

SEQ ID NO: 192749 - DNA, 25 bp, Artificial
  probe
  misc_feature (1)..(25): SEQ ID NO: 4141; WAN024F57_at; Start 114; Stop 138
taagatggcattcttggaattaaaa

SEQ ID NO: 192750 - DNA, 25 bp, Artificial
  probe
  misc_feature (1)..(25): SEQ ID NO: 4141; WAN024F57_at; Start 43; Stop 67
tttagtatgcgcgaagacacaacag

SEQ ID NO: 192751 - DNA, 25 bp, Artificial
  probe
  misc_feature (1)..(25): SEQ ID NO: 4141; WAN024F57_at; Start 132; Stop 156
attaaaaaatacagagaaaccagca

SEQ ID NO: 192752 - DNA, 25 bp, Artificial
  probe
  misc_feature (1)..(25): SEQ ID NO: 4141; WAN024F57_at; Start 93; Stop 117
tggacaggaaaaccatctggttaag

SEQ ID NO: 192753 - DNA, 25 bp, Artificial
  probe
  misc_feature (1)..(25): SEQ ID NO: 4141; WAN024F57_at; Start 164; Stop 188
ggttcgcaagccatggttggagttt

SEQ ID NO: 192754 - DNA, 25 bp, Artificial
  probe
  misc_feature (1)..(25): SEQ ID NO: 4141; WAN024F57_at; Start 62; Stop 86
caacaggtgaggtattggcgattac

SEQ ID NO: 192755 - DNA, 25 bp, Artificial
  probe
  misc_feature (1)..(25): SEQ ID NO: 4141; WAN024F57_at; Start 87; Stop 111
caacaatggacaggaaaaccatctg

SEQ ID NO: 192756 - DNA, 25 bp, Artificial
  probe
  misc_feature (1)..(25): SEQ ID NO: 4141; WAN024F57_at; Start 56; Stop 80
aagacacaacaggtgaggtattggc

SEQ ID NO: 192757 - DNA, 25 bp, Artificial
  probe
  misc_feature (1)..(25): SEQ ID NO: 4141; WAN024F57_at; Start 70; Stop 94
gaggtattggcgattaccaacaatg

SEQ ID NO: 192758 - DNA, 25 bp, Artificial
  probe
  misc_feature (1)..(25): SEQ ID NO: 4141; WAN024F57_at; Start 154; Stop 178
gcaaagacaaggttcgcaagccatg

SEQ ID NO: 192759 - DNA, 25 bp, Artificial
  probe
  misc_feature (1)..(25): SEQ ID NO: 4141; WAN024F57_at; Start 39; Stop 63
tagctttagtatgcgcgaagacaca

SEQ ID NO: 192760 - DNA, 25 bp, Artificial
  probe
  misc_feature (1)..(25): SEQ ID NO: 457; WAN024F58_at; Start 181; Stop 205
tctgaggttgccagccagcaattag

SEQ ID NO: 192761 - DNA, 25 bp, Artificial
  probe
  misc_feature (1)..(25): SEQ ID NO: 457; WAN024F58_at; Start 177; Stop 201
gacttctgaggttgccagccagcaa

SEQ ID NO: 192762 - DNA, 25 bp, Artificial
  probe
  misc_feature (1)..(25): SEQ ID NO: 457; WAN024F58_at; Start 11; Stop 35
ttagtcaactacatatgcgagaaga

SEQ ID NO: 192763 - DNA, 25 bp, Artificial
  probe
  misc_feature (1)..(25): SEQ ID NO: 457; WAN024F58_at; Start 93; Stop 117
acaaggactagagcgtgggaaagtt

SEQ ID NO: 192764 - DNA, 25 bp, Artificial
  probe
  misc_feature (1)..(25): SEQ ID NO: 457; WAN024F58_at; Start 147; Stop 171
cttcctagacatagtacgccaaggt

SEQ ID NO: 192765 - DNA, 25 bp, Artificial
  probe
  misc_feature (1)..(25): SEQ ID NO: 457; WAN024F58_at; Start 34; Stop 58
gaacaagtcttgttagcacaggact

SEQ ID NO: 192766 - DNA, 25 bp, Artificial
  probe
  misc_feature (1)..(25): SEQ ID NO: 457; WAN024F58_at; Start 190; Stop 214
gccagccagcaattaggtatgtcag

SEQ ID NO: 192767 - DNA, 25 bp, Artificial
  probe
  misc_feature (1)..(25): SEQ ID NO: 457; WAN024F58_at; Start 164; Stop 188
gccaaggtcttctgacttctgaggt

SEQ ID NO: 192768 - DNA, 25 bp, Artificial
  probe
  misc_feature (1)..(25): SEQ ID NO: 457; WAN024F58_at; Start 61; Stop 85
gccttggaaactgctagggctgaag

SEQ ID NO: 192769 - DNA, 25 bp, Artificial
  probe
  misc_feature (1)..(25): SEQ ID NO: 457; WAN024F58_at; Start 90; Stop 114
tgaacaaggactagagcgtgggaaa

SEQ ID NO: 192770 - DNA, 25 bp, Artificial
  probe
  misc_feature (1)..(25): SEQ ID NO: 457; WAN024F58_at; Start 47; Stop 71
tagcacaggactatgccttggaaac

SEQ ID NO: 192771 - DNA, 25 bp, Artificial
  probe
  misc_feature (1)..(25): SEQ ID NO: 457; WAN024F58_at; Start 108; Stop 132
tgggaaagttgaaggaagggcagaa

SEQ ID NO: 192772 - DNA, 25 bp, Artificial
  probe
  misc_feature (1)..(25): SEQ ID NO: 457; WAN024F58_at; Start 22; Stop 46
catatgcgagaagaacaagtcttgt

SEQ ID NO: 192773 - DNA, 25 bp, Artificial
  probe
  misc_feature (1)..(25): SEQ ID NO: 457; WAN024F58_at; Start 169; Stop 193
ggtcttctgacttctgaggttgcca

SEQ ID NO: 192774 - DNA, 25 bp, Artificial
  probe
  misc_feature (1)..(25): SEQ ID NO: 457; WAN024F58_at; Start 19; Stop 43
ctacatatgcgagaagaacaagtct

SEQ ID NO: 192775 - DNA, 25 bp, Artificial
  probe
  misc_feature (1)..(25): SEQ ID NO: 457; WAN024F58_at; Start 156; Stop 180
catagtacgccaaggtcttctgact

SEQ ID NO: 192776 - DNA, 25 bp, Artificial
  probe
  misc_feature (1)..(25): SEQ ID NO: 457; WAN024F58_at; Start 41; Stop 65
tcttgttagcacaggactatgcctt

SEQ ID NO: 192777 - DNA, 25 bp, Artificial
  probe
  misc_feature (1)..(25): SEQ ID NO: 457; WAN024F58_at; Start 215; Stop 239
tatctgaatttgaggcactgttgta

SEQ ID NO: 192778 - DNA, 25 bp, Artificial
  probe
  misc_feature (1)..(25): SEQ ID NO: 457; WAN024F58_at; Start 184; Stop 208
gaggttgccagccagcaattaggta

SEQ ID NO: 192779 - DNA, 25 bp, Artificial
  probe
  misc_feature (1)..(25): SEQ ID NO: 457; WAN024F58_at; Start 58; Stop 82
tatgccttggaaactgctagggctg

SEQ ID NO: 192780 - DNA, 25 bp, Artificial
  probe
  misc_feature (1)..(25): SEQ ID NO: 457; WAN024F58_at; Start 194; Stop 218
gccagcaattaggtatgtcagtatc

SEQ ID NO: 192781 - DNA, 25 bp, Artificial
  probe
  misc_feature (1)..(25): SEQ ID NO: 457; WAN024F58_at; Start 1; Stop 25
aggaaaatgtttagtcaactacata

SEQ ID NO: 192782 - DNA, 25 bp, Artificial
  probe
  misc_feature (1)..(25): SEQ ID NO: 457; WAN024F58_at; Start 154; Stop 178
gacatagtacgccaaggtcttctga

SEQ ID NO: 192783 - DNA, 25 bp, Artificial
  probe
  misc_feature (1)..(25): SEQ ID NO: 457; WAN024F58_at; Start 149; Stop 173
tcctagacatagtacgccaaggtct

SEQ ID NO: 192784 - DNA, 25 bp, Artificial
  probe
  misc_feature (1)..(25): SEQ ID NO: 457; WAN024F58_at; Start 15; Stop 39
tcaactacatatgcgagaagaacaa

SEQ ID NO: 192785 - DNA, 25 bp, Artificial
  probe
  misc_feature (1)..(25): SEQ ID NO: 457; WAN024F58_at; Start 55; Stop 79
gactatgccttggaaactgctaggg

SEQ ID NO: 192786 - DNA, 25 bp, Artificial
  probe
  misc_feature (1)..(25): SEQ ID NO: 457; WAN024F58_at; Start 220; Stop 244
gaatttgaggcactgttgtaactaa

SEQ ID NO: 192787 - DNA, 25 bp, Artificial
  probe
  misc_feature (1)..(25): SEQ ID NO: 457; WAN024F58_at; Start 52; Stop 76
caggactatgccttggaaactgcta

SEQ ID NO: 192788 - DNA, 25 bp, Artificial
  probe
  misc_feature (1)..(25): SEQ ID NO: 457; WAN024F58_at; Start 161; Stop 185
tacgccaaggtcttctgacttctga

SEQ ID NO: 192789 - DNA, 25 bp, Artificial
  probe
  misc_feature (1)..(25): SEQ ID NO: 457; WAN024F58_at; Start 87; Stop 111
ccttgaacaaggactagagcgtggg

SEQ ID NO: 192790 - DNA, 25 bp, Artificial
  probe
  misc_feature (1)..(25): SEQ ID NO: 457; WAN024F58_at; Start 209; Stop 233
tgtcagtatctgaatttgaggcact

SEQ ID NO: 192791 - DNA, 25 bp, Artificial
  probe
  misc_feature (1)..(25): SEQ ID NO: 457; WAN024F58_at; Start 174; Stop 198
tctgacttctgaggttgccagccag

SEQ ID NO: 192792 - DNA, 25 bp, Artificial
  probe
  misc_feature (1)..(25): SEQ ID NO: 457; WAN024F58_at; Start 198; Stop 222
gcaattaggtatgtcagtatctgaa

SEQ ID NO: 192793 - DNA, 25 bp, Artificial
  probe
  misc_feature (1)..(25): SEQ ID NO: 457; WAN024F58_at; Start 44; Stop 68
tgttagcacaggactatgccttgga

SEQ ID NO: 192794 - DNA, 25 bp, Artificial
  probe
  misc_feature (1)..(25): SEQ ID NO: 5493; WAN024F59_at; Start 92; Stop 116
gcatgacaaatcgttccagcggtat

SEQ ID NO: 192795 - DNA, 25 bp, Artificial
  probe
  misc_feature (1)..(25): SEQ ID NO: 5493; WAN024F59_at; Start 363; Stop 387
gatccacaggaatatcaaagaatcc

SEQ ID NO: 192796 - DNA, 25 bp, Artificial
  probe
  misc_feature (1)..(25): SEQ ID NO: 5493; WAN024F59_at; Start 38; Stop 62
tgcgtacagcttgcatagacttcaa

SEQ ID NO: 192797 - DNA, 25 bp, Artificial
  probe
  misc_feature (1)..(25): SEQ ID NO: 5493; WAN024F59_at; Start 202; Stop 226
gctacgacgtttatcaataatagcg

SEQ ID NO: 192798 - DNA, 25 bp, Artificial
  probe
  misc_feature (1)..(25): SEQ ID NO: 5493; WAN024F59_at; Start 11; Stop 35
tccgtagcaggaccagaaagaactg

SEQ ID NO: 192799 - DNA, 25 bp, Artificial
  probe
  misc_feature (1)..(25): SEQ ID NO: 5493; WAN024F59_at; Start 186; Stop 210
tattcatcttatcaacgctacgacg

SEQ ID NO: 192800 - DNA, 25 bp, Artificial
  probe
  misc_feature (1)..(25): SEQ ID NO: 5493; WAN024F59_at; Start 382; Stop 406
gaatccttgaatttgcgcagcatgc

SEQ ID NO: 192801 - DNA, 25 bp, Artificial
  probe
  misc_feature (1)..(25): SEQ ID NO: 5493; WAN024F59_at; Start 378; Stop 402
caaagaatccttgaatttgcgcagc

SEQ ID NO: 192802 - DNA, 25 bp, Artificial
  probe
  misc_feature (1)..(25): SEQ ID NO: 5493; WAN024F59_at; Start 83; Stop 107
gcatctgccgcatgacaaatcgttc

SEQ ID NO: 192803 - DNA, 25 bp, Artificial
  probe
  misc_feature (1)..(25): SEQ ID NO: 5493; WAN024F59_at; Start 70; Stop 94
agcttccgcaagagcatctgccgca

SEQ ID NO: 192804 - DNA, 25 bp, Artificial
  probe
  misc_feature (1)..(25): SEQ ID NO: 5493; WAN024F59_at; Start 58; Stop 82
ttcaacagcaccagcttccgcaaga

SEQ ID NO: 192805 - DNA, 25 bp, Artificial
  probe
  misc_feature (1)..(25): SEQ ID NO: 5493; WAN024F59_at; Start 348; Stop 372
gagcacccatcaaatgatccacagg

SEQ ID NO: 192806 - DNA, 25 bp, Artificial
  probe
  misc_feature (1)..(25): SEQ ID NO: 5493; WAN024F59_at; Start 98; Stop 122
caaatcgttccagcggtatcaatca

SEQ ID NO: 192807 - DNA, 25 bp, Artificial
  probe
  misc_feature (1)..(25): SEQ ID NO: 5493; WAN024F59_at; Start 30; Stop 54
gaactgggtgcgtacagcttgcata

SEQ ID NO: 192808 - DNA, 25 bp, Artificial
  probe
  misc_feature (1)..(25): SEQ ID NO: 5493; WAN024F59_at; Start 216; Stop 240
caataatagcgatagatgttttcaa

SEQ ID NO: 192809 - DNA, 25 bp, Artificial
  probe
  misc_feature (1)..(25): SEQ ID NO: 5493; WAN024F59_at; Start 262; Stop 286
acgagtcacccctccatggtccggg

SEQ ID NO: 192810 - DNA, 25 bp, Artificial
  probe
  misc_feature (1)..(25): SEQ ID NO: 5493; WAN024F59_at; Start 393; Stop 417
tttgcgcagcatgcaagtcgatggt

SEQ ID NO: 192811 - DNA, 25 bp, Artificial
  probe
  misc_feature (1)..(25): SEQ ID NO: 5493; WAN024F59_at; Start 3; Stop 27
ggatattgtccgtagcaggaccaga

SEQ ID NO: 192812 - DNA, 25 bp, Artificial
  probe
  misc_feature (1)..(25): SEQ ID NO: 5493; WAN024F59_at; Start 136; Stop 160
gatacaagtcttgccttcaacctta

SEQ ID NO: 192813 - DNA, 25 bp, Artificial
  probe
  misc_feature (1)..(25): SEQ ID NO: 5493; WAN024F59_at; Start 240; Stop 264
aaaattctgccaacttacgagcacg

SEQ ID NO: 192814 - DNA, 25 bp, Artificial
  probe
  misc_feature (1)..(25): SEQ ID NO: 5493; WAN024F59_at; Start 278; Stop 302
tggtccgggctgacaaccacatagt

SEQ ID NO: 192815 - DNA, 25 bp, Artificial
  probe
  misc_feature (1)..(25): SEQ ID NO: 5493; WAN024F59_at; Start 297; Stop 321
catagtcagaaccaaccataccacg

SEQ ID NO: 192816 - DNA, 25 bp, Artificial
  probe
  misc_feature (1)..(25): SEQ ID NO: 5493; WAN024F59_at; Start 344; Stop 368
agaggagcacccatcaaatgatcca

SEQ ID NO: 192817 - DNA, 25 bp, Artificial
  probe
  misc_feature (1)..(25): SEQ ID NO: 5493; WAN024F59_at; Start 283; Stop 307
cgggctgacaaccacatagtcagaa

SEQ ID NO: 192818 - DNA, 25 bp, Artificial
  probe
  misc_feature (1)..(25): SEQ ID NO: 5493; WAN024F59_at; Start 399; Stop 423
cagcatgcaagtcgatggtcaataa

SEQ ID NO: 192819 - DNA, 25 bp, Artificial
  probe
  misc_feature (1)..(25): SEQ ID NO: 5493; WAN024F59_at; Start 172; Stop 196
cataacttcactagtattcatctta

SEQ ID NO: 192820 - DNA, 25 bp, Artificial
  probe
  misc_feature (1)..(25): SEQ ID NO: 5493; WAN024F59_at; Start 77; Stop 101
gcaagagcatctgccgcatgacaaa

SEQ ID NO: 192821 - DNA, 25 bp, Artificial
  probe
  misc_feature (1)..(25): SEQ ID NO: 5493; WAN024F59_at; Start 125; Stop 149
tcatcaatcaagatacaagtcttgc

SEQ ID NO: 192822 - DNA, 25 bp, Artificial
  probe
  misc_feature (1)..(25): SEQ ID NO: 5493; WAN024F59_at; Start 50; Stop 74
gcatagacttcaacagcaccagctt

SEQ ID NO: 192823 - DNA, 25 bp, Artificial
  probe
  misc_feature (1)..(25): SEQ ID NO: 5493; WAN024F59_at; Start 23; Stop 47
ccagaaagaactgggtgcgtacagc

SEQ ID NO: 192824 - DNA, 25 bp, Artificial
  probe
  misc_feature (1)..(25): SEQ ID NO: 5493; WAN024F59_at; Start 107; Stop 131
ccagcggtatcaatcatatcatcaa

SEQ ID NO: 192825 - DNA, 25 bp, Artificial
  probe
  misc_feature (1)..(25): SEQ ID NO: 5493; WAN024F59_at; Start 226; Stop 250
gatagatgttttcaaaaattctgcc

SEQ ID NO: 192826 - DNA, 25 bp, Artificial
  probe
  misc_feature (1)..(25): SEQ ID NO: 5493; WAN024F59_at; Start 247; Stop 271
tgccaacttacgagcacgagtcacc

SEQ ID NO: 192827 - DNA, 25 bp, Artificial
  probe
  misc_feature (1)..(25): SEQ ID NO: 5493; WAN024F59_at; Start 143; Stop 167
gtcttgccttcaaccttaccgatga

SEQ ID NO: 192828 - DNA, 25 bp, Artificial
  probe
  misc_feature (1)..(25): SEQ ID NO: 5195; WAN024F5A_at; Start 322; Stop 346
ggctccaaccttaataaccgctaca

SEQ ID NO: 192829 - DNA, 25 bp, Artificial
  probe
  misc_feature (1)..(25): SEQ ID NO: 5195; WAN024F5A_at; Start 2; Stop 26
tgatcaatcatgttaacccactcgc

SEQ ID NO: 192830 - DNA, 25 bp, Artificial
  probe
  misc_feature (1)..(25): SEQ ID NO: 5195; WAN024F5A_at; Start 152; Stop 176
ttacgtcctgttgcttcatctcctg

SEQ ID NO: 192831 - DNA, 25 bp, Artificial
  probe
  misc_feature (1)..(25): SEQ ID NO: 5195; WAN024F5A_at; Start 124; Stop 148
gggttcttccaaagcacggagaaca

SEQ ID NO: 192832 - DNA, 25 bp, Artificial
  probe
  misc_feature (1)..(25): SEQ ID NO: 5195; WAN024F5A_at; Start 245; Stop 269
tcttcaacagctgcacgagtagcgt

SEQ ID NO: 192833 - DNA, 25 bp, Artificial
  probe
  misc_feature (1)..(25): SEQ ID NO: 5195; WAN024F5A_at; Start 35; Stop 59
gcgttaaatcctataccaagctcag

SEQ ID NO: 192834 - DNA, 25 bp, Artificial
  probe
  misc_feature (1)..(25): SEQ ID NO: 5195; WAN024F5A_at; Start 49; Stop 73
accaagctcagcatttttcaaacga

SEQ ID NO: 192835 - DNA, 25 bp, Artificial
  probe
  misc_feature (1)..(25): SEQ ID NO: 5195; WAN024F5A_at; Start 216; Stop 240
gagctgttccaccacctgcaacaat

SEQ ID NO: 192836 - DNA, 25 bp, Artificial
  probe
  misc_feature (1)..(25): SEQ ID NO: 5195; WAN024F5A_at; Start 141; Stop 165
ggagaacaatattacgtcctgttgc

SEQ ID NO: 192837 - DNA, 25 bp, Artificial
  probe
  misc_feature (1)..(25): SEQ ID NO: 5195; WAN024F5A_at; Start 167; Stop 191
tcatctcctgtcaattccaaggtag

SEQ ID NO: 192838 - DNA, 25 bp, Artificial
  probe
  misc_feature (1)..(25): SEQ ID NO: 5195; WAN024F5A_at; Start 78; Stop 102
taacgatagatccttcaaatcctgc

SEQ ID NO: 192839 - DNA, 25 bp, Artificial
  probe
  misc_feature (1)..(25): SEQ ID NO: 5195; WAN024F5A_at; Start 233; Stop 257
gcaacaataccttcttcaacagctg

SEQ ID NO: 192840 - DNA, 25 bp, Artificial
  probe
  misc_feature (1)..(25): SEQ ID NO: 5195; WAN024F5A_at; Start 177; Stop 201
tcaattccaaggtagcaacagctgg

SEQ ID NO: 192841 - DNA, 25 bp, Artificial
  probe
  misc_feature (1)..(25): SEQ ID NO: 5195; WAN024F5A_at; Start 266; Stop 290
gcgttgagggcatcttcaatgcgga

SEQ ID NO: 192842 - DNA, 25 bp, Artificial
  probe
  misc_feature (1)..(25): SEQ ID NO: 5195; WAN024F5A_at; Start 184; Stop 208
caaggtagcaacagctggaatcaca

SEQ ID NO: 192843 - DNA, 25 bp, Artificial
  probe
  misc_feature (1)..(25): SEQ ID NO: 5195; WAN024F5A_at; Start 315; Stop 339
cagttgcggctccaaccttaataac

SEQ ID NO: 192844 - DNA, 25 bp, Artificial
  probe
  misc_feature (1)..(25): SEQ ID NO: 5195; WAN024F5A_at; Start 197; Stop 221
gctggaatcacattggcaagagctg

SEQ ID NO: 192845 - DNA, 25 bp, Artificial
  probe
  misc_feature (1)..(25): SEQ ID NO: 5195; WAN024F5A_at; Start 66; Stop 90
tcaaacgatcgataacgatagatcc

SEQ ID NO: 192846 - DNA, 25 bp, Artificial
  probe
  misc_feature (1)..(25): SEQ ID NO: 5195; WAN024F5A_at; Start 105; Stop 129
tgtgagcaatttgacgaacgggttc

SEQ ID NO: 192847 - DNA, 25 bp, Artificial
  probe
  misc_feature (1)..(25): SEQ ID NO: 5195; WAN024F5A_at; Start 116; Stop 140
tgacgaacgggttcttccaaagcac

SEQ ID NO: 192848 - DNA, 25 bp, Artificial
  probe
  misc_feature (1)..(25): SEQ ID NO: 5195; WAN024F5A_at; Start 59; Stop 83
gcatttttcaaacgatcgataacga

SEQ ID NO: 192849 - DNA, 25 bp, Artificial
  probe
  misc_feature (1)..(25): SEQ ID NO: 5195; WAN024F5A_at; Start 12; Stop 36
tgttaacccactcgccagttgctgc

SEQ ID NO: 192850 - DNA, 25 bp, Artificial
  probe
  misc_feature (1)..(25): SEQ ID NO: 5195; WAN024F5A_at; Start 299; Stop 323
tctttcaactcagtttcagttgcgg

SEQ ID NO: 192851 - DNA, 25 bp, Artificial
  probe
  misc_feature (1)..(25): SEQ ID NO: 5195; WAN024F5A_at; Start 305; Stop 329
aactcagtttcagttgcggctccaa

SEQ ID NO: 192852 - DNA, 25 bp, Artificial
  probe
  misc_feature (1)..(25): SEQ ID NO: 5195; WAN024F5A_at; Start 25; Stop 49
gccagttgctgcgttaaatcctata

SEQ ID NO: 192853 - DNA, 25 bp, Artificial
  probe
  misc_feature (1)..(25): SEQ ID NO: 5195; WAN024F5A_at; Start 282; Stop 306
caatgcggagtttcatttctttcaa

SEQ ID NO: 192854 - DNA, 25 bp, Artificial
  probe
  misc_feature (1)..(25): SEQ ID NO: 5195; WAN024F5A_at; Start 258; Stop 282
cacgagtagcgttgagggcatcttc

SEQ ID NO: 192855 - DNA, 25 bp, Artificial
  probe
  misc_feature (1)..(25): SEQ ID NO: 5195; WAN024F5A_at; Start 272; Stop 296
agggcatcttcaatgcggagtttca

SEQ ID NO: 192856 - DNA, 25 bp, Artificial
  probe
  misc_feature (1)..(25): SEQ ID NO: 5195; WAN024F5A_at; Start 238; Stop 262
aataccttcttcaacagctgcacga

SEQ ID NO: 192857 - DNA, 25 bp, Artificial
  probe
  misc_feature (1)..(25): SEQ ID NO: 5195; WAN024F5A_at; Start 98; Stop 122
cctgcattgtgagcaatttgacgaa

SEQ ID NO: 192858 - DNA, 25 bp, Artificial
  probe
  misc_feature (1)..(25): SEQ ID NO: 5195; WAN024F5A_at; Start 204; Stop 228
tcacattggcaagagctgttccacc

SEQ ID NO: 192859 - DNA, 25 bp, Artificial
  probe
  misc_feature (1)..(25): SEQ ID NO: 5195; WAN024F5A_at; Start 133; Stop 157
caaagcacggagaacaatattacgt

SEQ ID NO: 192860 - DNA, 25 bp, Artificial
  probe
  misc_feature (1)..(25): SEQ ID NO: 5195; WAN024F5A_at; Start 86; Stop 110
gatccttcaaatcctgcattgtgag

SEQ ID NO: 192861 - DNA, 25 bp, Artificial
  probe
  misc_feature (1)..(25): SEQ ID NO: 5195; WAN024F5A_at; Start 209; Stop 233
ttggcaagagctgttccaccacctg

SEQ ID NO: 192862 - DNA, 25 bp, Artificial
  probe
  misc_feature (1)..(25): SEQ ID NO: 3990; WAN024F5B_at; Start 117; Stop 141
aacaagagttggaagagcctcgcca

SEQ ID NO: 192863 - DNA, 25 bp, Artificial
  probe
  misc_feature (1)..(25): SEQ ID NO: 3990; WAN024F5B_at; Start 87; Stop 111
tacgttgaaggttccacgaatcttg

SEQ ID NO: 192864 - DNA, 25 bp, Artificial
  probe
  misc_feature (1)..(25): SEQ ID NO: 3990; WAN024F5B_at; Start 250; Stop 274
tacggattttcaaggtcagccacca

SEQ ID NO: 192865 - DNA, 25 bp, Artificial
  probe
  misc_feature (1)..(25): SEQ ID NO: 3990; WAN024F5B_at; Start 66; Stop 90
accaggtgccttgactgctactacg

SEQ ID NO: 192866 - DNA, 25 bp, Artificial
  probe
  misc_feature (1)..(25): SEQ ID NO: 3990; WAN024F5B_at; Start 182; Stop 206
ggagaatgctttccaaaagtggcaa

SEQ ID NO: 192867 - DNA, 25 bp, Artificial
  probe
  misc_feature (1)..(25): SEQ ID NO: 3990; WAN024F5B_at; Start 55; Stop 79
cggtcaccaaaaccaggtgccttga

SEQ ID NO: 192868 - DNA, 25 bp, Artificial
  probe
  misc_feature (1)..(25): SEQ ID NO: 3990; WAN024F5B_at; Start 202; Stop 226
ggcaagatttcttggatattggaaa

SEQ ID NO: 192869 - DNA, 25 bp, Artificial
  probe
  misc_feature (1)..(25): SEQ ID NO: 3990; WAN024F5B_at; Start 49; Stop 73
ttgcgacggtcaccaaaaccaggtg

SEQ ID NO: 192870 - DNA, 25 bp, Artificial
  probe
  misc_feature (1)..(25): SEQ ID NO: 3990; WAN024F5B_at; Start 97; Stop 121
gttccacgaatcttgttcaaaacaa

SEQ ID NO: 192871 - DNA, 25 bp, Artificial
  probe
  misc_feature (1)..(25): SEQ ID NO: 3990; WAN024F5B_at; Start 253; Stop 277
ggattttcaaggtcagccaccattt

SEQ ID NO: 192872 - DNA, 25 bp, Artificial
  probe
  misc_feature (1)..(25): SEQ ID NO: 3990; WAN024F5B_at; Start 93; Stop 117
gaaggttccacgaatcttgttcaaa

SEQ ID NO: 192873 - DNA, 25 bp, Artificial
  probe
  misc_feature (1)..(25): SEQ ID NO: 3990; WAN024F5B_at; Start 155; Stop 179
caataatcaagagtggacgattgct

SEQ ID NO: 192874 - DNA, 25 bp, Artificial
  probe
  misc_feature (1)..(25): SEQ ID NO: 3990; WAN024F5B_at; Start 1; Stop 25
gtgataactgttccgcctgttaaga

SEQ ID NO: 192875 - DNA, 25 bp, Artificial
  probe
  misc_feature (1)..(25): SEQ ID NO: 3990; WAN024F5B_at; Start 170; Stop 194
gacgattgctttggagaatgctttc

SEQ ID NO: 192876 - DNA, 25 bp, Artificial
  probe
  misc_feature (1)..(25): SEQ ID NO: 3990; WAN024F5B_at; Start 125; Stop 149
ttggaagagcctcgccatccacatc

SEQ ID NO: 192877 - DNA, 25 bp, Artificial
  probe
  misc_feature (1)..(25): SEQ ID NO: 3990; WAN024F5B_at; Start 162; Stop 186
caagagtggacgattgctttggaga

SEQ ID NO: 192878 - DNA, 25 bp, Artificial
  probe
  misc_feature (1)..(25): SEQ ID NO: 3990; WAN024F5B_at; Start 140; Stop 164
catccacatcatccgcaataatcaa

SEQ ID NO: 192879 - DNA, 25 bp, Artificial
  probe
  misc_feature (1)..(25): SEQ ID NO: 3990; WAN024F5B_at; Start 261; Stop 285
aaggtcagccaccattttttcgcta

SEQ ID NO: 192880 - DNA, 25 bp, Artificial
  probe
  misc_feature (1)..(25): SEQ ID NO: 3990; WAN024F5B_at; Start 24; Stop 48
gatggcgatatcttcaagcatggct

SEQ ID NO: 192881 - DNA, 25 bp, Artificial
  probe
  misc_feature (1)..(25): SEQ ID NO: 3990; WAN024F5B_at; Start 70; Stop 94
ggtgccttgactgctactacgttga

SEQ ID NO: 192882 - DNA, 25 bp, Artificial
  probe
  misc_feature (1)..(25): SEQ ID NO: 3990; WAN024F5B_at; Start 37; Stop 61
tcaagcatggctttgcgacggtcac

SEQ ID NO: 192883 - DNA, 25 bp, Artificial
  probe
  misc_feature (1)..(25): SEQ ID NO: 3990; WAN024F5B_at; Start 120; Stop 144
aagagttggaagagcctcgccatcc

SEQ ID NO: 192884 - DNA, 25 bp, Artificial
  probe
  misc_feature (1)..(25): SEQ ID NO: 3990; WAN024F5B_at; Start 246; Stop 270
aatgtacggattttcaaggtcagcc

SEQ ID NO: 192885 - DNA, 25 bp, Artificial
  probe
  misc_feature (1)..(25): SEQ ID NO: 3990; WAN024F5B_at; Start 13; Stop 37
ccgcctgttaagatggcgatatctt

SEQ ID NO: 192886 - DNA, 25 bp, Artificial
  probe
  misc_feature (1)..(25): SEQ ID NO: 3990; WAN024F5B_at; Start 149; Stop 173
catccgcaataatcaagagtggacg

SEQ ID NO: 192887 - DNA, 25 bp, Artificial
  probe
  misc_feature (1)..(25): SEQ ID NO: 3990; WAN024F5B_at; Start 5; Stop 29
taactgttccgcctgttaagatggc

SEQ ID NO: 192888 - DNA, 25 bp, Artificial
  probe
  misc_feature (1)..(25): SEQ ID NO: 3990; WAN024F5B_at; Start 41; Stop 65
gcatggctttgcgacggtcaccaaa

SEQ ID NO: 192889 - DNA, 25 bp, Artificial
  probe
  misc_feature (1)..(25): SEQ ID NO: 3990; WAN024F5B_at; Start 222; Stop 246
ggaaattttcttgtctgtaatcaaa

SEQ ID NO: 192890 - DNA, 25 bp, Artificial
  probe
  misc_feature (1)..(25): SEQ ID NO: 3990; WAN024F5B_at; Start 113; Stop 137
tcaaaacaagagttggaagagcctc

SEQ ID NO: 192891 - DNA, 25 bp, Artificial
  probe
  misc_feature (1)..(25): SEQ ID NO: 3990; WAN024F5B_at; Start 32; Stop 56
tatcttcaagcatggctttgcgacg

SEQ ID NO: 192892 - DNA, 25 bp, Artificial
  probe
  misc_feature (1)..(25): SEQ ID NO: 3990; WAN024F5B_at; Start 82; Stop 106
gctactacgttgaaggttccacgaa

SEQ ID NO: 192893 - DNA, 25 bp, Artificial
  probe
  misc_feature (1)..(25): SEQ ID NO: 3990; WAN024F5B_at; Start 189; Stop 213
gctttccaaaagtggcaagatttct

SEQ ID NO: 192894 - DNA, 25 bp, Artificial
  probe
  misc_feature (1)..(25): SEQ ID NO: 3990; WAN024F5B_at; Start 78; Stop 102
gactgctactacgttgaaggttcca

SEQ ID NO: 192895 - DNA, 25 bp, Artificial
  probe
  misc_feature (1)..(25): SEQ ID NO: 3990; WAN024F5B_at; Start 61; Stop 85
ccaaaaccaggtgccttgactgcta

SEQ ID NO: 192896 - DNA, 25 bp, Artificial
  probe
  misc_feature (1)..(25): SEQ ID NO: 5506; WAN024F5C_at; Start 476; Stop 500
tgtacttttcatcgccatctttgac

SEQ ID NO: 192897 - DNA, 25 bp, Artificial
  probe
  misc_feature (1)..(25): SEQ ID NO: 5506; WAN024F5C_at; Start 566; Stop 590
caccgttcaaggtacgaacaccttg

SEQ ID NO: 192898 - DNA, 25 bp, Artificial
  probe
  misc_feature (1)..(25): SEQ ID NO: 5506; WAN024F5C_at; Start 167; Stop 191
cgatatcattggttttagaagctac

SEQ ID NO: 192899 - DNA, 25 bp, Artificial
  probe
  misc_feature (1)..(25): SEQ ID NO: 5506; WAN024F5C_at; Start 221; Stop 245
caaaatggtcttccaattcgatttc

SEQ ID NO: 192900 - DNA, 25 bp, Artificial
  probe
  misc_feature (1)..(25): SEQ ID NO: 5506; WAN024F5C_at; Start 201; Stop 225
taacttagcacccatattttcaaaa

SEQ ID NO: 192901 - DNA, 25 bp, Artificial
  probe
  misc_feature (1)..(25): SEQ ID NO: 5506; WAN024F5C_at; Start 240; Stop 264
gatttctttggcaatggtcacaccg

SEQ ID NO: 192902 - DNA, 25 bp, Artificial
  probe
  misc_feature (1)..(25): SEQ ID NO: 5506; WAN024F5C_at; Start 458; Stop 482
tagcttcgcctacgatgatgtactt

SEQ ID NO: 192903 - DNA, 25 bp, Artificial
  probe
  misc_feature (1)..(25): SEQ ID NO: 5506; WAN024F5C_at; Start 368; Stop 392
gaaccatggctgaacgggcatctga

SEQ ID NO: 192904 - DNA, 25 bp, Artificial
  probe
  misc_feature (1)..(25): SEQ ID NO: 5506; WAN024F5C_at; Start 538; Stop 562
ccagttttaacacttggagcaacca

SEQ ID NO: 192905 - DNA, 25 bp, Artificial
  probe
  misc_feature (1)..(25): SEQ ID NO: 5506; WAN024F5C_at; Start 503; Stop 527
caagacctgcgtgggcttcaactaa

SEQ ID NO: 192906 - DNA, 25 bp, Artificial
  probe
  misc_feature (1)..(25): SEQ ID NO: 5506; WAN024F5C_at; Start 78; Stop 102
gattggatttgcacctgctgtgacg

SEQ ID NO: 192907 - DNA, 25 bp, Artificial
  probe
  misc_feature (1)..(25): SEQ ID NO: 5506; WAN024F5C_at; Start 98; Stop 122
tgacgtttttgattccttcacggac

SEQ ID NO: 192908 - DNA, 25 bp, Artificial
  probe
  misc_feature (1)..(25): SEQ ID NO: 5506; WAN024F5C_at; Start 325; Stop 349
cccaaggttactttaacagtgtctg

SEQ ID NO: 192909 - DNA, 25 bp, Artificial
  probe
  misc_feature (1)..(25): SEQ ID NO: 5506; WAN024F5C_at; Start 338; Stop 362
taacagtgtctgcaaggatatcgac

SEQ ID NO: 192910 - DNA, 25 bp, Artificial
  probe
  misc_feature (1)..(25): SEQ ID NO: 5506; WAN024F5C_at; Start 23; Stop 47
ttttcaaagcttcaactgctgcggc

SEQ ID NO: 192911 - DNA, 25 bp, Artificial
  probe
  misc_feature (1)..(25): SEQ ID NO: 5506; WAN024F5C_at; Start 257; Stop 281
tcacaccgtcattggtaatcaaggg

SEQ ID NO: 192912 - DNA, 25 bp, Artificial
  probe
  misc_feature (1)..(25): SEQ ID NO: 5506; WAN024F5C_at; Start 37; Stop 61
actgctgcggcaactgctgtttcaa

SEQ ID NO: 192913 - DNA, 25 bp, Artificial
  probe
  misc_feature (1)..(25): SEQ ID NO: 5506; WAN024F5C_at; Start 493; Stop 517
tctttgacatcaagacctgcgtggg

SEQ ID NO: 192914 - DNA, 25 bp, Artificial
  probe
  misc_feature (1)..(25): SEQ ID NO: 5506; WAN024F5C_at; Start 444; Stop 468
gattgccaaaatgttagcttcgcct

SEQ ID NO: 192915 - DNA, 25 bp, Artificial
  probe
  misc_feature (1)..(25): SEQ ID NO: 5506; WAN024F5C_at; Start 292; Stop 316
gacttttcaagaacgacattgcgac

SEQ ID NO: 192916 - DNA, 25 bp, Artificial
  probe
  misc_feature (1)..(25): SEQ ID NO: 5506; WAN024F5C_at; Start 68; Stop 92
gacgaataccgattggatttgcacc

SEQ ID NO: 192917 - DNA, 25 bp, Artificial
  probe
  misc_feature (1)..(25): SEQ ID NO: 5506; WAN024F5C_at; Start 517; Stop 541
gcttcaactaagacacgatctccag

SEQ ID NO: 192918 - DNA, 25 bp, Artificial
  probe
  misc_feature (1)..(25): SEQ ID NO: 5506; WAN024F5C_at; Start 184; Stop 208
gaagctacttctgatactaacttag

SEQ ID NO: 192919 - DNA, 25 bp, Artificial
  probe
  misc_feature (1)..(25): SEQ ID NO: 5506; WAN024F5C_at; Start 306; Stop 330
gacattgcgaccttttggtcccaag

SEQ ID NO: 192920 - DNA, 25 bp, Artificial
  probe
  misc_feature (1)..(25): SEQ ID NO: 5506; WAN024F5C_at; Start 553; Stop 577
ggagcaaccaagtcaccgttcaagg

SEQ ID NO: 192921 - DNA, 25 bp, Artificial
  probe
  misc_feature (1)..(25): SEQ ID NO: 5506; WAN024F5C_at; Start 127; Stop 151
gcttgggtcaagactgttgcagtcg

SEQ ID NO: 192922 - DNA, 25 bp, Artificial
  probe
  misc_feature (1)..(25): SEQ ID NO: 5506; WAN024F5C_at; Start 8; Stop 32
cagggatggcgttgtttttcaaagc

SEQ ID NO: 192923 - DNA, 25 bp, Artificial
  probe
  misc_feature (1)..(25): SEQ ID NO: 5506; WAN024F5C_at; Start 428; Stop 452
ccttctattcctcaatgattgccaa

SEQ ID NO: 192924 - DNA, 25 bp, Artificial
  probe
  misc_feature (1)..(25): SEQ ID NO: 5506; WAN024F5C_at; Start 276; Stop 300
caagggtgaaccgaatgacttttca

SEQ ID NO: 192925 - DNA, 25 bp, Artificial
  probe
  misc_feature (1)..(25): SEQ ID NO: 5506; WAN024F5C_at; Start 51; Stop 75
tgctgtttcaatcccacgacgaata

SEQ ID NO: 192926 - DNA, 25 bp, Artificial
  probe
  misc_feature (1)..(25): SEQ ID NO: 5506; WAN024F5C_at; Start 157; Stop 181
ccgtcacctgcgatatcattggttt

SEQ ID NO: 192927 - DNA, 25 bp, Artificial
  probe
  misc_feature (1)..(25): SEQ ID NO: 5506; WAN024F5C_at; Start 112; Stop 136
ccttcacggacgatagcttgggtca

SEQ ID NO: 192928 - DNA, 25 bp, Artificial
  probe
  misc_feature (1)..(25): SEQ ID NO: 5506; WAN024F5C_at; Start 353; Stop 377
ggatatcgacaccacgaaccatggc

SEQ ID NO: 192929 - DNA, 25 bp, Artificial
  probe
  misc_feature (1)..(25): SEQ ID NO: 5506; WAN024F5C_at; Start 580; Stop 604
cgaacaccttgtccagtagccacaa

SEQ ID NO: 192930 - DNA, 25 bp, Artificial
  probe
  misc_feature (1)..(25): SEQ ID NO: 3050; WAN024F5D_at; Start 114; Stop 138
tgtggctactggacaaggtgttcgt

SEQ ID NO: 192931 - DNA, 25 bp, Artificial
  probe
  misc_feature (1)..(25): SEQ ID NO: 3050; WAN024F5D_at; Start 184; Stop 208
cgtgtcttagttgaagcccacgcag

SEQ ID NO: 192932 - DNA, 25 bp, Artificial
  probe
  misc_feature (1)..(25): SEQ ID NO: 3050; WAN024F5D_at; Start 192; Stop 216
agttgaagcccacgcaggtcttgat

SEQ ID NO: 192933 - DNA, 25 bp, Artificial
  probe
  misc_feature (1)..(25): SEQ ID NO: 3050; WAN024F5D_at; Start 140; Stop 164
ccttgaacggtgacttggttgctcc

SEQ ID NO: 192934 - DNA, 25 bp, Artificial
  probe
  misc_feature (1)..(25): SEQ ID NO: 3050; WAN024F5D_at; Start 206; Stop 230
caggtcttgatgtcaaagatggcga

SEQ ID NO: 192935 - DNA, 25 bp, Artificial
  probe
  misc_feature (1)..(25): SEQ ID NO: 3050; WAN024F5D_at; Start 143; Stop 167
tgaacggtgacttggttgctccaag

SEQ ID NO: 192936 - DNA, 25 bp, Artificial
  probe
  misc_feature (1)..(25): SEQ ID NO: 3050; WAN024F5D_at; Start 155; Stop 179
tggttgctccaagtgttaaaactgg

SEQ ID NO: 192937 - DNA, 25 bp, Artificial
  probe
  misc_feature (1)..(25): SEQ ID NO: 3050; WAN024F5D_at; Start 116; Stop 140
tggctactggacaaggtgttcgtac

SEQ ID NO: 192938 - DNA, 25 bp, Artificial
  probe
  misc_feature (1)..(25): SEQ ID NO: 3050; WAN024F5D_at; Start 127; Stop 151
caaggtgttcgtaccttgaacggtg

SEQ ID NO: 192939 - DNA, 25 bp, Artificial
  probe
  misc_feature (1)..(25): SEQ ID NO: 3050; WAN024F5D_at; Start 138; Stop 162
taccttgaacggtgacttggttgct

SEQ ID NO: 192940 - DNA, 25 bp, Artificial
  probe
  misc_feature (1)..(25): SEQ ID NO: 3050; WAN024F5D_at; Start 211; Stop 235
cttgatgtcaaagatggcgatgaaa

SEQ ID NO: 192941 - DNA, 25 bp, Artificial
  probe
  misc_feature (1)..(25): SEQ ID NO: 3050; WAN024F5D_at; Start 200; Stop 224
cccacgcaggtcttgatgtcaaaga

SEQ ID NO: 192942 - DNA, 25 bp, Artificial
  probe
  misc_feature (1)..(25): SEQ ID NO: 3050; WAN024F5D_at; Start 112; Stop 136
gttgtggctactggacaaggtgttc

SEQ ID NO: 192943 - DNA, 25 bp, Artificial
  probe
  misc_feature (1)..(25): SEQ ID NO: 3050; WAN024F5D_at; Start 198; Stop 222
agcccacgcaggtcttgatgtcaaa

SEQ ID NO: 192944 - DNA, 25 bp, Artificial
  probe
  misc_feature (1)..(25): SEQ ID NO: 3050; WAN024F5D_at; Start 196; Stop 220
gaagcccacgcaggtcttgatgtca

SEQ ID NO: 192945 - DNA, 25 bp, Artificial
  probe
  misc_feature (1)..(25): SEQ ID NO: 3050; WAN024F5D_at; Start 191; Stop 215
tagttgaagcccacgcaggtcttga

SEQ ID NO: 192946 - DNA, 25 bp, Artificial
  probe
  misc_feature (1)..(25): SEQ ID NO: 3050; WAN024F5D_at; Start 186; Stop 210
tgtcttagttgaagcccacgcaggt

SEQ ID NO: 192947 - DNA, 25 bp, Artificial
  probe
  misc_feature (1)..(25): SEQ ID NO: 3050; WAN024F5D_at; Start 145; Stop 169
aacggtgacttggttgctccaagtg

SEQ ID NO: 192948 - DNA, 25 bp, Artificial
  probe
  misc_feature (1)..(25): SEQ ID NO: 3050; WAN024F5D_at; Start 209; Stop 233
gtcttgatgtcaaagatggcgatga

SEQ ID NO: 192949 - DNA, 25 bp, Artificial
  probe
  misc_feature (1)..(25): SEQ ID NO: 3050; WAN024F5D_at; Start 141; Stop 165
cttgaacggtgacttggttgctcca

SEQ ID NO: 192950 - DNA, 25 bp, Artificial
  probe
  misc_feature (1)..(25): SEQ ID NO: 3050; WAN024F5D_at; Start 194; Stop 218
ttgaagcccacgcaggtcttgatgt

SEQ ID NO: 192951 - DNA, 25 bp, Artificial
  probe
  misc_feature (1)..(25): SEQ ID NO: 3050; WAN024F5D_at; Start 132; Stop 156
tgttcgtaccttgaacggtgacttg

SEQ ID NO: 192952 - DNA, 25 bp, Artificial
  probe
  misc_feature (1)..(25): SEQ ID NO: 3050; WAN024F5D_at; Start 202; Stop 226
cacgcaggtcttgatgtcaaagatg

SEQ ID NO: 192953 - DNA, 25 bp, Artificial
  probe
  misc_feature (1)..(25): SEQ ID NO: 3050; WAN024F5D_at; Start 151; Stop 175
gacttggttgctccaagtgttaaaa

SEQ ID NO: 192954 - DNA, 25 bp, Artificial
  probe
  misc_feature (1)..(25): SEQ ID NO: 3050; WAN024F5D_at; Start 109; Stop 133
caagttgtggctactggacaaggtg

SEQ ID NO: 192955 - DNA, 25 bp, Artificial
  probe
  misc_feature (1)..(25): SEQ ID NO: 3050; WAN024F5D_at; Start 120; Stop 144
tactggacaaggtgttcgtaccttg

SEQ ID NO: 192956 - DNA, 25 bp, Artificial
  probe
  misc_feature (1)..(25): SEQ ID NO: 3050; WAN024F5D_at; Start 158; Stop 182
ttgctccaagtgttaaaactggaga

SEQ ID NO: 192957 - DNA, 25 bp, Artificial
  probe
  misc_feature (1)..(25): SEQ ID NO: 3050; WAN024F5D_at; Start 123; Stop 147
tggacaaggtgttcgtaccttgaac

SEQ ID NO: 192958 - DNA, 25 bp, Artificial
  probe
  misc_feature (1)..(25): SEQ ID NO: 3050; WAN024F5D_at; Start 118; Stop 142
gctactggacaaggtgttcgtacct

SEQ ID NO: 192959 - DNA, 25 bp, Artificial
  probe
  misc_feature (1)..(25): SEQ ID NO: 3050; WAN024F5D_at; Start 156; Stop 180
ggttgctccaagtgttaaaactgga

SEQ ID NO: 192960 - DNA, 25 bp, Artificial
  probe
  misc_feature (1)..(25): SEQ ID NO: 3050; WAN024F5D_at; Start 204; Stop 228
cgcaggtcttgatgtcaaagatggc

SEQ ID NO: 192961 - DNA, 25 bp, Artificial
  probe
  misc_feature (1)..(25): SEQ ID NO: 3050; WAN024F5D_at; Start 190; Stop 214
ttagttgaagcccacgcaggtcttg

SEQ ID NO: 192962 - DNA, 25 bp, Artificial
  probe
  misc_feature (1)..(25): SEQ ID NO: 3050; WAN024F5D_at; Start 214; Stop 238
gatgtcaaagatggcgatgaaaagt

SEQ ID NO: 192963 - DNA, 25 bp, Artificial
  probe
  misc_feature (1)..(25): SEQ ID NO: 3050; WAN024F5D_at; Start 187; Stop 211
gtcttagttgaagcccacgcaggtc

SEQ ID NO: 192964 - DNA, 25 bp, Artificial
  probe
  misc_feature (1)..(25): SEQ ID NO: 2735; WAN024F5E_at; Start 627; Stop 651
ggtggctgaccttgaaaatccgtac

SEQ ID NO: 192965 - DNA, 25 bp, Artificial
  probe
  misc_feature (1)..(25): SEQ ID NO: 2735; WAN024F5E_at; Start 1197; Stop 1221
cgctactcgtgcagctgttgaagaa

SEQ ID NO: 192966 - DNA, 25 bp, Artificial
  probe
  misc_feature (1)..(25): SEQ ID NO: 2735; WAN024F5E_at; Start 1532; Stop 1556
ttttgacaacagaagcagtcgtagc

SEQ ID NO: 192967 - DNA, 25 bp, Artificial
  probe
  misc_feature (1)..(25): SEQ ID NO: 2735; WAN024F5E_at; Start 1182; Stop 1206
tgaagatgccctcaacgctactcgt

SEQ ID NO: 192968 - DNA, 25 bp, Artificial
  probe
  misc_feature (1)..(25): SEQ ID NO: 2735; WAN024F5E_at; Start 1011; Stop 1035
tgaagcgatttctcaccgtgttgcg

SEQ ID NO: 192969 - DNA, 25 bp, Artificial
  probe
  misc_feature (1)..(25): SEQ ID NO: 2735; WAN024F5E_at; Start 806; Stop 830
tcaacgtagtagcagtcaaggcacc

SEQ ID NO: 192970 - DNA, 25 bp, Artificial
  probe
  misc_feature (1)..(25): SEQ ID NO: 2735; WAN024F5E_at; Start 469; Stop 493
ggtgagtacatctctgaagcaatgg

SEQ ID NO: 192971 - DNA, 25 bp, Artificial
  probe
  misc_feature (1)..(25): SEQ ID NO: 2735; WAN024F5E_at; Start 1169; Stop 1193
tgaaactccgcattgaagatgccct

SEQ ID NO: 192972 - DNA, 25 bp, Artificial
  probe
  misc_feature (1)..(25): SEQ ID NO: 2735; WAN024F5E_at; Start 936; Stop 960
tgaagctcttggtcaagcagcgaga

SEQ ID NO: 192973 - DNA, 25 bp, Artificial
  probe
  misc_feature (1)..(25): SEQ ID NO: 2735; WAN024F5E_at; Start 1026; Stop 1050
ccgtgttgcggttatcaagtctcaa

SEQ ID NO: 192974 - DNA, 25 bp, Artificial
  probe
  misc_feature (1)..(25): SEQ ID NO: 2735; WAN024F5E_at; Start 532; Stop 556
tcacgtggtatggaaacagagcttg

SEQ ID NO: 192975 - DNA, 25 bp, Artificial
  probe
  misc_feature (1)..(25): SEQ ID NO: 2735; WAN024F5E_at; Start 838; Stop 862
ggtgaccgtcgcaaagccatgcttg

SEQ ID NO: 192976 - DNA, 25 bp, Artificial
  probe
  misc_feature (1)..(25): SEQ ID NO: 2735; WAN024F5E_at; Start 920; Stop 944
tgaaagatgcgacaattgaagctct

SEQ ID NO: 192977 - DNA, 25 bp, Artificial
  probe
  misc_feature (1)..(25): SEQ ID NO: 2735; WAN024F5E_at; Start 1089; Stop 1113
gcaagaacgcttggccaaattgtca

SEQ ID NO: 192978 - DNA, 25 bp, Artificial
  probe
  misc_feature (1)..(25): SEQ ID NO: 2735; WAN024F5E_at; Start 1429; Stop 1453
gcagcaactggcgagtgggttaaca

SEQ ID NO: 192979 - DNA, 25 bp, Artificial
  probe
  misc_feature (1)..(25): SEQ ID NO: 2735; WAN024F5E_at; Start 320; Stop 344
cagcaggtgcaaatccaatcggtat

SEQ ID NO: 192980 - DNA, 25 bp, Artificial
  probe
  misc_feature (1)..(25): SEQ ID NO: 2735; WAN024F5E_at; Start 789; Stop 813
caagattcgtggaaccttcaacgta

SEQ ID NO: 192981 - DNA, 25 bp, Artificial
  probe
  misc_feature (1)..(25): SEQ ID NO: 2735; WAN024F5E_at; Start 1286; Stop 1310
tgacaggagatgaagcaacaggacg

SEQ ID NO: 192982 - DNA, 25 bp, Artificial
  probe
  misc_feature (1)..(25): SEQ ID NO: 2735; WAN024F5E_at; Start 987; Stop 1011
tattgtagaaggtgcaggaaatcct

SEQ ID NO: 192983 - DNA, 25 bp, Artificial
  probe
  misc_feature (1)..(25): SEQ ID NO: 2735; WAN024F5E_at; Start 884; Stop 908
gcggaacagttatcacagaagacct

SEQ ID NO: 192984 - DNA, 25 bp, Artificial
  probe
  misc_feature (1)..(25): SEQ ID NO: 2735; WAN024F5E_at; Start 356; Stop 380
ttgaaacagcagttgccgcagcagt

SEQ ID NO: 192985 - DNA, 25 bp, Artificial
  probe
  misc_feature (1)..(25): SEQ ID NO: 2735; WAN024F5E_at; Start 1550; Stop 1574
tcgtagccaataaaccagaaccagt

SEQ ID NO: 192986 - DNA, 25 bp, Artificial
  probe
  misc_feature (1)..(25): SEQ ID NO: 2735; WAN024F5E_at; Start 821; Stop 845
tcaaggcacctggttttggtgaccg

SEQ ID NO: 192987 - DNA, 25 bp, Artificial
  probe
  misc_feature (1)..(25): SEQ ID NO: 2735; WAN024F5E_at; Start 959; Stop 983
gagtgaccgtggacaaagatagcac

SEQ ID NO: 192988 - DNA, 25 bp, Artificial
  probe
  misc_feature (1)..(25): SEQ ID NO: 2735; WAN024F5E_at; Start 342; Stop 366
tattcgtcgtgggattgaaacagca

SEQ ID NO: 192989 - DNA, 25 bp, Artificial
  probe
  misc_feature (1)..(25): SEQ ID NO: 2735; WAN024F5E_at; Start 1572; Stop 1596
agtagccccagctccagcaatggat

SEQ ID NO: 192990 - DNA, 25 bp, Artificial
  probe
  misc_feature (1)..(25): SEQ ID NO: 2735; WAN024F5E_at; Start 563; Stop 587
tagaaggaatgcagtttgaccgtgg

SEQ ID NO: 192991 - DNA, 25 bp, Artificial
  probe
  misc_feature (1)..(25): SEQ ID NO: 2735; WAN024F5E_at; Start 706; Stop 730
gaaagcattctccaaagcaatcgtc

SEQ ID NO: 192992 - DNA, 25 bp, Artificial
  probe
  misc_feature (1)..(25): SEQ ID NO: 2735; WAN024F5E_at; Start 495; Stop 519
aaaagttggcaaagacggtgtcatc

SEQ ID NO: 192993 - DNA, 25 bp, Artificial
  probe
  misc_feature (1)..(25): SEQ ID NO: 2735; WAN024F5E_at; Start 515; Stop 539
tcatcaccatcgaagagtcacgtgg

SEQ ID NO: 192994 - DNA, 25 bp, Artificial
  probe
  misc_feature (1)..(25): SEQ ID NO: 2735; WAN024F5E_at; Start 863; Stop 887
aagatatcgccatcttaacaggcgg

SEQ ID NO: 192995 - DNA, 25 bp, Artificial
  probe
  misc_feature (1)..(25): SEQ ID NO: 2735; WAN024F5E_at; Start 1482; Stop 1506
taaagtgagtcgttcagccctacaa

SEQ ID NO: 192996 - DNA, 25 bp, Artificial
  probe
  misc_feature (1)..(25): SEQ ID NO: 2735; WAN024F5E_at; Start 1104; Stop 1128
caaattgtcaggtggtgtagcggtt

SEQ ID NO: 192997 - DNA, 25 bp, Artificial
  probe
  misc_feature (1)..(25): SEQ ID NO: 2735; WAN024F5E_at; Start 405; Stop 429
ccctgttgccaataaagaagctatc

SEQ ID NO: 192998 - DNA, 25 bp, Artificial
  probe
  misc_feature (1)..(25): SEQ ID NO: 7336; WAN024F5F_at; Start 218; Stop 242
gctgctgtcacgatagagccttcag

SEQ ID NO: 192999 - DNA, 25 bp, Artificial
  probe
  misc_feature (1)..(25): SEQ ID NO: 7336; WAN024F5F_at; Start 233; Stop 257
gagccttcagcgtactgaccaaaga

SEQ ID NO: 193000 - DNA, 25 bp, Artificial
  probe
  misc_feature (1)..(25): SEQ ID NO: 7336; WAN024F5F_at; Start 126; Stop 150
gcgcattacgaacggcacggatcaa

SEQ ID NO: 193001 - DNA, 25 bp, Artificial
  probe
  misc_feature (1)..(25): SEQ ID NO: 7336; WAN024F5F_at; Start 78; Stop 102
taacaaggatggtgataggtttgct

SEQ ID NO: 193002 - DNA, 25 bp, Artificial
  probe
  misc_feature (1)..(25): SEQ ID NO: 7336; WAN024F5F_at; Start 111; Stop 135
catttacttccgcacgcgcattacg

SEQ ID NO: 193003 - DNA, 25 bp, Artificial
  probe
  misc_feature (1)..(25): SEQ ID NO: 7336; WAN024F5F_at; Start 169; Stop 193
accagtgtgggcagcaaggtcctca

SEQ ID NO: 193004 - DNA, 25 bp, Artificial
  probe
  misc_feature (1)..(25): SEQ ID NO: 7336; WAN024F5F_at; Start 188; Stop 212
tcctcaaaggctgggttgacagttg

SEQ ID NO: 193005 - DNA, 25 bp, Artificial
  probe
  misc_feature (1)..(25): SEQ ID NO: 7336; WAN024F5F_at; Start 17; Stop 41
aagcgtttgatgtagttgacattgc

SEQ ID NO: 193006 - DNA, 25 bp, Artificial
  probe
  misc_feature (1)..(25): SEQ ID NO: 7336; WAN024F5F_at; Start 100; Stop 124
gcttggtgctacatttacttccgca

SEQ ID NO: 193007 - DNA, 25 bp, Artificial
  probe
  misc_feature (1)..(25): SEQ ID NO: 7336; WAN024F5F_at; Start 40; Stop 64
gctgttaaagaaggcttccaagtca

SEQ ID NO: 193008 - DNA, 25 bp, Artificial
  probe
  misc_feature (1)..(25): SEQ ID NO: 7336; WAN024F5F_at; Start 225; Stop 249
tcacgatagagccttcagcgtactg

SEQ ID NO: 193009 - DNA, 25 bp, Artificial
  probe
  misc_feature (1)..(25): SEQ ID NO: 7336; WAN024F5F_at; Start 34; Stop 58
gacattgctgttaaagaaggcttcc

SEQ ID NO: 193010 - DNA, 25 bp, Artificial
  probe
  misc_feature (1)..(25): SEQ ID NO: 7336; WAN024F5F_at; Start 213; Stop 237
ggtatgctgctgtcacgatagagcc

SEQ ID NO: 193011 - DNA, 25 bp, Artificial
  probe
  misc_feature (1)..(25): SEQ ID NO: 7336; WAN024F5F_at; Start 106; Stop 130
tgctacatttacttccgcacgcgca

SEQ ID NO: 193012 - DNA, 25 bp, Artificial
  probe
  misc_feature (1)..(25): SEQ ID NO: 7336; WAN024F5F_at; Start 174; Stop 198
tgtgggcagcaaggtcctcaaaggc

SEQ ID NO: 193013 - DNA, 25 bp, Artificial
  probe
  misc_feature (1)..(25): SEQ ID NO: 7336; WAN024F5F_at; Start 129; Stop 153
cattacgaacggcacggatcaagtc

SEQ ID NO: 193014 - DNA, 25 bp, Artificial
  probe
  misc_feature (1)..(25): SEQ ID NO: 7336; WAN024F5F_at; Start 183; Stop 207
caaggtcctcaaaggctgggttgac

SEQ ID NO: 193015 - DNA, 25 bp, Artificial
  probe
  misc_feature (1)..(25): SEQ ID NO: 7336; WAN024F5F_at; Start 151; Stop 175
gtctttgagactttccacaccagtg

SEQ ID NO: 193016 - DNA, 25 bp, Artificial
  probe
  misc_feature (1)..(25): SEQ ID NO: 7336; WAN024F5F_at; Start 88; Stop 112
ggtgataggtttgcttggtgctaca

SEQ ID NO: 193017 - DNA, 25 bp, Artificial
  probe
  misc_feature (1)..(25): SEQ ID NO: 7336; WAN024F5F_at; Start 164; Stop 188
tccacaccagtgtgggcagcaaggt

SEQ ID NO: 193018 - DNA, 25 bp, Artificial
  probe
  misc_feature (1)..(25): SEQ ID NO: 7336; WAN024F5F_at; Start 138; Stop 162
cggcacggatcaagtctttgagact

SEQ ID NO: 193019 - DNA, 25 bp, Artificial
  probe
  misc_feature (1)..(25): SEQ ID NO: 7336; WAN024F5F_at; Start 229; Stop 253
gatagagccttcagcgtactgacca

SEQ ID NO: 193020 - DNA, 25 bp, Artificial
  probe
  misc_feature (1)..(25): SEQ ID NO: 7336; WAN024F5F_at; Start 134; Stop 158
cgaacggcacggatcaagtctttga

SEQ ID NO: 193021 - DNA, 25 bp, Artificial
  probe
  misc_feature (1)..(25): SEQ ID NO: 7336; WAN024F5F_at; Start 256; Stop 280
gatttcttctgtcacgaacggcatt

SEQ ID NO: 193022 - DNA, 25 bp, Artificial
  probe
  misc_feature (1)..(25): SEQ ID NO: 7336; WAN024F5F_at; Start 240; Stop 264
cagcgtactgaccaaagatttcttc

SEQ ID NO: 193023 - DNA, 25 bp, Artificial
  probe
  misc_feature (1)..(25): SEQ ID NO: 7336; WAN024F5F_at; Start 261; Stop 285
cttctgtcacgaacggcattattga

SEQ ID NO: 193024 - DNA, 25 bp, Artificial
  probe
  misc_feature (1)..(25): SEQ ID NO: 7336; WAN024F5F_at; Start 47; Stop 71
aagaaggcttccaagtcactatcgc

SEQ ID NO: 193025 - DNA, 25 bp, Artificial
  probe
  misc_feature (1)..(25): SEQ ID NO: 7336; WAN024F5F_at; Start 68; Stop 92
tcgctagtcttaacaaggatggtga

SEQ ID NO: 193026 - DNA, 25 bp, Artificial
  probe
  misc_feature (1)..(25): SEQ ID NO: 7336; WAN024F5F_at; Start 61; Stop 85
gtcactatcgctagtcttaacaagg

SEQ ID NO: 193027 - DNA, 25 bp, Artificial
  probe
  misc_feature (1)..(25): SEQ ID NO: 7336; WAN024F5F_at; Start 179; Stop 203
gcagcaaggtcctcaaaggctgggt

SEQ ID NO: 193028 - DNA, 25 bp, Artificial
  probe
  misc_feature (1)..(25): SEQ ID NO: 7336; WAN024F5F_at; Start 118; Stop 142
ttccgcacgcgcattacgaacggca

SEQ ID NO: 193029 - DNA, 25 bp, Artificial
  probe
  misc_feature (1)..(25): SEQ ID NO: 7336; WAN024F5F_at; Start 155; Stop 179
ttgagactttccacaccagtgtggg

SEQ ID NO: 193030 - DNA, 25 bp, Artificial
  probe
  misc_feature (1)..(25): SEQ ID NO: 7336; WAN024F5F_at; Start 205; Stop 229
gacagttgggtatgctgctgtcacg

SEQ ID NO: 193031 - DNA, 25 bp, Artificial
  probe
  misc_feature (1)..(25): SEQ ID NO: 7336; WAN024F5F_at; Start 252; Stop 276
caaagatttcttctgtcacgaacgg

SEQ ID NO: 193032 - DNA, 25 bp, Artificial
  probe
  misc_feature (1)..(25): SEQ ID NO: 7715; WAN024F5G_at; Start 178; Stop 202
catgcgtttttgacggatgataata

SEQ ID NO: 193033 - DNA, 25 bp, Artificial
  probe
  misc_feature (1)..(25): SEQ ID NO: 7715; WAN024F5G_at; Start 20; Stop 44
gcatattcgtctttccattcccaga

SEQ ID NO: 193034 - DNA, 25 bp, Artificial
  probe
  misc_feature (1)..(25): SEQ ID NO: 7715; WAN024F5G_at; Start 63; Stop 87
cacgaccaaggtcatagcgggaaat

SEQ ID NO: 193035 - DNA, 25 bp, Artificial
  probe
  misc_feature (1)..(25): SEQ ID NO: 7715; WAN024F5G_at; Start 6; Stop 30
ccttgatggtagtggcatattcgtc

SEQ ID NO: 193036 - DNA, 25 bp, Artificial
  probe
  misc_feature (1)..(25): SEQ ID NO: 7715; WAN024F5G_at; Start 162; Stop 186
gggtatcaaaaccttgcatgcgttt

SEQ ID NO: 193037 - DNA, 25 bp, Artificial
  probe
  misc_feature (1)..(25): SEQ ID NO: 7715; WAN024F5G_at; Start 59; Stop 83
gactcacgaccaaggtcatagcggg

SEQ ID NO: 193038 - DNA, 25 bp, Artificial
  probe
  misc_feature (1)..(25): SEQ ID NO: 7715; WAN024F5G_at; Start 110; Stop 134
tcaaccttagcctgagtggcaatcc

SEQ ID NO: 193039 - DNA, 25 bp, Artificial
  probe
  misc_feature (1)..(25): SEQ ID NO: 7715; WAN024F5G_at; Start 221; Stop 245
caagcgtgaccaaggtgaagtttac

SEQ ID NO: 193040 - DNA, 25 bp, Artificial
  probe
  misc_feature (1)..(25): SEQ ID NO: 7715; WAN024F5G_at; Start 188; Stop 212
tgacggatgataatatcttgcaaag

SEQ ID NO: 193041 - DNA, 25 bp, Artificial
  probe
  misc_feature (1)..(25): SEQ ID NO: 7715; WAN024F5G_at; Start 43; Stop 67
gactttcgtcaagaaagactcacga

SEQ ID NO: 193042 - DNA, 25 bp, Artificial
  probe
  misc_feature (1)..(25): SEQ ID NO: 7715; WAN024F5G_at; Start 140; Stop 164
tggtccatcccaggaagccaaaggg

SEQ ID NO: 193043 - DNA, 25 bp, Artificial
  probe
  misc_feature (1)..(25): SEQ ID NO: 7715; WAN024F5G_at; Start 210; Stop 234
aagttgtatcccaagcgtgaccaag

SEQ ID NO: 193044 - DNA, 25 bp, Artificial
  probe
  misc_feature (1)..(25): SEQ ID NO: 7715; WAN024F5G_at; Start 132; Stop 156
tccctgcgtggtccatcccaggaag

SEQ ID NO: 193045 - DNA, 25 bp, Artificial
  probe
  misc_feature (1)..(25): SEQ ID NO: 7715; WAN024F5G_at; Start 81; Stop 105
gggaaatgccctcaccacgcaagcg

SEQ ID NO: 193046 - DNA, 25 bp, Artificial
  probe
  misc_feature (1)..(25): SEQ ID NO: 7715; WAN024F5G_at; Start 206; Stop 230
tgcaaagttgtatcccaagcgtgac

SEQ ID NO: 193047 - DNA, 25 bp, Artificial
  probe
  misc_feature (1)..(25): SEQ ID NO: 7715; WAN024F5G_at; Start 13; Stop 37
ggtagtggcatattcgtctttccat

SEQ ID NO: 193048 - DNA, 25 bp, Artificial
  probe
  misc_feature (1)..(25): SEQ ID NO: 7715; WAN024F5G_at; Start 227; Stop 251
tgaccaaggtgaagtttacctgtaa

SEQ ID NO: 193049 - DNA, 25 bp, Artificial
  probe
  misc_feature (1)..(25): SEQ ID NO: 7715; WAN024F5G_at; Start 252; Stop 276
cgtttggtggtggaataacgattga

SEQ ID NO: 193050 - DNA, 25 bp, Artificial
  probe
  misc_feature (1)..(25): SEQ ID NO: 7715; WAN024F5G_at; Start 143; Stop 167
tccatcccaggaagccaaagggtat

SEQ ID NO: 193051 - DNA, 25 bp, Artificial
  probe
  misc_feature (1)..(25): SEQ ID NO: 7715; WAN024F5G_at; Start 67; Stop 91
accaaggtcatagcgggaaatgccc

SEQ ID NO: 193052 - DNA, 25 bp, Artificial
  probe
  misc_feature (1)..(25): SEQ ID NO: 7715; WAN024F5G_at; Start 216; Stop 240
tatcccaagcgtgaccaaggtgaag

SEQ ID NO: 193053 - DNA, 25 bp, Artificial
  probe
  misc_feature (1)..(25): SEQ ID NO: 7715; WAN024F5G_at; Start 198; Stop 222
taatatcttgcaaagttgtatccca

SEQ ID NO: 193054 - DNA, 25 bp, Artificial
  probe
  misc_feature (1)..(25): SEQ ID NO: 7715; WAN024F5G_at; Start 34; Stop 58
ccattcccagactttcgtcaagaaa

SEQ ID NO: 193055 - DNA, 25 bp, Artificial
  probe
  misc_feature (1)..(25): SEQ ID NO: 7715; WAN024F5G_at; Start 73; Stop 97
gtcatagcgggaaatgccctcacca

SEQ ID NO: 193056 - DNA, 25 bp, Artificial
  probe
  misc_feature (1)..(25): SEQ ID NO: 7715; WAN024F5G_at; Start 51; Stop 75
tcaagaaagactcacgaccaaggtc

SEQ ID NO: 193057 - DNA, 25 bp, Artificial
  probe
  misc_feature (1)..(25): SEQ ID NO: 7715; WAN024F5G_at; Start 171; Stop 195
aaccttgcatgcgtttttgacggat

SEQ ID NO: 193058 - DNA, 25 bp, Artificial
  probe
  misc_feature (1)..(25): SEQ ID NO: 7715; WAN024F5G_at; Start 123; Stop 147
gagtggcaatccctgcgtggtccat

SEQ ID NO: 193059 - DNA, 25 bp, Artificial
  probe
  misc_feature (1)..(25): SEQ ID NO: 7715; WAN024F5G_at; Start 156; Stop 180
gccaaagggtatcaaaaccttgcat

SEQ ID NO: 193060 - DNA, 25 bp, Artificial
  probe
  misc_feature (1)..(25): SEQ ID NO: 7715; WAN024F5G_at; Start 147; Stop 171
tcccaggaagccaaagggtatcaaa

SEQ ID NO: 193061 - DNA, 25 bp, Artificial
  probe
  misc_feature (1)..(25): SEQ ID NO: 7715; WAN024F5G_at; Start 101; Stop 125
aagcgctcctcaaccttagcctgag

SEQ ID NO: 193062 - DNA, 25 bp, Artificial
  probe
  misc_feature (1)..(25): SEQ ID NO: 7715; WAN024F5G_at; Start 2; Stop 26
tgttccttgatggtagtggcatatt

SEQ ID NO: 193063 - DNA, 25 bp, Artificial
  probe
  misc_feature (1)..(25): SEQ ID NO: 7715; WAN024F5G_at; Start 55; Stop 79
gaaagactcacgaccaaggtcatag

SEQ ID NO: 193064 - DNA, 25 bp, Artificial
  probe
  misc_feature (1)..(25): SEQ ID NO: 7715; WAN024F5G_at; Start 214; Stop 238
tgtatcccaagcgtgaccaaggtga

SEQ ID NO: 193065 - DNA, 25 bp, Artificial
  probe
  misc_feature (1)..(25): SEQ ID NO: 7715; WAN024F5G_at; Start 117; Stop 141
tagcctgagtggcaatccctgcgtg

SEQ ID NO: 193066 - DNA, 25 bp, Artificial
  probe
  misc_feature (1)..(25): SEQ ID NO: 7231; WAN024F5H_at; Start 270; Stop 294
tgacattgtcatgcgccacatccag

SEQ ID NO: 193067 - DNA, 25 bp, Artificial
  probe
  misc_feature (1)..(25): SEQ ID NO: 7231; WAN024F5H_at; Start 247; Stop 271
agcctcacctgttgcaacttttgtg

SEQ ID NO: 193068 - DNA, 25 bp, Artificial
  probe
  misc_feature (1)..(25): SEQ ID NO: 7231; WAN024F5H_at; Start 105; Stop 129
cataccagttggcaaattcttccca

SEQ ID NO: 193069 - DNA, 25 bp, Artificial
  probe
  misc_feature (1)..(25): SEQ ID NO: 7231; WAN024F5H_at; Start 133; Stop 157
gaagttgtaaaggatatgaccagcc

SEQ ID NO: 193070 - DNA, 25 bp, Artificial
  probe
  misc_feature (1)..(25): SEQ ID NO: 7231; WAN024F5H_at; Start 7; Stop 31
gagacgaaggattttatccagcgta

SEQ ID NO: 193071 - DNA, 25 bp, Artificial
  probe
  misc_feature (1)..(25): SEQ ID NO: 7231; WAN024F5H_at; Start 68; Stop 92
tcattgtcgctgtaaagaacttcct

SEQ ID NO: 193072 - DNA, 25 bp, Artificial
  probe
  misc_feature (1)..(25): SEQ ID NO: 7231; WAN024F5H_at; Start 3; Stop 27
gaaggagacgaaggattttatccag

SEQ ID NO: 193073 - DNA, 25 bp, Artificial
  probe
  misc_feature (1)..(25): SEQ ID NO: 7231; WAN024F5H_at; Start 27; Stop 51
gcgtatagaggagaacagatcgagt

SEQ ID NO: 193074 - DNA, 25 bp, Artificial
  probe
  misc_feature (1)..(25): SEQ ID NO: 7231; WAN024F5H_at; Start 157; Stop 181
cacaccaaactcgaacttatcaaag

SEQ ID NO: 193075 - DNA, 25 bp, Artificial
  probe
  misc_feature (1)..(25): SEQ ID NO: 7231; WAN024F5H_at; Start 179; Stop 203
aagttttcagtaacttttgcaatgg

SEQ ID NO: 193076 - DNA, 25 bp, Artificial
  probe
  misc_feature (1)..(25): SEQ ID NO: 7231; WAN024F5H_at; Start 46; Stop 70
tcgagtaattaccttatcgtcttca

SEQ ID NO: 193077 - DNA, 25 bp, Artificial
  probe
  misc_feature (1)..(25): SEQ ID NO: 7231; WAN024F5H_at; Start 60; Stop 84
tatcgtcttcattgtcgctgtaaag

SEQ ID NO: 193078 - DNA, 25 bp, Artificial
  probe
  misc_feature (1)..(25): SEQ ID NO: 7231; WAN024F5H_at; Start 146; Stop 170
atatgaccagccacaccaaactcga

SEQ ID NO: 193079 - DNA, 25 bp, Artificial
  probe
  misc_feature (1)..(25): SEQ ID NO: 7231; WAN024F5H_at; Start 292; Stop 316
cagcgtcaaacctccattgttcatg

SEQ ID NO: 193080 - DNA, 25 bp, Artificial
  probe
  misc_feature (1)..(25): SEQ ID NO: 7231; WAN024F5H_at; Start 190; Stop 214
aacttttgcaatggtttcgttgaga

SEQ ID NO: 193081 - DNA, 25 bp, Artificial
  probe
  misc_feature (1)..(25): SEQ ID NO: 7231; WAN024F5H_at; Start 316; Stop 340
gaggatatagcgagaaatgttccaa

SEQ ID NO: 193082 - DNA, 25 bp, Artificial
  probe
  misc_feature (1)..(25): SEQ ID NO: 7231; WAN024F5H_at; Start 222; Stop 246
gaatccagcggtccgtcacattacc

SEQ ID NO: 193083 - DNA, 25 bp, Artificial
  probe
  misc_feature (1)..(25): SEQ ID NO: 7231; WAN024F5H_at; Start 82; Stop 106
aagaacttccttggtcaactcaaca

SEQ ID NO: 193084 - DNA, 25 bp, Artificial
  probe
  misc_feature (1)..(25): SEQ ID NO: 7231; WAN024F5H_at; Start 122; Stop 146
tcttcccaaatgaagttgtaaagga

SEQ ID NO: 193085 - DNA, 25 bp, Artificial
  probe
  misc_feature (1)..(25): SEQ ID NO: 7231; WAN024F5H_at; Start 206; Stop 230
tcgttgagattgtggagaatccagc

SEQ ID NO: 193086 - DNA, 25 bp, Artificial
  probe
  misc_feature (1)..(25): SEQ ID NO: 7231; WAN024F5H_at; Start 305; Stop 329
ccattgttcatgaggatatagcgag

SEQ ID NO: 193087 - DNA, 25 bp, Artificial
  probe
  misc_feature (1)..(25): SEQ ID NO: 7231; WAN024F5H_at; Start 261; Stop 285
caacttttgtgacattgtcatgcgc

SEQ ID NO: 193088 - DNA, 25 bp, Artificial
  probe
  misc_feature (1)..(25): SEQ ID NO: 7231; WAN024F5H_at; Start 325; Stop 349
gcgagaaatgttccaaatcttgtta

SEQ ID NO: 193089 - DNA, 25 bp, Artificial
  probe
  misc_feature (1)..(25): SEQ ID NO: 7231; WAN024F5H_at; Start 37; Stop 61
gagaacagatcgagtaattacctta

SEQ ID NO: 193090 - DNA, 25 bp, Artificial
  probe
  misc_feature (1)..(25): SEQ ID NO: 7231; WAN024F5H_at; Start 216; Stop 240
tgtggagaatccagcggtccgtcac

SEQ ID NO: 193091 - DNA, 25 bp, Artificial
  probe
  misc_feature (1)..(25): SEQ ID NO: 7231; WAN024F5H_at; Start 277; Stop 301
gtcatgcgccacatccagcgtcaaa

SEQ ID NO: 193092 - DNA, 25 bp, Artificial
  probe
  misc_feature (1)..(25): SEQ ID NO: 7231; WAN024F5H_at; Start 164; Stop 188
aactcgaacttatcaaagttttcag

SEQ ID NO: 193093 - DNA, 25 bp, Artificial
  probe
  misc_feature (1)..(25): SEQ ID NO: 7231; WAN024F5H_at; Start 138; Stop 162
tgtaaaggatatgaccagccacacc

SEQ ID NO: 193094 - DNA, 25 bp, Artificial
  probe
  misc_feature (1)..(25): SEQ ID NO: 7231; WAN024F5H_at; Start 338; Stop 362
caaatcttgttaataaagttccatg

SEQ ID NO: 193095 - DNA, 25 bp, Artificial
  probe
  misc_feature (1)..(25): SEQ ID NO: 7231; WAN024F5H_at; Start 21; Stop 45
tatccagcgtatagaggagaacaga

SEQ ID NO: 193096 - DNA, 25 bp, Artificial
  probe
  misc_feature (1)..(25): SEQ ID NO: 7231; WAN024F5H_at; Start 94; Stop 118
ggtcaactcaacataccagttggca

SEQ ID NO: 193097 - DNA, 25 bp, Artificial
  probe
  misc_feature (1)..(25): SEQ ID NO: 7231; WAN024F5H_at; Start 74; Stop 98
tcgctgtaaagaacttccttggtca

SEQ ID NO: 193098 - DNA, 25 bp, Artificial
  probe
  misc_feature (1)..(25): SEQ ID NO: 7231; WAN024F5H_at; Start 112; Stop 136
gttggcaaattcttcccaaatgaag

SEQ ID NO: 193099 - DNA, 25 bp, Artificial
  probe
  misc_feature (1)..(25): SEQ ID NO: 7231; WAN024F5H_at; Start 239; Stop 263
acattaccagcctcacctgttgcaa

SEQ ID NO: 193100 - DNA, 25 bp, Artificial
  probe
  misc_feature (1)..(25): SEQ ID NO: 3957; WAN024F5I_at; Start 257; Stop 281
tctacagctgtatcccatgggtgtt

SEQ ID NO: 193101 - DNA, 25 bp, Artificial
  probe
  misc_feature (1)..(25): SEQ ID NO: 3957; WAN024F5I_at; Start 211; Stop 235
tgtaccagagtcagtcgtaacgtgg

SEQ ID NO: 193102 - DNA, 25 bp, Artificial
  probe
  misc_feature (1)..(25): SEQ ID NO: 3957; WAN024F5I_at; Start 157; Stop 181
aataccaacattgtaatcgtcctca

SEQ ID NO: 193103 - DNA, 25 bp, Artificial
  probe
  misc_feature (1)..(25): SEQ ID NO: 3957; WAN024F5I_at; Start 345; Stop 369
caaatttctcagacaagctagtcaa

SEQ ID NO: 193104 - DNA, 25 bp, Artificial
  probe
  misc_feature (1)..(25): SEQ ID NO: 3957; WAN024F5I_at; Start 61; Stop 85
taccttttcatagaattgaccttca

SEQ ID NO: 193105 - DNA, 25 bp, Artificial
  probe
  misc_feature (1)..(25): SEQ ID NO: 3957; WAN024F5I_at; Start 243; Stop 267
gaattaccaactcttctacagctgt

SEQ ID NO: 193106 - DNA, 25 bp, Artificial
  probe
  misc_feature (1)..(25): SEQ ID NO: 3957; WAN024F5I_at; Start 286; Stop 310
tacgatgtggttgagttcttggcca

SEQ ID NO: 193107 - DNA, 25 bp, Artificial
  probe
  misc_feature (1)..(25): SEQ ID NO: 3957; WAN024F5I_at; Start 112; Stop 136
gataccacgttcatcaacagtcact

SEQ ID NO: 193108 - DNA, 25 bp, Artificial
  probe
  misc_feature (1)..(25): SEQ ID NO: 3957; WAN024F5I_at; Start 337; Stop 361
agcccagccaaatttctcagacaag

SEQ ID NO: 193109 - DNA, 25 bp, Artificial
  probe
  misc_feature (1)..(25): SEQ ID NO: 3957; WAN024F5I_at; Start 117; Stop 141
cacgttcatcaacagtcactgcgac

SEQ ID NO: 193110 - DNA, 25 bp, Artificial
  probe
  misc_feature (1)..(25): SEQ ID NO: 3957; WAN024F5I_at; Start 271; Stop 295
ccatgggtgttctgttacgatgtgg

SEQ ID NO: 193111 - DNA, 25 bp, Artificial
  probe
  misc_feature (1)..(25): SEQ ID NO: 3957; WAN024F5I_at; Start 168; Stop 192
tgtaatcgtcctcaccaaaaccagg

SEQ ID NO: 193112 - DNA, 25 bp, Artificial
  probe
  misc_feature (1)..(25): SEQ ID NO: 3957; WAN024F5I_at; Start 14; Stop 38
tcttgggcaagaaggaggttaccaa

SEQ ID NO: 193113 - DNA, 25 bp, Artificial
  probe
  misc_feature (1)..(25): SEQ ID NO: 3957; WAN024F5I_at; Start 204; Stop 228
caatacctgtaccagagtcagtcgt

SEQ ID NO: 193114 - DNA, 25 bp, Artificial
  probe
  misc_feature (1)..(25): SEQ ID NO: 3957; WAN024F5I_at; Start 133; Stop 157
cactgcgacttcaagattattagca

SEQ ID NO: 193115 - DNA, 25 bp, Artificial
  probe
  misc_feature (1)..(25): SEQ ID NO: 3957; WAN024F5I_at; Start 98; Stop 122
gcattcttcatcatgataccacgtt

SEQ ID NO: 193116 - DNA, 25 bp, Artificial
  probe
  misc_feature (1)..(25): SEQ ID NO: 3957; WAN024F5I_at; Start 322; Stop 346
caaaacttgaacatcagcccagcca

SEQ ID NO: 193117 - DNA, 25 bp, Artificial
  probe
  misc_feature (1)..(25): SEQ ID NO: 3957; WAN024F5I_at; Start 228; Stop 252
taacgtggtcaccaagaattaccaa

SEQ ID NO: 193118 - DNA, 25 bp, Artificial
  probe
  misc_feature (1)..(25): SEQ ID NO: 3957; WAN024F5I_at; Start 125; Stop 149
tcaacagtcactgcgacttcaagat

SEQ ID NO: 193119 - DNA, 25 bp, Artificial
  probe
  misc_feature (1)..(25): SEQ ID NO: 3957; WAN024F5I_at; Start 216; Stop 240
cagagtcagtcgtaacgtggtcacc

SEQ ID NO: 193120 - DNA, 25 bp, Artificial
  probe
  misc_feature (1)..(25): SEQ ID NO: 3957; WAN024F5I_at; Start 74; Stop 98
aattgaccttcaaattcaggaccag

SEQ ID NO: 193121 - DNA, 25 bp, Artificial
  probe
  misc_feature (1)..(25): SEQ ID NO: 3957; WAN024F5I_at; Start 192; Stop 216
gggctgtatggacaatacctgtacc

SEQ ID NO: 193122 - DNA, 25 bp, Artificial
  probe
  misc_feature (1)..(25): SEQ ID NO: 3957; WAN024F5I_at; Start 2; Stop 26
tgagagatttcttcttgggcaagaa

SEQ ID NO: 193123 - DNA, 25 bp, Artificial
  probe
  misc_feature (1)..(25): SEQ ID NO: 3957; WAN024F5I_at; Start 221; Stop 245
tcagtcgtaacgtggtcaccaagaa

SEQ ID NO: 193124 - DNA, 25 bp, Artificial
  probe
  misc_feature (1)..(25): SEQ ID NO: 3957; WAN024F5I_at; Start 293; Stop 317
tggttgagttcttggccacggtaag

SEQ ID NO: 193125 - DNA, 25 bp, Artificial
  probe
  misc_feature (1)..(25): SEQ ID NO: 3957; WAN024F5I_at; Start 297; Stop 321
tgagttcttggccacggtaagtttc

SEQ ID NO: 193126 - DNA, 25 bp, Artificial
  probe
  misc_feature (1)..(25): SEQ ID NO: 3957; WAN024F5I_at; Start 49; Stop 73
aacagttggaactaccttttcatag

SEQ ID NO: 193127 - DNA, 25 bp, Artificial
  probe
  misc_feature (1)..(25): SEQ ID NO: 3957; WAN024F5I_at; Start 329; Stop 353
tgaacatcagcccagccaaatttct

SEQ ID NO: 193128 - DNA, 25 bp, Artificial
  probe
  misc_feature (1)..(25): SEQ ID NO: 3957; WAN024F5I_at; Start 84; Stop 108
caaattcaggaccagcattcttcat

SEQ ID NO: 193129 - DNA, 25 bp, Artificial
  probe
  misc_feature (1)..(25): SEQ ID NO: 3957; WAN024F5I_at; Start 316; Stop 340
agtttccaaaacttgaacatcagcc

SEQ ID NO: 193130 - DNA, 25 bp, Artificial
  probe
  misc_feature (1)..(25): SEQ ID NO: 3957; WAN024F5I_at; Start 266; Stop 290
gtatcccatgggtgttctgttacga

SEQ ID NO: 193131 - DNA, 25 bp, Artificial
  probe
  misc_feature (1)..(25): SEQ ID NO: 3957; WAN024F5I_at; Start 198; Stop 222
tatggacaatacctgtaccagagtc

SEQ ID NO: 193132 - DNA, 25 bp, Artificial
  probe
  misc_feature (1)..(25): SEQ ID NO: 3957; WAN024F5I_at; Start 92; Stop 116
ggaccagcattcttcatcatgatac

SEQ ID NO: 193133 - DNA, 25 bp, Artificial
  probe
  misc_feature (1)..(25): SEQ ID NO: 3957; WAN024F5I_at; Start 147; Stop 171
gattattagcaataccaacattgta

SEQ ID NO: 193134 - DNA, 25 bp, Artificial
  probe
  misc_feature (1)..(25): SEQ ID NO: 5708; WAN024F5J_at; Start 147; Stop 171
gataccttcatcactgcggcaactg

SEQ ID NO: 193135 - DNA, 25 bp, Artificial
  probe
  misc_feature (1)..(25): SEQ ID NO: 5708; WAN024F5J_at; Start 143; Stop 167
taaggataccttcatcactgcggca

SEQ ID NO: 193136 - DNA, 25 bp, Artificial
  probe
  misc_feature (1)..(25): SEQ ID NO: 5708; WAN024F5J_at; Start 50; Stop 74
tatgtgattggcacgcaagcaacca

SEQ ID NO: 193137 - DNA, 25 bp, Artificial
  probe
  misc_feature (1)..(25): SEQ ID NO: 5708; WAN024F5J_at; Start 100; Stop 124
ggagccaaaagtctccaattttgcc

SEQ ID NO: 193138 - DNA, 25 bp, Artificial
  probe
  misc_feature (1)..(25): SEQ ID NO: 5708; WAN024F5J_at; Start 113; Stop 137
tccaattttgcctagtatccttagt

SEQ ID NO: 193139 - DNA, 25 bp, Artificial
  probe
  misc_feature (1)..(25): SEQ ID NO: 5708; WAN024F5J_at; Start 91; Stop 115
gctaaaattggagccaaaagtctcc

SEQ ID NO: 193140 - DNA, 25 bp, Artificial
  probe
  misc_feature (1)..(25): SEQ ID NO: 5708; WAN024F5J_at; Start 249; Stop 273
tcttgtttcttcatccaaaagtggg

SEQ ID NO: 193141 - DNA, 25 bp, Artificial
  probe
  misc_feature (1)..(25): SEQ ID NO: 5708; WAN024F5J_at; Start 5; Stop 29
catgttttttctccgaaaagtatct

SEQ ID NO: 193142 - DNA, 25 bp, Artificial
  probe
  misc_feature (1)..(25): SEQ ID NO: 5708; WAN024F5J_at; Start 60; Stop 84
gcacgcaagcaaccaacttcgttgt

SEQ ID NO: 193143 - DNA, 25 bp, Artificial
  probe
  misc_feature (1)..(25): SEQ ID NO: 5708; WAN024F5J_at; Start 252; Stop 276
tgtttcttcatccaaaagtgggtag

SEQ ID NO: 193144 - DNA, 25 bp, Artificial
  probe
  misc_feature (1)..(25): SEQ ID NO: 5708; WAN024F5J_at; Start 72; Stop 96
ccaacttcgttgtttcattgctaaa

SEQ ID NO: 193145 - DNA, 25 bp, Artificial
  probe
  misc_feature (1)..(25): SEQ ID NO: 5708; WAN024F5J_at; Start 170; Stop 194
tggctcagggctcactctgttcgcc

SEQ ID NO: 193146 - DNA, 25 bp, Artificial
  probe
  misc_feature (1)..(25): SEQ ID NO: 5708; WAN024F5J_at; Start 122; Stop 146
gcctagtatccttagtttcactaag

SEQ ID NO: 193147 - DNA, 25 bp, Artificial
  probe
  misc_feature (1)..(25): SEQ ID NO: 5708; WAN024F5J_at; Start 159; Stop 183
actgcggcaactggctcagggctca

SEQ ID NO: 193148 - DNA, 25 bp, Artificial
  probe
  misc_feature (1)..(25): SEQ ID NO: 5708; WAN024F5J_at; Start 229; Stop 253
tcttctgctaggagtttagctcttg

SEQ ID NO: 193149 - DNA, 25 bp, Artificial
  probe
  misc_feature (1)..(25): SEQ ID NO: 5708; WAN024F5J_at; Start 204; Stop 228
aatttgtcactctctttattctgcg

SEQ ID NO: 193150 - DNA, 25 bp, Artificial
  probe
  misc_feature (1)..(25): SEQ ID NO: 5708; WAN024F5J_at; Start 39; Stop 63
ccagtttgccttatgtgattggcac

SEQ ID NO: 193151 - DNA, 25 bp, Artificial
  probe
  misc_feature (1)..(25): SEQ ID NO: 5708; WAN024F5J_at; Start 240; Stop 264
gagtttagctcttgtttcttcatcc

SEQ ID NO: 193152 - DNA, 25 bp, Artificial
  probe
  misc_feature (1)..(25): SEQ ID NO: 5708; WAN024F5J_at; Start 156; Stop 180
atcactgcggcaactggctcagggc

SEQ ID NO: 193153 - DNA, 25 bp, Artificial
  probe
  misc_feature (1)..(25): SEQ ID NO: 5708; WAN024F5J_at; Start 178; Stop 202
ggctcactctgttcgcccattttcg

SEQ ID NO: 193154 - DNA, 25 bp, Artificial
  probe
  misc_feature (1)..(25): SEQ ID NO: 5708; WAN024F5J_at; Start 134; Stop 158
tagtttcactaaggataccttcatc

SEQ ID NO: 193155 - DNA, 25 bp, Artificial
  probe
  misc_feature (1)..(25): SEQ ID NO: 5708; WAN024F5J_at; Start 2; Stop 26
tgtcatgttttttctccgaaaagta

SEQ ID NO: 193156 - DNA, 25 bp, Artificial
  probe
  misc_feature (1)..(25): SEQ ID NO: 5708; WAN024F5J_at; Start 192; Stop 216
gcccattttcgtaatttgtcactct

SEQ ID NO: 193157 - DNA, 25 bp, Artificial
  probe
  misc_feature (1)..(25): SEQ ID NO: 5708; WAN024F5J_at; Start 108; Stop 132
aagtctccaattttgcctagtatcc

SEQ ID NO: 193158 - DNA, 25 bp, Artificial
  probe
  misc_feature (1)..(25): SEQ ID NO: 5708; WAN024F5J_at; Start 46; Stop 70
gccttatgtgattggcacgcaagca

SEQ ID NO: 193159 - DNA, 25 bp, Artificial
  probe
  misc_feature (1)..(25): SEQ ID NO: 5708; WAN024F5J_at; Start 149; Stop 173
taccttcatcactgcggcaactggc

SEQ ID NO: 193160 - DNA, 25 bp, Artificial
  probe
  misc_feature (1)..(25): SEQ ID NO: 5708; WAN024F5J_at; Start 58; Stop 82
tggcacgcaagcaaccaacttcgtt

SEQ ID NO: 193161 - DNA, 25 bp, Artificial
  probe
  misc_feature (1)..(25): SEQ ID NO: 5708; WAN024F5J_at; Start 223; Stop 247
tctgcgtcttctgctaggagtttag

SEQ ID NO: 193162 - DNA, 25 bp, Artificial
  probe
  misc_feature (1)..(25): SEQ ID NO: 5708; WAN024F5J_at; Start 82; Stop 106
tgtttcattgctaaaattggagcca

SEQ ID NO: 193163 - DNA, 25 bp, Artificial
  probe
  misc_feature (1)..(25): SEQ ID NO: 5708; WAN024F5J_at; Start 188; Stop 212
gttcgcccattttcgtaatttgtca

SEQ ID NO: 193164 - DNA, 25 bp, Artificial
  probe
  misc_feature (1)..(25): SEQ ID NO: 5708; WAN024F5J_at; Start 31; Stop 55
tttattttccagtttgccttatgtg

SEQ ID NO: 193165 - DNA, 25 bp, Artificial
  probe
  misc_feature (1)..(25): SEQ ID NO: 5708; WAN024F5J_at; Start 165; Stop 189
gcaactggctcagggctcactctgt

SEQ ID NO: 193166 - DNA, 25 bp, Artificial
  probe
  misc_feature (1)..(25): SEQ ID NO: 5708; WAN024F5J_at; Start 54; Stop 78
tgattggcacgcaagcaaccaactt

SEQ ID NO: 193167 - DNA, 25 bp, Artificial
  probe
  misc_feature (1)..(25): SEQ ID NO: 5708; WAN024F5J_at; Start 218; Stop 242
tttattctgcgtcttctgctaggag

SEQ ID NO: 193168 - DNA, 25 bp, Artificial
  probe
  misc_feature (1)..(25): SEQ ID NO: 2881; WAN024F5K_at; Start 113; Stop 137
tccttttgccaaactggctctttgg

SEQ ID NO: 193169 - DNA, 25 bp, Artificial
  probe
  misc_feature (1)..(25): SEQ ID NO: 2881; WAN024F5K_at; Start 13; Stop 37
gatatttccgttagcgtatggaggg

SEQ ID NO: 193170 - DNA, 25 bp, Artificial
  probe
  misc_feature (1)..(25): SEQ ID NO: 2881; WAN024F5K_at; Start 2; Stop 26
tgtccaacgtggatatttccgttag

SEQ ID NO: 193171 - DNA, 25 bp, Artificial
  probe
  misc_feature (1)..(25): SEQ ID NO: 2881; WAN024F5K_at; Start 19; Stop 43
tccgttagcgtatggagggccatca

SEQ ID NO: 193172 - DNA, 25 bp, Artificial
  probe
  misc_feature (1)..(25): SEQ ID NO: 2881; WAN024F5K_at; Start 64; Stop 88
tccttggttcaattcttgacgacgt

SEQ ID NO: 193173 - DNA, 25 bp, Artificial
  probe
  misc_feature (1)..(25): SEQ ID NO: 2881; WAN024F5K_at; Start 69; Stop 93
ggttcaattcttgacgacgttgata

SEQ ID NO: 193174 - DNA, 25 bp, Artificial
  probe
  misc_feature (1)..(25): SEQ ID NO: 2881; WAN024F5K_at; Start 80; Stop 104
tgacgacgttgataaagttttgcat

SEQ ID NO: 193175 - DNA, 25 bp, Artificial
  probe
  misc_feature (1)..(25): SEQ ID NO: 2881; WAN024F5K_at; Start 179; Stop 203
ttaagggtgtctttgagtttcatgg

SEQ ID NO: 193176 - DNA, 25 bp, Artificial
  probe
  misc_feature (1)..(25): SEQ ID NO: 2881; WAN024F5K_at; Start 171; Stop 195
tcccaagattaagggtgtctttgag

SEQ ID NO: 193177 - DNA, 25 bp, Artificial
  probe
  misc_feature (1)..(25): SEQ ID NO: 2881; WAN024F5K_at; Start 145; Stop 169
gcctgcacgcattgggaattcagtt

SEQ ID NO: 193178 - DNA, 25 bp, Artificial
  probe
  misc_feature (1)..(25): SEQ ID NO: 2881; WAN024F5K_at; Start 31; Stop 55
tggagggccatcatgcaaggtgaaa

SEQ ID NO: 193179 - DNA, 25 bp, Artificial
  probe
  misc_feature (1)..(25): SEQ ID NO: 2881; WAN024F5K_at; Start 126; Stop 150
ctggctctttggtaggaaggcctgc

SEQ ID NO: 193180 - DNA, 25 bp, Artificial
  probe
  misc_feature (1)..(25): SEQ ID NO: 2881; WAN024F5K_at; Start 29; Stop 53
tatggagggccatcatgcaaggtga

SEQ ID NO: 193181 - DNA, 25 bp, Artificial
  probe
  misc_feature (1)..(25): SEQ ID NO: 2881; WAN024F5K_at; Start 132; Stop 156
ctttggtaggaaggcctgcacgcat

SEQ ID NO: 193182 - DNA, 25 bp, Artificial
  probe
  misc_feature (1)..(25): SEQ ID NO: 2881; WAN024F5K_at; Start 122; Stop 146
caaactggctctttggtaggaaggc

SEQ ID NO: 193183 - DNA, 25 bp, Artificial
  probe
  misc_feature (1)..(25): SEQ ID NO: 2881; WAN024F5K_at; Start 106; Stop 130
ttcccattccttttgccaaactggc

SEQ ID NO: 193184 - DNA, 25 bp, Artificial
  probe
  misc_feature (1)..(25): SEQ ID NO: 2881; WAN024F5K_at; Start 157; Stop 181
tgggaattcagttttcccaagatta

SEQ ID NO: 193185 - DNA, 25 bp, Artificial
  probe
  misc_feature (1)..(25): SEQ ID NO: 2881; WAN024F5K_at; Start 183; Stop 207
gggtgtctttgagtttcatggtatc

SEQ ID NO: 193186 - DNA, 25 bp, Artificial
  probe
  misc_feature (1)..(25): SEQ ID NO: 2881; WAN024F5K_at; Start 150; Stop 174
cacgcattgggaattcagttttccc

SEQ ID NO: 193187 - DNA, 25 bp, Artificial
  probe
  misc_feature (1)..(25): SEQ ID NO: 2881; WAN024F5K_at; Start 33; Stop 57
gagggccatcatgcaaggtgaaatg

SEQ ID NO: 193188 - DNA, 25 bp, Artificial
  probe
  misc_feature (1)..(25): SEQ ID NO: 2881; WAN024F5K_at; Start 37; Stop 61
gccatcatgcaaggtgaaatgaggt

SEQ ID NO: 193189 - DNA, 25 bp, Artificial
  probe
  misc_feature (1)..(25): SEQ ID NO: 2881; WAN024F5K_at; Start 131; Stop 155
tctttggtaggaaggcctgcacgca

SEQ ID NO: 193190 - DNA, 25 bp, Artificial
  probe
  misc_feature (1)..(25): SEQ ID NO: 2881; WAN024F5K_at; Start 16; Stop 40
atttccgttagcgtatggagggcca

SEQ ID NO: 193191 - DNA, 25 bp, Artificial
  probe
  misc_feature (1)..(25): SEQ ID NO: 2881; WAN024F5K_at; Start 51; Stop 75
tgaaatgaggttttccttggttcaa

SEQ ID NO: 193192 - DNA, 25 bp, Artificial
  probe
  misc_feature (1)..(25): SEQ ID NO: 2881; WAN024F5K_at; Start 142; Stop 166
aaggcctgcacgcattgggaattca

SEQ ID NO: 193193 - DNA, 25 bp, Artificial
  probe
  misc_feature (1)..(25): SEQ ID NO: 2881; WAN024F5K_at; Start 73; Stop 97
caattcttgacgacgttgataaagt

SEQ ID NO: 193194 - DNA, 25 bp, Artificial
  probe
  misc_feature (1)..(25): SEQ ID NO: 2881; WAN024F5K_at; Start 78; Stop 102
cttgacgacgttgataaagttttgc

SEQ ID NO: 193195 - DNA, 25 bp, Artificial
  probe
  misc_feature (1)..(25): SEQ ID NO: 2881; WAN024F5K_at; Start 23; Stop 47
ttagcgtatggagggccatcatgca

SEQ ID NO: 193196 - DNA, 25 bp, Artificial
  probe
  misc_feature (1)..(25): SEQ ID NO: 2881; WAN024F5K_at; Start 139; Stop 163
aggaaggcctgcacgcattgggaat

SEQ ID NO: 193197 - DNA, 25 bp, Artificial
  probe
  misc_feature (1)..(25): SEQ ID NO: 2881; WAN024F5K_at; Start 42; Stop 66
catgcaaggtgaaatgaggttttcc

SEQ ID NO: 193198 - DNA, 25 bp, Artificial
  probe
  misc_feature (1)..(25): SEQ ID NO: 2881; WAN024F5K_at; Start 129; Stop 153
gctctttggtaggaaggcctgcacg

SEQ ID NO: 193199 - DNA, 25 bp, Artificial
  probe
  misc_feature (1)..(25): SEQ ID NO: 2881; WAN024F5K_at; Start 202; Stop 226
ggtatctcctttataaataataaca

SEQ ID NO: 193200 - DNA, 25 bp, Artificial
  probe
  misc_feature (1)..(25): SEQ ID NO: 2881; WAN024F5K_at; Start 6; Stop 30
caacgtggatatttccgttagcgta

SEQ ID NO: 193201 - DNA, 25 bp, Artificial
  probe
  misc_feature (1)..(25): SEQ ID NO: 2881; WAN024F5K_at; Start 194; Stop 218
agtttcatggtatctcctttataaa

SEQ ID NO: 193202 - DNA, 25 bp, Artificial
  probe
  misc_feature (1)..(25): SEQ ID NO: 4326; WAN024F5L_at; Start 44; Stop 68
cgtgctacggtcacatcatacttgg

SEQ ID NO: 193203 - DNA, 25 bp, Artificial
  probe
  misc_feature (1)..(25): SEQ ID NO: 4326; WAN024F5L_at; Start 60; Stop 84
catacttggcttggtagtcggcttg

SEQ ID NO: 193204 - DNA, 25 bp, Artificial
  probe
  misc_feature (1)..(25): SEQ ID NO: 4326; WAN024F5L_at; Start 253; Stop 277
ttcggctcctgtaataacgcttgac

SEQ ID NO: 193205 - DNA, 25 bp, Artificial
  probe
  misc_feature (1)..(25): SEQ ID NO: 4326; WAN024F5L_at; Start 14; Stop 38
tatttcaccaacttcttcatctcat

SEQ ID NO: 193206 - DNA, 25 bp, Artificial
  probe
  misc_feature (1)..(25): SEQ ID NO: 4326; WAN024F5L_at; Start 277; Stop 301
catagccagttcaggtgcagggatg

SEQ ID NO: 193207 - DNA, 25 bp, Artificial
  probe
  misc_feature (1)..(25): SEQ ID NO: 4326; WAN024F5L_at; Start 120; Stop 144
cgttggcgacgaagcgttcgttgct

SEQ ID NO: 193208 - DNA, 25 bp, Artificial
  probe
  misc_feature (1)..(25): SEQ ID NO: 4326; WAN024F5L_at; Start 301; Stop 325
ggttgatgcgatttccaagtgttct

SEQ ID NO: 193209 - DNA, 25 bp, Artificial
  probe
  misc_feature (1)..(25): SEQ ID NO: 4326; WAN024F5L_at; Start 29; Stop 53
ttcatctcatcaatacgtgctacgg

SEQ ID NO: 193210 - DNA, 25 bp, Artificial
  probe
  misc_feature (1)..(25): SEQ ID NO: 4326; WAN024F5L_at; Start 242; Stop 266
ggcaagaagatttcggctcctgtaa

SEQ ID NO: 193211 - DNA, 25 bp, Artificial
  probe
  misc_feature (1)..(25): SEQ ID NO: 4326; WAN024F5L_at; Start 233; Stop 257
tctaccagtggcaagaagatttcgg

SEQ ID NO: 193212 - DNA, 25 bp, Artificial
  probe
  misc_feature (1)..(25): SEQ ID NO: 4326; WAN024F5L_at; Start 208; Stop 232
caattcttcttcgacattcaagagg

SEQ ID NO: 193213 - DNA, 25 bp, Artificial
  probe
  misc_feature (1)..(25): SEQ ID NO: 4326; WAN024F5L_at; Start 199; Stop 223
cagacgtgccaattcttcttcgaca

SEQ ID NO: 193214 - DNA, 25 bp, Artificial
  probe
  misc_feature (1)..(25): SEQ ID NO: 4326; WAN024F5L_at; Start 101; Stop 125
tggacaacttctggtttagcgttgg

SEQ ID NO: 193215 - DNA, 25 bp, Artificial
  probe
  misc_feature (1)..(25): SEQ ID NO: 4326; WAN024F5L_at; Start 262; Stop 286
tgtaataacgcttgacatagccagt

SEQ ID NO: 193216 - DNA, 25 bp, Artificial
  probe
  misc_feature (1)..(25): SEQ ID NO: 4326; WAN024F5L_at; Start 115; Stop 139
tttagcgttggcgacgaagcgttcg

SEQ ID NO: 193217 - DNA, 25 bp, Artificial
  probe
  misc_feature (1)..(25): SEQ ID NO: 4326; WAN024F5L_at; Start 225; Stop 249
tcaagaggtctaccagtggcaagaa

SEQ ID NO: 193218 - DNA, 25 bp, Artificial
  probe
  misc_feature (1)..(25): SEQ ID NO: 4326; WAN024F5L_at; Start 107; Stop 131
acttctggtttagcgttggcgacga

SEQ ID NO: 193219 - DNA, 25 bp, Artificial
  probe
  misc_feature (1)..(25): SEQ ID NO: 4326; WAN024F5L_at; Start 237; Stop 261
ccagtggcaagaagatttcggctcc

SEQ ID NO: 193220 - DNA, 25 bp, Artificial
  probe
  misc_feature (1)..(25): SEQ ID NO: 4326; WAN024F5L_at; Start 49; Stop 73
tacggtcacatcatacttggcttgg

SEQ ID NO: 193221 - DNA, 25 bp, Artificial
  probe
  misc_feature (1)..(25): SEQ ID NO: 4326; WAN024F5L_at; Start 220; Stop 244
gacattcaagaggtctaccagtggc

SEQ ID NO: 193222 - DNA, 25 bp, Artificial
  probe
  misc_feature (1)..(25): SEQ ID NO: 4326; WAN024F5L_at; Start 145; Stop 169
gagttttttgccaaccatgtcgagt

SEQ ID NO: 193223 - DNA, 25 bp, Artificial
  probe
  misc_feature (1)..(25): SEQ ID NO: 4326; WAN024F5L_at; Start 35; Stop 59
tcatcaatacgtgctacggtcacat

SEQ ID NO: 193224 - DNA, 25 bp, Artificial
  probe
  misc_feature (1)..(25): SEQ ID NO: 4326; WAN024F5L_at; Start 57; Stop 81
catcatacttggcttggtagtcggc

SEQ ID NO: 193225 - DNA, 25 bp, Artificial
  probe
  misc_feature (1)..(25): SEQ ID NO: 4326; WAN024F5L_at; Start 1; Stop 25
gtgtttctgtgtttatttcaccaac

SEQ ID NO: 193226 - DNA, 25 bp, Artificial
  probe
  misc_feature (1)..(25): SEQ ID NO: 4326; WAN024F5L_at; Start 163; Stop 187
gtcgagttctttctgccatttggca

SEQ ID NO: 193227 - DNA, 25 bp, Artificial
  probe
  misc_feature (1)..(25): SEQ ID NO: 4326; WAN024F5L_at; Start 186; Stop 210
caagttctttttccagacgtgccaa

SEQ ID NO: 193228 - DNA, 25 bp, Artificial
  probe
  misc_feature (1)..(25): SEQ ID NO: 4326; WAN024F5L_at; Start 275; Stop 299
gacatagccagttcaggtgcaggga

SEQ ID NO: 193229 - DNA, 25 bp, Artificial
  probe
  misc_feature (1)..(25): SEQ ID NO: 4326; WAN024F5L_at; Start 308; Stop 332
gcgatttccaagtgttctggatttg

SEQ ID NO: 193230 - DNA, 25 bp, Artificial
  probe
  misc_feature (1)..(25): SEQ ID NO: 4326; WAN024F5L_at; Start 247; Stop 271
gaagatttcggctcctgtaataacg

SEQ ID NO: 193231 - DNA, 25 bp, Artificial
  probe
  misc_feature (1)..(25): SEQ ID NO: 4326; WAN024F5L_at; Start 177; Stop 201
gccatttggcaagttctttttccag

SEQ ID NO: 193232 - DNA, 25 bp, Artificial
  probe
  misc_feature (1)..(25): SEQ ID NO: 4326; WAN024F5L_at; Start 292; Stop 316
tgcagggatggttgatgcgatttcc

SEQ ID NO: 193233 - DNA, 25 bp, Artificial
  probe
  misc_feature (1)..(25): SEQ ID NO: 4326; WAN024F5L_at; Start 69; Stop 93
cttggtagtcggcttgtttgtcttt

SEQ ID NO: 193234 - DNA, 25 bp, Artificial
  probe
  misc_feature (1)..(25): SEQ ID NO: 4326; WAN024F5L_at; Start 133; Stop 157
gcgttcgttgctgagttttttgcca

SEQ ID NO: 193235 - DNA, 25 bp, Artificial
  probe
  misc_feature (1)..(25): SEQ ID NO: 4326; WAN024F5L_at; Start 156; Stop 180
caaccatgtcgagttctttctgcca

SEQ ID NO: 193236 - DNA, 25 bp, Artificial
  probe
  misc_feature (1)..(25): SEQ ID NO: 1865; WAN024F5M_at; Start 153; Stop 177
gataacaatttttctcattctaagt

SEQ ID NO: 193237 - DNA, 25 bp, Artificial
  probe
  misc_feature (1)..(25): SEQ ID NO: 1865; WAN024F5M_at; Start 23; Stop 47
catccgaaatatctggaacgcaatc

SEQ ID NO: 193238 - DNA, 25 bp, Artificial
  probe
  misc_feature (1)..(25): SEQ ID NO: 1865; WAN024F5M_at; Start 91; Stop 115
gcaacgacactatttttagcaccac

SEQ ID NO: 193239 - DNA, 25 bp, Artificial
  probe
  misc_feature (1)..(25): SEQ ID NO: 1865; WAN024F5M_at; Start 9; Stop 33
gacaagactggctacatccgaaata

SEQ ID NO: 193240 - DNA, 25 bp, Artificial
  probe
  misc_feature (1)..(25): SEQ ID NO: 1865; WAN024F5M_at; Start 184; Stop 208
tactctttcaagatttctaataagg

SEQ ID NO: 193241 - DNA, 25 bp, Artificial
  probe
  misc_feature (1)..(25): SEQ ID NO: 1865; WAN024F5M_at; Start 247; Stop 271
ccatccttttcaattttattggata

SEQ ID NO: 193242 - DNA, 25 bp, Artificial
  probe
  misc_feature (1)..(25): SEQ ID NO: 1865; WAN024F5M_at; Start 32; Stop 56
tatctggaacgcaatccaaagtcac

SEQ ID NO: 193243 - DNA, 25 bp, Artificial
  probe
  misc_feature (1)..(25): SEQ ID NO: 1865; WAN024F5M_at; Start 14; Stop 38
gactggctacatccgaaatatctgg

SEQ ID NO: 193244 - DNA, 25 bp, Artificial
  probe
  misc_feature (1)..(25): SEQ ID NO: 1865; WAN024F5M_at; Start 59; Stop 83
catcatcagccaagataatagctgg

SEQ ID NO: 193245 - DNA, 25 bp, Artificial
  probe
  misc_feature (1)..(25): SEQ ID NO: 1865; WAN024F5M_at; Start 126; Stop 150
ttcaccttgcagtggtaatccacca

SEQ ID NO: 193246 - DNA, 25 bp, Artificial
  probe
  misc_feature (1)..(25): SEQ ID NO: 1865; WAN024F5M_at; Start 77; Stop 101
tagctggaattaaggcaacgacact

SEQ ID NO: 193247 - DNA, 25 bp, Artificial
  probe
  misc_feature (1)..(25): SEQ ID NO: 1865; WAN024F5M_at; Start 44; Stop 68
aatccaaagtcaccacatcatcagc

SEQ ID NO: 193248 - DNA, 25 bp, Artificial
  probe
  misc_feature (1)..(25): SEQ ID NO: 1865; WAN024F5M_at; Start 81; Stop 105
tggaattaaggcaacgacactattt

SEQ ID NO: 193249 - DNA, 25 bp, Artificial
  probe
  misc_feature (1)..(25): SEQ ID NO: 1865; WAN024F5M_at; Start 192; Stop 216
caagatttctaataaggtcttcaaa

SEQ ID NO: 193250 - DNA, 25 bp, Artificial
  probe
  misc_feature (1)..(25): SEQ ID NO: 1865; WAN024F5M_at; Start 74; Stop 98
taatagctggaattaaggcaacgac

SEQ ID NO: 193251 - DNA, 25 bp, Artificial
  probe
  misc_feature (1)..(25): SEQ ID NO: 1865; WAN024F5M_at; Start 37; Stop 61
ggaacgcaatccaaagtcaccacat

SEQ ID NO: 193252 - DNA, 25 bp, Artificial
  probe
  misc_feature (1)..(25): SEQ ID NO: 1865; WAN024F5M_at; Start 18; Stop 42
ggctacatccgaaatatctggaacg

SEQ ID NO: 193253 - DNA, 25 bp, Artificial
  probe
  misc_feature (1)..(25): SEQ ID NO: 1865; WAN024F5M_at; Start 5; Stop 29
tttcgacaagactggctacatccga

SEQ ID NO: 193254 - DNA, 25 bp, Artificial
  probe
  misc_feature (1)..(25): SEQ ID NO: 1865; WAN024F5M_at; Start 2; Stop 26
tgatttcgacaagactggctacatc

SEQ ID NO: 193255 - DNA, 25 bp, Artificial
  probe
  misc_feature (1)..(25): SEQ ID NO: 1865; WAN024F5M_at; Start 101; Stop 125
tatttttagcaccactaatagtgat

SEQ ID NO: 193256 - DNA, 25 bp, Artificial
  probe
  misc_feature (1)..(25): SEQ ID NO: 1865; WAN024F5M_at; Start 267; Stop 291
ggataaatcagagttgacgagttag

SEQ ID NO: 193257 - DNA, 25 bp, Artificial
  probe
  misc_feature (1)..(25): SEQ ID NO: 1865; WAN024F5M_at; Start 207; Stop 231
ggtcttcaaaataaagtatatcata

SEQ ID NO: 193258 - DNA, 25 bp, Artificial
  probe
  misc_feature (1)..(25): SEQ ID NO: 1865; WAN024F5M_at; Start 135; Stop 159
cagtggtaatccaccattgataaca

SEQ ID NO: 193259 - DNA, 25 bp, Artificial
  probe
  misc_feature (1)..(25): SEQ ID NO: 1865; WAN024F5M_at; Start 171; Stop 195
tctaagttttcaatactctttcaag

SEQ ID NO: 193260 - DNA, 25 bp, Artificial
  probe
  misc_feature (1)..(25): SEQ ID NO: 1865; WAN024F5M_at; Start 119; Stop 143
tagtgatttcaccttgcagtggtaa

SEQ ID NO: 193261 - DNA, 25 bp, Artificial
  probe
  misc_feature (1)..(25): SEQ ID NO: 1865; WAN024F5M_at; Start 116; Stop 140
taatagtgatttcaccttgcagtgg

SEQ ID NO: 193262 - DNA, 25 bp, Artificial
  probe
  misc_feature (1)..(25): SEQ ID NO: 1865; WAN024F5M_at; Start 87; Stop 111
taaggcaacgacactatttttagca

SEQ ID NO: 193263 - DNA, 25 bp, Artificial
  probe
  misc_feature (1)..(25): SEQ ID NO: 1865; WAN024F5M_at; Start 123; Stop 147
gatttcaccttgcagtggtaatcca

SEQ ID NO: 193264 - DNA, 25 bp, Artificial
  probe
  misc_feature (1)..(25): SEQ ID NO: 1865; WAN024F5M_at; Start 94; Stop 118
acgacactatttttagcaccactaa

SEQ ID NO: 193265 - DNA, 25 bp, Artificial
  probe
  misc_feature (1)..(25): SEQ ID NO: 1865; WAN024F5M_at; Start 68; Stop 92
ccaagataatagctggaattaaggc

SEQ ID NO: 193266 - DNA, 25 bp, Artificial
  probe
  misc_feature (1)..(25): SEQ ID NO: 1865; WAN024F5M_at; Start 28; Stop 52
gaaatatctggaacgcaatccaaag

SEQ ID NO: 193267 - DNA, 25 bp, Artificial
  probe
  misc_feature (1)..(25): SEQ ID NO: 1865; WAN024F5M_at; Start 139; Stop 163
ggtaatccaccattgataacaattt

SEQ ID NO: 193268 - DNA, 25 bp, Artificial
  probe
  misc_feature (1)..(25): SEQ ID NO: 1865; WAN024F5M_at; Start 130; Stop 154
ccttgcagtggtaatccaccattga

SEQ ID NO: 193269 - DNA, 25 bp, Artificial
  probe
  misc_feature (1)..(25): SEQ ID NO: 1865; WAN024F5M_at; Start 263; Stop 287
tattggataaatcagagttgacgag

SEQ ID NO: 193270 - DNA, 25 bp, Artificial
  probe
  misc_feature (1)..(25): SEQ ID NO: 4093; WAN024F5N_at; Start 104; Stop 128
tccaaaccataggtaacttccgcag

SEQ ID NO: 193271 - DNA, 25 bp, Artificial
  probe
  misc_feature (1)..(25): SEQ ID NO: 4093; WAN024F5N_at; Start 83; Stop 107
tgaatgtaagaagccaagcgctcca

SEQ ID NO: 193272 - DNA, 25 bp, Artificial
  probe
  misc_feature (1)..(25): SEQ ID NO: 4093; WAN024F5N_at; Start 14; Stop 38
ggctggataaagatttctccgtatt

SEQ ID NO: 193273 - DNA, 25 bp, Artificial
  probe
  misc_feature (1)..(25): SEQ ID NO: 4093; WAN024F5N_at; Start 143; Stop 167
gccaatccaccgacttgttggaaat

SEQ ID NO: 193274 - DNA, 25 bp, Artificial
  probe
  misc_feature (1)..(25): SEQ ID NO: 4093; WAN024F5N_at; Start 34; Stop 58
gtattttacaccatcagcccactcg

SEQ ID NO: 193275 - DNA, 25 bp, Artificial
  probe
  misc_feature (1)..(25): SEQ ID NO: 4093; WAN024F5N_at; Start 114; Stop 138
aggtaacttccgcagtcacagggcc

SEQ ID NO: 193276 - DNA, 25 bp, Artificial
  probe
  misc_feature (1)..(25): SEQ ID NO: 4093; WAN024F5N_at; Start 136; Stop 160
gccagttgccaatccaccgacttgt

SEQ ID NO: 193277 - DNA, 25 bp, Artificial
  probe
  misc_feature (1)..(25): SEQ ID NO: 4093; WAN024F5N_at; Start 8; Stop 32
tactcaggctggataaagatttctc

SEQ ID NO: 193278 - DNA, 25 bp, Artificial
  probe
  misc_feature (1)..(25): SEQ ID NO: 4093; WAN024F5N_at; Start 87; Stop 111
tgtaagaagccaagcgctccaaacc

SEQ ID NO: 193279 - DNA, 25 bp, Artificial
  probe
  misc_feature (1)..(25): SEQ ID NO: 4093; WAN024F5N_at; Start 120; Stop 144
cttccgcagtcacagggccagttgc

SEQ ID NO: 193280 - DNA, 25 bp, Artificial
  probe
  misc_feature (1)..(25): SEQ ID NO: 4093; WAN024F5N_at; Start 11; Stop 35
tcaggctggataaagatttctccgt

SEQ ID NO: 193281 - DNA, 25 bp, Artificial
  probe
  misc_feature (1)..(25): SEQ ID NO: 4093; WAN024F5N_at; Start 44; Stop 68
ccatcagcccactcgatatcataga

SEQ ID NO: 193282 - DNA, 25 bp, Artificial
  probe
  misc_feature (1)..(25): SEQ ID NO: 4093; WAN024F5N_at; Start 70; Stop 94
agagtctacttcttgaatgtaagaa

SEQ ID NO: 193283 - DNA, 25 bp, Artificial
  probe
  misc_feature (1)..(25): SEQ ID NO: 4093; WAN024F5N_at; Start 91; Stop 115
agaagccaagcgctccaaaccatag

SEQ ID NO: 193284 - DNA, 25 bp, Artificial
  probe
  misc_feature (1)..(25): SEQ ID NO: 4093; WAN024F5N_at; Start 149; Stop 173
ccaccgacttgttggaaataagtga

SEQ ID NO: 193285 - DNA, 25 bp, Artificial
  probe
  misc_feature (1)..(25): SEQ ID NO: 4093; WAN024F5N_at; Start 80; Stop 104
tcttgaatgtaagaagccaagcgct

SEQ ID NO: 193286 - DNA, 25 bp, Artificial
  probe
  misc_feature (1)..(25): SEQ ID NO: 4093; WAN024F5N_at; Start 177; Stop 201
gagtgatttccattccgtcaagcca

SEQ ID NO: 193287 - DNA, 25 bp, Artificial
  probe
  misc_feature (1)..(25): SEQ ID NO: 4093; WAN024F5N_at; Start 117; Stop 141
taacttccgcagtcacagggccagt

SEQ ID NO: 193288 - DNA, 25 bp, Artificial
  probe
  misc_feature (1)..(25): SEQ ID NO: 4093; WAN024F5N_at; Start 201; Stop 225
aaacttcccaaccaagaccagctga

SEQ ID NO: 193289 - DNA, 25 bp, Artificial
  probe
  misc_feature (1)..(25): SEQ ID NO: 4093; WAN024F5N_at; Start 95; Stop 119
gccaagcgctccaaaccataggtaa

SEQ ID NO: 193290 - DNA, 25 bp, Artificial
  probe
  misc_feature (1)..(25): SEQ ID NO: 4093; WAN024F5N_at; Start 152; Stop 176
ccgacttgttggaaataagtgaact

SEQ ID NO: 193291 - DNA, 25 bp, Artificial
  probe
  misc_feature (1)..(25): SEQ ID NO: 4093; WAN024F5N_at; Start 169; Stop 193
agtgaactgagtgatttccattccg

SEQ ID NO: 193292 - DNA, 25 bp, Artificial
  probe
  misc_feature (1)..(25): SEQ ID NO: 4093; WAN024F5N_at; Start 127; Stop 151
agtcacagggccagttgccaatcca

SEQ ID NO: 193293 - DNA, 25 bp, Artificial
  probe
  misc_feature (1)..(25): SEQ ID NO: 4093; WAN024F5N_at; Start 107; Stop 131
aaaccataggtaacttccgcagtca

SEQ ID NO: 193294 - DNA, 25 bp, Artificial
  probe
  misc_feature (1)..(25): SEQ ID NO: 4093; WAN024F5N_at; Start 193; Stop 217
gtcaagccaaacttcccaaccaaga

SEQ ID NO: 193295 - DNA, 25 bp, Artificial
  probe
  misc_feature (1)..(25): SEQ ID NO: 4093; WAN024F5N_at; Start 158; Stop 182
tgttggaaataagtgaactgagtga

SEQ ID NO: 193296 - DNA, 25 bp, Artificial
  probe
  misc_feature (1)..(25): SEQ ID NO: 4093; WAN024F5N_at; Start 172; Stop 196
gaactgagtgatttccattccgtca

SEQ ID NO: 193297 - DNA, 25 bp, Artificial
  probe
  misc_feature (1)..(25): SEQ ID NO: 4093; WAN024F5N_at; Start 181; Stop 205
gatttccattccgtcaagccaaact

SEQ ID NO: 193298 - DNA, 25 bp, Artificial
  probe
  misc_feature (1)..(25): SEQ ID NO: 4093; WAN024F5N_at; Start 138; Stop 162
cagttgccaatccaccgacttgttg

SEQ ID NO: 193299 - DNA, 25 bp, Artificial
  probe
  misc_feature (1)..(25): SEQ ID NO: 4093; WAN024F5N_at; Start 25; Stop 49
gatttctccgtattttacaccatca

SEQ ID NO: 193300 - DNA, 25 bp, Artificial
  probe
  misc_feature (1)..(25): SEQ ID NO: 4093; WAN024F5N_at; Start 111; Stop 135
cataggtaacttccgcagtcacagg

SEQ ID NO: 193301 - DNA, 25 bp, Artificial
  probe
  misc_feature (1)..(25): SEQ ID NO: 4093; WAN024F5N_at; Start 97; Stop 121
caagcgctccaaaccataggtaact

SEQ ID NO: 193302 - DNA, 25 bp, Artificial
  probe
  misc_feature (1)..(25): SEQ ID NO: 4093; WAN024F5N_at; Start 37; Stop 61
ttttacaccatcagcccactcgata

SEQ ID NO: 193303 - DNA, 25 bp, Artificial
  probe
  misc_feature (1)..(25): SEQ ID NO: 4093; WAN024F5N_at; Start 1; Stop 25
gtgctcatactcaggctggataaag

SEQ ID NO: 193304 - DNA, 25 bp, Artificial
  probe
  misc_feature (1)..(25): SEQ ID NO: 1429; WAN024F5O_at; Start 35; Stop 59
tgggcaggtgtgattttcacgacac

SEQ ID NO: 193305 - DNA, 25 bp, Artificial
  probe
  misc_feature (1)..(25): SEQ ID NO: 1429; WAN024F5O_at; Start 158; Stop 182
cgcgggtcttctggattaaccgcaa

SEQ ID NO: 193306 - DNA, 25 bp, Artificial
  probe
  misc_feature (1)..(25): SEQ ID NO: 1429; WAN024F5O_at; Start 191; Stop 215
tccccaaacatagtctcaggacgag

SEQ ID NO: 193307 - DNA, 25 bp, Artificial
  probe
  misc_feature (1)..(25): SEQ ID NO: 1429; WAN024F5O_at; Start 79; Stop 103
tgcgtgctcatctccaacgattggg

SEQ ID NO: 193308 - DNA, 25 bp, Artificial
  probe
  misc_feature (1)..(25): SEQ ID NO: 1429; WAN024F5O_at; Start 96; Stop 120
cgattgggatgagtttattagcgat

SEQ ID NO: 193309 - DNA, 25 bp, Artificial
  probe
  misc_feature (1)..(25): SEQ ID NO: 1429; WAN024F5O_at; Start 87; Stop 111
catctccaacgattgggatgagttt

SEQ ID NO: 193310 - DNA, 25 bp, Artificial
  probe
  misc_feature (1)..(25): SEQ ID NO: 1429; WAN024F5O_at; Start 5; Stop 29
cgttggccaaccaagaagtcatttg

SEQ ID NO: 193311 - DNA, 25 bp, Artificial
  probe
  misc_feature (1)..(25): SEQ ID NO: 1429; WAN024F5O_at; Start 212; Stop 236
cgagttgtagcaacttcaagggcgc

SEQ ID NO: 193312 - DNA, 25 bp, Artificial
  probe
  misc_feature (1)..(25): SEQ ID NO: 1429; WAN024F5O_at; Start 16; Stop 40
caagaagtcatttggatcgtgggca

SEQ ID NO: 193313 - DNA, 25 bp, Artificial
  probe
  misc_feature (1)..(25): SEQ ID NO: 1429; WAN024F5O_at; Start 127; Stop 151
gatgacgtttttaccaatcaagtcc

SEQ ID NO: 193314 - DNA, 25 bp, Artificial
  probe
  misc_feature (1)..(25): SEQ ID NO: 1429; WAN024F5O_at; Start 195; Stop 219
caaacatagtctcaggacgagttgt

SEQ ID NO: 193315 - DNA, 25 bp, Artificial
  probe
  misc_feature (1)..(25): SEQ ID NO: 1429; WAN024F5O_at; Start 103; Stop 127
gatgagtttattagcgattggaagg

SEQ ID NO: 193316 - DNA, 25 bp, Artificial
  probe
  misc_feature (1)..(25): SEQ ID NO: 1429; WAN024F5O_at; Start 185; Stop 209
gcaacgtccccaaacatagtctcag

SEQ ID NO: 193317 - DNA, 25 bp, Artificial
  probe
  misc_feature (1)..(25): SEQ ID NO: 1429; WAN024F5O_at; Start 10; Stop 34
gccaaccaagaagtcatttggatcg

SEQ ID NO: 193318 - DNA, 25 bp, Artificial
  probe
  misc_feature (1)..(25): SEQ ID NO: 1429; WAN024F5O_at; Start 155; Stop 179
tagcgcgggtcttctggattaaccg

SEQ ID NO: 193319 - DNA, 25 bp, Artificial
  probe
  misc_feature (1)..(25): SEQ ID NO: 1429; WAN024F5O_at; Start 93; Stop 117
caacgattgggatgagtttattagc

SEQ ID NO: 193320 - DNA, 25 bp, Artificial
  probe
  misc_feature (1)..(25): SEQ ID NO: 1429; WAN024F5O_at; Start 30; Stop 54
gatcgtgggcaggtgtgattttcac

SEQ ID NO: 193321 - DNA, 25 bp, Artificial
  probe
  misc_feature (1)..(25): SEQ ID NO: 1429; WAN024F5O_at; Start 201; Stop 225
tagtctcaggacgagttgtagcaac

SEQ ID NO: 193322 - DNA, 25 bp, Artificial
  probe
  misc_feature (1)..(25): SEQ ID NO: 1429; WAN024F5O_at; Start 216; Stop 240
ttgtagcaacttcaagggcgcgtga

SEQ ID NO: 193323 - DNA, 25 bp, Artificial
  probe
  misc_feature (1)..(25): SEQ ID NO: 1429; WAN024F5O_at; Start 138; Stop 162
taccaatcaagtccttgtagcgcgg

SEQ ID NO: 193324 - DNA, 25 bp, Artificial
  probe
  misc_feature (1)..(25): SEQ ID NO: 1429; WAN024F5O_at; Start 145; Stop 169
caagtccttgtagcgcgggtcttct

SEQ ID NO: 193325 - DNA, 25 bp, Artificial
  probe
  misc_feature (1)..(25): SEQ ID NO: 1429; WAN024F5O_at; Start 199; Stop 223
catagtctcaggacgagttgtagca

SEQ ID NO: 193326 - DNA, 25 bp, Artificial
  probe
  misc_feature (1)..(25): SEQ ID NO: 1429; WAN024F5O_at; Start 71; Stop 95
tcaggatctgcgtgctcatctccaa

SEQ ID NO: 193327 - DNA, 25 bp, Artificial
  probe
  misc_feature (1)..(25): SEQ ID NO: 1429; WAN024F5O_at; Start 109; Stop 133
tttattagcgattggaaggatgacg

SEQ ID NO: 193328 - DNA, 25 bp, Artificial
  probe
  misc_feature (1)..(25): SEQ ID NO: 1429; WAN024F5O_at; Start 153; Stop 177
tgtagcgcgggtcttctggattaac

SEQ ID NO: 193329 - DNA, 25 bp, Artificial
  probe
  misc_feature (1)..(25): SEQ ID NO: 1429; WAN024F5O_at; Start 74; Stop 98
ggatctgcgtgctcatctccaacga

SEQ ID NO: 193330 - DNA, 25 bp, Artificial
  probe
  misc_feature (1)..(25): SEQ ID NO: 1429; WAN024F5O_at; Start 2; Stop 26
tgacgttggccaaccaagaagtcat

SEQ ID NO: 193331 - DNA, 25 bp, Artificial
  probe
  misc_feature (1)..(25): SEQ ID NO: 1429; WAN024F5O_at; Start 44; Stop 68
gtgattttcacgacaccagtaccaa

SEQ ID NO: 193332 - DNA, 25 bp, Artificial
  probe
  misc_feature (1)..(25): SEQ ID NO: 1429; WAN024F5O_at; Start 204; Stop 228
tctcaggacgagttgtagcaacttc

SEQ ID NO: 193333 - DNA, 25 bp, Artificial
  probe
  misc_feature (1)..(25): SEQ ID NO: 1429; WAN024F5O_at; Start 38; Stop 62
gcaggtgtgattttcacgacaccag

SEQ ID NO: 193334 - DNA, 25 bp, Artificial
  probe
  misc_feature (1)..(25): SEQ ID NO: 1429; WAN024F5O_at; Start 141; Stop 165
caatcaagtccttgtagcgcgggtc

SEQ ID NO: 193335 - DNA, 25 bp, Artificial
  probe
  misc_feature (1)..(25): SEQ ID NO: 1429; WAN024F5O_at; Start 81; Stop 105
cgtgctcatctccaacgattgggat

SEQ ID NO: 193336 - DNA, 25 bp, Artificial
  probe
  misc_feature (1)..(25): SEQ ID NO: 1429; WAN024F5O_at; Start 116; Stop 140
gcgattggaaggatgacgtttttac

SEQ ID NO: 193337 - DNA, 25 bp, Artificial
  probe
  misc_feature (1)..(25): SEQ ID NO: 1429; WAN024F5O_at; Start 122; Stop 146
ggaaggatgacgtttttaccaatca

SEQ ID NO: 193338 - DNA, 25 bp, Artificial
  probe
  misc_feature (1)..(25): SEQ ID NO: 2909; WAN024F5P_at; Start 384; Stop 408
tcttggttgggaagtttggcttgac

SEQ ID NO: 193339 - DNA, 25 bp, Artificial
  probe
  misc_feature (1)..(25): SEQ ID NO: 2909; WAN024F5P_at; Start 656; Stop 680
agtttgaaaaagaagctggtcgtgc

SEQ ID NO: 193340 - DNA, 25 bp, Artificial
  probe
  misc_feature (1)..(25): SEQ ID NO: 2909; WAN024F5P_at; Start 255; Stop 279
gaagccttctccatcaaatatccaa

SEQ ID NO: 193341 - DNA, 25 bp, Artificial
  probe
  misc_feature (1)..(25): SEQ ID NO: 2909; WAN024F5P_at; Start 482; Stop 506
ttacctatggtttggagcgcttggc

SEQ ID NO: 193342 - DNA, 25 bp, Artificial
  probe
  misc_feature (1)..(25): SEQ ID NO: 2909; WAN024F5P_at; Start 683; Stop 707
tagaagaaggcttggtacaccctgc

SEQ ID NO: 193343 - DNA, 25 bp, Artificial
  probe
  misc_feature (1)..(25): SEQ ID NO: 2909; WAN024F5P_at; Start 328; Stop 352
cacgatattcgttttgttgaggaca

SEQ ID NO: 193344 - DNA, 25 bp, Artificial
  probe
  misc_feature (1)..(25): SEQ ID NO: 2909; WAN024F5P_at; Start 466; Stop 490
cctgtgactgcggaagttacctatg

SEQ ID NO: 193345 - DNA, 25 bp, Artificial
  probe
  misc_feature (1)..(25): SEQ ID NO: 2909; WAN024F5P_at; Start 237; Stop 261
ccaattccaggtggtcatgaagcct

SEQ ID NO: 193346 - DNA, 25 bp, Artificial
  probe
  misc_feature (1)..(25): SEQ ID NO: 2909; WAN024F5P_at; Start 365; Stop 389
catcaactggttcagctggtcttgg

SEQ ID NO: 193347 - DNA, 25 bp, Artificial
  probe
  misc_feature (1)..(25): SEQ ID NO: 2909; WAN024F5P_at; Start 696; Stop 720
ggtacaccctgcctatgactatgtt

SEQ ID NO: 193348 - DNA, 25 bp, Artificial
  probe
  misc_feature (1)..(25): SEQ ID NO: 2909; WAN024F5P_at; Start 401; Stop 425
ggcttgacggaatggaaatcactca

SEQ ID NO: 193349 - DNA, 25 bp, Artificial
  probe
  misc_feature (1)..(25): SEQ ID NO: 2909; WAN024F5P_at; Start 179; Stop 203
cacgtcgtcctgctgacggtcgtta

SEQ ID NO: 193350 - DNA, 25 bp, Artificial
  probe
  misc_feature (1)..(25): SEQ ID NO: 2909; WAN024F5P_at; Start 138; Stop 162
tatcggacctgagccatggaatgca

SEQ ID NO: 193351 - DNA, 25 bp, Artificial
  probe
  misc_feature (1)..(25): SEQ ID NO: 2909; WAN024F5P_at; Start 83; Stop 107
cttatgataatgaaaaaggtgcggg

SEQ ID NO: 193352 - DNA, 25 bp, Artificial
  probe
  misc_feature (1)..(25): SEQ ID NO: 2909; WAN024F5P_at; Start 438; Stop 462
ccaacaagtcggtggattggcaact

SEQ ID NO: 193353 - DNA, 25 bp, Artificial
  probe
  misc_feature (1)..(25): SEQ ID NO: 2909; WAN024F5P_at; Start 152; Stop 176
catggaatgcagcttatgtagagcc

SEQ ID NO: 193354 - DNA, 25 bp, Artificial
  probe
  misc_feature (1)..(25): SEQ ID NO: 2909; WAN024F5P_at; Start 796; Stop 820
gctcgtatccgtaacttggcccgtg

SEQ ID NO: 193355 - DNA, 25 bp, Artificial
  probe
  misc_feature (1)..(25): SEQ ID NO: 2909; WAN024F5P_at; Start 569; Stop 593
gagaaatctttatccagcctgagta

SEQ ID NO: 193356 - DNA, 25 bp, Artificial
  probe
  misc_feature (1)..(25): SEQ ID NO: 2909; WAN024F5P_at; Start 346; Stop 370
gaggacaactgggaaaacccatcaa

SEQ ID NO: 193357 - DNA, 25 bp, Artificial
  probe
  misc_feature (1)..(25): SEQ ID NO: 2909; WAN024F5P_at; Start 121; Stop 145
tacactttccttcgtgctatcggac

SEQ ID NO: 193358 - DNA, 25 bp, Artificial
  probe
  misc_feature (1)..(25): SEQ ID NO: 2909; WAN024F5P_at; Start 496; Stop 520
gagcgcttggcttcttacattcaag

SEQ ID NO: 193359 - DNA, 25 bp, Artificial
  probe
  misc_feature (1)..(25): SEQ ID NO: 2909; WAN024F5P_at; Start 741; Stop 765
taatctgcttgacgcgcgtggtgcc

SEQ ID NO: 193360 - DNA, 25 bp, Artificial
  probe
  misc_feature (1)..(25): SEQ ID NO: 2909; WAN024F5P_at; Start 38; Stop 62
ctttgcaacaattttggaatgacca

SEQ ID NO: 193361 - DNA, 25 bp, Artificial
  probe
  misc_feature (1)..(25): SEQ ID NO: 2909; WAN024F5P_at; Start 277; Stop 301
caagaactttaccttgagtctttgg

SEQ ID NO: 193362 - DNA, 25 bp, Artificial
  probe
  misc_feature (1)..(25): SEQ ID NO: 2909; WAN024F5P_at; Start 755; Stop 779
cgcgtggtgccgtatctgtaacaga

SEQ ID NO: 193363 - DNA, 25 bp, Artificial
  probe
  misc_feature (1)..(25): SEQ ID NO: 2909; WAN024F5P_at; Start 166; Stop 190
tatgtagagccatcacgtcgtcctg

SEQ ID NO: 193364 - DNA, 25 bp, Artificial
  probe
  misc_feature (1)..(25): SEQ ID NO: 2909; WAN024F5P_at; Start 670; Stop 694
gctggtcgtgcattagaagaaggct

SEQ ID NO: 193365 - DNA, 25 bp, Artificial
  probe
  misc_feature (1)..(25): SEQ ID NO: 2909; WAN024F5P_at; Start 781; Stop 805
cgtgcaggctatatcgctcgtatcc

SEQ ID NO: 193366 - DNA, 25 bp, Artificial
  probe
  misc_feature (1)..(25): SEQ ID NO: 2909; WAN024F5P_at; Start 620; Stop 644
tttcggaccaagaaatgttgcttga

SEQ ID NO: 193367 - DNA, 25 bp, Artificial
  probe
  misc_feature (1)..(25): SEQ ID NO: 2909; WAN024F5P_at; Start 309; Stop 333
gggaatcaatcctttggagcacgat

SEQ ID NO: 193368 - DNA, 25 bp, Artificial
  probe
  misc_feature (1)..(25): SEQ ID NO: 2909; WAN024F5P_at; Start 428; Stop 452
tcacttatttccaacaagtcggtgg

SEQ ID NO: 193369 - DNA, 25 bp, Artificial
  probe
  misc_feature (1)..(25): SEQ ID NO: 2909; WAN024F5P_at; Start 767; Stop 791
tatctgtaacagagcgtgcaggcta

SEQ ID NO: 193370 - DNA, 25 bp, Artificial
  probe
  misc_feature (1)..(25): SEQ ID NO: 2909; WAN024F5P_at; Start 543; Stop 567
cgagtgggctgatggtgtaaaatac

SEQ ID NO: 193371 - DNA, 25 bp, Artificial
  probe
  misc_feature (1)..(25): SEQ ID NO: 2909; WAN024F5P_at; Start 582; Stop 606
ccagcctgagtatgagcactcaaaa

SEQ ID NO: 193372 - DNA, 25 bp, Artificial
  probe
  misc_feature (1)..(25): SEQ ID NO: 1495; WAN024F5Q_at; Start 318; Stop 342
tgaagcgacagttggtctaccggga

SEQ ID NO: 193373 - DNA, 25 bp, Artificial
  probe
  misc_feature (1)..(25): SEQ ID NO: 1495; WAN024F5Q_at; Start 489; Stop 513
tagtgtgggagcaacgattaatacg

SEQ ID NO: 193374 - DNA, 25 bp, Artificial
  probe
  misc_feature (1)..(25): SEQ ID NO: 1495; WAN024F5Q_at; Start 549; Stop 573
tattgaaaatgcagcccgtgaacct

SEQ ID NO: 193375 - DNA, 25 bp, Artificial
  probe
  misc_feature (1)..(25): SEQ ID NO: 1495; WAN024F5Q_at; Start 286; Stop 310
tatttttatgggagcctcttaggcc

SEQ ID NO: 193376 - DNA, 25 bp, Artificial
  probe
  misc_feature (1)..(25): SEQ ID NO: 1495; WAN024F5Q_at; Start 658; Stop 682
gttgaaagattacatgggacacgtc

SEQ ID NO: 193377 - DNA, 25 bp, Artificial
  probe
  misc_feature (1)..(25): SEQ ID NO: 1495; WAN024F5Q_at; Start 444; Stop 468
taaagatacaggacttcatggtgca

SEQ ID NO: 193378 - DNA, 25 bp, Artificial
  probe
  misc_feature (1)..(25): SEQ ID NO: 1495; WAN024F5Q_at; Start 335; Stop 359
taccgggaggatgtgatcttggtcc

SEQ ID NO: 193379 - DNA, 25 bp, Artificial
  probe
  misc_feature (1)..(25): SEQ ID NO: 1495; WAN024F5Q_at; Start 882; Stop 906
tattaagacagctccttacccaggc

SEQ ID NO: 193380 - DNA, 25 bp, Artificial
  probe
  misc_feature (1)..(25): SEQ ID NO: 1495; WAN024F5Q_at; Start 381; Stop 405
taaggcgtttgaagctatgggtgcc

SEQ ID NO: 193381 - DNA, 25 bp, Artificial
  probe
  misc_feature (1)..(25): SEQ ID NO: 1495; WAN024F5Q_at; Start 562; Stop 586
gcccgtgaacctgagattattgatg

SEQ ID NO: 193382 - DNA, 25 bp, Artificial
  probe
  misc_feature (1)..(25): SEQ ID NO: 1495; WAN024F5Q_at; Start 1009; Stop 1033
tttgaactagcaaagatggatgcgg

SEQ ID NO: 193383 - DNA, 25 bp, Artificial
  probe
  misc_feature (1)..(25): SEQ ID NO: 1495; WAN024F5Q_at; Start 1053; Stop 1077
tcatattttgtacacgggtggacgt

SEQ ID NO: 193384 - DNA, 25 bp, Artificial
  probe
  misc_feature (1)..(25): SEQ ID NO: 1495; WAN024F5Q_at; Start 940; Stop 964
cttttactaagagcgaatggtcgtg

SEQ ID NO: 193385 - DNA, 25 bp, Artificial
  probe
  misc_feature (1)..(25): SEQ ID NO: 1495; WAN024F5Q_at; Start 363; Stop 387
tccgattgacttacaccttaaggcg

SEQ ID NO: 193386 - DNA, 25 bp, Artificial
  probe
  misc_feature (1)..(25): SEQ ID NO: 1495; WAN024F5Q_at; Start 396; Stop 420
tatgggtgccactgctagctacgag

SEQ ID NO: 193387 - DNA, 25 bp, Artificial
  probe
  misc_feature (1)..(25): SEQ ID NO: 1495; WAN024F5Q_at; Start 410; Stop 434
ctagctacgagggagataacatgaa

SEQ ID NO: 193388 - DNA, 25 bp, Artificial
  probe
  misc_feature (1)..(25): SEQ ID NO: 1495; WAN024F5Q_at; Start 915; Stop 939
tgatttgcaacaaccgcttacccct

SEQ ID NO: 193389 - DNA, 25 bp, Artificial
  probe
  misc_feature (1)..(25): SEQ ID NO: 1495; WAN024F5Q_at; Start 852; Stop 876
cgaggaacagtctaatttgaaagca

SEQ ID NO: 193390 - DNA, 25 bp, Artificial
  probe
  misc_feature (1)..(25): SEQ ID NO: 1495; WAN024F5Q_at; Start 147; Stop 171
tgtagccagtcttgtcgaaatcatg

SEQ ID NO: 193391 - DNA, 25 bp, Artificial
  probe
  misc_feature (1)..(25): SEQ ID NO: 1495; WAN024F5Q_at; Start 835; Stop 859
gaagacagcatttttgtcgaggaac

SEQ ID NO: 193392 - DNA, 25 bp, Artificial
  probe
  misc_feature (1)..(25): SEQ ID NO: 1495; WAN024F5Q_at; Start 697; Stop 721
gaccgcattgaagctggaacatata

SEQ ID NO: 193393 - DNA, 25 bp, Artificial
  probe
  misc_feature (1)..(25): SEQ ID NO: 1495; WAN024F5Q_at; Start 675; Stop 699
gacacgtcatcaggtgattccagac

SEQ ID NO: 193394 - DNA, 25 bp, Artificial
  probe
  misc_feature (1)..(25): SEQ ID NO: 1495; WAN024F5Q_at; Start 1127; Stop 1151
cactagtcattgctgggcttatggc

SEQ ID NO: 193395 - DNA, 25 bp, Artificial
  probe
  misc_feature (1)..(25): SEQ ID NO: 1495; WAN024F5Q_at; Start 898; Stop 922
tacccaggctttgcaactgatttgc

SEQ ID NO: 193396 - DNA, 25 bp, Artificial
  probe
  misc_feature (1)..(25): SEQ ID NO: 1495; WAN024F5Q_at; Start 957; Stop 981
tggtcgtggtacaattgtcgatacg

SEQ ID NO: 193397 - DNA, 25 bp, Artificial
  probe
  misc_feature (1)..(25): SEQ ID NO: 1495; WAN024F5Q_at; Start 303; Stop 327
cttaggccgttttggtgaagcgaca

SEQ ID NO: 193398 - DNA, 25 bp, Artificial
  probe
  misc_feature (1)..(25): SEQ ID NO: 1495; WAN024F5Q_at; Start 1098; Stop 1122
taaagcgaccgacttaagagctggg

SEQ ID NO: 193399 - DNA, 25 bp, Artificial
  probe
  misc_feature (1)..(25): SEQ ID NO: 1495; WAN024F5Q_at; Start 227; Stop 251
gaggtgttcaaaatattccaatgcc

SEQ ID NO: 193400 - DNA, 25 bp, Artificial
  probe
  misc_feature (1)..(25): SEQ ID NO: 1495; WAN024F5Q_at; Start 730; Stop 754
gctgctgcagttggtaaaggaattc

SEQ ID NO: 193401 - DNA, 25 bp, Artificial
  probe
  misc_feature (1)..(25): SEQ ID NO: 1495; WAN024F5Q_at; Start 348; Stop 372
tgatcttggtcctcgtccgattgac

SEQ ID NO: 193402 - DNA, 25 bp, Artificial
  probe
  misc_feature (1)..(25): SEQ ID NO: 1495; WAN024F5Q_at; Start 22; Stop 46
ggtggattaccactgcaaggtgaaa

SEQ ID NO: 193403 - DNA, 25 bp, Artificial
  probe
  misc_feature (1)..(25): SEQ ID NO: 1495; WAN024F5Q_at; Start 182; Stop 206
gagctactgttaagcgttatgacga

SEQ ID NO: 193404 - DNA, 25 bp, Artificial
  probe
  misc_feature (1)..(25): SEQ ID NO: 1495; WAN024F5Q_at; Start 593; Stop 617
ctctcttgaataatatgggtgccca

SEQ ID NO: 193405 - DNA, 25 bp, Artificial
  probe
  misc_feature (1)..(25): SEQ ID NO: 1495; WAN024F5Q_at; Start 1023; Stop 1047
gatggatgcggatatttcgacaaca

SEQ ID NO: 193406 - DNA, 25 bp, Artificial
  probe
  misc_feature (1)..(25): SEQ ID NO: 862; WAN024F5R_at; Start 2482; Stop 2506
gaagcacacttgacagtttatccaa

SEQ ID NO: 193407 - DNA, 25 bp, Artificial
  probe
  misc_feature (1)..(25): SEQ ID NO: 862; WAN024F5R_at; Start 1976; Stop 2000
catctgactttaacccagctcaaga

SEQ ID NO: 193408 - DNA, 25 bp, Artificial
  probe
  misc_feature (1)..(25): SEQ ID NO: 862; WAN024F5R_at; Start 1216; Stop 1240
tggcgtgcagttccacaatggtttg

SEQ ID NO: 193409 - DNA, 25 bp, Artificial
  probe
  misc_feature (1)..(25): SEQ ID NO: 862; WAN024F5R_at; Start 1885; Stop 1909
aatgacgtgcgtatctctatggata

SEQ ID NO: 193410 - DNA, 25 bp, Artificial
  probe
  misc_feature (1)..(25): SEQ ID NO: 862; WAN024F5R_at; Start 550; Stop 574
tactggtcatggtcatctgagtcag

SEQ ID NO: 193411 - DNA, 25 bp, Artificial
  probe
  misc_feature (1)..(25): SEQ ID NO: 862; WAN024F5R_at; Start 2722; Stop 2746
tgtgaccactgtgcaagcatcgtag

SEQ ID NO: 193412 - DNA, 25 bp, Artificial
  probe
  misc_feature (1)..(25): SEQ ID NO: 862; WAN024F5R_at; Start 179; Stop 203
acggaaatatccacgttggacatgc

SEQ ID NO: 193413 - DNA, 25 bp, Artificial
  probe
  misc_feature (1)..(25): SEQ ID NO: 862; WAN024F5R_at; Start 2525; Stop 2549
tactcgaagcagtaaacagcaatgt

SEQ ID NO: 193414 - DNA, 25 bp, Artificial
  probe
  misc_feature (1)..(25): SEQ ID NO: 862; WAN024F5R_at; Start 1200; Stop 1224
taagaaaccaatcatctggcgtgca

SEQ ID NO: 193415 - DNA, 25 bp, Artificial
  probe
  misc_feature (1)..(25): SEQ ID NO: 862; WAN024F5R_at; Start 2152; Stop 2176
gccttctaccttgattttgccaaag

SEQ ID NO: 193416 - DNA, 25 bp, Artificial
  probe
  misc_feature (1)..(25): SEQ ID NO: 862; WAN024F5R_at; Start 2066; Stop 2090
tcaagaccattcgtgatgcctatgc

SEQ ID NO: 193417 - DNA, 25 bp, Artificial
  probe
  misc_feature (1)..(25): SEQ ID NO: 862; WAN024F5R_at; Start 1949; Stop 1973
acactcttcgtttcttgattgccaa

SEQ ID NO: 193418 - DNA, 25 bp, Artificial
  probe
  misc_feature (1)..(25): SEQ ID NO: 862; WAN024F5R_at; Start 896; Stop 920
aacacccatgggatacagctgtaga

SEQ ID NO: 193419 - DNA, 25 bp, Artificial
  probe
  misc_feature (1)..(25): SEQ ID NO: 862; WAN024F5R_at; Start 2113; Stop 2137
tacaaggccttggtgaactttatca

SEQ ID NO: 193420 - DNA, 25 bp, Artificial
  probe
  misc_feature (1)..(25): SEQ ID NO: 862; WAN024F5R_at; Start 1583; Stop 1607
ggtttgactcaggttcatcatggaa

SEQ ID NO: 193421 - DNA, 25 bp, Artificial
  probe
  misc_feature (1)..(25): SEQ ID NO: 862; WAN024F5R_at; Start 1662; Stop 1686
aggttctgaccaataccgtggttgg

SEQ ID NO: 193422 - DNA, 25 bp, Artificial
  probe
  misc_feature (1)..(25): SEQ ID NO: 862; WAN024F5R_at; Start 2176; Stop 2200
gatgttgtttacattgaaggtgcca

SEQ ID NO: 193423 - DNA, 25 bp, Artificial
  probe
  misc_feature (1)..(25): SEQ ID NO: 862; WAN024F5R_at; Start 2657; Stop 2681
aagtatgtgaccgttgccgtcgtat

SEQ ID NO: 193424 - DNA, 25 bp, Artificial
  probe
  misc_feature (1)..(25): SEQ ID NO: 862; WAN024F5R_at; Start 980; Stop 1004
cagcccctggttttggtgaggacga

SEQ ID NO: 193425 - DNA, 25 bp, Artificial
  probe
  misc_feature (1)..(25): SEQ ID NO: 862; WAN024F5R_at; Start 285; Stop 309
tactcatggtctgccaatcgagcaa

SEQ ID NO: 193426 - DNA, 25 bp, Artificial
  probe
  misc_feature (1)..(25): SEQ ID NO: 862; WAN024F5R_at; Start 883; Stop 907
cacatcgtaacagaacacccatggg

SEQ ID NO: 193427 - DNA, 25 bp, Artificial
  probe
  misc_feature (1)..(25): SEQ ID NO: 862; WAN024F5R_at; Start 2050; Stop 2074
cgctttaaccagcttgtcaagacca

SEQ ID NO: 193428 - DNA, 25 bp, Artificial
  probe
  misc_feature (1)..(25): SEQ ID NO: 862; WAN024F5R_at; Start 2133; Stop 2157
tatcaacgttgacttgtcagccttc

SEQ ID NO: 193429 - DNA, 25 bp, Artificial
  probe
  misc_feature (1)..(25): SEQ ID NO: 862; WAN024F5R_at; Start 2765; Stop 2789
cagtcgcagaaggatttgaagagaa

SEQ ID NO: 193430 - DNA, 25 bp, Artificial
  probe
  misc_feature (1)..(25): SEQ ID NO: 862; WAN024F5R_at; Start 1478; Stop 1502
gcatttggtgggaacgtgatgccaa

SEQ ID NO: 193431 - DNA, 25 bp, Artificial
  probe
  misc_feature (1)..(25): SEQ ID NO: 862; WAN024F5R_at; Start 1184; Stop 1208
catttgactggcgtactaagaaacc

SEQ ID NO: 193432 - DNA, 25 bp, Artificial
  probe
  misc_feature (1)..(25): SEQ ID NO: 862; WAN024F5R_at; Start 2605; Stop 2629
gctgcccttagcttcgaagatgtag

SEQ ID NO: 193433 - DNA, 25 bp, Artificial
  probe
  misc_feature (1)..(25): SEQ ID NO: 862; WAN024F5R_at; Start 65; Stop 89
ccaaagagccagtttggcaaaagga

SEQ ID NO: 193434 - DNA, 25 bp, Artificial
  probe
  misc_feature (1)..(25): SEQ ID NO: 862; WAN024F5R_at; Start 2621; Stop 2645
aagatgtagccttcacagttgaacg

SEQ ID NO: 193435 - DNA, 25 bp, Artificial
  probe
  misc_feature (1)..(25): SEQ ID NO: 862; WAN024F5R_at; Start 1716; Stop 1740
caaccatggcgtagcaccttacaaa

SEQ ID NO: 193436 - DNA, 25 bp, Artificial
  probe
  misc_feature (1)..(25): SEQ ID NO: 862; WAN024F5R_at; Start 2387; Stop 2411
tcttggatacatgggcagccttcat

SEQ ID NO: 193437 - DNA, 25 bp, Artificial
  probe
  misc_feature (1)..(25): SEQ ID NO: 862; WAN024F5R_at; Start 815; Stop 839
gcttgtctgagaaatttggctgggc

SEQ ID NO: 193438 - DNA, 25 bp, Artificial
  probe
  misc_feature (1)..(25): SEQ ID NO: 862; WAN024F5R_at; Start 515; Stop 539
ataagggttatatctaccgtggtgc

SEQ ID NO: 193439 - DNA, 25 bp, Artificial
  probe
  misc_feature (1)..(25): SEQ ID NO: 862; WAN024F5R_at; Start 1846; Stop 1870
gaaatcttgcgtctctgggtaacaa

SEQ ID NO: 193440 - DNA, 25 bp, Artificial
  probe
  misc_feature (1)..(25): SEQ ID NO: 2905; WAN024F5S_at; Start 1276; Stop 1300
tatgtcggcgaagaagctccagaag

SEQ ID NO: 193441 - DNA, 25 bp, Artificial
  probe
  misc_feature (1)..(25): SEQ ID NO: 2905; WAN024F5S_at; Start 613; Stop 637
tacatgctggaagatggttcacgcg

SEQ ID NO: 193442 - DNA, 25 bp, Artificial
  probe
  misc_feature (1)..(25): SEQ ID NO: 2905; WAN024F5S_at; Start 1302; Stop 1326
tgacggatggactcaggacgaagac

SEQ ID NO: 193443 - DNA, 25 bp, Artificial
  probe
  misc_feature (1)..(25): SEQ ID NO: 2905; WAN024F5S_at; Start 2217; Stop 2241
tgcgcgtgcggaagtaaatgtagca

SEQ ID NO: 193444 - DNA, 25 bp, Artificial
  probe
  misc_feature (1)..(25): SEQ ID NO: 2905; WAN024F5S_at; Start 1135; Stop 1159
gaggacaaggtcgaattctacccac

SEQ ID NO: 193445 - DNA, 25 bp, Artificial
  probe
  misc_feature (1)..(25): SEQ ID NO: 2905; WAN024F5S_at; Start 1320; Stop 1344
cgaagacgtcttggatacttggttc

SEQ ID NO: 193446 - DNA, 25 bp, Artificial
  probe
  misc_feature (1)..(25): SEQ ID NO: 2905; WAN024F5S_at; Start 812; Stop 836
gtgtcgtgaaaatcacacctgccca

SEQ ID NO: 193447 - DNA, 25 bp, Artificial
  probe
  misc_feature (1)..(25): SEQ ID NO: 2905; WAN024F5S_at; Start 1092; Stop 1116
gatggaccaattggctaagaacgcc

SEQ ID NO: 193448 - DNA, 25 bp, Artificial
  probe
  misc_feature (1)..(25): SEQ ID NO: 2905; WAN024F5S_at; Start 643; Stop 667
gaagttgctacaactcgtcctgaga

SEQ ID NO: 193449 - DNA, 25 bp, Artificial
  probe
  misc_feature (1)..(25): SEQ ID NO: 2905; WAN024F5S_at; Start 90; Stop 114
ttcaggcgatcaaaaggctaagcct

SEQ ID NO: 193450 - DNA, 25 bp, Artificial
  probe
  misc_feature (1)..(25): SEQ ID NO: 2905; WAN024F5S_at; Start 1335; Stop 1359
tacttggttcagttctgccctctgg

SEQ ID NO: 193451 - DNA, 25 bp, Artificial
  probe
  misc_feature (1)..(25): SEQ ID NO: 2905; WAN024F5S_at; Start 1460; Stop 1484
gggtgtctcgtatgatcttccagtc

SEQ ID NO: 193452 - DNA, 25 bp, Artificial
  probe
  misc_feature (1)..(25): SEQ ID NO: 2905; WAN024F5S_at; Start 1791; Stop 1815
cacaaaagttgcaacaggtgaggct

SEQ ID NO: 193453 - DNA, 25 bp, Artificial
  probe
  misc_feature (1)..(25): SEQ ID NO: 2905; WAN024F5S_at; Start 151; Stop 175
aaacttcaccttggtcacgcttggg

SEQ ID NO: 193454 - DNA, 25 bp, Artificial
  probe
  misc_feature (1)..(25): SEQ ID NO: 2905; WAN024F5S_at; Start 1542; Stop 1566
tgacgagcaaggacgcaagatgtct

SEQ ID NO: 193455 - DNA, 25 bp, Artificial
  probe
  misc_feature (1)..(25): SEQ ID NO: 2905; WAN024F5S_at; Start 842; Stop 866
caaatgacttcttggttggccaacg

SEQ ID NO: 193456 - DNA, 25 bp, Artificial
  probe
  misc_feature (1)..(25): SEQ ID NO: 2905; WAN024F5S_at; Start 547; Stop 571
cgcacagccctttctgatattgagg

SEQ ID NO: 193457 - DNA, 25 bp, Artificial
  probe
  misc_feature (1)..(25): SEQ ID NO: 2905; WAN024F5S_at; Start 2289; Stop 2313
ggaagccttctttaacagcaatgtc

SEQ ID NO: 193458 - DNA, 25 bp, Artificial
  probe
  misc_feature (1)..(25): SEQ ID NO: 2905; WAN024F5S_at; Start 946; Stop 970
cgttttgaagctcgtaaggcagtcg

SEQ ID NO: 193459 - DNA, 25 bp, Artificial
  probe
  misc_feature (1)..(25): SEQ ID NO: 2905; WAN024F5S_at; Start 517; Stop 541
gagtttatcatcaactgggacccag

SEQ ID NO: 193460 - DNA, 25 bp, Artificial
  probe
  misc_feature (1)..(25): SEQ ID NO: 2905; WAN024F5S_at; Start 589; Stop 613
gaaggtgccttctaccacatgaatt

SEQ ID NO: 193461 - DNA, 25 bp, Artificial
  probe
  misc_feature (1)..(25): SEQ ID NO: 2905; WAN024F5S_at; Start 1818; Stop 1842
taatgtgacggaccgctggattctc

SEQ ID NO: 193462 - DNA, 25 bp, Artificial
  probe
  misc_feature (1)..(25): SEQ ID NO: 2905; WAN024F5S_at; Start 702; Stop 726
agaagacccgcgctacaaggacttg

SEQ ID NO: 193463 - DNA, 25 bp, Artificial
  probe
  misc_feature (1)..(25): SEQ ID NO: 2905; WAN024F5S_at; Start 2347; Stop 2371
ttggaaatcgcatcaaccatccctg

SEQ ID NO: 193464 - DNA, 25 bp, Artificial
  probe
  misc_feature (1)..(25): SEQ ID NO: 2905; WAN024F5S_at; Start 350; Stop 374
tctgggaatggaaagacgaatatgc

SEQ ID NO: 193465 - DNA, 25 bp, Artificial
  probe
  misc_feature (1)..(25): SEQ ID NO: 2905; WAN024F5S_at; Start 1188; Stop 1212
gatggaaaatgtccacgactgggtt

SEQ ID NO: 193466 - DNA, 25 bp, Artificial
  probe
  misc_feature (1)..(25): SEQ ID NO: 2905; WAN024F5S_at; Start 770; Stop 794
caatcgttggagatgagcacgcaga

SEQ ID NO: 193467 - DNA, 25 bp, Artificial
  probe
  misc_feature (1)..(25): SEQ ID NO: 2905; WAN024F5S_at; Start 2366; Stop 2390
tccctgcacctgaactggctatgtc

SEQ ID NO: 193468 - DNA, 25 bp, Artificial
  probe
  misc_feature (1)..(25): SEQ ID NO: 2905; WAN024F5S_at; Start 1769; Stop 1793
tggatgtggcgcatgacaatgtcac

SEQ ID NO: 193469 - DNA, 25 bp, Artificial
  probe
  misc_feature (1)..(25): SEQ ID NO: 2905; WAN024F5S_at; Start 1074; Stop 1098
tactcaatggttcgtcaagatggac

SEQ ID NO: 193470 - DNA, 25 bp, Artificial
  probe
  misc_feature (1)..(25): SEQ ID NO: 2905; WAN024F5S_at; Start 1376; Stop 1400
gctggcctgaagtcgactcagaaga

SEQ ID NO: 193471 - DNA, 25 bp, Artificial
  probe
  misc_feature (1)..(25): SEQ ID NO: 2905; WAN024F5S_at; Start 1361; Stop 1385
cattttcaaccatgggctggcctga

SEQ ID NO: 193472 - DNA, 25 bp, Artificial
  probe
  misc_feature (1)..(25): SEQ ID NO: 2905; WAN024F5S_at; Start 1438; Stop 1462
ggttacgacatcatcttcttctggg

SEQ ID NO: 193473 - DNA, 25 bp, Artificial
  probe
  misc_feature (1)..(25): SEQ ID NO: 2905; WAN024F5S_at; Start 43; Stop 67
gaggctggtcgttaccaaaaatggc

SEQ ID NO: 193474 - DNA, 25 bp, Artificial
  probe
  misc_feature (1)..(25): SEQ ID NO: 5413; WAN024F5T_at; Start 178; Stop 202
cataatttcaactacggcttcctta

SEQ ID NO: 193475 - DNA, 25 bp, Artificial
  probe
  misc_feature (1)..(25): SEQ ID NO: 5413; WAN024F5T_at; Start 144; Stop 168
aaagctcaccagtcttagaaattcc

SEQ ID NO: 193476 - DNA, 25 bp, Artificial
  probe
  misc_feature (1)..(25): SEQ ID NO: 5413; WAN024F5T_at; Start 69; Stop 93
gcccaattttttcatctttgtaaga

SEQ ID NO: 193477 - DNA, 25 bp, Artificial
  probe
  misc_feature (1)..(25): SEQ ID NO: 5413; WAN024F5T_at; Start 15; Stop 39
catcaaagatttctgggtgctctgc

SEQ ID NO: 193478 - DNA, 25 bp, Artificial
  probe
  misc_feature (1)..(25): SEQ ID NO: 5413; WAN024F5T_at; Start 294; Stop 318
tattaccacgaacatccaagcggac

SEQ ID NO: 193479 - DNA, 25 bp, Artificial
  probe
  misc_feature (1)..(25): SEQ ID NO: 5413; WAN024F5T_at; Start 85; Stop 109
tttgtaagaataccaagcccctgct

SEQ ID NO: 193480 - DNA, 25 bp, Artificial
  probe
  misc_feature (1)..(25): SEQ ID NO: 5413; WAN024F5T_at; Start 147; Stop 171
gctcaccagtcttagaaattccttc

SEQ ID NO: 193481 - DNA, 25 bp, Artificial
  probe
  misc_feature (1)..(25): SEQ ID NO: 5413; WAN024F5T_at; Start 115; Stop 139
gataatatccaaatcgcttgcaatc

SEQ ID NO: 193482 - DNA, 25 bp, Artificial
  probe
  misc_feature (1)..(25): SEQ ID NO: 5413; WAN024F5T_at; Start 297; Stop 321
taccacgaacatccaagcggactga

SEQ ID NO: 193483 - DNA, 25 bp, Artificial
  probe
  misc_feature (1)..(25): SEQ ID NO: 5413; WAN024F5T_at; Start 80; Stop 104
tcatctttgtaagaataccaagccc

SEQ ID NO: 193484 - DNA, 25 bp, Artificial
  probe
  misc_feature (1)..(25): SEQ ID NO: 5413; WAN024F5T_at; Start 176; Stop 200
tacataatttcaactacggcttcct

SEQ ID NO: 193485 - DNA, 25 bp, Artificial
  probe
  misc_feature (1)..(25): SEQ ID NO: 5413; WAN024F5T_at; Start 138; Stop 162
tcttcaaaagctcaccagtcttaga

SEQ ID NO: 193486 - DNA, 25 bp, Artificial
  probe
  misc_feature (1)..(25): SEQ ID NO: 5413; WAN024F5T_at; Start 95; Stop 119
taccaagcccctgcttttttgataa

SEQ ID NO: 193487 - DNA, 25 bp, Artificial
  probe
  misc_feature (1)..(25): SEQ ID NO: 5413; WAN024F5T_at; Start 30; Stop 54
ggtgctctgccaagtatttcttagc

SEQ ID NO: 193488 - DNA, 25 bp, Artificial
  probe
  misc_feature (1)..(25): SEQ ID NO: 5413; WAN024F5T_at; Start 236; Stop 260
atcttagtttctttaccgacattgg

SEQ ID NO: 193489 - DNA, 25 bp, Artificial
  probe
  misc_feature (1)..(25): SEQ ID NO: 5413; WAN024F5T_at; Start 22; Stop 46
gatttctgggtgctctgccaagtat

SEQ ID NO: 193490 - DNA, 25 bp, Artificial
  probe
  misc_feature (1)..(25): SEQ ID NO: 5413; WAN024F5T_at; Start 87; Stop 111
tgtaagaataccaagcccctgcttt

SEQ ID NO: 193491 - DNA, 25 bp, Artificial
  probe
  misc_feature (1)..(25): SEQ ID NO: 5413; WAN024F5T_at; Start 272; Stop 296
tcaccagttcccttaatttgtgtat

SEQ ID NO: 193492 - DNA, 25 bp, Artificial
  probe
  misc_feature (1)..(25): SEQ ID NO: 5413; WAN024F5T_at; Start 153; Stop 177
cagtcttagaaattccttctccgta

SEQ ID NO: 193493 - DNA, 25 bp, Artificial
  probe
  misc_feature (1)..(25): SEQ ID NO: 5413; WAN024F5T_at; Start 53; Stop 77
gcattctcagaaccttgcccaattt

SEQ ID NO: 193494 - DNA, 25 bp, Artificial
  probe
  misc_feature (1)..(25): SEQ ID NO: 5413; WAN024F5T_at; Start 38; Stop 62
gccaagtatttcttagcattctcag

SEQ ID NO: 193495 - DNA, 25 bp, Artificial
  probe
  misc_feature (1)..(25): SEQ ID NO: 5413; WAN024F5T_at; Start 133; Stop 157
tgcaatcttcaaaagctcaccagtc

SEQ ID NO: 193496 - DNA, 25 bp, Artificial
  probe
  misc_feature (1)..(25): SEQ ID NO: 5413; WAN024F5T_at; Start 83; Stop 107
tctttgtaagaataccaagcccctg

SEQ ID NO: 193497 - DNA, 25 bp, Artificial
  probe
  misc_feature (1)..(25): SEQ ID NO: 5413; WAN024F5T_at; Start 26; Stop 50
tctgggtgctctgccaagtatttct

SEQ ID NO: 193498 - DNA, 25 bp, Artificial
  probe
  misc_feature (1)..(25): SEQ ID NO: 5413; WAN024F5T_at; Start 19; Stop 43
aaagatttctgggtgctctgccaag

SEQ ID NO: 193499 - DNA, 25 bp, Artificial
  probe
  misc_feature (1)..(25): SEQ ID NO: 5413; WAN024F5T_at; Start 159; Stop 183
tagaaattccttctccgtacataat

SEQ ID NO: 193500 - DNA, 25 bp, Artificial
  probe
  misc_feature (1)..(25): SEQ ID NO: 5413; WAN024F5T_at; Start 280; Stop 304
tcccttaatttgtgtattaccacga

SEQ ID NO: 193501 - DNA, 25 bp, Artificial
  probe
  misc_feature (1)..(25): SEQ ID NO: 5413; WAN024F5T_at; Start 101; Stop 125
gcccctgcttttttgataatatcca

SEQ ID NO: 193502 - DNA, 25 bp, Artificial
  probe
  misc_feature (1)..(25): SEQ ID NO: 5413; WAN024F5T_at; Start 48; Stop 72
tcttagcattctcagaaccttgccc

SEQ ID NO: 193503 - DNA, 25 bp, Artificial
  probe
  misc_feature (1)..(25): SEQ ID NO: 5413; WAN024F5T_at; Start 166; Stop 190
tccttctccgtacataatttcaact

SEQ ID NO: 193504 - DNA, 25 bp, Artificial
  probe
  misc_feature (1)..(25): SEQ ID NO: 5413; WAN024F5T_at; Start 9; Stop 33
caatttcatcaaagatttctgggtg

SEQ ID NO: 193505 - DNA, 25 bp, Artificial
  probe
  misc_feature (1)..(25): SEQ ID NO: 5413; WAN024F5T_at; Start 60; Stop 84
cagaaccttgcccaattttttcatc

SEQ ID NO: 193506 - DNA, 25 bp, Artificial
  probe
  misc_feature (1)..(25): SEQ ID NO: 5413; WAN024F5T_at; Start 123; Stop 147
ccaaatcgcttgcaatcttcaaaag

SEQ ID NO: 193507 - DNA, 25 bp, Artificial
  probe
  misc_feature (1)..(25): SEQ ID NO: 5413; WAN024F5T_at; Start 292; Stop 316
tgtattaccacgaacatccaagcgg

SEQ ID NO: 193508 - DNA, 25 bp, Artificial
  probe
  misc_feature (1)..(25): SEQ ID NO: 5169; WAN024F5U_at; Start 139; Stop 163
gcaactgagtcgactacgacaagat

SEQ ID NO: 193509 - DNA, 25 bp, Artificial
  probe
  misc_feature (1)..(25): SEQ ID NO: 5169; WAN024F5U_at; Start 69; Stop 93
catacgagcctgcaaaccaacatgg

SEQ ID NO: 193510 - DNA, 25 bp, Artificial
  probe
  misc_feature (1)..(25): SEQ ID NO: 5169; WAN024F5U_at; Start 193; Stop 217
gcaatctcaagaccttgctctcctg

SEQ ID NO: 193511 - DNA, 25 bp, Artificial
  probe
  misc_feature (1)..(25): SEQ ID NO: 5169; WAN024F5U_at; Start 204; Stop 228
accttgctctcctgagtctggttga

SEQ ID NO: 193512 - DNA, 25 bp, Artificial
  probe
  misc_feature (1)..(25): SEQ ID NO: 5169; WAN024F5U_at; Start 102; Stop 126
gatatctccatcaatttccgcacga

SEQ ID NO: 193513 - DNA, 25 bp, Artificial
  probe
  misc_feature (1)..(25): SEQ ID NO: 5169; WAN024F5U_at; Start 80; Stop 104
gcaaaccaacatggctatctccgat

SEQ ID NO: 193514 - DNA, 25 bp, Artificial
  probe
  misc_feature (1)..(25): SEQ ID NO: 5169; WAN024F5U_at; Start 122; Stop 146
cacgaggaacaagggcagcaactga

SEQ ID NO: 193515 - DNA, 25 bp, Artificial
  probe
  misc_feature (1)..(25): SEQ ID NO: 5169; WAN024F5U_at; Start 50; Stop 74
tacgcatggcctggctcatcatacg

SEQ ID NO: 193516 - DNA, 25 bp, Artificial
  probe
  misc_feature (1)..(25): SEQ ID NO: 5169; WAN024F5U_at; Start 153; Stop 177
tacgacaagatcaactgcacctgag

SEQ ID NO: 193517 - DNA, 25 bp, Artificial
  probe
  misc_feature (1)..(25): SEQ ID NO: 5169; WAN024F5U_at; Start 45; Stop 69
aagtttacgcatggcctggctcatc

SEQ ID NO: 193518 - DNA, 25 bp, Artificial
  probe
  misc_feature (1)..(25): SEQ ID NO: 5169; WAN024F5U_at; Start 24; Stop 48
ggttttattgatagaggcgccaagt

SEQ ID NO: 193519 - DNA, 25 bp, Artificial
  probe
  misc_feature (1)..(25): SEQ ID NO: 5169; WAN024F5U_at; Start 161; Stop 185
gatcaactgcacctgagtcaatcaa

SEQ ID NO: 193520 - DNA, 25 bp, Artificial
  probe
  misc_feature (1)..(25): SEQ ID NO: 5169; WAN024F5U_at; Start 61; Stop 85
tggctcatcatacgagcctgcaaac

SEQ ID NO: 193521 - DNA, 25 bp, Artificial
  probe
  misc_feature (1)..(25): SEQ ID NO: 5169; WAN024F5U_at; Start 131; Stop 155
caagggcagcaactgagtcgactac

SEQ ID NO: 193522 - DNA, 25 bp, Artificial
  probe
  misc_feature (1)..(25): SEQ ID NO: 5169; WAN024F5U_at; Start 104; Stop 128
tatctccatcaatttccgcacgagg

SEQ ID NO: 193523 - DNA, 25 bp, Artificial
  probe
  misc_feature (1)..(25): SEQ ID NO: 5169; WAN024F5U_at; Start 112; Stop 136
tcaatttccgcacgaggaacaaggg

SEQ ID NO: 193524 - DNA, 25 bp, Artificial
  probe
  misc_feature (1)..(25): SEQ ID NO: 5169; WAN024F5U_at; Start 200; Stop 224
caagaccttgctctcctgagtctgg

SEQ ID NO: 193525 - DNA, 25 bp, Artificial
  probe
  misc_feature (1)..(25): SEQ ID NO: 5169; WAN024F5U_at; Start 147; Stop 171
gtcgactacgacaagatcaactgca

SEQ ID NO: 193526 - DNA, 25 bp, Artificial
  probe
  misc_feature (1)..(25): SEQ ID NO: 5169; WAN024F5U_at; Start 116; Stop 140
tttccgcacgaggaacaagggcagc

SEQ ID NO: 193527 - DNA, 25 bp, Artificial
  probe
  misc_feature (1)..(25): SEQ ID NO: 5169; WAN024F5U_at; Start 135; Stop 159
ggcagcaactgagtcgactacgaca

SEQ ID NO: 193528 - DNA, 25 bp, Artificial
  probe
  misc_feature (1)..(25): SEQ ID NO: 5169; WAN024F5U_at; Start 39; Stop 63
ggcgccaagtttacgcatggcctgg

SEQ ID NO: 193529 - DNA, 25 bp, Artificial
  probe
  misc_feature (1)..(25): SEQ ID NO: 5169; WAN024F5U_at; Start 87; Stop 111
aacatggctatctccgatatctcca

SEQ ID NO: 193530 - DNA, 25 bp, Artificial
  probe
  misc_feature (1)..(25): SEQ ID NO: 5169; WAN024F5U_at; Start 169; Stop 193
gcacctgagtcaatcaattttcccg

SEQ ID NO: 193531 - DNA, 25 bp, Artificial
  probe
  misc_feature (1)..(25): SEQ ID NO: 5169; WAN024F5U_at; Start 185; Stop 209
attttcccgcaatctcaagaccttg

SEQ ID NO: 193532 - DNA, 25 bp, Artificial
  probe
  misc_feature (1)..(25): SEQ ID NO: 5169; WAN024F5U_at; Start 32; Stop 56
tgatagaggcgccaagtttacgcat

SEQ ID NO: 193533 - DNA, 25 bp, Artificial
  probe
  misc_feature (1)..(25): SEQ ID NO: 5169; WAN024F5U_at; Start 35; Stop 59
tagaggcgccaagtttacgcatggc

SEQ ID NO: 193534 - DNA, 25 bp, Artificial
  probe
  misc_feature (1)..(25): SEQ ID NO: 5169; WAN024F5U_at; Start 53; Stop 77
gcatggcctggctcatcatacgagc

SEQ ID NO: 193535 - DNA, 25 bp, Artificial
  probe
  misc_feature (1)..(25): SEQ ID NO: 5169; WAN024F5U_at; Start 128; Stop 152
gaacaagggcagcaactgagtcgac

SEQ ID NO: 193536 - DNA, 25 bp, Artificial
  probe
  misc_feature (1)..(25): SEQ ID NO: 5169; WAN024F5U_at; Start 43; Stop 67
ccaagtttacgcatggcctggctca

SEQ ID NO: 193537 - DNA, 25 bp, Artificial
  probe
  misc_feature (1)..(25): SEQ ID NO: 5169; WAN024F5U_at; Start 73; Stop 97
cgagcctgcaaaccaacatggctat

SEQ ID NO: 193538 - DNA, 25 bp, Artificial
  probe
  misc_feature (1)..(25): SEQ ID NO: 5169; WAN024F5U_at; Start 175; Stop 199
gagtcaatcaattttcccgcaatct

SEQ ID NO: 193539 - DNA, 25 bp, Artificial
  probe
  misc_feature (1)..(25): SEQ ID NO: 5169; WAN024F5U_at; Start 158; Stop 182
caagatcaactgcacctgagtcaat

SEQ ID NO: 193540 - DNA, 25 bp, Artificial
  probe
  misc_feature (1)..(25): SEQ ID NO: 5169; WAN024F5U_at; Start 56; Stop 80
tggcctggctcatcatacgagcctg

SEQ ID NO: 193541 - DNA, 25 bp, Artificial
  probe
  misc_feature (1)..(25): SEQ ID NO: 5169; WAN024F5U_at; Start 20; Stop 44
ttttggttttattgatagaggcgcc

SEQ ID NO: 193542 - DNA, 25 bp, Artificial
  probe
  misc_feature (1)..(25): SEQ ID NO: 2833; WAN024F5V_at; Start 104; Stop 128
taagagcgtcattcaaggccttttc

SEQ ID NO: 193543 - DNA, 25 bp, Artificial
  probe
  misc_feature (1)..(25): SEQ ID NO: 2833; WAN024F5V_at; Start 2; Stop 26
tgtcaagagctaaagaacctgagct

SEQ ID NO: 193544 - DNA, 25 bp, Artificial
  probe
  misc_feature (1)..(25): SEQ ID NO: 2833; WAN024F5V_at; Start 12; Stop 36
taaagaacctgagctcatcacttgc

SEQ ID NO: 193545 - DNA, 25 bp, Artificial
  probe
  misc_feature (1)..(25): SEQ ID NO: 2833; WAN024F5V_at; Start 69; Stop 93
gattgatcctttaccaaagtctttc

SEQ ID NO: 193546 - DNA, 25 bp, Artificial
  probe
  misc_feature (1)..(25): SEQ ID NO: 2833; WAN024F5V_at; Start 14; Stop 38
aagaacctgagctcatcacttgcac

SEQ ID NO: 193547 - DNA, 25 bp, Artificial
  probe
  misc_feature (1)..(25): SEQ ID NO: 2833; WAN024F5V_at; Start 4; Stop 28
tcaagagctaaagaacctgagctca

SEQ ID NO: 193548 - DNA, 25 bp, Artificial
  probe
  misc_feature (1)..(25): SEQ ID NO: 2833; WAN024F5V_at; Start 115; Stop 139
ttcaaggccttttcacgttctgccc

SEQ ID NO: 193549 - DNA, 25 bp, Artificial
  probe
  misc_feature (1)..(25): SEQ ID NO: 2833; WAN024F5V_at; Start 63; Stop 87
acgcatgattgatcctttaccaaag

SEQ ID NO: 193550 - DNA, 25 bp, Artificial
  probe
  misc_feature (1)..(25): SEQ ID NO: 2833; WAN024F5V_at; Start 49; Stop 73
gcacgttcacccaaacgcatgattg

SEQ ID NO: 193551 - DNA, 25 bp, Artificial
  probe
  misc_feature (1)..(25): SEQ ID NO: 2833; WAN024F5V_at; Start 65; Stop 89
gcatgattgatcctttaccaaagtc

SEQ ID NO: 193552 - DNA, 25 bp, Artificial
  probe
  misc_feature (1)..(25): SEQ ID NO: 2833; WAN024F5V_at; Start 87; Stop 111
gtctttctcaatcaatttaagagcg

SEQ ID NO: 193553 - DNA, 25 bp, Artificial
  probe
  misc_feature (1)..(25): SEQ ID NO: 2833; WAN024F5V_at; Start 113; Stop 137
cattcaaggccttttcacgttctgc

SEQ ID NO: 193554 - DNA, 25 bp, Artificial
  probe
  misc_feature (1)..(25): SEQ ID NO: 2833; WAN024F5V_at; Start 207; Stop 231
gatcctcagacctatctactattat

SEQ ID NO: 193555 - DNA, 25 bp, Artificial
  probe
  misc_feature (1)..(25): SEQ ID NO: 2833; WAN024F5V_at; Start 203; Stop 227
taatgatcctcagacctatctacta

SEQ ID NO: 193556 - DNA, 25 bp, Artificial
  probe
  misc_feature (1)..(25): SEQ ID NO: 2833; WAN024F5V_at; Start 95; Stop 119
caatcaatttaagagcgtcattcaa

SEQ ID NO: 193557 - DNA, 25 bp, Artificial
  probe
  misc_feature (1)..(25): SEQ ID NO: 2833; WAN024F5V_at; Start 196; Stop 220
tacattctaatgatcctcagaccta

SEQ ID NO: 193558 - DNA, 25 bp, Artificial
  probe
  misc_feature (1)..(25): SEQ ID NO: 2833; WAN024F5V_at; Start 100; Stop 124
aatttaagagcgtcattcaaggcct

SEQ ID NO: 193559 - DNA, 25 bp, Artificial
  probe
  misc_feature (1)..(25): SEQ ID NO: 2833; WAN024F5V_at; Start 173; Stop 197
gttttttcgccattctattctccta

SEQ ID NO: 193560 - DNA, 25 bp, Artificial
  probe
  misc_feature (1)..(25): SEQ ID NO: 2833; WAN024F5V_at; Start 107; Stop 131
gagcgtcattcaaggccttttcacg

SEQ ID NO: 193561 - DNA, 25 bp, Artificial
  probe
  misc_feature (1)..(25): SEQ ID NO: 2833; WAN024F5V_at; Start 54; Stop 78
ttcacccaaacgcatgattgatcct

SEQ ID NO: 193562 - DNA, 25 bp, Artificial
  probe
  misc_feature (1)..(25): SEQ ID NO: 2833; WAN024F5V_at; Start 93; Stop 117
ctcaatcaatttaagagcgtcattc

SEQ ID NO: 193563 - DNA, 25 bp, Artificial
  probe
  misc_feature (1)..(25): SEQ ID NO: 2833; WAN024F5V_at; Start 99; Stop 123
caatttaagagcgtcattcaaggcc

SEQ ID NO: 193564 - DNA, 25 bp, Artificial
  probe
  misc_feature (1)..(25): SEQ ID NO: 2833; WAN024F5V_at; Start 56; Stop 80
cacccaaacgcatgattgatccttt

SEQ ID NO: 193565 - DNA, 25 bp, Artificial
  probe
  misc_feature (1)..(25): SEQ ID NO: 2833; WAN024F5V_at; Start 73; Stop 97
gatcctttaccaaagtctttctcaa

SEQ ID NO: 193566 - DNA, 25 bp, Artificial
  probe
  misc_feature (1)..(25): SEQ ID NO: 2833; WAN024F5V_at; Start 213; Stop 237
cagacctatctactattatatcaaa

SEQ ID NO: 193567 - DNA, 25 bp, Artificial
  probe
  misc_feature (1)..(25): SEQ ID NO: 2833; WAN024F5V_at; Start 33; Stop 57
ttgcaccttttgctccgcacgttca

SEQ ID NO: 193568 - DNA, 25 bp, Artificial
  probe
  misc_feature (1)..(25): SEQ ID NO: 2833; WAN024F5V_at; Start 8; Stop 32
gagctaaagaacctgagctcatcac

SEQ ID NO: 193569 - DNA, 25 bp, Artificial
  probe
  misc_feature (1)..(25): SEQ ID NO: 2833; WAN024F5V_at; Start 191; Stop 215
tctcctacattctaatgatcctcag

SEQ ID NO: 193570 - DNA, 25 bp, Artificial
  probe
  misc_feature (1)..(25): SEQ ID NO: 2833; WAN024F5V_at; Start 181; Stop 205
gccattctattctcctacattctaa

SEQ ID NO: 193571 - DNA, 25 bp, Artificial
  probe
  misc_feature (1)..(25): SEQ ID NO: 2833; WAN024F5V_at; Start 21; Stop 45
tgagctcatcacttgcaccttttgc

SEQ ID NO: 193572 - DNA, 25 bp, Artificial
  probe
  misc_feature (1)..(25): SEQ ID NO: 2833; WAN024F5V_at; Start 16; Stop 40
gaacctgagctcatcacttgcacct

SEQ ID NO: 193573 - DNA, 25 bp, Artificial
  probe
  misc_feature (1)..(25): SEQ ID NO: 2833; WAN024F5V_at; Start 52; Stop 76
cgttcacccaaacgcatgattgatc

SEQ ID NO: 193574 - DNA, 25 bp, Artificial
  probe
  misc_feature (1)..(25): SEQ ID NO: 2833; WAN024F5V_at; Start 60; Stop 84
caaacgcatgattgatcctttacca

SEQ ID NO: 193575 - DNA, 25 bp, Artificial
  probe
  misc_feature (1)..(25): SEQ ID NO: 2833; WAN024F5V_at; Start 31; Stop 55
acttgcaccttttgctccgcacgtt

SEQ ID NO: 193576 - DNA, 25 bp, Artificial
  probe
  misc_feature (1)..(25): SEQ ID NO: 2462; WAN024F5W_at; Start 476; Stop 500
ttgctgcccttgttcctcgtgcgga

SEQ ID NO: 193577 - DNA, 25 bp, Artificial
  probe
  misc_feature (1)..(25): SEQ ID NO: 2462; WAN024F5W_at; Start 205; Stop 229
tatcctaagggacgtatcatcgaaa

SEQ ID NO: 193578 - DNA, 25 bp, Artificial
  probe
  misc_feature (1)..(25): SEQ ID NO: 2462; WAN024F5W_at; Start 861; Stop 885
gactggtgagcttttgaagattgca

SEQ ID NO: 193579 - DNA, 25 bp, Artificial
  probe
  misc_feature (1)..(25): SEQ ID NO: 2462; WAN024F5W_at; Start 1086; Stop 1110
tgagccaaagaaagaagaagcagtg

SEQ ID NO: 193580 - DNA, 25 bp, Artificial
  probe
  misc_feature (1)..(25): SEQ ID NO: 2462; WAN024F5W_at; Start 129; Stop 153
tgaacgtgcggagcaaaaggtgcaa

SEQ ID NO: 193581 - DNA, 25 bp, Artificial
  probe
  misc_feature (1)..(25): SEQ ID NO: 2462; WAN024F5W_at; Start 492; Stop 516
tcgtgcggaaattgatggagatatc

SEQ ID NO: 193582 - DNA, 25 bp, Artificial
  probe
  misc_feature (1)..(25): SEQ ID NO: 2462; WAN024F5W_at; Start 447; Stop 471
tgcagttgatcttgtcgtagtcgac

SEQ ID NO: 193583 - DNA, 25 bp, Artificial
  probe
  misc_feature (1)..(25): SEQ ID NO: 2462; WAN024F5W_at; Start 187; Stop 211
gcccttggctcaggtggttatccta

SEQ ID NO: 193584 - DNA, 25 bp, Artificial
  probe
  misc_feature (1)..(25): SEQ ID NO: 2462; WAN024F5W_at; Start 142; Stop 166
caaaaggtgcaagtgatgagctcag

SEQ ID NO: 193585 - DNA, 25 bp, Artificial
  probe
  misc_feature (1)..(25): SEQ ID NO: 2462; WAN024F5W_at; Start 551; Stop 575
tgagccaggccatgcgtaaacttgg

SEQ ID NO: 193586 - DNA, 25 bp, Artificial
  probe
  misc_feature (1)..(25): SEQ ID NO: 2462; WAN024F5W_at; Start 686; Stop 710
aattctatgcttcagtccgcttgga

SEQ ID NO: 193587 - DNA, 25 bp, Artificial
  probe
  misc_feature (1)..(25): SEQ ID NO: 2462; WAN024F5W_at; Start 351; Stop 375
tgcggcccttggtgtcaatattgac

SEQ ID NO: 193588 - DNA, 25 bp, Artificial
  probe
  misc_feature (1)..(25): SEQ ID NO: 2462; WAN024F5W_at; Start 49; Stop 73
gcagaacgtgaaaaggccttgaatg

SEQ ID NO: 193589 - DNA, 25 bp, Artificial
  probe
  misc_feature (1)..(25): SEQ ID NO: 2462; WAN024F5W_at; Start 525; Stop 549
ccatgttggtttgcaggctcgtatg

SEQ ID NO: 193590 - DNA, 25 bp, Artificial
  probe
  misc_feature (1)..(25): SEQ ID NO: 2462; WAN024F5W_at; Start 390; Stop 414
tcaaccagactcaggagagcaaggt

SEQ ID NO: 193591 - DNA, 25 bp, Artificial
  probe
  misc_feature (1)..(25): SEQ ID NO: 2462; WAN024F5W_at; Start 319; Stop 343
gatgcggaacatgcccttgatccag

SEQ ID NO: 193592 - DNA, 25 bp, Artificial
  probe
  misc_feature (1)..(25): SEQ ID NO: 2462; WAN024F5W_at; Start 758; Stop 782
ccaatgtcggtaaagaaactaagat

SEQ ID NO: 193593 - DNA, 25 bp, Artificial
  probe
  misc_feature (1)..(25): SEQ ID NO: 2462; WAN024F5W_at; Start 261; Stop 285
ggttgcccttcatgcagttgcacaa

SEQ ID NO: 193594 - DNA, 25 bp, Artificial
  probe
  misc_feature (1)..(25): SEQ ID NO: 2462; WAN024F5W_at; Start 461; Stop 485
tcgtagtcgactcagttgctgccct

SEQ ID NO: 193595 - DNA, 25 bp, Artificial
  probe
  misc_feature (1)..(25): SEQ ID NO: 2462; WAN024F5W_at; Start 1011; Stop 1035
taagcaagtccgttctaaatttggc

SEQ ID NO: 193596 - DNA, 25 bp, Artificial
  probe
  misc_feature (1)..(25): SEQ ID NO: 2462; WAN024F5W_at; Start 244; Stop 268
tcatctggtaagacaacggttgccc

SEQ ID NO: 193597 - DNA, 25 bp, Artificial
  probe
  misc_feature (1)..(25): SEQ ID NO: 2462; WAN024F5W_at; Start 302; Stop 326
ggattgctgcctttatcgatgcgga

SEQ ID NO: 193598 - DNA, 25 bp, Artificial
  probe
  misc_feature (1)..(25): SEQ ID NO: 2462; WAN024F5W_at; Start 279; Stop 303
tgcacaagcgcaaaaagaaggtggg

SEQ ID NO: 193599 - DNA, 25 bp, Artificial
  probe
  misc_feature (1)..(25): SEQ ID NO: 2462; WAN024F5W_at; Start 337; Stop 361
gatccagcttatgctgcggcccttg

SEQ ID NO: 193600 - DNA, 25 bp, Artificial
  probe
  misc_feature (1)..(25): SEQ ID NO: 2462; WAN024F5W_at; Start 648; Stop 672
tggaaatccagaaacaacaccgggc

SEQ ID NO: 193601 - DNA, 25 bp, Artificial
  probe
  misc_feature (1)..(25): SEQ ID NO: 2462; WAN024F5W_at; Start 98; Stop 122
actttggtaaaggatcaatcatgcg

SEQ ID NO: 193602 - DNA, 25 bp, Artificial
  probe
  misc_feature (1)..(25): SEQ ID NO: 2462; WAN024F5W_at; Start 969; Stop 993
gaaatacttggcagagcacccagaa

SEQ ID NO: 193603 - DNA, 25 bp, Artificial
  probe
  misc_feature (1)..(25): SEQ ID NO: 2462; WAN024F5W_at; Start 667; Stop 691
ccgggcggacgtgctttgaaattct

SEQ ID NO: 193604 - DNA, 25 bp, Artificial
  probe
  misc_feature (1)..(25): SEQ ID NO: 2462; WAN024F5W_at; Start 1126; Stop 1150
cttgacttaggcgatgaacttgaaa

SEQ ID NO: 193605 - DNA, 25 bp, Artificial
  probe
  misc_feature (1)..(25): SEQ ID NO: 2462; WAN024F5W_at; Start 221; Stop 245
tcatcgaaatctatggcccagagtc

SEQ ID NO: 193606 - DNA, 25 bp, Artificial
  probe
  misc_feature (1)..(25): SEQ ID NO: 2462; WAN024F5W_at; Start 113; Stop 137
caatcatgcgtttgggtgaacgtgc

SEQ ID NO: 193607 - DNA, 25 bp, Artificial
  probe
  misc_feature (1)..(25): SEQ ID NO: 2462; WAN024F5W_at; Start 373; Stop 397
gacgaattgctcttgtctcaaccag

SEQ ID NO: 193608 - DNA, 25 bp, Artificial
  probe
  misc_feature (1)..(25): SEQ ID NO: 2462; WAN024F5W_at; Start 171; Stop 195
tttagctcttgacattgcccttggc

SEQ ID NO: 193609 - DNA, 25 bp, Artificial
  probe
  misc_feature (1)..(25): SEQ ID NO: 2462; WAN024F5W_at; Start 701; Stop 725
tccgcttggatgttcgtggtaatac

SEQ ID NO: 193610 - DNA, 25 bp, Artificial
  probe
  misc_feature (1)..(25): SEQ ID NO: 5527; WAN024F5X_at; Start 150; Stop 174
tcacagcaatcatcaagacaaccat

SEQ ID NO: 193611 - DNA, 25 bp, Artificial
  probe
  misc_feature (1)..(25): SEQ ID NO: 5527; WAN024F5X_at; Start 217; Stop 241
tttcaatggtttgcggcggatggct

SEQ ID NO: 193612 - DNA, 25 bp, Artificial
  probe
  misc_feature (1)..(25): SEQ ID NO: 5527; WAN024F5X_at; Start 33; Stop 57
catggctgataacttgagcatcgct

SEQ ID NO: 193613 - DNA, 25 bp, Artificial
  probe
  misc_feature (1)..(25): SEQ ID NO: 5527; WAN024F5X_at; Start 103; Stop 127
aatattcctcgattatctaaaaaag

SEQ ID NO: 193614 - DNA, 25 bp, Artificial
  probe
  misc_feature (1)..(25): SEQ ID NO: 5527; WAN024F5X_at; Start 138; Stop 162
tgtcattccaagtcacagcaatcat

SEQ ID NO: 193615 - DNA, 25 bp, Artificial
  probe
  misc_feature (1)..(25): SEQ ID NO: 5527; WAN024F5X_at; Start 77; Stop 101
gggataggcattttactttgtttca

SEQ ID NO: 193616 - DNA, 25 bp, Artificial
  probe
  misc_feature (1)..(25): SEQ ID NO: 5527; WAN024F5X_at; Start 1; Stop 25
ttggcgaacataaccagcacgcaac

SEQ ID NO: 193617 - DNA, 25 bp, Artificial
  probe
  misc_feature (1)..(25): SEQ ID NO: 5527; WAN024F5X_at; Start 37; Stop 61
gctgataacttgagcatcgcttggc

SEQ ID NO: 193618 - DNA, 25 bp, Artificial
  probe
  misc_feature (1)..(25): SEQ ID NO: 5527; WAN024F5X_at; Start 40; Stop 64
gataacttgagcatcgcttggcatt

SEQ ID NO: 193619 - DNA, 25 bp, Artificial
  probe
  misc_feature (1)..(25): SEQ ID NO: 5527; WAN024F5X_at; Start 27; Stop 51
taagagcatggctgataacttgagc

SEQ ID NO: 193620 - DNA, 25 bp, Artificial
  probe
  misc_feature (1)..(25): SEQ ID NO: 5527; WAN024F5X_at; Start 118; Stop 142
tctaaaaaagagtcgcataatgtca

SEQ ID NO: 193621 - DNA, 25 bp, Artificial
  probe
  misc_feature (1)..(25): SEQ ID NO: 5527; WAN024F5X_at; Start 64; Stop 88
ttcgcgaagcgttgggataggcatt

SEQ ID NO: 193622 - DNA, 25 bp, Artificial
  probe
  misc_feature (1)..(25): SEQ ID NO: 5527; WAN024F5X_at; Start 47; Stop 71
tgagcatcgcttggcatttcgcgaa

SEQ ID NO: 193623 - DNA, 25 bp, Artificial
  probe
  misc_feature (1)..(25): SEQ ID NO: 5527; WAN024F5X_at; Start 143; Stop 167
ttccaagtcacagcaatcatcaaga

SEQ ID NO: 193624 - DNA, 25 bp, Artificial
  probe
  misc_feature (1)..(25): SEQ ID NO: 5527; WAN024F5X_at; Start 123; Stop 147
aaaagagtcgcataatgtcattcca

SEQ ID NO: 193625 - DNA, 25 bp, Artificial
  probe
  misc_feature (1)..(25): SEQ ID NO: 5527; WAN024F5X_at; Start 57; Stop 81
ttggcatttcgcgaagcgttgggat

SEQ ID NO: 193626 - DNA, 25 bp, Artificial
  probe
  misc_feature (1)..(25): SEQ ID NO: 5527; WAN024F5X_at; Start 6; Stop 30
gaacataaccagcacgcaacataag

SEQ ID NO: 193627 - DNA, 25 bp, Artificial
  probe
  misc_feature (1)..(25): SEQ ID NO: 5527; WAN024F5X_at; Start 198; Stop 222
cataggtttcaatttcttgtttcaa

SEQ ID NO: 193628 - DNA, 25 bp, Artificial
  probe
  misc_feature (1)..(25): SEQ ID NO: 5527; WAN024F5X_at; Start 133; Stop 157
cataatgtcattccaagtcacagca

SEQ ID NO: 193629 - DNA, 25 bp, Artificial
  probe
  misc_feature (1)..(25): SEQ ID NO: 5527; WAN024F5X_at; Start 68; Stop 92
cgaagcgttgggataggcattttac

SEQ ID NO: 193630 - DNA, 25 bp, Artificial
  probe
  misc_feature (1)..(25): SEQ ID NO: 5527; WAN024F5X_at; Start 164; Stop 188
aagacaaccatgatgaccactccgg

SEQ ID NO: 193631 - DNA, 25 bp, Artificial
  probe
  misc_feature (1)..(25): SEQ ID NO: 5527; WAN024F5X_at; Start 22; Stop 46
caacataagagcatggctgataact

SEQ ID NO: 193632 - DNA, 25 bp, Artificial
  probe
  misc_feature (1)..(25): SEQ ID NO: 5527; WAN024F5X_at; Start 220; Stop 244
caatggtttgcggcggatggcttct

SEQ ID NO: 193633 - DNA, 25 bp, Artificial
  probe
  misc_feature (1)..(25): SEQ ID NO: 5527; WAN024F5X_at; Start 185; Stop 209
ccggccaaggtgacataggtttcaa

SEQ ID NO: 193634 - DNA, 25 bp, Artificial
  probe
  misc_feature (1)..(25): SEQ ID NO: 5527; WAN024F5X_at; Start 190; Stop 214
caaggtgacataggtttcaatttct

SEQ ID NO: 193635 - DNA, 25 bp, Artificial
  probe
  misc_feature (1)..(25): SEQ ID NO: 5527; WAN024F5X_at; Start 18; Stop 42
cacgcaacataagagcatggctgat

SEQ ID NO: 193636 - DNA, 25 bp, Artificial
  probe
  misc_feature (1)..(25): SEQ ID NO: 5527; WAN024F5X_at; Start 90; Stop 114
tactttgtttcataatattcctcga

SEQ ID NO: 193637 - DNA, 25 bp, Artificial
  probe
  misc_feature (1)..(25): SEQ ID NO: 5527; WAN024F5X_at; Start 173; Stop 197
atgatgaccactccggccaaggtga

SEQ ID NO: 193638 - DNA, 25 bp, Artificial
  probe
  misc_feature (1)..(25): SEQ ID NO: 5527; WAN024F5X_at; Start 50; Stop 74
gcatcgcttggcatttcgcgaagcg

SEQ ID NO: 193639 - DNA, 25 bp, Artificial
  probe
  misc_feature (1)..(25): SEQ ID NO: 5527; WAN024F5X_at; Start 181; Stop 205
cactccggccaaggtgacataggtt

SEQ ID NO: 193640 - DNA, 25 bp, Artificial
  probe
  misc_feature (1)..(25): SEQ ID NO: 5527; WAN024F5X_at; Start 212; Stop 236
tcttgtttcaatggtttgcggcgga

SEQ ID NO: 193641 - DNA, 25 bp, Artificial
  probe
  misc_feature (1)..(25): SEQ ID NO: 5527; WAN024F5X_at; Start 14; Stop 38
ccagcacgcaacataagagcatggc

SEQ ID NO: 193642 - DNA, 25 bp, Artificial
  probe
  misc_feature (1)..(25): SEQ ID NO: 5527; WAN024F5X_at; Start 127; Stop 151
gagtcgcataatgtcattccaagtc

SEQ ID NO: 193643 - DNA, 25 bp, Artificial
  probe
  misc_feature (1)..(25): SEQ ID NO: 5527; WAN024F5X_at; Start 11; Stop 35
taaccagcacgcaacataagagcat

SEQ ID NO: 193644 - DNA, 25 bp, Artificial
  probe
  misc_feature (1)..(25): SEQ ID NO: 1034; WAN024F5Y_at; Start 162; Stop 186
cagctcccatcaagcttgcttcaag

SEQ ID NO: 193645 - DNA, 25 bp, Artificial
  probe
  misc_feature (1)..(25): SEQ ID NO: 1034; WAN024F5Y_at; Start 274; Stop 298
gattccccaagcgtaacggtattca

SEQ ID NO: 193646 - DNA, 25 bp, Artificial
  probe
  misc_feature (1)..(25): SEQ ID NO: 1034; WAN024F5Y_at; Start 231; Stop 255
taatcaaatgcacatcaaatggtgc

SEQ ID NO: 193647 - DNA, 25 bp, Artificial
  probe
  misc_feature (1)..(25): SEQ ID NO: 1034; WAN024F5Y_at; Start 70; Stop 94
aacagtgatacggattggaagacca

SEQ ID NO: 193648 - DNA, 25 bp, Artificial
  probe
  misc_feature (1)..(25): SEQ ID NO: 1034; WAN024F5Y_at; Start 59; Stop 83
gcttttttaccaacagtgatacgga

SEQ ID NO: 193649 - DNA, 25 bp, Artificial
  probe
  misc_feature (1)..(25): SEQ ID NO: 1034; WAN024F5Y_at; Start 133; Stop 157
gttacggtcatctgtcaagacttca

SEQ ID NO: 193650 - DNA, 25 bp, Artificial
  probe
  misc_feature (1)..(25): SEQ ID NO: 1034; WAN024F5Y_at; Start 264; Stop 288
tagggaaattgattccccaagcgta

SEQ ID NO: 193651 - DNA, 25 bp, Artificial
  probe
  misc_feature (1)..(25): SEQ ID NO: 1034; WAN024F5Y_at; Start 10; Stop 34
aatggtgtcaccagttgccttgatc

SEQ ID NO: 193652 - DNA, 25 bp, Artificial
  probe
  misc_feature (1)..(25): SEQ ID NO: 1034; WAN024F5Y_at; Start 53; Stop 77
tcggccgcttttttaccaacagtga

SEQ ID NO: 193653 - DNA, 25 bp, Artificial
  probe
  misc_feature (1)..(25): SEQ ID NO: 1034; WAN024F5Y_at; Start 48; Stop 72
tgccatcggccgcttttttaccaac

SEQ ID NO: 193654 - DNA, 25 bp, Artificial
  probe
  misc_feature (1)..(25): SEQ ID NO: 1034; WAN024F5Y_at; Start 155; Stop 179
tcataaccagctcccatcaagcttg

SEQ ID NO: 193655 - DNA, 25 bp, Artificial
  probe
  misc_feature (1)..(25): SEQ ID NO: 1034; WAN024F5Y_at; Start 327; Stop 351
gagcgtgttgctccatcactgctga

SEQ ID NO: 193656 - DNA, 25 bp, Artificial
  probe
  misc_feature (1)..(25): SEQ ID NO: 1034; WAN024F5Y_at; Start 36; Stop 60
taacttctacaatgccatcggccgc

SEQ ID NO: 193657 - DNA, 25 bp, Artificial
  probe
  misc_feature (1)..(25): SEQ ID NO: 1034; WAN024F5Y_at; Start 145; Stop 169
tgtcaagacttcataaccagctccc

SEQ ID NO: 193658 - DNA, 25 bp, Artificial
  probe
  misc_feature (1)..(25): SEQ ID NO: 1034; WAN024F5Y_at; Start 315; Stop 339
taacaaagaggcgagcgtgttgctc

SEQ ID NO: 193659 - DNA, 25 bp, Artificial
  probe
  misc_feature (1)..(25): SEQ ID NO: 1034; WAN024F5Y_at; Start 281; Stop 305
caagcgtaacggtattcaccttttg

SEQ ID NO: 193660 - DNA, 25 bp, Artificial
  probe
  misc_feature (1)..(25): SEQ ID NO: 1034; WAN024F5Y_at; Start 128; Stop 152
cgttcgttacggtcatctgtcaaga

SEQ ID NO: 193661 - DNA, 25 bp, Artificial
  probe
  misc_feature (1)..(25): SEQ ID NO: 1034; WAN024F5Y_at; Start 120; Stop 144
caccgacacgttcgttacggtcatc

SEQ ID NO: 193662 - DNA, 25 bp, Artificial
  probe
  misc_feature (1)..(25): SEQ ID NO: 1034; WAN024F5Y_at; Start 21; Stop 45
cagttgccttgatcttaacttctac

SEQ ID NO: 193663 - DNA, 25 bp, Artificial
  probe
  misc_feature (1)..(25): SEQ ID NO: 1034; WAN024F5Y_at; Start 14; Stop 38
gtgtcaccagttgccttgatcttaa

SEQ ID NO: 193664 - DNA, 25 bp, Artificial
  probe
  misc_feature (1)..(25): SEQ ID NO: 1034; WAN024F5Y_at; Start 320; Stop 344
aagaggcgagcgtgttgctccatca

SEQ ID NO: 193665 - DNA, 25 bp, Artificial
  probe
  misc_feature (1)..(25): SEQ ID NO: 1034; WAN024F5Y_at; Start 246; Stop 270
caaatggtgccaattctttagggaa

SEQ ID NO: 193666 - DNA, 25 bp, Artificial
  probe
  misc_feature (1)..(25): SEQ ID NO: 1034; WAN024F5Y_at; Start 209; Stop 233
tcttcatccttgacattgacagtaa

SEQ ID NO: 193667 - DNA, 25 bp, Artificial
  probe
  misc_feature (1)..(25): SEQ ID NO: 1034; WAN024F5Y_at; Start 220; Stop 244
gacattgacagtaatcaaatgcaca

SEQ ID NO: 193668 - DNA, 25 bp, Artificial
  probe
  misc_feature (1)..(25): SEQ ID NO: 1034; WAN024F5Y_at; Start 33; Stop 57
tcttaacttctacaatgccatcggc

SEQ ID NO: 193669 - DNA, 25 bp, Artificial
  probe
  misc_feature (1)..(25): SEQ ID NO: 1034; WAN024F5Y_at; Start 251; Stop 275
ggtgccaattctttagggaaattga

SEQ ID NO: 193670 - DNA, 25 bp, Artificial
  probe
  misc_feature (1)..(25): SEQ ID NO: 1034; WAN024F5Y_at; Start 2; Stop 26
tgaacctcaatggtgtcaccagttg

SEQ ID NO: 193671 - DNA, 25 bp, Artificial
  probe
  misc_feature (1)..(25): SEQ ID NO: 1034; WAN024F5Y_at; Start 105; Stop 129
tatcgctaaatttaacaccgacacg

SEQ ID NO: 193672 - DNA, 25 bp, Artificial
  probe
  misc_feature (1)..(25): SEQ ID NO: 1034; WAN024F5Y_at; Start 309; Stop 333
ttttgttaacaaagaggcgagcgtg

SEQ ID NO: 193673 - DNA, 25 bp, Artificial
  probe
  misc_feature (1)..(25): SEQ ID NO: 1034; WAN024F5Y_at; Start 199; Stop 223
ggcttgcgcttcttcatccttgaca

SEQ ID NO: 193674 - DNA, 25 bp, Artificial
  probe
  misc_feature (1)..(25): SEQ ID NO: 1034; WAN024F5Y_at; Start 190; Stop 214
ttctgtcaaggcttgcgcttcttca

SEQ ID NO: 193675 - DNA, 25 bp, Artificial
  probe
  misc_feature (1)..(25): SEQ ID NO: 1034; WAN024F5Y_at; Start 85; Stop 109
tggaagaccaatcaagtcactatcg

SEQ ID NO: 193676 - DNA, 25 bp, Artificial
  probe
  misc_feature (1)..(25): SEQ ID NO: 1034; WAN024F5Y_at; Start 177; Stop 201
ttgcttcaagtttttctgtcaaggc

SEQ ID NO: 193677 - DNA, 25 bp, Artificial
  probe
  misc_feature (1)..(25): SEQ ID NO: 1034; WAN024F5Y_at; Start 100; Stop 124
gtcactatcgctaaatttaacaccg

SEQ ID NO: 193678 - DNA, 25 bp, Artificial
  probe
  misc_feature (1)..(25): SEQ ID NO: 2645; WAN024F5Z_at; Start 97; Stop 121
tccaagacaacccagcggtcaaggt

SEQ ID NO: 193679 - DNA, 25 bp, Artificial
  probe
  misc_feature (1)..(25): SEQ ID NO: 2645; WAN024F5Z_at; Start 173; Stop 197
tggctccaccgtcaccaataatagc

SEQ ID NO: 193680 - DNA, 25 bp, Artificial
  probe
  misc_feature (1)..(25): SEQ ID NO: 2645; WAN024F5Z_at; Start 24; Stop 48
ccatttgagcaattctgccttgatt

SEQ ID NO: 193681 - DNA, 25 bp, Artificial
  probe
  misc_feature (1)..(25): SEQ ID NO: 2645; WAN024F5Z_at; Start 201; Stop 225
gaagtctaaaccactacgagtgaaa

SEQ ID NO: 193682 - DNA, 25 bp, Artificial
  probe
  misc_feature (1)..(25): SEQ ID NO: 2645; WAN024F5Z_at; Start 102; Stop 126
gacaacccagcggtcaaggtctgta

SEQ ID NO: 193683 - DNA, 25 bp, Artificial
  probe
  misc_feature (1)..(25): SEQ ID NO: 2645; WAN024F5Z_at; Start 108; Stop 132
ccagcggtcaaggtctgtacgagca

SEQ ID NO: 193684 - DNA, 25 bp, Artificial
  probe
  misc_feature (1)..(25): SEQ ID NO: 2645; WAN024F5Z_at; Start 198; Stop 222
cttgaagtctaaaccactacgagtg

SEQ ID NO: 193685 - DNA, 25 bp, Artificial
  probe
  misc_feature (1)..(25): SEQ ID NO: 2645; WAN024F5Z_at; Start 21; Stop 45
tatccatttgagcaattctgccttg

SEQ ID NO: 193686 - DNA, 25 bp, Artificial
  probe
  misc_feature (1)..(25): SEQ ID NO: 2645; WAN024F5Z_at; Start 125; Stop 149
tacgagcagatgtaatggccataaa

SEQ ID NO: 193687 - DNA, 25 bp, Artificial
  probe
  misc_feature (1)..(25): SEQ ID NO: 2645; WAN024F5Z_at; Start 3; Stop 27
ggtatcttcaccagagactatccat

SEQ ID NO: 193688 - DNA, 25 bp, Artificial
  probe
  misc_feature (1)..(25): SEQ ID NO: 2645; WAN024F5Z_at; Start 207; Stop 231
taaaccactacgagtgaaaatacgc

SEQ ID NO: 193689 - DNA, 25 bp, Artificial
  probe
  misc_feature (1)..(25): SEQ ID NO: 2645; WAN024F5Z_at; Start 153; Stop 177
ttggctatccttaccacccatggct

SEQ ID NO: 193690 - DNA, 25 bp, Artificial
  probe
  misc_feature (1)..(25): SEQ ID NO: 2645; WAN024F5Z_at; Start 30; Stop 54
gagcaattctgccttgatttcttct

SEQ ID NO: 193691 - DNA, 25 bp, Artificial
  probe
  misc_feature (1)..(25): SEQ ID NO: 2645; WAN024F5Z_at; Start 86; Stop 110
caactgacttgtccaagacaaccca

SEQ ID NO: 193692 - DNA, 25 bp, Artificial
  probe
  misc_feature (1)..(25): SEQ ID NO: 2645; WAN024F5Z_at; Start 213; Stop 237
actacgagtgaaaatacgctcatag

SEQ ID NO: 193693 - DNA, 25 bp, Artificial
  probe
  misc_feature (1)..(25): SEQ ID NO: 2645; WAN024F5Z_at; Start 112; Stop 136
cggtcaaggtctgtacgagcagatg

SEQ ID NO: 193694 - DNA, 25 bp, Artificial
  probe
  misc_feature (1)..(25): SEQ ID NO: 2645; WAN024F5Z_at; Start 34; Stop 58
aattctgccttgatttcttcttgca

SEQ ID NO: 193695 - DNA, 25 bp, Artificial
  probe
  misc_feature (1)..(25): SEQ ID NO: 2645; WAN024F5Z_at; Start 146; Stop 170
taaattcttggctatccttaccacc

SEQ ID NO: 193696 - DNA, 25 bp, Artificial
  probe
  misc_feature (1)..(25): SEQ ID NO: 2645; WAN024F5Z_at; Start 105; Stop 129
aacccagcggtcaaggtctgtacga

SEQ ID NO: 193697 - DNA, 25 bp, Artificial
  probe
  misc_feature (1)..(25): SEQ ID NO: 2645; WAN024F5Z_at; Start 116; Stop 140
caaggtctgtacgagcagatgtaat

SEQ ID NO: 193698 - DNA, 25 bp, Artificial
  probe
  misc_feature (1)..(25): SEQ ID NO: 2645; WAN024F5Z_at; Start 128; Stop 152
gagcagatgtaatggccataaattc

SEQ ID NO: 193699 - DNA, 25 bp, Artificial
  probe
  misc_feature (1)..(25): SEQ ID NO: 2645; WAN024F5Z_at; Start 194; Stop 218
tagccttgaagtctaaaccactacg

SEQ ID NO: 193700 - DNA, 25 bp, Artificial
  probe
  misc_feature (1)..(25): SEQ ID NO: 2645; WAN024F5Z_at; Start 18; Stop 42
gactatccatttgagcaattctgcc

SEQ ID NO: 193701 - DNA, 25 bp, Artificial
  probe
  misc_feature (1)..(25): SEQ ID NO: 2645; WAN024F5Z_at; Start 11; Stop 35
caccagagactatccatttgagcaa

SEQ ID NO: 193702 - DNA, 25 bp, Artificial
  probe
  misc_feature (1)..(25): SEQ ID NO: 2645; WAN024F5Z_at; Start 39; Stop 63
tgccttgatttcttcttgcacttct

SEQ ID NO: 193703 - DNA, 25 bp, Artificial
  probe
  misc_feature (1)..(25): SEQ ID NO: 2645; WAN024F5Z_at; Start 138; Stop 162
aatggccataaattcttggctatcc

SEQ ID NO: 193704 - DNA, 25 bp, Artificial
  probe
  misc_feature (1)..(25): SEQ ID NO: 2645; WAN024F5Z_at; Start 94; Stop 118
ttgtccaagacaacccagcggtcaa

SEQ ID NO: 193705 - DNA, 25 bp, Artificial
  probe
  misc_feature (1)..(25): SEQ ID NO: 2645; WAN024F5Z_at; Start 181; Stop 205
ccgtcaccaataatagccttgaagt

SEQ ID NO: 193706 - DNA, 25 bp, Artificial
  probe
  misc_feature (1)..(25): SEQ ID NO: 2645; WAN024F5Z_at; Start 90; Stop 114
tgacttgtccaagacaacccagcgg

SEQ ID NO: 193707 - DNA, 25 bp, Artificial
  probe
  misc_feature (1)..(25): SEQ ID NO: 2645; WAN024F5Z_at; Start 133; Stop 157
gatgtaatggccataaattcttggc

SEQ ID NO: 193708 - DNA, 25 bp, Artificial
  probe
  misc_feature (1)..(25): SEQ ID NO: 2645; WAN024F5Z_at; Start 177; Stop 201
tccaccgtcaccaataatagccttg

SEQ ID NO: 193709 - DNA, 25 bp, Artificial
  probe
  misc_feature (1)..(25): SEQ ID NO: 2645; WAN024F5Z_at; Start 210; Stop 234
accactacgagtgaaaatacgctca

SEQ ID NO: 193710 - DNA, 25 bp, Artificial
  probe
  misc_feature (1)..(25): SEQ ID NO: 2645; WAN024F5Z_at; Start 121; Stop 145
tctgtacgagcagatgtaatggcca

SEQ ID NO: 193711 - DNA, 25 bp, Artificial
  probe
  misc_feature (1)..(25): SEQ ID NO: 2645; WAN024F5Z_at; Start 188; Stop 212
caataatagccttgaagtctaaacc

SEQ ID NO: 193712 - DNA, 25 bp, Artificial
  probe
  misc_feature (1)..(25): SEQ ID NO: 2514; WAN024F62_at; Start 152; Stop 176
tagcaacaggtccacccaacttgtt

SEQ ID NO: 193713 - DNA, 25 bp, Artificial
  probe
  misc_feature (1)..(25): SEQ ID NO: 2514; WAN024F62_at; Start 203; Stop 227
tcagagctgagagaattcggagagc

SEQ ID NO: 193714 - DNA, 25 bp, Artificial
  probe
  misc_feature (1)..(25): SEQ ID NO: 2514; WAN024F62_at; Start 12; Stop 36
gatattgagcacaatcttaccacca

SEQ ID NO: 193715 - DNA, 25 bp, Artificial
  probe
  misc_feature (1)..(25): SEQ ID NO: 2514; WAN024F62_at; Start 228; Stop 252
tgagtcagcagcagttgtaaaacca

SEQ ID NO: 193716 - DNA, 25 bp, Artificial
  probe
  misc_feature (1)..(25): SEQ ID NO: 2514; WAN024F62_at; Start 127; Stop 151
gcagcatcactacttgccttaaaga

SEQ ID NO: 193717 - DNA, 25 bp, Artificial
  probe
  misc_feature (1)..(25): SEQ ID NO: 2514; WAN024F62_at; Start 18; Stop 42
gagcacaatcttaccaccatccaag

SEQ ID NO: 193718 - DNA, 25 bp, Artificial
  probe
  misc_feature (1)..(25): SEQ ID NO: 2514; WAN024F62_at; Start 235; Stop 259
gcagcagttgtaaaaccacctacaa

SEQ ID NO: 193719 - DNA, 25 bp, Artificial
  probe
  misc_feature (1)..(25): SEQ ID NO: 2514; WAN024F62_at; Start 119; Stop 143
catttttagcagcatcactacttgc

SEQ ID NO: 193720 - DNA, 25 bp, Artificial
  probe
  misc_feature (1)..(25): SEQ ID NO: 2514; WAN024F62_at; Start 82; Stop 106
gaaatcattgccaagaagtacaaga

SEQ ID NO: 193721 - DNA, 25 bp, Artificial
  probe
  misc_feature (1)..(25): SEQ ID NO: 2514; WAN024F62_at; Start 130; Stop 154
gcatcactacttgccttaaagatag

SEQ ID NO: 193722 - DNA, 25 bp, Artificial
  probe
  misc_feature (1)..(25): SEQ ID NO: 2514; WAN024F62_at; Start 23; Stop 47
caatcttaccaccatccaaggctgg

SEQ ID NO: 193723 - DNA, 25 bp, Artificial
  probe
  misc_feature (1)..(25): SEQ ID NO: 2514; WAN024F62_at; Start 146; Stop 170
taaagatagcaacaggtccacccaa

SEQ ID NO: 193724 - DNA, 25 bp, Artificial
  probe
  misc_feature (1)..(25): SEQ ID NO: 2514; WAN024F62_at; Start 78; Stop 102
gatggaaatcattgccaagaagtac

SEQ ID NO: 193725 - DNA, 25 bp, Artificial
  probe
  misc_feature (1)..(25): SEQ ID NO: 2514; WAN024F62_at; Start 59; Stop 83
gattaaaaatcccaatattgatgga

SEQ ID NO: 193726 - DNA, 25 bp, Artificial
  probe
  misc_feature (1)..(25): SEQ ID NO: 2514; WAN024F62_at; Start 263; Stop 287
tggatagaaaatctgacttaacccc

SEQ ID NO: 193727 - DNA, 25 bp, Artificial
  probe
  misc_feature (1)..(25): SEQ ID NO: 2514; WAN024F62_at; Start 243; Stop 267
tgtaaaaccacctacaaacatggat

SEQ ID NO: 193728 - DNA, 25 bp, Artificial
  probe
  misc_feature (1)..(25): SEQ ID NO: 2514; WAN024F62_at; Start 200; Stop 224
ttttcagagctgagagaattcggag

SEQ ID NO: 193729 - DNA, 25 bp, Artificial
  probe
  misc_feature (1)..(25): SEQ ID NO: 2514; WAN024F62_at; Start 213; Stop 237
gagaattcggagagctgagtcagca

SEQ ID NO: 193730 - DNA, 25 bp, Artificial
  probe
  misc_feature (1)..(25): SEQ ID NO: 2514; WAN024F62_at; Start 189; Stop 213
gaaaatcagatttttcagagctgag

SEQ ID NO: 193731 - DNA, 25 bp, Artificial
  probe
  misc_feature (1)..(25): SEQ ID NO: 2514; WAN024F62_at; Start 142; Stop 166
gccttaaagatagcaacaggtccac

SEQ ID NO: 193732 - DNA, 25 bp, Artificial
  probe
  misc_feature (1)..(25): SEQ ID NO: 2514; WAN024F62_at; Start 43; Stop 67
gctggaatcggaataagattaaaaa

SEQ ID NO: 193733 - DNA, 25 bp, Artificial
  probe
  misc_feature (1)..(25): SEQ ID NO: 2514; WAN024F62_at; Start 224; Stop 248
gagctgagtcagcagcagttgtaaa

SEQ ID NO: 193734 - DNA, 25 bp, Artificial
  probe
  misc_feature (1)..(25): SEQ ID NO: 2514; WAN024F62_at; Start 35; Stop 59
catccaaggctggaatcggaataag

SEQ ID NO: 193735 - DNA, 25 bp, Artificial
  probe
  misc_feature (1)..(25): SEQ ID NO: 2514; WAN024F62_at; Start 38; Stop 62
ccaaggctggaatcggaataagatt

SEQ ID NO: 193736 - DNA, 25 bp, Artificial
  probe
  misc_feature (1)..(25): SEQ ID NO: 2514; WAN024F62_at; Start 219; Stop 243
tcggagagctgagtcagcagcagtt

SEQ ID NO: 193737 - DNA, 25 bp, Artificial
  probe
  misc_feature (1)..(25): SEQ ID NO: 2514; WAN024F62_at; Start 137; Stop 161
tacttgccttaaagatagcaacagg

SEQ ID NO: 193738 - DNA, 25 bp, Artificial
  probe
  misc_feature (1)..(25): SEQ ID NO: 2514; WAN024F62_at; Start 150; Stop 174
gatagcaacaggtccacccaacttg

SEQ ID NO: 193739 - DNA, 25 bp, Artificial
  probe
  misc_feature (1)..(25): SEQ ID NO: 2514; WAN024F62_at; Start 253; Stop 277
cctacaaacatggatagaaaatctg

SEQ ID NO: 193740 - DNA, 25 bp, Artificial
  probe
  misc_feature (1)..(25): SEQ ID NO: 2514; WAN024F62_at; Start 69; Stop 93
cccaatattgatggaaatcattgcc

SEQ ID NO: 193741 - DNA, 25 bp, Artificial
  probe
  misc_feature (1)..(25): SEQ ID NO: 2514; WAN024F62_at; Start 158; Stop 182
caggtccacccaacttgttcaaatc

SEQ ID NO: 193742 - DNA, 25 bp, Artificial
  probe
  misc_feature (1)..(25): SEQ ID NO: 2514; WAN024F62_at; Start 29; Stop 53
taccaccatccaaggctggaatcgg

SEQ ID NO: 193743 - DNA, 25 bp, Artificial
  probe
  misc_feature (1)..(25): SEQ ID NO: 2514; WAN024F62_at; Start 216; Stop 240
aattcggagagctgagtcagcagca

SEQ ID NO: 193744 - DNA, 25 bp, Artificial
  probe
  misc_feature (1)..(25): SEQ ID NO: 2514; WAN024F62_at; Start 3; Stop 27
ggcttctaggatattgagcacaatc

SEQ ID NO: 193745 - DNA, 25 bp, Artificial
  probe
  misc_feature (1)..(25): SEQ ID NO: 2514; WAN024F62_at; Start 112; Stop 136
tcaattccatttttagcagcatcac

SEQ ID NO: 193746 - DNA, 25 bp, Artificial
  probe
  misc_feature (1)..(25): SEQ ID NO: 1411; WAN024F63_at; Start 28; Stop 52
gttaaggacaccttgtccatctggg

SEQ ID NO: 193747 - DNA, 25 bp, Artificial
  probe
  misc_feature (1)..(25): SEQ ID NO: 1411; WAN024F63_at; Start 100; Stop 124
aaaatcacggcctgggttcacacca

SEQ ID NO: 193748 - DNA, 25 bp, Artificial
  probe
  misc_feature (1)..(25): SEQ ID NO: 1411; WAN024F63_at; Start 173; Stop 197
tcttgtaccttacgatctgcaataa

SEQ ID NO: 193749 - DNA, 25 bp, Artificial
  probe
  misc_feature (1)..(25): SEQ ID NO: 1411; WAN024F63_at; Start 157; Stop 181
aactgcattgcgaacatcttgtacc

SEQ ID NO: 193750 - DNA, 25 bp, Artificial
  probe
  misc_feature (1)..(25): SEQ ID NO: 1411; WAN024F63_at; Start 87; Stop 111
catattctgcagtaaaatcacggcc

SEQ ID NO: 193751 - DNA, 25 bp, Artificial
  probe
  misc_feature (1)..(25): SEQ ID NO: 1411; WAN024F63_at; Start 78; Stop 102
ggatatccacatattctgcagtaaa

SEQ ID NO: 193752 - DNA, 25 bp, Artificial
  probe
  misc_feature (1)..(25): SEQ ID NO: 1411; WAN024F63_at; Start 105; Stop 129
cacggcctgggttcacaccagtcaa

SEQ ID NO: 193753 - DNA, 25 bp, Artificial
  probe
  misc_feature (1)..(25): SEQ ID NO: 1411; WAN024F63_at; Start 95; Stop 119
gcagtaaaatcacggcctgggttca

SEQ ID NO: 193754 - DNA, 25 bp, Artificial
  probe
  misc_feature (1)..(25): SEQ ID NO: 1411; WAN024F63_at; Start 149; Stop 173
gcaccgacaactgcattgcgaacat

SEQ ID NO: 193755 - DNA, 25 bp, Artificial
  probe
  misc_feature (1)..(25): SEQ ID NO: 1411; WAN024F63_at; Start 204; Stop 228
tattctctggcaaaccaactggtcc

SEQ ID NO: 193756 - DNA, 25 bp, Artificial
  probe
  misc_feature (1)..(25): SEQ ID NO: 1411; WAN024F63_at; Start 15; Stop 39
taccacgcgcaaagttaaggacacc

SEQ ID NO: 193757 - DNA, 25 bp, Artificial
  probe
  misc_feature (1)..(25): SEQ ID NO: 1411; WAN024F63_at; Start 112; Stop 136
tgggttcacaccagtcaagtggtag

SEQ ID NO: 193758 - DNA, 25 bp, Artificial
  probe
  misc_feature (1)..(25): SEQ ID NO: 1411; WAN024F63_at; Start 153; Stop 177
cgacaactgcattgcgaacatcttg

SEQ ID NO: 193759 - DNA, 25 bp, Artificial
  probe
  misc_feature (1)..(25): SEQ ID NO: 1411; WAN024F63_at; Start 52; Stop 76
ggaaatttcaccctcacgaacttca

SEQ ID NO: 193760 - DNA, 25 bp, Artificial
  probe
  misc_feature (1)..(25): SEQ ID NO: 1411; WAN024F63_at; Start 22; Stop 46
cgcaaagttaaggacaccttgtcca

SEQ ID NO: 193761 - DNA, 25 bp, Artificial
  probe
  misc_feature (1)..(25): SEQ ID NO: 1411; WAN024F63_at; Start 89; Stop 113
tattctgcagtaaaatcacggcctg

SEQ ID NO: 193762 - DNA, 25 bp, Artificial
  probe
  misc_feature (1)..(25): SEQ ID NO: 1411; WAN024F63_at; Start 162; Stop 186
cattgcgaacatcttgtaccttacg

SEQ ID NO: 193763 - DNA, 25 bp, Artificial
  probe
  misc_feature (1)..(25): SEQ ID NO: 1411; WAN024F63_at; Start 12; Stop 36
caataccacgcgcaaagttaaggac

SEQ ID NO: 193764 - DNA, 25 bp, Artificial
  probe
  misc_feature (1)..(25): SEQ ID NO: 1411; WAN024F63_at; Start 168; Stop 192
gaacatcttgtaccttacgatctgc

SEQ ID NO: 193765 - DNA, 25 bp, Artificial
  probe
  misc_feature (1)..(25): SEQ ID NO: 1411; WAN024F63_at; Start 195; Stop 219
taattttaatattctctggcaaacc

SEQ ID NO: 193766 - DNA, 25 bp, Artificial
  probe
  misc_feature (1)..(25): SEQ ID NO: 1411; WAN024F63_at; Start 92; Stop 116
tctgcagtaaaatcacggcctgggt

SEQ ID NO: 193767 - DNA, 25 bp, Artificial
  probe
  misc_feature (1)..(25): SEQ ID NO: 1411; WAN024F63_at; Start 38; Stop 62
ccttgtccatctggggaaatttcac

SEQ ID NO: 193768 - DNA, 25 bp, Artificial
  probe
  misc_feature (1)..(25): SEQ ID NO: 1411; WAN024F63_at; Start 180; Stop 204
ccttacgatctgcaataattttaat

SEQ ID NO: 193769 - DNA, 25 bp, Artificial
  probe
  misc_feature (1)..(25): SEQ ID NO: 1411; WAN024F63_at; Start 65; Stop 89
tcacgaacttcacggatatccacat

SEQ ID NO: 193770 - DNA, 25 bp, Artificial
  probe
  misc_feature (1)..(25): SEQ ID NO: 1411; WAN024F63_at; Start 2; Stop 26
tgaccgatctcaataccacgcgcaa

SEQ ID NO: 193771 - DNA, 25 bp, Artificial
  probe
  misc_feature (1)..(25): SEQ ID NO: 1411; WAN024F63_at; Start 138; Stop 162
catcttcgttagcaccgacaactgc

SEQ ID NO: 193772 - DNA, 25 bp, Artificial
  probe
  misc_feature (1)..(25): SEQ ID NO: 1411; WAN024F63_at; Start 56; Stop 80
atttcaccctcacgaacttcacgga

SEQ ID NO: 193773 - DNA, 25 bp, Artificial
  probe
  misc_feature (1)..(25): SEQ ID NO: 1411; WAN024F63_at; Start 109; Stop 133
gcctgggttcacaccagtcaagtgg

SEQ ID NO: 193774 - DNA, 25 bp, Artificial
  probe
  misc_feature (1)..(25): SEQ ID NO: 1411; WAN024F63_at; Start 145; Stop 169
gttagcaccgacaactgcattgcga

SEQ ID NO: 193775 - DNA, 25 bp, Artificial
  probe
  misc_feature (1)..(25): SEQ ID NO: 1411; WAN024F63_at; Start 18; Stop 42
cacgcgcaaagttaaggacaccttg

SEQ ID NO: 193776 - DNA, 25 bp, Artificial
  probe
  misc_feature (1)..(25): SEQ ID NO: 1411; WAN024F63_at; Start 7; Stop 31
gatctcaataccacgcgcaaagtta

SEQ ID NO: 193777 - DNA, 25 bp, Artificial
  probe
  misc_feature (1)..(25): SEQ ID NO: 1411; WAN024F63_at; Start 142; Stop 166
ttcgttagcaccgacaactgcattg

SEQ ID NO: 193778 - DNA, 25 bp, Artificial
  probe
  misc_feature (1)..(25): SEQ ID NO: 1411; WAN024F63_at; Start 74; Stop 98
tcacggatatccacatattctgcag

SEQ ID NO: 193779 - DNA, 25 bp, Artificial
  probe
  misc_feature (1)..(25): SEQ ID NO: 1411; WAN024F63_at; Start 209; Stop 233
tctggcaaaccaactggtccaagtg

SEQ ID NO: 193780 - DNA, 25 bp, Artificial
  probe
  misc_feature (1)..(25): SEQ ID NO: 806; WAN024F64_at; Start 1046; Stop 1070
cagatttctttgacgttgctagcga

SEQ ID NO: 193781 - DNA, 25 bp, Artificial
  probe
  misc_feature (1)..(25): SEQ ID NO: 806; WAN024F64_at; Start 580; Stop 604
gctattattggtgacggtggagcca

SEQ ID NO: 193782 - DNA, 25 bp, Artificial
  probe
  misc_feature (1)..(25): SEQ ID NO: 806; WAN024F64_at; Start 829; Stop 853
gagtacaaaccaagcaaccgtgttg

SEQ ID NO: 193783 - DNA, 25 bp, Artificial
  probe
  misc_feature (1)..(25): SEQ ID NO: 806; WAN024F64_at; Start 523; Stop 547
gatgagtacaaagcagcctatgagc

SEQ ID NO: 193784 - DNA, 25 bp, Artificial
  probe
  misc_feature (1)..(25): SEQ ID NO: 806; WAN024F64_at; Start 1807; Stop 1831
catgcagataacgtgcttgaaacgc

SEQ ID NO: 193785 - DNA, 25 bp, Artificial
  probe
  misc_feature (1)..(25): SEQ ID NO: 806; WAN024F64_at; Start 1367; Stop 1391
cagcaagcatgggagcagatgtctt

SEQ ID NO: 193786 - DNA, 25 bp, Artificial
  probe
  misc_feature (1)..(25): SEQ ID NO: 806; WAN024F64_at; Start 1176; Stop 1200
caatgcagttgtcggtgctaacgaa

SEQ ID NO: 193787 - DNA, 25 bp, Artificial
  probe
  misc_feature (1)..(25): SEQ ID NO: 806; WAN024F64_at; Start 986; Stop 1010
cagcccttctagttggaaatgacca

SEQ ID NO: 193788 - DNA, 25 bp, Artificial
  probe
  misc_feature (1)..(25): SEQ ID NO: 806; WAN024F64_at; Start 230; Stop 254
cagaattgtggcgtgaatcaggtcg

SEQ ID NO: 193789 - DNA, 25 bp, Artificial
  probe
  misc_feature (1)..(25): SEQ ID NO: 806; WAN024F64_at; Start 865; Stop 889
gaagttactcgtgttgcaacgccag

SEQ ID NO: 193790 - DNA, 25 bp, Artificial
  probe
  misc_feature (1)..(25): SEQ ID NO: 806; WAN024F64_at; Start 1396; Stop 1420
gaaaatggtcgtgctgtgccaatca

SEQ ID NO: 193791 - DNA, 25 bp, Artificial
  probe
  misc_feature (1)..(25): SEQ ID NO: 806; WAN024F64_at; Start 410; Stop 434
ccaagtatcgtgatgaaaaacgccc

SEQ ID NO: 193792 - DNA, 25 bp, Artificial
  probe
  misc_feature (1)..(25): SEQ ID NO: 806; WAN024F64_at; Start 660; Stop 684
tgaccgctgggttgtcttggacaag

SEQ ID NO: 193793 - DNA, 25 bp, Artificial
  probe
  misc_feature (1)..(25): SEQ ID NO: 806; WAN024F64_at; Start 136; Stop 160
gccaaccgtgtgattgaaaaagcta

SEQ ID NO: 193794 - DNA, 25 bp, Artificial
  probe
  misc_feature (1)..(25): SEQ ID NO: 806; WAN024F64_at; Start 1658; Stop 1682
tcttgacagatgaccgtaacgaacg

SEQ ID NO: 193795 - DNA, 25 bp, Artificial
  probe
  misc_feature (1)..(25): SEQ ID NO: 806; WAN024F64_at; Start 1459; Stop 1483
tcagcagtgatggagcaacacgctc

SEQ ID NO: 193796 - DNA, 25 bp, Artificial
  probe
  misc_feature (1)..(25): SEQ ID NO: 806; WAN024F64_at; Start 334; Stop 358
gaaacctttacagctattgtccgtg

SEQ ID NO: 193797 - DNA, 25 bp, Artificial
  probe
  misc_feature (1)..(25): SEQ ID NO: 806; WAN024F64_at; Start 1062; Stop 1086
tgctagcgaagaagaagtggcgaat

SEQ ID NO: 193798 - DNA, 25 bp, Artificial
  probe
  misc_feature (1)..(25): SEQ ID NO: 806; WAN024F64_at; Start 1282; Stop 1306
gaaatttccccagatggacaaggtg

SEQ ID NO: 193799 - DNA, 25 bp, Artificial
  probe
  misc_feature (1)..(25): SEQ ID NO: 806; WAN024F64_at; Start 1587; Stop 1611
tgtcaaggatgaagaagcgcaagcc

SEQ ID NO: 193800 - DNA, 25 bp, Artificial
  probe
  misc_feature (1)..(25): SEQ ID NO: 806; WAN024F64_at; Start 1427; Stop 1451
gatgttacggtatcggtgtcagccg

SEQ ID NO: 193801 - DNA, 25 bp, Artificial
  probe
  misc_feature (1)..(25): SEQ ID NO: 806; WAN024F64_at; Start 843; Stop 867
caaccgtgttgtcgctgaagaagaa

SEQ ID NO: 193802 - DNA, 25 bp, Artificial
  probe
  misc_feature (1)..(25): SEQ ID NO: 806; WAN024F64_at; Start 1792; Stop 1816
gacaccattgaggttcatgcagata

SEQ ID NO: 193803 - DNA, 25 bp, Artificial
  probe
  misc_feature (1)..(25): SEQ ID NO: 806; WAN024F64_at; Start 1734; Stop 1758
cactgttggtaaaaaagcggccgat

SEQ ID NO: 193804 - DNA, 25 bp, Artificial
  probe
  misc_feature (1)..(25): SEQ ID NO: 806; WAN024F64_at; Start 968; Stop 992
cagatggtgagcttgttgcagccct

SEQ ID NO: 193805 - DNA, 25 bp, Artificial
  probe
  misc_feature (1)..(25): SEQ ID NO: 806; WAN024F64_at; Start 1443; Stop 1467
tgtcagccgtcttctttcagcagtg

SEQ ID NO: 193806 - DNA, 25 bp, Artificial
  probe
  misc_feature (1)..(25): SEQ ID NO: 806; WAN024F64_at; Start 1332; Stop 1356
gatcggtcatattttcaaactcgga

SEQ ID NO: 193807 - DNA, 25 bp, Artificial
  probe
  misc_feature (1)..(25): SEQ ID NO: 806; WAN024F64_at; Start 12; Stop 36
taaaatgcctatcccaacgcttcgc

SEQ ID NO: 193808 - DNA, 25 bp, Artificial
  probe
  misc_feature (1)..(25): SEQ ID NO: 806; WAN024F64_at; Start 44; Stop 68
caagcgatgctcaagttatcagcca

SEQ ID NO: 193809 - DNA, 25 bp, Artificial
  probe
  misc_feature (1)..(25): SEQ ID NO: 806; WAN024F64_at; Start 438; Stop 462
taatggacttcttcgtacacgtgag

SEQ ID NO: 193810 - DNA, 25 bp, Artificial
  probe
  misc_feature (1)..(25): SEQ ID NO: 806; WAN024F64_at; Start 645; Stop 669
tgctcgtacagaccttgaccgctgg

SEQ ID NO: 193811 - DNA, 25 bp, Artificial
  probe
  misc_feature (1)..(25): SEQ ID NO: 806; WAN024F64_at; Start 1207; Stop 1231
taccacttgactggtgtgaacccag

SEQ ID NO: 193812 - DNA, 25 bp, Artificial
  probe
  misc_feature (1)..(25): SEQ ID NO: 806; WAN024F64_at; Start 1773; Stop 1797
taagatcaaggcaactggtgacacc

SEQ ID NO: 193813 - DNA, 25 bp, Artificial
  probe
  misc_feature (1)..(25): SEQ ID NO: 806; WAN024F64_at; Start 88; Stop 112
ggttatgttcgccaagtttcagcag

SEQ ID NO: 193814 - DNA, 25 bp, Artificial
  probe
  misc_feature (1)..(25): SEQ ID NO: 2083; WAN024F65_at; Start 616; Stop 640
catatcatgccccaaggtgccttgg

SEQ ID NO: 193815 - DNA, 25 bp, Artificial
  probe
  misc_feature (1)..(25): SEQ ID NO: 2083; WAN024F65_at; Start 138; Stop 162
tcacattggcaaggatggaacggcc

SEQ ID NO: 193816 - DNA, 25 bp, Artificial
  probe
  misc_feature (1)..(25): SEQ ID NO: 2083; WAN024F65_at; Start 317; Stop 341
aaacagccctccctatgcaggtgac

SEQ ID NO: 193817 - DNA, 25 bp, Artificial
  probe
  misc_feature (1)..(25): SEQ ID NO: 2083; WAN024F65_at; Start 714; Stop 738
gatccaagctgtggaaacagaaacc

SEQ ID NO: 193818 - DNA, 25 bp, Artificial
  probe
  misc_feature (1)..(25): SEQ ID NO: 2083; WAN024F65_at; Start 224; Stop 248
caactgaaatcaagacaggaacgcc

SEQ ID NO: 193819 - DNA, 25 bp, Artificial
  probe
  misc_feature (1)..(25): SEQ ID NO: 2083; WAN024F65_at; Start 733; Stop 757
gaaaccaaagataagacggcaccga

SEQ ID NO: 193820 - DNA, 25 bp, Artificial
  probe
  misc_feature (1)..(25): SEQ ID NO: 2083; WAN024F65_at; Start 747; Stop 771
gacggcaccgactttggatgtgact

SEQ ID NO: 193821 - DNA, 25 bp, Artificial
  probe
  misc_feature (1)..(25): SEQ ID NO: 2083; WAN024F65_at; Start 70; Stop 94
tactttgccaagaaatcagggattt

SEQ ID NO: 193822 - DNA, 25 bp, Artificial
  probe
  misc_feature (1)..(25): SEQ ID NO: 2083; WAN024F65_at; Start 153; Stop 177
tggaacggcctataccattcgaatc

SEQ ID NO: 193823 - DNA, 25 bp, Artificial
  probe
  misc_feature (1)..(25): SEQ ID NO: 2083; WAN024F65_at; Start 569; Stop 593
taatctttatgcagggtggtgtcag

SEQ ID NO: 193824 - DNA, 25 bp, Artificial
  probe
  misc_feature (1)..(25): SEQ ID NO: 2083; WAN024F65_at; Start 475; Stop 499
caatatcaaaatgcgactatctggg

SEQ ID NO: 193825 - DNA, 25 bp, Artificial
  probe
  misc_feature (1)..(25): SEQ ID NO: 2083; WAN024F65_at; Start 407; Stop 431
cagtggatcacgatgcaacggttgt

SEQ ID NO: 193826 - DNA, 25 bp, Artificial
  probe
  misc_feature (1)..(25): SEQ ID NO: 2083; WAN024F65_at; Start 279; Stop 303
ggttaaacgcatcaatctctcaggt

SEQ ID NO: 193827 - DNA, 25 bp, Artificial
  probe
  misc_feature (1)..(25): SEQ ID NO: 2083; WAN024F65_at; Start 1224; Stop 1248
gacttggaatgacattatgcgactc

SEQ ID NO: 193828 - DNA, 25 bp, Artificial
  probe
  misc_feature (1)..(25): SEQ ID NO: 2083; WAN024F65_at; Start 394; Stop 418
gaaaaaacatttgcagtggatcacg

SEQ ID NO: 193829 - DNA, 25 bp, Artificial
  probe
  misc_feature (1)..(25): SEQ ID NO: 2083; WAN024F65_at; Start 168; Stop 192
cattcgaatcttgcctctgggtggc

SEQ ID NO: 193830 - DNA, 25 bp, Artificial
  probe
  misc_feature (1)..(25): SEQ ID NO: 2083; WAN024F65_at; Start 966; Stop 990
caagttgggtggacctgttgctatc

SEQ ID NO: 193831 - DNA, 25 bp, Artificial
  probe
  misc_feature (1)..(25): SEQ ID NO: 2083; WAN024F65_at; Start 989; Stop 1013
tctttaaggcaagtagtgatgctgc

SEQ ID NO: 193832 - DNA, 25 bp, Artificial
  probe
  misc_feature (1)..(25): SEQ ID NO: 2083; WAN024F65_at; Start 38; Stop 62
ttattgtagtggtgcacgagttcgg

SEQ ID NO: 193833 - DNA, 25 bp, Artificial
  probe
  misc_feature (1)..(25): SEQ ID NO: 2083; WAN024F65_at; Start 633; Stop 657
tgccttggccaaggtaggagtacca

SEQ ID NO: 193834 - DNA, 25 bp, Artificial
  probe
  misc_feature (1)..(25): SEQ ID NO: 2083; WAN024F65_at; Start 1186; Stop 1210
gccggagtggtcatcatggttgtct

SEQ ID NO: 193835 - DNA, 25 bp, Artificial
  probe
  misc_feature (1)..(25): SEQ ID NO: 2083; WAN024F65_at; Start 510; Stop 534
taccaattttgcaggtcctatgaac

SEQ ID NO: 193836 - DNA, 25 bp, Artificial
  probe
  misc_feature (1)..(25): SEQ ID NO: 2083; WAN024F65_at; Start 588; Stop 612
tgtcagagatgttgataccaatcag

SEQ ID NO: 193837 - DNA, 25 bp, Artificial
  probe
  misc_feature (1)..(25): SEQ ID NO: 2083; WAN024F65_at; Start 1168; Stop 1192
gaaacctatgtcaccttggccggag

SEQ ID NO: 193838 - DNA, 25 bp, Artificial
  probe
  misc_feature (1)..(25): SEQ ID NO: 2083; WAN024F65_at; Start 439; Stop 463
gatggtactgaggttcggattgcac

SEQ ID NO: 193839 - DNA, 25 bp, Artificial
  probe
  misc_feature (1)..(25): SEQ ID NO: 2083; WAN024F65_at; Start 183; Stop 207
tctgggtggctatgtccgcatggcc

SEQ ID NO: 193840 - DNA, 25 bp, Artificial
  probe
  misc_feature (1)..(25): SEQ ID NO: 2083; WAN024F65_at; Start 1093; Stop 1117
ccagccttggatggtggtaagattg

SEQ ID NO: 193841 - DNA, 25 bp, Artificial
  probe
  misc_feature (1)..(25): SEQ ID NO: 2083; WAN024F65_at; Start 1208; Stop 1232
tcttgatgattgctgtgacttggaa

SEQ ID NO: 193842 - DNA, 25 bp, Artificial
  probe
  misc_feature (1)..(25): SEQ ID NO: 2083; WAN024F65_at; Start 886; Stop 910
ggtggttttacaactgctgctgact

SEQ ID NO: 193843 - DNA, 25 bp, Artificial
  probe
  misc_feature (1)..(25): SEQ ID NO: 2083; WAN024F65_at; Start 1113; Stop 1137
gattgtgctcaatatcctagaagcc

SEQ ID NO: 193844 - DNA, 25 bp, Artificial
  probe
  misc_feature (1)..(25): SEQ ID NO: 2083; WAN024F65_at; Start 422; Stop 446
caacggttgtggaagcagatggtac

SEQ ID NO: 193845 - DNA, 25 bp, Artificial
  probe
  misc_feature (1)..(25): SEQ ID NO: 2083; WAN024F65_at; Start 239; Stop 263
caggaacgcctgttagtttgacact

SEQ ID NO: 193846 - DNA, 25 bp, Artificial
  probe
  misc_feature (1)..(25): SEQ ID NO: 2083; WAN024F65_at; Start 102; Stop 126
tgaatttgccatcggtatgggacct

SEQ ID NO: 193847 - DNA, 25 bp, Artificial
  probe
  misc_feature (1)..(25): SEQ ID NO: 2083; WAN024F65_at; Start 303; Stop 327
taaaaaattggatcaaacagccctc

SEQ ID NO: 193848 - DNA, 25 bp, Artificial
  probe
  misc_feature (1)..(25): SEQ ID NO: 4788; WAN024F66_at; Start 60; Stop 84
tcttgtgagaatatttacttcattt

SEQ ID NO: 193849 - DNA, 25 bp, Artificial
  probe
  misc_feature (1)..(25): SEQ ID NO: 4788; WAN024F66_at; Start 221; Stop 245
acgtcgctgtaaaatctttgcatta

SEQ ID NO: 193850 - DNA, 25 bp, Artificial
  probe
  misc_feature (1)..(25): SEQ ID NO: 4788; WAN024F66_at; Start 164; Stop 188
caaatcattttgaccaccgagcaag

SEQ ID NO: 193851 - DNA, 25 bp, Artificial
  probe
  misc_feature (1)..(25): SEQ ID NO: 4788; WAN024F66_at; Start 46; Stop 70
gatgatatacgttttcttgtgagaa

SEQ ID NO: 193852 - DNA, 25 bp, Artificial
  probe
  misc_feature (1)..(25): SEQ ID NO: 4788; WAN024F66_at; Start 298; Stop 322
tatcaatatcaaaaccaaactcacg

SEQ ID NO: 193853 - DNA, 25 bp, Artificial
  probe
  misc_feature (1)..(25): SEQ ID NO: 4788; WAN024F66_at; Start 363; Stop 387
ccttcgcgaaatggatgaatctgcc

SEQ ID NO: 193854 - DNA, 25 bp, Artificial
  probe
  misc_feature (1)..(25): SEQ ID NO: 4788; WAN024F66_at; Start 370; Stop 394
gaaatggatgaatctgccagattcc

SEQ ID NO: 193855 - DNA, 25 bp, Artificial
  probe
  misc_feature (1)..(25): SEQ ID NO: 4788; WAN024F66_at; Start 316; Stop 340
actcacgaagatactgaatcaaaaa

SEQ ID NO: 193856 - DNA, 25 bp, Artificial
  probe
  misc_feature (1)..(25): SEQ ID NO: 4788; WAN024F66_at; Start 27; Stop 51
tgacaaagagccaaactttgatgat

SEQ ID NO: 193857 - DNA, 25 bp, Artificial
  probe
  misc_feature (1)..(25): SEQ ID NO: 4788; WAN024F66_at; Start 158; Stop 182
tgaagacaaatcattttgaccaccg

SEQ ID NO: 193858 - DNA, 25 bp, Artificial
  probe
  misc_feature (1)..(25): SEQ ID NO: 4788; WAN024F66_at; Start 301; Stop 325
caatatcaaaaccaaactcacgaag

SEQ ID NO: 193859 - DNA, 25 bp, Artificial
  probe
  misc_feature (1)..(25): SEQ ID NO: 4788; WAN024F66_at; Start 129; Stop 153
tcgaggtctaaatctagatacattt

SEQ ID NO: 193860 - DNA, 25 bp, Artificial
  probe
  misc_feature (1)..(25): SEQ ID NO: 4788; WAN024F66_at; Start 362; Stop 386
tccttcgcgaaatggatgaatctgc

SEQ ID NO: 193861 - DNA, 25 bp, Artificial
  probe
  misc_feature (1)..(25): SEQ ID NO: 4788; WAN024F66_at; Start 88; Stop 112
cctaaaattcaatgtttactcagta

SEQ ID NO: 193862 - DNA, 25 bp, Artificial
  probe
  misc_feature (1)..(25): SEQ ID NO: 4788; WAN024F66_at; Start 378; Stop 402
tgaatctgccagattcctgaaataa

SEQ ID NO: 193863 - DNA, 25 bp, Artificial
  probe
  misc_feature (1)..(25): SEQ ID NO: 4788; WAN024F66_at; Start 355; Stop 379
gagtgtttccttcgcgaaatggatg

SEQ ID NO: 193864 - DNA, 25 bp, Artificial
  probe
  misc_feature (1)..(25): SEQ ID NO: 4788; WAN024F66_at; Start 143; Stop 167
tagatacattttttctgaagacaaa

SEQ ID NO: 193865 - DNA, 25 bp, Artificial
  probe
  misc_feature (1)..(25): SEQ ID NO: 4788; WAN024F66_at; Start 225; Stop 249
cgctgtaaaatctttgcattatcta

SEQ ID NO: 193866 - DNA, 25 bp, Artificial
  probe
  misc_feature (1)..(25): SEQ ID NO: 4788; WAN024F66_at; Start 365; Stop 389
ttcgcgaaatggatgaatctgccag

SEQ ID NO: 193867 - DNA, 25 bp, Artificial
  probe
  misc_feature (1)..(25): SEQ ID NO: 4788; WAN024F66_at; Start 172; Stop 196
tttgaccaccgagcaagagattttc

SEQ ID NO: 193868 - DNA, 25 bp, Artificial
  probe
  misc_feature (1)..(25): SEQ ID NO: 4788; WAN024F66_at; Start 175; Stop 199
gaccaccgagcaagagattttcaaa

SEQ ID NO: 193869 - DNA, 25 bp, Artificial
  probe
  misc_feature (1)..(25): SEQ ID NO: 4788; WAN024F66_at; Start 367; Stop 391
cgcgaaatggatgaatctgccagat

SEQ ID NO: 193870 - DNA, 25 bp, Artificial
  probe
  misc_feature (1)..(25): SEQ ID NO: 4788; WAN024F66_at; Start 168; Stop 192
tcattttgaccaccgagcaagagat

SEQ ID NO: 193871 - DNA, 25 bp, Artificial
  probe
  misc_feature (1)..(25): SEQ ID NO: 4788; WAN024F66_at; Start 351; Stop 375
gtccgagtgtttccttcgcgaaatg

SEQ ID NO: 193872 - DNA, 25 bp, Artificial
  probe
  misc_feature (1)..(25): SEQ ID NO: 4788; WAN024F66_at; Start 307; Stop 331
caaaaccaaactcacgaagatactg

SEQ ID NO: 193873 - DNA, 25 bp, Artificial
  probe
  misc_feature (1)..(25): SEQ ID NO: 4788; WAN024F66_at; Start 178; Stop 202
caccgagcaagagattttcaaaaaa

SEQ ID NO: 193874 - DNA, 25 bp, Artificial
  probe
  misc_feature (1)..(25): SEQ ID NO: 4788; WAN024F66_at; Start 312; Stop 336
ccaaactcacgaagatactgaatca

SEQ ID NO: 193875 - DNA, 25 bp, Artificial
  probe
  misc_feature (1)..(25): SEQ ID NO: 4788; WAN024F66_at; Start 375; Stop 399
ggatgaatctgccagattcctgaaa

SEQ ID NO: 193876 - DNA, 25 bp, Artificial
  probe
  misc_feature (1)..(25): SEQ ID NO: 4788; WAN024F66_at; Start 34; Stop 58
gagccaaactttgatgatatacgtt

SEQ ID NO: 193877 - DNA, 25 bp, Artificial
  probe
  misc_feature (1)..(25): SEQ ID NO: 4788; WAN024F66_at; Start 353; Stop 377
ccgagtgtttccttcgcgaaatgga

SEQ ID NO: 193878 - DNA, 25 bp, Artificial
  probe
  misc_feature (1)..(25): SEQ ID NO: 4788; WAN024F66_at; Start 166; Stop 190
aatcattttgaccaccgagcaagag

SEQ ID NO: 193879 - DNA, 25 bp, Artificial
  probe
  misc_feature (1)..(25): SEQ ID NO: 4788; WAN024F66_at; Start 162; Stop 186
gacaaatcattttgaccaccgagca

SEQ ID NO: 193880 - DNA, 25 bp, Artificial
  probe
  misc_feature (1)..(25): SEQ ID NO: 4788; WAN024F66_at; Start 184; Stop 208
gcaagagattttcaaaaaaagctgt

SEQ ID NO: 193881 - DNA, 25 bp, Artificial
  probe
  misc_feature (1)..(25): SEQ ID NO: 4788; WAN024F66_at; Start 53; Stop 77
tacgttttcttgtgagaatatttac

SEQ ID NO: 193882 - DNA, 25 bp, Artificial
  probe
  misc_feature (1)..(25): SEQ ID NO: 1916; WAN024F67_at; Start 80; Stop 104
tgcagaaagttgacaatctagtgcc

SEQ ID NO: 193883 - DNA, 25 bp, Artificial
  probe
  misc_feature (1)..(25): SEQ ID NO: 1916; WAN024F67_at; Start 745; Stop 769
ggtcaaaatgatttgtcttcagaaa

SEQ ID NO: 193884 - DNA, 25 bp, Artificial
  probe
  misc_feature (1)..(25): SEQ ID NO: 1916; WAN024F67_at; Start 148; Stop 172
gaactgacttatgagcaggtttatg

SEQ ID NO: 193885 - DNA, 25 bp, Artificial
  probe
  misc_feature (1)..(25): SEQ ID NO: 1916; WAN024F67_at; Start 540; Stop 564
gattcatccatttcgcgaaggaaac

SEQ ID NO: 193886 - DNA, 25 bp, Artificial
  probe
  misc_feature (1)..(25): SEQ ID NO: 1916; WAN024F67_at; Start 517; Stop 541
cattttatttcaggaatctggcaga

SEQ ID NO: 193887 - DNA, 25 bp, Artificial
  probe
  misc_feature (1)..(25): SEQ ID NO: 1916; WAN024F67_at; Start 114; Stop 138
tatggaatctttggctgagaaacag

SEQ ID NO: 193888 - DNA, 25 bp, Artificial
  probe
  misc_feature (1)..(25): SEQ ID NO: 1916; WAN024F67_at; Start 250; Stop 274
ctattgtctcgaagaggctttagct

SEQ ID NO: 193889 - DNA, 25 bp, Artificial
  probe
  misc_feature (1)..(25): SEQ ID NO: 1916; WAN024F67_at; Start 3; Stop 27
gcaaccaacttacaacattgacaat

SEQ ID NO: 193890 - DNA, 25 bp, Artificial
  probe
  misc_feature (1)..(25): SEQ ID NO: 1916; WAN024F67_at; Start 536; Stop 560
ggcagattcatccatttcgcgaagg

SEQ ID NO: 193891 - DNA, 25 bp, Artificial
  probe
  misc_feature (1)..(25): SEQ ID NO: 1916; WAN024F67_at; Start 375; Stop 399
gaatgaacctgttttgaatggtgaa

SEQ ID NO: 193892 - DNA, 25 bp, Artificial
  probe
  misc_feature (1)..(25): SEQ ID NO: 1916; WAN024F67_at; Start 601; Stop 625
cgtgagtttggttttgatattgata

SEQ ID NO: 193893 - DNA, 25 bp, Artificial
  probe
  misc_feature (1)..(25): SEQ ID NO: 1916; WAN024F67_at; Start 243; Stop 267
tgtagaactattgtctcgaagaggc

SEQ ID NO: 193894 - DNA, 25 bp, Artificial
  probe
  misc_feature (1)..(25): SEQ ID NO: 1916; WAN024F67_at; Start 770; Stop 794
aaatgtatctagatttagacctcga

SEQ ID NO: 193895 - DNA, 25 bp, Artificial
  probe
  misc_feature (1)..(25): SEQ ID NO: 1916; WAN024F67_at; Start 49; Stop 73
aagcgtgatttatggcggataggtt

SEQ ID NO: 193896 - DNA, 25 bp, Artificial
  probe
  misc_feature (1)..(25): SEQ ID NO: 1916; WAN024F67_at; Start 311; Stop 335
tgtttcaagatatatttgaaccctc

SEQ ID NO: 193897 - DNA, 25 bp, Artificial
  probe
  misc_feature (1)..(25): SEQ ID NO: 1916; WAN024F67_at; Start 288; Stop 312
cttacttgctattcataaggagttg

SEQ ID NO: 193898 - DNA, 25 bp, Artificial
  probe
  misc_feature (1)..(25): SEQ ID NO: 1916; WAN024F67_at; Start 757; Stop 781
ttgtcttcagaaaaaatgtatctag

SEQ ID NO: 193899 - DNA, 25 bp, Artificial
  probe
  misc_feature (1)..(25): SEQ ID NO: 1916; WAN024F67_at; Start 587; Stop 611
tgattcagtatcttcgtgagtttgg

SEQ ID NO: 193900 - DNA, 25 bp, Artificial
  probe
  misc_feature (1)..(25): SEQ ID NO: 1916; WAN024F67_at; Start 678; Stop 702
taatgcaaagattttacagcgacgt

SEQ ID NO: 193901 - DNA, 25 bp, Artificial
  probe
  misc_feature (1)..(25): SEQ ID NO: 1916; WAN024F67_at; Start 413; Stop 437
ctgattactccatgattcaaatgac

SEQ ID NO: 193902 - DNA, 25 bp, Artificial
  probe
  misc_feature (1)..(25): SEQ ID NO: 1916; WAN024F67_at; Start 366; Stop 390
tatcacaaagaatgaacctgttttg

SEQ ID NO: 193903 - DNA, 25 bp, Artificial
  probe
  misc_feature (1)..(25): SEQ ID NO: 1916; WAN024F67_at; Start 727; Stop 751
gaaaatctcttgctcggtggtcaaa

SEQ ID NO: 193904 - DNA, 25 bp, Artificial
  probe
  misc_feature (1)..(25): SEQ ID NO: 1916; WAN024F67_at; Start 156; Stop 180
ttatgagcaggtttatgaggatgca

SEQ ID NO: 193905 - DNA, 25 bp, Artificial
  probe
  misc_feature (1)..(25): SEQ ID NO: 1916; WAN024F67_at; Start 390; Stop 414
gaatggtgaaagtgttgtgtactct

SEQ ID NO: 193906 - DNA, 25 bp, Artificial
  probe
  misc_feature (1)..(25): SEQ ID NO: 1916; WAN024F67_at; Start 295; Stop 319
gctattcataaggagttgtttcaag

SEQ ID NO: 193907 - DNA, 25 bp, Artificial
  probe
  misc_feature (1)..(25): SEQ ID NO: 1916; WAN024F67_at; Start 464; Stop 488
aacaagttgcatatgcgacactaac

SEQ ID NO: 193908 - DNA, 25 bp, Artificial
  probe
  misc_feature (1)..(25): SEQ ID NO: 1916; WAN024F67_at; Start 86; Stop 110
aagttgacaatctagtgccatcagc

SEQ ID NO: 193909 - DNA, 25 bp, Artificial
  probe
  misc_feature (1)..(25): SEQ ID NO: 1916; WAN024F67_at; Start 22; Stop 46
gacaatccaaacttgtcttatgaag

SEQ ID NO: 193910 - DNA, 25 bp, Artificial
  probe
  misc_feature (1)..(25): SEQ ID NO: 1916; WAN024F67_at; Start 70; Stop 94
ggttttggtctgcagaaagttgaca

SEQ ID NO: 193911 - DNA, 25 bp, Artificial
  probe
  misc_feature (1)..(25): SEQ ID NO: 1916; WAN024F67_at; Start 59; Stop 83
tatggcggataggttttggtctgca

SEQ ID NO: 193912 - DNA, 25 bp, Artificial
  probe
  misc_feature (1)..(25): SEQ ID NO: 1916; WAN024F67_at; Start 737; Stop 761
tgctcggtggtcaaaatgatttgtc

SEQ ID NO: 193913 - DNA, 25 bp, Artificial
  probe
  misc_feature (1)..(25): SEQ ID NO: 1916; WAN024F67_at; Start 451; Stop 475
tttaatcaggaaaaacaagttgcat

SEQ ID NO: 193914 - DNA, 25 bp, Artificial
  probe
  misc_feature (1)..(25): SEQ ID NO: 1916; WAN024F67_at; Start 399; Stop 423
aagtgttgtgtactctgattactcc

SEQ ID NO: 193915 - DNA, 25 bp, Artificial
  probe
  misc_feature (1)..(25): SEQ ID NO: 1916; WAN024F67_at; Start 722; Stop 746
tttttgaaaatctcttgctcggtgg

SEQ ID NO: 193916 - DNA, 25 bp, Artificial
  probe
  misc_feature (1)..(25): SEQ ID NO: 6733; WAN024F68_at; Start 38; Stop 62
gtacatctgaagctcctttggagtt

SEQ ID NO: 193917 - DNA, 25 bp, Artificial
  probe
  misc_feature (1)..(25): SEQ ID NO: 6733; WAN024F68_at; Start 57; Stop 81
ggagttcattatctgcctcttttat

SEQ ID NO: 193918 - DNA, 25 bp, Artificial
  probe
  misc_feature (1)..(25): SEQ ID NO: 6733; WAN024F68_at; Start 31; Stop 55
gataatcgtacatctgaagctcctt

SEQ ID NO: 193919 - DNA, 25 bp, Artificial
  probe
  misc_feature (1)..(25): SEQ ID NO: 6733; WAN024F68_at; Start 25; Stop 49
caacaagataatcgtacatctgaag

SEQ ID NO: 193920 - DNA, 25 bp, Artificial
  probe
  misc_feature (1)..(25): SEQ ID NO: 6733; WAN024F68_at; Start 36; Stop 60
tcgtacatctgaagctcctttggag

SEQ ID NO: 193921 - DNA, 25 bp, Artificial
  probe
  misc_feature (1)..(25): SEQ ID NO: 6733; WAN024F68_at; Start 34; Stop 58
aatcgtacatctgaagctcctttgg

SEQ ID NO: 193922 - DNA, 25 bp, Artificial
  probe
  misc_feature (1)..(25): SEQ ID NO: 6733; WAN024F68_at; Start 10; Stop 34
agagaccagcaccaacaacaagata

SEQ ID NO: 193923 - DNA, 25 bp, Artificial
  probe
  misc_feature (1)..(25): SEQ ID NO: 6733; WAN024F68_at; Start 8; Stop 32
aaagagaccagcaccaacaacaaga

SEQ ID NO: 193924 - DNA, 25 bp, Artificial
  probe
  misc_feature (1)..(25): SEQ ID NO: 6733; WAN024F68_at; Start 45; Stop 69
tgaagctcctttggagttcattatc

SEQ ID NO: 193925 - DNA, 25 bp, Artificial
  probe
  misc_feature (1)..(25): SEQ ID NO: 6733; WAN024F68_at; Start 13; Stop 37
gaccagcaccaacaacaagataatc

SEQ ID NO: 193926 - DNA, 25 bp, Artificial
  probe
  misc_feature (1)..(25): SEQ ID NO: 6733; WAN024F68_at; Start 37; Stop 61
cgtacatctgaagctcctttggagt

SEQ ID NO: 193927 - DNA, 25 bp, Artificial
  probe
  misc_feature (1)..(25): SEQ ID NO: 6733; WAN024F68_at; Start 5; Stop 29
gccaaagagaccagcaccaacaaca

SEQ ID NO: 193928 - DNA, 25 bp, Artificial
  probe
  misc_feature (1)..(25): SEQ ID NO: 6733; WAN024F68_at; Start 53; Stop 77
ctttggagttcattatctgcctctt

SEQ ID NO: 193929 - DNA, 25 bp, Artificial
  probe
  misc_feature (1)..(25): SEQ ID NO: 6733; WAN024F68_at; Start 19; Stop 43
caccaacaacaagataatcgtacat

SEQ ID NO: 193930 - DNA, 25 bp, Artificial
  probe
  misc_feature (1)..(25): SEQ ID NO: 6733; WAN024F68_at; Start 12; Stop 36
agaccagcaccaacaacaagataat

SEQ ID NO: 193931 - DNA, 25 bp, Artificial
  probe
  misc_feature (1)..(25): SEQ ID NO: 6733; WAN024F68_at; Start 51; Stop 75
tcctttggagttcattatctgcctc

SEQ ID NO: 193932 - DNA, 25 bp, Artificial
  probe
  misc_feature (1)..(25): SEQ ID NO: 6733; WAN024F68_at; Start 18; Stop 42
gcaccaacaacaagataatcgtaca

SEQ ID NO: 193933 - DNA, 25 bp, Artificial
  probe
  misc_feature (1)..(25): SEQ ID NO: 6733; WAN024F68_at; Start 33; Stop 57
taatcgtacatctgaagctcctttg

SEQ ID NO: 193934 - DNA, 25 bp, Artificial
  probe
  misc_feature (1)..(25): SEQ ID NO: 6733; WAN024F68_at; Start 11; Stop 35
gagaccagcaccaacaacaagataa

SEQ ID NO: 193935 - DNA, 25 bp, Artificial
  probe
  misc_feature (1)..(25): SEQ ID NO: 6733; WAN024F68_at; Start 2; Stop 26
tgcgccaaagagaccagcaccaaca

SEQ ID NO: 193936 - DNA, 25 bp, Artificial
  probe
  misc_feature (1)..(25): SEQ ID NO: 6733; WAN024F68_at; Start 49; Stop 73
gctcctttggagttcattatctgcc

SEQ ID NO: 193937 - DNA, 25 bp, Artificial
  probe
  misc_feature (1)..(25): SEQ ID NO: 6733; WAN024F68_at; Start 43; Stop 67
tctgaagctcctttggagttcatta

SEQ ID NO: 193938 - DNA, 25 bp, Artificial
  probe
  misc_feature (1)..(25): SEQ ID NO: 6733; WAN024F68_at; Start 39; Stop 63
tacatctgaagctcctttggagttc

SEQ ID NO: 193939 - DNA, 25 bp, Artificial
  probe
  misc_feature (1)..(25): SEQ ID NO: 6733; WAN024F68_at; Start 16; Stop 40
cagcaccaacaacaagataatcgta

SEQ ID NO: 193940 - DNA, 25 bp, Artificial
  probe
  misc_feature (1)..(25): SEQ ID NO: 6733; WAN024F68_at; Start 9; Stop 33
aagagaccagcaccaacaacaagat

SEQ ID NO: 193941 - DNA, 25 bp, Artificial
  probe
  misc_feature (1)..(25): SEQ ID NO: 6733; WAN024F68_at; Start 52; Stop 76
cctttggagttcattatctgcctct

SEQ ID NO: 193942 - DNA, 25 bp, Artificial
  probe
  misc_feature (1)..(25): SEQ ID NO: 6733; WAN024F68_at; Start 28; Stop 52
caagataatcgtacatctgaagctc

SEQ ID NO: 193943 - DNA, 25 bp, Artificial
  probe
  misc_feature (1)..(25): SEQ ID NO: 6733; WAN024F68_at; Start 15; Stop 39
ccagcaccaacaacaagataatcgt

SEQ ID NO: 193944 - DNA, 25 bp, Artificial
  probe
  misc_feature (1)..(25): SEQ ID NO: 6733; WAN024F68_at; Start 22; Stop 46
caacaacaagataatcgtacatctg

SEQ ID NO: 193945 - DNA, 25 bp, Artificial
  probe
  misc_feature (1)..(25): SEQ ID NO: 6733; WAN024F68_at; Start 40; Stop 64
acatctgaagctcctttggagttca

SEQ ID NO: 193946 - DNA, 25 bp, Artificial
  probe
  misc_feature (1)..(25): SEQ ID NO: 6733; WAN024F68_at; Start 29; Stop 53
aagataatcgtacatctgaagctcc

SEQ ID NO: 193947 - DNA, 25 bp, Artificial
  probe
  misc_feature (1)..(25): SEQ ID NO: 6733; WAN024F68_at; Start 35; Stop 59
atcgtacatctgaagctcctttgga

SEQ ID NO: 193948 - DNA, 25 bp, Artificial
  probe
  misc_feature (1)..(25): SEQ ID NO: 6733; WAN024F68_at; Start 41; Stop 65
catctgaagctcctttggagttcat

SEQ ID NO: 193949 - DNA, 25 bp, Artificial
  probe
  misc_feature (1)..(25): SEQ ID NO: 6733; WAN024F68_at; Start 26; Stop 50
aacaagataatcgtacatctgaagc

SEQ ID NO: 193950 - DNA, 25 bp, Artificial
  probe
  misc_feature (1)..(25): SEQ ID NO: 7192; WAN024F69_at; Start 82; Stop 106
aaggcgacactgacgaagtttgaat

SEQ ID NO: 193951 - DNA, 25 bp, Artificial
  probe
  misc_feature (1)..(25): SEQ ID NO: 7192; WAN024F69_at; Start 77; Stop 101
acggcaaggcgacactgacgaagtt

SEQ ID NO: 193952 - DNA, 25 bp, Artificial
  probe
  misc_feature (1)..(25): SEQ ID NO: 7192; WAN024F69_at; Start 79; Stop 103
ggcaaggcgacactgacgaagtttg

SEQ ID NO: 193953 - DNA, 25 bp, Artificial
  probe
  misc_feature (1)..(25): SEQ ID NO: 7192; WAN024F69_at; Start 84; Stop 108
ggcgacactgacgaagtttgaattg

SEQ ID NO: 193954 - DNA, 25 bp, Artificial
  probe
  misc_feature (1)..(25): SEQ ID NO: 7192; WAN024F69_at; Start 75; Stop 99
ctacggcaaggcgacactgacgaag

SEQ ID NO: 193955 - DNA, 25 bp, Artificial
  probe
  misc_feature (1)..(25): SEQ ID NO: 7192; WAN024F69_at; Start 87; Stop 111
gacactgacgaagtttgaattggat

SEQ ID NO: 193956 - DNA, 25 bp, Artificial
  probe
  misc_feature (1)..(25): SEQ ID NO: 7192; WAN024F69_at; Start 76; Stop 100
tacggcaaggcgacactgacgaagt

SEQ ID NO: 193957 - DNA, 25 bp, Artificial
  probe
  misc_feature (1)..(25): SEQ ID NO: 7192; WAN024F69_at; Start 81; Stop 105
caaggcgacactgacgaagtttgaa

SEQ ID NO: 193958 - DNA, 25 bp, Artificial
  probe
  misc_feature (1)..(25): SEQ ID NO: 7192; WAN024F69_at; Start 83; Stop 107
aggcgacactgacgaagtttgaatt

SEQ ID NO: 193959 - DNA, 25 bp, Artificial
  probe
  misc_feature (1)..(25): SEQ ID NO: 7192; WAN024F69_at; Start 89; Stop 113
cactgacgaagtttgaattggattt

SEQ ID NO: 193960 - DNA, 25 bp, Artificial
  probe
  misc_feature (1)..(25): SEQ ID NO: 7192; WAN024F69_at; Start 90; Stop 114
actgacgaagtttgaattggatttt

SEQ ID NO: 193961 - DNA, 25 bp, Artificial
  probe
  misc_feature (1)..(25): SEQ ID NO: 7192; WAN024F69_at; Start 80; Stop 104
gcaaggcgacactgacgaagtttga

SEQ ID NO: 193962 - DNA, 25 bp, Artificial
  probe
  misc_feature (1)..(25): SEQ ID NO: 7192; WAN024F69_at; Start 86; Stop 110
cgacactgacgaagtttgaattgga

SEQ ID NO: 193963 - DNA, 25 bp, Artificial
  probe
  misc_feature (1)..(25): SEQ ID NO: 7192; WAN024F69_at; Start 88; Stop 112
acactgacgaagtttgaattggatt

SEQ ID NO: 193964 - DNA, 25 bp, Artificial
  probe
  misc_feature (1)..(25): SEQ ID NO: 7192; WAN024F69_at; Start 78; Stop 102
cggcaaggcgacactgacgaagttt

SEQ ID NO: 193965 - DNA, 25 bp, Artificial
  probe
  misc_feature (1)..(25): SEQ ID NO: 7192; WAN024F69_at; Start 85; Stop 109
gcgacactgacgaagtttgaattgg

SEQ ID NO: 193966 - DNA, 25 bp, Artificial
  probe
  misc_feature (1)..(25): SEQ ID NO: 7192; WAN024F69_at; Start 91; Stop 115
ctgacgaagtttgaattggattttc

SEQ ID NO: 193967 - DNA, 25 bp, Artificial
  probe
  misc_feature (1)..(25): SEQ ID NO: 7475; WAN024F6A_x_at; Start 48; Stop 72
gtataatttacgtgttcccaagatg

SEQ ID NO: 193968 - DNA, 25 bp, Artificial
  probe
  misc_feature (1)..(25): SEQ ID NO: 7475; WAN024F6A_x_at; Start 6; Stop 30
gttgcggatggggctgacatggttt

SEQ ID NO: 193969 - DNA, 25 bp, Artificial
  probe
  misc_feature (1)..(25): SEQ ID NO: 7475; WAN024F6A_x_at; Start 14; Stop 38
tggggctgacatggtttgaagagat

SEQ ID NO: 193970 - DNA, 25 bp, Artificial
  probe
  misc_feature (1)..(25): SEQ ID NO: 7475; WAN024F6A_x_at; Start 57; Stop 81
acgtgttcccaagatggagaagtta

SEQ ID NO: 193971 - DNA, 25 bp, Artificial
  probe
  misc_feature (1)..(25): SEQ ID NO: 7475; WAN024F6A_x_at; Start 12; Stop 36
gatggggctgacatggtttgaagag

SEQ ID NO: 193972 - DNA, 25 bp, Artificial
  probe
  misc_feature (1)..(25): SEQ ID NO: 7475; WAN024F6A_x_at; Start 47; Stop 71
agtataatttacgtgttcccaagat

SEQ ID NO: 193973 - DNA, 25 bp, Artificial
  probe
  misc_feature (1)..(25): SEQ ID NO: 7475; WAN024F6A_x_at; Start 52; Stop 76
aatttacgtgttcccaagatggaga

SEQ ID NO: 193974 - DNA, 25 bp, Artificial
  probe
  misc_feature (1)..(25): SEQ ID NO: 7475; WAN024F6A_x_at; Start 59; Stop 83
gtgttcccaagatggagaagttaga

SEQ ID NO: 193975 - DNA, 25 bp, Artificial
  probe
  misc_feature (1)..(25): SEQ ID NO: 7475; WAN024F6A_x_at; Start 4; Stop 28
aggttgcggatggggctgacatggt

SEQ ID NO: 193976 - DNA, 25 bp, Artificial
  probe
  misc_feature (1)..(25): SEQ ID NO: 7475; WAN024F6A_x_at; Start 60; Stop 84
tgttcccaagatggagaagttagac

SEQ ID NO: 193977 - DNA, 25 bp, Artificial
  probe
  misc_feature (1)..(25): SEQ ID NO: 7475; WAN024F6A_x_at; Start 50; Stop 74
ataatttacgtgttcccaagatgga

SEQ ID NO: 193978 - DNA, 25 bp, Artificial
  probe
  misc_feature (1)..(25): SEQ ID NO: 7475; WAN024F6A_x_at; Start 3; Stop 27
gaggttgcggatggggctgacatgg

SEQ ID NO: 193979 - DNA, 25 bp, Artificial
  probe
  misc_feature (1)..(25): SEQ ID NO: 7475; WAN024F6A_x_at; Start 5; Stop 29
ggttgcggatggggctgacatggtt

SEQ ID NO: 193980 - DNA, 25 bp, Artificial
  probe
  misc_feature (1)..(25): SEQ ID NO: 7475; WAN024F6A_x_at; Start 53; Stop 77
atttacgtgttcccaagatggagaa

SEQ ID NO: 193981 - DNA, 25 bp, Artificial
  probe
  misc_feature (1)..(25): SEQ ID NO: 7475; WAN024F6A_x_at; Start 11; Stop 35
ggatggggctgacatggtttgaaga

SEQ ID NO: 193982 - DNA, 25 bp, Artificial
  probe
  misc_feature (1)..(25): SEQ ID NO: 7475; WAN024F6A_x_at; Start 1; Stop 25
ttgaggttgcggatggggctgacat

SEQ ID NO: 193983 - DNA, 25 bp, Artificial
  probe
  misc_feature (1)..(25): SEQ ID NO: 7475; WAN024F6A_x_at; Start 55; Stop 79
ttacgtgttcccaagatggagaagt

SEQ ID NO: 193984 - DNA, 25 bp, Artificial
  probe
  misc_feature (1)..(25): SEQ ID NO: 7475; WAN024F6A_x_at; Start 41; Stop 65
tcgaagagtataatttacgtgttcc

SEQ ID NO: 193985 - DNA, 25 bp, Artificial
  probe
  misc_feature (1)..(25): SEQ ID NO: 7475; WAN024F6A_x_at; Start 58; Stop 82
cgtgttcccaagatggagaagttag

SEQ ID NO: 193986 - DNA, 25 bp, Artificial
  probe
  misc_feature (1)..(25): SEQ ID NO: 7475; WAN024F6A_x_at; Start 49; Stop 73
tataatttacgtgttcccaagatgg

SEQ ID NO: 193987 - DNA, 25 bp, Artificial
  probe
  misc_feature (1)..(25): SEQ ID NO: 7475; WAN024F6A_x_at; Start 2; Stop 26
tgaggttgcggatggggctgacatg

SEQ ID NO: 193988 - DNA, 25 bp, Artificial
  probe
  misc_feature (1)..(25): SEQ ID NO: 7475; WAN024F6A_x_at; Start 8; Stop 32
tgcggatggggctgacatggtttga

SEQ ID NO: 193989 - DNA, 25 bp, Artificial
  probe
  misc_feature (1)..(25): SEQ ID NO: 7475; WAN024F6A_x_at; Start 13; Stop 37
atggggctgacatggtttgaagaga

SEQ ID NO: 193990 - DNA, 25 bp, Artificial
  probe
  misc_feature (1)..(25): SEQ ID NO: 7475; WAN024F6A_x_at; Start 10; Stop 34
cggatggggctgacatggtttgaag

SEQ ID NO: 193991 - DNA, 25 bp, Artificial
  probe
  misc_feature (1)..(25): SEQ ID NO: 7475; WAN024F6A_x_at; Start 40; Stop 64
ttcgaagagtataatttacgtgttc

SEQ ID NO: 193992 - DNA, 25 bp, Artificial
  probe
  misc_feature (1)..(25): SEQ ID NO: 7475; WAN024F6A_x_at; Start 51; Stop 75
taatttacgtgttcccaagatggag

SEQ ID NO: 193993 - DNA, 25 bp, Artificial
  probe
  misc_feature (1)..(25): SEQ ID NO: 7475; WAN024F6A_x_at; Start 9; Stop 33
gcggatggggctgacatggtttgaa

SEQ ID NO: 193994 - DNA, 25 bp, Artificial
  probe
  misc_feature (1)..(25): SEQ ID NO: 7475; WAN024F6A_x_at; Start 54; Stop 78
tttacgtgttcccaagatggagaag

SEQ ID NO: 193995 - DNA, 25 bp, Artificial
  probe
  misc_feature (1)..(25): SEQ ID NO: 7475; WAN024F6A_x_at; Start 56; Stop 80
tacgtgttcccaagatggagaagtt

SEQ ID NO: 193996 - DNA, 25 bp, Artificial
  probe
  misc_feature (1)..(25): SEQ ID NO: 7475; WAN024F6A_x_at; Start 15; Stop 39
ggggctgacatggtttgaagagatt

SEQ ID NO: 193997 - DNA, 25 bp, Artificial
  probe
  misc_feature (1)..(25): SEQ ID NO: 7475; WAN024F6A_x_at; Start 45; Stop 69
agagtataatttacgtgttcccaag

SEQ ID NO: 193998 - DNA, 25 bp, Artificial
  probe
  misc_feature (1)..(25): SEQ ID NO: 7475; WAN024F6A_x_at; Start 43; Stop 67
gaagagtataatttacgtgttccca

SEQ ID NO: 193999 - DNA, 25 bp, Artificial
  probe
  misc_feature (1)..(25): SEQ ID NO: 7475; WAN024F6A_x_at; Start 46; Stop 70
gagtataatttacgtgttcccaaga

SEQ ID NO: 194000 - DNA, 25 bp, Artificial
  probe
  misc_feature (1)..(25): SEQ ID NO: 7475; WAN024F6A_x_at; Start 7; Stop 31
ttgcggatggggctgacatggtttg

SEQ ID NO: 194001 - DNA, 25 bp, Artificial
  probe
  misc_feature (1)..(25): SEQ ID NO: 6712; WAN024F6B_at; Start 257; Stop 281
attctttcaaggctactttttggcg

SEQ ID NO: 194002 - DNA, 25 bp, Artificial
  probe
  misc_feature (1)..(25): SEQ ID NO: 6712; WAN024F6B_at; Start 334; Stop 358
actgcaccgccacgaaggctcggtg

SEQ ID NO: 194003 - DNA, 25 bp, Artificial
  probe
  misc_feature (1)..(25): SEQ ID NO: 6712; WAN024F6B_at; Start 172; Stop 196
tattattctccatcaaaggcatctt

SEQ ID NO: 194004 - DNA, 25 bp, Artificial
  probe
  misc_feature (1)..(25): SEQ ID NO: 6712; WAN024F6B_at; Start 247; Stop 271
gcagccgcgaattctttcaaggcta

SEQ ID NO: 194005 - DNA, 25 bp, Artificial
  probe
  misc_feature (1)..(25): SEQ ID NO: 6712; WAN024F6B_at; Start 281; Stop 305
ggtcgttcaagcctgtcggtgttac

SEQ ID NO: 194006 - DNA, 25 bp, Artificial
  probe
  misc_feature (1)..(25): SEQ ID NO: 6712; WAN024F6B_at; Start 372; Stop 396
taggcggaatttcttaccagtctga

SEQ ID NO: 194007 - DNA, 25 bp, Artificial
  probe
  misc_feature (1)..(25): SEQ ID NO: 6712; WAN024F6B_at; Start 199; Stop 223
atatggtcaaagaagccttttttct

SEQ ID NO: 194008 - DNA, 25 bp, Artificial
  probe
  misc_feature (1)..(25): SEQ ID NO: 6712; WAN024F6B_at; Start 284; Stop 308
cgttcaagcctgtcggtgttacgac

SEQ ID NO: 194009 - DNA, 25 bp, Artificial
  probe
  misc_feature (1)..(25): SEQ ID NO: 6712; WAN024F6B_at; Start 221; Stop 245
tctttggatttactttcaagtcacc

SEQ ID NO: 194010 - DNA, 25 bp, Artificial
  probe
  misc_feature (1)..(25): SEQ ID NO: 6712; WAN024F6B_at; Start 250; Stop 274
gccgcgaattctttcaaggctactt

SEQ ID NO: 194011 - DNA, 25 bp, Artificial
  probe
  misc_feature (1)..(25): SEQ ID NO: 6712; WAN024F6B_at; Start 185; Stop 209
caaaggcatctttaatatggtcaaa

SEQ ID NO: 194012 - DNA, 25 bp, Artificial
  probe
  misc_feature (1)..(25): SEQ ID NO: 6712; WAN024F6B_at; Start 191; Stop 215
catctttaatatggtcaaagaagcc

SEQ ID NO: 194013 - DNA, 25 bp, Artificial
  probe
  misc_feature (1)..(25): SEQ ID NO: 6712; WAN024F6B_at; Start 321; Stop 345
gtattggtcaccaactgcaccgcca

SEQ ID NO: 194014 - DNA, 25 bp, Artificial
  probe
  misc_feature (1)..(25): SEQ ID NO: 6712; WAN024F6B_at; Start 279; Stop 303
gcggtcgttcaagcctgtcggtgtt

SEQ ID NO: 194015 - DNA, 25 bp, Artificial
  probe
  misc_feature (1)..(25): SEQ ID NO: 6712; WAN024F6B_at; Start 370; Stop 394
cgtaggcggaatttcttaccagtct

SEQ ID NO: 194016 - DNA, 25 bp, Artificial
  probe
  misc_feature (1)..(25): SEQ ID NO: 6712; WAN024F6B_at; Start 311; Stop 335
taacagtaacgtattggtcaccaac

SEQ ID NO: 194017 - DNA, 25 bp, Artificial
  probe
  misc_feature (1)..(25): SEQ ID NO: 6712; WAN024F6B_at; Start 227; Stop 251
gatttactttcaagtcaccagcagc

SEQ ID NO: 194018 - DNA, 25 bp, Artificial
  probe
  misc_feature (1)..(25): SEQ ID NO: 6712; WAN024F6B_at; Start 291; Stop 315
gcctgtcggtgttacgacattaaca

SEQ ID NO: 194019 - DNA, 25 bp, Artificial
  probe
  misc_feature (1)..(25): SEQ ID NO: 6712; WAN024F6B_at; Start 175; Stop 199
tattctccatcaaaggcatctttaa

SEQ ID NO: 194020 - DNA, 25 bp, Artificial
  probe
  misc_feature (1)..(25): SEQ ID NO: 6712; WAN024F6B_at; Start 288; Stop 312
caagcctgtcggtgttacgacatta

SEQ ID NO: 194021 - DNA, 25 bp, Artificial
  probe
  misc_feature (1)..(25): SEQ ID NO: 6712; WAN024F6B_at; Start 275; Stop 299
tttggcggtcgttcaagcctgtcgg

SEQ ID NO: 194022 - DNA, 25 bp, Artificial
  probe
  misc_feature (1)..(25): SEQ ID NO: 6712; WAN024F6B_at; Start 317; Stop 341
taacgtattggtcaccaactgcacc

SEQ ID NO: 194023 - DNA, 25 bp, Artificial
  probe
  misc_feature (1)..(25): SEQ ID NO: 6712; WAN024F6B_at; Start 169; Stop 193
gagtattattctccatcaaaggcat

SEQ ID NO: 194024 - DNA, 25 bp, Artificial
  probe
  misc_feature (1)..(25): SEQ ID NO: 6712; WAN024F6B_at; Start 166; Stop 190
gaagagtattattctccatcaaagg

SEQ ID NO: 194025 - DNA, 25 bp, Artificial
  probe
  misc_feature (1)..(25): SEQ ID NO: 6712; WAN024F6B_at; Start 297; Stop 321
cggtgttacgacattaacagtaacg

SEQ ID NO: 194026 - DNA, 25 bp, Artificial
  probe
  misc_feature (1)..(25): SEQ ID NO: 6712; WAN024F6B_at; Start 194; Stop 218
ctttaatatggtcaaagaagccttt

SEQ ID NO: 194027 - DNA, 25 bp, Artificial
  probe
  misc_feature (1)..(25): SEQ ID NO: 6712; WAN024F6B_at; Start 226; Stop 250
ggatttactttcaagtcaccagcag

SEQ ID NO: 194028 - DNA, 25 bp, Artificial
  probe
  misc_feature (1)..(25): SEQ ID NO: 6712; WAN024F6B_at; Start 367; Stop 391
ctacgtaggcggaatttcttaccag

SEQ ID NO: 194029 - DNA, 25 bp, Artificial
  probe
  misc_feature (1)..(25): SEQ ID NO: 6712; WAN024F6B_at; Start 238; Stop 262
aagtcaccagcagccgcgaattctt

SEQ ID NO: 194030 - DNA, 25 bp, Artificial
  probe
  misc_feature (1)..(25): SEQ ID NO: 6712; WAN024F6B_at; Start 271; Stop 295
actttttggcggtcgttcaagcctg

SEQ ID NO: 194031 - DNA, 25 bp, Artificial
  probe
  misc_feature (1)..(25): SEQ ID NO: 6712; WAN024F6B_at; Start 308; Stop 332
cattaacagtaacgtattggtcacc

SEQ ID NO: 194032 - DNA, 25 bp, Artificial
  probe
  misc_feature (1)..(25): SEQ ID NO: 6712; WAN024F6B_at; Start 182; Stop 206
catcaaaggcatctttaatatggtc

SEQ ID NO: 194033 - DNA, 25 bp, Artificial
  probe
  misc_feature (1)..(25): SEQ ID NO: 6712; WAN024F6B_at; Start 314; Stop 338
cagtaacgtattggtcaccaactgc

SEQ ID NO: 194034 - DNA, 25 bp, Artificial
  probe
  misc_feature (1)..(25): SEQ ID NO: 6712; WAN024F6B_at; Start 244; Stop 268
ccagcagccgcgaattctttcaagg

SEQ ID NO: 194035 - DNA, 25 bp, Artificial
  probe
  misc_feature (1)..(25): SEQ ID NO: 7704; WAN024F6C_at; Start 152; Stop 176
acttgaccttttctgaccaatgtag

SEQ ID NO: 194036 - DNA, 25 bp, Artificial
  probe
  misc_feature (1)..(25): SEQ ID NO: 7704; WAN024F6C_at; Start 129; Stop 153
tattggtcaattaaagtcaaaatac

SEQ ID NO: 194037 - DNA, 25 bp, Artificial
  probe
  misc_feature (1)..(25): SEQ ID NO: 7704; WAN024F6C_at; Start 54; Stop 78
tttactatacagtttcgaggttgta

SEQ ID NO: 194038 - DNA, 25 bp, Artificial
  probe
  misc_feature (1)..(25): SEQ ID NO: 7704; WAN024F6C_at; Start 145; Stop 169
tcaaaatacttgaccttttctgacc

SEQ ID NO: 194039 - DNA, 25 bp, Artificial
  probe
  misc_feature (1)..(25): SEQ ID NO: 7704; WAN024F6C_at; Start 154; Stop 178
ttgaccttttctgaccaatgtagta

SEQ ID NO: 194040 - DNA, 25 bp, Artificial
  probe
  misc_feature (1)..(25): SEQ ID NO: 7704; WAN024F6C_at; Start 59; Stop 83
tatacagtttcgaggttgtagataa

SEQ ID NO: 194041 - DNA, 25 bp, Artificial
  probe
  misc_feature (1)..(25): SEQ ID NO: 7704; WAN024F6C_at; Start 49; Stop 73
ttcattttactatacagtttcgagg

SEQ ID NO: 194042 - DNA, 25 bp, Artificial
  probe
  misc_feature (1)..(25): SEQ ID NO: 7704; WAN024F6C_at; Start 156; Stop 180
gaccttttctgaccaatgtagtata

SEQ ID NO: 194043 - DNA, 25 bp, Artificial
  probe
  misc_feature (1)..(25): SEQ ID NO: 7704; WAN024F6C_at; Start 57; Stop 81
actatacagtttcgaggttgtagat

SEQ ID NO: 194044 - DNA, 25 bp, Artificial
  probe
  misc_feature (1)..(25): SEQ ID NO: 7704; WAN024F6C_at; Start 132; Stop 156
tggtcaattaaagtcaaaatacttg

SEQ ID NO: 194045 - DNA, 25 bp, Artificial
  probe
  misc_feature (1)..(25): SEQ ID NO: 7704; WAN024F6C_at; Start 136; Stop 160
caattaaagtcaaaatacttgacct

SEQ ID NO: 194046 - DNA, 25 bp, Artificial
  probe
  misc_feature (1)..(25): SEQ ID NO: 7704; WAN024F6C_at; Start 135; Stop 159
tcaattaaagtcaaaatacttgacc

SEQ ID NO: 194047 - DNA, 25 bp, Artificial
  probe
  misc_feature (1)..(25): SEQ ID NO: 7704; WAN024F6C_at; Start 51; Stop 75
cattttactatacagtttcgaggtt

SEQ ID NO: 194048 - DNA, 25 bp, Artificial
  probe
  misc_feature (1)..(25): SEQ ID NO: 7704; WAN024F6C_at; Start 151; Stop 175
tacttgaccttttctgaccaatgta

SEQ ID NO: 194049 - DNA, 25 bp, Artificial
  probe
  misc_feature (1)..(25): SEQ ID NO: 7704; WAN024F6C_at; Start 158; Stop 182
ccttttctgaccaatgtagtatatt

SEQ ID NO: 194050 - DNA, 25 bp, Artificial
  probe
  misc_feature (1)..(25): SEQ ID NO: 7704; WAN024F6C_at; Start 50; Stop 74
tcattttactatacagtttcgaggt

SEQ ID NO: 194051 - DNA, 25 bp, Artificial
  probe
  misc_feature (1)..(25): SEQ ID NO: 7704; WAN024F6C_at; Start 56; Stop 80
tactatacagtttcgaggttgtaga

SEQ ID NO: 194052 - DNA, 25 bp, Artificial
  probe
  misc_feature (1)..(25): SEQ ID NO: 7704; WAN024F6C_at; Start 153; Stop 177
cttgaccttttctgaccaatgtagt

SEQ ID NO: 194053 - DNA, 25 bp, Artificial
  probe
  misc_feature (1)..(25): SEQ ID NO: 7704; WAN024F6C_at; Start 106; Stop 130
gagattttcgaagagataaaaaata

SEQ ID NO: 194054 - DNA, 25 bp, Artificial
  probe
  misc_feature (1)..(25): SEQ ID NO: 7704; WAN024F6C_at; Start 162; Stop 186
ttctgaccaatgtagtatattatga

SEQ ID NO: 194055 - DNA, 25 bp, Artificial
  probe
  misc_feature (1)..(25): SEQ ID NO: 7704; WAN024F6C_at; Start 113; Stop 137
tcgaagagataaaaaatattggtca

SEQ ID NO: 194056 - DNA, 25 bp, Artificial
  probe
  misc_feature (1)..(25): SEQ ID NO: 7704; WAN024F6C_at; Start 112; Stop 136
ttcgaagagataaaaaatattggtc

SEQ ID NO: 194057 - DNA, 25 bp, Artificial
  probe
  misc_feature (1)..(25): SEQ ID NO: 7704; WAN024F6C_at; Start 155; Stop 179
tgaccttttctgaccaatgtagtat

SEQ ID NO: 194058 - DNA, 25 bp, Artificial
  probe
  misc_feature (1)..(25): SEQ ID NO: 7704; WAN024F6C_at; Start 149; Stop 173
aatacttgaccttttctgaccaatg

SEQ ID NO: 194059 - DNA, 25 bp, Artificial
  probe
  misc_feature (1)..(25): SEQ ID NO: 7704; WAN024F6C_at; Start 52; Stop 76
attttactatacagtttcgaggttg

SEQ ID NO: 194060 - DNA, 25 bp, Artificial
  probe
  misc_feature (1)..(25): SEQ ID NO: 7704; WAN024F6C_at; Start 146; Stop 170
caaaatacttgaccttttctgacca

SEQ ID NO: 194061 - DNA, 25 bp, Artificial
  probe
  misc_feature (1)..(25): SEQ ID NO: 7704; WAN024F6C_at; Start 114; Stop 138
cgaagagataaaaaatattggtcaa

SEQ ID NO: 194062 - DNA, 25 bp, Artificial
  probe
  misc_feature (1)..(25): SEQ ID NO: 7704; WAN024F6C_at; Start 142; Stop 166
aagtcaaaatacttgaccttttctg

SEQ ID NO: 194063 - DNA, 25 bp, Artificial
  probe
  misc_feature (1)..(25): SEQ ID NO: 7704; WAN024F6C_at; Start 157; Stop 181
accttttctgaccaatgtagtatat

SEQ ID NO: 194064 - DNA, 25 bp, Artificial
  probe
  misc_feature (1)..(25): SEQ ID NO: 7704; WAN024F6C_at; Start 55; Stop 79
ttactatacagtttcgaggttgtag

SEQ ID NO: 194065 - DNA, 25 bp, Artificial
  probe
  misc_feature (1)..(25): SEQ ID NO: 7704; WAN024F6C_at; Start 148; Stop 172
aaatacttgaccttttctgaccaat

SEQ ID NO: 194066 - DNA, 25 bp, Artificial
  probe
  misc_feature (1)..(25): SEQ ID NO: 7704; WAN024F6C_at; Start 133; Stop 157
ggtcaattaaagtcaaaatacttga

SEQ ID NO: 194067 - DNA, 25 bp, Artificial
  probe
  misc_feature (1)..(25): SEQ ID NO: 7704; WAN024F6C_at; Start 58; Stop 82
ctatacagtttcgaggttgtagata

SEQ ID NO: 194068 - DNA, 25 bp, Artificial
  probe
  misc_feature (1)..(25): SEQ ID NO: 7704; WAN024F6C_at; Start 115; Stop 139
gaagagataaaaaatattggtcaat

SEQ ID NO: 194069 - DNA, 25 bp, Artificial
  probe
  misc_feature (1)..(25): SEQ ID NO: 7456; WAN024F6D_at; Start 43; Stop 67
aaaggtgagggacaatgtcctcgcc

SEQ ID NO: 194070 - DNA, 25 bp, Artificial
  probe
  misc_feature (1)..(25): SEQ ID NO: 7456; WAN024F6D_at; Start 114; Stop 138
ctgtagaataaaaggaggaatctat

SEQ ID NO: 194071 - DNA, 25 bp, Artificial
  probe
  misc_feature (1)..(25): SEQ ID NO: 7456; WAN024F6D_at; Start 112; Stop 136
gactgtagaataaaaggaggaatct

SEQ ID NO: 194072 - DNA, 25 bp, Artificial
  probe
  misc_feature (1)..(25): SEQ ID NO: 7456; WAN024F6D_at; Start 90; Stop 114
ctttgtgaaaagagttataatagac

SEQ ID NO: 194073 - DNA, 25 bp, Artificial
  probe
  misc_feature (1)..(25): SEQ ID NO: 7456; WAN024F6D_at; Start 122; Stop 146
taaaaggaggaatctatgaacgcga

SEQ ID NO: 194074 - DNA, 25 bp, Artificial
  probe
  misc_feature (1)..(25): SEQ ID NO: 7456; WAN024F6D_at; Start 41; Stop 65
aaaaaggtgagggacaatgtcctcg

SEQ ID NO: 194075 - DNA, 25 bp, Artificial
  probe
  misc_feature (1)..(25): SEQ ID NO: 7456; WAN024F6D_at; Start 38; Stop 62
tcgaaaaaggtgagggacaatgtcc

SEQ ID NO: 194076 - DNA, 25 bp, Artificial
  probe
  misc_feature (1)..(25): SEQ ID NO: 7456; WAN024F6D_at; Start 108; Stop 132
aatagactgtagaataaaaggagga

SEQ ID NO: 194077 - DNA, 25 bp, Artificial
  probe
  misc_feature (1)..(25): SEQ ID NO: 7456; WAN024F6D_at; Start 82; Stop 106
gttgcttcctttgtgaaaagagtta

SEQ ID NO: 194078 - DNA, 25 bp, Artificial
  probe
  misc_feature (1)..(25): SEQ ID NO: 7456; WAN024F6D_at; Start 35; Stop 59
aattcgaaaaaggtgagggacaatg

SEQ ID NO: 194079 - DNA, 25 bp, Artificial
  probe
  misc_feature (1)..(25): SEQ ID NO: 7456; WAN024F6D_at; Start 50; Stop 74
agggacaatgtcctcgccttttatg

SEQ ID NO: 194080 - DNA, 25 bp, Artificial
  probe
  misc_feature (1)..(25): SEQ ID NO: 7456; WAN024F6D_at; Start 39; Stop 63
cgaaaaaggtgagggacaatgtcct

SEQ ID NO: 194081 - DNA, 25 bp, Artificial
  probe
  misc_feature (1)..(25): SEQ ID NO: 7456; WAN024F6D_at; Start 52; Stop 76
ggacaatgtcctcgccttttatgtt

SEQ ID NO: 194082 - DNA, 25 bp, Artificial
  probe
  misc_feature (1)..(25): SEQ ID NO: 7456; WAN024F6D_at; Start 48; Stop 72
tgagggacaatgtcctcgcctttta

SEQ ID NO: 194083 - DNA, 25 bp, Artificial
  probe
  misc_feature (1)..(25): SEQ ID NO: 7456; WAN024F6D_at; Start 121; Stop 145
ataaaaggaggaatctatgaacgcg

SEQ ID NO: 194084 - DNA, 25 bp, Artificial
  probe
  misc_feature (1)..(25): SEQ ID NO: 7456; WAN024F6D_at; Start 73; Stop 97
tgttttttagttgcttcctttgtga

SEQ ID NO: 194085 - DNA, 25 bp, Artificial
  probe
  misc_feature (1)..(25): SEQ ID NO: 7456; WAN024F6D_at; Start 123; Stop 147
aaaaggaggaatctatgaacgcgat

SEQ ID NO: 194086 - DNA, 25 bp, Artificial
  probe
  misc_feature (1)..(25): SEQ ID NO: 7456; WAN024F6D_at; Start 44; Stop 68
aaggtgagggacaatgtcctcgcct

SEQ ID NO: 194087 - DNA, 25 bp, Artificial
  probe
  misc_feature (1)..(25): SEQ ID NO: 7456; WAN024F6D_at; Start 93; Stop 117
tgtgaaaagagttataatagactgt

SEQ ID NO: 194088 - DNA, 25 bp, Artificial
  probe
  misc_feature (1)..(25): SEQ ID NO: 7456; WAN024F6D_at; Start 85; Stop 109
gcttcctttgtgaaaagagttataa

SEQ ID NO: 194089 - DNA, 25 bp, Artificial
  probe
  misc_feature (1)..(25): SEQ ID NO: 7456; WAN024F6D_at; Start 80; Stop 104
tagttgcttcctttgtgaaaagagt

SEQ ID NO: 194090 - DNA, 25 bp, Artificial
  probe
  misc_feature (1)..(25): SEQ ID NO: 7456; WAN024F6D_at; Start 124; Stop 148
aaaggaggaatctatgaacgcgatt

SEQ ID NO: 194091 - DNA, 25 bp, Artificial
  probe
  misc_feature (1)..(25): SEQ ID NO: 7456; WAN024F6D_at; Start 125; Stop 149
aaggaggaatctatgaacgcgattc

SEQ ID NO: 194092 - DNA, 25 bp, Artificial
  probe
  misc_feature (1)..(25): SEQ ID NO: 7456; WAN024F6D_at; Start 37; Stop 61
ttcgaaaaaggtgagggacaatgtc

SEQ ID NO: 194093 - DNA, 25 bp, Artificial
  probe
  misc_feature (1)..(25): SEQ ID NO: 7456; WAN024F6D_at; Start 55; Stop 79
caatgtcctcgccttttatgttttt

SEQ ID NO: 194094 - DNA, 25 bp, Artificial
  probe
  misc_feature (1)..(25): SEQ ID NO: 7456; WAN024F6D_at; Start 49; Stop 73
gagggacaatgtcctcgccttttat

SEQ ID NO: 194095 - DNA, 25 bp, Artificial
  probe
  misc_feature (1)..(25): SEQ ID NO: 7456; WAN024F6D_at; Start 42; Stop 66
aaaaggtgagggacaatgtcctcgc

SEQ ID NO: 194096 - DNA, 25 bp, Artificial
  probe
  misc_feature (1)..(25): SEQ ID NO: 7456; WAN024F6D_at; Start 107; Stop 131
taatagactgtagaataaaaggagg

SEQ ID NO: 194097 - DNA, 25 bp, Artificial
  probe
  misc_feature (1)..(25): SEQ ID NO: 7456; WAN024F6D_at; Start 120; Stop 144
aataaaaggaggaatctatgaacgc

SEQ ID NO: 194098 - DNA, 25 bp, Artificial
  probe
  misc_feature (1)..(25): SEQ ID NO: 7456; WAN024F6D_at; Start 127; Stop 151
ggaggaatctatgaacgcgattcaa

SEQ ID NO: 194099 - DNA, 25 bp, Artificial
  probe
  misc_feature (1)..(25): SEQ ID NO: 7456; WAN024F6D_at; Start 46; Stop 70
ggtgagggacaatgtcctcgccttt

SEQ ID NO: 194100 - DNA, 25 bp, Artificial
  probe
  misc_feature (1)..(25): SEQ ID NO: 7456; WAN024F6D_at; Start 78; Stop 102
tttagttgcttcctttgtgaaaaga

SEQ ID NO: 194101 - DNA, 25 bp, Artificial
  probe
  misc_feature (1)..(25): SEQ ID NO: 7456; WAN024F6D_at; Start 27; Stop 51
agagtataaattcgaaaaaggtgag

SEQ ID NO: 194102 - DNA, 25 bp, Artificial
  probe
  misc_feature (1)..(25): SEQ ID NO: 7456; WAN024F6D_at; Start 51; Stop 75
gggacaatgtcctcgccttttatgt

SEQ ID NO: 194103 - DNA, 25 bp, Artificial
  probe
  misc_feature (1)..(25): SEQ ID NO: 7465; WAN024F6E_at; Start 107; Stop 131
cggagcgagacggactcagagtcac

SEQ ID NO: 194104 - DNA, 25 bp, Artificial
  probe
  misc_feature (1)..(25): SEQ ID NO: 7465; WAN024F6E_at; Start 51; Stop 75
taaatttgaaatcatgaaaatccgt

SEQ ID NO: 194105 - DNA, 25 bp, Artificial
  probe
  misc_feature (1)..(25): SEQ ID NO: 7465; WAN024F6E_at; Start 106; Stop 130
acggagcgagacggactcagagtca

SEQ ID NO: 194106 - DNA, 25 bp, Artificial
  probe
  misc_feature (1)..(25): SEQ ID NO: 7465; WAN024F6E_at; Start 52; Stop 76
aaatttgaaatcatgaaaatccgtc

SEQ ID NO: 194107 - DNA, 25 bp, Artificial
  probe
  misc_feature (1)..(25): SEQ ID NO: 7465; WAN024F6E_at; Start 84; Stop 108
tggttgttttgtctcgcacctcacg

SEQ ID NO: 194108 - DNA, 25 bp, Artificial
  probe
  misc_feature (1)..(25): SEQ ID NO: 7465; WAN024F6E_at; Start 108; Stop 132
ggagcgagacggactcagagtcaca

SEQ ID NO: 194109 - DNA, 25 bp, Artificial
  probe
  misc_feature (1)..(25): SEQ ID NO: 7465; WAN024F6E_at; Start 40; Stop 64
ttcgaagaatataaatttgaaatca

SEQ ID NO: 194110 - DNA, 25 bp, Artificial
  probe
  misc_feature (1)..(25): SEQ ID NO: 7465; WAN024F6E_at; Start 60; Stop 84
aatcatgaaaatccgtcaaacgggt

SEQ ID NO: 194111 - DNA, 25 bp, Artificial
  probe
  misc_feature (1)..(25): SEQ ID NO: 7465; WAN024F6E_at; Start 54; Stop 78
atttgaaatcatgaaaatccgtcaa

SEQ ID NO: 194112 - DNA, 25 bp, Artificial
  probe
  misc_feature (1)..(25): SEQ ID NO: 7465; WAN024F6E_at; Start 99; Stop 123
gcacctcacggagcgagacggactc

SEQ ID NO: 194113 - DNA, 25 bp, Artificial
  probe
  misc_feature (1)..(25): SEQ ID NO: 7465; WAN024F6E_at; Start 55; Stop 79
tttgaaatcatgaaaatccgtcaaa

SEQ ID NO: 194114 - DNA, 25 bp, Artificial
  probe
  misc_feature (1)..(25): SEQ ID NO: 7465; WAN024F6E_at; Start 58; Stop 82
gaaatcatgaaaatccgtcaaacgg

SEQ ID NO: 194115 - DNA, 25 bp, Artificial
  probe
  misc_feature (1)..(25): SEQ ID NO: 7465; WAN024F6E_at; Start 50; Stop 74
ataaatttgaaatcatgaaaatccg

SEQ ID NO: 194116 - DNA, 25 bp, Artificial
  probe
  misc_feature (1)..(25): SEQ ID NO: 7465; WAN024F6E_at; Start 104; Stop 128
tcacggagcgagacggactcagagt

SEQ ID NO: 194117 - DNA, 25 bp, Artificial
  probe
  misc_feature (1)..(25): SEQ ID NO: 7465; WAN024F6E_at; Start 59; Stop 83
aaatcatgaaaatccgtcaaacggg

SEQ ID NO: 194118 - DNA, 25 bp, Artificial
  probe
  misc_feature (1)..(25): SEQ ID NO: 7465; WAN024F6E_at; Start 82; Stop 106
ggtggttgttttgtctcgcacctca

SEQ ID NO: 194119 - DNA, 25 bp, Artificial
  probe
  misc_feature (1)..(25): SEQ ID NO: 7465; WAN024F6E_at; Start 81; Stop 105
gggtggttgttttgtctcgcacctc

SEQ ID NO: 194120 - DNA, 25 bp, Artificial
  probe
  misc_feature (1)..(25): SEQ ID NO: 7465; WAN024F6E_at; Start 62; Stop 86
tcatgaaaatccgtcaaacgggtgg

SEQ ID NO: 194121 - DNA, 25 bp, Artificial
  probe
  misc_feature (1)..(25): SEQ ID NO: 7465; WAN024F6E_at; Start 41; Stop 65
tcgaagaatataaatttgaaatcat

SEQ ID NO: 194122 - DNA, 25 bp, Artificial
  probe
  misc_feature (1)..(25): SEQ ID NO: 7465; WAN024F6E_at; Start 101; Stop 125
acctcacggagcgagacggactcag

SEQ ID NO: 194123 - DNA, 25 bp, Artificial
  probe
  misc_feature (1)..(25): SEQ ID NO: 7465; WAN024F6E_at; Start 43; Stop 67
gaagaatataaatttgaaatcatga

SEQ ID NO: 194124 - DNA, 25 bp, Artificial
  probe
  misc_feature (1)..(25): SEQ ID NO: 7465; WAN024F6E_at; Start 57; Stop 81
tgaaatcatgaaaatccgtcaaacg

SEQ ID NO: 194125 - DNA, 25 bp, Artificial
  probe
  misc_feature (1)..(25): SEQ ID NO: 7465; WAN024F6E_at; Start 56; Stop 80
ttgaaatcatgaaaatccgtcaaac

SEQ ID NO: 194126 - DNA, 25 bp, Artificial
  probe
  misc_feature (1)..(25): SEQ ID NO: 7465; WAN024F6E_at; Start 105; Stop 129
cacggagcgagacggactcagagtc

SEQ ID NO: 194127 - DNA, 25 bp, Artificial
  probe
  misc_feature (1)..(25): SEQ ID NO: 7465; WAN024F6E_at; Start 102; Stop 126
cctcacggagcgagacggactcaga

SEQ ID NO: 194128 - DNA, 25 bp, Artificial
  probe
  misc_feature (1)..(25): SEQ ID NO: 7465; WAN024F6E_at; Start 98; Stop 122
cgcacctcacggagcgagacggact

SEQ ID NO: 194129 - DNA, 25 bp, Artificial
  probe
  misc_feature (1)..(25): SEQ ID NO: 7465; WAN024F6E_at; Start 85; Stop 109
ggttgttttgtctcgcacctcacgg

SEQ ID NO: 194130 - DNA, 25 bp, Artificial
  probe
  misc_feature (1)..(25): SEQ ID NO: 7465; WAN024F6E_at; Start 83; Stop 107
gtggttgttttgtctcgcacctcac

SEQ ID NO: 194131 - DNA, 25 bp, Artificial
  probe
  misc_feature (1)..(25): SEQ ID NO: 7465; WAN024F6E_at; Start 63; Stop 87
catgaaaatccgtcaaacgggtggt

SEQ ID NO: 194132 - DNA, 25 bp, Artificial
  probe
  misc_feature (1)..(25): SEQ ID NO: 7465; WAN024F6E_at; Start 53; Stop 77
aatttgaaatcatgaaaatccgtca

SEQ ID NO: 194133 - DNA, 25 bp, Artificial
  probe
  misc_feature (1)..(25): SEQ ID NO: 7465; WAN024F6E_at; Start 103; Stop 127
ctcacggagcgagacggactcagag

SEQ ID NO: 194134 - DNA, 25 bp, Artificial
  probe
  misc_feature (1)..(25): SEQ ID NO: 7465; WAN024F6E_at; Start 42; Stop 66
cgaagaatataaatttgaaatcatg

SEQ ID NO: 194135 - DNA, 25 bp, Artificial
  probe
  misc_feature (1)..(25): SEQ ID NO: 7465; WAN024F6E_at; Start 49; Stop 73
tataaatttgaaatcatgaaaatcc

SEQ ID NO: 194136 - DNA, 25 bp, Artificial
  probe
  misc_feature (1)..(25): SEQ ID NO: 7465; WAN024F6E_at; Start 86; Stop 110
gttgttttgtctcgcacctcacgga

SEQ ID NO: 194137 - DNA, 25 bp, Artificial
  probe
  misc_feature (1)..(25): SEQ ID NO: 7629; WAN024F6F_at; Start 36; Stop 60
tatccactatatttcttctcatact

SEQ ID NO: 194138 - DNA, 25 bp, Artificial
  probe
  misc_feature (1)..(25): SEQ ID NO: 7629; WAN024F6F_at; Start 30; Stop 54
aaagagtatccactatatttcttct

SEQ ID NO: 194139 - DNA, 25 bp, Artificial
  probe
  misc_feature (1)..(25): SEQ ID NO: 7629; WAN024F6F_at; Start 9; Stop 33
tcaggtggagtggttaatgttaaag

SEQ ID NO: 194140 - DNA, 25 bp, Artificial
  probe
  misc_feature (1)..(25): SEQ ID NO: 7629; WAN024F6F_at; Start 6; Stop 30
tagtcaggtggagtggttaatgtta

SEQ ID NO: 194141 - DNA, 25 bp, Artificial
  probe
  misc_feature (1)..(25): SEQ ID NO: 7629; WAN024F6F_at; Start 16; Stop 40
gagtggttaatgttaaagagtatcc

SEQ ID NO: 194142 - DNA, 25 bp, Artificial
  probe
  misc_feature (1)..(25): SEQ ID NO: 7629; WAN024F6F_at; Start 10; Stop 34
caggtggagtggttaatgttaaaga

SEQ ID NO: 194143 - DNA, 25 bp, Artificial
  probe
  misc_feature (1)..(25): SEQ ID NO: 7629; WAN024F6F_at; Start 29; Stop 53
taaagagtatccactatatttcttc

SEQ ID NO: 194144 - DNA, 25 bp, Artificial
  probe
  misc_feature (1)..(25): SEQ ID NO: 7629; WAN024F6F_at; Start 31; Stop 55
aagagtatccactatatttcttctc

SEQ ID NO: 194145 - DNA, 25 bp, Artificial
  probe
  misc_feature (1)..(25): SEQ ID NO: 7629; WAN024F6F_at; Start 45; Stop 69
tatttcttctcatactcaatggaaa

SEQ ID NO: 194146 - DNA, 25 bp, Artificial
  probe
  misc_feature (1)..(25): SEQ ID NO: 7629; WAN024F6F_at; Start 43; Stop 67
tatatttcttctcatactcaatgga

SEQ ID NO: 194147 - DNA, 25 bp, Artificial
  probe
  misc_feature (1)..(25): SEQ ID NO: 7629; WAN024F6F_at; Start 8; Stop 32
gtcaggtggagtggttaatgttaaa

SEQ ID NO: 194148 - DNA, 25 bp, Artificial
  probe
  misc_feature (1)..(25): SEQ ID NO: 7629; WAN024F6F_at; Start 20; Stop 44
ggttaatgttaaagagtatccacta

SEQ ID NO: 194149 - DNA, 25 bp, Artificial
  probe
  misc_feature (1)..(25): SEQ ID NO: 7629; WAN024F6F_at; Start 7; Stop 31
agtcaggtggagtggttaatgttaa

SEQ ID NO: 194150 - DNA, 25 bp, Artificial
  probe
  misc_feature (1)..(25): SEQ ID NO: 7629; WAN024F6F_at; Start 32; Stop 56
agagtatccactatatttcttctca

SEQ ID NO: 194151 - DNA, 25 bp, Artificial
  probe
  misc_feature (1)..(25): SEQ ID NO: 7629; WAN024F6F_at; Start 35; Stop 59
gtatccactatatttcttctcatac

SEQ ID NO: 194152 - DNA, 25 bp, Artificial
  probe
  misc_feature (1)..(25): SEQ ID NO: 7629; WAN024F6F_at; Start 42; Stop 66
ctatatttcttctcatactcaatgg

SEQ ID NO: 194153 - DNA, 25 bp, Artificial
  probe
  misc_feature (1)..(25): SEQ ID NO: 7629; WAN024F6F_at; Start 18; Stop 42
gtggttaatgttaaagagtatccac

SEQ ID NO: 194154 - DNA, 25 bp, Artificial
  probe
  misc_feature (1)..(25): SEQ ID NO: 7629; WAN024F6F_at; Start 19; Stop 43
tggttaatgttaaagagtatccact

SEQ ID NO: 194155 - DNA, 25 bp, Artificial
  probe
  misc_feature (1)..(25): SEQ ID NO: 7629; WAN024F6F_at; Start 46; Stop 70
atttcttctcatactcaatggaaat

SEQ ID NO: 194156 - DNA, 25 bp, Artificial
  probe
  misc_feature (1)..(25): SEQ ID NO: 7629; WAN024F6F_at; Start 40; Stop 64
cactatatttcttctcatactcaat

SEQ ID NO: 194157 - DNA, 25 bp, Artificial
  probe
  misc_feature (1)..(25): SEQ ID NO: 7629; WAN024F6F_at; Start 23; Stop 47
taatgttaaagagtatccactatat

SEQ ID NO: 194158 - DNA, 25 bp, Artificial
  probe
  misc_feature (1)..(25): SEQ ID NO: 7629; WAN024F6F_at; Start 41; Stop 65
actatatttcttctcatactcaatg

SEQ ID NO: 194159 - DNA, 25 bp, Artificial
  probe
  misc_feature (1)..(25): SEQ ID NO: 7629; WAN024F6F_at; Start 34; Stop 58
agtatccactatatttcttctcata

SEQ ID NO: 194160 - DNA, 25 bp, Artificial
  probe
  misc_feature (1)..(25): SEQ ID NO: 7629; WAN024F6F_at; Start 17; Stop 41
agtggttaatgttaaagagtatcca

SEQ ID NO: 194161 - DNA, 25 bp, Artificial
  probe
  misc_feature (1)..(25): SEQ ID NO: 7629; WAN024F6F_at; Start 27; Stop 51
gttaaagagtatccactatatttct

SEQ ID NO: 194162 - DNA, 25 bp, Artificial
  probe
  misc_feature (1)..(25): SEQ ID NO: 7629; WAN024F6F_at; Start 5; Stop 29
ctagtcaggtggagtggttaatgtt

SEQ ID NO: 194163 - DNA, 25 bp, Artificial
  probe
  misc_feature (1)..(25): SEQ ID NO: 7629; WAN024F6F_at; Start 24; Stop 48
aatgttaaagagtatccactatatt

SEQ ID NO: 194164 - DNA, 25 bp, Artificial
  probe
  misc_feature (1)..(25): SEQ ID NO: 7629; WAN024F6F_at; Start 39; Stop 63
ccactatatttcttctcatactcaa

SEQ ID NO: 194165 - DNA, 25 bp, Artificial
  probe
  misc_feature (1)..(25): SEQ ID NO: 7629; WAN024F6F_at; Start 33; Stop 57
gagtatccactatatttcttctcat

SEQ ID NO: 194166 - DNA, 25 bp, Artificial
  probe
  misc_feature (1)..(25): SEQ ID NO: 7629; WAN024F6F_at; Start 22; Stop 46
ttaatgttaaagagtatccactata

SEQ ID NO: 194167 - DNA, 25 bp, Artificial
  probe
  misc_feature (1)..(25): SEQ ID NO: 7629; WAN024F6F_at; Start 26; Stop 50
tgttaaagagtatccactatatttc

SEQ ID NO: 194168 - DNA, 25 bp, Artificial
  probe
  misc_feature (1)..(25): SEQ ID NO: 7629; WAN024F6F_at; Start 38; Stop 62
tccactatatttcttctcatactca

SEQ ID NO: 194169 - DNA, 25 bp, Artificial
  probe
  misc_feature (1)..(25): SEQ ID NO: 7629; WAN024F6F_at; Start 21; Stop 45
gttaatgttaaagagtatccactat

SEQ ID NO: 194170 - DNA, 25 bp, Artificial
  probe
  misc_feature (1)..(25): SEQ ID NO: 7629; WAN024F6F_at; Start 44; Stop 68
atatttcttctcatactcaatggaa

SEQ ID NO: 194171 - DNA, 25 bp, Artificial
  probe
  misc_feature (1)..(25): SEQ ID NO: 7512; WAN024F6G_at; Start 141; Stop 165
taaggaaaataacacttctcaagaa

SEQ ID NO: 194172 - DNA, 25 bp, Artificial
  probe
  misc_feature (1)..(25): SEQ ID NO: 7512; WAN024F6G_at; Start 273; Stop 297
cactgaaaatgaaaaacagcccaat

SEQ ID NO: 194173 - DNA, 25 bp, Artificial
  probe
  misc_feature (1)..(25): SEQ ID NO: 7512; WAN024F6G_at; Start 137; Stop 161
caaataaggaaaataacacttctca

SEQ ID NO: 194174 - DNA, 25 bp, Artificial
  probe
  misc_feature (1)..(25): SEQ ID NO: 7512; WAN024F6G_at; Start 5; Stop 29
ttaccgcgggtatcacgatcatgaa

SEQ ID NO: 194175 - DNA, 25 bp, Artificial
  probe
  misc_feature (1)..(25): SEQ ID NO: 7512; WAN024F6G_at; Start 249; Stop 273
tacacctgctacaagtaaacctgcc

SEQ ID NO: 194176 - DNA, 25 bp, Artificial
  probe
  misc_feature (1)..(25): SEQ ID NO: 7512; WAN024F6G_at; Start 153; Stop 177
cacttctcaagaaaaaacacaacaa

SEQ ID NO: 194177 - DNA, 25 bp, Artificial
  probe
  misc_feature (1)..(25): SEQ ID NO: 7512; WAN024F6G_at; Start 279; Stop 303
aaatgaaaaacagcccaatactcca

SEQ ID NO: 194178 - DNA, 25 bp, Artificial
  probe
  misc_feature (1)..(25): SEQ ID NO: 7512; WAN024F6G_at; Start 247; Stop 271
actacacctgctacaagtaaacctg

SEQ ID NO: 194179 - DNA, 25 bp, Artificial
  probe
  misc_feature (1)..(25): SEQ ID NO: 7512; WAN024F6G_at; Start 282; Stop 306
tgaaaaacagcccaatactccaact

SEQ ID NO: 194180 - DNA, 25 bp, Artificial
  probe
  misc_feature (1)..(25): SEQ ID NO: 7512; WAN024F6G_at; Start 268; Stop 292
cctgccactgaaaatgaaaaacagc

SEQ ID NO: 194181 - DNA, 25 bp, Artificial
  probe
  misc_feature (1)..(25): SEQ ID NO: 7512; WAN024F6G_at; Start 3; Stop 27
gattaccgcgggtatcacgatcatg

SEQ ID NO: 194182 - DNA, 25 bp, Artificial
  probe
  misc_feature (1)..(25): SEQ ID NO: 7512; WAN024F6G_at; Start 252; Stop 276
acctgctacaagtaaacctgccact

SEQ ID NO: 194183 - DNA, 25 bp, Artificial
  probe
  misc_feature (1)..(25): SEQ ID NO: 7512; WAN024F6G_at; Start 241; Stop 265
gactctactacacctgctacaagta

SEQ ID NO: 194184 - DNA, 25 bp, Artificial
  probe
  misc_feature (1)..(25): SEQ ID NO: 7512; WAN024F6G_at; Start 117; Stop 141
ccctcaggaaaatactactccaaat

SEQ ID NO: 194185 - DNA, 25 bp, Artificial
  probe
  misc_feature (1)..(25): SEQ ID NO: 7512; WAN024F6G_at; Start 4; Stop 28
attaccgcgggtatcacgatcatga

SEQ ID NO: 194186 - DNA, 25 bp, Artificial
  probe
  misc_feature (1)..(25): SEQ ID NO: 7512; WAN024F6G_at; Start 239; Stop 263
aggactctactacacctgctacaag

SEQ ID NO: 194187 - DNA, 25 bp, Artificial
  probe
  misc_feature (1)..(25): SEQ ID NO: 7512; WAN024F6G_at; Start 6; Stop 30
taccgcgggtatcacgatcatgaac

SEQ ID NO: 194188 - DNA, 25 bp, Artificial
  probe
  misc_feature (1)..(25): SEQ ID NO: 7512; WAN024F6G_at; Start 271; Stop 295
gccactgaaaatgaaaaacagccca

SEQ ID NO: 194189 - DNA, 25 bp, Artificial
  probe
  misc_feature (1)..(25): SEQ ID NO: 7512; WAN024F6G_at; Start 270; Stop 294
tgccactgaaaatgaaaaacagccc

SEQ ID NO: 194190 - DNA, 25 bp, Artificial
  probe
  misc_feature (1)..(25): SEQ ID NO: 7512; WAN024F6G_at; Start 291; Stop 315
gcccaatactccaacttcagaaaat

SEQ ID NO: 194191 - DNA, 25 bp, Artificial
  probe
  misc_feature (1)..(25): SEQ ID NO: 7512; WAN024F6G_at; Start 157; Stop 181
tctcaagaaaaaacacaacaagaag

SEQ ID NO: 194192 - DNA, 25 bp, Artificial
  probe
  misc_feature (1)..(25): SEQ ID NO: 7512; WAN024F6G_at; Start 7; Stop 31
accgcgggtatcacgatcatgaacg

SEQ ID NO: 194193 - DNA, 25 bp, Artificial
  probe
  misc_feature (1)..(25): SEQ ID NO: 7512; WAN024F6G_at; Start 84; Stop 108
gacaacctttgtcaaagaaattcaa

SEQ ID NO: 194194 - DNA, 25 bp, Artificial
  probe
  misc_feature (1)..(25): SEQ ID NO: 7512; WAN024F6G_at; Start 11; Stop 35
cgggtatcacgatcatgaacgcctt

SEQ ID NO: 194195 - DNA, 25 bp, Artificial
  probe
  misc_feature (1)..(25): SEQ ID NO: 7512; WAN024F6G_at; Start 150; Stop 174
taacacttctcaagaaaaaacacaa

SEQ ID NO: 194196 - DNA, 25 bp, Artificial
  probe
  misc_feature (1)..(25): SEQ ID NO: 7512; WAN024F6G_at; Start 289; Stop 313
cagcccaatactccaacttcagaaa

SEQ ID NO: 194197 - DNA, 25 bp, Artificial
  probe
  misc_feature (1)..(25): SEQ ID NO: 7512; WAN024F6G_at; Start 276; Stop 300
tgaaaatgaaaaacagcccaatact

SEQ ID NO: 194198 - DNA, 25 bp, Artificial
  probe
  misc_feature (1)..(25): SEQ ID NO: 7512; WAN024F6G_at; Start 10; Stop 34
gcgggtatcacgatcatgaacgcct

SEQ ID NO: 194199 - DNA, 25 bp, Artificial
  probe
  misc_feature (1)..(25): SEQ ID NO: 7512; WAN024F6G_at; Start 115; Stop 139
tcccctcaggaaaatactactccaa

SEQ ID NO: 194200 - DNA, 25 bp, Artificial
  probe
  misc_feature (1)..(25): SEQ ID NO: 7512; WAN024F6G_at; Start 2; Stop 26
tgattaccgcgggtatcacgatcat

SEQ ID NO: 194201 - DNA, 25 bp, Artificial
  probe
  misc_feature (1)..(25): SEQ ID NO: 7512; WAN024F6G_at; Start 121; Stop 145
caggaaaatactactccaaataagg

SEQ ID NO: 194202 - DNA, 25 bp, Artificial
  probe
  misc_feature (1)..(25): SEQ ID NO: 7512; WAN024F6G_at; Start 235; Stop 259
actcaggactctactacacctgcta

SEQ ID NO: 194203 - DNA, 25 bp, Artificial
  probe
  misc_feature (1)..(25): SEQ ID NO: 7512; WAN024F6G_at; Start 112; Stop 136
gaatcccctcaggaaaatactactc

SEQ ID NO: 194204 - DNA, 25 bp, Artificial
  probe
  misc_feature (1)..(25): SEQ ID NO: 7512; WAN024F6G_at; Start 286; Stop 310
aaacagcccaatactccaacttcag

SEQ ID NO: 194205 - DNA, 25 bp, Artificial
  probe
  misc_feature (1)..(25): SEQ ID NO: 7417; WAN024F6H_at; Start 126; Stop 150
tgacatagccaagagccgttggcat

SEQ ID NO: 194206 - DNA, 25 bp, Artificial
  probe
  misc_feature (1)..(25): SEQ ID NO: 7417; WAN024F6H_at; Start 100; Stop 124
gataattccacaggccaggccgata

SEQ ID NO: 194207 - DNA, 25 bp, Artificial
  probe
  misc_feature (1)..(25): SEQ ID NO: 7417; WAN024F6H_at; Start 93; Stop 117
gcgcaccgataattccacaggccag

SEQ ID NO: 194208 - DNA, 25 bp, Artificial
  probe
  misc_feature (1)..(25): SEQ ID NO: 7417; WAN024F6H_at; Start 110; Stop 134
caggccaggccgatactgacatagc

SEQ ID NO: 194209 - DNA, 25 bp, Artificial
  probe
  misc_feature (1)..(25): SEQ ID NO: 7417; WAN024F6H_at; Start 123; Stop 147
tactgacatagccaagagccgttgg

SEQ ID NO: 194210 - DNA, 25 bp, Artificial
  probe
  misc_feature (1)..(25): SEQ ID NO: 7417; WAN024F6H_at; Start 187; Stop 211
catctttctcctcatattgtcttaa

SEQ ID NO: 194211 - DNA, 25 bp, Artificial
  probe
  misc_feature (1)..(25): SEQ ID NO: 7417; WAN024F6H_at; Start 20; Stop 44
aacatggcaaactgggcactcccag

SEQ ID NO: 194212 - DNA, 25 bp, Artificial
  probe
  misc_feature (1)..(25): SEQ ID NO: 7417; WAN024F6H_at; Start 34; Stop 58
ggcactcccagcataaacaaagaga

SEQ ID NO: 194213 - DNA, 25 bp, Artificial
  probe
  misc_feature (1)..(25): SEQ ID NO: 7417; WAN024F6H_at; Start 50; Stop 74
acaaagagactcatcaagcccatct

SEQ ID NO: 194214 - DNA, 25 bp, Artificial
  probe
  misc_feature (1)..(25): SEQ ID NO: 7417; WAN024F6H_at; Start 12; Stop 36
tcagtgccaacatggcaaactgggc

SEQ ID NO: 194215 - DNA, 25 bp, Artificial
  probe
  misc_feature (1)..(25): SEQ ID NO: 7417; WAN024F6H_at; Start 32; Stop 56
tgggcactcccagcataaacaaaga

SEQ ID NO: 194216 - DNA, 25 bp, Artificial
  probe
  misc_feature (1)..(25): SEQ ID NO: 7417; WAN024F6H_at; Start 17; Stop 41
gccaacatggcaaactgggcactcc

SEQ ID NO: 194217 - DNA, 25 bp, Artificial
  probe
  misc_feature (1)..(25): SEQ ID NO: 7417; WAN024F6H_at; Start 2; Stop 26
tgaaccacaatcagtgccaacatgg

SEQ ID NO: 194218 - DNA, 25 bp, Artificial
  probe
  misc_feature (1)..(25): SEQ ID NO: 7417; WAN024F6H_at; Start 199; Stop 223
catattgtcttaataatactcaatg

SEQ ID NO: 194219 - DNA, 25 bp, Artificial
  probe
  misc_feature (1)..(25): SEQ ID NO: 7417; WAN024F6H_at; Start 121; Stop 145
gatactgacatagccaagagccgtt

SEQ ID NO: 194220 - DNA, 25 bp, Artificial
  probe
  misc_feature (1)..(25): SEQ ID NO: 7417; WAN024F6H_at; Start 103; Stop 127
aattccacaggccaggccgatactg

SEQ ID NO: 194221 - DNA, 25 bp, Artificial
  probe
  misc_feature (1)..(25): SEQ ID NO: 7417; WAN024F6H_at; Start 113; Stop 137
gccaggccgatactgacatagccaa

SEQ ID NO: 194222 - DNA, 25 bp, Artificial
  probe
  misc_feature (1)..(25): SEQ ID NO: 7417; WAN024F6H_at; Start 78; Stop 102
caggtgtcacatagggcgcaccgat

SEQ ID NO: 194223 - DNA, 25 bp, Artificial
  probe
  misc_feature (1)..(25): SEQ ID NO: 7417; WAN024F6H_at; Start 119; Stop 143
ccgatactgacatagccaagagccg

SEQ ID NO: 194224 - DNA, 25 bp, Artificial
  probe
  misc_feature (1)..(25): SEQ ID NO: 7417; WAN024F6H_at; Start 89; Stop 113
tagggcgcaccgataattccacagg

SEQ ID NO: 194225 - DNA, 25 bp, Artificial
  probe
  misc_feature (1)..(25): SEQ ID NO: 7417; WAN024F6H_at; Start 47; Stop 71
taaacaaagagactcatcaagccca

SEQ ID NO: 194226 - DNA, 25 bp, Artificial
  probe
  misc_feature (1)..(25): SEQ ID NO: 7417; WAN024F6H_at; Start 74; Stop 98
tcaacaggtgtcacatagggcgcac

SEQ ID NO: 194227 - DNA, 25 bp, Artificial
  probe
  misc_feature (1)..(25): SEQ ID NO: 7417; WAN024F6H_at; Start 139; Stop 163
agccgttggcatggctgcctgcgcc

SEQ ID NO: 194228 - DNA, 25 bp, Artificial
  probe
  misc_feature (1)..(25): SEQ ID NO: 7417; WAN024F6H_at; Start 4; Stop 28
aaccacaatcagtgccaacatggca

SEQ ID NO: 194229 - DNA, 25 bp, Artificial
  probe
  misc_feature (1)..(25): SEQ ID NO: 7417; WAN024F6H_at; Start 60; Stop 84
tcatcaagcccatctcaacaggtgt

SEQ ID NO: 194230 - DNA, 25 bp, Artificial
  probe
  misc_feature (1)..(25): SEQ ID NO: 7417; WAN024F6H_at; Start 131; Stop 155
tagccaagagccgttggcatggctg

SEQ ID NO: 194231 - DNA, 25 bp, Artificial
  probe
  misc_feature (1)..(25): SEQ ID NO: 7417; WAN024F6H_at; Start 134; Stop 158
ccaagagccgttggcatggctgcct

SEQ ID NO: 194232 - DNA, 25 bp, Artificial
  probe
  misc_feature (1)..(25): SEQ ID NO: 7417; WAN024F6H_at; Start 25; Stop 49
ggcaaactgggcactcccagcataa

SEQ ID NO: 194233 - DNA, 25 bp, Artificial
  probe
  misc_feature (1)..(25): SEQ ID NO: 7417; WAN024F6H_at; Start 84; Stop 108
tcacatagggcgcaccgataattcc

SEQ ID NO: 194234 - DNA, 25 bp, Artificial
  probe
  misc_feature (1)..(25): SEQ ID NO: 7417; WAN024F6H_at; Start 64; Stop 88
caagcccatctcaacaggtgtcaca

SEQ ID NO: 194235 - DNA, 25 bp, Artificial
  probe
  misc_feature (1)..(25): SEQ ID NO: 7417; WAN024F6H_at; Start 70; Stop 94
catctcaacaggtgtcacatagggc

SEQ ID NO: 194236 - DNA, 25 bp, Artificial
  probe
  misc_feature (1)..(25): SEQ ID NO: 7417; WAN024F6H_at; Start 72; Stop 96
tctcaacaggtgtcacatagggcgc

SEQ ID NO: 194237 - DNA, 25 bp, Artificial
  probe
  misc_feature (1)..(25): SEQ ID NO: 7417; WAN024F6H_at; Start 176; Stop 200
cctttttctttcatctttctcctca

SEQ ID NO: 194238 - DNA, 25 bp, Artificial
  probe
  misc_feature (1)..(25): SEQ ID NO: 7417; WAN024F6H_at; Start 39; Stop 63
tcccagcataaacaaagagactcat

SEQ ID NO: 194239 - DNA, 25 bp, Artificial
  probe
  misc_feature (1)..(25): SEQ ID NO: 7706; WAN024F6I_x_at; Start 6; Stop 30
agaaatcgatttgactgtcctgatc

SEQ ID NO: 194240 - DNA, 25 bp, Artificial
  probe
  misc_feature (1)..(25): SEQ ID NO: 7706; WAN024F6I_x_at; Start 36; Stop 60
gtcctattcttgtttcattttacta

SEQ ID NO: 194241 - DNA, 25 bp, Artificial
  probe
  misc_feature (1)..(25): SEQ ID NO: 7706; WAN024F6I_x_at; Start 22; Stop 46
gtcctgatcgttttgtcctattctt

SEQ ID NO: 194242 - DNA, 25 bp, Artificial
  probe
  misc_feature (1)..(25): SEQ ID NO: 7706; WAN024F6I_x_at; Start 53; Stop 77
ttttactatatttccatgataaaac

SEQ ID NO: 194243 - DNA, 25 bp, Artificial
  probe
  misc_feature (1)..(25): SEQ ID NO: 7706; WAN024F6I_x_at; Start 54; Stop 78
tttactatatttccatgataaaacg

SEQ ID NO: 194244 - DNA, 25 bp, Artificial
  probe
  misc_feature (1)..(25): SEQ ID NO: 7706; WAN024F6I_x_at; Start 65; Stop 89
tccatgataaaacgcatagtatcaa

SEQ ID NO: 194245 - DNA, 25 bp, Artificial
  probe
  misc_feature (1)..(25): SEQ ID NO: 7706; WAN024F6I_x_at; Start 56; Stop 80
tactatatttccatgataaaacgca

SEQ ID NO: 194246 - DNA, 25 bp, Artificial
  probe
  misc_feature (1)..(25): SEQ ID NO: 7706; WAN024F6I_x_at; Start 59; Stop 83
tatatttccatgataaaacgcatag

SEQ ID NO: 194247 - DNA, 25 bp, Artificial
  probe
  misc_feature (1)..(25): SEQ ID NO: 7706; WAN024F6I_x_at; Start 57; Stop 81
actatatttccatgataaaacgcat

SEQ ID NO: 194248 - DNA, 25 bp, Artificial
  probe
  misc_feature (1)..(25): SEQ ID NO: 7706; WAN024F6I_x_at; Start 58; Stop 82
ctatatttccatgataaaacgcata

SEQ ID NO: 194249 - DNA, 25 bp, Artificial
  probe
  misc_feature (1)..(25): SEQ ID NO: 7706; WAN024F6I_x_at; Start 29; Stop 53
tcgttttgtcctattcttgtttcat

SEQ ID NO: 194250 - DNA, 25 bp, Artificial
  probe
  misc_feature (1)..(25): SEQ ID NO: 7706; WAN024F6I_x_at; Start 30; Stop 54
cgttttgtcctattcttgtttcatt

SEQ ID NO: 194251 - DNA, 25 bp, Artificial
  probe
  misc_feature (1)..(25): SEQ ID NO: 7706; WAN024F6I_x_at; Start 21; Stop 45
tgtcctgatcgttttgtcctattct

SEQ ID NO: 194252 - DNA, 25 bp, Artificial
  probe
  misc_feature (1)..(25): SEQ ID NO: 7706; WAN024F6I_x_at; Start 67; Stop 91
catgataaaacgcatagtatcaagt

SEQ ID NO: 194253 - DNA, 25 bp, Artificial
  probe
  misc_feature (1)..(25): SEQ ID NO: 7706; WAN024F6I_x_at; Start 61; Stop 85
tatttccatgataaaacgcatagta

SEQ ID NO: 194254 - DNA, 25 bp, Artificial
  probe
  misc_feature (1)..(25): SEQ ID NO: 7706; WAN024F6I_x_at; Start 37; Stop 61
tcctattcttgtttcattttactat

SEQ ID NO: 194255 - DNA, 25 bp, Artificial
  probe
  misc_feature (1)..(25): SEQ ID NO: 7706; WAN024F6I_x_at; Start 69; Stop 93
tgataaaacgcatagtatcaagttt

SEQ ID NO: 194256 - DNA, 25 bp, Artificial
  probe
  misc_feature (1)..(25): SEQ ID NO: 7706; WAN024F6I_x_at; Start 70; Stop 94
gataaaacgcatagtatcaagtttt

SEQ ID NO: 194257 - DNA, 25 bp, Artificial
  probe
  misc_feature (1)..(25): SEQ ID NO: 7706; WAN024F6I_x_at; Start 63; Stop 87
tttccatgataaaacgcatagtatc

SEQ ID NO: 194258 - DNA, 25 bp, Artificial
  probe
  misc_feature (1)..(25): SEQ ID NO: 7706; WAN024F6I_x_at; Start 23; Stop 47
tcctgatcgttttgtcctattcttg

SEQ ID NO: 194259 - DNA, 25 bp, Artificial
  probe
  misc_feature (1)..(25): SEQ ID NO: 7706; WAN024F6I_x_at; Start 55; Stop 79
ttactatatttccatgataaaacgc

SEQ ID NO: 194260 - DNA, 25 bp, Artificial
  probe
  misc_feature (1)..(25): SEQ ID NO: 7706; WAN024F6I_x_at; Start 27; Stop 51
gatcgttttgtcctattcttgtttc

SEQ ID NO: 194261 - DNA, 25 bp, Artificial
  probe
  misc_feature (1)..(25): SEQ ID NO: 7706; WAN024F6I_x_at; Start 68; Stop 92
atgataaaacgcatagtatcaagtt

SEQ ID NO: 194262 - DNA, 25 bp, Artificial
  probe
  misc_feature (1)..(25): SEQ ID NO: 7706; WAN024F6I_x_at; Start 34; Stop 58
ttgtcctattcttgtttcattttac

SEQ ID NO: 194263 - DNA, 25 bp, Artificial
  probe
  misc_feature (1)..(25): SEQ ID NO: 7706; WAN024F6I_x_at; Start 35; Stop 59
tgtcctattcttgtttcattttact

SEQ ID NO: 194264 - DNA, 25 bp, Artificial
  probe
  misc_feature (1)..(25): SEQ ID NO: 7706; WAN024F6I_x_at; Start 25; Stop 49
ctgatcgttttgtcctattcttgtt

SEQ ID NO: 194265 - DNA, 25 bp, Artificial
  probe
  misc_feature (1)..(25): SEQ ID NO: 7706; WAN024F6I_x_at; Start 24; Stop 48
cctgatcgttttgtcctattcttgt

SEQ ID NO: 194266 - DNA, 25 bp, Artificial
  probe
  misc_feature (1)..(25): SEQ ID NO: 7706; WAN024F6I_x_at; Start 38; Stop 62
cctattcttgtttcattttactata

SEQ ID NO: 194267 - DNA, 25 bp, Artificial
  probe
  misc_feature (1)..(25): SEQ ID NO: 7706; WAN024F6I_x_at; Start 71; Stop 95
ataaaacgcatagtatcaagttttt

SEQ ID NO: 194268 - DNA, 25 bp, Artificial
  probe
  misc_feature (1)..(25): SEQ ID NO: 7706; WAN024F6I_x_at; Start 66; Stop 90
ccatgataaaacgcatagtatcaag

SEQ ID NO: 194269 - DNA, 25 bp, Artificial
  probe
  misc_feature (1)..(25): SEQ ID NO: 7706; WAN024F6I_x_at; Start 64; Stop 88
ttccatgataaaacgcatagtatca

SEQ ID NO: 194270 - DNA, 25 bp, Artificial
  probe
  misc_feature (1)..(25): SEQ ID NO: 7706; WAN024F6I_x_at; Start 26; Stop 50
tgatcgttttgtcctattcttgttt

SEQ ID NO: 194271 - DNA, 25 bp, Artificial
  probe
  misc_feature (1)..(25): SEQ ID NO: 7706; WAN024F6I_x_at; Start 28; Stop 52
atcgttttgtcctattcttgtttca

SEQ ID NO: 194272 - DNA, 25 bp, Artificial
  probe
  misc_feature (1)..(25): SEQ ID NO: 7706; WAN024F6I_x_at; Start 60; Stop 84
atatttccatgataaaacgcatagt

SEQ ID NO: 194273 - DNA, 25 bp, Artificial
  probe
  misc_feature (1)..(25): SEQ ID NO: 7684; WAN024F6J_at; Start 171; Stop 195
gccgattcccaaacttgtacttgag

SEQ ID NO: 194274 - DNA, 25 bp, Artificial
  probe
  misc_feature (1)..(25): SEQ ID NO: 7684; WAN024F6J_at; Start 186; Stop 210
tgtacttgagattggcgtgtttgtc

SEQ ID NO: 194275 - DNA, 25 bp, Artificial
  probe
  misc_feature (1)..(25): SEQ ID NO: 7684; WAN024F6J_at; Start 120; Stop 144
tggcttcattaagccctactggact

SEQ ID NO: 194276 - DNA, 25 bp, Artificial
  probe
  misc_feature (1)..(25): SEQ ID NO: 7684; WAN024F6J_at; Start 169; Stop 193
atgccgattcccaaacttgtacttg

SEQ ID NO: 194277 - DNA, 25 bp, Artificial
  probe
  misc_feature (1)..(25): SEQ ID NO: 7684; WAN024F6J_at; Start 182; Stop 206
aacttgtacttgagattggcgtgtt

SEQ ID NO: 194278 - DNA, 25 bp, Artificial
  probe
  misc_feature (1)..(25): SEQ ID NO: 7684; WAN024F6J_at; Start 201; Stop 225
cgtgtttgtcaaacatcatgagtgc

SEQ ID NO: 194279 - DNA, 25 bp, Artificial
  probe
  misc_feature (1)..(25): SEQ ID NO: 7684; WAN024F6J_at; Start 166; Stop 190
gaaatgccgattcccaaacttgtac

SEQ ID NO: 194280 - DNA, 25 bp, Artificial
  probe
  misc_feature (1)..(25): SEQ ID NO: 7684; WAN024F6J_at; Start 206; Stop 230
ttgtcaaacatcatgagtgcacttt

SEQ ID NO: 194281 - DNA, 25 bp, Artificial
  probe
  misc_feature (1)..(25): SEQ ID NO: 7684; WAN024F6J_at; Start 145; Stop 169
tacataataaccttcctcccagaaa

SEQ ID NO: 194282 - DNA, 25 bp, Artificial
  probe
  misc_feature (1)..(25): SEQ ID NO: 7684; WAN024F6J_at; Start 216; Stop 240
tcatgagtgcacttttgccttttaa

SEQ ID NO: 194283 - DNA, 25 bp, Artificial
  probe
  misc_feature (1)..(25): SEQ ID NO: 7684; WAN024F6J_at; Start 132; Stop 156
gccctactggacttacataataacc

SEQ ID NO: 194284 - DNA, 25 bp, Artificial
  probe
  misc_feature (1)..(25): SEQ ID NO: 7684; WAN024F6J_at; Start 141; Stop 165
gacttacataataaccttcctccca

SEQ ID NO: 194285 - DNA, 25 bp, Artificial
  probe
  misc_feature (1)..(25): SEQ ID NO: 7684; WAN024F6J_at; Start 114; Stop 138
taattgtggcttcattaagccctac

SEQ ID NO: 194286 - DNA, 25 bp, Artificial
  probe
  misc_feature (1)..(25): SEQ ID NO: 7684; WAN024F6J_at; Start 99; Stop 123
cttgactatatttcttaattgtggc

SEQ ID NO: 194287 - DNA, 25 bp, Artificial
  probe
  misc_feature (1)..(25): SEQ ID NO: 7684; WAN024F6J_at; Start 210; Stop 234
caaacatcatgagtgcacttttgcc

SEQ ID NO: 194288 - DNA, 25 bp, Artificial
  probe
  misc_feature (1)..(25): SEQ ID NO: 7684; WAN024F6J_at; Start 212; Stop 236
aacatcatgagtgcacttttgcctt

SEQ ID NO: 194289 - DNA, 25 bp, Artificial
  probe
  misc_feature (1)..(25): SEQ ID NO: 7684; WAN024F6J_at; Start 72; Stop 96
aatcatccactcgataatttcttta

SEQ ID NO: 194290 - DNA, 25 bp, Artificial
  probe
  misc_feature (1)..(25): SEQ ID NO: 7684; WAN024F6J_at; Start 79; Stop 103
cactcgataatttctttaatcttga

SEQ ID NO: 194291 - DNA, 25 bp, Artificial
  probe
  misc_feature (1)..(25): SEQ ID NO: 7684; WAN024F6J_at; Start 129; Stop 153
taagccctactggacttacataata

SEQ ID NO: 194292 - DNA, 25 bp, Artificial
  probe
  misc_feature (1)..(25): SEQ ID NO: 7684; WAN024F6J_at; Start 118; Stop 142
tgtggcttcattaagccctactgga

SEQ ID NO: 194293 - DNA, 25 bp, Artificial
  probe
  misc_feature (1)..(25): SEQ ID NO: 7684; WAN024F6J_at; Start 150; Stop 174
aataaccttcctcccagaaatgccg

SEQ ID NO: 194294 - DNA, 25 bp, Artificial
  probe
  misc_feature (1)..(25): SEQ ID NO: 7684; WAN024F6J_at; Start 152; Stop 176
taaccttcctcccagaaatgccgat

SEQ ID NO: 194295 - DNA, 25 bp, Artificial
  probe
  misc_feature (1)..(25): SEQ ID NO: 7684; WAN024F6J_at; Start 193; Stop 217
gagattggcgtgtttgtcaaacatc

SEQ ID NO: 194296 - DNA, 25 bp, Artificial
  probe
  misc_feature (1)..(25): SEQ ID NO: 7684; WAN024F6J_at; Start 124; Stop 148
ttcattaagccctactggacttaca

SEQ ID NO: 194297 - DNA, 25 bp, Artificial
  probe
  misc_feature (1)..(25): SEQ ID NO: 7684; WAN024F6J_at; Start 136; Stop 160
tactggacttacataataaccttcc

SEQ ID NO: 194298 - DNA, 25 bp, Artificial
  probe
  misc_feature (1)..(25): SEQ ID NO: 7684; WAN024F6J_at; Start 180; Stop 204
caaacttgtacttgagattggcgtg

SEQ ID NO: 194299 - DNA, 25 bp, Artificial
  probe
  misc_feature (1)..(25): SEQ ID NO: 7684; WAN024F6J_at; Start 163; Stop 187
ccagaaatgccgattcccaaacttg

SEQ ID NO: 194300 - DNA, 25 bp, Artificial
  probe
  misc_feature (1)..(25): SEQ ID NO: 7684; WAN024F6J_at; Start 102; Stop 126
gactatatttcttaattgtggcttc

SEQ ID NO: 194301 - DNA, 25 bp, Artificial
  probe
  misc_feature (1)..(25): SEQ ID NO: 7684; WAN024F6J_at; Start 84; Stop 108
gataatttctttaatcttgactata

SEQ ID NO: 194302 - DNA, 25 bp, Artificial
  probe
  misc_feature (1)..(25): SEQ ID NO: 7684; WAN024F6J_at; Start 173; Stop 197
cgattcccaaacttgtacttgagat

SEQ ID NO: 194303 - DNA, 25 bp, Artificial
  probe
  misc_feature (1)..(25): SEQ ID NO: 7684; WAN024F6J_at; Start 190; Stop 214
cttgagattggcgtgtttgtcaaac

SEQ ID NO: 194304 - DNA, 25 bp, Artificial
  probe
  misc_feature (1)..(25): SEQ ID NO: 7684; WAN024F6J_at; Start 203; Stop 227
tgtttgtcaaacatcatgagtgcac

SEQ ID NO: 194305 - DNA, 25 bp, Artificial
  probe
  misc_feature (1)..(25): SEQ ID NO: 7684; WAN024F6J_at; Start 111; Stop 135
tcttaattgtggcttcattaagccc

SEQ ID NO: 194306 - DNA, 25 bp, Artificial
  probe
  misc_feature (1)..(25): SEQ ID NO: 7684; WAN024F6J_at; Start 177; Stop 201
tcccaaacttgtacttgagattggc

SEQ ID NO: 194307 - DNA, 25 bp, Artificial
  probe
  misc_feature (1)..(25): SEQ ID NO: 6743; WAN024F6K_at; Start 38; Stop 62
tctttatgctcaatgaaaatcagac

SEQ ID NO: 194308 - DNA, 25 bp, Artificial
  probe
  misc_feature (1)..(25): SEQ ID NO: 6743; WAN024F6K_at; Start 48; Stop 72
caatgaaaatcagactagaaagcta

SEQ ID NO: 194309 - DNA, 25 bp, Artificial
  probe
  misc_feature (1)..(25): SEQ ID NO: 6743; WAN024F6K_at; Start 41; Stop 65
ttatgctcaatgaaaatcagactag

SEQ ID NO: 194310 - DNA, 25 bp, Artificial
  probe
  misc_feature (1)..(25): SEQ ID NO: 6743; WAN024F6K_at; Start 51; Stop 75
tgaaaatcagactagaaagctagcc

SEQ ID NO: 194311 - DNA, 25 bp, Artificial
  probe
  misc_feature (1)..(25): SEQ ID NO: 6743; WAN024F6K_at; Start 39; Stop 63
ctttatgctcaatgaaaatcagact

SEQ ID NO: 194312 - DNA, 25 bp, Artificial
  probe
  misc_feature (1)..(25): SEQ ID NO: 6743; WAN024F6K_at; Start 44; Stop 68
tgctcaatgaaaatcagactagaaa

SEQ ID NO: 194313 - DNA, 25 bp, Artificial
  probe
  misc_feature (1)..(25): SEQ ID NO: 6743; WAN024F6K_at; Start 49; Stop 73
aatgaaaatcagactagaaagctag

SEQ ID NO: 194314 - DNA, 25 bp, Artificial
  probe
  misc_feature (1)..(25): SEQ ID NO: 6743; WAN024F6K_at; Start 47; Stop 71
tcaatgaaaatcagactagaaagct

SEQ ID NO: 194315 - DNA, 25 bp, Artificial
  probe
  misc_feature (1)..(25): SEQ ID NO: 6743; WAN024F6K_at; Start 42; Stop 66
tatgctcaatgaaaatcagactaga

SEQ ID NO: 194316 - DNA, 25 bp, Artificial
  probe
  misc_feature (1)..(25): SEQ ID NO: 6743; WAN024F6K_at; Start 43; Stop 67
atgctcaatgaaaatcagactagaa

SEQ ID NO: 194317 - DNA, 25 bp, Artificial
  probe
  misc_feature (1)..(25): SEQ ID NO: 6743; WAN024F6K_at; Start 46; Stop 70
ctcaatgaaaatcagactagaaagc

SEQ ID NO: 194318 - DNA, 25 bp, Artificial
  probe
  misc_feature (1)..(25): SEQ ID NO: 6743; WAN024F6K_at; Start 50; Stop 74
atgaaaatcagactagaaagctagc

SEQ ID NO: 194319 - DNA, 25 bp, Artificial
  probe
  misc_feature (1)..(25): SEQ ID NO: 6743; WAN024F6K_at; Start 45; Stop 69
gctcaatgaaaatcagactagaaag

SEQ ID NO: 194320 - DNA, 25 bp, Artificial
  probe
  misc_feature (1)..(25): SEQ ID NO: 6743; WAN024F6K_at; Start 40; Stop 64
tttatgctcaatgaaaatcagacta

SEQ ID NO: 194321 - DNA, 25 bp, Artificial
  probe
  misc_feature (1)..(25): SEQ ID NO: 7721; WAN024F6L_at; Start 34; Stop 58
agtggtggagaattatactcaatga

SEQ ID NO: 194322 - DNA, 25 bp, Artificial
  probe
  misc_feature (1)..(25): SEQ ID NO: 7721; WAN024F6L_at; Start 26; Stop 50
tggttaagagtggtggagaattata

SEQ ID NO: 194323 - DNA, 25 bp, Artificial
  probe
  misc_feature (1)..(25): SEQ ID NO: 7721; WAN024F6L_at; Start 28; Stop 52
gttaagagtggtggagaattatact

SEQ ID NO: 194324 - DNA, 25 bp, Artificial
  probe
  misc_feature (1)..(25): SEQ ID NO: 7721; WAN024F6L_at; Start 31; Stop 55
aagagtggtggagaattatactcaa

SEQ ID NO: 194325 - DNA, 25 bp, Artificial
  probe
  misc_feature (1)..(25): SEQ ID NO: 7721; WAN024F6L_at; Start 22; Stop 46
ttgatggttaagagtggtggagaat

SEQ ID NO: 194326 - DNA, 25 bp, Artificial
  probe
  misc_feature (1)..(25): SEQ ID NO: 7721; WAN024F6L_at; Start 21; Stop 45
tttgatggttaagagtggtggagaa

SEQ ID NO: 194327 - DNA, 25 bp, Artificial
  probe
  misc_feature (1)..(25): SEQ ID NO: 7721; WAN024F6L_at; Start 32; Stop 56
agagtggtggagaattatactcaat

SEQ ID NO: 194328 - DNA, 25 bp, Artificial
  probe
  misc_feature (1)..(25): SEQ ID NO: 7721; WAN024F6L_at; Start 23; Stop 47
tgatggttaagagtggtggagaatt

SEQ ID NO: 194329 - DNA, 25 bp, Artificial
  probe
  misc_feature (1)..(25): SEQ ID NO: 7721; WAN024F6L_at; Start 27; Stop 51
ggttaagagtggtggagaattatac

SEQ ID NO: 194330 - DNA, 25 bp, Artificial
  probe
  misc_feature (1)..(25): SEQ ID NO: 7721; WAN024F6L_at; Start 19; Stop 43
tttttgatggttaagagtggtggag

SEQ ID NO: 194331 - DNA, 25 bp, Artificial
  probe
  misc_feature (1)..(25): SEQ ID NO: 7721; WAN024F6L_at; Start 33; Stop 57
gagtggtggagaattatactcaatg

SEQ ID NO: 194332 - DNA, 25 bp, Artificial
  probe
  misc_feature (1)..(25): SEQ ID NO: 7721; WAN024F6L_at; Start 29; Stop 53
ttaagagtggtggagaattatactc

SEQ ID NO: 194333 - DNA, 25 bp, Artificial
  probe
  misc_feature (1)..(25): SEQ ID NO: 7721; WAN024F6L_at; Start 25; Stop 49
atggttaagagtggtggagaattat

SEQ ID NO: 194334 - DNA, 25 bp, Artificial
  probe
  misc_feature (1)..(25): SEQ ID NO: 7721; WAN024F6L_at; Start 17; Stop 41
actttttgatggttaagagtggtgg

SEQ ID NO: 194335 - DNA, 25 bp, Artificial
  probe
  misc_feature (1)..(25): SEQ ID NO: 7721; WAN024F6L_at; Start 30; Stop 54
taagagtggtggagaattatactca

SEQ ID NO: 194336 - DNA, 25 bp, Artificial
  probe
  misc_feature (1)..(25): SEQ ID NO: 7721; WAN024F6L_at; Start 18; Stop 42
ctttttgatggttaagagtggtgga

SEQ ID NO: 194337 - DNA, 25 bp, Artificial
  probe
  misc_feature (1)..(25): SEQ ID NO: 7721; WAN024F6L_at; Start 36; Stop 60
tggtggagaattatactcaatgaaa

SEQ ID NO: 194338 - DNA, 25 bp, Artificial
  probe
  misc_feature (1)..(25): SEQ ID NO: 7721; WAN024F6L_at; Start 35; Stop 59
gtggtggagaattatactcaatgaa

SEQ ID NO: 194339 - DNA, 25 bp, Artificial
  probe
  misc_feature (1)..(25): SEQ ID NO: 7721; WAN024F6L_at; Start 24; Stop 48
gatggttaagagtggtggagaatta

SEQ ID NO: 194340 - DNA, 25 bp, Artificial
  probe
  misc_feature (1)..(25): SEQ ID NO: 7721; WAN024F6L_at; Start 16; Stop 40
tactttttgatggttaagagtggtg

SEQ ID NO: 194341 - DNA, 25 bp, Artificial
  probe
  misc_feature (1)..(25): SEQ ID NO: 7721; WAN024F6L_at; Start 20; Stop 44
ttttgatggttaagagtggtggaga

SEQ ID NO: 194342 - DNA, 25 bp, Artificial
  probe
  misc_feature (1)..(25): SEQ ID NO: 6372; WAN024F6M_x_at; Start 36; Stop 60
tgttttagaagtagaggtgtactat

SEQ ID NO: 194343 - DNA, 25 bp, Artificial
  probe
  misc_feature (1)..(25): SEQ ID NO: 6372; WAN024F6M_x_at; Start 43; Stop 67
gaagtagaggtgtactattctagtt

SEQ ID NO: 194344 - DNA, 25 bp, Artificial
  probe
  misc_feature (1)..(25): SEQ ID NO: 6372; WAN024F6M_x_at; Start 26; Stop 50
tttctaacaatgttttagaagtaga

SEQ ID NO: 194345 - DNA, 25 bp, Artificial
  probe
  misc_feature (1)..(25): SEQ ID NO: 6372; WAN024F6M_x_at; Start 19; Stop 43
aaatcgatttctaacaatgttttag

SEQ ID NO: 194346 - DNA, 25 bp, Artificial
  probe
  misc_feature (1)..(25): SEQ ID NO: 6372; WAN024F6M_x_at; Start 17; Stop 41
acaaatcgatttctaacaatgtttt

SEQ ID NO: 194347 - DNA, 25 bp, Artificial
  probe
  misc_feature (1)..(25): SEQ ID NO: 6372; WAN024F6M_x_at; Start 28; Stop 52
tctaacaatgttttagaagtagagg

SEQ ID NO: 194348 - DNA, 25 bp, Artificial
  probe
  misc_feature (1)..(25): SEQ ID NO: 6372; WAN024F6M_x_at; Start 31; Stop 55
aacaatgttttagaagtagaggtgt

SEQ ID NO: 194349 - DNA, 25 bp, Artificial
  probe
  misc_feature (1)..(25): SEQ ID NO: 6372; WAN024F6M_x_at; Start 20; Stop 44
aatcgatttctaacaatgttttaga

SEQ ID NO: 194350 - DNA, 25 bp, Artificial
  probe
  misc_feature (1)..(25): SEQ ID NO: 6372; WAN024F6M_x_at; Start 8; Stop 32
aagaacaggacaaatcgatttctaa

SEQ ID NO: 194351 - DNA, 25 bp, Artificial
  probe
  misc_feature (1)..(25): SEQ ID NO: 6372; WAN024F6M_x_at; Start 38; Stop 62
ttttagaagtagaggtgtactattc

SEQ ID NO: 194352 - DNA, 25 bp, Artificial
  probe
  misc_feature (1)..(25): SEQ ID NO: 6372; WAN024F6M_x_at; Start 27; Stop 51
ttctaacaatgttttagaagtagag

SEQ ID NO: 194353 - DNA, 25 bp, Artificial
  probe
  misc_feature (1)..(25): SEQ ID NO: 6372; WAN024F6M_x_at; Start 12; Stop 36
acaggacaaatcgatttctaacaat

SEQ ID NO: 194354 - DNA, 25 bp, Artificial
  probe
  misc_feature (1)..(25): SEQ ID NO: 6372; WAN024F6M_x_at; Start 13; Stop 37
caggacaaatcgatttctaacaatg

SEQ ID NO: 194355 - DNA, 25 bp, Artificial
  probe
  misc_feature (1)..(25): SEQ ID NO: 6372; WAN024F6M_x_at; Start 22; Stop 46
tcgatttctaacaatgttttagaag

SEQ ID NO: 194356 - DNA, 25 bp, Artificial
  probe
  misc_feature (1)..(25): SEQ ID NO: 6372; WAN024F6M_x_at; Start 41; Stop 65
tagaagtagaggtgtactattctag

SEQ ID NO: 194357 - DNA, 25 bp, Artificial
  probe
  misc_feature (1)..(25): SEQ ID NO: 6372; WAN024F6M_x_at; Start 63; Stop 87
tagtttcaatctactatatttcgtc

SEQ ID NO: 194358 - DNA, 25 bp, Artificial
  probe
  misc_feature (1)..(25): SEQ ID NO: 6372; WAN024F6M_x_at; Start 39; Stop 63
tttagaagtagaggtgtactattct

SEQ ID NO: 194359 - DNA, 25 bp, Artificial
  probe
  misc_feature (1)..(25): SEQ ID NO: 6372; WAN024F6M_x_at; Start 18; Stop 42
caaatcgatttctaacaatgtttta

SEQ ID NO: 194360 - DNA, 25 bp, Artificial
  probe
  misc_feature (1)..(25): SEQ ID NO: 6372; WAN024F6M_x_at; Start 16; Stop 40
gacaaatcgatttctaacaatgttt

SEQ ID NO: 194361 - DNA, 25 bp, Artificial
  probe
  misc_feature (1)..(25): SEQ ID NO: 6372; WAN024F6M_x_at; Start 21; Stop 45
atcgatttctaacaatgttttagaa

SEQ ID NO: 194362 - DNA, 25 bp, Artificial
  probe
  misc_feature (1)..(25): SEQ ID NO: 6372; WAN024F6M_x_at; Start 42; Stop 66
agaagtagaggtgtactattctagt

SEQ ID NO: 194363 - DNA, 25 bp, Artificial
  probe
  misc_feature (1)..(25): SEQ ID NO: 6372; WAN024F6M_x_at; Start 33; Stop 57
caatgttttagaagtagaggtgtac

SEQ ID NO: 194364 - DNA, 25 bp, Artificial
  probe
  misc_feature (1)..(25): SEQ ID NO: 6372; WAN024F6M_x_at; Start 25; Stop 49
atttctaacaatgttttagaagtag

SEQ ID NO: 194365 - DNA, 25 bp, Artificial
  probe
  misc_feature (1)..(25): SEQ ID NO: 6372; WAN024F6M_x_at; Start 15; Stop 39
ggacaaatcgatttctaacaatgtt

SEQ ID NO: 194366 - DNA, 25 bp, Artificial
  probe
  misc_feature (1)..(25): SEQ ID NO: 6372; WAN024F6M_x_at; Start 24; Stop 48
gatttctaacaatgttttagaagta

SEQ ID NO: 194367 - DNA, 25 bp, Artificial
  probe
  misc_feature (1)..(25): SEQ ID NO: 6372; WAN024F6M_x_at; Start 35; Stop 59
atgttttagaagtagaggtgtacta

SEQ ID NO: 194368 - DNA, 25 bp, Artificial
  probe
  misc_feature (1)..(25): SEQ ID NO: 6372; WAN024F6M_x_at; Start 9; Stop 33
agaacaggacaaatcgatttctaac

SEQ ID NO: 194369 - DNA, 25 bp, Artificial
  probe
  misc_feature (1)..(25): SEQ ID NO: 6372; WAN024F6M_x_at; Start 30; Stop 54
taacaatgttttagaagtagaggtg

SEQ ID NO: 194370 - DNA, 25 bp, Artificial
  probe
  misc_feature (1)..(25): SEQ ID NO: 6372; WAN024F6M_x_at; Start 40; Stop 64
ttagaagtagaggtgtactattcta

SEQ ID NO: 194371 - DNA, 25 bp, Artificial
  probe
  misc_feature (1)..(25): SEQ ID NO: 6372; WAN024F6M_x_at; Start 34; Stop 58
aatgttttagaagtagaggtgtact

SEQ ID NO: 194372 - DNA, 25 bp, Artificial
  probe
  misc_feature (1)..(25): SEQ ID NO: 6372; WAN024F6M_x_at; Start 14; Stop 38
aggacaaatcgatttctaacaatgt

SEQ ID NO: 194373 - DNA, 25 bp, Artificial
  probe
  misc_feature (1)..(25): SEQ ID NO: 6372; WAN024F6M_x_at; Start 23; Stop 47
cgatttctaacaatgttttagaagt

SEQ ID NO: 194374 - DNA, 25 bp, Artificial
  probe
  misc_feature (1)..(25): SEQ ID NO: 6372; WAN024F6M_x_at; Start 29; Stop 53
ctaacaatgttttagaagtagaggt

SEQ ID NO: 194375 - DNA, 25 bp, Artificial
  probe
  misc_feature (1)..(25): SEQ ID NO: 6372; WAN024F6M_x_at; Start 32; Stop 56
acaatgttttagaagtagaggtgta

SEQ ID NO: 194376 - DNA, 25 bp, Artificial
  probe
  misc_feature (1)..(25): SEQ ID NO: 7635; WAN024F6N_x_at; Start 44; Stop 68
aggtcagccctatccgcaacctcaa

SEQ ID NO: 194377 - DNA, 25 bp, Artificial
  probe
  misc_feature (1)..(25): SEQ ID NO: 7635; WAN024F6N_x_at; Start 4; Stop 28
ggaacacgtaaattatactcttcga

SEQ ID NO: 194378 - DNA, 25 bp, Artificial
  probe
  misc_feature (1)..(25): SEQ ID NO: 7635; WAN024F6N_x_at; Start 39; Stop 63
aaaccaggtcagccctatccgcaac

SEQ ID NO: 194379 - DNA, 25 bp, Artificial
  probe
  misc_feature (1)..(25): SEQ ID NO: 7635; WAN024F6N_x_at; Start 8; Stop 32
cacgtaaattatactcttcgaaaat

SEQ ID NO: 194380 - DNA, 25 bp, Artificial
  probe
  misc_feature (1)..(25): SEQ ID NO: 7635; WAN024F6N_x_at; Start 52; Stop 76
cctatccgcaacctcaaaacagtgt

SEQ ID NO: 194381 - DNA, 25 bp, Artificial
  probe
  misc_feature (1)..(25): SEQ ID NO: 7635; WAN024F6N_x_at; Start 19; Stop 43
tactcttcgaaaatctcttcaaacc

SEQ ID NO: 194382 - DNA, 25 bp, Artificial
  probe
  misc_feature (1)..(25): SEQ ID NO: 7635; WAN024F6N_x_at; Start 5; Stop 29
gaacacgtaaattatactcttcgaa

SEQ ID NO: 194383 - DNA, 25 bp, Artificial
  probe
  misc_feature (1)..(25): SEQ ID NO: 7635; WAN024F6N_x_at; Start 38; Stop 62
caaaccaggtcagccctatccgcaa

SEQ ID NO: 194384 - DNA, 25 bp, Artificial
  probe
  misc_feature (1)..(25): SEQ ID NO: 7635; WAN024F6N_x_at; Start 37; Stop 61
tcaaaccaggtcagccctatccgca

SEQ ID NO: 194385 - DNA, 25 bp, Artificial
  probe
  misc_feature (1)..(25): SEQ ID NO: 7635; WAN024F6N_x_at; Start 45; Stop 69
ggtcagccctatccgcaacctcaaa

SEQ ID NO: 194386 - DNA, 25 bp, Artificial
  probe
  misc_feature (1)..(25): SEQ ID NO: 7635; WAN024F6N_x_at; Start 10; Stop 34
cgtaaattatactcttcgaaaatct

SEQ ID NO: 194387 - DNA, 25 bp, Artificial
  probe
  misc_feature (1)..(25): SEQ ID NO: 7635; WAN024F6N_x_at; Start 53; Stop 77
ctatccgcaacctcaaaacagtgtt

SEQ ID NO: 194388 - DNA, 25 bp, Artificial
  probe
  misc_feature (1)..(25): SEQ ID NO: 7635; WAN024F6N_x_at; Start 17; Stop 41
tatactcttcgaaaatctcttcaaa

SEQ ID NO: 194389 - DNA, 25 bp, Artificial
  probe
  misc_feature (1)..(25): SEQ ID NO: 7635; WAN024F6N_x_at; Start 50; Stop 74
gccctatccgcaacctcaaaacagt

SEQ ID NO: 194390 - DNA, 25 bp, Artificial
  probe
  misc_feature (1)..(25): SEQ ID NO: 7635; WAN024F6N_x_at; Start 36; Stop 60
ttcaaaccaggtcagccctatccgc

SEQ ID NO: 194391 - DNA, 25 bp, Artificial
  probe
  misc_feature (1)..(25): SEQ ID NO: 7635; WAN024F6N_x_at; Start 15; Stop 39
attatactcttcgaaaatctcttca

SEQ ID NO: 194392 - DNA, 25 bp, Artificial
  probe
  misc_feature (1)..(25): SEQ ID NO: 7635; WAN024F6N_x_at; Start 20; Stop 44
actcttcgaaaatctcttcaaacca

SEQ ID NO: 194393 - DNA, 25 bp, Artificial
  probe
  misc_feature (1)..(25): SEQ ID NO: 7635; WAN024F6N_x_at; Start 11; Stop 35
gtaaattatactcttcgaaaatctc

SEQ ID NO: 194394 - DNA, 25 bp, Artificial
  probe
  misc_feature (1)..(25): SEQ ID NO: 7635; WAN024F6N_x_at; Start 51; Stop 75
ccctatccgcaacctcaaaacagtg

SEQ ID NO: 194395 - DNA, 25 bp, Artificial
  probe
  misc_feature (1)..(25): SEQ ID NO: 7635; WAN024F6N_x_at; Start 21; Stop 45
ctcttcgaaaatctcttcaaaccag

SEQ ID NO: 194396 - DNA, 25 bp, Artificial
  probe
  misc_feature (1)..(25): SEQ ID NO: 7635; WAN024F6N_x_at; Start 14; Stop 38
aattatactcttcgaaaatctcttc

SEQ ID NO: 194397 - DNA, 25 bp, Artificial
  probe
  misc_feature (1)..(25): SEQ ID NO: 7635; WAN024F6N_x_at; Start 18; Stop 42
atactcttcgaaaatctcttcaaac

SEQ ID NO: 194398 - DNA, 25 bp, Artificial
  probe
  misc_feature (1)..(25): SEQ ID NO: 7635; WAN024F6N_x_at; Start 2; Stop 26
tgggaacacgtaaattatactcttc

SEQ ID NO: 194399 - DNA, 25 bp, Artificial
  probe
  misc_feature (1)..(25): SEQ ID NO: 7635; WAN024F6N_x_at; Start 16; Stop 40
ttatactcttcgaaaatctcttcaa

SEQ ID NO: 194400 - DNA, 25 bp, Artificial
  probe
  misc_feature (1)..(25): SEQ ID NO: 7635; WAN024F6N_x_at; Start 47; Stop 71
tcagccctatccgcaacctcaaaac

SEQ ID NO: 194401 - DNA, 25 bp, Artificial
  probe
  misc_feature (1)..(25): SEQ ID NO: 7635; WAN024F6N_x_at; Start 42; Stop 66
ccaggtcagccctatccgcaacctc

SEQ ID NO: 194402 - DNA, 25 bp, Artificial
  probe
  misc_feature (1)..(25): SEQ ID NO: 7635; WAN024F6N_x_at; Start 12; Stop 36
taaattatactcttcgaaaatctct

SEQ ID NO: 194403 - DNA, 25 bp, Artificial
  probe
  misc_feature (1)..(25): SEQ ID NO: 7635; WAN024F6N_x_at; Start 46; Stop 70
gtcagccctatccgcaacctcaaaa

SEQ ID NO: 194404 - DNA, 25 bp, Artificial
  probe
  misc_feature (1)..(25): SEQ ID NO: 7635; WAN024F6N_x_at; Start 49; Stop 73
agccctatccgcaacctcaaaacag

SEQ ID NO: 194405 - DNA, 25 bp, Artificial
  probe
  misc_feature (1)..(25): SEQ ID NO: 7635; WAN024F6N_x_at; Start 43; Stop 67
caggtcagccctatccgcaacctca

SEQ ID NO: 194406 - DNA, 25 bp, Artificial
  probe
  misc_feature (1)..(25): SEQ ID NO: 7635; WAN024F6N_x_at; Start 48; Stop 72
cagccctatccgcaacctcaaaaca

SEQ ID NO: 194407 - DNA, 25 bp, Artificial
  probe
  misc_feature (1)..(25): SEQ ID NO: 7635; WAN024F6N_x_at; Start 13; Stop 37
aaattatactcttcgaaaatctctt

SEQ ID NO: 194408 - DNA, 25 bp, Artificial
  probe
  misc_feature (1)..(25): SEQ ID NO: 7635; WAN024F6N_x_at; Start 40; Stop 64
aaccaggtcagccctatccgcaacc

SEQ ID NO: 194409 - DNA, 25 bp, Artificial
  probe
  misc_feature (1)..(25): SEQ ID NO: 7635; WAN024F6N_x_at; Start 41; Stop 65
accaggtcagccctatccgcaacct

SEQ ID NO: 194410 - DNA, 25 bp, Artificial
  probe
  misc_feature (1)..(25): SEQ ID NO: 7156; WAN024F6O_at; Start 6; Stop 30
tgatgagactgtgaaaagagcacaa

SEQ ID NO: 194411 - DNA, 25 bp, Artificial
  probe
  misc_feature (1)..(25): SEQ ID NO: 7156; WAN024F6O_at; Start 38; Stop 62
cttgcaagctggtcatactcttcga

SEQ ID NO: 194412 - DNA, 25 bp, Artificial
  probe
  misc_feature (1)..(25): SEQ ID NO: 7156; WAN024F6O_at; Start 22; Stop 46
agagcacaaagaccagcttgcaagc

SEQ ID NO: 194413 - DNA, 25 bp, Artificial
  probe
  misc_feature (1)..(25): SEQ ID NO: 7156; WAN024F6O_at; Start 19; Stop 43
aaaagagcacaaagaccagcttgca

SEQ ID NO: 194414 - DNA, 25 bp, Artificial
  probe
  misc_feature (1)..(25): SEQ ID NO: 7156; WAN024F6O_at; Start 7; Stop 31
gatgagactgtgaaaagagcacaaa

SEQ ID NO: 194415 - DNA, 25 bp, Artificial
  probe
  misc_feature (1)..(25): SEQ ID NO: 7156; WAN024F6O_at; Start 39; Stop 63
ttgcaagctggtcatactcttcgaa

SEQ ID NO: 194416 - DNA, 25 bp, Artificial
  probe
  misc_feature (1)..(25): SEQ ID NO: 7156; WAN024F6O_at; Start 37; Stop 61
gcttgcaagctggtcatactcttcg

SEQ ID NO: 194417 - DNA, 25 bp, Artificial
  probe
  misc_feature (1)..(25): SEQ ID NO: 7156; WAN024F6O_at; Start 5; Stop 29
ttgatgagactgtgaaaagagcaca

SEQ ID NO: 194418 - DNA, 25 bp, Artificial
  probe
  misc_feature (1)..(25): SEQ ID NO: 7156; WAN024F6O_at; Start 20; Stop 44
aaagagcacaaagaccagcttgcaa

SEQ ID NO: 194419 - DNA, 25 bp, Artificial
  probe
  misc_feature (1)..(25): SEQ ID NO: 7156; WAN024F6O_at; Start 8; Stop 32
atgagactgtgaaaagagcacaaag

SEQ ID NO: 194420 - DNA, 25 bp, Artificial
  probe
  misc_feature (1)..(25): SEQ ID NO: 7156; WAN024F6O_at; Start 21; Stop 45
aagagcacaaagaccagcttgcaag

SEQ ID NO: 194421 - DNA, 25 bp, Artificial
  probe
  misc_feature (1)..(25): SEQ ID NO: 7175; WAN024F6P_at; Start 68; Stop 92
cagaagggcaaacacttttctcaga

SEQ ID NO: 194422 - DNA, 25 bp, Artificial
  probe
  misc_feature (1)..(25): SEQ ID NO: 7175; WAN024F6P_at; Start 41; Stop 65
actcttcctcaaaaaggttgagttg

SEQ ID NO: 194423 - DNA, 25 bp, Artificial
  probe
  misc_feature (1)..(25): SEQ ID NO: 7175; WAN024F6P_at; Start 25; Stop 49
tctttctcagatggagactcttcct

SEQ ID NO: 194424 - DNA, 25 bp, Artificial
  probe
  misc_feature (1)..(25): SEQ ID NO: 7175; WAN024F6P_at; Start 78; Stop 102
aacacttttctcagaggattttcca

SEQ ID NO: 194425 - DNA, 25 bp, Artificial
  probe
  misc_feature (1)..(25): SEQ ID NO: 7175; WAN024F6P_at; Start 31; Stop 55
tcagatggagactcttcctcaaaaa

SEQ ID NO: 194426 - DNA, 25 bp, Artificial
  probe
  misc_feature (1)..(25): SEQ ID NO: 7175; WAN024F6P_at; Start 38; Stop 62
gagactcttcctcaaaaaggttgag

SEQ ID NO: 194427 - DNA, 25 bp, Artificial
  probe
  misc_feature (1)..(25): SEQ ID NO: 7175; WAN024F6P_at; Start 43; Stop 67
tcttcctcaaaaaggttgagttgtc

SEQ ID NO: 194428 - DNA, 25 bp, Artificial
  probe
  misc_feature (1)..(25): SEQ ID NO: 7175; WAN024F6P_at; Start 21; Stop 45
tccatctttctcagatggagactct

SEQ ID NO: 194429 - DNA, 25 bp, Artificial
  probe
  misc_feature (1)..(25): SEQ ID NO: 7175; WAN024F6P_at; Start 7; Stop 31
caactgggaacatctccatctttct

SEQ ID NO: 194430 - DNA, 25 bp, Artificial
  probe
  misc_feature (1)..(25): SEQ ID NO: 7175; WAN024F6P_at; Start 34; Stop 58
gatggagactcttcctcaaaaaggt

SEQ ID NO: 194431 - DNA, 25 bp, Artificial
  probe
  misc_feature (1)..(25): SEQ ID NO: 7175; WAN024F6P_at; Start 3; Stop 27
gtttcaactgggaacatctccatct

SEQ ID NO: 194432 - DNA, 25 bp, Artificial
  probe
  misc_feature (1)..(25): SEQ ID NO: 7175; WAN024F6P_at; Start 50; Stop 74
caaaaaggttgagttgtccagaagg

SEQ ID NO: 194433 - DNA, 25 bp, Artificial
  probe
  misc_feature (1)..(25): SEQ ID NO: 7175; WAN024F6P_at; Start 71; Stop 95
aagggcaaacacttttctcagagga

SEQ ID NO: 194434 - DNA, 25 bp, Artificial
  probe
  misc_feature (1)..(25): SEQ ID NO: 7175; WAN024F6P_at; Start 66; Stop 90
tccagaagggcaaacacttttctca

SEQ ID NO: 194435 - DNA, 25 bp, Artificial
  probe
  misc_feature (1)..(25): SEQ ID NO: 7175; WAN024F6P_at; Start 2; Stop 26
tgtttcaactgggaacatctccatc

SEQ ID NO: 194436 - DNA, 25 bp, Artificial
  probe
  misc_feature (1)..(25): SEQ ID NO: 7175; WAN024F6P_at; Start 58; Stop 82
ttgagttgtccagaagggcaaacac

SEQ ID NO: 194437 - DNA, 25 bp, Artificial
  probe
  misc_feature (1)..(25): SEQ ID NO: 7175; WAN024F6P_at; Start 54; Stop 78
aaggttgagttgtccagaagggcaa

SEQ ID NO: 194438 - DNA, 25 bp, Artificial
  probe
  misc_feature (1)..(25): SEQ ID NO: 7175; WAN024F6P_at; Start 36; Stop 60
tggagactcttcctcaaaaaggttg

SEQ ID NO: 194439 - DNA, 25 bp, Artificial
  probe
  misc_feature (1)..(25): SEQ ID NO: 7175; WAN024F6P_at; Start 53; Stop 77
aaaggttgagttgtccagaagggca

SEQ ID NO: 194440 - DNA, 25 bp, Artificial
  probe
  misc_feature (1)..(25): SEQ ID NO: 7175; WAN024F6P_at; Start 46; Stop 70
tcctcaaaaaggttgagttgtccag

SEQ ID NO: 194441 - DNA, 25 bp, Artificial
  probe
  misc_feature (1)..(25): SEQ ID NO: 7175; WAN024F6P_at; Start 60; Stop 84
gagttgtccagaagggcaaacactt

SEQ ID NO: 194442 - DNA, 25 bp, Artificial
  probe
  misc_feature (1)..(25): SEQ ID NO: 7175; WAN024F6P_at; Start 29; Stop 53
tctcagatggagactcttcctcaaa

SEQ ID NO: 194443 - DNA, 25 bp, Artificial
  probe
  misc_feature (1)..(25): SEQ ID NO: 7175; WAN024F6P_at; Start 59; Stop 83
tgagttgtccagaagggcaaacact

SEQ ID NO: 194444 - DNA, 25 bp, Artificial
  probe
  misc_feature (1)..(25): SEQ ID NO: 7175; WAN024F6P_at; Start 6; Stop 30
tcaactgggaacatctccatctttc

SEQ ID NO: 194445 - DNA, 25 bp, Artificial
  probe
  misc_feature (1)..(25): SEQ ID NO: 7175; WAN024F6P_at; Start 74; Stop 98
ggcaaacacttttctcagaggattt

SEQ ID NO: 194446 - DNA, 25 bp, Artificial
  probe
  misc_feature (1)..(25): SEQ ID NO: 7175; WAN024F6P_at; Start 23; Stop 47
catctttctcagatggagactcttc

SEQ ID NO: 194447 - DNA, 25 bp, Artificial
  probe
  misc_feature (1)..(25): SEQ ID NO: 7175; WAN024F6P_at; Start 73; Stop 97
gggcaaacacttttctcagaggatt

SEQ ID NO: 194448 - DNA, 25 bp, Artificial
  probe
  misc_feature (1)..(25): SEQ ID NO: 7175; WAN024F6P_at; Start 65; Stop 89
gtccagaagggcaaacacttttctc

SEQ ID NO: 194449 - DNA, 25 bp, Artificial
  probe
  misc_feature (1)..(25): SEQ ID NO: 7175; WAN024F6P_at; Start 27; Stop 51
tttctcagatggagactcttcctca

SEQ ID NO: 194450 - DNA, 25 bp, Artificial
  probe
  misc_feature (1)..(25): SEQ ID NO: 7175; WAN024F6P_at; Start 61; Stop 85
agttgtccagaagggcaaacacttt

SEQ ID NO: 194451 - DNA, 25 bp, Artificial
  probe
  misc_feature (1)..(25): SEQ ID NO: 7175; WAN024F6P_at; Start 70; Stop 94
gaagggcaaacacttttctcagagg

SEQ ID NO: 194452 - DNA, 25 bp, Artificial
  probe
  misc_feature (1)..(25): SEQ ID NO: 7175; WAN024F6P_at; Start 49; Stop 73
tcaaaaaggttgagttgtccagaag

SEQ ID NO: 194453 - DNA, 25 bp, Artificial
  probe
  misc_feature (1)..(25): SEQ ID NO: 7175; WAN024F6P_at; Start 57; Stop 81
gttgagttgtccagaagggcaaaca

SEQ ID NO: 194454 - DNA, 25 bp, Artificial
  probe
  misc_feature (1)..(25): SEQ ID NO: 7175; WAN024F6P_at; Start 37; Stop 61
ggagactcttcctcaaaaaggttga

SEQ ID NO: 194455 - DNA, 25 bp, Artificial
  probe
  misc_feature (1)..(25): SEQ ID NO: 7586; WAN024F6Q_at; Start 9; Stop 33
gtcaggcttgtctgtaggtgttaat

SEQ ID NO: 194456 - DNA, 25 bp, Artificial
  probe
  misc_feature (1)..(25): SEQ ID NO: 7586; WAN024F6Q_at; Start 2; Stop 26
tgctatcgtcaggcttgtctgtagg

SEQ ID NO: 194457 - DNA, 25 bp, Artificial
  probe
  misc_feature (1)..(25): SEQ ID NO: 7586; WAN024F6Q_at; Start 19; Stop 43
tctgtaggtgttaatacttttcaaa

SEQ ID NO: 194458 - DNA, 25 bp, Artificial
  probe
  misc_feature (1)..(25): SEQ ID NO: 7586; WAN024F6Q_at; Start 15; Stop 39
cttgtctgtaggtgttaatactttt

SEQ ID NO: 194459 - DNA, 25 bp, Artificial
  probe
  misc_feature (1)..(25): SEQ ID NO: 7586; WAN024F6Q_at; Start 6; Stop 30
atcgtcaggcttgtctgtaggtgtt

SEQ ID NO: 194460 - DNA, 25 bp, Artificial
  probe
  misc_feature (1)..(25): SEQ ID NO: 7586; WAN024F6Q_at; Start 8; Stop 32
cgtcaggcttgtctgtaggtgttaa

SEQ ID NO: 194461 - DNA, 25 bp, Artificial
  probe
  misc_feature (1)..(25): SEQ ID NO: 7586; WAN024F6Q_at; Start 12; Stop 36
aggcttgtctgtaggtgttaatact

SEQ ID NO: 194462 - DNA, 25 bp, Artificial
  probe
  misc_feature (1)..(25): SEQ ID NO: 7586; WAN024F6Q_at; Start 16; Stop 40
ttgtctgtaggtgttaatacttttc

SEQ ID NO: 194463 - DNA, 25 bp, Artificial
  probe
  misc_feature (1)..(25): SEQ ID NO: 7586; WAN024F6Q_at; Start 18; Stop 42
gtctgtaggtgttaatacttttcaa

SEQ ID NO: 194464 - DNA, 25 bp, Artificial
  probe
  misc_feature (1)..(25): SEQ ID NO: 7586; WAN024F6Q_at; Start 13; Stop 37
ggcttgtctgtaggtgttaatactt

SEQ ID NO: 194465 - DNA, 25 bp, Artificial
  probe
  misc_feature (1)..(25): SEQ ID NO: 7586; WAN024F6Q_at; Start 5; Stop 29
tatcgtcaggcttgtctgtaggtgt

SEQ ID NO: 194466 - DNA, 25 bp, Artificial
  probe
  misc_feature (1)..(25): SEQ ID NO: 7586; WAN024F6Q_at; Start 4; Stop 28
ctatcgtcaggcttgtctgtaggtg

SEQ ID NO: 194467 - DNA, 25 bp, Artificial
  probe
  misc_feature (1)..(25): SEQ ID NO: 7586; WAN024F6Q_at; Start 11; Stop 35
caggcttgtctgtaggtgttaatac

SEQ ID NO: 194468 - DNA, 25 bp, Artificial
  probe
  misc_feature (1)..(25): SEQ ID NO: 7586; WAN024F6Q_at; Start 14; Stop 38
gcttgtctgtaggtgttaatacttt

SEQ ID NO: 194469 - DNA, 25 bp, Artificial
  probe
  misc_feature (1)..(25): SEQ ID NO: 7586; WAN024F6Q_at; Start 10; Stop 34
tcaggcttgtctgtaggtgttaata

SEQ ID NO: 194470 - DNA, 25 bp, Artificial
  probe
  misc_feature (1)..(25): SEQ ID NO: 7586; WAN024F6Q_at; Start 3; Stop 27
gctatcgtcaggcttgtctgtaggt

SEQ ID NO: 194471 - DNA, 25 bp, Artificial
  probe
  misc_feature (1)..(25): SEQ ID NO: 7586; WAN024F6Q_at; Start 1; Stop 25
ttgctatcgtcaggcttgtctgtag

SEQ ID NO: 194472 - DNA, 25 bp, Artificial
  probe
  misc_feature (1)..(25): SEQ ID NO: 7586; WAN024F6Q_at; Start 17; Stop 41
tgtctgtaggtgttaatacttttca

SEQ ID NO: 194473 - DNA, 25 bp, Artificial
  probe
  misc_feature (1)..(25): SEQ ID NO: 7586; WAN024F6Q_at; Start 7; Stop 31
tcgtcaggcttgtctgtaggtgtta

SEQ ID NO: 194474 - DNA, 25 bp, Artificial
  probe
  misc_feature (1)..(25): SEQ ID NO: 7711; WAN024F6R_at; Start 3; Stop 27
gttatcagatgagtttatactcttc

SEQ ID NO: 194475 - DNA, 25 bp, Artificial
  probe
  misc_feature (1)..(25): SEQ ID NO: 7711; WAN024F6R_at; Start 1; Stop 25
ttgttatcagatgagtttatactct

SEQ ID NO: 194476 - DNA, 25 bp, Artificial
  probe
  misc_feature (1)..(25): SEQ ID NO: 7711; WAN024F6R_at; Start 4; Stop 28
ttatcagatgagtttatactcttcg

SEQ ID NO: 194477 - DNA, 25 bp, Artificial
  probe
  misc_feature (1)..(25): SEQ ID NO: 7711; WAN024F6R_at; Start 2; Stop 26
tgttatcagatgagtttatactctt

SEQ ID NO: 194478 - DNA, 25 bp, Artificial
  probe
  misc_feature (1)..(25): SEQ ID NO: 7333; WAN024F6S_at; Start 19; Stop 43
gcgctctacctttctgtttatactc

SEQ ID NO: 194479 - DNA, 25 bp, Artificial
  probe
  misc_feature (1)..(25): SEQ ID NO: 7333; WAN024F6S_at; Start 7; Stop 31
aaattagaacacgcgctctaccttt

SEQ ID NO: 194480 - DNA, 25 bp, Artificial
  probe
  misc_feature (1)..(25): SEQ ID NO: 7333; WAN024F6S_at; Start 10; Stop 34
ttagaacacgcgctctacctttctg

SEQ ID NO: 194481 - DNA, 25 bp, Artificial
  probe
  misc_feature (1)..(25): SEQ ID NO: 7333; WAN024F6S_at; Start 4; Stop 28
ttcaaattagaacacgcgctctacc

SEQ ID NO: 194482 - DNA, 25 bp, Artificial
  probe
  misc_feature (1)..(25): SEQ ID NO: 7333; WAN024F6S_at; Start 15; Stop 39
acacgcgctctacctttctgtttat

SEQ ID NO: 194483 - DNA, 25 bp, Artificial
  probe
  misc_feature (1)..(25): SEQ ID NO: 7333; WAN024F6S_at; Start 11; Stop 35
tagaacacgcgctctacctttctgt

SEQ ID NO: 194484 - DNA, 25 bp, Artificial
  probe
  misc_feature (1)..(25): SEQ ID NO: 7333; WAN024F6S_at; Start 20; Stop 44
cgctctacctttctgtttatactct

SEQ ID NO: 194485 - DNA, 25 bp, Artificial
  probe
  misc_feature (1)..(25): SEQ ID NO: 7333; WAN024F6S_at; Start 22; Stop 46
ctctacctttctgtttatactcttc

SEQ ID NO: 194486 - DNA, 25 bp, Artificial
  probe
  misc_feature (1)..(25): SEQ ID NO: 7333; WAN024F6S_at; Start 21; Stop 45
gctctacctttctgtttatactctt

SEQ ID NO: 194487 - DNA, 25 bp, Artificial
  probe
  misc_feature (1)..(25): SEQ ID NO: 7333; WAN024F6S_at; Start 17; Stop 41
acgcgctctacctttctgtttatac

SEQ ID NO: 194488 - DNA, 25 bp, Artificial
  probe
  misc_feature (1)..(25): SEQ ID NO: 7333; WAN024F6S_at; Start 3; Stop 27
gttcaaattagaacacgcgctctac

SEQ ID NO: 194489 - DNA, 25 bp, Artificial
  probe
  misc_feature (1)..(25): SEQ ID NO: 7333; WAN024F6S_at; Start 14; Stop 38
aacacgcgctctacctttctgttta

SEQ ID NO: 194490 - DNA, 25 bp, Artificial
  probe
  misc_feature (1)..(25): SEQ ID NO: 7333; WAN024F6S_at; Start 1; Stop 25
gtgttcaaattagaacacgcgctct

SEQ ID NO: 194491 - DNA, 25 bp, Artificial
  probe
  misc_feature (1)..(25): SEQ ID NO: 7333; WAN024F6S_at; Start 9; Stop 33
attagaacacgcgctctacctttct

SEQ ID NO: 194492 - DNA, 25 bp, Artificial
  probe
  misc_feature (1)..(25): SEQ ID NO: 7333; WAN024F6S_at; Start 12; Stop 36
agaacacgcgctctacctttctgtt

SEQ ID NO: 194493 - DNA, 25 bp, Artificial
  probe
  misc_feature (1)..(25): SEQ ID NO: 7333; WAN024F6S_at; Start 16; Stop 40
cacgcgctctacctttctgtttata

SEQ ID NO: 194494 - DNA, 25 bp, Artificial
  probe
  misc_feature (1)..(25): SEQ ID NO: 7333; WAN024F6S_at; Start 5; Stop 29
tcaaattagaacacgcgctctacct

SEQ ID NO: 194495 - DNA, 25 bp, Artificial
  probe
  misc_feature (1)..(25): SEQ ID NO: 7333; WAN024F6S_at; Start 13; Stop 37
gaacacgcgctctacctttctgttt

SEQ ID NO: 194496 - DNA, 25 bp, Artificial
  probe
  misc_feature (1)..(25): SEQ ID NO: 7333; WAN024F6S_at; Start 8; Stop 32
aattagaacacgcgctctacctttc

SEQ ID NO: 194497 - DNA, 25 bp, Artificial
  probe
  misc_feature (1)..(25): SEQ ID NO: 7333; WAN024F6S_at; Start 23; Stop 47
tctacctttctgtttatactcttcg

SEQ ID NO: 194498 - DNA, 25 bp, Artificial
  probe
  misc_feature (1)..(25): SEQ ID NO: 7333; WAN024F6S_at; Start 2; Stop 26
tgttcaaattagaacacgcgctcta

SEQ ID NO: 194499 - DNA, 25 bp, Artificial
  probe
  misc_feature (1)..(25): SEQ ID NO: 7333; WAN024F6S_at; Start 18; Stop 42
cgcgctctacctttctgtttatact

SEQ ID NO: 194500 - DNA, 25 bp, Artificial
  probe
  misc_feature (1)..(25): SEQ ID NO: 7333; WAN024F6S_at; Start 6; Stop 30
caaattagaacacgcgctctacctt

SEQ ID NO: 194501 - DNA, 25 bp, Artificial
  probe
  misc_feature (1)..(25): SEQ ID NO: 7317; WAN024F6T_at; Start 142; Stop 166
gacttgatcaattttcaaatctgta

SEQ ID NO: 194502 - DNA, 25 bp, Artificial
  probe
  misc_feature (1)..(25): SEQ ID NO: 7317; WAN024F6T_at; Start 202; Stop 226
ttcattgaatatcagaaacccattc

SEQ ID NO: 194503 - DNA, 25 bp, Artificial
  probe
  misc_feature (1)..(25): SEQ ID NO: 7317; WAN024F6T_at; Start 163; Stop 187
tgtactttgagcaagctgagactag

SEQ ID NO: 194504 - DNA, 25 bp, Artificial
  probe
  misc_feature (1)..(25): SEQ ID NO: 7317; WAN024F6T_at; Start 59; Stop 83
acatcatgtcagcttcgtctttccg

SEQ ID NO: 194505 - DNA, 25 bp, Artificial
  probe
  misc_feature (1)..(25): SEQ ID NO: 7317; WAN024F6T_at; Start 63; Stop 87
catgtcagcttcgtctttccgtata

SEQ ID NO: 194506 - DNA, 25 bp, Artificial
  probe
  misc_feature (1)..(25): SEQ ID NO: 7317; WAN024F6T_at; Start 126; Stop 150
aacagtgtttcgagctgacttgatc

SEQ ID NO: 194507 - DNA, 25 bp, Artificial
  probe
  misc_feature (1)..(25): SEQ ID NO: 7317; WAN024F6T_at; Start 3; Stop 27
ggtgaatatttgtaaatcagtcagc

SEQ ID NO: 194508 - DNA, 25 bp, Artificial
  probe
  misc_feature (1)..(25): SEQ ID NO: 7317; WAN024F6T_at; Start 20; Stop 44
cagtcagcagacagaacgatactct

SEQ ID NO: 194509 - DNA, 25 bp, Artificial
  probe
  misc_feature (1)..(25): SEQ ID NO: 7317; WAN024F6T_at; Start 15; Stop 39
taaatcagtcagcagacagaacgat

SEQ ID NO: 194510 - DNA, 25 bp, Artificial
  probe
  misc_feature (1)..(25): SEQ ID NO: 7317; WAN024F6T_at; Start 171; Stop 195
gagcaagctgagactagcttcctat

SEQ ID NO: 194511 - DNA, 25 bp, Artificial
  probe
  misc_feature (1)..(25): SEQ ID NO: 7317; WAN024F6T_at; Start 229; Stop 253
catcaaataattcgactgcgtctaa

SEQ ID NO: 194512 - DNA, 25 bp, Artificial
  probe
  misc_feature (1)..(25): SEQ ID NO: 7317; WAN024F6T_at; Start 159; Stop 183
aatctgtactttgagcaagctgaga

SEQ ID NO: 194513 - DNA, 25 bp, Artificial
  probe
  misc_feature (1)..(25): SEQ ID NO: 7317; WAN024F6T_at; Start 254; Stop 278
taatttttgatctggcacggtgtct

SEQ ID NO: 194514 - DNA, 25 bp, Artificial
  probe
  misc_feature (1)..(25): SEQ ID NO: 7317; WAN024F6T_at; Start 177; Stop 201
gctgagactagcttcctatttgatt

SEQ ID NO: 194515 - DNA, 25 bp, Artificial
  probe
  misc_feature (1)..(25): SEQ ID NO: 7317; WAN024F6T_at; Start 257; Stop 281
tttttgatctggcacggtgtctgaa

SEQ ID NO: 194516 - DNA, 25 bp, Artificial
  probe
  misc_feature (1)..(25): SEQ ID NO: 7317; WAN024F6T_at; Start 224; Stop 248
ttctccatcaaataattcgactgcg

SEQ ID NO: 194517 - DNA, 25 bp, Artificial
  probe
  misc_feature (1)..(25): SEQ ID NO: 7317; WAN024F6T_at; Start 232; Stop 256
caaataattcgactgcgtctaataa

SEQ ID NO: 194518 - DNA, 25 bp, Artificial
  probe
  misc_feature (1)..(25): SEQ ID NO: 7317; WAN024F6T_at; Start 136; Stop 160
cgagctgacttgatcaattttcaaa

SEQ ID NO: 194519 - DNA, 25 bp, Artificial
  probe
  misc_feature (1)..(25): SEQ ID NO: 7317; WAN024F6T_at; Start 216; Stop 240
gaaacccattctccatcaaataatt

SEQ ID NO: 194520 - DNA, 25 bp, Artificial
  probe
  misc_feature (1)..(25): SEQ ID NO: 7317; WAN024F6T_at; Start 161; Stop 185
tctgtactttgagcaagctgagact

SEQ ID NO: 194521 - DNA, 25 bp, Artificial
  probe
  misc_feature (1)..(25): SEQ ID NO: 7317; WAN024F6T_at; Start 45; Stop 69
tcgaaaatctcttcacatcatgtca

SEQ ID NO: 194522 - DNA, 25 bp, Artificial
  probe
  misc_feature (1)..(25): SEQ ID NO: 7317; WAN024F6T_at; Start 54; Stop 78
tcttcacatcatgtcagcttcgtct

SEQ ID NO: 194523 - DNA, 25 bp, Artificial
  probe
  misc_feature (1)..(25): SEQ ID NO: 7317; WAN024F6T_at; Start 27; Stop 51
cagacagaacgatactcttcgaaaa

SEQ ID NO: 194524 - DNA, 25 bp, Artificial
  probe
  misc_feature (1)..(25): SEQ ID NO: 7317; WAN024F6T_at; Start 181; Stop 205
agactagcttcctatttgattttca

SEQ ID NO: 194525 - DNA, 25 bp, Artificial
  probe
  misc_feature (1)..(25): SEQ ID NO: 7317; WAN024F6T_at; Start 9; Stop 33
tatttgtaaatcagtcagcagacag

SEQ ID NO: 194526 - DNA, 25 bp, Artificial
  probe
  misc_feature (1)..(25): SEQ ID NO: 7317; WAN024F6T_at; Start 261; Stop 285
tgatctggcacggtgtctgaaataa

SEQ ID NO: 194527 - DNA, 25 bp, Artificial
  probe
  misc_feature (1)..(25): SEQ ID NO: 7317; WAN024F6T_at; Start 208; Stop 232
gaatatcagaaacccattctccatc

SEQ ID NO: 194528 - DNA, 25 bp, Artificial
  probe
  misc_feature (1)..(25): SEQ ID NO: 7317; WAN024F6T_at; Start 71; Stop 95
cttcgtctttccgtatatatgtgac

SEQ ID NO: 194529 - DNA, 25 bp, Artificial
  probe
  misc_feature (1)..(25): SEQ ID NO: 7317; WAN024F6T_at; Start 251; Stop 275
taataatttttgatctggcacggtg

SEQ ID NO: 194530 - DNA, 25 bp, Artificial
  probe
  misc_feature (1)..(25): SEQ ID NO: 7317; WAN024F6T_at; Start 239; Stop 263
ttcgactgcgtctaataatttttga

SEQ ID NO: 194531 - DNA, 25 bp, Artificial
  probe
  misc_feature (1)..(25): SEQ ID NO: 7317; WAN024F6T_at; Start 67; Stop 91
tcagcttcgtctttccgtatatatg

SEQ ID NO: 194532 - DNA, 25 bp, Artificial
  probe
  misc_feature (1)..(25): SEQ ID NO: 7317; WAN024F6T_at; Start 13; Stop 37
tgtaaatcagtcagcagacagaacg

SEQ ID NO: 194533 - DNA, 25 bp, Artificial
  probe
  misc_feature (1)..(25): SEQ ID NO: 7317; WAN024F6T_at; Start 128; Stop 152
cagtgtttcgagctgacttgatcaa

SEQ ID NO: 194534 - DNA, 25 bp, Artificial
  probe
  misc_feature (1)..(25): SEQ ID NO: 7317; WAN024F6T_at; Start 23; Stop 47
tcagcagacagaacgatactcttcg

SEQ ID NO: 194535 - DNA, 25 bp, Artificial
  probe
  misc_feature (1)..(25): SEQ ID NO: 7140; WAN024F6U_x_at; Start 8; Stop 32
taagaataatactctttgaaaatct

SEQ ID NO: 194536 - DNA, 25 bp, Artificial
  probe
  misc_feature (1)..(25): SEQ ID NO: 7140; WAN024F6U_x_at; Start 25; Stop 49
gaaaatctcttcaaaccacgtcaac

SEQ ID NO: 194537 - DNA, 25 bp, Artificial
  probe
  misc_feature (1)..(25): SEQ ID NO: 7140; WAN024F6U_x_at; Start 47; Stop 71
aacgtcgccttatctacaacctcaa

SEQ ID NO: 194538 - DNA, 25 bp, Artificial
  probe
  misc_feature (1)..(25): SEQ ID NO: 7140; WAN024F6U_x_at; Start 1; Stop 25
ctggcaataagaataatactctttg

SEQ ID NO: 194539 - DNA, 25 bp, Artificial
  probe
  misc_feature (1)..(25): SEQ ID NO: 7140; WAN024F6U_x_at; Start 11; Stop 35
gaataatactctttgaaaatctctt

SEQ ID NO: 194540 - DNA, 25 bp, Artificial
  probe
  misc_feature (1)..(25): SEQ ID NO: 7140; WAN024F6U_x_at; Start 17; Stop 41
tactctttgaaaatctcttcaaacc

SEQ ID NO: 194541 - DNA, 25 bp, Artificial
  probe
  misc_feature (1)..(25): SEQ ID NO: 7140; WAN024F6U_x_at; Start 20; Stop 44
tctttgaaaatctcttcaaaccacg

SEQ ID NO: 194542 - DNA, 25 bp, Artificial
  probe
  misc_feature (1)..(25): SEQ ID NO: 7140; WAN024F6U_x_at; Start 9; Stop 33
aagaataatactctttgaaaatctc

SEQ ID NO: 194543 - DNA, 25 bp, Artificial
  probe
  misc_feature (1)..(25): SEQ ID NO: 7140; WAN024F6U_x_at; Start 24; Stop 48
tgaaaatctcttcaaaccacgtcaa

SEQ ID NO: 194544 - DNA, 25 bp, Artificial
  probe
  misc_feature (1)..(25): SEQ ID NO: 7140; WAN024F6U_x_at; Start 22; Stop 46
tttgaaaatctcttcaaaccacgtc

SEQ ID NO: 194545 - DNA, 25 bp, Artificial
  probe
  misc_feature (1)..(25): SEQ ID NO: 7140; WAN024F6U_x_at; Start 48; Stop 72
acgtcgccttatctacaacctcaaa

SEQ ID NO: 194546 - DNA, 25 bp, Artificial
  probe
  misc_feature (1)..(25): SEQ ID NO: 7140; WAN024F6U_x_at; Start 4; Stop 28
gcaataagaataatactctttgaaa

SEQ ID NO: 194547 - DNA, 25 bp, Artificial
  probe
  misc_feature (1)..(25): SEQ ID NO: 7140; WAN024F6U_x_at; Start 18; Stop 42
actctttgaaaatctcttcaaacca

SEQ ID NO: 194548 - DNA, 25 bp, Artificial
  probe
  misc_feature (1)..(25): SEQ ID NO: 7140; WAN024F6U_x_at; Start 5; Stop 29
caataagaataatactctttgaaaa

SEQ ID NO: 194549 - DNA, 25 bp, Artificial
  probe
  misc_feature (1)..(25): SEQ ID NO: 7140; WAN024F6U_x_at; Start 46; Stop 70
caacgtcgccttatctacaacctca

SEQ ID NO: 194550 - DNA, 25 bp, Artificial
  probe
  misc_feature (1)..(25): SEQ ID NO: 7140; WAN024F6U_x_at; Start 29; Stop 53
atctcttcaaaccacgtcaacgtcg

SEQ ID NO: 194551 - DNA, 25 bp, Artificial
  probe
  misc_feature (1)..(25): SEQ ID NO: 7140; WAN024F6U_x_at; Start 19; Stop 43
ctctttgaaaatctcttcaaaccac

SEQ ID NO: 194552 - DNA, 25 bp, Artificial
  probe
  misc_feature (1)..(25): SEQ ID NO: 7140; WAN024F6U_x_at; Start 16; Stop 40
atactctttgaaaatctcttcaaac

SEQ ID NO: 194553 - DNA, 25 bp, Artificial
  probe
  misc_feature (1)..(25): SEQ ID NO: 7140; WAN024F6U_x_at; Start 3; Stop 27
ggcaataagaataatactctttgaa

SEQ ID NO: 194554 - DNA, 25 bp, Artificial
  probe
  misc_feature (1)..(25): SEQ ID NO: 7140; WAN024F6U_x_at; Start 50; Stop 74
gtcgccttatctacaacctcaaaac

SEQ ID NO: 194555 - DNA, 25 bp, Artificial
  probe
  misc_feature (1)..(25): SEQ ID NO: 7140; WAN024F6U_x_at; Start 13; Stop 37
ataatactctttgaaaatctcttca

SEQ ID NO: 194556 - DNA, 25 bp, Artificial
  probe
  misc_feature (1)..(25): SEQ ID NO: 7140; WAN024F6U_x_at; Start 49; Stop 73
cgtcgccttatctacaacctcaaaa

SEQ ID NO: 194557 - DNA, 25 bp, Artificial
  probe
  misc_feature (1)..(25): SEQ ID NO: 7140; WAN024F6U_x_at; Start 26; Stop 50
aaaatctcttcaaaccacgtcaacg

SEQ ID NO: 194558 - DNA, 25 bp, Artificial
  probe
  misc_feature (1)..(25): SEQ ID NO: 7140; WAN024F6U_x_at; Start 23; Stop 47
ttgaaaatctcttcaaaccacgtca

SEQ ID NO: 194559 - DNA, 25 bp, Artificial
  probe
  misc_feature (1)..(25): SEQ ID NO: 7140; WAN024F6U_x_at; Start 44; Stop 68
gtcaacgtcgccttatctacaacct

SEQ ID NO: 194560 - DNA, 25 bp, Artificial
  probe
  misc_feature (1)..(25): SEQ ID NO: 7140; WAN024F6U_x_at; Start 28; Stop 52
aatctcttcaaaccacgtcaacgtc

SEQ ID NO: 194561 - DNA, 25 bp, Artificial
  probe
  misc_feature (1)..(25): SEQ ID NO: 7140; WAN024F6U_x_at; Start 10; Stop 34
agaataatactctttgaaaatctct

SEQ ID NO: 194562 - DNA, 25 bp, Artificial
  probe
  misc_feature (1)..(25): SEQ ID NO: 7140; WAN024F6U_x_at; Start 2; Stop 26
tggcaataagaataatactctttga

SEQ ID NO: 194563 - DNA, 25 bp, Artificial
  probe
  misc_feature (1)..(25): SEQ ID NO: 7140; WAN024F6U_x_at; Start 45; Stop 69
tcaacgtcgccttatctacaacctc

SEQ ID NO: 194564 - DNA, 25 bp, Artificial
  probe
  misc_feature (1)..(25): SEQ ID NO: 7140; WAN024F6U_x_at; Start 14; Stop 38
taatactctttgaaaatctcttcaa

SEQ ID NO: 194565 - DNA, 25 bp, Artificial
  probe
  misc_feature (1)..(25): SEQ ID NO: 7140; WAN024F6U_x_at; Start 12; Stop 36
aataatactctttgaaaatctcttc

SEQ ID NO: 194566 - DNA, 25 bp, Artificial
  probe
  misc_feature (1)..(25): SEQ ID NO: 7140; WAN024F6U_x_at; Start 21; Stop 45
ctttgaaaatctcttcaaaccacgt

SEQ ID NO: 194567 - DNA, 25 bp, Artificial
  probe
  misc_feature (1)..(25): SEQ ID NO: 7140; WAN024F6U_x_at; Start 27; Stop 51
aaatctcttcaaaccacgtcaacgt

SEQ ID NO: 194568 - DNA, 25 bp, Artificial
  probe
  misc_feature (1)..(25): SEQ ID NO: 7140; WAN024F6U_x_at; Start 15; Stop 39
aatactctttgaaaatctcttcaaa

SEQ ID NO: 194569 - DNA, 25 bp, Artificial
  probe
  misc_feature (1)..(25): SEQ ID NO: 7258; WAN024F6V_x_at; Start 55; Stop 79
gccgtacgtatgattactgacttcg

SEQ ID NO: 194570 - DNA, 25 bp, Artificial
  probe
  misc_feature (1)..(25): SEQ ID NO: 7258; WAN024F6V_x_at; Start 10; Stop 34
tttatactcttcgaaaatctcttca

SEQ ID NO: 194571 - DNA, 25 bp, Artificial
  probe
  misc_feature (1)..(25): SEQ ID NO: 7258; WAN024F6V_x_at; Start 56; Stop 80
ccgtacgtatgattactgacttcgt

SEQ ID NO: 194572 - DNA, 25 bp, Artificial
  probe
  misc_feature (1)..(25): SEQ ID NO: 7258; WAN024F6V_x_at; Start 47; Stop 71
gtcgccttgccgtacgtatgattac

SEQ ID NO: 194573 - DNA, 25 bp, Artificial
  probe
  misc_feature (1)..(25): SEQ ID NO: 7258; WAN024F6V_x_at; Start 48; Stop 72
tcgccttgccgtacgtatgattact

SEQ ID NO: 194574 - DNA, 25 bp, Artificial
  probe
  misc_feature (1)..(25): SEQ ID NO: 7258; WAN024F6V_x_at; Start 14; Stop 38
tactcttcgaaaatctcttcaaacc

SEQ ID NO: 194575 - DNA, 25 bp, Artificial
  probe
  misc_feature (1)..(25): SEQ ID NO: 7258; WAN024F6V_x_at; Start 12; Stop 36
tatactcttcgaaaatctcttcaaa

SEQ ID NO: 194576 - DNA, 25 bp, Artificial
  probe
  misc_feature (1)..(25): SEQ ID NO: 7258; WAN024F6V_x_at; Start 31; Stop 55
ttcaaaccacgtcaacgtcgccttg

SEQ ID NO: 194577 - DNA, 25 bp, Artificial
  probe
  misc_feature (1)..(25): SEQ ID NO: 7258; WAN024F6V_x_at; Start 9; Stop 33
ctttatactcttcgaaaatctcttc

SEQ ID NO: 194578 - DNA, 25 bp, Artificial
  probe
  misc_feature (1)..(25): SEQ ID NO: 7258; WAN024F6V_x_at; Start 50; Stop 74
gccttgccgtacgtatgattactga

SEQ ID NO: 194579 - DNA, 25 bp, Artificial
  probe
  misc_feature (1)..(25): SEQ ID NO: 7258; WAN024F6V_x_at; Start 17; Stop 41
tcttcgaaaatctcttcaaaccacg

SEQ ID NO: 194580 - DNA, 25 bp, Artificial
  probe
  misc_feature (1)..(25): SEQ ID NO: 7258; WAN024F6V_x_at; Start 15; Stop 39
actcttcgaaaatctcttcaaacca

SEQ ID NO: 194581 - DNA, 25 bp, Artificial
  probe
  misc_feature (1)..(25): SEQ ID NO: 7258; WAN024F6V_x_at; Start 7; Stop 31
ctctttatactcttcgaaaatctct

SEQ ID NO: 194582 - DNA, 25 bp, Artificial
  probe
  misc_feature (1)..(25): SEQ ID NO: 7258; WAN024F6V_x_at; Start 2; Stop 26
tgatgctctttatactcttcgaaaa

SEQ ID NO: 194583 - DNA, 25 bp, Artificial
  probe
  misc_feature (1)..(25): SEQ ID NO: 7258; WAN024F6V_x_at; Start 52; Stop 76
cttgccgtacgtatgattactgact

SEQ ID NO: 194584 - DNA, 25 bp, Artificial
  probe
  misc_feature (1)..(25): SEQ ID NO: 7258; WAN024F6V_x_at; Start 1; Stop 25
gtgatgctctttatactcttcgaaa

SEQ ID NO: 194585 - DNA, 25 bp, Artificial
  probe
  misc_feature (1)..(25): SEQ ID NO: 7258; WAN024F6V_x_at; Start 16; Stop 40
ctcttcgaaaatctcttcaaaccac

SEQ ID NO: 194586 - DNA, 25 bp, Artificial
  probe
  misc_feature (1)..(25): SEQ ID NO: 7258; WAN024F6V_x_at; Start 13; Stop 37
atactcttcgaaaatctcttcaaac

SEQ ID NO: 194587 - DNA, 25 bp, Artificial
  probe
  misc_feature (1)..(25): SEQ ID NO: 7258; WAN024F6V_x_at; Start 85; Stop 109
tttatctgcaacctcaaagctgtac

SEQ ID NO: 194588 - DNA, 25 bp, Artificial
  probe
  misc_feature (1)..(25): SEQ ID NO: 7258; WAN024F6V_x_at; Start 11; Stop 35
ttatactcttcgaaaatctcttcaa

SEQ ID NO: 194589 - DNA, 25 bp, Artificial
  probe
  misc_feature (1)..(25): SEQ ID NO: 7258; WAN024F6V_x_at; Start 8; Stop 32
tctttatactcttcgaaaatctctt

SEQ ID NO: 194590 - DNA, 25 bp, Artificial
  probe
  misc_feature (1)..(25): SEQ ID NO: 7258; WAN024F6V_x_at; Start 51; Stop 75
ccttgccgtacgtatgattactgac

SEQ ID NO: 194591 - DNA, 25 bp, Artificial
  probe
  misc_feature (1)..(25): SEQ ID NO: 7258; WAN024F6V_x_at; Start 86; Stop 110
ttatctgcaacctcaaagctgtact

SEQ ID NO: 194592 - DNA, 25 bp, Artificial
  probe
  misc_feature (1)..(25): SEQ ID NO: 7258; WAN024F6V_x_at; Start 4; Stop 28
atgctctttatactcttcgaaaatc

SEQ ID NO: 194593 - DNA, 25 bp, Artificial
  probe
  misc_feature (1)..(25): SEQ ID NO: 7258; WAN024F6V_x_at; Start 59; Stop 83
tacgtatgattactgacttcgtcag

SEQ ID NO: 194594 - DNA, 25 bp, Artificial
  probe
  misc_feature (1)..(25): SEQ ID NO: 7258; WAN024F6V_x_at; Start 84; Stop 108
ttttatctgcaacctcaaagctgta

SEQ ID NO: 194595 - DNA, 25 bp, Artificial
  probe
  misc_feature (1)..(25): SEQ ID NO: 7258; WAN024F6V_x_at; Start 3; Stop 27
gatgctctttatactcttcgaaaat

SEQ ID NO: 194596 - DNA, 25 bp, Artificial
  probe
  misc_feature (1)..(25): SEQ ID NO: 7258; WAN024F6V_x_at; Start 54; Stop 78
tgccgtacgtatgattactgacttc

SEQ ID NO: 194597 - DNA, 25 bp, Artificial
  probe
  misc_feature (1)..(25): SEQ ID NO: 7258; WAN024F6V_x_at; Start 57; Stop 81
cgtacgtatgattactgacttcgtc

SEQ ID NO: 194598 - DNA, 25 bp, Artificial
  probe
  misc_feature (1)..(25): SEQ ID NO: 7258; WAN024F6V_x_at; Start 58; Stop 82
gtacgtatgattactgacttcgtca

SEQ ID NO: 194599 - DNA, 25 bp, Artificial
  probe
  misc_feature (1)..(25): SEQ ID NO: 7258; WAN024F6V_x_at; Start 6; Stop 30
gctctttatactcttcgaaaatctc

SEQ ID NO: 194600 - DNA, 25 bp, Artificial
  probe
  misc_feature (1)..(25): SEQ ID NO: 7258; WAN024F6V_x_at; Start 5; Stop 29
tgctctttatactcttcgaaaatct

SEQ ID NO: 194601 - DNA, 25 bp, Artificial
  probe
  misc_feature (1)..(25): SEQ ID NO: 7258; WAN024F6V_x_at; Start 49; Stop 73
cgccttgccgtacgtatgattactg

SEQ ID NO: 194602 - DNA, 25 bp, Artificial
  probe
  misc_feature (1)..(25): SEQ ID NO: 7258; WAN024F6V_x_at; Start 46; Stop 70
cgtcgccttgccgtacgtatgatta

SEQ ID NO: 194603 - DNA, 25 bp, Artificial
  probe
  misc_feature (1)..(25): SEQ ID NO: 7072; WAN024F6W_at; Start 30; Stop 54
acgtcagttccatccacaatctcaa

SEQ ID NO: 194604 - DNA, 25 bp, Artificial
  probe
  misc_feature (1)..(25): SEQ ID NO: 7072; WAN024F6W_at; Start 21; Stop 45
atactaactacgtcagttccatcca

SEQ ID NO: 194605 - DNA, 25 bp, Artificial
  probe
  misc_feature (1)..(25): SEQ ID NO: 7072; WAN024F6W_at; Start 3; Stop 27
ccttgccgtatgtgtaggatactaa

SEQ ID NO: 194606 - DNA, 25 bp, Artificial
  probe
  misc_feature (1)..(25): SEQ ID NO: 7072; WAN024F6W_at; Start 28; Stop 52
ctacgtcagttccatccacaatctc

SEQ ID NO: 194607 - DNA, 25 bp, Artificial
  probe
  misc_feature (1)..(25): SEQ ID NO: 7072; WAN024F6W_at; Start 4; Stop 28
cttgccgtatgtgtaggatactaac

SEQ ID NO: 194608 - DNA, 25 bp, Artificial
  probe
  misc_feature (1)..(25): SEQ ID NO: 7072; WAN024F6W_at; Start 2; Stop 26
gccttgccgtatgtgtaggatacta

SEQ ID NO: 194609 - DNA, 25 bp, Artificial
  probe
  misc_feature (1)..(25): SEQ ID NO: 7072; WAN024F6W_at; Start 17; Stop 41
taggatactaactacgtcagttcca

SEQ ID NO: 194610 - DNA, 25 bp, Artificial
  probe
  misc_feature (1)..(25): SEQ ID NO: 7072; WAN024F6W_at; Start 10; Stop 34
gtatgtgtaggatactaactacgtc

SEQ ID NO: 194611 - DNA, 25 bp, Artificial
  probe
  misc_feature (1)..(25): SEQ ID NO: 7072; WAN024F6W_at; Start 7; Stop 31
gccgtatgtgtaggatactaactac

SEQ ID NO: 194612 - DNA, 25 bp, Artificial
  probe
  misc_feature (1)..(25): SEQ ID NO: 7072; WAN024F6W_at; Start 8; Stop 32
ccgtatgtgtaggatactaactacg

SEQ ID NO: 194613 - DNA, 25 bp, Artificial
  probe
  misc_feature (1)..(25): SEQ ID NO: 7072; WAN024F6W_at; Start 24; Stop 48
ctaactacgtcagttccatccacaa

SEQ ID NO: 194614 - DNA, 25 bp, Artificial
  probe
  misc_feature (1)..(25): SEQ ID NO: 7072; WAN024F6W_at; Start 18; Stop 42
aggatactaactacgtcagttccat

SEQ ID NO: 194615 - DNA, 25 bp, Artificial
  probe
  misc_feature (1)..(25): SEQ ID NO: 7072; WAN024F6W_at; Start 23; Stop 47
actaactacgtcagttccatccaca

SEQ ID NO: 194616 - DNA, 25 bp, Artificial
  probe
  misc_feature (1)..(25): SEQ ID NO: 7072; WAN024F6W_at; Start 26; Stop 50
aactacgtcagttccatccacaatc

SEQ ID NO: 194617 - DNA, 25 bp, Artificial
  probe
  misc_feature (1)..(25): SEQ ID NO: 7072; WAN024F6W_at; Start 14; Stop 38
gtgtaggatactaactacgtcagtt

SEQ ID NO: 194618 - DNA, 25 bp, Artificial
  probe
  misc_feature (1)..(25): SEQ ID NO: 7072; WAN024F6W_at; Start 15; Stop 39
tgtaggatactaactacgtcagttc

SEQ ID NO: 194619 - DNA, 25 bp, Artificial
  probe
  misc_feature (1)..(25): SEQ ID NO: 7072; WAN024F6W_at; Start 20; Stop 44
gatactaactacgtcagttccatcc

SEQ ID NO: 194620 - DNA, 25 bp, Artificial
  probe
  misc_feature (1)..(25): SEQ ID NO: 7072; WAN024F6W_at; Start 19; Stop 43
ggatactaactacgtcagttccatc

SEQ ID NO: 194621 - DNA, 25 bp, Artificial
  probe
  misc_feature (1)..(25): SEQ ID NO: 7072; WAN024F6W_at; Start 29; Stop 53
tacgtcagttccatccacaatctca

SEQ ID NO: 194622 - DNA, 25 bp, Artificial
  probe
  misc_feature (1)..(25): SEQ ID NO: 7072; WAN024F6W_at; Start 11; Stop 35
tatgtgtaggatactaactacgtca

SEQ ID NO: 194623 - DNA, 25 bp, Artificial
  probe
  misc_feature (1)..(25): SEQ ID NO: 7072; WAN024F6W_at; Start 27; Stop 51
actacgtcagttccatccacaatct

SEQ ID NO: 194624 - DNA, 25 bp, Artificial
  probe
  misc_feature (1)..(25): SEQ ID NO: 7072; WAN024F6W_at; Start 6; Stop 30
tgccgtatgtgtaggatactaacta

SEQ ID NO: 194625 - DNA, 25 bp, Artificial
  probe
  misc_feature (1)..(25): SEQ ID NO: 7072; WAN024F6W_at; Start 12; Stop 36
atgtgtaggatactaactacgtcag

SEQ ID NO: 194626 - DNA, 25 bp, Artificial
  probe
  misc_feature (1)..(25): SEQ ID NO: 7072; WAN024F6W_at; Start 9; Stop 33
cgtatgtgtaggatactaactacgt

SEQ ID NO: 194627 - DNA, 25 bp, Artificial
  probe
  misc_feature (1)..(25): SEQ ID NO: 7072; WAN024F6W_at; Start 25; Stop 49
taactacgtcagttccatccacaat

SEQ ID NO: 194628 - DNA, 25 bp, Artificial
  probe
  misc_feature (1)..(25): SEQ ID NO: 7072; WAN024F6W_at; Start 13; Stop 37
tgtgtaggatactaactacgtcagt

SEQ ID NO: 194629 - DNA, 25 bp, Artificial
  probe
  misc_feature (1)..(25): SEQ ID NO: 7072; WAN024F6W_at; Start 5; Stop 29
ttgccgtatgtgtaggatactaact

SEQ ID NO: 194630 - DNA, 25 bp, Artificial
  probe
  misc_feature (1)..(25): SEQ ID NO: 7072; WAN024F6W_at; Start 22; Stop 46
tactaactacgtcagttccatccac

SEQ ID NO: 194631 - DNA, 25 bp, Artificial
  probe
  misc_feature (1)..(25): SEQ ID NO: 7072; WAN024F6W_at; Start 16; Stop 40
gtaggatactaactacgtcagttcc

SEQ ID NO: 194632 - DNA, 25 bp, Artificial
  probe
  misc_feature (1)..(25): SEQ ID NO: 7072; WAN024F6W_at; Start 1; Stop 25
cgccttgccgtatgtgtaggatact

SEQ ID NO: 194633 - DNA, 25 bp, Artificial
  probe
  misc_feature (1)..(25): SEQ ID NO: 7687; WAN024F6X_at; Start 94; Stop 118
tatccatcacagtttacaattagcc

SEQ ID NO: 194634 - DNA, 25 bp, Artificial
  probe
  misc_feature (1)..(25): SEQ ID NO: 7687; WAN024F6X_at; Start 98; Stop 122
catcacagtttacaattagccttca

SEQ ID NO: 194635 - DNA, 25 bp, Artificial
  probe
  misc_feature (1)..(25): SEQ ID NO: 7687; WAN024F6X_at; Start 115; Stop 139
agccttcattacttaacccattcac

SEQ ID NO: 194636 - DNA, 25 bp, Artificial
  probe
  misc_feature (1)..(25): SEQ ID NO: 7687; WAN024F6X_at; Start 86; Stop 110
aagttaagtatccatcacagtttac

SEQ ID NO: 194637 - DNA, 25 bp, Artificial
  probe
  misc_feature (1)..(25): SEQ ID NO: 7687; WAN024F6X_at; Start 52; Stop 76
ttgattgtgaagacttttatccacc

SEQ ID NO: 194638 - DNA, 25 bp, Artificial
  probe
  misc_feature (1)..(25): SEQ ID NO: 7687; WAN024F6X_at; Start 57; Stop 81
tgtgaagacttttatccacctatta

SEQ ID NO: 194639 - DNA, 25 bp, Artificial
  probe
  misc_feature (1)..(25): SEQ ID NO: 7687; WAN024F6X_at; Start 71; Stop 95
tccacctattatacaaagttaagta

SEQ ID NO: 194640 - DNA, 25 bp, Artificial
  probe
  misc_feature (1)..(25): SEQ ID NO: 7687; WAN024F6X_at; Start 108; Stop 132
tacaattagccttcattacttaacc

SEQ ID NO: 194641 - DNA, 25 bp, Artificial
  probe
  misc_feature (1)..(25): SEQ ID NO: 7687; WAN024F6X_at; Start 44; Stop 68
tgcgttttttgattgtgaagacttt

SEQ ID NO: 194642 - DNA, 25 bp, Artificial
  probe
  misc_feature (1)..(25): SEQ ID NO: 7687; WAN024F6X_at; Start 82; Stop 106
tacaaagttaagtatccatcacagt

SEQ ID NO: 194643 - DNA, 25 bp, Artificial
  probe
  misc_feature (1)..(25): SEQ ID NO: 7687; WAN024F6X_at; Start 83; Stop 107
acaaagttaagtatccatcacagtt

SEQ ID NO: 194644 - DNA, 25 bp, Artificial
  probe
  misc_feature (1)..(25): SEQ ID NO: 7687; WAN024F6X_at; Start 69; Stop 93
tatccacctattatacaaagttaag

SEQ ID NO: 194645 - DNA, 25 bp, Artificial
  probe
  misc_feature (1)..(25): SEQ ID NO: 7687; WAN024F6X_at; Start 80; Stop 104
tatacaaagttaagtatccatcaca

SEQ ID NO: 194646 - DNA, 25 bp, Artificial
  probe
  misc_feature (1)..(25): SEQ ID NO: 7687; WAN024F6X_at; Start 41; Stop 65
ctatgcgttttttgattgtgaagac

SEQ ID NO: 194647 - DNA, 25 bp, Artificial
  probe
  misc_feature (1)..(25): SEQ ID NO: 7687; WAN024F6X_at; Start 63; Stop 87
gacttttatccacctattatacaaa

SEQ ID NO: 194648 - DNA, 25 bp, Artificial
  probe
  misc_feature (1)..(25): SEQ ID NO: 7687; WAN024F6X_at; Start 101; Stop 125
cacagtttacaattagccttcatta

SEQ ID NO: 194649 - DNA, 25 bp, Artificial
  probe
  misc_feature (1)..(25): SEQ ID NO: 7687; WAN024F6X_at; Start 39; Stop 63
tactatgcgttttttgattgtgaag

SEQ ID NO: 194650 - DNA, 25 bp, Artificial
  probe
  misc_feature (1)..(25): SEQ ID NO: 7687; WAN024F6X_at; Start 97; Stop 121
ccatcacagtttacaattagccttc

SEQ ID NO: 194651 - DNA, 25 bp, Artificial
  probe
  misc_feature (1)..(25): SEQ ID NO: 7687; WAN024F6X_at; Start 114; Stop 138
tagccttcattacttaacccattca

SEQ ID NO: 194652 - DNA, 25 bp, Artificial
  probe
  misc_feature (1)..(25): SEQ ID NO: 7687; WAN024F6X_at; Start 96; Stop 120
tccatcacagtttacaattagcctt

SEQ ID NO: 194653 - DNA, 25 bp, Artificial
  probe
  misc_feature (1)..(25): SEQ ID NO: 7687; WAN024F6X_at; Start 110; Stop 134
caattagccttcattacttaaccca

SEQ ID NO: 194654 - DNA, 25 bp, Artificial
  probe
  misc_feature (1)..(25): SEQ ID NO: 7687; WAN024F6X_at; Start 90; Stop 114
taagtatccatcacagtttacaatt

SEQ ID NO: 194655 - DNA, 25 bp, Artificial
  probe
  misc_feature (1)..(25): SEQ ID NO: 7687; WAN024F6X_at; Start 92; Stop 116
agtatccatcacagtttacaattag

SEQ ID NO: 194656 - DNA, 25 bp, Artificial
  probe
  misc_feature (1)..(25): SEQ ID NO: 7687; WAN024F6X_at; Start 75; Stop 99
cctattatacaaagttaagtatcca

SEQ ID NO: 194657 - DNA, 25 bp, Artificial
  probe
  misc_feature (1)..(25): SEQ ID NO: 7687; WAN024F6X_at; Start 60; Stop 84
gaagacttttatccacctattatac

SEQ ID NO: 194658 - DNA, 25 bp, Artificial
  probe
  misc_feature (1)..(25): SEQ ID NO: 7687; WAN024F6X_at; Start 84; Stop 108
caaagttaagtatccatcacagttt

SEQ ID NO: 194659 - DNA, 25 bp, Artificial
  probe
  misc_feature (1)..(25): SEQ ID NO: 7687; WAN024F6X_at; Start 17; Stop 41
gggcagtacagaaaaaccttgatac

SEQ ID NO: 194660 - DNA, 25 bp, Artificial
  probe
  misc_feature (1)..(25): SEQ ID NO: 7687; WAN024F6X_at; Start 119; Stop 143
ttcattacttaacccattcaccatt

SEQ ID NO: 194661 - DNA, 25 bp, Artificial
  probe
  misc_feature (1)..(25): SEQ ID NO: 7687; WAN024F6X_at; Start 111; Stop 135
aattagccttcattacttaacccat

SEQ ID NO: 194662 - DNA, 25 bp, Artificial
  probe
  misc_feature (1)..(25): SEQ ID NO: 7687; WAN024F6X_at; Start 54; Stop 78
gattgtgaagacttttatccaccta

SEQ ID NO: 194663 - DNA, 25 bp, Artificial
  probe
  misc_feature (1)..(25): SEQ ID NO: 7687; WAN024F6X_at; Start 42; Stop 66
tatgcgttttttgattgtgaagact

SEQ ID NO: 194664 - DNA, 25 bp, Artificial
  probe
  misc_feature (1)..(25): SEQ ID NO: 7687; WAN024F6X_at; Start 88; Stop 112
gttaagtatccatcacagtttacaa

SEQ ID NO: 194665 - DNA, 25 bp, Artificial
  probe
  misc_feature (1)..(25): SEQ ID NO: 7687; WAN024F6X_at; Start 103; Stop 127
cagtttacaattagccttcattact

SEQ ID NO: 194666 - DNA, 25 bp, Artificial
  probe
  misc_feature (1)..(25): SEQ ID NO: 7687; WAN024F6X_at; Start 53; Stop 77
tgattgtgaagacttttatccacct

SEQ ID NO: 194667 - DNA, 25 bp, Artificial
  probe
  misc_feature (1)..(25): SEQ ID NO: 7102; WAN024F6Y_at; Start 84; Stop 108
ctttgagaaacctgtggctatcttc

SEQ ID NO: 194668 - DNA, 25 bp, Artificial
  probe
  misc_feature (1)..(25): SEQ ID NO: 7102; WAN024F6Y_at; Start 129; Stop 153
tattgagtataagaggtctttccta

SEQ ID NO: 194669 - DNA, 25 bp, Artificial
  probe
  misc_feature (1)..(25): SEQ ID NO: 7102; WAN024F6Y_at; Start 96; Stop 120
tgtggctatcttcctagtttacttt

SEQ ID NO: 194670 - DNA, 25 bp, Artificial
  probe
  misc_feature (1)..(25): SEQ ID NO: 7102; WAN024F6Y_at; Start 25; Stop 49
acctcaaagctatactttgagctga

SEQ ID NO: 194671 - DNA, 25 bp, Artificial
  probe
  misc_feature (1)..(25): SEQ ID NO: 7102; WAN024F6Y_at; Start 134; Stop 158
agtataagaggtctttcctaagcag

SEQ ID NO: 194672 - DNA, 25 bp, Artificial
  probe
  misc_feature (1)..(25): SEQ ID NO: 7102; WAN024F6Y_at; Start 80; Stop 104
ggtactttgagaaacctgtggctat

SEQ ID NO: 194673 - DNA, 25 bp, Artificial
  probe
  misc_feature (1)..(25): SEQ ID NO: 7102; WAN024F6Y_at; Start 77; Stop 101
agcggtactttgagaaacctgtggc

SEQ ID NO: 194674 - DNA, 25 bp, Artificial
  probe
  misc_feature (1)..(25): SEQ ID NO: 7102; WAN024F6Y_at; Start 127; Stop 151
tttattgagtataagaggtctttcc

SEQ ID NO: 194675 - DNA, 25 bp, Artificial
  probe
  misc_feature (1)..(25): SEQ ID NO: 7102; WAN024F6Y_at; Start 28; Stop 52
tcaaagctatactttgagctgactt

SEQ ID NO: 194676 - DNA, 25 bp, Artificial
  probe
  misc_feature (1)..(25): SEQ ID NO: 7102; WAN024F6Y_at; Start 95; Stop 119
ctgtggctatcttcctagtttactt

SEQ ID NO: 194677 - DNA, 25 bp, Artificial
  probe
  misc_feature (1)..(25): SEQ ID NO: 7102; WAN024F6Y_at; Start 131; Stop 155
ttgagtataagaggtctttcctaag

SEQ ID NO: 194678 - DNA, 25 bp, Artificial
  probe
  misc_feature (1)..(25): SEQ ID NO: 7102; WAN024F6Y_at; Start 30; Stop 54
aaagctatactttgagctgacttcg

SEQ ID NO: 194679 - DNA, 25 bp, Artificial
  probe
  misc_feature (1)..(25): SEQ ID NO: 7102; WAN024F6Y_at; Start 76; Stop 100
aagcggtactttgagaaacctgtgg

SEQ ID NO: 194680 - DNA, 25 bp, Artificial
  probe
  misc_feature (1)..(25): SEQ ID NO: 7102; WAN024F6Y_at; Start 78; Stop 102
gcggtactttgagaaacctgtggct

SEQ ID NO: 194681 - DNA, 25 bp, Artificial
  probe
  misc_feature (1)..(25): SEQ ID NO: 7102; WAN024F6Y_at; Start 79; Stop 103
cggtactttgagaaacctgtggcta

SEQ ID NO: 194682 - DNA, 25 bp, Artificial
  probe
  misc_feature (1)..(25): SEQ ID NO: 7102; WAN024F6Y_at; Start 83; Stop 107
actttgagaaacctgtggctatctt

SEQ ID NO: 194683 - DNA, 25 bp, Artificial
  probe
  misc_feature (1)..(25): SEQ ID NO: 7102; WAN024F6Y_at; Start 81; Stop 105
gtactttgagaaacctgtggctatc

SEQ ID NO: 194684 - DNA, 25 bp, Artificial
  probe
  misc_feature (1)..(25): SEQ ID NO: 7102; WAN024F6Y_at; Start 132; Stop 156
tgagtataagaggtctttcctaagc

SEQ ID NO: 194685 - DNA, 25 bp, Artificial
  probe
  misc_feature (1)..(25): SEQ ID NO: 7102; WAN024F6Y_at; Start 29; Stop 53
caaagctatactttgagctgacttc

SEQ ID NO: 194686 - DNA, 25 bp, Artificial
  probe
  misc_feature (1)..(25): SEQ ID NO: 7102; WAN024F6Y_at; Start 75; Stop 99
aaagcggtactttgagaaacctgtg

SEQ ID NO: 194687 - DNA, 25 bp, Artificial
  probe
  misc_feature (1)..(25): SEQ ID NO: 7102; WAN024F6Y_at; Start 74; Stop 98
caaagcggtactttgagaaacctgt

SEQ ID NO: 194688 - DNA, 25 bp, Artificial
  probe
  misc_feature (1)..(25): SEQ ID NO: 7102; WAN024F6Y_at; Start 130; Stop 154
attgagtataagaggtctttcctaa

SEQ ID NO: 194689 - DNA, 25 bp, Artificial
  probe
  misc_feature (1)..(25): SEQ ID NO: 7102; WAN024F6Y_at; Start 133; Stop 157
gagtataagaggtctttcctaagca

SEQ ID NO: 194690 - DNA, 25 bp, Artificial
  probe
  misc_feature (1)..(25): SEQ ID NO: 7102; WAN024F6Y_at; Start 128; Stop 152
ttattgagtataagaggtctttcct

SEQ ID NO: 194691 - DNA, 25 bp, Artificial
  probe
  misc_feature (1)..(25): SEQ ID NO: 7102; WAN024F6Y_at; Start 126; Stop 150
ttttattgagtataagaggtctttc

SEQ ID NO: 194692 - DNA, 25 bp, Artificial
  probe
  misc_feature (1)..(25): SEQ ID NO: 7102; WAN024F6Y_at; Start 82; Stop 106
tactttgagaaacctgtggctatct

SEQ ID NO: 194693 - DNA, 25 bp, Artificial
  probe
  misc_feature (1)..(25): SEQ ID NO: 7102; WAN024F6Y_at; Start 135; Stop 159
gtataagaggtctttcctaagcagt

SEQ ID NO: 194694 - DNA, 25 bp, Artificial
  probe
  misc_feature (1)..(25): SEQ ID NO: 7351; WAN024F6Z_at; Start 1; Stop 25
tagttacttcatgttttcctaattc

SEQ ID NO: 194695 - DNA, 25 bp, Artificial
  probe
  misc_feature (1)..(25): SEQ ID NO: 7351; WAN024F6Z_at; Start 93; Stop 117
ttgccagttttgtctgtaacatcga

SEQ ID NO: 194696 - DNA, 25 bp, Artificial
  probe
  misc_feature (1)..(25): SEQ ID NO: 7351; WAN024F6Z_at; Start 78; Stop 102
tgttttgagctaattttgccagttt

SEQ ID NO: 194697 - DNA, 25 bp, Artificial
  probe
  misc_feature (1)..(25): SEQ ID NO: 7351; WAN024F6Z_at; Start 91; Stop 115
ttttgccagttttgtctgtaacatc

SEQ ID NO: 194698 - DNA, 25 bp, Artificial
  probe
  misc_feature (1)..(25): SEQ ID NO: 7351; WAN024F6Z_at; Start 7; Stop 31
cttcatgttttcctaattcttttcg

SEQ ID NO: 194699 - DNA, 25 bp, Artificial
  probe
  misc_feature (1)..(25): SEQ ID NO: 7351; WAN024F6Z_at; Start 92; Stop 116
tttgccagttttgtctgtaacatcg

SEQ ID NO: 194700 - DNA, 25 bp, Artificial
  probe
  misc_feature (1)..(25): SEQ ID NO: 7351; WAN024F6Z_at; Start 49; Stop 73
cgtcagttttatcagtaatctcaaa

SEQ ID NO: 194701 - DNA, 25 bp, Artificial
  probe
  misc_feature (1)..(25): SEQ ID NO: 7351; WAN024F6Z_at; Start 97; Stop 121
cagttttgtctgtaacatcgaagtt

SEQ ID NO: 194702 - DNA, 25 bp, Artificial
  probe
  misc_feature (1)..(25): SEQ ID NO: 7351; WAN024F6Z_at; Start 82; Stop 106
ttgagctaattttgccagttttgtc

SEQ ID NO: 194703 - DNA, 25 bp, Artificial
  probe
  misc_feature (1)..(25): SEQ ID NO: 7351; WAN024F6Z_at; Start 76; Stop 100
agtgttttgagctaattttgccagt

SEQ ID NO: 194704 - DNA, 25 bp, Artificial
  probe
  misc_feature (1)..(25): SEQ ID NO: 7351; WAN024F6Z_at; Start 103; Stop 127
tgtctgtaacatcgaagttgtgttt

SEQ ID NO: 194705 - DNA, 25 bp, Artificial
  probe
  misc_feature (1)..(25): SEQ ID NO: 7351; WAN024F6Z_at; Start 105; Stop 129
tctgtaacatcgaagttgtgtttta

SEQ ID NO: 194706 - DNA, 25 bp, Artificial
  probe
  misc_feature (1)..(25): SEQ ID NO: 7351; WAN024F6Z_at; Start 9; Stop 33
tcatgttttcctaattcttttcgaa

SEQ ID NO: 194707 - DNA, 25 bp, Artificial
  probe
  misc_feature (1)..(25): SEQ ID NO: 7351; WAN024F6Z_at; Start 55; Stop 79
ttttatcagtaatctcaaaacagtg

SEQ ID NO: 194708 - DNA, 25 bp, Artificial
  probe
  misc_feature (1)..(25): SEQ ID NO: 7351; WAN024F6Z_at; Start 88; Stop 112
taattttgccagttttgtctgtaac

SEQ ID NO: 194709 - DNA, 25 bp, Artificial
  probe
  misc_feature (1)..(25): SEQ ID NO: 7351; WAN024F6Z_at; Start 95; Stop 119
gccagttttgtctgtaacatcgaag

SEQ ID NO: 194710 - DNA, 25 bp, Artificial
  probe
  misc_feature (1)..(25): SEQ ID NO: 7351; WAN024F6Z_at; Start 101; Stop 125
tttgtctgtaacatcgaagttgtgt

SEQ ID NO: 194711 - DNA, 25 bp, Artificial
  probe
  misc_feature (1)..(25): SEQ ID NO: 7351; WAN024F6Z_at; Start 102; Stop 126
ttgtctgtaacatcgaagttgtgtt

SEQ ID NO: 194712 - DNA, 25 bp, Artificial
  probe
  misc_feature (1)..(25): SEQ ID NO: 7351; WAN024F6Z_at; Start 94; Stop 118
tgccagttttgtctgtaacatcgaa

SEQ ID NO: 194713 - DNA, 25 bp, Artificial
  probe
  misc_feature (1)..(25): SEQ ID NO: 7351; WAN024F6Z_at; Start 100; Stop 124
ttttgtctgtaacatcgaagttgtg

SEQ ID NO: 194714 - DNA, 25 bp, Artificial
  probe
  misc_feature (1)..(25): SEQ ID NO: 7351; WAN024F6Z_at; Start 107; Stop 131
tgtaacatcgaagttgtgttttacc

SEQ ID NO: 194715 - DNA, 25 bp, Artificial
  probe
  misc_feature (1)..(25): SEQ ID NO: 7351; WAN024F6Z_at; Start 86; Stop 110
gctaattttgccagttttgtctgta

SEQ ID NO: 194716 - DNA, 25 bp, Artificial
  probe
  misc_feature (1)..(25): SEQ ID NO: 7351; WAN024F6Z_at; Start 50; Stop 74
gtcagttttatcagtaatctcaaaa

SEQ ID NO: 194717 - DNA, 25 bp, Artificial
  probe
  misc_feature (1)..(25): SEQ ID NO: 7351; WAN024F6Z_at; Start 89; Stop 113
aattttgccagttttgtctgtaaca

SEQ ID NO: 194718 - DNA, 25 bp, Artificial
  probe
  misc_feature (1)..(25): SEQ ID NO: 7351; WAN024F6Z_at; Start 47; Stop 71
cacgtcagttttatcagtaatctca

SEQ ID NO: 194719 - DNA, 25 bp, Artificial
  probe
  misc_feature (1)..(25): SEQ ID NO: 7351; WAN024F6Z_at; Start 96; Stop 120
ccagttttgtctgtaacatcgaagt

SEQ ID NO: 194720 - DNA, 25 bp, Artificial
  probe
  misc_feature (1)..(25): SEQ ID NO: 7351; WAN024F6Z_at; Start 83; Stop 107
tgagctaattttgccagttttgtct

SEQ ID NO: 194721 - DNA, 25 bp, Artificial
  probe
  misc_feature (1)..(25): SEQ ID NO: 7351; WAN024F6Z_at; Start 80; Stop 104
ttttgagctaattttgccagttttg

SEQ ID NO: 194722 - DNA, 25 bp, Artificial
  probe
  misc_feature (1)..(25): SEQ ID NO: 7351; WAN024F6Z_at; Start 48; Stop 72
acgtcagttttatcagtaatctcaa

SEQ ID NO: 194723 - DNA, 25 bp, Artificial
  probe
  misc_feature (1)..(25): SEQ ID NO: 7351; WAN024F6Z_at; Start 52; Stop 76
cagttttatcagtaatctcaaaaca

SEQ ID NO: 194724 - DNA, 25 bp, Artificial
  probe
  misc_feature (1)..(25): SEQ ID NO: 7351; WAN024F6Z_at; Start 77; Stop 101
gtgttttgagctaattttgccagtt

SEQ ID NO: 194725 - DNA, 25 bp, Artificial
  probe
  misc_feature (1)..(25): SEQ ID NO: 7351; WAN024F6Z_at; Start 75; Stop 99
cagtgttttgagctaattttgccag

SEQ ID NO: 194726 - DNA, 25 bp, Artificial
  probe
  misc_feature (1)..(25): SEQ ID NO: 7351; WAN024F6Z_at; Start 99; Stop 123
gttttgtctgtaacatcgaagttgt

SEQ ID NO: 194727 - DNA, 25 bp, Artificial
  probe
  misc_feature (1)..(25): SEQ ID NO: 7351; WAN024F6Z_at; Start 98; Stop 122
agttttgtctgtaacatcgaagttg

SEQ ID NO: 194728 - DNA, 25 bp, Artificial
  probe
  misc_feature (1)..(25): SEQ ID NO: 7097; WAN024F72_at; Start 62; Stop 86
tatctacaggttcaaagcagtgttt

SEQ ID NO: 194729 - DNA, 25 bp, Artificial
  probe
  misc_feature (1)..(25): SEQ ID NO: 7097; WAN024F72_at; Start 63; Stop 87
atctacaggttcaaagcagtgtttt

SEQ ID NO: 194730 - DNA, 25 bp, Artificial
  probe
  misc_feature (1)..(25): SEQ ID NO: 7097; WAN024F72_at; Start 64; Stop 88
tctacaggttcaaagcagtgttttg

SEQ ID NO: 194731 - DNA, 25 bp, Artificial
  probe
  misc_feature (1)..(25): SEQ ID NO: 7097; WAN024F72_at; Start 68; Stop 92
caggttcaaagcagtgttttgagca

SEQ ID NO: 194732 - DNA, 25 bp, Artificial
  probe
  misc_feature (1)..(25): SEQ ID NO: 7097; WAN024F72_at; Start 138; Stop 162
taaatcattcaacgtaaatgaaaaa

SEQ ID NO: 194733 - DNA, 25 bp, Artificial
  probe
  misc_feature (1)..(25): SEQ ID NO: 7097; WAN024F72_at; Start 167; Stop 191
tcttaacgaaagatagagataaatc

SEQ ID NO: 194734 - DNA, 25 bp, Artificial
  probe
  misc_feature (1)..(25): SEQ ID NO: 7097; WAN024F72_at; Start 165; Stop 189
tttcttaacgaaagatagagataaa

SEQ ID NO: 194735 - DNA, 25 bp, Artificial
  probe
  misc_feature (1)..(25): SEQ ID NO: 7097; WAN024F72_at; Start 61; Stop 85
ttatctacaggttcaaagcagtgtt

SEQ ID NO: 194736 - DNA, 25 bp, Artificial
  probe
  misc_feature (1)..(25): SEQ ID NO: 7097; WAN024F72_at; Start 66; Stop 90
tacaggttcaaagcagtgttttgag

SEQ ID NO: 194737 - DNA, 25 bp, Artificial
  probe
  misc_feature (1)..(25): SEQ ID NO: 7097; WAN024F72_at; Start 174; Stop 198
gaaagatagagataaatcgaaatca

SEQ ID NO: 194738 - DNA, 25 bp, Artificial
  probe
  misc_feature (1)..(25): SEQ ID NO: 7097; WAN024F72_at; Start 163; Stop 187
aatttcttaacgaaagatagagata

SEQ ID NO: 194739 - DNA, 25 bp, Artificial
  probe
  misc_feature (1)..(25): SEQ ID NO: 7097; WAN024F72_at; Start 173; Stop 197
cgaaagatagagataaatcgaaatc

SEQ ID NO: 194740 - DNA, 25 bp, Artificial
  probe
  misc_feature (1)..(25): SEQ ID NO: 7097; WAN024F72_at; Start 178; Stop 202
gatagagataaatcgaaatcagtag

SEQ ID NO: 194741 - DNA, 25 bp, Artificial
  probe
  misc_feature (1)..(25): SEQ ID NO: 7097; WAN024F72_at; Start 135; Stop 159
gtataaatcattcaacgtaaatgaa

SEQ ID NO: 194742 - DNA, 25 bp, Artificial
  probe
  misc_feature (1)..(25): SEQ ID NO: 7097; WAN024F72_at; Start 65; Stop 89
ctacaggttcaaagcagtgttttga

SEQ ID NO: 194743 - DNA, 25 bp, Artificial
  probe
  misc_feature (1)..(25): SEQ ID NO: 7097; WAN024F72_at; Start 175; Stop 199
aaagatagagataaatcgaaatcag

SEQ ID NO: 194744 - DNA, 25 bp, Artificial
  probe
  misc_feature (1)..(25): SEQ ID NO: 7097; WAN024F72_at; Start 136; Stop 160
tataaatcattcaacgtaaatgaaa

SEQ ID NO: 194745 - DNA, 25 bp, Artificial
  probe
  misc_feature (1)..(25): SEQ ID NO: 7097; WAN024F72_at; Start 133; Stop 157
gagtataaatcattcaacgtaaatg

SEQ ID NO: 194746 - DNA, 25 bp, Artificial
  probe
  misc_feature (1)..(25): SEQ ID NO: 7097; WAN024F72_at; Start 60; Stop 84
cttatctacaggttcaaagcagtgt

SEQ ID NO: 194747 - DNA, 25 bp, Artificial
  probe
  misc_feature (1)..(25): SEQ ID NO: 7097; WAN024F72_at; Start 170; Stop 194
taacgaaagatagagataaatcgaa

SEQ ID NO: 194748 - DNA, 25 bp, Artificial
  probe
  misc_feature (1)..(25): SEQ ID NO: 7097; WAN024F72_at; Start 164; Stop 188
atttcttaacgaaagatagagataa

SEQ ID NO: 194749 - DNA, 25 bp, Artificial
  probe
  misc_feature (1)..(25): SEQ ID NO: 7097; WAN024F72_at; Start 55; Stop 79
tcagtcttatctacaggttcaaagc

SEQ ID NO: 194750 - DNA, 25 bp, Artificial
  probe
  misc_feature (1)..(25): SEQ ID NO: 7097; WAN024F72_at; Start 169; Stop 193
ttaacgaaagatagagataaatcga

SEQ ID NO: 194751 - DNA, 25 bp, Artificial
  probe
  misc_feature (1)..(25): SEQ ID NO: 7097; WAN024F72_at; Start 176; Stop 200
aagatagagataaatcgaaatcagt

SEQ ID NO: 194752 - DNA, 25 bp, Artificial
  probe
  misc_feature (1)..(25): SEQ ID NO: 7097; WAN024F72_at; Start 134; Stop 158
agtataaatcattcaacgtaaatga

SEQ ID NO: 194753 - DNA, 25 bp, Artificial
  probe
  misc_feature (1)..(25): SEQ ID NO: 7097; WAN024F72_at; Start 162; Stop 186
aaatttcttaacgaaagatagagat

SEQ ID NO: 194754 - DNA, 25 bp, Artificial
  probe
  misc_feature (1)..(25): SEQ ID NO: 7097; WAN024F72_at; Start 168; Stop 192
cttaacgaaagatagagataaatcg

SEQ ID NO: 194755 - DNA, 25 bp, Artificial
  probe
  misc_feature (1)..(25): SEQ ID NO: 7097; WAN024F72_at; Start 132; Stop 156
tgagtataaatcattcaacgtaaat

SEQ ID NO: 194756 - DNA, 25 bp, Artificial
  probe
  misc_feature (1)..(25): SEQ ID NO: 7097; WAN024F72_at; Start 69; Stop 93
aggttcaaagcagtgttttgagcaa

SEQ ID NO: 194757 - DNA, 25 bp, Artificial
  probe
  misc_feature (1)..(25): SEQ ID NO: 7097; WAN024F72_at; Start 171; Stop 195
aacgaaagatagagataaatcgaaa

SEQ ID NO: 194758 - DNA, 25 bp, Artificial
  probe
  misc_feature (1)..(25): SEQ ID NO: 7097; WAN024F72_at; Start 67; Stop 91
acaggttcaaagcagtgttttgagc

SEQ ID NO: 194759 - DNA, 25 bp, Artificial
  probe
  misc_feature (1)..(25): SEQ ID NO: 7097; WAN024F72_at; Start 59; Stop 83
tcttatctacaggttcaaagcagtg

SEQ ID NO: 194760 - DNA, 25 bp, Artificial
  probe
  misc_feature (1)..(25): SEQ ID NO: 7097; WAN024F72_at; Start 177; Stop 201
agatagagataaatcgaaatcagta

SEQ ID NO: 194761 - DNA, 25 bp, Artificial
  probe
  misc_feature (1)..(25): SEQ ID NO: 7097; WAN024F72_at; Start 179; Stop 203
atagagataaatcgaaatcagtaga

SEQ ID NO: 194762 - DNA, 25 bp, Artificial
  probe
  misc_feature (1)..(25): SEQ ID NO: 6228; WAN024F73_at; Start 146; Stop 170
ttctgaaattggagtattgggctgt

SEQ ID NO: 194763 - DNA, 25 bp, Artificial
  probe
  misc_feature (1)..(25): SEQ ID NO: 6228; WAN024F73_at; Start 132; Stop 156
cattgagtattattttctgaaattg

SEQ ID NO: 194764 - DNA, 25 bp, Artificial
  probe
  misc_feature (1)..(25): SEQ ID NO: 6228; WAN024F73_at; Start 143; Stop 167
attttctgaaattggagtattgggc

SEQ ID NO: 194765 - DNA, 25 bp, Artificial
  probe
  misc_feature (1)..(25): SEQ ID NO: 6228; WAN024F73_at; Start 31; Stop 55
tacttttatactcttcgcaaatctc

SEQ ID NO: 194766 - DNA, 25 bp, Artificial
  probe
  misc_feature (1)..(25): SEQ ID NO: 6228; WAN024F73_at; Start 1; Stop 25
ttggaaggagctattttactggcta

SEQ ID NO: 194767 - DNA, 25 bp, Artificial
  probe
  misc_feature (1)..(25): SEQ ID NO: 6228; WAN024F73_at; Start 148; Stop 172
ctgaaattggagtattgggctgttt

SEQ ID NO: 194768 - DNA, 25 bp, Artificial
  probe
  misc_feature (1)..(25): SEQ ID NO: 6228; WAN024F73_at; Start 9; Stop 33
agctattttactggctattgattac

SEQ ID NO: 194769 - DNA, 25 bp, Artificial
  probe
  misc_feature (1)..(25): SEQ ID NO: 6228; WAN024F73_at; Start 20; Stop 44
tggctattgattacttttatactct

SEQ ID NO: 194770 - DNA, 25 bp, Artificial
  probe
  misc_feature (1)..(25): SEQ ID NO: 6228; WAN024F73_at; Start 135; Stop 159
tgagtattattttctgaaattggag

SEQ ID NO: 194771 - DNA, 25 bp, Artificial
  probe
  misc_feature (1)..(25): SEQ ID NO: 6228; WAN024F73_at; Start 145; Stop 169
tttctgaaattggagtattgggctg

SEQ ID NO: 194772 - DNA, 25 bp, Artificial
  probe
  misc_feature (1)..(25): SEQ ID NO: 6228; WAN024F73_at; Start 14; Stop 38
ttttactggctattgattactttta

SEQ ID NO: 194773 - DNA, 25 bp, Artificial
  probe
  misc_feature (1)..(25): SEQ ID NO: 6228; WAN024F73_at; Start 12; Stop 36
tattttactggctattgattacttt

SEQ ID NO: 194774 - DNA, 25 bp, Artificial
  probe
  misc_feature (1)..(25): SEQ ID NO: 6228; WAN024F73_at; Start 19; Stop 43
ctggctattgattacttttatactc

SEQ ID NO: 194775 - DNA, 25 bp, Artificial
  probe
  misc_feature (1)..(25): SEQ ID NO: 6228; WAN024F73_at; Start 7; Stop 31
ggagctattttactggctattgatt

SEQ ID NO: 194776 - DNA, 25 bp, Artificial
  probe
  misc_feature (1)..(25): SEQ ID NO: 6228; WAN024F73_at; Start 17; Stop 41
tactggctattgattacttttatac

SEQ ID NO: 194777 - DNA, 25 bp, Artificial
  probe
  misc_feature (1)..(25): SEQ ID NO: 6228; WAN024F73_at; Start 18; Stop 42
actggctattgattacttttatact

SEQ ID NO: 194778 - DNA, 25 bp, Artificial
  probe
  misc_feature (1)..(25): SEQ ID NO: 6228; WAN024F73_at; Start 8; Stop 32
gagctattttactggctattgatta

SEQ ID NO: 194779 - DNA, 25 bp, Artificial
  probe
  misc_feature (1)..(25): SEQ ID NO: 6228; WAN024F73_at; Start 142; Stop 166
tattttctgaaattggagtattggg

SEQ ID NO: 194780 - DNA, 25 bp, Artificial
  probe
  misc_feature (1)..(25): SEQ ID NO: 6228; WAN024F73_at; Start 3; Stop 27
ggaaggagctattttactggctatt

SEQ ID NO: 194781 - DNA, 25 bp, Artificial
  probe
  misc_feature (1)..(25): SEQ ID NO: 6228; WAN024F73_at; Start 11; Stop 35
ctattttactggctattgattactt

SEQ ID NO: 194782 - DNA, 25 bp, Artificial
  probe
  misc_feature (1)..(25): SEQ ID NO: 6228; WAN024F73_at; Start 2; Stop 26
tggaaggagctattttactggctat

SEQ ID NO: 194783 - DNA, 25 bp, Artificial
  probe
  misc_feature (1)..(25): SEQ ID NO: 6228; WAN024F73_at; Start 152; Stop 176
aattggagtattgggctgtttttca

SEQ ID NO: 194784 - DNA, 25 bp, Artificial
  probe
  misc_feature (1)..(25): SEQ ID NO: 6228; WAN024F73_at; Start 29; Stop 53
attacttttatactcttcgcaaatc

SEQ ID NO: 194785 - DNA, 25 bp, Artificial
  probe
  misc_feature (1)..(25): SEQ ID NO: 6228; WAN024F73_at; Start 24; Stop 48
tattgattacttttatactcttcgc

SEQ ID NO: 194786 - DNA, 25 bp, Artificial
  probe
  misc_feature (1)..(25): SEQ ID NO: 6228; WAN024F73_at; Start 6; Stop 30
aggagctattttactggctattgat

SEQ ID NO: 194787 - DNA, 25 bp, Artificial
  probe
  misc_feature (1)..(25): SEQ ID NO: 6228; WAN024F73_at; Start 5; Stop 29
aaggagctattttactggctattga

SEQ ID NO: 194788 - DNA, 25 bp, Artificial
  probe
  misc_feature (1)..(25): SEQ ID NO: 6228; WAN024F73_at; Start 144; Stop 168
ttttctgaaattggagtattgggct

SEQ ID NO: 194789 - DNA, 25 bp, Artificial
  probe
  misc_feature (1)..(25): SEQ ID NO: 6228; WAN024F73_at; Start 28; Stop 52
gattacttttatactcttcgcaaat

SEQ ID NO: 194790 - DNA, 25 bp, Artificial
  probe
  misc_feature (1)..(25): SEQ ID NO: 6228; WAN024F73_at; Start 21; Stop 45
ggctattgattacttttatactctt

SEQ ID NO: 194791 - DNA, 25 bp, Artificial
  probe
  misc_feature (1)..(25): SEQ ID NO: 6228; WAN024F73_at; Start 149; Stop 173
tgaaattggagtattgggctgtttt

SEQ ID NO: 194792 - DNA, 25 bp, Artificial
  probe
  misc_feature (1)..(25): SEQ ID NO: 6228; WAN024F73_at; Start 4; Stop 28
gaaggagctattttactggctattg

SEQ ID NO: 194793 - DNA, 25 bp, Artificial
  probe
  misc_feature (1)..(25): SEQ ID NO: 6228; WAN024F73_at; Start 147; Stop 171
tctgaaattggagtattgggctgtt

SEQ ID NO: 194794 - DNA, 25 bp, Artificial
  probe
  misc_feature (1)..(25): SEQ ID NO: 6228; WAN024F73_at; Start 25; Stop 49
attgattacttttatactcttcgca

SEQ ID NO: 194795 - DNA, 25 bp, Artificial
  probe
  misc_feature (1)..(25): SEQ ID NO: 6228; WAN024F73_at; Start 27; Stop 51
tgattacttttatactcttcgcaaa

SEQ ID NO: 194796 - DNA, 25 bp, Artificial
  probe
  misc_feature (1)..(25): SEQ ID NO: 7597; WAN024F74_at; Start 58; Stop 82
gactctctagaacccgataagaagt

SEQ ID NO: 194797 - DNA, 25 bp, Artificial
  probe
  misc_feature (1)..(25): SEQ ID NO: 7597; WAN024F74_at; Start 19; Stop 43
tcccagacaaaaaggtccaatagta

SEQ ID NO: 194798 - DNA, 25 bp, Artificial
  probe
  misc_feature (1)..(25): SEQ ID NO: 7597; WAN024F74_at; Start 47; Stop 71
cagatggctatgactctctagaacc

SEQ ID NO: 194799 - DNA, 25 bp, Artificial
  probe
  misc_feature (1)..(25): SEQ ID NO: 7597; WAN024F74_at; Start 32; Stop 56
ggtccaatagtaggtcagatggcta

SEQ ID NO: 194800 - DNA, 25 bp, Artificial
  probe
  misc_feature (1)..(25): SEQ ID NO: 7597; WAN024F74_at; Start 7; Stop 31
gattctcaactttcccagacaaaaa

SEQ ID NO: 194801 - DNA, 25 bp, Artificial
  probe
  misc_feature (1)..(25): SEQ ID NO: 7597; WAN024F74_at; Start 53; Stop 77
gctatgactctctagaacccgataa

SEQ ID NO: 194802 - DNA, 25 bp, Artificial
  probe
  misc_feature (1)..(25): SEQ ID NO: 7597; WAN024F74_at; Start 42; Stop 66
taggtcagatggctatgactctcta

SEQ ID NO: 194803 - DNA, 25 bp, Artificial
  probe
  misc_feature (1)..(25): SEQ ID NO: 7597; WAN024F74_at; Start 36; Stop 60
caatagtaggtcagatggctatgac

SEQ ID NO: 194804 - DNA, 25 bp, Artificial
  probe
  misc_feature (1)..(25): SEQ ID NO: 7597; WAN024F74_at; Start 37; Stop 61
aatagtaggtcagatggctatgact

SEQ ID NO: 194805 - DNA, 25 bp, Artificial
  probe
  misc_feature (1)..(25): SEQ ID NO: 7597; WAN024F74_at; Start 46; Stop 70
tcagatggctatgactctctagaac

SEQ ID NO: 194806 - DNA, 25 bp, Artificial
  probe
  misc_feature (1)..(25): SEQ ID NO: 7597; WAN024F74_at; Start 50; Stop 74
atggctatgactctctagaacccga

SEQ ID NO: 194807 - DNA, 25 bp, Artificial
  probe
  misc_feature (1)..(25): SEQ ID NO: 7597; WAN024F74_at; Start 35; Stop 59
ccaatagtaggtcagatggctatga

SEQ ID NO: 194808 - DNA, 25 bp, Artificial
  probe
  misc_feature (1)..(25): SEQ ID NO: 7597; WAN024F74_at; Start 8; Stop 32
attctcaactttcccagacaaaaag

SEQ ID NO: 194809 - DNA, 25 bp, Artificial
  probe
  misc_feature (1)..(25): SEQ ID NO: 7597; WAN024F74_at; Start 6; Stop 30
tgattctcaactttcccagacaaaa

SEQ ID NO: 194810 - DNA, 25 bp, Artificial
  probe
  misc_feature (1)..(25): SEQ ID NO: 7597; WAN024F74_at; Start 22; Stop 46
cagacaaaaaggtccaatagtaggt

SEQ ID NO: 194811 - DNA, 25 bp, Artificial
  probe
  misc_feature (1)..(25): SEQ ID NO: 7597; WAN024F74_at; Start 30; Stop 54
aaggtccaatagtaggtcagatggc

SEQ ID NO: 194812 - DNA, 25 bp, Artificial
  probe
  misc_feature (1)..(25): SEQ ID NO: 7597; WAN024F74_at; Start 1; Stop 25
ttgcttgattctcaactttcccaga

SEQ ID NO: 194813 - DNA, 25 bp, Artificial
  probe
  misc_feature (1)..(25): SEQ ID NO: 7597; WAN024F74_at; Start 27; Stop 51
aaaaaggtccaatagtaggtcagat

SEQ ID NO: 194814 - DNA, 25 bp, Artificial
  probe
  misc_feature (1)..(25): SEQ ID NO: 7597; WAN024F74_at; Start 39; Stop 63
tagtaggtcagatggctatgactct

SEQ ID NO: 194815 - DNA, 25 bp, Artificial
  probe
  misc_feature (1)..(25): SEQ ID NO: 7597; WAN024F74_at; Start 40; Stop 64
agtaggtcagatggctatgactctc

SEQ ID NO: 194816 - DNA, 25 bp, Artificial
  probe
  misc_feature (1)..(25): SEQ ID NO: 7597; WAN024F74_at; Start 33; Stop 57
gtccaatagtaggtcagatggctat

SEQ ID NO: 194817 - DNA, 25 bp, Artificial
  probe
  misc_feature (1)..(25): SEQ ID NO: 7597; WAN024F74_at; Start 29; Stop 53
aaaggtccaatagtaggtcagatgg

SEQ ID NO: 194818 - DNA, 25 bp, Artificial
  probe
  misc_feature (1)..(25): SEQ ID NO: 7597; WAN024F74_at; Start 3; Stop 27
gcttgattctcaactttcccagaca

SEQ ID NO: 194819 - DNA, 25 bp, Artificial
  probe
  misc_feature (1)..(25): SEQ ID NO: 7597; WAN024F74_at; Start 28; Stop 52
aaaaggtccaatagtaggtcagatg

SEQ ID NO: 194820 - DNA, 25 bp, Artificial
  probe
  misc_feature (1)..(25): SEQ ID NO: 7597; WAN024F74_at; Start 55; Stop 79
tatgactctctagaacccgataaga

SEQ ID NO: 194821 - DNA, 25 bp, Artificial
  probe
  misc_feature (1)..(25): SEQ ID NO: 7597; WAN024F74_at; Start 26; Stop 50
caaaaaggtccaatagtaggtcaga

SEQ ID NO: 194822 - DNA, 25 bp, Artificial
  probe
  misc_feature (1)..(25): SEQ ID NO: 7597; WAN024F74_at; Start 51; Stop 75
tggctatgactctctagaacccgat

SEQ ID NO: 194823 - DNA, 25 bp, Artificial
  probe
  misc_feature (1)..(25): SEQ ID NO: 7597; WAN024F74_at; Start 49; Stop 73
gatggctatgactctctagaacccg

SEQ ID NO: 194824 - DNA, 25 bp, Artificial
  probe
  misc_feature (1)..(25): SEQ ID NO: 7597; WAN024F74_at; Start 57; Stop 81
tgactctctagaacccgataagaag

SEQ ID NO: 194825 - DNA, 25 bp, Artificial
  probe
  misc_feature (1)..(25): SEQ ID NO: 7597; WAN024F74_at; Start 52; Stop 76
ggctatgactctctagaacccgata

SEQ ID NO: 194826 - DNA, 25 bp, Artificial
  probe
  misc_feature (1)..(25): SEQ ID NO: 7597; WAN024F74_at; Start 44; Stop 68
ggtcagatggctatgactctctaga

SEQ ID NO: 194827 - DNA, 25 bp, Artificial
  probe
  misc_feature (1)..(25): SEQ ID NO: 7597; WAN024F74_at; Start 34; Stop 58
tccaatagtaggtcagatggctatg

SEQ ID NO: 194828 - DNA, 25 bp, Artificial
  probe
  misc_feature (1)..(25): SEQ ID NO: 7597; WAN024F74_at; Start 20; Stop 44
cccagacaaaaaggtccaatagtag

SEQ ID NO: 194829 - DNA, 25 bp, Artificial
  probe
  misc_feature (1)..(25): SEQ ID NO: 7597; WAN024F74_at; Start 48; Stop 72
agatggctatgactctctagaaccc

SEQ ID NO: 194830 - DNA, 25 bp, Artificial
  probe
  misc_feature (1)..(25): SEQ ID NO: 7707; WAN024F75_at; Start 26; Stop 50
tgatctattcgttctattcttattt

SEQ ID NO: 194831 - DNA, 25 bp, Artificial
  probe
  misc_feature (1)..(25): SEQ ID NO: 7707; WAN024F75_at; Start 22; Stop 46
gtcctgatctattcgttctattctt

SEQ ID NO: 194832 - DNA, 25 bp, Artificial
  probe
  misc_feature (1)..(25): SEQ ID NO: 7707; WAN024F75_at; Start 29; Stop 53
tctattcgttctattcttatttcat

SEQ ID NO: 194833 - DNA, 25 bp, Artificial
  probe
  misc_feature (1)..(25): SEQ ID NO: 7707; WAN024F75_at; Start 28; Stop 52
atctattcgttctattcttatttca

SEQ ID NO: 194834 - DNA, 25 bp, Artificial
  probe
  misc_feature (1)..(25): SEQ ID NO: 7707; WAN024F75_at; Start 23; Stop 47
tcctgatctattcgttctattctta

SEQ ID NO: 194835 - DNA, 25 bp, Artificial
  probe
  misc_feature (1)..(25): SEQ ID NO: 7707; WAN024F75_at; Start 18; Stop 42
gactgtcctgatctattcgttctat

SEQ ID NO: 194836 - DNA, 25 bp, Artificial
  probe
  misc_feature (1)..(25): SEQ ID NO: 7707; WAN024F75_at; Start 21; Stop 45
tgtcctgatctattcgttctattct

SEQ ID NO: 194837 - DNA, 25 bp, Artificial
  probe
  misc_feature (1)..(25): SEQ ID NO: 7707; WAN024F75_at; Start 27; Stop 51
gatctattcgttctattcttatttc

SEQ ID NO: 194838 - DNA, 25 bp, Artificial
  probe
  misc_feature (1)..(25): SEQ ID NO: 7707; WAN024F75_at; Start 20; Stop 44
ctgtcctgatctattcgttctattc

SEQ ID NO: 194839 - DNA, 25 bp, Artificial
  probe
  misc_feature (1)..(25): SEQ ID NO: 7707; WAN024F75_at; Start 25; Stop 49
ctgatctattcgttctattcttatt

SEQ ID NO: 194840 - DNA, 25 bp, Artificial
  probe
  misc_feature (1)..(25): SEQ ID NO: 7707; WAN024F75_at; Start 52; Stop 76
attttactatattttggtgcaataa

SEQ ID NO: 194841 - DNA, 25 bp, Artificial
  probe
  misc_feature (1)..(25): SEQ ID NO: 7707; WAN024F75_at; Start 19; Stop 43
actgtcctgatctattcgttctatt

SEQ ID NO: 194842 - DNA, 25 bp, Artificial
  probe
  misc_feature (1)..(25): SEQ ID NO: 7707; WAN024F75_at; Start 17; Stop 41
tgactgtcctgatctattcgttcta

SEQ ID NO: 194843 - DNA, 25 bp, Artificial
  probe
  misc_feature (1)..(25): SEQ ID NO: 7707; WAN024F75_at; Start 24; Stop 48
cctgatctattcgttctattcttat

SEQ ID NO: 194844 - DNA, 25 bp, Artificial
  probe
  misc_feature (1)..(25): SEQ ID NO: 7707; WAN024F75_at; Start 53; Stop 77
ttttactatattttggtgcaataag

SEQ ID NO: 194845 - DNA, 25 bp, Artificial
  probe
  misc_feature (1)..(25): SEQ ID NO: 7468; WAN024F76_at; Start 57; Stop 81
agaaaacttcagaccaatccacaaa

SEQ ID NO: 194846 - DNA, 25 bp, Artificial
  probe
  misc_feature (1)..(25): SEQ ID NO: 7468; WAN024F76_at; Start 56; Stop 80
aagaaaacttcagaccaatccacaa

SEQ ID NO: 194847 - DNA, 25 bp, Artificial
  probe
  misc_feature (1)..(25): SEQ ID NO: 7468; WAN024F76_at; Start 60; Stop 84
aaacttcagaccaatccacaaaagg

SEQ ID NO: 194848 - DNA, 25 bp, Artificial
  probe
  misc_feature (1)..(25): SEQ ID NO: 7468; WAN024F76_at; Start 59; Stop 83
aaaacttcagaccaatccacaaaag

SEQ ID NO: 194849 - DNA, 25 bp, Artificial
  probe
  misc_feature (1)..(25): SEQ ID NO: 7468; WAN024F76_at; Start 58; Stop 82
gaaaacttcagaccaatccacaaaa

SEQ ID NO: 194850 - DNA, 25 bp, Artificial
  probe
  misc_feature (1)..(25): SEQ ID NO: 7468; WAN024F76_at; Start 55; Stop 79
aaagaaaacttcagaccaatccaca

SEQ ID NO: 194851 - DNA, 25 bp, Artificial
  probe
  misc_feature (1)..(25): SEQ ID NO: 6353; WAN024F77_x_at; Start 81; Stop 105
agtcagtaacatctatacggcaagg

SEQ ID NO: 194852 - DNA, 25 bp, Artificial
  probe
  misc_feature (1)..(25): SEQ ID NO: 6353; WAN024F77_x_at; Start 53; Stop 77
gttttgaggttgcagatagaactga

SEQ ID NO: 194853 - DNA, 25 bp, Artificial
  probe
  misc_feature (1)..(25): SEQ ID NO: 6353; WAN024F77_x_at; Start 24; Stop 48
gaaactagctacgggctgctcaaaa

SEQ ID NO: 194854 - DNA, 25 bp, Artificial
  probe
  misc_feature (1)..(25): SEQ ID NO: 6353; WAN024F77_x_at; Start 22; Stop 46
aggaaactagctacgggctgctcaa

SEQ ID NO: 194855 - DNA, 25 bp, Artificial
  probe
  misc_feature (1)..(25): SEQ ID NO: 6353; WAN024F77_x_at; Start 41; Stop 65
gctcaaaacactgttttgaggttgc

SEQ ID NO: 194856 - DNA, 25 bp, Artificial
  probe
  misc_feature (1)..(25): SEQ ID NO: 6353; WAN024F77_x_at; Start 38; Stop 62
gctgctcaaaacactgttttgaggt

SEQ ID NO: 194857 - DNA, 25 bp, Artificial
  probe
  misc_feature (1)..(25): SEQ ID NO: 6353; WAN024F77_x_at; Start 19; Stop 43
actaggaaactagctacgggctgct

SEQ ID NO: 194858 - DNA, 25 bp, Artificial
  probe
  misc_feature (1)..(25): SEQ ID NO: 6353; WAN024F77_x_at; Start 30; Stop 54
agctacgggctgctcaaaacactgt

SEQ ID NO: 194859 - DNA, 25 bp, Artificial
  probe
  misc_feature (1)..(25): SEQ ID NO: 6353; WAN024F77_x_at; Start 29; Stop 53
tagctacgggctgctcaaaacactg

SEQ ID NO: 194860 - DNA, 25 bp, Artificial
  probe
  misc_feature (1)..(25): SEQ ID NO: 6353; WAN024F77_x_at; Start 78; Stop 102
cgaagtcagtaacatctatacggca

SEQ ID NO: 194861 - DNA, 25 bp, Artificial
  probe
  misc_feature (1)..(25): SEQ ID NO: 6353; WAN024F77_x_at; Start 86; Stop 110
gtaacatctatacggcaaggcgacg

SEQ ID NO: 194862 - DNA, 25 bp, Artificial
  probe
  misc_feature (1)..(25): SEQ ID NO: 6353; WAN024F77_x_at; Start 93; Stop 117
ctatacggcaaggcgacgtctaact

SEQ ID NO: 194863 - DNA, 25 bp, Artificial
  probe
  misc_feature (1)..(25): SEQ ID NO: 6353; WAN024F77_x_at; Start 95; Stop 119
atacggcaaggcgacgtctaactaa

SEQ ID NO: 194864 - DNA, 25 bp, Artificial
  probe
  misc_feature (1)..(25): SEQ ID NO: 6353; WAN024F77_x_at; Start 32; Stop 56
ctacgggctgctcaaaacactgttt

SEQ ID NO: 194865 - DNA, 25 bp, Artificial
  probe
  misc_feature (1)..(25): SEQ ID NO: 6353; WAN024F77_x_at; Start 36; Stop 60
gggctgctcaaaacactgttttgag

SEQ ID NO: 194866 - DNA, 25 bp, Artificial
  probe
  misc_feature (1)..(25): SEQ ID NO: 6353; WAN024F77_x_at; Start 85; Stop 109
agtaacatctatacggcaaggcgac

SEQ ID NO: 194867 - DNA, 25 bp, Artificial
  probe
  misc_feature (1)..(25): SEQ ID NO: 6353; WAN024F77_x_at; Start 42; Stop 66
ctcaaaacactgttttgaggttgca

SEQ ID NO: 194868 - DNA, 25 bp, Artificial
  probe
  misc_feature (1)..(25): SEQ ID NO: 6353; WAN024F77_x_at; Start 40; Stop 64
tgctcaaaacactgttttgaggttg

SEQ ID NO: 194869 - DNA, 25 bp, Artificial
  probe
  misc_feature (1)..(25): SEQ ID NO: 6353; WAN024F77_x_at; Start 34; Stop 58
acgggctgctcaaaacactgttttg

SEQ ID NO: 194870 - DNA, 25 bp, Artificial
  probe
  misc_feature (1)..(25): SEQ ID NO: 6353; WAN024F77_x_at; Start 91; Stop 115
atctatacggcaaggcgacgtctaa

SEQ ID NO: 194871 - DNA, 25 bp, Artificial
  probe
  misc_feature (1)..(25): SEQ ID NO: 6353; WAN024F77_x_at; Start 39; Stop 63
ctgctcaaaacactgttttgaggtt

SEQ ID NO: 194872 - DNA, 25 bp, Artificial
  probe
  misc_feature (1)..(25): SEQ ID NO: 6353; WAN024F77_x_at; Start 96; Stop 120
tacggcaaggcgacgtctaactaat

SEQ ID NO: 194873 - DNA, 25 bp, Artificial
  probe
  misc_feature (1)..(25): SEQ ID NO: 6353; WAN024F77_x_at; Start 2; Stop 26
tgaaaatcaaagatcaaactaggaa

SEQ ID NO: 194874 - DNA, 25 bp, Artificial
  probe
  misc_feature (1)..(25): SEQ ID NO: 6353; WAN024F77_x_at; Start 43; Stop 67
tcaaaacactgttttgaggttgcag

SEQ ID NO: 194875 - DNA, 25 bp, Artificial
  probe
  misc_feature (1)..(25): SEQ ID NO: 6353; WAN024F77_x_at; Start 27; Stop 51
actagctacgggctgctcaaaacac

SEQ ID NO: 194876 - DNA, 25 bp, Artificial
  probe
  misc_feature (1)..(25): SEQ ID NO: 6353; WAN024F77_x_at; Start 92; Stop 116
tctatacggcaaggcgacgtctaac

SEQ ID NO: 194877 - DNA, 25 bp, Artificial
  probe
  misc_feature (1)..(25): SEQ ID NO: 6353; WAN024F77_x_at; Start 23; Stop 47
ggaaactagctacgggctgctcaaa

SEQ ID NO: 194878 - DNA, 25 bp, Artificial
  probe
  misc_feature (1)..(25): SEQ ID NO: 6353; WAN024F77_x_at; Start 1; Stop 25
atgaaaatcaaagatcaaactagga

SEQ ID NO: 194879 - DNA, 25 bp, Artificial
  probe
  misc_feature (1)..(25): SEQ ID NO: 6353; WAN024F77_x_at; Start 26; Stop 50
aactagctacgggctgctcaaaaca

SEQ ID NO: 194880 - DNA, 25 bp, Artificial
  probe
  misc_feature (1)..(25): SEQ ID NO: 6353; WAN024F77_x_at; Start 35; Stop 59
cgggctgctcaaaacactgttttga

SEQ ID NO: 194881 - DNA, 25 bp, Artificial
  probe
  misc_feature (1)..(25): SEQ ID NO: 6353; WAN024F77_x_at; Start 37; Stop 61
ggctgctcaaaacactgttttgagg

SEQ ID NO: 194882 - DNA, 25 bp, Artificial
  probe
  misc_feature (1)..(25): SEQ ID NO: 6353; WAN024F77_x_at; Start 31; Stop 55
gctacgggctgctcaaaacactgtt

SEQ ID NO: 194883 - DNA, 25 bp, Artificial
  probe
  misc_feature (1)..(25): SEQ ID NO: 6353; WAN024F77_x_at; Start 33; Stop 57
tacgggctgctcaaaacactgtttt

SEQ ID NO: 194884 - DNA, 25 bp, Artificial
  probe
  misc_feature (1)..(25): SEQ ID NO: 6353; WAN024F77_x_at; Start 3; Stop 27
gaaaatcaaagatcaaactaggaaa

SEQ ID NO: 194885 - DNA, 25 bp, Artificial
  probe
  misc_feature (1)..(25): SEQ ID NO: 6231; WAN024F78_at; Start 48; Stop 72
tattagagtcctgaagttgctggtt

SEQ ID NO: 194886 - DNA, 25 bp, Artificial
  probe
  misc_feature (1)..(25): SEQ ID NO: 6231; WAN024F78_at; Start 32; Stop 56
tacttgtagcaggtgttattagagt

SEQ ID NO: 194887 - DNA, 25 bp, Artificial
  probe
  misc_feature (1)..(25): SEQ ID NO: 6231; WAN024F78_at; Start 26; Stop 50
caggtttacttgtagcaggtgttat

SEQ ID NO: 194888 - DNA, 25 bp, Artificial
  probe
  misc_feature (1)..(25): SEQ ID NO: 6231; WAN024F78_at; Start 39; Stop 63
agcaggtgttattagagtcctgaag

SEQ ID NO: 194889 - DNA, 25 bp, Artificial
  probe
  misc_feature (1)..(25): SEQ ID NO: 6231; WAN024F78_at; Start 24; Stop 48
ggcaggtttacttgtagcaggtgtt

SEQ ID NO: 194890 - DNA, 25 bp, Artificial
  probe
  misc_feature (1)..(25): SEQ ID NO: 6231; WAN024F78_at; Start 23; Stop 47
tggcaggtttacttgtagcaggtgt

SEQ ID NO: 194891 - DNA, 25 bp, Artificial
  probe
  misc_feature (1)..(25): SEQ ID NO: 6231; WAN024F78_at; Start 36; Stop 60
tgtagcaggtgttattagagtcctg

SEQ ID NO: 194892 - DNA, 25 bp, Artificial
  probe
  misc_feature (1)..(25): SEQ ID NO: 6231; WAN024F78_at; Start 47; Stop 71
ttattagagtcctgaagttgctggt

SEQ ID NO: 194893 - DNA, 25 bp, Artificial
  probe
  misc_feature (1)..(25): SEQ ID NO: 6231; WAN024F78_at; Start 35; Stop 59
ttgtagcaggtgttattagagtcct

SEQ ID NO: 194894 - DNA, 25 bp, Artificial
  probe
  misc_feature (1)..(25): SEQ ID NO: 6231; WAN024F78_at; Start 45; Stop 69
tgttattagagtcctgaagttgctg

SEQ ID NO: 194895 - DNA, 25 bp, Artificial
  probe
  misc_feature (1)..(25): SEQ ID NO: 6231; WAN024F78_at; Start 43; Stop 67
ggtgttattagagtcctgaagttgc

SEQ ID NO: 194896 - DNA, 25 bp, Artificial
  probe
  misc_feature (1)..(25): SEQ ID NO: 6231; WAN024F78_at; Start 46; Stop 70
gttattagagtcctgaagttgctgg

SEQ ID NO: 194897 - DNA, 25 bp, Artificial
  probe
  misc_feature (1)..(25): SEQ ID NO: 6231; WAN024F78_at; Start 51; Stop 75
tagagtcctgaagttgctggttttc

SEQ ID NO: 194898 - DNA, 25 bp, Artificial
  probe
  misc_feature (1)..(25): SEQ ID NO: 6231; WAN024F78_at; Start 37; Stop 61
gtagcaggtgttattagagtcctga

SEQ ID NO: 194899 - DNA, 25 bp, Artificial
  probe
  misc_feature (1)..(25): SEQ ID NO: 6231; WAN024F78_at; Start 50; Stop 74
ttagagtcctgaagttgctggtttt

SEQ ID NO: 194900 - DNA, 25 bp, Artificial
  probe
  misc_feature (1)..(25): SEQ ID NO: 6231; WAN024F78_at; Start 30; Stop 54
tttacttgtagcaggtgttattaga

SEQ ID NO: 194901 - DNA, 25 bp, Artificial
  probe
  misc_feature (1)..(25): SEQ ID NO: 6231; WAN024F78_at; Start 38; Stop 62
tagcaggtgttattagagtcctgaa

SEQ ID NO: 194902 - DNA, 25 bp, Artificial
  probe
  misc_feature (1)..(25): SEQ ID NO: 6231; WAN024F78_at; Start 42; Stop 66
aggtgttattagagtcctgaagttg

SEQ ID NO: 194903 - DNA, 25 bp, Artificial
  probe
  misc_feature (1)..(25): SEQ ID NO: 6231; WAN024F78_at; Start 31; Stop 55
ttacttgtagcaggtgttattagag

SEQ ID NO: 194904 - DNA, 25 bp, Artificial
  probe
  misc_feature (1)..(25): SEQ ID NO: 6231; WAN024F78_at; Start 33; Stop 57
acttgtagcaggtgttattagagtc

SEQ ID NO: 194905 - DNA, 25 bp, Artificial
  probe
  misc_feature (1)..(25): SEQ ID NO: 6231; WAN024F78_at; Start 27; Stop 51
aggtttacttgtagcaggtgttatt

SEQ ID NO: 194906 - DNA, 25 bp, Artificial
  probe
  misc_feature (1)..(25): SEQ ID NO: 6231; WAN024F78_at; Start 44; Stop 68
gtgttattagagtcctgaagttgct

SEQ ID NO: 194907 - DNA, 25 bp, Artificial
  probe
  misc_feature (1)..(25): SEQ ID NO: 6231; WAN024F78_at; Start 29; Stop 53
gtttacttgtagcaggtgttattag

SEQ ID NO: 194908 - DNA, 25 bp, Artificial
  probe
  misc_feature (1)..(25): SEQ ID NO: 6231; WAN024F78_at; Start 28; Stop 52
ggtttacttgtagcaggtgttatta

SEQ ID NO: 194909 - DNA, 25 bp, Artificial
  probe
  misc_feature (1)..(25): SEQ ID NO: 6231; WAN024F78_at; Start 34; Stop 58
cttgtagcaggtgttattagagtcc

SEQ ID NO: 194910 - DNA, 25 bp, Artificial
  probe
  misc_feature (1)..(25): SEQ ID NO: 6231; WAN024F78_at; Start 25; Stop 49
gcaggtttacttgtagcaggtgtta

SEQ ID NO: 194911 - DNA, 25 bp, Artificial
  probe
  misc_feature (1)..(25): SEQ ID NO: 6231; WAN024F78_at; Start 41; Stop 65
caggtgttattagagtcctgaagtt

SEQ ID NO: 194912 - DNA, 25 bp, Artificial
  probe
  misc_feature (1)..(25): SEQ ID NO: 6231; WAN024F78_at; Start 40; Stop 64
gcaggtgttattagagtcctgaagt

SEQ ID NO: 194913 - DNA, 25 bp, Artificial
  probe
  misc_feature (1)..(25): SEQ ID NO: 6231; WAN024F78_at; Start 49; Stop 73
attagagtcctgaagttgctggttt

SEQ ID NO: 194914 - DNA, 25 bp, Artificial
  probe
  misc_feature (1)..(25): SEQ ID NO: 6352; WAN024F79_at; Start 84; Stop 108
cagtgatcatatcgtaaccgtccaa

SEQ ID NO: 194915 - DNA, 25 bp, Artificial
  probe
  misc_feature (1)..(25): SEQ ID NO: 6352; WAN024F79_at; Start 78; Stop 102
cgaagtcagtgatcatatcgtaacc

SEQ ID NO: 194916 - DNA, 25 bp, Artificial
  probe
  misc_feature (1)..(25): SEQ ID NO: 6352; WAN024F79_at; Start 82; Stop 106
gtcagtgatcatatcgtaaccgtcc

SEQ ID NO: 194917 - DNA, 25 bp, Artificial
  probe
  misc_feature (1)..(25): SEQ ID NO: 6352; WAN024F79_at; Start 80; Stop 104
aagtcagtgatcatatcgtaaccgt

SEQ ID NO: 194918 - DNA, 25 bp, Artificial
  probe
  misc_feature (1)..(25): SEQ ID NO: 6352; WAN024F79_at; Start 81; Stop 105
agtcagtgatcatatcgtaaccgtc

SEQ ID NO: 194919 - DNA, 25 bp, Artificial
  probe
  misc_feature (1)..(25): SEQ ID NO: 6352; WAN024F79_at; Start 83; Stop 107
tcagtgatcatatcgtaaccgtcca

SEQ ID NO: 194920 - DNA, 25 bp, Artificial
  probe
  misc_feature (1)..(25): SEQ ID NO: 6352; WAN024F79_at; Start 79; Stop 103
gaagtcagtgatcatatcgtaaccg

SEQ ID NO: 194921 - DNA, 25 bp, Artificial
  probe
  misc_feature (1)..(25): SEQ ID NO: 6352; WAN024F79_at; Start 77; Stop 101
acgaagtcagtgatcatatcgtaac

SEQ ID NO: 194922 - DNA, 25 bp, Artificial
  probe
  misc_feature (1)..(25): SEQ ID NO: 3475; WAN024F7A_x_at; Start 86; Stop 110
ttgattttcattgagtataaaaaga

SEQ ID NO: 194923 - DNA, 25 bp, Artificial
  probe
  misc_feature (1)..(25): SEQ ID NO: 3475; WAN024F7A_x_at; Start 58; Stop 82
ctgcggctagcttcctagtttgtgc

SEQ ID NO: 194924 - DNA, 25 bp, Artificial
  probe
  misc_feature (1)..(25): SEQ ID NO: 3475; WAN024F7A_x_at; Start 57; Stop 81
cctgcggctagcttcctagtttgtg

SEQ ID NO: 194925 - DNA, 25 bp, Artificial
  probe
  misc_feature (1)..(25): SEQ ID NO: 3475; WAN024F7A_x_at; Start 85; Stop 109
tttgattttcattgagtataaaaag

SEQ ID NO: 194926 - DNA, 25 bp, Artificial
  probe
  misc_feature (1)..(25): SEQ ID NO: 3475; WAN024F7A_x_at; Start 84; Stop 108
ctttgattttcattgagtataaaaa

SEQ ID NO: 194927 - DNA, 25 bp, Artificial
  probe
  misc_feature (1)..(25): SEQ ID NO: 3475; WAN024F7A_x_at; Start 87; Stop 111
tgattttcattgagtataaaaagaa

SEQ ID NO: 194928 - DNA, 25 bp, Artificial
  probe
  misc_feature (1)..(25): SEQ ID NO: 3475; WAN024F7A_x_at; Start 92; Stop 116
ttcattgagtataaaaagaatccgc

SEQ ID NO: 194929 - DNA, 25 bp, Artificial
  probe
  misc_feature (1)..(25): SEQ ID NO: 3475; WAN024F7A_x_at; Start 90; Stop 114
ttttcattgagtataaaaagaatcc

SEQ ID NO: 194930 - DNA, 25 bp, Artificial
  probe
  misc_feature (1)..(25): SEQ ID NO: 3475; WAN024F7A_x_at; Start 91; Stop 115
tttcattgagtataaaaagaatccg

SEQ ID NO: 194931 - DNA, 25 bp, Artificial
  probe
  misc_feature (1)..(25): SEQ ID NO: 3475; WAN024F7A_x_at; Start 94; Stop 118
cattgagtataaaaagaatccgctt

SEQ ID NO: 194932 - DNA, 25 bp, Artificial
  probe
  misc_feature (1)..(25): SEQ ID NO: 3475; WAN024F7A_x_at; Start 93; Stop 117
tcattgagtataaaaagaatccgct

SEQ ID NO: 194933 - DNA, 25 bp, Artificial
  probe
  misc_feature (1)..(25): SEQ ID NO: 3475; WAN024F7A_x_at; Start 89; Stop 113
attttcattgagtataaaaagaatc

SEQ ID NO: 194934 - DNA, 25 bp, Artificial
  probe
  misc_feature (1)..(25): SEQ ID NO: 3475; WAN024F7A_x_at; Start 88; Stop 112
gattttcattgagtataaaaagaat

SEQ ID NO: 194935 - DNA, 25 bp, Artificial
  probe
  misc_feature (1)..(25): SEQ ID NO: 4472; WAN024F7B_x_at; Start 181; Stop 205
ggtgttttgagctgacttcgtcagt

SEQ ID NO: 194936 - DNA, 25 bp, Artificial
  probe
  misc_feature (1)..(25): SEQ ID NO: 4472; WAN024F7B_x_at; Start 162; Stop 186
ctatccacaacctcaaaacggtgtt

SEQ ID NO: 194937 - DNA, 25 bp, Artificial
  probe
  misc_feature (1)..(25): SEQ ID NO: 4472; WAN024F7B_x_at; Start 161; Stop 185
tctatccacaacctcaaaacggtgt

SEQ ID NO: 194938 - DNA, 25 bp, Artificial
  probe
  misc_feature (1)..(25): SEQ ID NO: 4472; WAN024F7B_x_at; Start 160; Stop 184
ttctatccacaacctcaaaacggtg

SEQ ID NO: 194939 - DNA, 25 bp, Artificial
  probe
  misc_feature (1)..(25): SEQ ID NO: 4472; WAN024F7B_x_at; Start 2; Stop 26
actcttcgaaaatctcttcaaacca

SEQ ID NO: 194940 - DNA, 25 bp, Artificial
  probe
  misc_feature (1)..(25): SEQ ID NO: 4472; WAN024F7B_x_at; Start 180; Stop 204
cggtgttttgagctgacttcgtcag

SEQ ID NO: 194941 - DNA, 25 bp, Artificial
  probe
  misc_feature (1)..(25): SEQ ID NO: 4472; WAN024F7B_x_at; Start 94; Stop 118
gttttgagctgacttcgtcagttct

SEQ ID NO: 194942 - DNA, 25 bp, Artificial
  probe
  misc_feature (1)..(25): SEQ ID NO: 4472; WAN024F7B_x_at; Start 51; Stop 75
atgttactgacttcgtcagttctat

SEQ ID NO: 194943 - DNA, 25 bp, Artificial
  probe
  misc_feature (1)..(25): SEQ ID NO: 4472; WAN024F7B_x_at; Start 96; Stop 120
tttgagctgacttcgtcagttctat

SEQ ID NO: 194944 - DNA, 25 bp, Artificial
  probe
  misc_feature (1)..(25): SEQ ID NO: 4472; WAN024F7B_x_at; Start 179; Stop 203
acggtgttttgagctgacttcgtca

SEQ ID NO: 194945 - DNA, 25 bp, Artificial
  probe
  misc_feature (1)..(25): SEQ ID NO: 4472; WAN024F7B_x_at; Start 178; Stop 202
aacggtgttttgagctgacttcgtc

SEQ ID NO: 194946 - DNA, 25 bp, Artificial
  probe
  misc_feature (1)..(25): SEQ ID NO: 4472; WAN024F7B_x_at; Start 52; Stop 76
tgttactgacttcgtcagttctatc

SEQ ID NO: 194947 - DNA, 25 bp, Artificial
  probe
  misc_feature (1)..(25): SEQ ID NO: 4472; WAN024F7B_x_at; Start 137; Stop 161
gtgttttgagctgacttcgtcagtt

SEQ ID NO: 194948 - DNA, 25 bp, Artificial
  probe
  misc_feature (1)..(25): SEQ ID NO: 1729; WAN024F7C_at; Start 9; Stop 33
aaccacggatcgtttagaagctata

SEQ ID NO: 194949 - DNA, 25 bp, Artificial
  probe
  misc_feature (1)..(25): SEQ ID NO: 1729; WAN024F7C_at; Start 3; Stop 27
gatgaaaaccacggatcgtttagaa

SEQ ID NO: 194950 - DNA, 25 bp, Artificial
  probe
  misc_feature (1)..(25): SEQ ID NO: 1729; WAN024F7C_at; Start 8; Stop 32
aaaccacggatcgtttagaagctat

SEQ ID NO: 194951 - DNA, 25 bp, Artificial
  probe
  misc_feature (1)..(25): SEQ ID NO: 1729; WAN024F7C_at; Start 5; Stop 29
tgaaaaccacggatcgtttagaagc

SEQ ID NO: 194952 - DNA, 25 bp, Artificial
  probe
  misc_feature (1)..(25): SEQ ID NO: 1729; WAN024F7C_at; Start 10; Stop 34
accacggatcgtttagaagctatag

SEQ ID NO: 194953 - DNA, 25 bp, Artificial
  probe
  misc_feature (1)..(25): SEQ ID NO: 1729; WAN024F7C_at; Start 32; Stop 56
taggttttagtttcatactcttcga

SEQ ID NO: 194954 - DNA, 25 bp, Artificial
  probe
  misc_feature (1)..(25): SEQ ID NO: 1729; WAN024F7C_at; Start 2; Stop 26
tgatgaaaaccacggatcgtttaga

SEQ ID NO: 194955 - DNA, 25 bp, Artificial
  probe
  misc_feature (1)..(25): SEQ ID NO: 1729; WAN024F7C_at; Start 112; Stop 136
aacctgcggctagctgccctaacta

SEQ ID NO: 194956 - DNA, 25 bp, Artificial
  probe
  misc_feature (1)..(25): SEQ ID NO: 1729; WAN024F7C_at; Start 30; Stop 54
tataggttttagtttcatactcttc

SEQ ID NO: 194957 - DNA, 25 bp, Artificial
  probe
  misc_feature (1)..(25): SEQ ID NO: 1729; WAN024F7C_at; Start 11; Stop 35
ccacggatcgtttagaagctatagg

SEQ ID NO: 194958 - DNA, 25 bp, Artificial
  probe
  misc_feature (1)..(25): SEQ ID NO: 1729; WAN024F7C_at; Start 25; Stop 49
gaagctataggttttagtttcatac

SEQ ID NO: 194959 - DNA, 25 bp, Artificial
  probe
  misc_feature (1)..(25): SEQ ID NO: 1729; WAN024F7C_at; Start 24; Stop 48
agaagctataggttttagtttcata

SEQ ID NO: 194960 - DNA, 25 bp, Artificial
  probe
  misc_feature (1)..(25): SEQ ID NO: 1729; WAN024F7C_at; Start 29; Stop 53
ctataggttttagtttcatactctt

SEQ ID NO: 194961 - DNA, 25 bp, Artificial
  probe
  misc_feature (1)..(25): SEQ ID NO: 1729; WAN024F7C_at; Start 31; Stop 55
ataggttttagtttcatactcttcg

SEQ ID NO: 194962 - DNA, 25 bp, Artificial
  probe
  misc_feature (1)..(25): SEQ ID NO: 1729; WAN024F7C_at; Start 1; Stop 25
atgatgaaaaccacggatcgtttag

SEQ ID NO: 194963 - DNA, 25 bp, Artificial
  probe
  misc_feature (1)..(25): SEQ ID NO: 1729; WAN024F7C_at; Start 27; Stop 51
agctataggttttagtttcatactc

SEQ ID NO: 194964 - DNA, 25 bp, Artificial
  probe
  misc_feature (1)..(25): SEQ ID NO: 1729; WAN024F7C_at; Start 12; Stop 36
cacggatcgtttagaagctataggt

SEQ ID NO: 194965 - DNA, 25 bp, Artificial
  probe
  misc_feature (1)..(25): SEQ ID NO: 1729; WAN024F7C_at; Start 28; Stop 52
gctataggttttagtttcatactct

SEQ ID NO: 194966 - DNA, 25 bp, Artificial
  probe
  misc_feature (1)..(25): SEQ ID NO: 1729; WAN024F7C_at; Start 13; Stop 37
acggatcgtttagaagctataggtt

SEQ ID NO: 194967 - DNA, 25 bp, Artificial
  probe
  misc_feature (1)..(25): SEQ ID NO: 1729; WAN024F7C_at; Start 26; Stop 50
aagctataggttttagtttcatact

SEQ ID NO: 194968 - DNA, 25 bp, Artificial
  probe
  misc_feature (1)..(25): SEQ ID NO: 1729; WAN024F7C_at; Start 4; Stop 28
atgaaaaccacggatcgtttagaag

SEQ ID NO: 194969 - DNA, 25 bp, Artificial
  probe
  misc_feature (1)..(25): SEQ ID NO: 381; WAN024F7D_at; Start 33; Stop 57
tacaagtgaatataagaatactctt

SEQ ID NO: 194970 - DNA, 25 bp, Artificial
  probe
  misc_feature (1)..(25): SEQ ID NO: 381; WAN024F7D_at; Start 36; Stop 60
aagtgaatataagaatactcttcga

SEQ ID NO: 194971 - DNA, 25 bp, Artificial
  probe
  misc_feature (1)..(25): SEQ ID NO: 381; WAN024F7D_at; Start 13; Stop 37
taccatctattaagctttattacaa

SEQ ID NO: 194972 - DNA, 25 bp, Artificial
  probe
  misc_feature (1)..(25): SEQ ID NO: 381; WAN024F7D_at; Start 26; Stop 50
gctttattacaagtgaatataagaa

SEQ ID NO: 194973 - DNA, 25 bp, Artificial
  probe
  misc_feature (1)..(25): SEQ ID NO: 381; WAN024F7D_at; Start 148; Stop 172
gattttgaaagtgaaacagttctta

SEQ ID NO: 194974 - DNA, 25 bp, Artificial
  probe
  misc_feature (1)..(25): SEQ ID NO: 381; WAN024F7D_at; Start 107; Stop 131
gctttgagcaaccaattctatttct

SEQ ID NO: 194975 - DNA, 25 bp, Artificial
  probe
  misc_feature (1)..(25): SEQ ID NO: 381; WAN024F7D_at; Start 35; Stop 59
caagtgaatataagaatactcttcg

SEQ ID NO: 194976 - DNA, 25 bp, Artificial
  probe
  misc_feature (1)..(25): SEQ ID NO: 381; WAN024F7D_at; Start 147; Stop 171
cgattttgaaagtgaaacagttctt

SEQ ID NO: 194977 - DNA, 25 bp, Artificial
  probe
  misc_feature (1)..(25): SEQ ID NO: 381; WAN024F7D_at; Start 18; Stop 42
tctattaagctttattacaagtgaa

SEQ ID NO: 194978 - DNA, 25 bp, Artificial
  probe
  misc_feature (1)..(25): SEQ ID NO: 381; WAN024F7D_at; Start 5; Stop 29
gtctattttaccatctattaagctt

SEQ ID NO: 194979 - DNA, 25 bp, Artificial
  probe
  misc_feature (1)..(25): SEQ ID NO: 381; WAN024F7D_at; Start 23; Stop 47
taagctttattacaagtgaatataa

SEQ ID NO: 194980 - DNA, 25 bp, Artificial
  probe
  misc_feature (1)..(25): SEQ ID NO: 381; WAN024F7D_at; Start 37; Stop 61
agtgaatataagaatactcttcgaa

SEQ ID NO: 194981 - DNA, 25 bp, Artificial
  probe
  misc_feature (1)..(25): SEQ ID NO: 381; WAN024F7D_at; Start 105; Stop 129
gtgctttgagcaaccaattctattt

SEQ ID NO: 194982 - DNA, 25 bp, Artificial
  probe
  misc_feature (1)..(25): SEQ ID NO: 381; WAN024F7D_at; Start 164; Stop 188
cagttcttactttttcagtcacaaa

SEQ ID NO: 194983 - DNA, 25 bp, Artificial
  probe
  misc_feature (1)..(25): SEQ ID NO: 381; WAN024F7D_at; Start 14; Stop 38
accatctattaagctttattacaag

SEQ ID NO: 194984 - DNA, 25 bp, Artificial
  probe
  misc_feature (1)..(25): SEQ ID NO: 381; WAN024F7D_at; Start 38; Stop 62
gtgaatataagaatactcttcgaaa

SEQ ID NO: 194985 - DNA, 25 bp, Artificial
  probe
  misc_feature (1)..(25): SEQ ID NO: 381; WAN024F7D_at; Start 111; Stop 135
tgagcaaccaattctatttctccct

SEQ ID NO: 194986 - DNA, 25 bp, Artificial
  probe
  misc_feature (1)..(25): SEQ ID NO: 381; WAN024F7D_at; Start 160; Stop 184
gaaacagttcttactttttcagtca

SEQ ID NO: 194987 - DNA, 25 bp, Artificial
  probe
  misc_feature (1)..(25): SEQ ID NO: 381; WAN024F7D_at; Start 16; Stop 40
catctattaagctttattacaagtg

SEQ ID NO: 194988 - DNA, 25 bp, Artificial
  probe
  misc_feature (1)..(25): SEQ ID NO: 381; WAN024F7D_at; Start 166; Stop 190
gttcttactttttcagtcacaaatg

SEQ ID NO: 194989 - DNA, 25 bp, Artificial
  probe
  misc_feature (1)..(25): SEQ ID NO: 381; WAN024F7D_at; Start 167; Stop 191
ttcttactttttcagtcacaaatga

SEQ ID NO: 194990 - DNA, 25 bp, Artificial
  probe
  misc_feature (1)..(25): SEQ ID NO: 381; WAN024F7D_at; Start 7; Stop 31
ctattttaccatctattaagcttta

SEQ ID NO: 194991 - DNA, 25 bp, Artificial
  probe
  misc_feature (1)..(25): SEQ ID NO: 381; WAN024F7D_at; Start 19; Stop 43
ctattaagctttattacaagtgaat

SEQ ID NO: 194992 - DNA, 25 bp, Artificial
  probe
  misc_feature (1)..(25): SEQ ID NO: 381; WAN024F7D_at; Start 110; Stop 134
ttgagcaaccaattctatttctccc

SEQ ID NO: 194993 - DNA, 25 bp, Artificial
  probe
  misc_feature (1)..(25): SEQ ID NO: 381; WAN024F7D_at; Start 146; Stop 170
ccgattttgaaagtgaaacagttct

SEQ ID NO: 194994 - DNA, 25 bp, Artificial
  probe
  misc_feature (1)..(25): SEQ ID NO: 381; WAN024F7D_at; Start 106; Stop 130
tgctttgagcaaccaattctatttc

SEQ ID NO: 194995 - DNA, 25 bp, Artificial
  probe
  misc_feature (1)..(25): SEQ ID NO: 381; WAN024F7D_at; Start 109; Stop 133
tttgagcaaccaattctatttctcc

SEQ ID NO: 194996 - DNA, 25 bp, Artificial
  probe
  misc_feature (1)..(25): SEQ ID NO: 381; WAN024F7D_at; Start 162; Stop 186
aacagttcttactttttcagtcaca

SEQ ID NO: 194997 - DNA, 25 bp, Artificial
  probe
  misc_feature (1)..(25): SEQ ID NO: 381; WAN024F7D_at; Start 32; Stop 56
ttacaagtgaatataagaatactct

SEQ ID NO: 194998 - DNA, 25 bp, Artificial
  probe
  misc_feature (1)..(25): SEQ ID NO: 381; WAN024F7D_at; Start 1; Stop 25
actcgtctattttaccatctattaa

SEQ ID NO: 194999 - DNA, 25 bp, Artificial
  probe
  misc_feature (1)..(25): SEQ ID NO: 381; WAN024F7D_at; Start 208; Stop 232
tttacaattttcaaataaactctga

SEQ ID NO: 195000 - DNA, 25 bp, Artificial
  probe
  misc_feature (1)..(25): SEQ ID NO: 381; WAN024F7D_at; Start 3; Stop 27
tcgtctattttaccatctattaagc

SEQ ID NO: 195001 - DNA, 25 bp, Artificial
  probe
  misc_feature (1)..(25): SEQ ID NO: 381; WAN024F7D_at; Start 163; Stop 187
acagttcttactttttcagtcacaa

SEQ ID NO: 195002 - DNA, 25 bp, Artificial
  probe
  misc_feature (1)..(25): SEQ ID NO: 381; WAN024F7D_at; Start 4; Stop 28
cgtctattttaccatctattaagct

SEQ ID NO: 195003 - DNA, 25 bp, Artificial
  probe
  misc_feature (1)..(25): SEQ ID NO: 4879; WAN024F7E_at; Start 48; Stop 72
tgaacttgcccttcttcgtgaacaa

SEQ ID NO: 195004 - DNA, 25 bp, Artificial
  probe
  misc_feature (1)..(25): SEQ ID NO: 4879; WAN024F7E_at; Start 165; Stop 189
tatggaagaagactctgacttaccc

SEQ ID NO: 195005 - DNA, 25 bp, Artificial
  probe
  misc_feature (1)..(25): SEQ ID NO: 4879; WAN024F7E_at; Start 74; Stop 98
tggcttatctaacgcaaaagctcta

SEQ ID NO: 195006 - DNA, 25 bp, Artificial
  probe
  misc_feature (1)..(25): SEQ ID NO: 4879; WAN024F7E_at; Start 139; Stop 163
ctcagtctttttgaagaggaacaaa

SEQ ID NO: 195007 - DNA, 25 bp, Artificial
  probe
  misc_feature (1)..(25): SEQ ID NO: 4879; WAN024F7E_at; Start 148; Stop 172
tttgaagaggaacaaaatatggaag

SEQ ID NO: 195008 - DNA, 25 bp, Artificial
  probe
  misc_feature (1)..(25): SEQ ID NO: 4879; WAN024F7E_at; Start 41; Stop 65
tcaccaatgaacttgcccttcttcg

SEQ ID NO: 195009 - DNA, 25 bp, Artificial
  probe
  misc_feature (1)..(25): SEQ ID NO: 4879; WAN024F7E_at; Start 79; Stop 103
tatctaacgcaaaagctctatggaa

SEQ ID NO: 195010 - DNA, 25 bp, Artificial
  probe
  misc_feature (1)..(25): SEQ ID NO: 4879; WAN024F7E_at; Start 53; Stop 77
ttgcccttcttcgtgaacaagtggc

SEQ ID NO: 195011 - DNA, 25 bp, Artificial
  probe
  misc_feature (1)..(25): SEQ ID NO: 4879; WAN024F7E_at; Start 84; Stop 108
aacgcaaaagctctatggaaaatcc

SEQ ID NO: 195012 - DNA, 25 bp, Artificial
  probe
  misc_feature (1)..(25): SEQ ID NO: 4879; WAN024F7E_at; Start 77; Stop 101
cttatctaacgcaaaagctctatgg

SEQ ID NO: 195013 - DNA, 25 bp, Artificial
  probe
  misc_feature (1)..(25): SEQ ID NO: 4879; WAN024F7E_at; Start 157; Stop 181
gaacaaaatatggaagaagactctg

SEQ ID NO: 195014 - DNA, 25 bp, Artificial
  probe
  misc_feature (1)..(25): SEQ ID NO: 4879; WAN024F7E_at; Start 49; Stop 73
gaacttgcccttcttcgtgaacaag

SEQ ID NO: 195015 - DNA, 25 bp, Artificial
  probe
  misc_feature (1)..(25): SEQ ID NO: 4879; WAN024F7E_at; Start 167; Stop 191
tggaagaagactctgacttacccag

SEQ ID NO: 195016 - DNA, 25 bp, Artificial
  probe
  misc_feature (1)..(25): SEQ ID NO: 4879; WAN024F7E_at; Start 24; Stop 48
tgctacaattgatagtctcaccaat

SEQ ID NO: 195017 - DNA, 25 bp, Artificial
  probe
  misc_feature (1)..(25): SEQ ID NO: 4879; WAN024F7E_at; Start 132; Stop 156
tggacaactcagtctttttgaagag

SEQ ID NO: 195018 - DNA, 25 bp, Artificial
  probe
  misc_feature (1)..(25): SEQ ID NO: 4879; WAN024F7E_at; Start 141; Stop 165
cagtctttttgaagaggaacaaaat

SEQ ID NO: 195019 - DNA, 25 bp, Artificial
  probe
  misc_feature (1)..(25): SEQ ID NO: 4879; WAN024F7E_at; Start 136; Stop 160
caactcagtctttttgaagaggaac

SEQ ID NO: 195020 - DNA, 25 bp, Artificial
  probe
  misc_feature (1)..(25): SEQ ID NO: 4879; WAN024F7E_at; Start 122; Stop 146
tttgcccatctggacaactcagtct

SEQ ID NO: 195021 - DNA, 25 bp, Artificial
  probe
  misc_feature (1)..(25): SEQ ID NO: 4879; WAN024F7E_at; Start 127; Stop 151
ccatctggacaactcagtctttttg

SEQ ID NO: 195022 - DNA, 25 bp, Artificial
  probe
  misc_feature (1)..(25): SEQ ID NO: 4879; WAN024F7E_at; Start 46; Stop 70
aatgaacttgcccttcttcgtgaac

SEQ ID NO: 195023 - DNA, 25 bp, Artificial
  probe
  misc_feature (1)..(25): SEQ ID NO: 4879; WAN024F7E_at; Start 172; Stop 196
gaagactctgacttacccagtctaa

SEQ ID NO: 195024 - DNA, 25 bp, Artificial
  probe
  misc_feature (1)..(25): SEQ ID NO: 4879; WAN024F7E_at; Start 134; Stop 158
gacaactcagtctttttgaagagga

SEQ ID NO: 195025 - DNA, 25 bp, Artificial
  probe
  misc_feature (1)..(25): SEQ ID NO: 4879; WAN024F7E_at; Start 175; Stop 199
gactctgacttacccagtctaacta

SEQ ID NO: 195026 - DNA, 25 bp, Artificial
  probe
  misc_feature (1)..(25): SEQ ID NO: 4879; WAN024F7E_at; Start 177; Stop 201
ctctgacttacccagtctaactaat

SEQ ID NO: 195027 - DNA, 25 bp, Artificial
  probe
  misc_feature (1)..(25): SEQ ID NO: 4879; WAN024F7E_at; Start 156; Stop 180
ggaacaaaatatggaagaagactct

SEQ ID NO: 195028 - DNA, 25 bp, Artificial
  probe
  misc_feature (1)..(25): SEQ ID NO: 4879; WAN024F7E_at; Start 83; Stop 107
taacgcaaaagctctatggaaaatc

SEQ ID NO: 195029 - DNA, 25 bp, Artificial
  probe
  misc_feature (1)..(25): SEQ ID NO: 4879; WAN024F7E_at; Start 55; Stop 79
gcccttcttcgtgaacaagtggctt

SEQ ID NO: 195030 - DNA, 25 bp, Artificial
  probe
  misc_feature (1)..(25): SEQ ID NO: 4879; WAN024F7E_at; Start 124; Stop 148
tgcccatctggacaactcagtcttt

SEQ ID NO: 195031 - DNA, 25 bp, Artificial
  probe
  misc_feature (1)..(25): SEQ ID NO: 4879; WAN024F7E_at; Start 39; Stop 63
tctcaccaatgaacttgcccttctt

SEQ ID NO: 195032 - DNA, 25 bp, Artificial
  probe
  misc_feature (1)..(25): SEQ ID NO: 4879; WAN024F7E_at; Start 160; Stop 184
caaaatatggaagaagactctgact

SEQ ID NO: 195033 - DNA, 25 bp, Artificial
  probe
  misc_feature (1)..(25): SEQ ID NO: 4879; WAN024F7E_at; Start 21; Stop 45
gagtgctacaattgatagtctcacc

SEQ ID NO: 195034 - DNA, 25 bp, Artificial
  probe
  misc_feature (1)..(25): SEQ ID NO: 4879; WAN024F7E_at; Start 43; Stop 67
accaatgaacttgcccttcttcgtg

SEQ ID NO: 195035 - DNA, 25 bp, Artificial
  probe
  misc_feature (1)..(25): SEQ ID NO: 4879; WAN024F7E_at; Start 81; Stop 105
tctaacgcaaaagctctatggaaaa

SEQ ID NO: 195036 - DNA, 25 bp, Artificial
  probe
  misc_feature (1)..(25): SEQ ID NO: 4879; WAN024F7E_at; Start 169; Stop 193
gaagaagactctgacttacccagtc

SEQ ID NO: 195037 - DNA, 25 bp, Artificial
  probe
  misc_feature (1)..(25): SEQ ID NO: 3947; WAN024F7F_at; Start 5; Stop 29
ctgaaaaagtaagaactgtttcact

SEQ ID NO: 195038 - DNA, 25 bp, Artificial
  probe
  misc_feature (1)..(25): SEQ ID NO: 3947; WAN024F7F_at; Start 3; Stop 27
gactgaaaaagtaagaactgtttca

SEQ ID NO: 195039 - DNA, 25 bp, Artificial
  probe
  misc_feature (1)..(25): SEQ ID NO: 3947; WAN024F7F_at; Start 48; Stop 72
tgaagggagaaatagaattggttgc

SEQ ID NO: 195040 - DNA, 25 bp, Artificial
  probe
  misc_feature (1)..(25): SEQ ID NO: 3947; WAN024F7F_at; Start 2; Stop 26
tgactgaaaaagtaagaactgtttc

SEQ ID NO: 195041 - DNA, 25 bp, Artificial
  probe
  misc_feature (1)..(25): SEQ ID NO: 3947; WAN024F7F_at; Start 44; Stop 68
tgtttgaagggagaaatagaattgg

SEQ ID NO: 195042 - DNA, 25 bp, Artificial
  probe
  misc_feature (1)..(25): SEQ ID NO: 3947; WAN024F7F_at; Start 54; Stop 78
gagaaatagaattggttgctcaaag

SEQ ID NO: 195043 - DNA, 25 bp, Artificial
  probe
  misc_feature (1)..(25): SEQ ID NO: 3947; WAN024F7F_at; Start 43; Stop 67
ttgtttgaagggagaaatagaattg

SEQ ID NO: 195044 - DNA, 25 bp, Artificial
  probe
  misc_feature (1)..(25): SEQ ID NO: 3947; WAN024F7F_at; Start 15; Stop 39
aagaactgtttcactttcaaaatcg

SEQ ID NO: 195045 - DNA, 25 bp, Artificial
  probe
  misc_feature (1)..(25): SEQ ID NO: 3947; WAN024F7F_at; Start 53; Stop 77
ggagaaatagaattggttgctcaaa

SEQ ID NO: 195046 - DNA, 25 bp, Artificial
  probe
  misc_feature (1)..(25): SEQ ID NO: 3947; WAN024F7F_at; Start 56; Stop 80
gaaatagaattggttgctcaaagca

SEQ ID NO: 195047 - DNA, 25 bp, Artificial
  probe
  misc_feature (1)..(25): SEQ ID NO: 3947; WAN024F7F_at; Start 49; Stop 73
gaagggagaaatagaattggttgct

SEQ ID NO: 195048 - DNA, 25 bp, Artificial
  probe
  misc_feature (1)..(25): SEQ ID NO: 3947; WAN024F7F_at; Start 57; Stop 81
aaatagaattggttgctcaaagcac

SEQ ID NO: 195049 - DNA, 25 bp, Artificial
  probe
  misc_feature (1)..(25): SEQ ID NO: 3947; WAN024F7F_at; Start 51; Stop 75
agggagaaatagaattggttgctca

SEQ ID NO: 195050 - DNA, 25 bp, Artificial
  probe
  misc_feature (1)..(25): SEQ ID NO: 3947; WAN024F7F_at; Start 16; Stop 40
agaactgtttcactttcaaaatcgg

SEQ ID NO: 195051 - DNA, 25 bp, Artificial
  probe
  misc_feature (1)..(25): SEQ ID NO: 3947; WAN024F7F_at; Start 47; Stop 71
ttgaagggagaaatagaattggttg

SEQ ID NO: 195052 - DNA, 25 bp, Artificial
  probe
  misc_feature (1)..(25): SEQ ID NO: 3947; WAN024F7F_at; Start 50; Stop 74
aagggagaaatagaattggttgctc

SEQ ID NO: 195053 - DNA, 25 bp, Artificial
  probe
  misc_feature (1)..(25): SEQ ID NO: 3947; WAN024F7F_at; Start 14; Stop 38
taagaactgtttcactttcaaaatc

SEQ ID NO: 195054 - DNA, 25 bp, Artificial
  probe
  misc_feature (1)..(25): SEQ ID NO: 3947; WAN024F7F_at; Start 55; Stop 79
agaaatagaattggttgctcaaagc

SEQ ID NO: 195055 - DNA, 25 bp, Artificial
  probe
  misc_feature (1)..(25): SEQ ID NO: 3947; WAN024F7F_at; Start 52; Stop 76
gggagaaatagaattggttgctcaa

SEQ ID NO: 195056 - DNA, 25 bp, Artificial
  probe
  misc_feature (1)..(25): SEQ ID NO: 1613; WAN024F7G_at; Start 191; Stop 215
agctgttctttgagcagcctacagc

SEQ ID NO: 195057 - DNA, 25 bp, Artificial
  probe
  misc_feature (1)..(25): SEQ ID NO: 1613; WAN024F7G_at; Start 39; Stop 63
tcttcacataagaactctagcttac

SEQ ID NO: 195058 - DNA, 25 bp, Artificial
  probe
  misc_feature (1)..(25): SEQ ID NO: 1613; WAN024F7G_at; Start 56; Stop 80
tagcttacccattctatggaatctt

SEQ ID NO: 195059 - DNA, 25 bp, Artificial
  probe
  misc_feature (1)..(25): SEQ ID NO: 1613; WAN024F7G_at; Start 54; Stop 78
tctagcttacccattctatggaatc

SEQ ID NO: 195060 - DNA, 25 bp, Artificial
  probe
  misc_feature (1)..(25): SEQ ID NO: 1613; WAN024F7G_at; Start 41; Stop 65
ttcacataagaactctagcttaccc

SEQ ID NO: 195061 - DNA, 25 bp, Artificial
  probe
  misc_feature (1)..(25): SEQ ID NO: 1613; WAN024F7G_at; Start 43; Stop 67
cacataagaactctagcttacccat

SEQ ID NO: 195062 - DNA, 25 bp, Artificial
  probe
  misc_feature (1)..(25): SEQ ID NO: 1613; WAN024F7G_at; Start 63; Stop 87
cccattctatggaatcttgcattat

SEQ ID NO: 195063 - DNA, 25 bp, Artificial
  probe
  misc_feature (1)..(25): SEQ ID NO: 1613; WAN024F7G_at; Start 65; Stop 89
cattctatggaatcttgcattatcc

SEQ ID NO: 195064 - DNA, 25 bp, Artificial
  probe
  misc_feature (1)..(25): SEQ ID NO: 1613; WAN024F7G_at; Start 58; Stop 82
gcttacccattctatggaatcttgc

SEQ ID NO: 195065 - DNA, 25 bp, Artificial
  probe
  misc_feature (1)..(25): SEQ ID NO: 1613; WAN024F7G_at; Start 190; Stop 214
aagctgttctttgagcagcctacag

SEQ ID NO: 195066 - DNA, 25 bp, Artificial
  probe
  misc_feature (1)..(25): SEQ ID NO: 1613; WAN024F7G_at; Start 192; Stop 216
gctgttctttgagcagcctacagct

SEQ ID NO: 195067 - DNA, 25 bp, Artificial
  probe
  misc_feature (1)..(25): SEQ ID NO: 1613; WAN024F7G_at; Start 189; Stop 213
aaagctgttctttgagcagcctaca

SEQ ID NO: 195068 - DNA, 25 bp, Artificial
  probe
  misc_feature (1)..(25): SEQ ID NO: 1613; WAN024F7G_at; Start 135; Stop 159
cgtcagcttcacattatatatgttg

SEQ ID NO: 195069 - DNA, 25 bp, Artificial
  probe
  misc_feature (1)..(25): SEQ ID NO: 1613; WAN024F7G_at; Start 50; Stop 74
gaactctagcttacccattctatgg

SEQ ID NO: 195070 - DNA, 25 bp, Artificial
  probe
  misc_feature (1)..(25): SEQ ID NO: 1613; WAN024F7G_at; Start 22; Stop 46
aaagtttatgcccaaactcttcaca

SEQ ID NO: 195071 - DNA, 25 bp, Artificial
  probe
  misc_feature (1)..(25): SEQ ID NO: 1613; WAN024F7G_at; Start 79; Stop 103
ttgcattatccattaaaacttccag

SEQ ID NO: 195072 - DNA, 25 bp, Artificial
  probe
  misc_feature (1)..(25): SEQ ID NO: 1613; WAN024F7G_at; Start 61; Stop 85
tacccattctatggaatcttgcatt

SEQ ID NO: 195073 - DNA, 25 bp, Artificial
  probe
  misc_feature (1)..(25): SEQ ID NO: 1613; WAN024F7G_at; Start 77; Stop 101
tcttgcattatccattaaaacttcc

SEQ ID NO: 195074 - DNA, 25 bp, Artificial
  probe
  misc_feature (1)..(25): SEQ ID NO: 1613; WAN024F7G_at; Start 30; Stop 54
tgcccaaactcttcacataagaact

SEQ ID NO: 195075 - DNA, 25 bp, Artificial
  probe
  misc_feature (1)..(25): SEQ ID NO: 1613; WAN024F7G_at; Start 74; Stop 98
gaatcttgcattatccattaaaact

SEQ ID NO: 195076 - DNA, 25 bp, Artificial
  probe
  misc_feature (1)..(25): SEQ ID NO: 1613; WAN024F7G_at; Start 36; Stop 60
aactcttcacataagaactctagct

SEQ ID NO: 195077 - DNA, 25 bp, Artificial
  probe
  misc_feature (1)..(25): SEQ ID NO: 1613; WAN024F7G_at; Start 28; Stop 52
tatgcccaaactcttcacataagaa

SEQ ID NO: 195078 - DNA, 25 bp, Artificial
  probe
  misc_feature (1)..(25): SEQ ID NO: 1613; WAN024F7G_at; Start 24; Stop 48
agtttatgcccaaactcttcacata

SEQ ID NO: 195079 - DNA, 25 bp, Artificial
  probe
  misc_feature (1)..(25): SEQ ID NO: 1613; WAN024F7G_at; Start 51; Stop 75
aactctagcttacccattctatgga

SEQ ID NO: 195080 - DNA, 25 bp, Artificial
  probe
  misc_feature (1)..(25): SEQ ID NO: 1613; WAN024F7G_at; Start 137; Stop 161
tcagcttcacattatatatgttggt

SEQ ID NO: 195081 - DNA, 25 bp, Artificial
  probe
  misc_feature (1)..(25): SEQ ID NO: 1613; WAN024F7G_at; Start 73; Stop 97
ggaatcttgcattatccattaaaac

SEQ ID NO: 195082 - DNA, 25 bp, Artificial
  probe
  misc_feature (1)..(25): SEQ ID NO: 1613; WAN024F7G_at; Start 133; Stop 157
cacgtcagcttcacattatatatgt

SEQ ID NO: 195083 - DNA, 25 bp, Artificial
  probe
  misc_feature (1)..(25): SEQ ID NO: 1613; WAN024F7G_at; Start 34; Stop 58
caaactcttcacataagaactctag

SEQ ID NO: 195084 - DNA, 25 bp, Artificial
  probe
  misc_feature (1)..(25): SEQ ID NO: 1613; WAN024F7G_at; Start 45; Stop 69
cataagaactctagcttacccattc

SEQ ID NO: 195085 - DNA, 25 bp, Artificial
  probe
  misc_feature (1)..(25): SEQ ID NO: 1613; WAN024F7G_at; Start 47; Stop 71
taagaactctagcttacccattcta

SEQ ID NO: 195086 - DNA, 25 bp, Artificial
  probe
  misc_feature (1)..(25): SEQ ID NO: 1613; WAN024F7G_at; Start 59; Stop 83
cttacccattctatggaatcttgca

SEQ ID NO: 195087 - DNA, 25 bp, Artificial
  probe
  misc_feature (1)..(25): SEQ ID NO: 1613; WAN024F7G_at; Start 132; Stop 156
ccacgtcagcttcacattatatatg

SEQ ID NO: 195088 - DNA, 25 bp, Artificial
  probe
  misc_feature (1)..(25): SEQ ID NO: 1613; WAN024F7G_at; Start 194; Stop 218
tgttctttgagcagcctacagctag

SEQ ID NO: 195089 - DNA, 25 bp, Artificial
  probe
  misc_feature (1)..(25): SEQ ID NO: 1613; WAN024F7G_at; Start 42; Stop 66
tcacataagaactctagcttaccca

SEQ ID NO: 195090 - DNA, 25 bp, Artificial
  probe
  misc_feature (1)..(25): SEQ ID NO: 5796; WAN024F7H_at; Start 55; Stop 79
tctattatatatatcccatcaacta

SEQ ID NO: 195091 - DNA, 25 bp, Artificial
  probe
  misc_feature (1)..(25): SEQ ID NO: 5796; WAN024F7H_at; Start 68; Stop 92
tcccatcaactatgcatcataattt

SEQ ID NO: 195092 - DNA, 25 bp, Artificial
  probe
  misc_feature (1)..(25): SEQ ID NO: 5796; WAN024F7H_at; Start 61; Stop 85
atatatatcccatcaactatgcatc

SEQ ID NO: 195093 - DNA, 25 bp, Artificial
  probe
  misc_feature (1)..(25): SEQ ID NO: 5796; WAN024F7H_at; Start 57; Stop 81
tattatatatatcccatcaactatg

SEQ ID NO: 195094 - DNA, 25 bp, Artificial
  probe
  misc_feature (1)..(25): SEQ ID NO: 5796; WAN024F7H_at; Start 62; Stop 86
tatatatcccatcaactatgcatca

SEQ ID NO: 195095 - DNA, 25 bp, Artificial
  probe
  misc_feature (1)..(25): SEQ ID NO: 5796; WAN024F7H_at; Start 56; Stop 80
ctattatatatatcccatcaactat

SEQ ID NO: 195096 - DNA, 25 bp, Artificial
  probe
  misc_feature (1)..(25): SEQ ID NO: 5796; WAN024F7H_at; Start 52; Stop 76
caatctattatatatatcccatcaa

SEQ ID NO: 195097 - DNA, 25 bp, Artificial
  probe
  misc_feature (1)..(25): SEQ ID NO: 5796; WAN024F7H_at; Start 54; Stop 78
atctattatatatatcccatcaact

SEQ ID NO: 195098 - DNA, 25 bp, Artificial
  probe
  misc_feature (1)..(25): SEQ ID NO: 5796; WAN024F7H_at; Start 64; Stop 88
tatatcccatcaactatgcatcata

SEQ ID NO: 195099 - DNA, 25 bp, Artificial
  probe
  misc_feature (1)..(25): SEQ ID NO: 5796; WAN024F7H_at; Start 63; Stop 87
atatatcccatcaactatgcatcat

SEQ ID NO: 195100 - DNA, 25 bp, Artificial
  probe
  misc_feature (1)..(25): SEQ ID NO: 5796; WAN024F7H_at; Start 67; Stop 91
atcccatcaactatgcatcataatt

SEQ ID NO: 195101 - DNA, 25 bp, Artificial
  probe
  misc_feature (1)..(25): SEQ ID NO: 5796; WAN024F7H_at; Start 65; Stop 89
atatcccatcaactatgcatcataa

SEQ ID NO: 195102 - DNA, 25 bp, Artificial
  probe
  misc_feature (1)..(25): SEQ ID NO: 5796; WAN024F7H_at; Start 59; Stop 83
ttatatatatcccatcaactatgca

SEQ ID NO: 195103 - DNA, 25 bp, Artificial
  probe
  misc_feature (1)..(25): SEQ ID NO: 5796; WAN024F7H_at; Start 53; Stop 77
aatctattatatatatcccatcaac

SEQ ID NO: 195104 - DNA, 25 bp, Artificial
  probe
  misc_feature (1)..(25): SEQ ID NO: 5796; WAN024F7H_at; Start 69; Stop 93
cccatcaactatgcatcataattta

SEQ ID NO: 195105 - DNA, 25 bp, Artificial
  probe
  misc_feature (1)..(25): SEQ ID NO: 5796; WAN024F7H_at; Start 66; Stop 90
tatcccatcaactatgcatcataat

SEQ ID NO: 195106 - DNA, 25 bp, Artificial
  probe
  misc_feature (1)..(25): SEQ ID NO: 5796; WAN024F7H_at; Start 58; Stop 82
attatatatatcccatcaactatgc

SEQ ID NO: 195107 - DNA, 25 bp, Artificial
  probe
  misc_feature (1)..(25): SEQ ID NO: 5796; WAN024F7H_at; Start 60; Stop 84
tatatatatcccatcaactatgcat

SEQ ID NO: 195108 - DNA, 25 bp, Artificial
  probe
  misc_feature (1)..(25): SEQ ID NO: 756; WAN024F7I_at; Start 99; Stop 123
acgacaaggcgatattgacgtgatt

SEQ ID NO: 195109 - DNA, 25 bp, Artificial
  probe
  misc_feature (1)..(25): SEQ ID NO: 756; WAN024F7I_at; Start 104; Stop 128
aaggcgatattgacgtgattctaac

SEQ ID NO: 195110 - DNA, 25 bp, Artificial
  probe
  misc_feature (1)..(25): SEQ ID NO: 756; WAN024F7I_at; Start 70; Stop 94
ggaactgacgtagtcagtatcctac

SEQ ID NO: 195111 - DNA, 25 bp, Artificial
  probe
  misc_feature (1)..(25): SEQ ID NO: 756; WAN024F7I_at; Start 78; Stop 102
cgtagtcagtatcctacacatacga

SEQ ID NO: 195112 - DNA, 25 bp, Artificial
  probe
  misc_feature (1)..(25): SEQ ID NO: 756; WAN024F7I_at; Start 81; Stop 105
agtcagtatcctacacatacgacaa

SEQ ID NO: 195113 - DNA, 25 bp, Artificial
  probe
  misc_feature (1)..(25): SEQ ID NO: 756; WAN024F7I_at; Start 74; Stop 98
ctgacgtagtcagtatcctacacat

SEQ ID NO: 195114 - DNA, 25 bp, Artificial
  probe
  misc_feature (1)..(25): SEQ ID NO: 756; WAN024F7I_at; Start 83; Stop 107
tcagtatcctacacatacgacaagg

SEQ ID NO: 195115 - DNA, 25 bp, Artificial
  probe
  misc_feature (1)..(25): SEQ ID NO: 756; WAN024F7I_at; Start 102; Stop 126
acaaggcgatattgacgtgattcta

SEQ ID NO: 195116 - DNA, 25 bp, Artificial
  probe
  misc_feature (1)..(25): SEQ ID NO: 756; WAN024F7I_at; Start 79; Stop 103
gtagtcagtatcctacacatacgac

SEQ ID NO: 195117 - DNA, 25 bp, Artificial
  probe
  misc_feature (1)..(25): SEQ ID NO: 756; WAN024F7I_at; Start 72; Stop 96
aactgacgtagtcagtatcctacac

SEQ ID NO: 195118 - DNA, 25 bp, Artificial
  probe
  misc_feature (1)..(25): SEQ ID NO: 756; WAN024F7I_at; Start 69; Stop 93
tggaactgacgtagtcagtatccta

SEQ ID NO: 195119 - DNA, 25 bp, Artificial
  probe
  misc_feature (1)..(25): SEQ ID NO: 756; WAN024F7I_at; Start 107; Stop 131
gcgatattgacgtgattctaactaa

SEQ ID NO: 195120 - DNA, 25 bp, Artificial
  probe
  misc_feature (1)..(25): SEQ ID NO: 756; WAN024F7I_at; Start 75; Stop 99
tgacgtagtcagtatcctacacata

SEQ ID NO: 195121 - DNA, 25 bp, Artificial
  probe
  misc_feature (1)..(25): SEQ ID NO: 756; WAN024F7I_at; Start 76; Stop 100
gacgtagtcagtatcctacacatac

SEQ ID NO: 195122 - DNA, 25 bp, Artificial
  probe
  misc_feature (1)..(25): SEQ ID NO: 756; WAN024F7I_at; Start 68; Stop 92
atggaactgacgtagtcagtatcct

SEQ ID NO: 195123 - DNA, 25 bp, Artificial
  probe
  misc_feature (1)..(25): SEQ ID NO: 756; WAN024F7I_at; Start 106; Stop 130
ggcgatattgacgtgattctaacta

SEQ ID NO: 195124 - DNA, 25 bp, Artificial
  probe
  misc_feature (1)..(25): SEQ ID NO: 756; WAN024F7I_at; Start 98; Stop 122
tacgacaaggcgatattgacgtgat

SEQ ID NO: 195125 - DNA, 25 bp, Artificial
  probe
  misc_feature (1)..(25): SEQ ID NO: 756; WAN024F7I_at; Start 103; Stop 127
caaggcgatattgacgtgattctaa

SEQ ID NO: 195126 - DNA, 25 bp, Artificial
  probe
  misc_feature (1)..(25): SEQ ID NO: 756; WAN024F7I_at; Start 85; Stop 109
agtatcctacacatacgacaaggcg

SEQ ID NO: 195127 - DNA, 25 bp, Artificial
  probe
  misc_feature (1)..(25): SEQ ID NO: 756; WAN024F7I_at; Start 100; Stop 124
cgacaaggcgatattgacgtgattc

SEQ ID NO: 195128 - DNA, 25 bp, Artificial
  probe
  misc_feature (1)..(25): SEQ ID NO: 756; WAN024F7I_at; Start 71; Stop 95
gaactgacgtagtcagtatcctaca

SEQ ID NO: 195129 - DNA, 25 bp, Artificial
  probe
  misc_feature (1)..(25): SEQ ID NO: 756; WAN024F7I_at; Start 67; Stop 91
gatggaactgacgtagtcagtatcc

SEQ ID NO: 195130 - DNA, 25 bp, Artificial
  probe
  misc_feature (1)..(25): SEQ ID NO: 756; WAN024F7I_at; Start 73; Stop 97
actgacgtagtcagtatcctacaca

SEQ ID NO: 195131 - DNA, 25 bp, Artificial
  probe
  misc_feature (1)..(25): SEQ ID NO: 756; WAN024F7I_at; Start 66; Stop 90
agatggaactgacgtagtcagtatc

SEQ ID NO: 195132 - DNA, 25 bp, Artificial
  probe
  misc_feature (1)..(25): SEQ ID NO: 756; WAN024F7I_at; Start 101; Stop 125
gacaaggcgatattgacgtgattct

SEQ ID NO: 195133 - DNA, 25 bp, Artificial
  probe
  misc_feature (1)..(25): SEQ ID NO: 756; WAN024F7I_at; Start 84; Stop 108
cagtatcctacacatacgacaaggc

SEQ ID NO: 195134 - DNA, 25 bp, Artificial
  probe
  misc_feature (1)..(25): SEQ ID NO: 756; WAN024F7I_at; Start 108; Stop 132
cgatattgacgtgattctaactaat

SEQ ID NO: 195135 - DNA, 25 bp, Artificial
  probe
  misc_feature (1)..(25): SEQ ID NO: 756; WAN024F7I_at; Start 65; Stop 89
tagatggaactgacgtagtcagtat

SEQ ID NO: 195136 - DNA, 25 bp, Artificial
  probe
  misc_feature (1)..(25): SEQ ID NO: 756; WAN024F7I_at; Start 80; Stop 104
tagtcagtatcctacacatacgaca

SEQ ID NO: 195137 - DNA, 25 bp, Artificial
  probe
  misc_feature (1)..(25): SEQ ID NO: 756; WAN024F7I_at; Start 105; Stop 129
aggcgatattgacgtgattctaact

SEQ ID NO: 195138 - DNA, 25 bp, Artificial
  probe
  misc_feature (1)..(25): SEQ ID NO: 756; WAN024F7I_at; Start 77; Stop 101
acgtagtcagtatcctacacatacg

SEQ ID NO: 195139 - DNA, 25 bp, Artificial
  probe
  misc_feature (1)..(25): SEQ ID NO: 756; WAN024F7I_at; Start 82; Stop 106
gtcagtatcctacacatacgacaag

SEQ ID NO: 195140 - DNA, 25 bp, Artificial
  probe
  misc_feature (1)..(25): SEQ ID NO: 5066; WAN024F7J_at; Start 33; Stop 57
tttatctgcaattttatactcaatg

SEQ ID NO: 195141 - DNA, 25 bp, Artificial
  probe
  misc_feature (1)..(25): SEQ ID NO: 5066; WAN024F7J_at; Start 29; Stop 53
tcgttttatctgcaattttatactc

SEQ ID NO: 195142 - DNA, 25 bp, Artificial
  probe
  misc_feature (1)..(25): SEQ ID NO: 5066; WAN024F7J_at; Start 22; Stop 46
attgttatcgttttatctgcaattt

SEQ ID NO: 195143 - DNA, 25 bp, Artificial
  probe
  misc_feature (1)..(25): SEQ ID NO: 5066; WAN024F7J_at; Start 14; Stop 38
gtcctatgattgttatcgttttatc

SEQ ID NO: 195144 - DNA, 25 bp, Artificial
  probe
  misc_feature (1)..(25): SEQ ID NO: 5066; WAN024F7J_at; Start 25; Stop 49
gttatcgttttatctgcaattttat

SEQ ID NO: 195145 - DNA, 25 bp, Artificial
  probe
  misc_feature (1)..(25): SEQ ID NO: 5066; WAN024F7J_at; Start 18; Stop 42
tatgattgttatcgttttatctgca

SEQ ID NO: 195146 - DNA, 25 bp, Artificial
  probe
  misc_feature (1)..(25): SEQ ID NO: 5066; WAN024F7J_at; Start 20; Stop 44
tgattgttatcgttttatctgcaat

SEQ ID NO: 195147 - DNA, 25 bp, Artificial
  probe
  misc_feature (1)..(25): SEQ ID NO: 5066; WAN024F7J_at; Start 21; Stop 45
gattgttatcgttttatctgcaatt

SEQ ID NO: 195148 - DNA, 25 bp, Artificial
  probe
  misc_feature (1)..(25): SEQ ID NO: 5066; WAN024F7J_at; Start 13; Stop 37
agtcctatgattgttatcgttttat

SEQ ID NO: 195149 - DNA, 25 bp, Artificial
  probe
  misc_feature (1)..(25): SEQ ID NO: 5066; WAN024F7J_at; Start 8; Stop 32
tgctgagtcctatgattgttatcgt

SEQ ID NO: 195150 - DNA, 25 bp, Artificial
  probe
  misc_feature (1)..(25): SEQ ID NO: 5066; WAN024F7J_at; Start 4; Stop 28
actctgctgagtcctatgattgtta

SEQ ID NO: 195151 - DNA, 25 bp, Artificial
  probe
  misc_feature (1)..(25): SEQ ID NO: 5066; WAN024F7J_at; Start 32; Stop 56
ttttatctgcaattttatactcaat

SEQ ID NO: 195152 - DNA, 25 bp, Artificial
  probe
  misc_feature (1)..(25): SEQ ID NO: 5066; WAN024F7J_at; Start 19; Stop 43
atgattgttatcgttttatctgcaa

SEQ ID NO: 195153 - DNA, 25 bp, Artificial
  probe
  misc_feature (1)..(25): SEQ ID NO: 5066; WAN024F7J_at; Start 34; Stop 58
ttatctgcaattttatactcaatga

SEQ ID NO: 195154 - DNA, 25 bp, Artificial
  probe
  misc_feature (1)..(25): SEQ ID NO: 5066; WAN024F7J_at; Start 11; Stop 35
tgagtcctatgattgttatcgtttt

SEQ ID NO: 195155 - DNA, 25 bp, Artificial
  probe
  misc_feature (1)..(25): SEQ ID NO: 5066; WAN024F7J_at; Start 1; Stop 25
ttgactctgctgagtcctatgattg

SEQ ID NO: 195156 - DNA, 25 bp, Artificial
  probe
  misc_feature (1)..(25): SEQ ID NO: 5066; WAN024F7J_at; Start 30; Stop 54
cgttttatctgcaattttatactca

SEQ ID NO: 195157 - DNA, 25 bp, Artificial
  probe
  misc_feature (1)..(25): SEQ ID NO: 5066; WAN024F7J_at; Start 27; Stop 51
tatcgttttatctgcaattttatac

SEQ ID NO: 195158 - DNA, 25 bp, Artificial
  probe
  misc_feature (1)..(25): SEQ ID NO: 5066; WAN024F7J_at; Start 23; Stop 47
ttgttatcgttttatctgcaatttt

SEQ ID NO: 195159 - DNA, 25 bp, Artificial
  probe
  misc_feature (1)..(25): SEQ ID NO: 5066; WAN024F7J_at; Start 24; Stop 48
tgttatcgttttatctgcaatttta

SEQ ID NO: 195160 - DNA, 25 bp, Artificial
  probe
  misc_feature (1)..(25): SEQ ID NO: 5066; WAN024F7J_at; Start 15; Stop 39
tcctatgattgttatcgttttatct

SEQ ID NO: 195161 - DNA, 25 bp, Artificial
  probe
  misc_feature (1)..(25): SEQ ID NO: 5066; WAN024F7J_at; Start 7; Stop 31
ctgctgagtcctatgattgttatcg

SEQ ID NO: 195162 - DNA, 25 bp, Artificial
  probe
  misc_feature (1)..(25): SEQ ID NO: 5066; WAN024F7J_at; Start 3; Stop 27
gactctgctgagtcctatgattgtt

SEQ ID NO: 195163 - DNA, 25 bp, Artificial
  probe
  misc_feature (1)..(25): SEQ ID NO: 5066; WAN024F7J_at; Start 2; Stop 26
tgactctgctgagtcctatgattgt

SEQ ID NO: 195164 - DNA, 25 bp, Artificial
  probe
  misc_feature (1)..(25): SEQ ID NO: 5066; WAN024F7J_at; Start 16; Stop 40
cctatgattgttatcgttttatctg

SEQ ID NO: 195165 - DNA, 25 bp, Artificial
  probe
  misc_feature (1)..(25): SEQ ID NO: 5066; WAN024F7J_at; Start 17; Stop 41
ctatgattgttatcgttttatctgc

SEQ ID NO: 195166 - DNA, 25 bp, Artificial
  probe
  misc_feature (1)..(25): SEQ ID NO: 5066; WAN024F7J_at; Start 6; Stop 30
tctgctgagtcctatgattgttatc

SEQ ID NO: 195167 - DNA, 25 bp, Artificial
  probe
  misc_feature (1)..(25): SEQ ID NO: 5066; WAN024F7J_at; Start 12; Stop 36
gagtcctatgattgttatcgtttta

SEQ ID NO: 195168 - DNA, 25 bp, Artificial
  probe
  misc_feature (1)..(25): SEQ ID NO: 5066; WAN024F7J_at; Start 5; Stop 29
ctctgctgagtcctatgattgttat

SEQ ID NO: 195169 - DNA, 25 bp, Artificial
  probe
  misc_feature (1)..(25): SEQ ID NO: 5066; WAN024F7J_at; Start 9; Stop 33
gctgagtcctatgattgttatcgtt

SEQ ID NO: 195170 - DNA, 25 bp, Artificial
  probe
  misc_feature (1)..(25): SEQ ID NO: 5066; WAN024F7J_at; Start 28; Stop 52
atcgttttatctgcaattttatact

SEQ ID NO: 195171 - DNA, 25 bp, Artificial
  probe
  misc_feature (1)..(25): SEQ ID NO: 5066; WAN024F7J_at; Start 10; Stop 34
ctgagtcctatgattgttatcgttt

SEQ ID NO: 195172 - DNA, 25 bp, Artificial
  probe
  misc_feature (1)..(25): SEQ ID NO: 5066; WAN024F7J_at; Start 31; Stop 55
gttttatctgcaattttatactcaa

SEQ ID NO: 195173 - DNA, 25 bp, Artificial
  probe
  misc_feature (1)..(25): SEQ ID NO: 5066; WAN024F7J_at; Start 26; Stop 50
ttatcgttttatctgcaattttata

SEQ ID NO: 195174 - DNA, 25 bp, Artificial
  probe
  misc_feature (1)..(25): SEQ ID NO: 3350; WAN024F7K_at; Start 25; Stop 49
taccttcattttgatttcctatcta

SEQ ID NO: 195175 - DNA, 25 bp, Artificial
  probe
  misc_feature (1)..(25): SEQ ID NO: 3350; WAN024F7K_at; Start 35; Stop 59
ttgatttcctatctattgacaagca

SEQ ID NO: 195176 - DNA, 25 bp, Artificial
  probe
  misc_feature (1)..(25): SEQ ID NO: 3350; WAN024F7K_at; Start 31; Stop 55
cattttgatttcctatctattgaca

SEQ ID NO: 195177 - DNA, 25 bp, Artificial
  probe
  misc_feature (1)..(25): SEQ ID NO: 3350; WAN024F7K_at; Start 24; Stop 48
ataccttcattttgatttcctatct

SEQ ID NO: 195178 - DNA, 25 bp, Artificial
  probe
  misc_feature (1)..(25): SEQ ID NO: 3350; WAN024F7K_at; Start 28; Stop 52
cttcattttgatttcctatctattg

SEQ ID NO: 195179 - DNA, 25 bp, Artificial
  probe
  misc_feature (1)..(25): SEQ ID NO: 3350; WAN024F7K_at; Start 29; Stop 53
ttcattttgatttcctatctattga

SEQ ID NO: 195180 - DNA, 25 bp, Artificial
  probe
  misc_feature (1)..(25): SEQ ID NO: 3350; WAN024F7K_at; Start 39; Stop 63
tttcctatctattgacaagcatagt

SEQ ID NO: 195181 - DNA, 25 bp, Artificial
  probe
  misc_feature (1)..(25): SEQ ID NO: 3350; WAN024F7K_at; Start 30; Stop 54
tcattttgatttcctatctattgac

SEQ ID NO: 195182 - DNA, 25 bp, Artificial
  probe
  misc_feature (1)..(25): SEQ ID NO: 3350; WAN024F7K_at; Start 23; Stop 47
cataccttcattttgatttcctatc

SEQ ID NO: 195183 - DNA, 25 bp, Artificial
  probe
  misc_feature (1)..(25): SEQ ID NO: 3350; WAN024F7K_at; Start 26; Stop 50
accttcattttgatttcctatctat

SEQ ID NO: 195184 - DNA, 25 bp, Artificial
  probe
  misc_feature (1)..(25): SEQ ID NO: 3350; WAN024F7K_at; Start 32; Stop 56
attttgatttcctatctattgacaa

SEQ ID NO: 195185 - DNA, 25 bp, Artificial
  probe
  misc_feature (1)..(25): SEQ ID NO: 3350; WAN024F7K_at; Start 38; Stop 62
atttcctatctattgacaagcatag

SEQ ID NO: 195186 - DNA, 25 bp, Artificial
  probe
  misc_feature (1)..(25): SEQ ID NO: 3350; WAN024F7K_at; Start 40; Stop 64
ttcctatctattgacaagcatagtc

SEQ ID NO: 195187 - DNA, 25 bp, Artificial
  probe
  misc_feature (1)..(25): SEQ ID NO: 3350; WAN024F7K_at; Start 36; Stop 60
tgatttcctatctattgacaagcat

SEQ ID NO: 195188 - DNA, 25 bp, Artificial
  probe
  misc_feature (1)..(25): SEQ ID NO: 3350; WAN024F7K_at; Start 41; Stop 65
tcctatctattgacaagcatagtca

SEQ ID NO: 195189 - DNA, 25 bp, Artificial
  probe
  misc_feature (1)..(25): SEQ ID NO: 3350; WAN024F7K_at; Start 27; Stop 51
ccttcattttgatttcctatctatt

SEQ ID NO: 195190 - DNA, 25 bp, Artificial
  probe
  misc_feature (1)..(25): SEQ ID NO: 3350; WAN024F7K_at; Start 37; Stop 61
gatttcctatctattgacaagcata

SEQ ID NO: 195191 - DNA, 25 bp, Artificial
  probe
  misc_feature (1)..(25): SEQ ID NO: 2783; WAN024F7L_at; Start 129; Stop 153
taatttcctaaattccatgctagct

SEQ ID NO: 195192 - DNA, 25 bp, Artificial
  probe
  misc_feature (1)..(25): SEQ ID NO: 2783; WAN024F7L_at; Start 62; Stop 86
tagtcttggcttctgacaccattgc

SEQ ID NO: 195193 - DNA, 25 bp, Artificial
  probe
  misc_feature (1)..(25): SEQ ID NO: 2783; WAN024F7L_at; Start 191; Stop 215
gattttggttactaatactcaatga

SEQ ID NO: 195194 - DNA, 25 bp, Artificial
  probe
  misc_feature (1)..(25): SEQ ID NO: 2783; WAN024F7L_at; Start 103; Stop 127
ctaacctttgtatctgcggtggttt

SEQ ID NO: 195195 - DNA, 25 bp, Artificial
  probe
  misc_feature (1)..(25): SEQ ID NO: 2783; WAN024F7L_at; Start 25; Stop 49
gattccaaaactttagatcggttga

SEQ ID NO: 195196 - DNA, 25 bp, Artificial
  probe
  misc_feature (1)..(25): SEQ ID NO: 2783; WAN024F7L_at; Start 53; Stop 77
cctatattctagtcttggcttctga

SEQ ID NO: 195197 - DNA, 25 bp, Artificial
  probe
  misc_feature (1)..(25): SEQ ID NO: 2783; WAN024F7L_at; Start 76; Stop 100
gacaccattgcttttaatgtttttg

SEQ ID NO: 195198 - DNA, 25 bp, Artificial
  probe
  misc_feature (1)..(25): SEQ ID NO: 2783; WAN024F7L_at; Start 111; Stop 135
tgtatctgcggtggtttttaatttc

SEQ ID NO: 195199 - DNA, 25 bp, Artificial
  probe
  misc_feature (1)..(25): SEQ ID NO: 2783; WAN024F7L_at; Start 20; Stop 44
tcctagattccaaaactttagatcg

SEQ ID NO: 195200 - DNA, 25 bp, Artificial
  probe
  misc_feature (1)..(25): SEQ ID NO: 2783; WAN024F7L_at; Start 28; Stop 52
tccaaaactttagatcggttgacac

SEQ ID NO: 195201 - DNA, 25 bp, Artificial
  probe
  misc_feature (1)..(25): SEQ ID NO: 2783; WAN024F7L_at; Start 42; Stop 66
tcggttgacaccctatattctagtc

SEQ ID NO: 195202 - DNA, 25 bp, Artificial
  probe
  misc_feature (1)..(25): SEQ ID NO: 2783; WAN024F7L_at; Start 176; Stop 200
ctggctatgtggtcggattttggtt

SEQ ID NO: 195203 - DNA, 25 bp, Artificial
  probe
  misc_feature (1)..(25): SEQ ID NO: 2783; WAN024F7L_at; Start 139; Stop 163
aattccatgctagctttaatggcta

SEQ ID NO: 195204 - DNA, 25 bp, Artificial
  probe
  misc_feature (1)..(25): SEQ ID NO: 2783; WAN024F7L_at; Start 99; Stop 123
tgtgctaacctttgtatctgcggtg

SEQ ID NO: 195205 - DNA, 25 bp, Artificial
  probe
  misc_feature (1)..(25): SEQ ID NO: 2783; WAN024F7L_at; Start 59; Stop 83
ttctagtcttggcttctgacaccat

SEQ ID NO: 195206 - DNA, 25 bp, Artificial
  probe
  misc_feature (1)..(25): SEQ ID NO: 2783; WAN024F7L_at; Start 150; Stop 174
agctttaatggctatattcataggg

SEQ ID NO: 195207 - DNA, 25 bp, Artificial
  probe
  misc_feature (1)..(25): SEQ ID NO: 2783; WAN024F7L_at; Start 97; Stop 121
tttgtgctaacctttgtatctgcgg

SEQ ID NO: 195208 - DNA, 25 bp, Artificial
  probe
  misc_feature (1)..(25): SEQ ID NO: 2783; WAN024F7L_at; Start 48; Stop 72
gacaccctatattctagtcttggct

SEQ ID NO: 195209 - DNA, 25 bp, Artificial
  probe
  misc_feature (1)..(25): SEQ ID NO: 2783; WAN024F7L_at; Start 84; Stop 108
tgcttttaatgtttttgtgctaacc

SEQ ID NO: 195210 - DNA, 25 bp, Artificial
  probe
  misc_feature (1)..(25): SEQ ID NO: 2783; WAN024F7L_at; Start 57; Stop 81
tattctagtcttggcttctgacacc

SEQ ID NO: 195211 - DNA, 25 bp, Artificial
  probe
  misc_feature (1)..(25): SEQ ID NO: 2783; WAN024F7L_at; Start 187; Stop 211
gtcggattttggttactaatactca

SEQ ID NO: 195212 - DNA, 25 bp, Artificial
  probe
  misc_feature (1)..(25): SEQ ID NO: 2783; WAN024F7L_at; Start 69; Stop 93
ggcttctgacaccattgcttttaat

SEQ ID NO: 195213 - DNA, 25 bp, Artificial
  probe
  misc_feature (1)..(25): SEQ ID NO: 2783; WAN024F7L_at; Start 101; Stop 125
tgctaacctttgtatctgcggtggt

SEQ ID NO: 195214 - DNA, 25 bp, Artificial
  probe
  misc_feature (1)..(25): SEQ ID NO: 2783; WAN024F7L_at; Start 46; Stop 70
ttgacaccctatattctagtcttgg

SEQ ID NO: 195215 - DNA, 25 bp, Artificial
  probe
  misc_feature (1)..(25): SEQ ID NO: 2783; WAN024F7L_at; Start 181; Stop 205
tatgtggtcggattttggttactaa

SEQ ID NO: 195216 - DNA, 25 bp, Artificial
  probe
  misc_feature (1)..(25): SEQ ID NO: 2783; WAN024F7L_at; Start 2; Stop 26
tgtataaacacttatttttcctaga

SEQ ID NO: 195217 - DNA, 25 bp, Artificial
  probe
  misc_feature (1)..(25): SEQ ID NO: 2783; WAN024F7L_at; Start 137; Stop 161
taaattccatgctagctttaatggc

SEQ ID NO: 195218 - DNA, 25 bp, Artificial
  probe
  misc_feature (1)..(25): SEQ ID NO: 2783; WAN024F7L_at; Start 159; Stop 183
ggctatattcataggggctggctat

SEQ ID NO: 195219 - DNA, 25 bp, Artificial
  probe
  misc_feature (1)..(25): SEQ ID NO: 2783; WAN024F7L_at; Start 40; Stop 64
gatcggttgacaccctatattctag

SEQ ID NO: 195220 - DNA, 25 bp, Artificial
  probe
  misc_feature (1)..(25): SEQ ID NO: 2783; WAN024F7L_at; Start 33; Stop 57
aactttagatcggttgacaccctat

SEQ ID NO: 195221 - DNA, 25 bp, Artificial
  probe
  misc_feature (1)..(25): SEQ ID NO: 2783; WAN024F7L_at; Start 37; Stop 61
ttagatcggttgacaccctatattc

SEQ ID NO: 195222 - DNA, 25 bp, Artificial
  probe
  misc_feature (1)..(25): SEQ ID NO: 2783; WAN024F7L_at; Start 179; Stop 203
gctatgtggtcggattttggttact

SEQ ID NO: 195223 - DNA, 25 bp, Artificial
  probe
  misc_feature (1)..(25): SEQ ID NO: 2783; WAN024F7L_at; Start 144; Stop 168
catgctagctttaatggctatattc

SEQ ID NO: 195224 - DNA, 25 bp, Artificial
  probe
  misc_feature (1)..(25): SEQ ID NO: 2783; WAN024F7L_at; Start 65; Stop 89
tcttggcttctgacaccattgcttt

SEQ ID NO: 195225 - DNA, 25 bp, Artificial
  probe
  misc_feature (1)..(25): SEQ ID NO: 5955; WAN024F7M_at; Start 24; Stop 48
attgctgtgtaaaatatggcctgga

SEQ ID NO: 195226 - DNA, 25 bp, Artificial
  probe
  misc_feature (1)..(25): SEQ ID NO: 5955; WAN024F7M_at; Start 17; Stop 41
gaagactattgctgtgtaaaatatg

SEQ ID NO: 195227 - DNA, 25 bp, Artificial
  probe
  misc_feature (1)..(25): SEQ ID NO: 5955; WAN024F7M_at; Start 11; Stop 35
tttttagaagactattgctgtgtaa

SEQ ID NO: 195228 - DNA, 25 bp, Artificial
  probe
  misc_feature (1)..(25): SEQ ID NO: 5955; WAN024F7M_at; Start 6; Stop 30
gtccatttttagaagactattgctg

SEQ ID NO: 195229 - DNA, 25 bp, Artificial
  probe
  misc_feature (1)..(25): SEQ ID NO: 5955; WAN024F7M_at; Start 21; Stop 45
actattgctgtgtaaaatatggcct

SEQ ID NO: 195230 - DNA, 25 bp, Artificial
  probe
  misc_feature (1)..(25): SEQ ID NO: 5955; WAN024F7M_at; Start 38; Stop 62
tatggcctggagcacttttatactc

SEQ ID NO: 195231 - DNA, 25 bp, Artificial
  probe
  misc_feature (1)..(25): SEQ ID NO: 5955; WAN024F7M_at; Start 28; Stop 52
ctgtgtaaaatatggcctggagcac

SEQ ID NO: 195232 - DNA, 25 bp, Artificial
  probe
  misc_feature (1)..(25): SEQ ID NO: 5955; WAN024F7M_at; Start 29; Stop 53
tgtgtaaaatatggcctggagcact

SEQ ID NO: 195233 - DNA, 25 bp, Artificial
  probe
  misc_feature (1)..(25): SEQ ID NO: 5955; WAN024F7M_at; Start 14; Stop 38
ttagaagactattgctgtgtaaaat

SEQ ID NO: 195234 - DNA, 25 bp, Artificial
  probe
  misc_feature (1)..(25): SEQ ID NO: 5955; WAN024F7M_at; Start 32; Stop 56
gtaaaatatggcctggagcactttt

SEQ ID NO: 195235 - DNA, 25 bp, Artificial
  probe
  misc_feature (1)..(25): SEQ ID NO: 5955; WAN024F7M_at; Start 34; Stop 58
aaaatatggcctggagcacttttat

SEQ ID NO: 195236 - DNA, 25 bp, Artificial
  probe
  misc_feature (1)..(25): SEQ ID NO: 5955; WAN024F7M_at; Start 25; Stop 49
ttgctgtgtaaaatatggcctggag

SEQ ID NO: 195237 - DNA, 25 bp, Artificial
  probe
  misc_feature (1)..(25): SEQ ID NO: 5955; WAN024F7M_at; Start 9; Stop 33
catttttagaagactattgctgtgt

SEQ ID NO: 195238 - DNA, 25 bp, Artificial
  probe
  misc_feature (1)..(25): SEQ ID NO: 5955; WAN024F7M_at; Start 18; Stop 42
aagactattgctgtgtaaaatatgg

SEQ ID NO: 195239 - DNA, 25 bp, Artificial
  probe
  misc_feature (1)..(25): SEQ ID NO: 5955; WAN024F7M_at; Start 43; Stop 67
cctggagcacttttatactcaatga

SEQ ID NO: 195240 - DNA, 25 bp, Artificial
  probe
  misc_feature (1)..(25): SEQ ID NO: 5955; WAN024F7M_at; Start 36; Stop 60
aatatggcctggagcacttttatac

SEQ ID NO: 195241 - DNA, 25 bp, Artificial
  probe
  misc_feature (1)..(25): SEQ ID NO: 5955; WAN024F7M_at; Start 33; Stop 57
taaaatatggcctggagcactttta

SEQ ID NO: 195242 - DNA, 25 bp, Artificial
  probe
  misc_feature (1)..(25): SEQ ID NO: 5955; WAN024F7M_at; Start 26; Stop 50
tgctgtgtaaaatatggcctggagc

SEQ ID NO: 195243 - DNA, 25 bp, Artificial
  probe
  misc_feature (1)..(25): SEQ ID NO: 5955; WAN024F7M_at; Start 19; Stop 43
agactattgctgtgtaaaatatggc

SEQ ID NO: 195244 - DNA, 25 bp, Artificial
  probe
  misc_feature (1)..(25): SEQ ID NO: 5955; WAN024F7M_at; Start 39; Stop 63
atggcctggagcacttttatactca

SEQ ID NO: 195245 - DNA, 25 bp, Artificial
  probe
  misc_feature (1)..(25): SEQ ID NO: 5955; WAN024F7M_at; Start 4; Stop 28
ttgtccatttttagaagactattgc

SEQ ID NO: 195246 - DNA, 25 bp, Artificial
  probe
  misc_feature (1)..(25): SEQ ID NO: 5955; WAN024F7M_at; Start 42; Stop 66
gcctggagcacttttatactcaatg

SEQ ID NO: 195247 - DNA, 25 bp, Artificial
  probe
  misc_feature (1)..(25): SEQ ID NO: 5955; WAN024F7M_at; Start 20; Stop 44
gactattgctgtgtaaaatatggcc

SEQ ID NO: 195248 - DNA, 25 bp, Artificial
  probe
  misc_feature (1)..(25): SEQ ID NO: 5955; WAN024F7M_at; Start 5; Stop 29
tgtccatttttagaagactattgct

SEQ ID NO: 195249 - DNA, 25 bp, Artificial
  probe
  misc_feature (1)..(25): SEQ ID NO: 5955; WAN024F7M_at; Start 7; Stop 31
tccatttttagaagactattgctgt

SEQ ID NO: 195250 - DNA, 25 bp, Artificial
  probe
  misc_feature (1)..(25): SEQ ID NO: 5955; WAN024F7M_at; Start 23; Stop 47
tattgctgtgtaaaatatggcctgg

SEQ ID NO: 195251 - DNA, 25 bp, Artificial
  probe
  misc_feature (1)..(25): SEQ ID NO: 5955; WAN024F7M_at; Start 27; Stop 51
gctgtgtaaaatatggcctggagca

SEQ ID NO: 195252 - DNA, 25 bp, Artificial
  probe
  misc_feature (1)..(25): SEQ ID NO: 5955; WAN024F7M_at; Start 37; Stop 61
atatggcctggagcacttttatact

SEQ ID NO: 195253 - DNA, 25 bp, Artificial
  probe
  misc_feature (1)..(25): SEQ ID NO: 5955; WAN024F7M_at; Start 8; Stop 32
ccatttttagaagactattgctgtg

SEQ ID NO: 195254 - DNA, 25 bp, Artificial
  probe
  misc_feature (1)..(25): SEQ ID NO: 5955; WAN024F7M_at; Start 22; Stop 46
ctattgctgtgtaaaatatggcctg

SEQ ID NO: 195255 - DNA, 25 bp, Artificial
  probe
  misc_feature (1)..(25): SEQ ID NO: 5955; WAN024F7M_at; Start 41; Stop 65
ggcctggagcacttttatactcaat

SEQ ID NO: 195256 - DNA, 25 bp, Artificial
  probe
  misc_feature (1)..(25): SEQ ID NO: 5955; WAN024F7M_at; Start 15; Stop 39
tagaagactattgctgtgtaaaata

SEQ ID NO: 195257 - DNA, 25 bp, Artificial
  probe
  misc_feature (1)..(25): SEQ ID NO: 5955; WAN024F7M_at; Start 35; Stop 59
aaatatggcctggagcacttttata

SEQ ID NO: 195258 - DNA, 25 bp, Artificial
  probe
  misc_feature (1)..(25): SEQ ID NO: 5955; WAN024F7M_at; Start 40; Stop 64
tggcctggagcacttttatactcaa

SEQ ID NO: 195259 - DNA, 25 bp, Artificial
  probe
  misc_feature (1)..(25): SEQ ID NO: 4334; WAN024F7N_x_at; Start 49; Stop 73
gccgtaggtatggttactgacttcg

SEQ ID NO: 195260 - DNA, 25 bp, Artificial
  probe
  misc_feature (1)..(25): SEQ ID NO: 4334; WAN024F7N_x_at; Start 50; Stop 74
ccgtaggtatggttactgacttcgt

SEQ ID NO: 195261 - DNA, 25 bp, Artificial
  probe
  misc_feature (1)..(25): SEQ ID NO: 4334; WAN024F7N_x_at; Start 42; Stop 66
tcgccttgccgtaggtatggttact

SEQ ID NO: 195262 - DNA, 25 bp, Artificial
  probe
  misc_feature (1)..(25): SEQ ID NO: 4334; WAN024F7N_x_at; Start 22; Stop 46
ctcttcaaaccacgtcagcttcgcc

SEQ ID NO: 195263 - DNA, 25 bp, Artificial
  probe
  misc_feature (1)..(25): SEQ ID NO: 4334; WAN024F7N_x_at; Start 46; Stop 70
cttgccgtaggtatggttactgact

SEQ ID NO: 195264 - DNA, 25 bp, Artificial
  probe
  misc_feature (1)..(25): SEQ ID NO: 4334; WAN024F7N_x_at; Start 45; Stop 69
ccttgccgtaggtatggttactgac

SEQ ID NO: 195265 - DNA, 25 bp, Artificial
  probe
  misc_feature (1)..(25): SEQ ID NO: 4334; WAN024F7N_x_at; Start 26; Stop 50
tcaaaccacgtcagcttcgccttgc

SEQ ID NO: 195266 - DNA, 25 bp, Artificial
  probe
  misc_feature (1)..(25): SEQ ID NO: 4334; WAN024F7N_x_at; Start 53; Stop 77
taggtatggttactgacttcgtcag

SEQ ID NO: 195267 - DNA, 25 bp, Artificial
  probe
  misc_feature (1)..(25): SEQ ID NO: 4334; WAN024F7N_x_at; Start 54; Stop 78
aggtatggttactgacttcgtcagt

SEQ ID NO: 195268 - DNA, 25 bp, Artificial
  probe
  misc_feature (1)..(25): SEQ ID NO: 4334; WAN024F7N_x_at; Start 20; Stop 44
atctcttcaaaccacgtcagcttcg

SEQ ID NO: 195269 - DNA, 25 bp, Artificial
  probe
  misc_feature (1)..(25): SEQ ID NO: 4334; WAN024F7N_x_at; Start 52; Stop 76
gtaggtatggttactgacttcgtca

SEQ ID NO: 195270 - DNA, 25 bp, Artificial
  probe
  misc_feature (1)..(25): SEQ ID NO: 4334; WAN024F7N_x_at; Start 23; Stop 47
tcttcaaaccacgtcagcttcgcct

SEQ ID NO: 195271 - DNA, 25 bp, Artificial
  probe
  misc_feature (1)..(25): SEQ ID NO: 4334; WAN024F7N_x_at; Start 41; Stop 65
ttcgccttgccgtaggtatggttac

SEQ ID NO: 195272 - DNA, 25 bp, Artificial
  probe
  misc_feature (1)..(25): SEQ ID NO: 4334; WAN024F7N_x_at; Start 19; Stop 43
aatctcttcaaaccacgtcagcttc

SEQ ID NO: 195273 - DNA, 25 bp, Artificial
  probe
  misc_feature (1)..(25): SEQ ID NO: 4334; WAN024F7N_x_at; Start 21; Stop 45
tctcttcaaaccacgtcagcttcgc

SEQ ID NO: 195274 - DNA, 25 bp, Artificial
  probe
  misc_feature (1)..(25): SEQ ID NO: 4334; WAN024F7N_x_at; Start 51; Stop 75
cgtaggtatggttactgacttcgtc

SEQ ID NO: 195275 - DNA, 25 bp, Artificial
  probe
  misc_feature (1)..(25): SEQ ID NO: 4334; WAN024F7N_x_at; Start 18; Stop 42
aaatctcttcaaaccacgtcagctt

SEQ ID NO: 195276 - DNA, 25 bp, Artificial
  probe
  misc_feature (1)..(25): SEQ ID NO: 5016; WAN024F7O_at; Start 148; Stop 172
atttccattgagtgttactgcttat

SEQ ID NO: 195277 - DNA, 25 bp, Artificial
  probe
  misc_feature (1)..(25): SEQ ID NO: 5016; WAN024F7O_at; Start 153; Stop 177
cattgagtgttactgcttattttct

SEQ ID NO: 195278 - DNA, 25 bp, Artificial
  probe
  misc_feature (1)..(25): SEQ ID NO: 5016; WAN024F7O_at; Start 28; Stop 52
tcaacatgcctagcacctttttata

SEQ ID NO: 195279 - DNA, 25 bp, Artificial
  probe
  misc_feature (1)..(25): SEQ ID NO: 5016; WAN024F7O_at; Start 147; Stop 171
gatttccattgagtgttactgctta

SEQ ID NO: 195280 - DNA, 25 bp, Artificial
  probe
  misc_feature (1)..(25): SEQ ID NO: 5016; WAN024F7O_at; Start 144; Stop 168
ttcgatttccattgagtgttactgc

SEQ ID NO: 195281 - DNA, 25 bp, Artificial
  probe
  misc_feature (1)..(25): SEQ ID NO: 5016; WAN024F7O_at; Start 31; Stop 55
acatgcctagcacctttttatactc

SEQ ID NO: 195282 - DNA, 25 bp, Artificial
  probe
  misc_feature (1)..(25): SEQ ID NO: 5016; WAN024F7O_at; Start 20; Stop 44
aggaaaaatcaacatgcctagcacc

SEQ ID NO: 195283 - DNA, 25 bp, Artificial
  probe
  misc_feature (1)..(25): SEQ ID NO: 5016; WAN024F7O_at; Start 22; Stop 46
gaaaaatcaacatgcctagcacctt

SEQ ID NO: 195284 - DNA, 25 bp, Artificial
  probe
  misc_feature (1)..(25): SEQ ID NO: 5016; WAN024F7O_at; Start 137; Stop 161
tttgcttttcgatttccattgagtg

SEQ ID NO: 195285 - DNA, 25 bp, Artificial
  probe
  misc_feature (1)..(25): SEQ ID NO: 5016; WAN024F7O_at; Start 19; Stop 43
aaggaaaaatcaacatgcctagcac

SEQ ID NO: 195286 - DNA, 25 bp, Artificial
  probe
  misc_feature (1)..(25): SEQ ID NO: 5016; WAN024F7O_at; Start 2; Stop 26
tgacaaatcatttaacaaaggaaaa

SEQ ID NO: 195287 - DNA, 25 bp, Artificial
  probe
  misc_feature (1)..(25): SEQ ID NO: 5016; WAN024F7O_at; Start 29; Stop 53
caacatgcctagcacctttttatac

SEQ ID NO: 195288 - DNA, 25 bp, Artificial
  probe
  misc_feature (1)..(25): SEQ ID NO: 5016; WAN024F7O_at; Start 35; Stop 59
gcctagcacctttttatactcttcg

SEQ ID NO: 195289 - DNA, 25 bp, Artificial
  probe
  misc_feature (1)..(25): SEQ ID NO: 5016; WAN024F7O_at; Start 34; Stop 58
tgcctagcacctttttatactcttc

SEQ ID NO: 195290 - DNA, 25 bp, Artificial
  probe
  misc_feature (1)..(25): SEQ ID NO: 5016; WAN024F7O_at; Start 143; Stop 167
tttcgatttccattgagtgttactg

SEQ ID NO: 195291 - DNA, 25 bp, Artificial
  probe
  misc_feature (1)..(25): SEQ ID NO: 5016; WAN024F7O_at; Start 150; Stop 174
ttccattgagtgttactgcttattt

SEQ ID NO: 195292 - DNA, 25 bp, Artificial
  probe
  misc_feature (1)..(25): SEQ ID NO: 5016; WAN024F7O_at; Start 163; Stop 187
tactgcttattttcttttattatac

SEQ ID NO: 195293 - DNA, 25 bp, Artificial
  probe
  misc_feature (1)..(25): SEQ ID NO: 5016; WAN024F7O_at; Start 21; Stop 45
ggaaaaatcaacatgcctagcacct

SEQ ID NO: 195294 - DNA, 25 bp, Artificial
  probe
  misc_feature (1)..(25): SEQ ID NO: 5016; WAN024F7O_at; Start 145; Stop 169
tcgatttccattgagtgttactgct

SEQ ID NO: 195295 - DNA, 25 bp, Artificial
  probe
  misc_feature (1)..(25): SEQ ID NO: 5016; WAN024F7O_at; Start 149; Stop 173
tttccattgagtgttactgcttatt

SEQ ID NO: 195296 - DNA, 25 bp, Artificial
  probe
  misc_feature (1)..(25): SEQ ID NO: 5016; WAN024F7O_at; Start 140; Stop 164
gcttttcgatttccattgagtgtta

SEQ ID NO: 195297 - DNA, 25 bp, Artificial
  probe
  misc_feature (1)..(25): SEQ ID NO: 5016; WAN024F7O_at; Start 30; Stop 54
aacatgcctagcacctttttatact

SEQ ID NO: 195298 - DNA, 25 bp, Artificial
  probe
  misc_feature (1)..(25): SEQ ID NO: 5016; WAN024F7O_at; Start 23; Stop 47
aaaaatcaacatgcctagcaccttt

SEQ ID NO: 195299 - DNA, 25 bp, Artificial
  probe
  misc_feature (1)..(25): SEQ ID NO: 5016; WAN024F7O_at; Start 32; Stop 56
catgcctagcacctttttatactct

SEQ ID NO: 195300 - DNA, 25 bp, Artificial
  probe
  misc_feature (1)..(25): SEQ ID NO: 5016; WAN024F7O_at; Start 157; Stop 181
gagtgttactgcttattttctttta

SEQ ID NO: 195301 - DNA, 25 bp, Artificial
  probe
  misc_feature (1)..(25): SEQ ID NO: 5016; WAN024F7O_at; Start 33; Stop 57
atgcctagcacctttttatactctt

SEQ ID NO: 195302 - DNA, 25 bp, Artificial
  probe
  misc_feature (1)..(25): SEQ ID NO: 5016; WAN024F7O_at; Start 152; Stop 176
ccattgagtgttactgcttattttc

SEQ ID NO: 195303 - DNA, 25 bp, Artificial
  probe
  misc_feature (1)..(25): SEQ ID NO: 5016; WAN024F7O_at; Start 142; Stop 166
ttttcgatttccattgagtgttact

SEQ ID NO: 195304 - DNA, 25 bp, Artificial
  probe
  misc_feature (1)..(25): SEQ ID NO: 5016; WAN024F7O_at; Start 141; Stop 165
cttttcgatttccattgagtgttac

SEQ ID NO: 195305 - DNA, 25 bp, Artificial
  probe
  misc_feature (1)..(25): SEQ ID NO: 5016; WAN024F7O_at; Start 26; Stop 50
aatcaacatgcctagcaccttttta

SEQ ID NO: 195306 - DNA, 25 bp, Artificial
  probe
  misc_feature (1)..(25): SEQ ID NO: 5016; WAN024F7O_at; Start 25; Stop 49
aaatcaacatgcctagcaccttttt

SEQ ID NO: 195307 - DNA, 25 bp, Artificial
  probe
  misc_feature (1)..(25): SEQ ID NO: 5016; WAN024F7O_at; Start 138; Stop 162
ttgcttttcgatttccattgagtgt

SEQ ID NO: 195308 - DNA, 25 bp, Artificial
  probe
  misc_feature (1)..(25): SEQ ID NO: 5016; WAN024F7O_at; Start 146; Stop 170
cgatttccattgagtgttactgctt

SEQ ID NO: 195309 - DNA, 25 bp, Artificial
  probe
  misc_feature (1)..(25): SEQ ID NO: 5016; WAN024F7O_at; Start 139; Stop 163
tgcttttcgatttccattgagtgtt

SEQ ID NO: 195310 - DNA, 25 bp, Artificial
  probe
  misc_feature (1)..(25): SEQ ID NO: 5124; WAN024F7P_at; Start 14; Stop 38
ggtataaattaagtttgctgctgta

SEQ ID NO: 195311 - DNA, 25 bp, Artificial
  probe
  misc_feature (1)..(25): SEQ ID NO: 5124; WAN024F7P_at; Start 33; Stop 57
gctgtataatggatttatcactaat

SEQ ID NO: 195312 - DNA, 25 bp, Artificial
  probe
  misc_feature (1)..(25): SEQ ID NO: 5124; WAN024F7P_at; Start 318; Stop 342
ggctatcaaaaaggagtactaacta

SEQ ID NO: 195313 - DNA, 25 bp, Artificial
  probe
  misc_feature (1)..(25): SEQ ID NO: 5124; WAN024F7P_at; Start 93; Stop 117
gccttgccgtagatatagttatcga

SEQ ID NO: 195314 - DNA, 25 bp, Artificial
  probe
  misc_feature (1)..(25): SEQ ID NO: 5124; WAN024F7P_at; Start 25; Stop 49
agtttgctgctgtataatggattta

SEQ ID NO: 195315 - DNA, 25 bp, Artificial
  probe
  misc_feature (1)..(25): SEQ ID NO: 5124; WAN024F7P_at; Start 241; Stop 265
tcattgagtataaaagtgctccagg

SEQ ID NO: 195316 - DNA, 25 bp, Artificial
  probe
  misc_feature (1)..(25): SEQ ID NO: 5124; WAN024F7P_at; Start 94; Stop 118
ccttgccgtagatatagttatcgac

SEQ ID NO: 195317 - DNA, 25 bp, Artificial
  probe
  misc_feature (1)..(25): SEQ ID NO: 5124; WAN024F7P_at; Start 106; Stop 130
tatagttatcgacttcgtcagttct

SEQ ID NO: 195318 - DNA, 25 bp, Artificial
  probe
  misc_feature (1)..(25): SEQ ID NO: 5124; WAN024F7P_at; Start 312; Stop 336
tgtaaaggctatcaaaaaggagtac

SEQ ID NO: 195319 - DNA, 25 bp, Artificial
  probe
  misc_feature (1)..(25): SEQ ID NO: 5124; WAN024F7P_at; Start 91; Stop 115
tcgccttgccgtagatatagttatc

SEQ ID NO: 195320 - DNA, 25 bp, Artificial
  probe
  misc_feature (1)..(25): SEQ ID NO: 5124; WAN024F7P_at; Start 95; Stop 119
cttgccgtagatatagttatcgact

SEQ ID NO: 195321 - DNA, 25 bp, Artificial
  probe
  misc_feature (1)..(25): SEQ ID NO: 5124; WAN024F7P_at; Start 309; Stop 333
cattgtaaaggctatcaaaaaggag

SEQ ID NO: 195322 - DNA, 25 bp, Artificial
  probe
  misc_feature (1)..(25): SEQ ID NO: 5124; WAN024F7P_at; Start 30; Stop 54
gctgctgtataatggatttatcact

SEQ ID NO: 195323 - DNA, 25 bp, Artificial
  probe
  misc_feature (1)..(25): SEQ ID NO: 5124; WAN024F7P_at; Start 11; Stop 35
gaaggtataaattaagtttgctgct

SEQ ID NO: 195324 - DNA, 25 bp, Artificial
  probe
  misc_feature (1)..(25): SEQ ID NO: 5124; WAN024F7P_at; Start 319; Stop 343
gctatcaaaaaggagtactaactaa

SEQ ID NO: 195325 - DNA, 25 bp, Artificial
  probe
  misc_feature (1)..(25): SEQ ID NO: 5124; WAN024F7P_at; Start 102; Stop 126
tagatatagttatcgacttcgtcag

SEQ ID NO: 195326 - DNA, 25 bp, Artificial
  probe
  misc_feature (1)..(25): SEQ ID NO: 5124; WAN024F7P_at; Start 269; Stop 293
tattttacacagcaatagtcttcta

SEQ ID NO: 195327 - DNA, 25 bp, Artificial
  probe
  misc_feature (1)..(25): SEQ ID NO: 5124; WAN024F7P_at; Start 42; Stop 66
tggatttatcactaatactcttcga

SEQ ID NO: 195328 - DNA, 25 bp, Artificial
  probe
  misc_feature (1)..(25): SEQ ID NO: 5124; WAN024F7P_at; Start 90; Stop 114
ttcgccttgccgtagatatagttat

SEQ ID NO: 195329 - DNA, 25 bp, Artificial
  probe
  misc_feature (1)..(25): SEQ ID NO: 5124; WAN024F7P_at; Start 314; Stop 338
taaaggctatcaaaaaggagtacta

SEQ ID NO: 195330 - DNA, 25 bp, Artificial
  probe
  misc_feature (1)..(25): SEQ ID NO: 5124; WAN024F7P_at; Start 276; Stop 300
cacagcaatagtcttctaaaaatgg

SEQ ID NO: 195331 - DNA, 25 bp, Artificial
  probe
  misc_feature (1)..(25): SEQ ID NO: 5124; WAN024F7P_at; Start 242; Stop 266
cattgagtataaaagtgctccaggc

SEQ ID NO: 195332 - DNA, 25 bp, Artificial
  probe
  misc_feature (1)..(25): SEQ ID NO: 5124; WAN024F7P_at; Start 104; Stop 128
gatatagttatcgacttcgtcagtt

SEQ ID NO: 195333 - DNA, 25 bp, Artificial
  probe
  misc_feature (1)..(25): SEQ ID NO: 5124; WAN024F7P_at; Start 29; Stop 53
tgctgctgtataatggatttatcac

SEQ ID NO: 195334 - DNA, 25 bp, Artificial
  probe
  misc_feature (1)..(25): SEQ ID NO: 5124; WAN024F7P_at; Start 23; Stop 47
taagtttgctgctgtataatggatt

SEQ ID NO: 195335 - DNA, 25 bp, Artificial
  probe
  misc_feature (1)..(25): SEQ ID NO: 5124; WAN024F7P_at; Start 98; Stop 122
gccgtagatatagttatcgacttcg

SEQ ID NO: 195336 - DNA, 25 bp, Artificial
  probe
  misc_feature (1)..(25): SEQ ID NO: 5124; WAN024F7P_at; Start 100; Stop 124
cgtagatatagttatcgacttcgtc

SEQ ID NO: 195337 - DNA, 25 bp, Artificial
  probe
  misc_feature (1)..(25): SEQ ID NO: 5124; WAN024F7P_at; Start 320; Stop 344
ctatcaaaaaggagtactaactaat

SEQ ID NO: 195338 - DNA, 25 bp, Artificial
  probe
  misc_feature (1)..(25): SEQ ID NO: 5124; WAN024F7P_at; Start 278; Stop 302
cagcaatagtcttctaaaaatggac

SEQ ID NO: 195339 - DNA, 25 bp, Artificial
  probe
  misc_feature (1)..(25): SEQ ID NO: 5124; WAN024F7P_at; Start 2; Stop 26
tgaggagcggaaggtataaattaag

SEQ ID NO: 195340 - DNA, 25 bp, Artificial
  probe
  misc_feature (1)..(25): SEQ ID NO: 5124; WAN024F7P_at; Start 9; Stop 33
cggaaggtataaattaagtttgctg

SEQ ID NO: 195341 - DNA, 25 bp, Artificial
  probe
  misc_feature (1)..(25): SEQ ID NO: 5124; WAN024F7P_at; Start 92; Stop 116
cgccttgccgtagatatagttatcg

SEQ ID NO: 195342 - DNA, 25 bp, Artificial
  probe
  misc_feature (1)..(25): SEQ ID NO: 5124; WAN024F7P_at; Start 279; Stop 303
agcaatagtcttctaaaaatggaca

SEQ ID NO: 195343 - DNA, 25 bp, Artificial
  probe
  misc_feature (1)..(25): SEQ ID NO: 5124; WAN024F7P_at; Start 20; Stop 44
aattaagtttgctgctgtataatgg

SEQ ID NO: 195344 - DNA, 25 bp, Artificial
  probe
  misc_feature (1)..(25): SEQ ID NO: 4139; WAN024F7Q_at; Start 78; Stop 102
gtatcattcaccatttcacaaccta

SEQ ID NO: 195345 - DNA, 25 bp, Artificial
  probe
  misc_feature (1)..(25): SEQ ID NO: 4139; WAN024F7Q_at; Start 65; Stop 89
aaatttttgaagagtatcattcacc

SEQ ID NO: 195346 - DNA, 25 bp, Artificial
  probe
  misc_feature (1)..(25): SEQ ID NO: 4139; WAN024F7Q_at; Start 73; Stop 97
gaagagtatcattcaccatttcaca

SEQ ID NO: 195347 - DNA, 25 bp, Artificial
  probe
  misc_feature (1)..(25): SEQ ID NO: 4139; WAN024F7Q_at; Start 71; Stop 95
ttgaagagtatcattcaccatttca

SEQ ID NO: 195348 - DNA, 25 bp, Artificial
  probe
  misc_feature (1)..(25): SEQ ID NO: 4139; WAN024F7Q_at; Start 66; Stop 90
aatttttgaagagtatcattcacca

SEQ ID NO: 195349 - DNA, 25 bp, Artificial
  probe
  misc_feature (1)..(25): SEQ ID NO: 4139; WAN024F7Q_at; Start 80; Stop 104
atcattcaccatttcacaacctaac

SEQ ID NO: 195350 - DNA, 25 bp, Artificial
  probe
  misc_feature (1)..(25): SEQ ID NO: 4139; WAN024F7Q_at; Start 74; Stop 98
aagagtatcattcaccatttcacaa

SEQ ID NO: 195351 - DNA, 25 bp, Artificial
  probe
  misc_feature (1)..(25): SEQ ID NO: 4139; WAN024F7Q_at; Start 69; Stop 93
ttttgaagagtatcattcaccattt

SEQ ID NO: 195352 - DNA, 25 bp, Artificial
  probe
  misc_feature (1)..(25): SEQ ID NO: 4139; WAN024F7Q_at; Start 83; Stop 107
attcaccatttcacaacctaactaa

SEQ ID NO: 195353 - DNA, 25 bp, Artificial
  probe
  misc_feature (1)..(25): SEQ ID NO: 4139; WAN024F7Q_at; Start 77; Stop 101
agtatcattcaccatttcacaacct

SEQ ID NO: 195354 - DNA, 25 bp, Artificial
  probe
  misc_feature (1)..(25): SEQ ID NO: 4139; WAN024F7Q_at; Start 72; Stop 96
tgaagagtatcattcaccatttcac

SEQ ID NO: 195355 - DNA, 25 bp, Artificial
  probe
  misc_feature (1)..(25): SEQ ID NO: 4139; WAN024F7Q_at; Start 70; Stop 94
tttgaagagtatcattcaccatttc

SEQ ID NO: 195356 - DNA, 25 bp, Artificial
  probe
  misc_feature (1)..(25): SEQ ID NO: 4139; WAN024F7Q_at; Start 76; Stop 100
gagtatcattcaccatttcacaacc

SEQ ID NO: 195357 - DNA, 25 bp, Artificial
  probe
  misc_feature (1)..(25): SEQ ID NO: 4139; WAN024F7Q_at; Start 67; Stop 91
atttttgaagagtatcattcaccat

SEQ ID NO: 195358 - DNA, 25 bp, Artificial
  probe
  misc_feature (1)..(25): SEQ ID NO: 4139; WAN024F7Q_at; Start 82; Stop 106
cattcaccatttcacaacctaacta

SEQ ID NO: 195359 - DNA, 25 bp, Artificial
  probe
  misc_feature (1)..(25): SEQ ID NO: 4139; WAN024F7Q_at; Start 84; Stop 108
ttcaccatttcacaacctaactaat

SEQ ID NO: 195360 - DNA, 25 bp, Artificial
  probe
  misc_feature (1)..(25): SEQ ID NO: 4139; WAN024F7Q_at; Start 79; Stop 103
tatcattcaccatttcacaacctaa

SEQ ID NO: 195361 - DNA, 25 bp, Artificial
  probe
  misc_feature (1)..(25): SEQ ID NO: 4139; WAN024F7Q_at; Start 68; Stop 92
tttttgaagagtatcattcaccatt

SEQ ID NO: 195362 - DNA, 25 bp, Artificial
  probe
  misc_feature (1)..(25): SEQ ID NO: 4139; WAN024F7Q_at; Start 64; Stop 88
gaaatttttgaagagtatcattcac

SEQ ID NO: 195363 - DNA, 25 bp, Artificial
  probe
  misc_feature (1)..(25): SEQ ID NO: 4139; WAN024F7Q_at; Start 75; Stop 99
agagtatcattcaccatttcacaac

SEQ ID NO: 195364 - DNA, 25 bp, Artificial
  probe
  misc_feature (1)..(25): SEQ ID NO: 4139; WAN024F7Q_at; Start 62; Stop 86
aagaaatttttgaagagtatcattc

SEQ ID NO: 195365 - DNA, 25 bp, Artificial
  probe
  misc_feature (1)..(25): SEQ ID NO: 4139; WAN024F7Q_at; Start 63; Stop 87
agaaatttttgaagagtatcattca

SEQ ID NO: 195366 - DNA, 25 bp, Artificial
  probe
  misc_feature (1)..(25): SEQ ID NO: 4139; WAN024F7Q_at; Start 81; Stop 105
tcattcaccatttcacaacctaact

SEQ ID NO: 195367 - DNA, 25 bp, Artificial
  probe
  misc_feature (1)..(25): SEQ ID NO: 4223; WAN024F7R_at; Start 55; Stop 79
cactgttttgagattactgataaaa

SEQ ID NO: 195368 - DNA, 25 bp, Artificial
  probe
  misc_feature (1)..(25): SEQ ID NO: 4223; WAN024F7R_at; Start 13; Stop 37
aacttcgatgttacagacaaaactg

SEQ ID NO: 195369 - DNA, 25 bp, Artificial
  probe
  misc_feature (1)..(25): SEQ ID NO: 4223; WAN024F7R_at; Start 15; Stop 39
cttcgatgttacagacaaaactggc

SEQ ID NO: 195370 - DNA, 25 bp, Artificial
  probe
  misc_feature (1)..(25): SEQ ID NO: 4223; WAN024F7R_at; Start 58; Stop 82
tgttttgagattactgataaaactg

SEQ ID NO: 195371 - DNA, 25 bp, Artificial
  probe
  misc_feature (1)..(25): SEQ ID NO: 4223; WAN024F7R_at; Start 25; Stop 49
acagacaaaactggcaaaattagct

SEQ ID NO: 195372 - DNA, 25 bp, Artificial
  probe
  misc_feature (1)..(25): SEQ ID NO: 4223; WAN024F7R_at; Start 11; Stop 35
acaacttcgatgttacagacaaaac

SEQ ID NO: 195373 - DNA, 25 bp, Artificial
  probe
  misc_feature (1)..(25): SEQ ID NO: 4223; WAN024F7R_at; Start 17; Stop 41
tcgatgttacagacaaaactggcaa

SEQ ID NO: 195374 - DNA, 25 bp, Artificial
  probe
  misc_feature (1)..(25): SEQ ID NO: 4223; WAN024F7R_at; Start 24; Stop 48
tacagacaaaactggcaaaattagc

SEQ ID NO: 195375 - DNA, 25 bp, Artificial
  probe
  misc_feature (1)..(25): SEQ ID NO: 4223; WAN024F7R_at; Start 30; Stop 54
caaaactggcaaaattagctcaaaa

SEQ ID NO: 195376 - DNA, 25 bp, Artificial
  probe
  misc_feature (1)..(25): SEQ ID NO: 4223; WAN024F7R_at; Start 36; Stop 60
tggcaaaattagctcaaaacactgt

SEQ ID NO: 195377 - DNA, 25 bp, Artificial
  probe
  misc_feature (1)..(25): SEQ ID NO: 4223; WAN024F7R_at; Start 21; Stop 45
tgttacagacaaaactggcaaaatt

SEQ ID NO: 195378 - DNA, 25 bp, Artificial
  probe
  misc_feature (1)..(25): SEQ ID NO: 4223; WAN024F7R_at; Start 14; Stop 38
acttcgatgttacagacaaaactgg

SEQ ID NO: 195379 - DNA, 25 bp, Artificial
  probe
  misc_feature (1)..(25): SEQ ID NO: 4223; WAN024F7R_at; Start 33; Stop 57
aactggcaaaattagctcaaaacac

SEQ ID NO: 195380 - DNA, 25 bp, Artificial
  probe
  misc_feature (1)..(25): SEQ ID NO: 4223; WAN024F7R_at; Start 18; Stop 42
cgatgttacagacaaaactggcaaa

SEQ ID NO: 195381 - DNA, 25 bp, Artificial
  probe
  misc_feature (1)..(25): SEQ ID NO: 4223; WAN024F7R_at; Start 27; Stop 51
agacaaaactggcaaaattagctca

SEQ ID NO: 195382 - DNA, 25 bp, Artificial
  probe
  misc_feature (1)..(25): SEQ ID NO: 4223; WAN024F7R_at; Start 56; Stop 80
actgttttgagattactgataaaac

SEQ ID NO: 195383 - DNA, 25 bp, Artificial
  probe
  misc_feature (1)..(25): SEQ ID NO: 4223; WAN024F7R_at; Start 12; Stop 36
caacttcgatgttacagacaaaact

SEQ ID NO: 195384 - DNA, 25 bp, Artificial
  probe
  misc_feature (1)..(25): SEQ ID NO: 4223; WAN024F7R_at; Start 8; Stop 32
aacacaacttcgatgttacagacaa

SEQ ID NO: 195385 - DNA, 25 bp, Artificial
  probe
  misc_feature (1)..(25): SEQ ID NO: 4223; WAN024F7R_at; Start 7; Stop 31
aaacacaacttcgatgttacagaca

SEQ ID NO: 195386 - DNA, 25 bp, Artificial
  probe
  misc_feature (1)..(25): SEQ ID NO: 4223; WAN024F7R_at; Start 20; Stop 44
atgttacagacaaaactggcaaaat

SEQ ID NO: 195387 - DNA, 25 bp, Artificial
  probe
  misc_feature (1)..(25): SEQ ID NO: 4223; WAN024F7R_at; Start 23; Stop 47
ttacagacaaaactggcaaaattag

SEQ ID NO: 195388 - DNA, 25 bp, Artificial
  probe
  misc_feature (1)..(25): SEQ ID NO: 4223; WAN024F7R_at; Start 9; Stop 33
acacaacttcgatgttacagacaaa

SEQ ID NO: 195389 - DNA, 25 bp, Artificial
  probe
  misc_feature (1)..(25): SEQ ID NO: 4223; WAN024F7R_at; Start 10; Stop 34
cacaacttcgatgttacagacaaaa

SEQ ID NO: 195390 - DNA, 25 bp, Artificial
  probe
  misc_feature (1)..(25): SEQ ID NO: 4223; WAN024F7R_at; Start 32; Stop 56
aaactggcaaaattagctcaaaaca

SEQ ID NO: 195391 - DNA, 25 bp, Artificial
  probe
  misc_feature (1)..(25): SEQ ID NO: 4223; WAN024F7R_at; Start 35; Stop 59
ctggcaaaattagctcaaaacactg

SEQ ID NO: 195392 - DNA, 25 bp, Artificial
  probe
  misc_feature (1)..(25): SEQ ID NO: 4223; WAN024F7R_at; Start 62; Stop 86
ttgagattactgataaaactgacgt

SEQ ID NO: 195393 - DNA, 25 bp, Artificial
  probe
  misc_feature (1)..(25): SEQ ID NO: 4223; WAN024F7R_at; Start 16; Stop 40
ttcgatgttacagacaaaactggca

SEQ ID NO: 195394 - DNA, 25 bp, Artificial
  probe
  misc_feature (1)..(25): SEQ ID NO: 4223; WAN024F7R_at; Start 60; Stop 84
ttttgagattactgataaaactgac

SEQ ID NO: 195395 - DNA, 25 bp, Artificial
  probe
  misc_feature (1)..(25): SEQ ID NO: 4223; WAN024F7R_at; Start 61; Stop 85
tttgagattactgataaaactgacg

SEQ ID NO: 195396 - DNA, 25 bp, Artificial
  probe
  misc_feature (1)..(25): SEQ ID NO: 4223; WAN024F7R_at; Start 22; Stop 46
gttacagacaaaactggcaaaatta

SEQ ID NO: 195397 - DNA, 25 bp, Artificial
  probe
  misc_feature (1)..(25): SEQ ID NO: 4223; WAN024F7R_at; Start 28; Stop 52
gacaaaactggcaaaattagctcaa

SEQ ID NO: 195398 - DNA, 25 bp, Artificial
  probe
  misc_feature (1)..(25): SEQ ID NO: 4223; WAN024F7R_at; Start 34; Stop 58
actggcaaaattagctcaaaacact

SEQ ID NO: 195399 - DNA, 25 bp, Artificial
  probe
  misc_feature (1)..(25): SEQ ID NO: 4223; WAN024F7R_at; Start 19; Stop 43
gatgttacagacaaaactggcaaaa

SEQ ID NO: 195400 - DNA, 25 bp, Artificial
  probe
  misc_feature (1)..(25): SEQ ID NO: 4223; WAN024F7R_at; Start 29; Stop 53
acaaaactggcaaaattagctcaaa

SEQ ID NO: 195401 - DNA, 25 bp, Artificial
  probe
  misc_feature (1)..(25): SEQ ID NO: 748; WAN024F7S_at; Start 24; Stop 48
caagctagtagcagattgcccaaaa

SEQ ID NO: 195402 - DNA, 25 bp, Artificial
  probe
  misc_feature (1)..(25): SEQ ID NO: 748; WAN024F7S_at; Start 18; Stop 42
aactagcaagctagtagcagattgc

SEQ ID NO: 195403 - DNA, 25 bp, Artificial
  probe
  misc_feature (1)..(25): SEQ ID NO: 748; WAN024F7S_at; Start 23; Stop 47
gcaagctagtagcagattgcccaaa

SEQ ID NO: 195404 - DNA, 25 bp, Artificial
  probe
  misc_feature (1)..(25): SEQ ID NO: 748; WAN024F7S_at; Start 26; Stop 50
agctagtagcagattgcccaaaaca

SEQ ID NO: 195405 - DNA, 25 bp, Artificial
  probe
  misc_feature (1)..(25): SEQ ID NO: 748; WAN024F7S_at; Start 30; Stop 54
agtagcagattgcccaaaacaccgc

SEQ ID NO: 195406 - DNA, 25 bp, Artificial
  probe
  misc_feature (1)..(25): SEQ ID NO: 748; WAN024F7S_at; Start 19; Stop 43
actagcaagctagtagcagattgcc

SEQ ID NO: 195407 - DNA, 25 bp, Artificial
  probe
  misc_feature (1)..(25): SEQ ID NO: 748; WAN024F7S_at; Start 28; Stop 52
ctagtagcagattgcccaaaacacc

SEQ ID NO: 195408 - DNA, 25 bp, Artificial
  probe
  misc_feature (1)..(25): SEQ ID NO: 748; WAN024F7S_at; Start 22; Stop 46
agcaagctagtagcagattgcccaa

SEQ ID NO: 195409 - DNA, 25 bp, Artificial
  probe
  misc_feature (1)..(25): SEQ ID NO: 748; WAN024F7S_at; Start 15; Stop 39
agaaactagcaagctagtagcagat

SEQ ID NO: 195410 - DNA, 25 bp, Artificial
  probe
  misc_feature (1)..(25): SEQ ID NO: 748; WAN024F7S_at; Start 12; Stop 36
agaagaaactagcaagctagtagca

SEQ ID NO: 195411 - DNA, 25 bp, Artificial
  probe
  misc_feature (1)..(25): SEQ ID NO: 748; WAN024F7S_at; Start 8; Stop 32
tcaaagaagaaactagcaagctagt

SEQ ID NO: 195412 - DNA, 25 bp, Artificial
  probe
  misc_feature (1)..(25): SEQ ID NO: 748; WAN024F7S_at; Start 27; Stop 51
gctagtagcagattgcccaaaacac

SEQ ID NO: 195413 - DNA, 25 bp, Artificial
  probe
  misc_feature (1)..(25): SEQ ID NO: 748; WAN024F7S_at; Start 66; Stop 90
agataagactgacctatataatcca

SEQ ID NO: 195414 - DNA, 25 bp, Artificial
  probe
  misc_feature (1)..(25): SEQ ID NO: 748; WAN024F7S_at; Start 17; Stop 41
aaactagcaagctagtagcagattg

SEQ ID NO: 195415 - DNA, 25 bp, Artificial
  probe
  misc_feature (1)..(25): SEQ ID NO: 748; WAN024F7S_at; Start 67; Stop 91
gataagactgacctatataatccaa

SEQ ID NO: 195416 - DNA, 25 bp, Artificial
  probe
  misc_feature (1)..(25): SEQ ID NO: 748; WAN024F7S_at; Start 64; Stop 88
gtagataagactgacctatataatc

SEQ ID NO: 195417 - DNA, 25 bp, Artificial
  probe
  misc_feature (1)..(25): SEQ ID NO: 748; WAN024F7S_at; Start 16; Stop 40
gaaactagcaagctagtagcagatt

SEQ ID NO: 195418 - DNA, 25 bp, Artificial
  probe
  misc_feature (1)..(25): SEQ ID NO: 748; WAN024F7S_at; Start 10; Stop 34
aaagaagaaactagcaagctagtag

SEQ ID NO: 195419 - DNA, 25 bp, Artificial
  probe
  misc_feature (1)..(25): SEQ ID NO: 748; WAN024F7S_at; Start 20; Stop 44
ctagcaagctagtagcagattgccc

SEQ ID NO: 195420 - DNA, 25 bp, Artificial
  probe
  misc_feature (1)..(25): SEQ ID NO: 748; WAN024F7S_at; Start 21; Stop 45
tagcaagctagtagcagattgccca

SEQ ID NO: 195421 - DNA, 25 bp, Artificial
  probe
  misc_feature (1)..(25): SEQ ID NO: 748; WAN024F7S_at; Start 29; Stop 53
tagtagcagattgcccaaaacaccg

SEQ ID NO: 195422 - DNA, 25 bp, Artificial
  probe
  misc_feature (1)..(25): SEQ ID NO: 748; WAN024F7S_at; Start 14; Stop 38
aagaaactagcaagctagtagcaga

SEQ ID NO: 195423 - DNA, 25 bp, Artificial
  probe
  misc_feature (1)..(25): SEQ ID NO: 748; WAN024F7S_at; Start 68; Stop 92
ataagactgacctatataatccaag

SEQ ID NO: 195424 - DNA, 25 bp, Artificial
  probe
  misc_feature (1)..(25): SEQ ID NO: 748; WAN024F7S_at; Start 69; Stop 93
taagactgacctatataatccaagg

SEQ ID NO: 195425 - DNA, 25 bp, Artificial
  probe
  misc_feature (1)..(25): SEQ ID NO: 748; WAN024F7S_at; Start 9; Stop 33
caaagaagaaactagcaagctagta

SEQ ID NO: 195426 - DNA, 25 bp, Artificial
  probe
  misc_feature (1)..(25): SEQ ID NO: 748; WAN024F7S_at; Start 13; Stop 37
gaagaaactagcaagctagtagcag

SEQ ID NO: 195427 - DNA, 25 bp, Artificial
  probe
  misc_feature (1)..(25): SEQ ID NO: 748; WAN024F7S_at; Start 65; Stop 89
tagataagactgacctatataatcc

SEQ ID NO: 195428 - DNA, 25 bp, Artificial
  probe
  misc_feature (1)..(25): SEQ ID NO: 748; WAN024F7S_at; Start 11; Stop 35
aagaagaaactagcaagctagtagc

SEQ ID NO: 195429 - DNA, 25 bp, Artificial
  probe
  misc_feature (1)..(25): SEQ ID NO: 748; WAN024F7S_at; Start 25; Stop 49
aagctagtagcagattgcccaaaac

SEQ ID NO: 195430 - DNA, 25 bp, Artificial
  probe
  misc_feature (1)..(25): SEQ ID NO: 4043; WAN024F7T_at; Start 62; Stop 86
ttgagtttttgtccagcctctgttt

SEQ ID NO: 195431 - DNA, 25 bp, Artificial
  probe
  misc_feature (1)..(25): SEQ ID NO: 4043; WAN024F7T_at; Start 61; Stop 85
attgagtttttgtccagcctctgtt

SEQ ID NO: 195432 - DNA, 25 bp, Artificial
  probe
  misc_feature (1)..(25): SEQ ID NO: 4043; WAN024F7T_at; Start 35; Stop 59
gaaggtttactccattttctcctga

SEQ ID NO: 195433 - DNA, 25 bp, Artificial
  probe
  misc_feature (1)..(25): SEQ ID NO: 4043; WAN024F7T_at; Start 63; Stop 87
tgagtttttgtccagcctctgtttt

SEQ ID NO: 195434 - DNA, 25 bp, Artificial
  probe
  misc_feature (1)..(25): SEQ ID NO: 4043; WAN024F7T_at; Start 60; Stop 84
aattgagtttttgtccagcctctgt

SEQ ID NO: 195435 - DNA, 25 bp, Artificial
  probe
  misc_feature (1)..(25): SEQ ID NO: 674; WAN024F7U_at; Start 431; Stop 455
atagcgaccttctcaaacctgaact

SEQ ID NO: 195436 - DNA, 25 bp, Artificial
  probe
  misc_feature (1)..(25): SEQ ID NO: 674; WAN024F7U_at; Start 422; Stop 446
tcgaaggatatagcgaccttctcaa

SEQ ID NO: 195437 - DNA, 25 bp, Artificial
  probe
  misc_feature (1)..(25): SEQ ID NO: 674; WAN024F7U_at; Start 419; Stop 443
acatcgaaggatatagcgaccttct

SEQ ID NO: 195438 - DNA, 25 bp, Artificial
  probe
  misc_feature (1)..(25): SEQ ID NO: 674; WAN024F7U_at; Start 429; Stop 453
atatagcgaccttctcaaacctgaa

SEQ ID NO: 195439 - DNA, 25 bp, Artificial
  probe
  misc_feature (1)..(25): SEQ ID NO: 674; WAN024F7U_at; Start 427; Stop 451
ggatatagcgaccttctcaaacctg

SEQ ID NO: 195440 - DNA, 25 bp, Artificial
  probe
  misc_feature (1)..(25): SEQ ID NO: 674; WAN024F7U_at; Start 420; Stop 444
catcgaaggatatagcgaccttctc

SEQ ID NO: 195441 - DNA, 25 bp, Artificial
  probe
  misc_feature (1)..(25): SEQ ID NO: 674; WAN024F7U_at; Start 428; Stop 452
gatatagcgaccttctcaaacctga

SEQ ID NO: 195442 - DNA, 25 bp, Artificial
  probe
  misc_feature (1)..(25): SEQ ID NO: 674; WAN024F7U_at; Start 426; Stop 450
aggatatagcgaccttctcaaacct

SEQ ID NO: 195443 - DNA, 25 bp, Artificial
  probe
  misc_feature (1)..(25): SEQ ID NO: 674; WAN024F7U_at; Start 586; Stop 610
cttattgatggtatagtaaaatgaa

SEQ ID NO: 195444 - DNA, 25 bp, Artificial
  probe
  misc_feature (1)..(25): SEQ ID NO: 674; WAN024F7U_at; Start 421; Stop 445
atcgaaggatatagcgaccttctca

SEQ ID NO: 195445 - DNA, 25 bp, Artificial
  probe
  misc_feature (1)..(25): SEQ ID NO: 674; WAN024F7U_at; Start 433; Stop 457
agcgaccttctcaaacctgaactaa

SEQ ID NO: 195446 - DNA, 25 bp, Artificial
  probe
  misc_feature (1)..(25): SEQ ID NO: 674; WAN024F7U_at; Start 585; Stop 609
acttattgatggtatagtaaaatga

SEQ ID NO: 195447 - DNA, 25 bp, Artificial
  probe
  misc_feature (1)..(25): SEQ ID NO: 674; WAN024F7U_at; Start 584; Stop 608
cacttattgatggtatagtaaaatg

SEQ ID NO: 195448 - DNA, 25 bp, Artificial
  probe
  misc_feature (1)..(25): SEQ ID NO: 674; WAN024F7U_at; Start 430; Stop 454
tatagcgaccttctcaaacctgaac

SEQ ID NO: 195449 - DNA, 25 bp, Artificial
  probe
  misc_feature (1)..(25): SEQ ID NO: 674; WAN024F7U_at; Start 432; Stop 456
tagcgaccttctcaaacctgaacta

SEQ ID NO: 195450 - DNA, 25 bp, Artificial
  probe
  misc_feature (1)..(25): SEQ ID NO: 674; WAN024F7U_at; Start 425; Stop 449
aaggatatagcgaccttctcaaacc

SEQ ID NO: 195451 - DNA, 25 bp, Artificial
  probe
  misc_feature (1)..(25): SEQ ID NO: 674; WAN024F7U_at; Start 423; Stop 447
cgaaggatatagcgaccttctcaaa

SEQ ID NO: 195452 - DNA, 25 bp, Artificial
  probe
  misc_feature (1)..(25): SEQ ID NO: 674; WAN024F7U_at; Start 424; Stop 448
gaaggatatagcgaccttctcaaac

SEQ ID NO: 195453 - DNA, 25 bp, Artificial
  probe
  misc_feature (1)..(25): SEQ ID NO: 674; WAN024F7U_at; Start 587; Stop 611
ttattgatggtatagtaaaatgaaa

SEQ ID NO: 195454 - DNA, 25 bp, Artificial
  probe
  misc_feature (1)..(25): SEQ ID NO: 1749; WAN024F7V_at; Start 203; Stop 227
aattgggagagtatcaaggaagtca

SEQ ID NO: 195455 - DNA, 25 bp, Artificial
  probe
  misc_feature (1)..(25): SEQ ID NO: 1749; WAN024F7V_at; Start 2; Stop 26
tgatgccagctaatacgaaagttat

SEQ ID NO: 195456 - DNA, 25 bp, Artificial
  probe
  misc_feature (1)..(25): SEQ ID NO: 1749; WAN024F7V_at; Start 99; Stop 123
ggattcgcaaggatttaaaagtcgc

SEQ ID NO: 195457 - DNA, 25 bp, Artificial
  probe
  misc_feature (1)..(25): SEQ ID NO: 1749; WAN024F7V_at; Start 397; Stop 421
gattattataatatattggtgcatg

SEQ ID NO: 195458 - DNA, 25 bp, Artificial
  probe
  misc_feature (1)..(25): SEQ ID NO: 1749; WAN024F7V_at; Start 361; Stop 385
caagatgctagtttatcagccttat

SEQ ID NO: 195459 - DNA, 25 bp, Artificial
  probe
  misc_feature (1)..(25): SEQ ID NO: 1749; WAN024F7V_at; Start 51; Stop 75
tcagaactattatgttctgattggg

SEQ ID NO: 195460 - DNA, 25 bp, Artificial
  probe
  misc_feature (1)..(25): SEQ ID NO: 1749; WAN024F7V_at; Start 106; Stop 130
caaggatttaaaagtcgcacaacaa

SEQ ID NO: 195461 - DNA, 25 bp, Artificial
  probe
  misc_feature (1)..(25): SEQ ID NO: 1749; WAN024F7V_at; Start 197; Stop 221
ttttagaattgggagagtatcaagg

SEQ ID NO: 195462 - DNA, 25 bp, Artificial
  probe
  misc_feature (1)..(25): SEQ ID NO: 1749; WAN024F7V_at; Start 225; Stop 249
tcagaaagatgagaaagcgcagctt

SEQ ID NO: 195463 - DNA, 25 bp, Artificial
  probe
  misc_feature (1)..(25): SEQ ID NO: 1749; WAN024F7V_at; Start 221; Stop 245
gaagtcagaaagatgagaaagcgca

SEQ ID NO: 195464 - DNA, 25 bp, Artificial
  probe
  misc_feature (1)..(25): SEQ ID NO: 1749; WAN024F7V_at; Start 307; Stop 331
ttaccagaatatccattaaagaagg

SEQ ID NO: 195465 - DNA, 25 bp, Artificial
  probe
  misc_feature (1)..(25): SEQ ID NO: 1749; WAN024F7V_at; Start 320; Stop 344
cattaaagaaggacggtcgagaaat

SEQ ID NO: 195466 - DNA, 25 bp, Artificial
  probe
  misc_feature (1)..(25): SEQ ID NO: 1749; WAN024F7V_at; Start 313; Stop 337
gaatatccattaaagaaggacggtc

SEQ ID NO: 195467 - DNA, 25 bp, Artificial
  probe
  misc_feature (1)..(25): SEQ ID NO: 1749; WAN024F7V_at; Start 8; Stop 32
cagctaatacgaaagttatttttca

SEQ ID NO: 195468 - DNA, 25 bp, Artificial
  probe
  misc_feature (1)..(25): SEQ ID NO: 1749; WAN024F7V_at; Start 86; Stop 110
cctctatcgtattggattcgcaagg

SEQ ID NO: 195469 - DNA, 25 bp, Artificial
  probe
  misc_feature (1)..(25): SEQ ID NO: 1749; WAN024F7V_at; Start 377; Stop 401
cagccttattattggatgaagatta

SEQ ID NO: 195470 - DNA, 25 bp, Artificial
  probe
  misc_feature (1)..(25): SEQ ID NO: 1749; WAN024F7V_at; Start 316; Stop 340
tatccattaaagaaggacggtcgag

SEQ ID NO: 195471 - DNA, 25 bp, Artificial
  probe
  misc_feature (1)..(25): SEQ ID NO: 1749; WAN024F7V_at; Start 229; Stop 253
aaagatgagaaagcgcagctttttc

SEQ ID NO: 195472 - DNA, 25 bp, Artificial
  probe
  misc_feature (1)..(25): SEQ ID NO: 1749; WAN024F7V_at; Start 209; Stop 233
gagagtatcaaggaagtcagaaaga

SEQ ID NO: 195473 - DNA, 25 bp, Artificial
  probe
  misc_feature (1)..(25): SEQ ID NO: 1749; WAN024F7V_at; Start 115; Stop 139
aaaagtcgcacaacaaaagattatg

SEQ ID NO: 195474 - DNA, 25 bp, Artificial
  probe
  misc_feature (1)..(25): SEQ ID NO: 1749; WAN024F7V_at; Start 81; Stop 105
tgctacctctatcgtattggattcg

SEQ ID NO: 195475 - DNA, 25 bp, Artificial
  probe
  misc_feature (1)..(25): SEQ ID NO: 1749; WAN024F7V_at; Start 170; Stop 194
aggaattttatactaccttgaatca

SEQ ID NO: 195476 - DNA, 25 bp, Artificial
  probe
  misc_feature (1)..(25): SEQ ID NO: 1749; WAN024F7V_at; Start 440; Stop 464
ggtattcggtattgagtaattgtgg

SEQ ID NO: 195477 - DNA, 25 bp, Artificial
  probe
  misc_feature (1)..(25): SEQ ID NO: 1749; WAN024F7V_at; Start 31; Stop 55
caagaaatgtttgcggattttcaga

SEQ ID NO: 195478 - DNA, 25 bp, Artificial
  probe
  misc_feature (1)..(25): SEQ ID NO: 1749; WAN024F7V_at; Start 23; Stop 47
ttatttttcaagaaatgtttgcgga

SEQ ID NO: 195479 - DNA, 25 bp, Artificial
  probe
  misc_feature (1)..(25): SEQ ID NO: 1749; WAN024F7V_at; Start 35; Stop 59
aaatgtttgcggattttcagaacta

SEQ ID NO: 195480 - DNA, 25 bp, Artificial
  probe
  misc_feature (1)..(25): SEQ ID NO: 1749; WAN024F7V_at; Start 42; Stop 66
tgcggattttcagaactattatgtt

SEQ ID NO: 195481 - DNA, 25 bp, Artificial
  probe
  misc_feature (1)..(25): SEQ ID NO: 1749; WAN024F7V_at; Start 104; Stop 128
cgcaaggatttaaaagtcgcacaac

SEQ ID NO: 195482 - DNA, 25 bp, Artificial
  probe
  misc_feature (1)..(25): SEQ ID NO: 1749; WAN024F7V_at; Start 75; Stop 99
gggaactgctacctctatcgtattg

SEQ ID NO: 195483 - DNA, 25 bp, Artificial
  probe
  misc_feature (1)..(25): SEQ ID NO: 1749; WAN024F7V_at; Start 77; Stop 101
gaactgctacctctatcgtattgga

SEQ ID NO: 195484 - DNA, 25 bp, Artificial
  probe
  misc_feature (1)..(25): SEQ ID NO: 1749; WAN024F7V_at; Start 214; Stop 238
tatcaaggaagtcagaaagatgaga

SEQ ID NO: 195485 - DNA, 25 bp, Artificial
  probe
  misc_feature (1)..(25): SEQ ID NO: 1749; WAN024F7V_at; Start 123; Stop 147
cacaacaaaagattatgatatggtc

SEQ ID NO: 195486 - DNA, 25 bp, Artificial
  probe
  misc_feature (1)..(25): SEQ ID NO: 1749; WAN024F7V_at; Start 374; Stop 398
tatcagccttattattggatgaaga

SEQ ID NO: 195487 - DNA, 25 bp, Artificial
  probe
  misc_feature (1)..(25): SEQ ID NO: 1749; WAN024F7V_at; Start 136; Stop 160
tatgatatggtcatcattgatgaag

SEQ ID NO: 195488 - DNA, 25 bp, Artificial
  probe
  misc_feature (1)..(25): SEQ ID NO: 4303; WAN024F7W_at; Start 103; Stop 127
atacaagaagataacttcttgaaaa

SEQ ID NO: 195489 - DNA, 25 bp, Artificial
  probe
  misc_feature (1)..(25): SEQ ID NO: 4303; WAN024F7W_at; Start 102; Stop 126
aatacaagaagataacttcttgaaa

SEQ ID NO: 195490 - DNA, 25 bp, Artificial
  probe
  misc_feature (1)..(25): SEQ ID NO: 4303; WAN024F7W_at; Start 89; Stop 113
tcattgagtataaaatacaagaaga

SEQ ID NO: 195491 - DNA, 25 bp, Artificial
  probe
  misc_feature (1)..(25): SEQ ID NO: 4303; WAN024F7W_at; Start 104; Stop 128
tacaagaagataacttcttgaaaaa

SEQ ID NO: 195492 - DNA, 25 bp, Artificial
  probe
  misc_feature (1)..(25): SEQ ID NO: 4101; WAN024F7X_at; Start 48; Stop 72
tgctgaaattgggctcttgcccaag

SEQ ID NO: 195493 - DNA, 25 bp, Artificial
  probe
  misc_feature (1)..(25): SEQ ID NO: 4101; WAN024F7X_at; Start 51; Stop 75
tgaaattgggctcttgcccaagctc

SEQ ID NO: 195494 - DNA, 25 bp, Artificial
  probe
  misc_feature (1)..(25): SEQ ID NO: 4101; WAN024F7X_at; Start 41; Stop 65
cattttttgctgaaattgggctctt

SEQ ID NO: 195495 - DNA, 25 bp, Artificial
  probe
  misc_feature (1)..(25): SEQ ID NO: 4101; WAN024F7X_at; Start 49; Stop 73
gctgaaattgggctcttgcccaagc

SEQ ID NO: 195496 - DNA, 25 bp, Artificial
  probe
  misc_feature (1)..(25): SEQ ID NO: 4101; WAN024F7X_at; Start 40; Stop 64
tcattttttgctgaaattgggctct

SEQ ID NO: 195497 - DNA, 25 bp, Artificial
  probe
  misc_feature (1)..(25): SEQ ID NO: 4101; WAN024F7X_at; Start 44; Stop 68
tttttgctgaaattgggctcttgcc

SEQ ID NO: 195498 - DNA, 25 bp, Artificial
  probe
  misc_feature (1)..(25): SEQ ID NO: 4101; WAN024F7X_at; Start 55; Stop 79
attgggctcttgcccaagctctatc

SEQ ID NO: 195499 - DNA, 25 bp, Artificial
  probe
  misc_feature (1)..(25): SEQ ID NO: 4101; WAN024F7X_at; Start 47; Stop 71
ttgctgaaattgggctcttgcccaa

SEQ ID NO: 195500 - DNA, 25 bp, Artificial
  probe
  misc_feature (1)..(25): SEQ ID NO: 4101; WAN024F7X_at; Start 46; Stop 70
tttgctgaaattgggctcttgccca

SEQ ID NO: 195501 - DNA, 25 bp, Artificial
  probe
  misc_feature (1)..(25): SEQ ID NO: 4101; WAN024F7X_at; Start 33; Stop 57
atttacttcattttttgctgaaatt

SEQ ID NO: 195502 - DNA, 25 bp, Artificial
  probe
  misc_feature (1)..(25): SEQ ID NO: 4101; WAN024F7X_at; Start 50; Stop 74
ctgaaattgggctcttgcccaagct

SEQ ID NO: 195503 - DNA, 25 bp, Artificial
  probe
  misc_feature (1)..(25): SEQ ID NO: 4101; WAN024F7X_at; Start 39; Stop 63
ttcattttttgctgaaattgggctc

SEQ ID NO: 195504 - DNA, 25 bp, Artificial
  probe
  misc_feature (1)..(25): SEQ ID NO: 4101; WAN024F7X_at; Start 32; Stop 56
gatttacttcattttttgctgaaat

SEQ ID NO: 195505 - DNA, 25 bp, Artificial
  probe
  misc_feature (1)..(25): SEQ ID NO: 4101; WAN024F7X_at; Start 56; Stop 80
ttgggctcttgcccaagctctatca

SEQ ID NO: 195506 - DNA, 25 bp, Artificial
  probe
  misc_feature (1)..(25): SEQ ID NO: 4101; WAN024F7X_at; Start 38; Stop 62
cttcattttttgctgaaattgggct

SEQ ID NO: 195507 - DNA, 25 bp, Artificial
  probe
  misc_feature (1)..(25): SEQ ID NO: 4101; WAN024F7X_at; Start 37; Stop 61
acttcattttttgctgaaattgggc

SEQ ID NO: 195508 - DNA, 25 bp, Artificial
  probe
  misc_feature (1)..(25): SEQ ID NO: 4101; WAN024F7X_at; Start 52; Stop 76
gaaattgggctcttgcccaagctct

SEQ ID NO: 195509 - DNA, 25 bp, Artificial
  probe
  misc_feature (1)..(25): SEQ ID NO: 4101; WAN024F7X_at; Start 57; Stop 81
tgggctcttgcccaagctctatcaa

SEQ ID NO: 195510 - DNA, 25 bp, Artificial
  probe
  misc_feature (1)..(25): SEQ ID NO: 4101; WAN024F7X_at; Start 35; Stop 59
ttacttcattttttgctgaaattgg

SEQ ID NO: 195511 - DNA, 25 bp, Artificial
  probe
  misc_feature (1)..(25): SEQ ID NO: 4101; WAN024F7X_at; Start 53; Stop 77
aaattgggctcttgcccaagctcta

SEQ ID NO: 195512 - DNA, 25 bp, Artificial
  probe
  misc_feature (1)..(25): SEQ ID NO: 4101; WAN024F7X_at; Start 42; Stop 66
attttttgctgaaattgggctcttg

SEQ ID NO: 195513 - DNA, 25 bp, Artificial
  probe
  misc_feature (1)..(25): SEQ ID NO: 4101; WAN024F7X_at; Start 36; Stop 60
tacttcattttttgctgaaattggg

SEQ ID NO: 195514 - DNA, 25 bp, Artificial
  probe
  misc_feature (1)..(25): SEQ ID NO: 4101; WAN024F7X_at; Start 45; Stop 69
ttttgctgaaattgggctcttgccc

SEQ ID NO: 195515 - DNA, 25 bp, Artificial
  probe
  misc_feature (1)..(25): SEQ ID NO: 4101; WAN024F7X_at; Start 54; Stop 78
aattgggctcttgcccaagctctat

SEQ ID NO: 195516 - DNA, 25 bp, Artificial
  probe
  misc_feature (1)..(25): SEQ ID NO: 4101; WAN024F7X_at; Start 34; Stop 58
tttacttcattttttgctgaaattg

SEQ ID NO: 195517 - DNA, 25 bp, Artificial
  probe
  misc_feature (1)..(25): SEQ ID NO: 4101; WAN024F7X_at; Start 43; Stop 67
ttttttgctgaaattgggctcttgc

SEQ ID NO: 195518 - DNA, 25 bp, Artificial
  probe
  misc_feature (1)..(25): SEQ ID NO: 5789; WAN024F7Y_x_at; Start 127; Stop 151
aaggagaagctgatgtggtttgaag

SEQ ID NO: 195519 - DNA, 25 bp, Artificial
  probe
  misc_feature (1)..(25): SEQ ID NO: 5789; WAN024F7Y_x_at; Start 120; Stop 144
tgtagataaggagaagctgatgtgg

SEQ ID NO: 195520 - DNA, 25 bp, Artificial
  probe
  misc_feature (1)..(25): SEQ ID NO: 5789; WAN024F7Y_x_at; Start 66; Stop 90
ttttgagatggttgatagaactgac

SEQ ID NO: 195521 - DNA, 25 bp, Artificial
  probe
  misc_feature (1)..(25): SEQ ID NO: 5789; WAN024F7Y_x_at; Start 128; Stop 152
aggagaagctgatgtggtttgaaga

SEQ ID NO: 195522 - DNA, 25 bp, Artificial
  probe
  misc_feature (1)..(25): SEQ ID NO: 5789; WAN024F7Y_x_at; Start 69; Stop 93
tgagatggttgatagaactgacgaa

SEQ ID NO: 195523 - DNA, 25 bp, Artificial
  probe
  misc_feature (1)..(25): SEQ ID NO: 5789; WAN024F7Y_x_at; Start 78; Stop 102
tgatagaactgacgaagtcagctca

SEQ ID NO: 195524 - DNA, 25 bp, Artificial
  probe
  misc_feature (1)..(25): SEQ ID NO: 5789; WAN024F7Y_x_at; Start 118; Stop 142
gttgtagataaggagaagctgatgt

SEQ ID NO: 195525 - DNA, 25 bp, Artificial
  probe
  misc_feature (1)..(25): SEQ ID NO: 5789; WAN024F7Y_x_at; Start 73; Stop 97
atggttgatagaactgacgaagtca

SEQ ID NO: 195526 - DNA, 25 bp, Artificial
  probe
  misc_feature (1)..(25): SEQ ID NO: 5789; WAN024F7Y_x_at; Start 67; Stop 91
tttgagatggttgatagaactgacg

SEQ ID NO: 195527 - DNA, 25 bp, Artificial
  probe
  misc_feature (1)..(25): SEQ ID NO: 5789; WAN024F7Y_x_at; Start 133; Stop 157
aagctgatgtggtttgaagaggttt

SEQ ID NO: 195528 - DNA, 25 bp, Artificial
  probe
  misc_feature (1)..(25): SEQ ID NO: 5789; WAN024F7Y_x_at; Start 126; Stop 150
taaggagaagctgatgtggtttgaa

SEQ ID NO: 195529 - DNA, 25 bp, Artificial
  probe
  misc_feature (1)..(25): SEQ ID NO: 5789; WAN024F7Y_x_at; Start 77; Stop 101
ttgatagaactgacgaagtcagctc

SEQ ID NO: 195530 - DNA, 25 bp, Artificial
  probe
  misc_feature (1)..(25): SEQ ID NO: 5789; WAN024F7Y_x_at; Start 116; Stop 140
aggttgtagataaggagaagctgat

SEQ ID NO: 195531 - DNA, 25 bp, Artificial
  probe
  misc_feature (1)..(25): SEQ ID NO: 5789; WAN024F7Y_x_at; Start 117; Stop 141
ggttgtagataaggagaagctgatg

SEQ ID NO: 195532 - DNA, 25 bp, Artificial
  probe
  misc_feature (1)..(25): SEQ ID NO: 5789; WAN024F7Y_x_at; Start 5; Stop 29
tagaaatcgatttgactgtcctgat

SEQ ID NO: 195533 - DNA, 25 bp, Artificial
  probe
  misc_feature (1)..(25): SEQ ID NO: 5789; WAN024F7Y_x_at; Start 71; Stop 95
agatggttgatagaactgacgaagt

SEQ ID NO: 195534 - DNA, 25 bp, Artificial
  probe
  misc_feature (1)..(25): SEQ ID NO: 5789; WAN024F7Y_x_at; Start 64; Stop 88
agttttgagatggttgatagaactg

SEQ ID NO: 195535 - DNA, 25 bp, Artificial
  probe
  misc_feature (1)..(25): SEQ ID NO: 5789; WAN024F7Y_x_at; Start 65; Stop 89
gttttgagatggttgatagaactga

SEQ ID NO: 195536 - DNA, 25 bp, Artificial
  probe
  misc_feature (1)..(25): SEQ ID NO: 5789; WAN024F7Y_x_at; Start 121; Stop 145
gtagataaggagaagctgatgtggt

SEQ ID NO: 195537 - DNA, 25 bp, Artificial
  probe
  misc_feature (1)..(25): SEQ ID NO: 5789; WAN024F7Y_x_at; Start 125; Stop 149
ataaggagaagctgatgtggtttga

SEQ ID NO: 195538 - DNA, 25 bp, Artificial
  probe
  misc_feature (1)..(25): SEQ ID NO: 5789; WAN024F7Y_x_at; Start 147; Stop 171
tgaagaggttttcgaagagtgtaaa

SEQ ID NO: 195539 - DNA, 25 bp, Artificial
  probe
  misc_feature (1)..(25): SEQ ID NO: 5789; WAN024F7Y_x_at; Start 75; Stop 99
ggttgatagaactgacgaagtcagc

SEQ ID NO: 195540 - DNA, 25 bp, Artificial
  probe
  misc_feature (1)..(25): SEQ ID NO: 5789; WAN024F7Y_x_at; Start 72; Stop 96
gatggttgatagaactgacgaagtc

SEQ ID NO: 195541 - DNA, 25 bp, Artificial
  probe
  misc_feature (1)..(25): SEQ ID NO: 5789; WAN024F7Y_x_at; Start 68; Stop 92
ttgagatggttgatagaactgacga

SEQ ID NO: 195542 - DNA, 25 bp, Artificial
  probe
  misc_feature (1)..(25): SEQ ID NO: 5789; WAN024F7Y_x_at; Start 123; Stop 147
agataaggagaagctgatgtggttt

SEQ ID NO: 195543 - DNA, 25 bp, Artificial
  probe
  misc_feature (1)..(25): SEQ ID NO: 5789; WAN024F7Y_x_at; Start 76; Stop 100
gttgatagaactgacgaagtcagct

SEQ ID NO: 195544 - DNA, 25 bp, Artificial
  probe
  misc_feature (1)..(25): SEQ ID NO: 5789; WAN024F7Y_x_at; Start 79; Stop 103
gatagaactgacgaagtcagctcaa

SEQ ID NO: 195545 - DNA, 25 bp, Artificial
  probe
  misc_feature (1)..(25): SEQ ID NO: 5789; WAN024F7Y_x_at; Start 122; Stop 146
tagataaggagaagctgatgtggtt

SEQ ID NO: 195546 - DNA, 25 bp, Artificial
  probe
  misc_feature (1)..(25): SEQ ID NO: 5789; WAN024F7Y_x_at; Start 119; Stop 143
ttgtagataaggagaagctgatgtg

SEQ ID NO: 195547 - DNA, 25 bp, Artificial
  probe
  misc_feature (1)..(25): SEQ ID NO: 5789; WAN024F7Y_x_at; Start 74; Stop 98
tggttgatagaactgacgaagtcag

SEQ ID NO: 195548 - DNA, 25 bp, Artificial
  probe
  misc_feature (1)..(25): SEQ ID NO: 5789; WAN024F7Y_x_at; Start 124; Stop 148
gataaggagaagctgatgtggtttg

SEQ ID NO: 195549 - DNA, 25 bp, Artificial
  probe
  misc_feature (1)..(25): SEQ ID NO: 5789; WAN024F7Y_x_at; Start 4; Stop 28
ttagaaatcgatttgactgtcctga

SEQ ID NO: 195550 - DNA, 25 bp, Artificial
  probe
  misc_feature (1)..(25): SEQ ID NO: 5789; WAN024F7Y_x_at; Start 70; Stop 94
gagatggttgatagaactgacgaag

SEQ ID NO: 195551 - DNA, 25 bp, Artificial
  probe
  misc_feature (1)..(25): SEQ ID NO: 5789; WAN024F7Y_x_at; Start 3; Stop 27
gttagaaatcgatttgactgtcctg

SEQ ID NO: 195552 - DNA, 25 bp, Artificial
  probe
  misc_feature (1)..(25): SEQ ID NO: 4880; WAN024F7Z_at; Start 310; Stop 334
ttgtcaggacgatttaaaagagatt

SEQ ID NO: 195553 - DNA, 25 bp, Artificial
  probe
  misc_feature (1)..(25): SEQ ID NO: 4880; WAN024F7Z_at; Start 399; Stop 423
tccaacacgcttacaaatgccaaac

SEQ ID NO: 195554 - DNA, 25 bp, Artificial
  probe
  misc_feature (1)..(25): SEQ ID NO: 4880; WAN024F7Z_at; Start 377; Stop 401
caattaaaaagagtggatcatatcc

SEQ ID NO: 195555 - DNA, 25 bp, Artificial
  probe
  misc_feature (1)..(25): SEQ ID NO: 4880; WAN024F7Z_at; Start 412; Stop 436
caaatgccaaacatgcagtaagaat

SEQ ID NO: 195556 - DNA, 25 bp, Artificial
  probe
  misc_feature (1)..(25): SEQ ID NO: 4880; WAN024F7Z_at; Start 144; Stop 168
cctttttgaggaagagtctccatct

SEQ ID NO: 195557 - DNA, 25 bp, Artificial
  probe
  misc_feature (1)..(25): SEQ ID NO: 4880; WAN024F7Z_at; Start 382; Stop 406
aaaaagagtggatcatatccaacac

SEQ ID NO: 195558 - DNA, 25 bp, Artificial
  probe
  misc_feature (1)..(25): SEQ ID NO: 4880; WAN024F7Z_at; Start 418; Stop 442
ccaaacatgcagtaagaataatcca

SEQ ID NO: 195559 - DNA, 25 bp, Artificial
  probe
  misc_feature (1)..(25): SEQ ID NO: 4880; WAN024F7Z_at; Start 443; Stop 467
agtgataaaattgtaaaagctccta

SEQ ID NO: 195560 - DNA, 25 bp, Artificial
  probe
  misc_feature (1)..(25): SEQ ID NO: 4880; WAN024F7Z_at; Start 433; Stop 457
gaataatccaagtgataaaattgta

SEQ ID NO: 195561 - DNA, 25 bp, Artificial
  probe
  misc_feature (1)..(25): SEQ ID NO: 4880; WAN024F7Z_at; Start 402; Stop 426
aacacgcttacaaatgccaaacatg

SEQ ID NO: 195562 - DNA, 25 bp, Artificial
  probe
  misc_feature (1)..(25): SEQ ID NO: 4880; WAN024F7Z_at; Start 410; Stop 434
tacaaatgccaaacatgcagtaaga

SEQ ID NO: 195563 - DNA, 25 bp, Artificial
  probe
  misc_feature (1)..(25): SEQ ID NO: 4880; WAN024F7Z_at; Start 145; Stop 169
ctttttgaggaagagtctccatctg

SEQ ID NO: 195564 - DNA, 25 bp, Artificial
  probe
  misc_feature (1)..(25): SEQ ID NO: 4880; WAN024F7Z_at; Start 147; Stop 171
ttttgaggaagagtctccatctgag

SEQ ID NO: 195565 - DNA, 25 bp, Artificial
  probe
  misc_feature (1)..(25): SEQ ID NO: 4880; WAN024F7Z_at; Start 407; Stop 431
gcttacaaatgccaaacatgcagta

SEQ ID NO: 195566 - DNA, 25 bp, Artificial
  probe
  misc_feature (1)..(25): SEQ ID NO: 4880; WAN024F7Z_at; Start 314; Stop 338
caggacgatttaaaagagattggag

SEQ ID NO: 195567 - DNA, 25 bp, Artificial
  probe
  misc_feature (1)..(25): SEQ ID NO: 4880; WAN024F7Z_at; Start 375; Stop 399
cgcaattaaaaagagtggatcatat

SEQ ID NO: 195568 - DNA, 25 bp, Artificial
  probe
  misc_feature (1)..(25): SEQ ID NO: 4880; WAN024F7Z_at; Start 312; Stop 336
gtcaggacgatttaaaagagattgg

SEQ ID NO: 195569 - DNA, 25 bp, Artificial
  probe
  misc_feature (1)..(25): SEQ ID NO: 4880; WAN024F7Z_at; Start 441; Stop 465
caagtgataaaattgtaaaagctcc

SEQ ID NO: 195570 - DNA, 25 bp, Artificial
  probe
  misc_feature (1)..(25): SEQ ID NO: 4880; WAN024F7Z_at; Start 373; Stop 397
tgcgcaattaaaaagagtggatcat

SEQ ID NO: 195571 - DNA, 25 bp, Artificial
  probe
  misc_feature (1)..(25): SEQ ID NO: 4880; WAN024F7Z_at; Start 425; Stop 449
tgcagtaagaataatccaagtgata

SEQ ID NO: 195572 - DNA, 25 bp, Artificial
  probe
  misc_feature (1)..(25): SEQ ID NO: 4880; WAN024F7Z_at; Start 308; Stop 332
gattgtcaggacgatttaaaagaga

SEQ ID NO: 195573 - DNA, 25 bp, Artificial
  probe
  misc_feature (1)..(25): SEQ ID NO: 4880; WAN024F7Z_at; Start 427; Stop 451
cagtaagaataatccaagtgataaa

SEQ ID NO: 195574 - DNA, 25 bp, Artificial
  probe
  misc_feature (1)..(25): SEQ ID NO: 4880; WAN024F7Z_at; Start 303; Stop 327
gccctgattgtcaggacgatttaaa

SEQ ID NO: 195575 - DNA, 25 bp, Artificial
  probe
  misc_feature (1)..(25): SEQ ID NO: 4880; WAN024F7Z_at; Start 421; Stop 445
aacatgcagtaagaataatccaagt

SEQ ID NO: 195576 - DNA, 25 bp, Artificial
  probe
  misc_feature (1)..(25): SEQ ID NO: 4880; WAN024F7Z_at; Start 417; Stop 441
gccaaacatgcagtaagaataatcc

SEQ ID NO: 195577 - DNA, 25 bp, Artificial
  probe
  misc_feature (1)..(25): SEQ ID NO: 4880; WAN024F7Z_at; Start 419; Stop 443
caaacatgcagtaagaataatccaa

SEQ ID NO: 195578 - DNA, 25 bp, Artificial
  probe
  misc_feature (1)..(25): SEQ ID NO: 4880; WAN024F7Z_at; Start 380; Stop 404
ttaaaaagagtggatcatatccaac

SEQ ID NO: 195579 - DNA, 25 bp, Artificial
  probe
  misc_feature (1)..(25): SEQ ID NO: 4880; WAN024F7Z_at; Start 305; Stop 329
cctgattgtcaggacgatttaaaag

SEQ ID NO: 195580 - DNA, 25 bp, Artificial
  probe
  misc_feature (1)..(25): SEQ ID NO: 4880; WAN024F7Z_at; Start 404; Stop 428
cacgcttacaaatgccaaacatgca

SEQ ID NO: 195581 - DNA, 25 bp, Artificial
  probe
  misc_feature (1)..(25): SEQ ID NO: 4880; WAN024F7Z_at; Start 423; Stop 447
catgcagtaagaataatccaagtga

SEQ ID NO: 195582 - DNA, 25 bp, Artificial
  probe
  misc_feature (1)..(25): SEQ ID NO: 4880; WAN024F7Z_at; Start 405; Stop 429
acgcttacaaatgccaaacatgcag

SEQ ID NO: 195583 - DNA, 25 bp, Artificial
  probe
  misc_feature (1)..(25): SEQ ID NO: 4880; WAN024F7Z_at; Start 371; Stop 395
cctgcgcaattaaaaagagtggatc

SEQ ID NO: 195584 - DNA, 25 bp, Artificial
  probe
  misc_feature (1)..(25): SEQ ID NO: 4880; WAN024F7Z_at; Start 446; Stop 470
gataaaattgtaaaagctcctattc

SEQ ID NO: 195585 - DNA, 25 bp, Artificial
  probe
  misc_feature (1)..(25): SEQ ID NO: 4880; WAN024F7Z_at; Start 372; Stop 396
ctgcgcaattaaaaagagtggatca

SEQ ID NO: 195586 - DNA, 25 bp, Artificial
  probe
  misc_feature (1)..(25): SEQ ID NO: 4246; WAN024F82_at; Start 76; Stop 100
aaaaagttggagtatatgatgctag

SEQ ID NO: 195587 - DNA, 25 bp, Artificial
  probe
  misc_feature (1)..(25): SEQ ID NO: 4246; WAN024F82_at; Start 426; Stop 450
taattcttctgctattgatccaatc

SEQ ID NO: 195588 - DNA, 25 bp, Artificial
  probe
  misc_feature (1)..(25): SEQ ID NO: 4246; WAN024F82_at; Start 93; Stop 117
gatgctaggtgactgcgtcatgtta

SEQ ID NO: 195589 - DNA, 25 bp, Artificial
  probe
  misc_feature (1)..(25): SEQ ID NO: 4246; WAN024F82_at; Start 255; Stop 279
tcaaccgagtgggtactggataggt

SEQ ID NO: 195590 - DNA, 25 bp, Artificial
  probe
  misc_feature (1)..(25): SEQ ID NO: 4246; WAN024F82_at; Start 358; Stop 382
gatggcttttatgaattctatcaaa

SEQ ID NO: 195591 - DNA, 25 bp, Artificial
  probe
  misc_feature (1)..(25): SEQ ID NO: 4246; WAN024F82_at; Start 245; Stop 269
aattatctaatcaaccgagtgggta

SEQ ID NO: 195592 - DNA, 25 bp, Artificial
  probe
  misc_feature (1)..(25): SEQ ID NO: 4246; WAN024F82_at; Start 280; Stop 304
tcgttggatgagagatttttagacc

SEQ ID NO: 195593 - DNA, 25 bp, Artificial
  probe
  misc_feature (1)..(25): SEQ ID NO: 4246; WAN024F82_at; Start 286; Stop 310
gatgagagatttttagaccatgcta

SEQ ID NO: 195594 - DNA, 25 bp, Artificial
  probe
  misc_feature (1)..(25): SEQ ID NO: 4246; WAN024F82_at; Start 81; Stop 105
gttggagtatatgatgctaggtgac

SEQ ID NO: 195595 - DNA, 25 bp, Artificial
  probe
  misc_feature (1)..(25): SEQ ID NO: 4246; WAN024F82_at; Start 250; Stop 274
tctaatcaaccgagtgggtactgga

SEQ ID NO: 195596 - DNA, 25 bp, Artificial
  probe
  misc_feature (1)..(25): SEQ ID NO: 4246; WAN024F82_at; Start 111; Stop 135
catgttagtaaacgaaatggaaata

SEQ ID NO: 195597 - DNA, 25 bp, Artificial
  probe
  misc_feature (1)..(25): SEQ ID NO: 4246; WAN024F82_at; Start 28; Stop 52
tattatcgcttaccaacatttgctt

SEQ ID NO: 195598 - DNA, 25 bp, Artificial
  probe
  misc_feature (1)..(25): SEQ ID NO: 4246; WAN024F82_at; Start 354; Stop 378
gagcgatggcttttatgaattctat

SEQ ID NO: 195599 - DNA, 25 bp, Artificial
  probe
  misc_feature (1)..(25): SEQ ID NO: 4246; WAN024F82_at; Start 100; Stop 124
ggtgactgcgtcatgttagtaaacg

SEQ ID NO: 195600 - DNA, 25 bp, Artificial
  probe
  misc_feature (1)..(25): SEQ ID NO: 4246; WAN024F82_at; Start 301; Stop 325
gaccatgctattattaatcaaatag

SEQ ID NO: 195601 - DNA, 25 bp, Artificial
  probe
  misc_feature (1)..(25): SEQ ID NO: 4246; WAN024F82_at; Start 38; Stop 62
taccaacatttgcttttatatttgc

SEQ ID NO: 195602 - DNA, 25 bp, Artificial
  probe
  misc_feature (1)..(25): SEQ ID NO: 4246; WAN024F82_at; Start 49; Stop 73
gcttttatatttgctaaactttcag

SEQ ID NO: 195603 - DNA, 25 bp, Artificial
  probe
  misc_feature (1)..(25): SEQ ID NO: 4246; WAN024F82_at; Start 433; Stop 457
tctgctattgatccaatctatggaa

SEQ ID NO: 195604 - DNA, 25 bp, Artificial
  probe
  misc_feature (1)..(25): SEQ ID NO: 4246; WAN024F82_at; Start 325; Stop 349
gatgttactagtgaacaaattgttt

SEQ ID NO: 195605 - DNA, 25 bp, Artificial
  probe
  misc_feature (1)..(25): SEQ ID NO: 4246; WAN024F82_at; Start 21; Stop 45
tatactatattatcgcttaccaaca

SEQ ID NO: 195606 - DNA, 25 bp, Artificial
  probe
  misc_feature (1)..(25): SEQ ID NO: 4246; WAN024F82_at; Start 340; Stop 364
caaattgttttaatgagcgatggct

SEQ ID NO: 195607 - DNA, 25 bp, Artificial
  probe
  misc_feature (1)..(25): SEQ ID NO: 4246; WAN024F82_at; Start 413; Stop 437
ttaagatgagatttaattcttctgc

SEQ ID NO: 195608 - DNA, 25 bp, Artificial
  probe
  misc_feature (1)..(25): SEQ ID NO: 4246; WAN024F82_at; Start 398; Stop 422
cttttgaagagttaattaagatgag

SEQ ID NO: 195609 - DNA, 25 bp, Artificial
  probe
  misc_feature (1)..(25): SEQ ID NO: 4246; WAN024F82_at; Start 247; Stop 271
ttatctaatcaaccgagtgggtact

SEQ ID NO: 195610 - DNA, 25 bp, Artificial
  probe
  misc_feature (1)..(25): SEQ ID NO: 4246; WAN024F82_at; Start 88; Stop 112
tatatgatgctaggtgactgcgtca

SEQ ID NO: 195611 - DNA, 25 bp, Artificial
  probe
  misc_feature (1)..(25): SEQ ID NO: 4246; WAN024F82_at; Start 436; Stop 460
gctattgatccaatctatggaaaga

SEQ ID NO: 195612 - DNA, 25 bp, Artificial
  probe
  misc_feature (1)..(25): SEQ ID NO: 4246; WAN024F82_at; Start 103; Stop 127
gactgcgtcatgttagtaaacgaaa

SEQ ID NO: 195613 - DNA, 25 bp, Artificial
  probe
  misc_feature (1)..(25): SEQ ID NO: 4246; WAN024F82_at; Start 107; Stop 131
gcgtcatgttagtaaacgaaatgga

SEQ ID NO: 195614 - DNA, 25 bp, Artificial
  probe
  misc_feature (1)..(25): SEQ ID NO: 4246; WAN024F82_at; Start 242; Stop 266
gaaaattatctaatcaaccgagtgg

SEQ ID NO: 195615 - DNA, 25 bp, Artificial
  probe
  misc_feature (1)..(25): SEQ ID NO: 4246; WAN024F82_at; Start 139; Stop 163
gatcatagagtagataacttatttg

SEQ ID NO: 195616 - DNA, 25 bp, Artificial
  probe
  misc_feature (1)..(25): SEQ ID NO: 4246; WAN024F82_at; Start 252; Stop 276
taatcaaccgagtgggtactggata

SEQ ID NO: 195617 - DNA, 25 bp, Artificial
  probe
  misc_feature (1)..(25): SEQ ID NO: 4246; WAN024F82_at; Start 289; Stop 313
gagagatttttagaccatgctatta

SEQ ID NO: 195618 - DNA, 25 bp, Artificial
  probe
  misc_feature (1)..(25): SEQ ID NO: 4246; WAN024F82_at; Start 316; Stop 340
aatcaaatagatgttactagtgaac

SEQ ID NO: 195619 - DNA, 25 bp, Artificial
  probe
  misc_feature (1)..(25): SEQ ID NO: 4246; WAN024F82_at; Start 268; Stop 292
tactggataggttcgttggatgaga

SEQ ID NO: 195620 - DNA, 25 bp, Artificial
  probe
  misc_feature (1)..(25): SEQ ID NO: 2763; WAN024F83_x_at; Start 202; Stop 226
caattaaaacgaatagatcatatcc

SEQ ID NO: 195621 - DNA, 25 bp, Artificial
  probe
  misc_feature (1)..(25): SEQ ID NO: 2763; WAN024F83_x_at; Start 227; Stop 251
aacacgcttataagtgccaagcatg

SEQ ID NO: 195622 - DNA, 25 bp, Artificial
  probe
  misc_feature (1)..(25): SEQ ID NO: 2763; WAN024F83_x_at; Start 116; Stop 140
aagagagcatttgccctgattgtca

SEQ ID NO: 195623 - DNA, 25 bp, Artificial
  probe
  misc_feature (1)..(25): SEQ ID NO: 2763; WAN024F83_x_at; Start 240; Stop 264
gtgccaagcatgcagtgataaaaat

SEQ ID NO: 195624 - DNA, 25 bp, Artificial
  probe
  misc_feature (1)..(25): SEQ ID NO: 2763; WAN024F83_x_at; Start 207; Stop 231
aaaacgaatagatcatatccaacac

SEQ ID NO: 195625 - DNA, 25 bp, Artificial
  probe
  misc_feature (1)..(25): SEQ ID NO: 2763; WAN024F83_x_at; Start 241; Stop 265
tgccaagcatgcagtgataaaaatc

SEQ ID NO: 195626 - DNA, 25 bp, Artificial
  probe
  misc_feature (1)..(25): SEQ ID NO: 2763; WAN024F83_x_at; Start 103; Stop 127
catcatcaagtagaagagagcattt

SEQ ID NO: 195627 - DNA, 25 bp, Artificial
  probe
  misc_feature (1)..(25): SEQ ID NO: 2763; WAN024F83_x_at; Start 152; Stop 176
aagagattggagcaacccttcaacg

SEQ ID NO: 195628 - DNA, 25 bp, Artificial
  probe
  misc_feature (1)..(25): SEQ ID NO: 2763; WAN024F83_x_at; Start 163; Stop 187
gcaacccttcaacgacaagaattag

SEQ ID NO: 195629 - DNA, 25 bp, Artificial
  probe
  misc_feature (1)..(25): SEQ ID NO: 2763; WAN024F83_x_at; Start 157; Stop 181
attggagcaacccttcaacgacaag

SEQ ID NO: 195630 - DNA, 25 bp, Artificial
  probe
  misc_feature (1)..(25): SEQ ID NO: 2763; WAN024F83_x_at; Start 200; Stop 224
cgcaattaaaacgaatagatcatat

SEQ ID NO: 195631 - DNA, 25 bp, Artificial
  probe
  misc_feature (1)..(25): SEQ ID NO: 2763; WAN024F83_x_at; Start 233; Stop 257
cttataagtgccaagcatgcagtga

SEQ ID NO: 195632 - DNA, 25 bp, Artificial
  probe
  misc_feature (1)..(25): SEQ ID NO: 2763; WAN024F83_x_at; Start 161; Stop 185
gagcaacccttcaacgacaagaatt

SEQ ID NO: 195633 - DNA, 25 bp, Artificial
  probe
  misc_feature (1)..(25): SEQ ID NO: 2763; WAN024F83_x_at; Start 181; Stop 205
gaattagtctttattcctgcgcaat

SEQ ID NO: 195634 - DNA, 25 bp, Artificial
  probe
  misc_feature (1)..(25): SEQ ID NO: 2763; WAN024F83_x_at; Start 155; Stop 179
agattggagcaacccttcaacgaca

SEQ ID NO: 195635 - DNA, 25 bp, Artificial
  probe
  misc_feature (1)..(25): SEQ ID NO: 2763; WAN024F83_x_at; Start 70; Stop 94
gctcttcttgcccaatttgattcag

SEQ ID NO: 195636 - DNA, 25 bp, Artificial
  probe
  misc_feature (1)..(25): SEQ ID NO: 2763; WAN024F83_x_at; Start 164; Stop 188
caacccttcaacgacaagaattagt

SEQ ID NO: 195637 - DNA, 25 bp, Artificial
  probe
  misc_feature (1)..(25): SEQ ID NO: 2763; WAN024F83_x_at; Start 225; Stop 249
ccaacacgcttataagtgccaagca

SEQ ID NO: 195638 - DNA, 25 bp, Artificial
  probe
  misc_feature (1)..(25): SEQ ID NO: 2763; WAN024F83_x_at; Start 154; Stop 178
gagattggagcaacccttcaacgac

SEQ ID NO: 195639 - DNA, 25 bp, Artificial
  probe
  misc_feature (1)..(25): SEQ ID NO: 2763; WAN024F83_x_at; Start 158; Stop 182
ttggagcaacccttcaacgacaaga

SEQ ID NO: 195640 - DNA, 25 bp, Artificial
  probe
  misc_feature (1)..(25): SEQ ID NO: 2763; WAN024F83_x_at; Start 166; Stop 190
acccttcaacgacaagaattagtct

SEQ ID NO: 195641 - DNA, 25 bp, Artificial
  probe
  misc_feature (1)..(25): SEQ ID NO: 2763; WAN024F83_x_at; Start 168; Stop 192
ccttcaacgacaagaattagtcttt

SEQ ID NO: 195642 - DNA, 25 bp, Artificial
  probe
  misc_feature (1)..(25): SEQ ID NO: 2763; WAN024F83_x_at; Start 150; Stop 174
aaaagagattggagcaacccttcaa

SEQ ID NO: 195643 - DNA, 25 bp, Artificial
  probe
  misc_feature (1)..(25): SEQ ID NO: 2763; WAN024F83_x_at; Start 159; Stop 183
tggagcaacccttcaacgacaagaa

SEQ ID NO: 195644 - DNA, 25 bp, Artificial
  probe
  misc_feature (1)..(25): SEQ ID NO: 2763; WAN024F83_x_at; Start 223; Stop 247
atccaacacgcttataagtgccaag

SEQ ID NO: 195645 - DNA, 25 bp, Artificial
  probe
  misc_feature (1)..(25): SEQ ID NO: 2763; WAN024F83_x_at; Start 160; Stop 184
ggagcaacccttcaacgacaagaat

SEQ ID NO: 195646 - DNA, 25 bp, Artificial
  probe
  misc_feature (1)..(25): SEQ ID NO: 2763; WAN024F83_x_at; Start 151; Stop 175
aaagagattggagcaacccttcaac

SEQ ID NO: 195647 - DNA, 25 bp, Artificial
  probe
  misc_feature (1)..(25): SEQ ID NO: 2763; WAN024F83_x_at; Start 149; Stop 173
taaaagagattggagcaacccttca

SEQ ID NO: 195648 - DNA, 25 bp, Artificial
  probe
  misc_feature (1)..(25): SEQ ID NO: 2763; WAN024F83_x_at; Start 232; Stop 256
gcttataagtgccaagcatgcagtg

SEQ ID NO: 195649 - DNA, 25 bp, Artificial
  probe
  misc_feature (1)..(25): SEQ ID NO: 2763; WAN024F83_x_at; Start 229; Stop 253
cacgcttataagtgccaagcatgca

SEQ ID NO: 195650 - DNA, 25 bp, Artificial
  probe
  misc_feature (1)..(25): SEQ ID NO: 2763; WAN024F83_x_at; Start 238; Stop 262
aagtgccaagcatgcagtgataaaa

SEQ ID NO: 195651 - DNA, 25 bp, Artificial
  probe
  misc_feature (1)..(25): SEQ ID NO: 2763; WAN024F83_x_at; Start 153; Stop 177
agagattggagcaacccttcaacga

SEQ ID NO: 195652 - DNA, 25 bp, Artificial
  probe
  misc_feature (1)..(25): SEQ ID NO: 2763; WAN024F83_x_at; Start 237; Stop 261
taagtgccaagcatgcagtgataaa

SEQ ID NO: 195653 - DNA, 25 bp, Artificial
  probe
  misc_feature (1)..(25): SEQ ID NO: 2763; WAN024F83_x_at; Start 235; Stop 259
tataagtgccaagcatgcagtgata

SEQ ID NO: 195654 - DNA, 25 bp, Artificial
  probe
  misc_feature (1)..(25): SEQ ID NO: 3359; WAN024F84_at; Start 880; Stop 904
tccagtcaaatccaatcgcatccgt

SEQ ID NO: 195655 - DNA, 25 bp, Artificial
  probe
  misc_feature (1)..(25): SEQ ID NO: 3359; WAN024F84_at; Start 239; Stop 263
cctaaactcagaggaaaacctgtca

SEQ ID NO: 195656 - DNA, 25 bp, Artificial
  probe
  misc_feature (1)..(25): SEQ ID NO: 3359; WAN024F84_at; Start 844; Stop 868
tgatctgtatcgaaaggctcgtggc

SEQ ID NO: 195657 - DNA, 25 bp, Artificial
  probe
  misc_feature (1)..(25): SEQ ID NO: 3359; WAN024F84_at; Start 520; Stop 544
taaactcggtatcaagtcagcggtc

SEQ ID NO: 195658 - DNA, 25 bp, Artificial
  probe
  misc_feature (1)..(25): SEQ ID NO: 3359; WAN024F84_at; Start 728; Stop 752
catggagtaggaaaaaagacagtag

SEQ ID NO: 195659 - DNA, 25 bp, Artificial
  probe
  misc_feature (1)..(25): SEQ ID NO: 3359; WAN024F84_at; Start 968; Stop 992
gagctgactcttctatcagaaaaag

SEQ ID NO: 195660 - DNA, 25 bp, Artificial
  probe
  misc_feature (1)..(25): SEQ ID NO: 3359; WAN024F84_at; Start 986; Stop 1010
gaaaaagtcgctctcaatctacatc

SEQ ID NO: 195661 - DNA, 25 bp, Artificial
  probe
  misc_feature (1)..(25): SEQ ID NO: 3359; WAN024F84_at; Start 258; Stop 282
ctgtcattattggaagcgaccctcg

SEQ ID NO: 195662 - DNA, 25 bp, Artificial
  probe
  misc_feature (1)..(25): SEQ ID NO: 3359; WAN024F84_at; Start 895; Stop 919
tcgcatccgtaaatcaatcggcaag

SEQ ID NO: 195663 - DNA, 25 bp, Artificial
  probe
  misc_feature (1)..(25): SEQ ID NO: 3359; WAN024F84_at; Start 1036; Stop 1060
cattttgaaaatccgctacgaggac

SEQ ID NO: 195664 - DNA, 25 bp, Artificial
  probe
  misc_feature (1)..(25): SEQ ID NO: 3359; WAN024F84_at; Start 461; Stop 485
tatacagatttgattgaacccatga

SEQ ID NO: 195665 - DNA, 25 bp, Artificial
  probe
  misc_feature (1)..(25): SEQ ID NO: 3359; WAN024F84_at; Start 505; Stop 529
ggatgtgacagaaaataaactcggt

SEQ ID NO: 195666 - DNA, 25 bp, Artificial
  probe
  misc_feature (1)..(25): SEQ ID NO: 3359; WAN024F84_at; Start 532; Stop 556
caagtcagcggtcaaaattgctcgc

SEQ ID NO: 195667 - DNA, 25 bp, Artificial
  probe
  misc_feature (1)..(25): SEQ ID NO: 3359; WAN024F84_at; Start 1159; Stop 1183
gaaagaaagaggtgtccgcctattg

SEQ ID NO: 195668 - DNA, 25 bp, Artificial
  probe
  misc_feature (1)..(25): SEQ ID NO: 3359; WAN024F84_at; Start 821; Stop 845
gaccgttttggtagactaggctatg

SEQ ID NO: 195669 - DNA, 25 bp, Artificial
  probe
  misc_feature (1)..(25): SEQ ID NO: 3359; WAN024F84_at; Start 908; Stop 932
tcaatcggcaaggagaaaacctacg

SEQ ID NO: 195670 - DNA, 25 bp, Artificial
  probe
  misc_feature (1)..(25): SEQ ID NO: 3359; WAN024F84_at; Start 1090; Stop 1114
tgctcaaaaaacacaagatgctagt

SEQ ID NO: 195671 - DNA, 25 bp, Artificial
  probe
  misc_feature (1)..(25): SEQ ID NO: 3359; WAN024F84_at; Start 1052; Stop 1076
tacgaggacttttcaactcttacca

SEQ ID NO: 195672 - DNA, 25 bp, Artificial
  probe
  misc_feature (1)..(25): SEQ ID NO: 3359; WAN024F84_at; Start 859; Stop 883
ggctcgtggcattcacaactctcca

SEQ ID NO: 195673 - DNA, 25 bp, Artificial
  probe
  misc_feature (1)..(25): SEQ ID NO: 3359; WAN024F84_at; Start 683; Stop 707
gaacaggctgaggattttctcaaac

SEQ ID NO: 195674 - DNA, 25 bp, Artificial
  probe
  misc_feature (1)..(25): SEQ ID NO: 3359; WAN024F84_at; Start 330; Stop 354
gagcttttggtgtccattctgccat

SEQ ID NO: 195675 - DNA, 25 bp, Artificial
  probe
  misc_feature (1)..(25): SEQ ID NO: 3359; WAN024F84_at; Start 1003; Stop 1027
tctacatcaacaagaaaaagctgga

SEQ ID NO: 195676 - DNA, 25 bp, Artificial
  probe
  misc_feature (1)..(25): SEQ ID NO: 3359; WAN024F84_at; Start 1128; Stop 1152
tagccctgcaactctatgaagaatt

SEQ ID NO: 195677 - DNA, 25 bp, Artificial
  probe
  misc_feature (1)..(25): SEQ ID NO: 3359; WAN024F84_at; Start 1113; Stop 1137
gtcagataagccaaatagccctgca

SEQ ID NO: 195678 - DNA, 25 bp, Artificial
  probe
  misc_feature (1)..(25): SEQ ID NO: 3359; WAN024F84_at; Start 749; Stop 773
gtagaacgtcttcatcaaatgggcg

SEQ ID NO: 195679 - DNA, 25 bp, Artificial
  probe
  misc_feature (1)..(25): SEQ ID NO: 3359; WAN024F84_at; Start 553; Stop 577
tcgcctcattcaaaaagatatctgg

SEQ ID NO: 195680 - DNA, 25 bp, Artificial
  probe
  misc_feature (1)..(25): SEQ ID NO: 3359; WAN024F84_at; Start 491; Stop 515
gacgaagcctatttggatgtgacag

SEQ ID NO: 195681 - DNA, 25 bp, Artificial
  probe
  misc_feature (1)..(25): SEQ ID NO: 3359; WAN024F84_at; Start 624; Stop 648
tcttagctaaaatggcgagtgatta

SEQ ID NO: 195682 - DNA, 25 bp, Artificial
  probe
  misc_feature (1)..(25): SEQ ID NO: 3359; WAN024F84_at; Start 780; Stop 804
ctggtgctgatttacttgaagttcc

SEQ ID NO: 195683 - DNA, 25 bp, Artificial
  probe
  misc_feature (1)..(25): SEQ ID NO: 3359; WAN024F84_at; Start 667; Stop 691
gacagtgattctacctgaacaggct

SEQ ID NO: 195684 - DNA, 25 bp, Artificial
  probe
  misc_feature (1)..(25): SEQ ID NO: 3359; WAN024F84_at; Start 444; Stop 468
gagctatttttaagcgctatacaga

SEQ ID NO: 195685 - DNA, 25 bp, Artificial
  probe
  misc_feature (1)..(25): SEQ ID NO: 3359; WAN024F84_at; Start 346; Stop 370
ttctgccatgagttccaaggaagct

SEQ ID NO: 195686 - DNA, 25 bp, Artificial
  probe
  misc_feature (1)..(25): SEQ ID NO: 3359; WAN024F84_at; Start 365; Stop 389
gaagcttatgaacgttgtccccagg

SEQ ID NO: 195687 - DNA, 25 bp, Artificial
  probe
  misc_feature (1)..(25): SEQ ID NO: 3359; WAN024F84_at; Start 764; Stop 788
caaatgggcgtttttactggtgctg

SEQ ID NO: 195688 - DNA, 25 bp, Artificial
  probe
  misc_feature (1)..(25): SEQ ID NO: 4389; WAN024F85_at; Start 940; Stop 964
ccagttaataatgatcgtaataatc

SEQ ID NO: 195689 - DNA, 25 bp, Artificial
  probe
  misc_feature (1)..(25): SEQ ID NO: 4389; WAN024F85_at; Start 732; Stop 756
cgaactagagtaccgtagtcttcgt

SEQ ID NO: 195690 - DNA, 25 bp, Artificial
  probe
  misc_feature (1)..(25): SEQ ID NO: 4389; WAN024F85_at; Start 994; Stop 1018
gatgagcaagggaatgttatctttg

SEQ ID NO: 195691 - DNA, 25 bp, Artificial
  probe
  misc_feature (1)..(25): SEQ ID NO: 4389; WAN024F85_at; Start 928; Stop 952
gagccttattatccagttaataatg

SEQ ID NO: 195692 - DNA, 25 bp, Artificial
  probe
  misc_feature (1)..(25): SEQ ID NO: 4389; WAN024F85_at; Start 908; Stop 932
aaacatgggaaaaaggtgatgagcc

SEQ ID NO: 195693 - DNA, 25 bp, Artificial
  probe
  misc_feature (1)..(25): SEQ ID NO: 4389; WAN024F85_at; Start 925; Stop 949
gatgagccttattatccagttaata

SEQ ID NO: 195694 - DNA, 25 bp, Artificial
  probe
  misc_feature (1)..(25): SEQ ID NO: 4389; WAN024F85_at; Start 1074; Stop 1098
tttgcagtgcgtgagaaatgagtta

SEQ ID NO: 195695 - DNA, 25 bp, Artificial
  probe
  misc_feature (1)..(25): SEQ ID NO: 4389; WAN024F85_at; Start 779; Stop 803
tggaaaattaccaaggaaatgcagt

SEQ ID NO: 195696 - DNA, 25 bp, Artificial
  probe
  misc_feature (1)..(25): SEQ ID NO: 4389; WAN024F85_at; Start 990; Stop 1014
tgctgatgagcaagggaatgttatc

SEQ ID NO: 195697 - DNA, 25 bp, Artificial
  probe
  misc_feature (1)..(25): SEQ ID NO: 4389; WAN024F85_at; Start 579; Stop 603
atacactcaaatagttgaaaaaatg

SEQ ID NO: 195698 - DNA, 25 bp, Artificial
  probe
  misc_feature (1)..(25): SEQ ID NO: 4389; WAN024F85_at; Start 1018; Stop 1042
ggtggccgcttaggacactatcgtt

SEQ ID NO: 195699 - DNA, 25 bp, Artificial
  probe
  misc_feature (1)..(25): SEQ ID NO: 4389; WAN024F85_at; Start 1028; Stop 1052
taggacactatcgttattacgatat

SEQ ID NO: 195700 - DNA, 25 bp, Artificial
  probe
  misc_feature (1)..(25): SEQ ID NO: 4389; WAN024F85_at; Start 1016; Stop 1040
ttggtggccgcttaggacactatcg

SEQ ID NO: 195701 - DNA, 25 bp, Artificial
  probe
  misc_feature (1)..(25): SEQ ID NO: 4389; WAN024F85_at; Start 1020; Stop 1044
tggccgcttaggacactatcgttat

SEQ ID NO: 195702 - DNA, 25 bp, Artificial
  probe
  misc_feature (1)..(25): SEQ ID NO: 4389; WAN024F85_at; Start 1014; Stop 1038
ctttggtggccgcttaggacactat

SEQ ID NO: 195703 - DNA, 25 bp, Artificial
  probe
  misc_feature (1)..(25): SEQ ID NO: 4389; WAN024F85_at; Start 611; Stop 635
atgaaaatattgatgtagaaacaaa

SEQ ID NO: 195704 - DNA, 25 bp, Artificial
  probe
  misc_feature (1)..(25): SEQ ID NO: 4389; WAN024F85_at; Start 904; Stop 928
tctaaaacatgggaaaaaggtgatg

SEQ ID NO: 195705 - DNA, 25 bp, Artificial
  probe
  misc_feature (1)..(25): SEQ ID NO: 4389; WAN024F85_at; Start 777; Stop 801
tatggaaaattaccaaggaaatgca

SEQ ID NO: 195706 - DNA, 25 bp, Artificial
  probe
  misc_feature (1)..(25): SEQ ID NO: 4389; WAN024F85_at; Start 991; Stop 1015
gctgatgagcaagggaatgttatct

SEQ ID NO: 195707 - DNA, 25 bp, Artificial
  probe
  misc_feature (1)..(25): SEQ ID NO: 4389; WAN024F85_at; Start 1326; Stop 1350
tatcaaggtttttatgtactgcccc

SEQ ID NO: 195708 - DNA, 25 bp, Artificial
  probe
  misc_feature (1)..(25): SEQ ID NO: 4389; WAN024F85_at; Start 1025; Stop 1049
gcttaggacactatcgttattacga

SEQ ID NO: 195709 - DNA, 25 bp, Artificial
  probe
  misc_feature (1)..(25): SEQ ID NO: 4389; WAN024F85_at; Start 1022; Stop 1046
gccgcttaggacactatcgttatta

SEQ ID NO: 195710 - DNA, 25 bp, Artificial
  probe
  misc_feature (1)..(25): SEQ ID NO: 4389; WAN024F85_at; Start 1008; Stop 1032
tgttatctttggtggccgcttagga

SEQ ID NO: 195711 - DNA, 25 bp, Artificial
  probe
  misc_feature (1)..(25): SEQ ID NO: 4389; WAN024F85_at; Start 1319; Stop 1343
cgcatactatcaaggtttttatgta

SEQ ID NO: 195712 - DNA, 25 bp, Artificial
  probe
  misc_feature (1)..(25): SEQ ID NO: 4389; WAN024F85_at; Start 694; Stop 718
actggtatgattgatgaattctttg

SEQ ID NO: 195713 - DNA, 25 bp, Artificial
  probe
  misc_feature (1)..(25): SEQ ID NO: 4389; WAN024F85_at; Start 911; Stop 935
catgggaaaaaggtgatgagcctta

SEQ ID NO: 195714 - DNA, 25 bp, Artificial
  probe
  misc_feature (1)..(25): SEQ ID NO: 4389; WAN024F85_at; Start 706; Stop 730
gatgaattctttgactataagttgg

SEQ ID NO: 195715 - DNA, 25 bp, Artificial
  probe
  misc_feature (1)..(25): SEQ ID NO: 4389; WAN024F85_at; Start 922; Stop 946
ggtgatgagccttattatccagtta

SEQ ID NO: 195716 - DNA, 25 bp, Artificial
  probe
  misc_feature (1)..(25): SEQ ID NO: 4389; WAN024F85_at; Start 997; Stop 1021
gagcaagggaatgttatctttggtg

SEQ ID NO: 195717 - DNA, 25 bp, Artificial
  probe
  misc_feature (1)..(25): SEQ ID NO: 4389; WAN024F85_at; Start 1009; Stop 1033
gttatctttggtggccgcttaggac

SEQ ID NO: 195718 - DNA, 25 bp, Artificial
  probe
  misc_feature (1)..(25): SEQ ID NO: 4389; WAN024F85_at; Start 918; Stop 942
aaaaggtgatgagccttattatcca

SEQ ID NO: 195719 - DNA, 25 bp, Artificial
  probe
  misc_feature (1)..(25): SEQ ID NO: 4389; WAN024F85_at; Start 770; Stop 794
ccttggatatggaaaattaccaagg

SEQ ID NO: 195720 - DNA, 25 bp, Artificial
  probe
  misc_feature (1)..(25): SEQ ID NO: 4389; WAN024F85_at; Start 1072; Stop 1096
gctttgcagtgcgtgagaaatgagt

SEQ ID NO: 195721 - DNA, 25 bp, Artificial
  probe
  misc_feature (1)..(25): SEQ ID NO: 4389; WAN024F85_at; Start 697; Stop 721
ggtatgattgatgaattctttgact

SEQ ID NO: 195722 - DNA, 25 bp, Artificial
  probe
  misc_feature (1)..(25): SEQ ID NO: 7712; WAN024F86_at; Start 119; Stop 143
tagcacttgagaagatgccaagcgt

SEQ ID NO: 195723 - DNA, 25 bp, Artificial
  probe
  misc_feature (1)..(25): SEQ ID NO: 7712; WAN024F86_at; Start 33; Stop 57
tccgactgctactcccgctttttgg

SEQ ID NO: 195724 - DNA, 25 bp, Artificial
  probe
  misc_feature (1)..(25): SEQ ID NO: 7712; WAN024F86_at; Start 5; Stop 29
tattggaagcaaccgagtcagtcgc

SEQ ID NO: 195725 - DNA, 25 bp, Artificial
  probe
  misc_feature (1)..(25): SEQ ID NO: 7712; WAN024F86_at; Start 189; Stop 213
ggatgatctaaataacccagttctt

SEQ ID NO: 195726 - DNA, 25 bp, Artificial
  probe
  misc_feature (1)..(25): SEQ ID NO: 7712; WAN024F86_at; Start 1; Stop 25
ttgttattggaagcaaccgagtcag

SEQ ID NO: 195727 - DNA, 25 bp, Artificial
  probe
  misc_feature (1)..(25): SEQ ID NO: 7712; WAN024F86_at; Start 122; Stop 146
cacttgagaagatgccaagcgttca

SEQ ID NO: 195728 - DNA, 25 bp, Artificial
  probe
  misc_feature (1)..(25): SEQ ID NO: 7712; WAN024F86_at; Start 79; Stop 103
cctgatgccagtttgaggttactga

SEQ ID NO: 195729 - DNA, 25 bp, Artificial
  probe
  misc_feature (1)..(25): SEQ ID NO: 7712; WAN024F86_at; Start 46; Stop 70
cccgctttttggagctggataattg

SEQ ID NO: 195730 - DNA, 25 bp, Artificial
  probe
  misc_feature (1)..(25): SEQ ID NO: 7712; WAN024F86_at; Start 85; Stop 109
gccagtttgaggttactgataggat

SEQ ID NO: 195731 - DNA, 25 bp, Artificial
  probe
  misc_feature (1)..(25): SEQ ID NO: 7712; WAN024F86_at; Start 154; Stop 178
tctcgtttaattcgaccccgtgagc

SEQ ID NO: 195732 - DNA, 25 bp, Artificial
  probe
  misc_feature (1)..(25): SEQ ID NO: 7712; WAN024F86_at; Start 40; Stop 64
gctactcccgctttttggagctgga

SEQ ID NO: 195733 - DNA, 25 bp, Artificial
  probe
  misc_feature (1)..(25): SEQ ID NO: 7712; WAN024F86_at; Start 98; Stop 122
tactgataggattgtgggcgatagc

SEQ ID NO: 195734 - DNA, 25 bp, Artificial
  probe
  misc_feature (1)..(25): SEQ ID NO: 7712; WAN024F86_at; Start 156; Stop 180
tcgtttaattcgaccccgtgagcaa

SEQ ID NO: 195735 - DNA, 25 bp, Artificial
  probe
  misc_feature (1)..(25): SEQ ID NO: 7712; WAN024F86_at; Start 107; Stop 131
gattgtgggcgatagcacttgagaa

SEQ ID NO: 195736 - DNA, 25 bp, Artificial
  probe
  misc_feature (1)..(25): SEQ ID NO: 7712; WAN024F86_at; Start 172; Stop 196
cgtgagcaaatacggacggatgatc

SEQ ID NO: 195737 - DNA, 25 bp, Artificial
  probe
  misc_feature (1)..(25): SEQ ID NO: 7712; WAN024F86_at; Start 139; Stop 163
agcgttcaatttctctctcgtttaa

SEQ ID NO: 195738 - DNA, 25 bp, Artificial
  probe
  misc_feature (1)..(25): SEQ ID NO: 7712; WAN024F86_at; Start 127; Stop 151
gagaagatgccaagcgttcaatttc

SEQ ID NO: 195739 - DNA, 25 bp, Artificial
  probe
  misc_feature (1)..(25): SEQ ID NO: 7712; WAN024F86_at; Start 132; Stop 156
gatgccaagcgttcaatttctctct

SEQ ID NO: 195740 - DNA, 25 bp, Artificial
  probe
  misc_feature (1)..(25): SEQ ID NO: 7712; WAN024F86_at; Start 167; Stop 191
gaccccgtgagcaaatacggacgga

SEQ ID NO: 195741 - DNA, 25 bp, Artificial
  probe
  misc_feature (1)..(25): SEQ ID NO: 7712; WAN024F86_at; Start 182; Stop 206
tacggacggatgatctaaataaccc

SEQ ID NO: 195742 - DNA, 25 bp, Artificial
  probe
  misc_feature (1)..(25): SEQ ID NO: 7712; WAN024F86_at; Start 101; Stop 125
tgataggattgtgggcgatagcact

SEQ ID NO: 195743 - DNA, 25 bp, Artificial
  probe
  misc_feature (1)..(25): SEQ ID NO: 7712; WAN024F86_at; Start 115; Stop 139
gcgatagcacttgagaagatgccaa

SEQ ID NO: 195744 - DNA, 25 bp, Artificial
  probe
  misc_feature (1)..(25): SEQ ID NO: 7712; WAN024F86_at; Start 73; Stop 97
gcaattcctgatgccagtttgaggt

SEQ ID NO: 195745 - DNA, 25 bp, Artificial
  probe
  misc_feature (1)..(25): SEQ ID NO: 7712; WAN024F86_at; Start 204; Stop 228
cccagttcttcaagaaaagcaaggg

SEQ ID NO: 195746 - DNA, 25 bp, Artificial
  probe
  misc_feature (1)..(25): SEQ ID NO: 7712; WAN024F86_at; Start 13; Stop 37
gcaaccgagtcagtcgcaattccga

SEQ ID NO: 195747 - DNA, 25 bp, Artificial
  probe
  misc_feature (1)..(25): SEQ ID NO: 7712; WAN024F86_at; Start 162; Stop 186
aattcgaccccgtgagcaaatacgg

SEQ ID NO: 195748 - DNA, 25 bp, Artificial
  probe
  misc_feature (1)..(25): SEQ ID NO: 7712; WAN024F86_at; Start 185; Stop 209
ggacggatgatctaaataacccagt

SEQ ID NO: 195749 - DNA, 25 bp, Artificial
  probe
  misc_feature (1)..(25): SEQ ID NO: 7712; WAN024F86_at; Start 8; Stop 32
tggaagcaaccgagtcagtcgcaat

SEQ ID NO: 195750 - DNA, 25 bp, Artificial
  probe
  misc_feature (1)..(25): SEQ ID NO: 7712; WAN024F86_at; Start 19; Stop 43
gagtcagtcgcaattccgactgcta

SEQ ID NO: 195751 - DNA, 25 bp, Artificial
  probe
  misc_feature (1)..(25): SEQ ID NO: 7712; WAN024F86_at; Start 50; Stop 74
ctttttggagctggataattggagc

SEQ ID NO: 195752 - DNA, 25 bp, Artificial
  probe
  misc_feature (1)..(25): SEQ ID NO: 7712; WAN024F86_at; Start 213; Stop 237
tcaagaaaagcaagggggcgtttgc

SEQ ID NO: 195753 - DNA, 25 bp, Artificial
  probe
  misc_feature (1)..(25): SEQ ID NO: 7712; WAN024F86_at; Start 65; Stop 89
taattggagcaattcctgatgccag

SEQ ID NO: 195754 - DNA, 25 bp, Artificial
  probe
  misc_feature (1)..(25): SEQ ID NO: 7712; WAN024F86_at; Start 70; Stop 94
ggagcaattcctgatgccagtttga

SEQ ID NO: 195755 - DNA, 25 bp, Artificial
  probe
  misc_feature (1)..(25): SEQ ID NO: 7712; WAN024F86_at; Start 175; Stop 199
gagcaaatacggacggatgatctaa

SEQ ID NO: 195756 - DNA, 25 bp, Artificial
  probe
  misc_feature (1)..(25): SEQ ID NO: 7412; WAN024F87_at; Start 64; Stop 88
tcagcagttgcttctgtctctgaag

SEQ ID NO: 195757 - DNA, 25 bp, Artificial
  probe
  misc_feature (1)..(25): SEQ ID NO: 7412; WAN024F87_at; Start 53; Stop 77
tgcttatagtctcagcagttgcttc

SEQ ID NO: 195758 - DNA, 25 bp, Artificial
  probe
  misc_feature (1)..(25): SEQ ID NO: 7412; WAN024F87_at; Start 27; Stop 51
gatttcgtctatgatggatcgagtt

SEQ ID NO: 195759 - DNA, 25 bp, Artificial
  probe
  misc_feature (1)..(25): SEQ ID NO: 7412; WAN024F87_at; Start 67; Stop 91
gcagttgcttctgtctctgaagaaa

SEQ ID NO: 195760 - DNA, 25 bp, Artificial
  probe
  misc_feature (1)..(25): SEQ ID NO: 7412; WAN024F87_at; Start 32; Stop 56
cgtctatgatggatcgagttctgct

SEQ ID NO: 195761 - DNA, 25 bp, Artificial
  probe
  misc_feature (1)..(25): SEQ ID NO: 7412; WAN024F87_at; Start 77; Stop 101
ctgtctctgaagaaaagagagtcgg

SEQ ID NO: 195762 - DNA, 25 bp, Artificial
  probe
  misc_feature (1)..(25): SEQ ID NO: 7412; WAN024F87_at; Start 39; Stop 63
gatggatcgagttctgcttatagtc

SEQ ID NO: 195763 - DNA, 25 bp, Artificial
  probe
  misc_feature (1)..(25): SEQ ID NO: 7412; WAN024F87_at; Start 78; Stop 102
tgtctctgaagaaaagagagtcgga

SEQ ID NO: 195764 - DNA, 25 bp, Artificial
  probe
  misc_feature (1)..(25): SEQ ID NO: 7412; WAN024F87_at; Start 31; Stop 55
tcgtctatgatggatcgagttctgc

SEQ ID NO: 195765 - DNA, 25 bp, Artificial
  probe
  misc_feature (1)..(25): SEQ ID NO: 7412; WAN024F87_at; Start 84; Stop 108
tgaagaaaagagagtcggagaaaaa

SEQ ID NO: 195766 - DNA, 25 bp, Artificial
  probe
  misc_feature (1)..(25): SEQ ID NO: 7412; WAN024F87_at; Start 59; Stop 83
tagtctcagcagttgcttctgtctc

SEQ ID NO: 195767 - DNA, 25 bp, Artificial
  probe
  misc_feature (1)..(25): SEQ ID NO: 7412; WAN024F87_at; Start 42; Stop 66
ggatcgagttctgcttatagtctca

SEQ ID NO: 195768 - DNA, 25 bp, Artificial
  probe
  misc_feature (1)..(25): SEQ ID NO: 7412; WAN024F87_at; Start 76; Stop 100
tctgtctctgaagaaaagagagtcg

SEQ ID NO: 195769 - DNA, 25 bp, Artificial
  probe
  misc_feature (1)..(25): SEQ ID NO: 7412; WAN024F87_at; Start 57; Stop 81
tatagtctcagcagttgcttctgtc

SEQ ID NO: 195770 - DNA, 25 bp, Artificial
  probe
  misc_feature (1)..(25): SEQ ID NO: 7412; WAN024F87_at; Start 65; Stop 89
cagcagttgcttctgtctctgaaga

SEQ ID NO: 195771 - DNA, 25 bp, Artificial
  probe
  misc_feature (1)..(25): SEQ ID NO: 7412; WAN024F87_at; Start 49; Stop 73
gttctgcttatagtctcagcagttg

SEQ ID NO: 195772 - DNA, 25 bp, Artificial
  probe
  misc_feature (1)..(25): SEQ ID NO: 7412; WAN024F87_at; Start 51; Stop 75
tctgcttatagtctcagcagttgct

SEQ ID NO: 195773 - DNA, 25 bp, Artificial
  probe
  misc_feature (1)..(25): SEQ ID NO: 7412; WAN024F87_at; Start 68; Stop 92
cagttgcttctgtctctgaagaaaa

SEQ ID NO: 195774 - DNA, 25 bp, Artificial
  probe
  misc_feature (1)..(25): SEQ ID NO: 7412; WAN024F87_at; Start 73; Stop 97
gcttctgtctctgaagaaaagagag

SEQ ID NO: 195775 - DNA, 25 bp, Artificial
  probe
  misc_feature (1)..(25): SEQ ID NO: 7412; WAN024F87_at; Start 36; Stop 60
tatgatggatcgagttctgcttata

SEQ ID NO: 195776 - DNA, 25 bp, Artificial
  probe
  misc_feature (1)..(25): SEQ ID NO: 7412; WAN024F87_at; Start 43; Stop 67
gatcgagttctgcttatagtctcag

SEQ ID NO: 195777 - DNA, 25 bp, Artificial
  probe
  misc_feature (1)..(25): SEQ ID NO: 7412; WAN024F87_at; Start 46; Stop 70
cgagttctgcttatagtctcagcag

SEQ ID NO: 195778 - DNA, 25 bp, Artificial
  probe
  misc_feature (1)..(25): SEQ ID NO: 7412; WAN024F87_at; Start 62; Stop 86
tctcagcagttgcttctgtctctga

SEQ ID NO: 195779 - DNA, 25 bp, Artificial
  probe
  misc_feature (1)..(25): SEQ ID NO: 7412; WAN024F87_at; Start 80; Stop 104
tctctgaagaaaagagagtcggaga

SEQ ID NO: 195780 - DNA, 25 bp, Artificial
  probe
  misc_feature (1)..(25): SEQ ID NO: 7412; WAN024F87_at; Start 61; Stop 85
gtctcagcagttgcttctgtctctg

SEQ ID NO: 195781 - DNA, 25 bp, Artificial
  probe
  misc_feature (1)..(25): SEQ ID NO: 7412; WAN024F87_at; Start 34; Stop 58
tctatgatggatcgagttctgctta

SEQ ID NO: 195782 - DNA, 25 bp, Artificial
  probe
  misc_feature (1)..(25): SEQ ID NO: 7412; WAN024F87_at; Start 23; Stop 47
ttaagatttcgtctatgatggatcg

SEQ ID NO: 195783 - DNA, 25 bp, Artificial
  probe
  misc_feature (1)..(25): SEQ ID NO: 7412; WAN024F87_at; Start 47; Stop 71
gagttctgcttatagtctcagcagt

SEQ ID NO: 195784 - DNA, 25 bp, Artificial
  probe
  misc_feature (1)..(25): SEQ ID NO: 7412; WAN024F87_at; Start 19; Stop 43
tattttaagatttcgtctatgatgg

SEQ ID NO: 195785 - DNA, 25 bp, Artificial
  probe
  misc_feature (1)..(25): SEQ ID NO: 7412; WAN024F87_at; Start 44; Stop 68
atcgagttctgcttatagtctcagc

SEQ ID NO: 195786 - DNA, 25 bp, Artificial
  probe
  misc_feature (1)..(25): SEQ ID NO: 7412; WAN024F87_at; Start 54; Stop 78
gcttatagtctcagcagttgcttct

SEQ ID NO: 195787 - DNA, 25 bp, Artificial
  probe
  misc_feature (1)..(25): SEQ ID NO: 7412; WAN024F87_at; Start 70; Stop 94
gttgcttctgtctctgaagaaaaga

SEQ ID NO: 195788 - DNA, 25 bp, Artificial
  probe
  misc_feature (1)..(25): SEQ ID NO: 7412; WAN024F87_at; Start 25; Stop 49
aagatttcgtctatgatggatcgag

SEQ ID NO: 195789 - DNA, 25 bp, Artificial
  probe
  misc_feature (1)..(25): SEQ ID NO: 7412; WAN024F87_at; Start 82; Stop 106
tctgaagaaaagagagtcggagaaa

SEQ ID NO: 195790 - DNA, 25 bp, Artificial
  probe
  misc_feature (1)..(25): SEQ ID NO: 1922; WAN024F88_at; Start 285; Stop 309
ccttgagagctgtttcgattggaaa

SEQ ID NO: 195791 - DNA, 25 bp, Artificial
  probe
  misc_feature (1)..(25): SEQ ID NO: 1922; WAN024F88_at; Start 350; Stop 374
gcagtccttccttcctcaaacatat

SEQ ID NO: 195792 - DNA, 25 bp, Artificial
  probe
  misc_feature (1)..(25): SEQ ID NO: 1922; WAN024F88_at; Start 266; Stop 290
gccccttcgattgtcagtaccttga

SEQ ID NO: 195793 - DNA, 25 bp, Artificial
  probe
  misc_feature (1)..(25): SEQ ID NO: 1922; WAN024F88_at; Start 202; Stop 226
cagaaaatctgcttgcttgccgact

SEQ ID NO: 195794 - DNA, 25 bp, Artificial
  probe
  misc_feature (1)..(25): SEQ ID NO: 1922; WAN024F88_at; Start 220; Stop 244
gccgacttccagacttcctatctga

SEQ ID NO: 195795 - DNA, 25 bp, Artificial
  probe
  misc_feature (1)..(25): SEQ ID NO: 1922; WAN024F88_at; Start 45; Stop 69
tcttttaaagttctactgtcaggac

SEQ ID NO: 195796 - DNA, 25 bp, Artificial
  probe
  misc_feature (1)..(25): SEQ ID NO: 1922; WAN024F88_at; Start 90; Stop 114
gttctccggcgatataaacatcatc

SEQ ID NO: 195797 - DNA, 25 bp, Artificial
  probe
  misc_feature (1)..(25): SEQ ID NO: 1922; WAN024F88_at; Start 66; Stop 90
ggacttgaccttgcttaacaacctg

SEQ ID NO: 195798 - DNA, 25 bp, Artificial
  probe
  misc_feature (1)..(25): SEQ ID NO: 1922; WAN024F88_at; Start 56; Stop 80
tctactgtcaggacttgaccttgct

SEQ ID NO: 195799 - DNA, 25 bp, Artificial
  probe
  misc_feature (1)..(25): SEQ ID NO: 1922; WAN024F88_at; Start 144; Stop 168
ggtgagacagcatattttcctgagg

SEQ ID NO: 195800 - DNA, 25 bp, Artificial
  probe
  misc_feature (1)..(25): SEQ ID NO: 1922; WAN024F88_at; Start 190; Stop 214
tggttgaatgaccagaaaatctgct

SEQ ID NO: 195801 - DNA, 25 bp, Artificial
  probe
  misc_feature (1)..(25): SEQ ID NO: 1922; WAN024F88_at; Start 336; Stop 360
tctgaagaagagctgcagtccttcc

SEQ ID NO: 195802 - DNA, 25 bp, Artificial
  probe
  misc_feature (1)..(25): SEQ ID NO: 1922; WAN024F88_at; Start 345; Stop 369
gagctgcagtccttccttcctcaaa

SEQ ID NO: 195803 - DNA, 25 bp, Artificial
  probe
  misc_feature (1)..(25): SEQ ID NO: 1922; WAN024F88_at; Start 125; Stop 149
gatttaactgcataaaccaggtgag

SEQ ID NO: 195804 - DNA, 25 bp, Artificial
  probe
  misc_feature (1)..(25): SEQ ID NO: 1922; WAN024F88_at; Start 162; Stop 186
cctgaggttggagatgaattttccc

SEQ ID NO: 195805 - DNA, 25 bp, Artificial
  probe
  misc_feature (1)..(25): SEQ ID NO: 1922; WAN024F88_at; Start 113; Stop 137
tctacatcactagatttaactgcat

SEQ ID NO: 195806 - DNA, 25 bp, Artificial
  probe
  misc_feature (1)..(25): SEQ ID NO: 1922; WAN024F88_at; Start 216; Stop 240
gcttgccgacttccagacttcctat

SEQ ID NO: 195807 - DNA, 25 bp, Artificial
  probe
  misc_feature (1)..(25): SEQ ID NO: 1922; WAN024F88_at; Start 97; Stop 121
ggcgatataaacatcatctacatca

SEQ ID NO: 195808 - DNA, 25 bp, Artificial
  probe
  misc_feature (1)..(25): SEQ ID NO: 1922; WAN024F88_at; Start 333; Stop 357
tcttctgaagaagagctgcagtcct

SEQ ID NO: 195809 - DNA, 25 bp, Artificial
  probe
  misc_feature (1)..(25): SEQ ID NO: 1922; WAN024F88_at; Start 261; Stop 285
ccttagccccttcgattgtcagtac

SEQ ID NO: 195810 - DNA, 25 bp, Artificial
  probe
  misc_feature (1)..(25): SEQ ID NO: 1922; WAN024F88_at; Start 139; Stop 163
aaccaggtgagacagcatattttcc

SEQ ID NO: 195811 - DNA, 25 bp, Artificial
  probe
  misc_feature (1)..(25): SEQ ID NO: 1922; WAN024F88_at; Start 149; Stop 173
gacagcatattttcctgaggttgga

SEQ ID NO: 195812 - DNA, 25 bp, Artificial
  probe
  misc_feature (1)..(25): SEQ ID NO: 1922; WAN024F88_at; Start 172; Stop 196
gagatgaattttcccttgtggttga

SEQ ID NO: 195813 - DNA, 25 bp, Artificial
  probe
  misc_feature (1)..(25): SEQ ID NO: 1922; WAN024F88_at; Start 235; Stop 259
tcctatctgattttccattccaagg

SEQ ID NO: 195814 - DNA, 25 bp, Artificial
  probe
  misc_feature (1)..(25): SEQ ID NO: 1922; WAN024F88_at; Start 135; Stop 159
cataaaccaggtgagacagcatatt

SEQ ID NO: 195815 - DNA, 25 bp, Artificial
  probe
  misc_feature (1)..(25): SEQ ID NO: 1922; WAN024F88_at; Start 77; Stop 101
tgcttaacaacctgttctccggcga

SEQ ID NO: 195816 - DNA, 25 bp, Artificial
  probe
  misc_feature (1)..(25): SEQ ID NO: 1922; WAN024F88_at; Start 299; Stop 323
tcgattggaaactggctggcatccc

SEQ ID NO: 195817 - DNA, 25 bp, Artificial
  probe
  misc_feature (1)..(25): SEQ ID NO: 1922; WAN024F88_at; Start 316; Stop 340
ggcatccccacttttcatcttctga

SEQ ID NO: 195818 - DNA, 25 bp, Artificial
  probe
  misc_feature (1)..(25): SEQ ID NO: 1922; WAN024F88_at; Start 277; Stop 301
tgtcagtaccttgagagctgtttcg

SEQ ID NO: 195819 - DNA, 25 bp, Artificial
  probe
  misc_feature (1)..(25): SEQ ID NO: 1922; WAN024F88_at; Start 82; Stop 106
aacaacctgttctccggcgatataa

SEQ ID NO: 195820 - DNA, 25 bp, Artificial
  probe
  misc_feature (1)..(25): SEQ ID NO: 1922; WAN024F88_at; Start 211; Stop 235
tgcttgcttgccgacttccagactt

SEQ ID NO: 195821 - DNA, 25 bp, Artificial
  probe
  misc_feature (1)..(25): SEQ ID NO: 1922; WAN024F88_at; Start 306; Stop 330
gaaactggctggcatccccactttt

SEQ ID NO: 195822 - DNA, 25 bp, Artificial
  probe
  misc_feature (1)..(25): SEQ ID NO: 1922; WAN024F88_at; Start 272; Stop 296
tcgattgtcagtaccttgagagctg

SEQ ID NO: 195823 - DNA, 25 bp, Artificial
  probe
  misc_feature (1)..(25): SEQ ID NO: 1922; WAN024F88_at; Start 181; Stop 205
tttcccttgtggttgaatgaccaga

SEQ ID NO: 195824 - DNA, 25 bp, Artificial
  probe
  misc_feature (1)..(25): SEQ ID NO: 930; WAN024F89_at; Start 586; Stop 610
gacttgctggaagcgagtttggaaa

SEQ ID NO: 195825 - DNA, 25 bp, Artificial
  probe
  misc_feature (1)..(25): SEQ ID NO: 930; WAN024F89_at; Start 1000; Stop 1024
tttccaatcgaaacagctctcaagg

SEQ ID NO: 195826 - DNA, 25 bp, Artificial
  probe
  misc_feature (1)..(25): SEQ ID NO: 930; WAN024F89_at; Start 1124; Stop 1148
ggaaaattcatctccaacctcagga

SEQ ID NO: 195827 - DNA, 25 bp, Artificial
  probe
  misc_feature (1)..(25): SEQ ID NO: 930; WAN024F89_at; Start 874; Stop 898
caaaaagcgggagtagcagtcggaa

SEQ ID NO: 195828 - DNA, 25 bp, Artificial
  probe
  misc_feature (1)..(25): SEQ ID NO: 930; WAN024F89_at; Start 99; Stop 123
tgtcggtcaagataagccagcgttt

SEQ ID NO: 195829 - DNA, 25 bp, Artificial
  probe
  misc_feature (1)..(25): SEQ ID NO: 930; WAN024F89_at; Start 85; Stop 109
tctcaaatcgtctatgtcggtcaag

SEQ ID NO: 195830 - DNA, 25 bp, Artificial
  probe
  misc_feature (1)..(25): SEQ ID NO: 930; WAN024F89_at; Start 168; Stop 192
tatgcctggtttggtcaattgtcac

SEQ ID NO: 195831 - DNA, 25 bp, Artificial
  probe
  misc_feature (1)..(25): SEQ ID NO: 930; WAN024F89_at; Start 1017; Stop 1041
tctcaaggtactgacaatcgaaggg

SEQ ID NO: 195832 - DNA, 25 bp, Artificial
  probe
  misc_feature (1)..(25): SEQ ID NO: 930; WAN024F89_at; Start 1085; Stop 1109
tcggcaagcaagcagattttctggt

SEQ ID NO: 195833 - DNA, 25 bp, Artificial
  probe
  misc_feature (1)..(25): SEQ ID NO: 930; WAN024F89_at; Start 936; Stop 960
tatgtttgaggaaggaaggactgca

SEQ ID NO: 195834 - DNA, 25 bp, Artificial
  probe
  misc_feature (1)..(25): SEQ ID NO: 930; WAN024F89_at; Start 807; Stop 831
ggctatcgcccacaatcctatcagt

SEQ ID NO: 195835 - DNA, 25 bp, Artificial
  probe
  misc_feature (1)..(25): SEQ ID NO: 930; WAN024F89_at; Start 1146; Stop 1170
ggaaaatatgctgtctcacctggtt

SEQ ID NO: 195836 - DNA, 25 bp, Artificial
  probe
  misc_feature (1)..(25): SEQ ID NO: 930; WAN024F89_at; Start 1070; Stop 1094
taggaagtctggaagtcggcaagca

SEQ ID NO: 195837 - DNA, 25 bp, Artificial
  probe
  misc_feature (1)..(25): SEQ ID NO: 930; WAN024F89_at; Start 1104; Stop 1128
tctggtcattcaaccacaagggaaa

SEQ ID NO: 195838 - DNA, 25 bp, Artificial
  probe
  misc_feature (1)..(25): SEQ ID NO: 930; WAN024F89_at; Start 203; Stop 227
caatgacaggtctgagagggatccg

SEQ ID NO: 195839 - DNA, 25 bp, Artificial
  probe
  misc_feature (1)..(25): SEQ ID NO: 930; WAN024F89_at; Start 723; Stop 747
gggttatttagatcatccgtccgta

SEQ ID NO: 195840 - DNA, 25 bp, Artificial
  probe
  misc_feature (1)..(25): SEQ ID NO: 930; WAN024F89_at; Start 1219; Stop 1243
caggttgttaagcaaggtcaagtcc

SEQ ID NO: 195841 - DNA, 25 bp, Artificial
  probe
  misc_feature (1)..(25): SEQ ID NO: 930; WAN024F89_at; Start 771; Stop 795
cgagagagaaattgaacgcttggca

SEQ ID NO: 195842 - DNA, 25 bp, Artificial
  probe
  misc_feature (1)..(25): SEQ ID NO: 930; WAN024F89_at; Start 1204; Stop 1228
tatatcgccggagaacaggttgtta

SEQ ID NO: 195843 - DNA, 25 bp, Artificial
  probe
  misc_feature (1)..(25): SEQ ID NO: 930; WAN024F89_at; Start 901; Stop 925
gcgactgactcggttgcttccaata

SEQ ID NO: 195844 - DNA, 25 bp, Artificial
  probe
  misc_feature (1)..(25): SEQ ID NO: 930; WAN024F89_at; Start 836; Stop 860
tcaaactggcatcaggaattgctcc

SEQ ID NO: 195845 - DNA, 25 bp, Artificial
  probe
  misc_feature (1)..(25): SEQ ID NO: 930; WAN024F89_at; Start 410; Stop 434
tggtgaaaacttccaagatgcgttg

SEQ ID NO: 195846 - DNA, 25 bp, Artificial
  probe
  misc_feature (1)..(25): SEQ ID NO: 930; WAN024F89_at; Start 860; Stop 884
caattatccagctccaaaaagcggg

SEQ ID NO: 195847 - DNA, 25 bp, Artificial
  probe
  misc_feature (1)..(25): SEQ ID NO: 930; WAN024F89_at; Start 635; Stop 659
tccatgtccatgtggcggagaccaa

SEQ ID NO: 195848 - DNA, 25 bp, Artificial
  probe
  misc_feature (1)..(25): SEQ ID NO: 930; WAN024F89_at; Start 952; Stop 976
aggactgcagctcttcttcagaaga

SEQ ID NO: 195849 - DNA, 25 bp, Artificial
  probe
  misc_feature (1)..(25): SEQ ID NO: 930; WAN024F89_at; Start 986; Stop 1010
gggatgccagccagtttccaatcga

SEQ ID NO: 195850 - DNA, 25 bp, Artificial
  probe
  misc_feature (1)..(25): SEQ ID NO: 930; WAN024F89_at; Start 141; Stop 165
gattatagactatcagggagcttgg

SEQ ID NO: 195851 - DNA, 25 bp, Artificial
  probe
  misc_feature (1)..(25): SEQ ID NO: 930; WAN024F89_at; Start 329; Stop 353
cagagatgctccagtcaggaacaac

SEQ ID NO: 195852 - DNA, 25 bp, Artificial
  probe
  misc_feature (1)..(25): SEQ ID NO: 930; WAN024F89_at; Start 70; Stop 94
ttagcagtcaaggattctcaaatcg

SEQ ID NO: 195853 - DNA, 25 bp, Artificial
  probe
  misc_feature (1)..(25): SEQ ID NO: 930; WAN024F89_at; Start 283; Stop 307
gagtttactcccgacatgactacca

SEQ ID NO: 195854 - DNA, 25 bp, Artificial
  probe
  misc_feature (1)..(25): SEQ ID NO: 930; WAN024F89_at; Start 571; Stop 595
tatagctgcagtagagacttgctgg

SEQ ID NO: 195855 - DNA, 25 bp, Artificial
  probe
  misc_feature (1)..(25): SEQ ID NO: 930; WAN024F89_at; Start 552; Stop 576
ggtagcacctcattctccgtatagc

SEQ ID NO: 195856 - DNA, 25 bp, Artificial
  probe
  misc_feature (1)..(25): SEQ ID NO: 930; WAN024F89_at; Start 229; Stop 253
gatgacagcaatctccatgaatggc

SEQ ID NO: 195857 - DNA, 25 bp, Artificial
  probe
  misc_feature (1)..(25): SEQ ID NO: 930; WAN024F89_at; Start 393; Stop 417
ccagcaaatttatcaggtggtgaaa

SEQ ID NO: 195858 - DNA, 25 bp, Artificial
  probe
  misc_feature (1)..(25): SEQ ID NO: 6221; WAN024F8A_at; Start 58; Stop 82
gctgatgcccggatgtctgagaatc

SEQ ID NO: 195859 - DNA, 25 bp, Artificial
  probe
  misc_feature (1)..(25): SEQ ID NO: 6221; WAN024F8A_at; Start 22; Stop 46
gctgaatattttcttagcaatcaaa

SEQ ID NO: 195860 - DNA, 25 bp, Artificial
  probe
  misc_feature (1)..(25): SEQ ID NO: 6221; WAN024F8A_at; Start 48; Stop 72
cattagttgggctgatgcccggatg

SEQ ID NO: 195861 - DNA, 25 bp, Artificial
  probe
  misc_feature (1)..(25): SEQ ID NO: 6221; WAN024F8A_at; Start 49; Stop 73
attagttgggctgatgcccggatgt

SEQ ID NO: 195862 - DNA, 25 bp, Artificial
  probe
  misc_feature (1)..(25): SEQ ID NO: 6221; WAN024F8A_at; Start 16; Stop 40
tggattgctgaatattttcttagca

SEQ ID NO: 195863 - DNA, 25 bp, Artificial
  probe
  misc_feature (1)..(25): SEQ ID NO: 6221; WAN024F8A_at; Start 81; Stop 105
tcctcctattcctccttctatagtg

SEQ ID NO: 195864 - DNA, 25 bp, Artificial
  probe
  misc_feature (1)..(25): SEQ ID NO: 6221; WAN024F8A_at; Start 15; Stop 39
ctggattgctgaatattttcttagc

SEQ ID NO: 195865 - DNA, 25 bp, Artificial
  probe
  misc_feature (1)..(25): SEQ ID NO: 6221; WAN024F8A_at; Start 37; Stop 61
agcaatcaaatcattagttgggctg

SEQ ID NO: 195866 - DNA, 25 bp, Artificial
  probe
  misc_feature (1)..(25): SEQ ID NO: 6221; WAN024F8A_at; Start 5; Stop 29
caagtgatttctggattgctgaata

SEQ ID NO: 195867 - DNA, 25 bp, Artificial
  probe
  misc_feature (1)..(25): SEQ ID NO: 6221; WAN024F8A_at; Start 10; Stop 34
gatttctggattgctgaatattttc

SEQ ID NO: 195868 - DNA, 25 bp, Artificial
  probe
  misc_feature (1)..(25): SEQ ID NO: 6221; WAN024F8A_at; Start 83; Stop 107
ctcctattcctccttctatagtgag

SEQ ID NO: 195869 - DNA, 25 bp, Artificial
  probe
  misc_feature (1)..(25): SEQ ID NO: 6221; WAN024F8A_at; Start 39; Stop 63
caatcaaatcattagttgggctgat

SEQ ID NO: 195870 - DNA, 25 bp, Artificial
  probe
  misc_feature (1)..(25): SEQ ID NO: 6221; WAN024F8A_at; Start 25; Stop 49
gaatattttcttagcaatcaaatca

SEQ ID NO: 195871 - DNA, 25 bp, Artificial
  probe
  misc_feature (1)..(25): SEQ ID NO: 6221; WAN024F8A_at; Start 59; Stop 83
ctgatgcccggatgtctgagaatcc

SEQ ID NO: 195872 - DNA, 25 bp, Artificial
  probe
  misc_feature (1)..(25): SEQ ID NO: 6221; WAN024F8A_at; Start 34; Stop 58
cttagcaatcaaatcattagttggg

SEQ ID NO: 195873 - DNA, 25 bp, Artificial
  probe
  misc_feature (1)..(25): SEQ ID NO: 6221; WAN024F8A_at; Start 3; Stop 27
gacaagtgatttctggattgctgaa

SEQ ID NO: 195874 - DNA, 25 bp, Artificial
  probe
  misc_feature (1)..(25): SEQ ID NO: 6221; WAN024F8A_at; Start 40; Stop 64
aatcaaatcattagttgggctgatg

SEQ ID NO: 195875 - DNA, 25 bp, Artificial
  probe
  misc_feature (1)..(25): SEQ ID NO: 6221; WAN024F8A_at; Start 30; Stop 54
ttttcttagcaatcaaatcattagt

SEQ ID NO: 195876 - DNA, 25 bp, Artificial
  probe
  misc_feature (1)..(25): SEQ ID NO: 6221; WAN024F8A_at; Start 57; Stop 81
ggctgatgcccggatgtctgagaat

SEQ ID NO: 195877 - DNA, 25 bp, Artificial
  probe
  misc_feature (1)..(25): SEQ ID NO: 6221; WAN024F8A_at; Start 4; Stop 28
acaagtgatttctggattgctgaat

SEQ ID NO: 195878 - DNA, 25 bp, Artificial
  probe
  misc_feature (1)..(25): SEQ ID NO: 6221; WAN024F8A_at; Start 41; Stop 65
atcaaatcattagttgggctgatgc

SEQ ID NO: 195879 - DNA, 25 bp, Artificial
  probe
  misc_feature (1)..(25): SEQ ID NO: 6221; WAN024F8A_at; Start 51; Stop 75
tagttgggctgatgcccggatgtct

SEQ ID NO: 195880 - DNA, 25 bp, Artificial
  probe
  misc_feature (1)..(25): SEQ ID NO: 6221; WAN024F8A_at; Start 32; Stop 56
ttcttagcaatcaaatcattagttg

SEQ ID NO: 195881 - DNA, 25 bp, Artificial
  probe
  misc_feature (1)..(25): SEQ ID NO: 6221; WAN024F8A_at; Start 36; Stop 60
tagcaatcaaatcattagttgggct

SEQ ID NO: 195882 - DNA, 25 bp, Artificial
  probe
  misc_feature (1)..(25): SEQ ID NO: 6221; WAN024F8A_at; Start 14; Stop 38
tctggattgctgaatattttcttag

SEQ ID NO: 195883 - DNA, 25 bp, Artificial
  probe
  misc_feature (1)..(25): SEQ ID NO: 6221; WAN024F8A_at; Start 6; Stop 30
aagtgatttctggattgctgaatat

SEQ ID NO: 195884 - DNA, 25 bp, Artificial
  probe
  misc_feature (1)..(25): SEQ ID NO: 6221; WAN024F8A_at; Start 38; Stop 62
gcaatcaaatcattagttgggctga

SEQ ID NO: 195885 - DNA, 25 bp, Artificial
  probe
  misc_feature (1)..(25): SEQ ID NO: 6221; WAN024F8A_at; Start 33; Stop 57
tcttagcaatcaaatcattagttgg

SEQ ID NO: 195886 - DNA, 25 bp, Artificial
  probe
  misc_feature (1)..(25): SEQ ID NO: 6221; WAN024F8A_at; Start 50; Stop 74
ttagttgggctgatgcccggatgtc

SEQ ID NO: 195887 - DNA, 25 bp, Artificial
  probe
  misc_feature (1)..(25): SEQ ID NO: 6221; WAN024F8A_at; Start 84; Stop 108
tcctattcctccttctatagtgagt

SEQ ID NO: 195888 - DNA, 25 bp, Artificial
  probe
  misc_feature (1)..(25): SEQ ID NO: 6221; WAN024F8A_at; Start 35; Stop 59
ttagcaatcaaatcattagttgggc

SEQ ID NO: 195889 - DNA, 25 bp, Artificial
  probe
  misc_feature (1)..(25): SEQ ID NO: 6221; WAN024F8A_at; Start 43; Stop 67
caaatcattagttgggctgatgccc

SEQ ID NO: 195890 - DNA, 25 bp, Artificial
  probe
  misc_feature (1)..(25): SEQ ID NO: 6221; WAN024F8A_at; Start 42; Stop 66
tcaaatcattagttgggctgatgcc

SEQ ID NO: 195891 - DNA, 25 bp, Artificial
  probe
  misc_feature (1)..(25): SEQ ID NO: 6221; WAN024F8A_at; Start 44; Stop 68
aaatcattagttgggctgatgcccg

SEQ ID NO: 195892 - DNA, 25 bp, Artificial
  probe
  misc_feature (1)..(25): SEQ ID NO: 4545; WAN024F8B_at; Start 163; Stop 187
caccagagctacaaacaaatcgcac

SEQ ID NO: 195893 - DNA, 25 bp, Artificial
  probe
  misc_feature (1)..(25): SEQ ID NO: 4545; WAN024F8B_at; Start 138; Stop 162
aattcgccaacgtgaaggtgatacc

SEQ ID NO: 195894 - DNA, 25 bp, Artificial
  probe
  misc_feature (1)..(25): SEQ ID NO: 4545; WAN024F8B_at; Start 207; Stop 231
tgtcgatagtaattacttctcagat

SEQ ID NO: 195895 - DNA, 25 bp, Artificial
  probe
  misc_feature (1)..(25): SEQ ID NO: 4545; WAN024F8B_at; Start 232; Stop 256
gacctagcttttcatagttttatag

SEQ ID NO: 195896 - DNA, 25 bp, Artificial
  probe
  misc_feature (1)..(25): SEQ ID NO: 4545; WAN024F8B_at; Start 36; Stop 60
tggaatccaagttatcatcgaaatt

SEQ ID NO: 195897 - DNA, 25 bp, Artificial
  probe
  misc_feature (1)..(25): SEQ ID NO: 4545; WAN024F8B_at; Start 15; Stop 39
cgtcttggcggagttagataatgga

SEQ ID NO: 195898 - DNA, 25 bp, Artificial
  probe
  misc_feature (1)..(25): SEQ ID NO: 4545; WAN024F8B_at; Start 23; Stop 47
cggagttagataatggaatccaagt

SEQ ID NO: 195899 - DNA, 25 bp, Artificial
  probe
  misc_feature (1)..(25): SEQ ID NO: 4545; WAN024F8B_at; Start 195; Stop 219
cgctatcgcaattgtcgatagtaat

SEQ ID NO: 195900 - DNA, 25 bp, Artificial
  probe
  misc_feature (1)..(25): SEQ ID NO: 4545; WAN024F8B_at; Start 145; Stop 169
caacgtgaaggtgatacccaccaga

SEQ ID NO: 195901 - DNA, 25 bp, Artificial
  probe
  misc_feature (1)..(25): SEQ ID NO: 4545; WAN024F8B_at; Start 201; Stop 225
cgcaattgtcgatagtaattacttc

SEQ ID NO: 195902 - DNA, 25 bp, Artificial
  probe
  misc_feature (1)..(25): SEQ ID NO: 4545; WAN024F8B_at; Start 54; Stop 78
cgaaattcaggttcatcatcagaat

SEQ ID NO: 195903 - DNA, 25 bp, Artificial
  probe
  misc_feature (1)..(25): SEQ ID NO: 4545; WAN024F8B_at; Start 141; Stop 165
tcgccaacgtgaaggtgatacccac

SEQ ID NO: 195904 - DNA, 25 bp, Artificial
  probe
  misc_feature (1)..(25): SEQ ID NO: 4545; WAN024F8B_at; Start 140; Stop 164
ttcgccaacgtgaaggtgataccca

SEQ ID NO: 195905 - DNA, 25 bp, Artificial
  probe
  misc_feature (1)..(25): SEQ ID NO: 4545; WAN024F8B_at; Start 135; Stop 159
aaaaattcgccaacgtgaaggtgat

SEQ ID NO: 195906 - DNA, 25 bp, Artificial
  probe
  misc_feature (1)..(25): SEQ ID NO: 4545; WAN024F8B_at; Start 151; Stop 175
gaaggtgatacccaccagagctaca

SEQ ID NO: 195907 - DNA, 25 bp, Artificial
  probe
  misc_feature (1)..(25): SEQ ID NO: 4545; WAN024F8B_at; Start 154; Stop 178
ggtgatacccaccagagctacaaac

SEQ ID NO: 195908 - DNA, 25 bp, Artificial
  probe
  misc_feature (1)..(25): SEQ ID NO: 4545; WAN024F8B_at; Start 57; Stop 81
aattcaggttcatcatcagaatttt

SEQ ID NO: 195909 - DNA, 25 bp, Artificial
  probe
  misc_feature (1)..(25): SEQ ID NO: 4545; WAN024F8B_at; Start 157; Stop 181
gatacccaccagagctacaaacaaa

SEQ ID NO: 195910 - DNA, 25 bp, Artificial
  probe
  misc_feature (1)..(25): SEQ ID NO: 4545; WAN024F8B_at; Start 137; Stop 161
aaattcgccaacgtgaaggtgatac

SEQ ID NO: 195911 - DNA, 25 bp, Artificial
  probe
  misc_feature (1)..(25): SEQ ID NO: 4545; WAN024F8B_at; Start 43; Stop 67
caagttatcatcgaaattcaggttc

SEQ ID NO: 195912 - DNA, 25 bp, Artificial
  probe
  misc_feature (1)..(25): SEQ ID NO: 4545; WAN024F8B_at; Start 147; Stop 171
acgtgaaggtgatacccaccagagc

SEQ ID NO: 195913 - DNA, 25 bp, Artificial
  probe
  misc_feature (1)..(25): SEQ ID NO: 4545; WAN024F8B_at; Start 18; Stop 42
cttggcggagttagataatggaatc

SEQ ID NO: 195914 - DNA, 25 bp, Artificial
  probe
  misc_feature (1)..(25): SEQ ID NO: 4545; WAN024F8B_at; Start 189; Stop 213
agtatacgctatcgcaattgtcgat

SEQ ID NO: 195915 - DNA, 25 bp, Artificial
  probe
  misc_feature (1)..(25): SEQ ID NO: 4545; WAN024F8B_at; Start 159; Stop 183
tacccaccagagctacaaacaaatc

SEQ ID NO: 195916 - DNA, 25 bp, Artificial
  probe
  misc_feature (1)..(25): SEQ ID NO: 4545; WAN024F8B_at; Start 143; Stop 167
gccaacgtgaaggtgatacccacca

SEQ ID NO: 195917 - DNA, 25 bp, Artificial
  probe
  misc_feature (1)..(25): SEQ ID NO: 4545; WAN024F8B_at; Start 33; Stop 57
taatggaatccaagttatcatcgaa

SEQ ID NO: 195918 - DNA, 25 bp, Artificial
  probe
  misc_feature (1)..(25): SEQ ID NO: 4545; WAN024F8B_at; Start 149; Stop 173
gtgaaggtgatacccaccagagcta

SEQ ID NO: 195919 - DNA, 25 bp, Artificial
  probe
  misc_feature (1)..(25): SEQ ID NO: 4545; WAN024F8B_at; Start 191; Stop 215
tatacgctatcgcaattgtcgatag

SEQ ID NO: 195920 - DNA, 25 bp, Artificial
  probe
  misc_feature (1)..(25): SEQ ID NO: 4545; WAN024F8B_at; Start 21; Stop 45
ggcggagttagataatggaatccaa

SEQ ID NO: 195921 - DNA, 25 bp, Artificial
  probe
  misc_feature (1)..(25): SEQ ID NO: 4545; WAN024F8B_at; Start 46; Stop 70
gttatcatcgaaattcaggttcatc

SEQ ID NO: 195922 - DNA, 25 bp, Artificial
  probe
  misc_feature (1)..(25): SEQ ID NO: 4545; WAN024F8B_at; Start 51; Stop 75
catcgaaattcaggttcatcatcag

SEQ ID NO: 195923 - DNA, 25 bp, Artificial
  probe
  misc_feature (1)..(25): SEQ ID NO: 4545; WAN024F8B_at; Start 53; Stop 77
tcgaaattcaggttcatcatcagaa

SEQ ID NO: 195924 - DNA, 25 bp, Artificial
  probe
  misc_feature (1)..(25): SEQ ID NO: 4545; WAN024F8B_at; Start 41; Stop 65
tccaagttatcatcgaaattcaggt

SEQ ID NO: 195925 - DNA, 25 bp, Artificial
  probe
  misc_feature (1)..(25): SEQ ID NO: 4545; WAN024F8B_at; Start 130; Stop 154
ctagaaaaaattcgccaacgtgaag

SEQ ID NO: 195926 - DNA, 25 bp, Artificial
  probe
  misc_feature (1)..(25): SEQ ID NO: 1867; WAN024F8C_at; Start 58; Stop 82
ttggagggaagtaacattcacgtct

SEQ ID NO: 195927 - DNA, 25 bp, Artificial
  probe
  misc_feature (1)..(25): SEQ ID NO: 1867; WAN024F8C_at; Start 62; Stop 86
agggaagtaacattcacgtcttgcc

SEQ ID NO: 195928 - DNA, 25 bp, Artificial
  probe
  misc_feature (1)..(25): SEQ ID NO: 1867; WAN024F8C_at; Start 63; Stop 87
gggaagtaacattcacgtcttgcct

SEQ ID NO: 195929 - DNA, 25 bp, Artificial
  probe
  misc_feature (1)..(25): SEQ ID NO: 1867; WAN024F8C_at; Start 34; Stop 58
ttgccagcaaaaaatgtgacgattt

SEQ ID NO: 195930 - DNA, 25 bp, Artificial
  probe
  misc_feature (1)..(25): SEQ ID NO: 1867; WAN024F8C_at; Start 60; Stop 84
ggagggaagtaacattcacgtcttg

SEQ ID NO: 195931 - DNA, 25 bp, Artificial
  probe
  misc_feature (1)..(25): SEQ ID NO: 1867; WAN024F8C_at; Start 69; Stop 93
taacattcacgtcttgccttccatg

SEQ ID NO: 195932 - DNA, 25 bp, Artificial
  probe
  misc_feature (1)..(25): SEQ ID NO: 1867; WAN024F8C_at; Start 67; Stop 91
agtaacattcacgtcttgccttcca

SEQ ID NO: 195933 - DNA, 25 bp, Artificial
  probe
  misc_feature (1)..(25): SEQ ID NO: 1867; WAN024F8C_at; Start 30; Stop 54
ggacttgccagcaaaaaatgtgacg

SEQ ID NO: 195934 - DNA, 25 bp, Artificial
  probe
  misc_feature (1)..(25): SEQ ID NO: 1867; WAN024F8C_at; Start 70; Stop 94
aacattcacgtcttgccttccatgc

SEQ ID NO: 195935 - DNA, 25 bp, Artificial
  probe
  misc_feature (1)..(25): SEQ ID NO: 1867; WAN024F8C_at; Start 57; Stop 81
tttggagggaagtaacattcacgtc

SEQ ID NO: 195936 - DNA, 25 bp, Artificial
  probe
  misc_feature (1)..(25): SEQ ID NO: 1867; WAN024F8C_at; Start 61; Stop 85
gagggaagtaacattcacgtcttgc

SEQ ID NO: 195937 - DNA, 25 bp, Artificial
  probe
  misc_feature (1)..(25): SEQ ID NO: 1867; WAN024F8C_at; Start 54; Stop 78
gattttggagggaagtaacattcac

SEQ ID NO: 195938 - DNA, 25 bp, Artificial
  probe
  misc_feature (1)..(25): SEQ ID NO: 1867; WAN024F8C_at; Start 35; Stop 59
tgccagcaaaaaatgtgacgatttt

SEQ ID NO: 195939 - DNA, 25 bp, Artificial
  probe
  misc_feature (1)..(25): SEQ ID NO: 1867; WAN024F8C_at; Start 29; Stop 53
tggacttgccagcaaaaaatgtgac

SEQ ID NO: 195940 - DNA, 25 bp, Artificial
  probe
  misc_feature (1)..(25): SEQ ID NO: 1867; WAN024F8C_at; Start 32; Stop 56
acttgccagcaaaaaatgtgacgat

SEQ ID NO: 195941 - DNA, 25 bp, Artificial
  probe
  misc_feature (1)..(25): SEQ ID NO: 1867; WAN024F8C_at; Start 55; Stop 79
attttggagggaagtaacattcacg

SEQ ID NO: 195942 - DNA, 25 bp, Artificial
  probe
  misc_feature (1)..(25): SEQ ID NO: 1867; WAN024F8C_at; Start 28; Stop 52
ctggacttgccagcaaaaaatgtga

SEQ ID NO: 195943 - DNA, 25 bp, Artificial
  probe
  misc_feature (1)..(25): SEQ ID NO: 1867; WAN024F8C_at; Start 53; Stop 77
cgattttggagggaagtaacattca

SEQ ID NO: 195944 - DNA, 25 bp, Artificial
  probe
  misc_feature (1)..(25): SEQ ID NO: 1867; WAN024F8C_at; Start 79; Stop 103
gtcttgccttccatgccctactcag

SEQ ID NO: 195945 - DNA, 25 bp, Artificial
  probe
  misc_feature (1)..(25): SEQ ID NO: 1867; WAN024F8C_at; Start 41; Stop 65
caaaaaatgtgacgattttggaggg

SEQ ID NO: 195946 - DNA, 25 bp, Artificial
  probe
  misc_feature (1)..(25): SEQ ID NO: 1867; WAN024F8C_at; Start 37; Stop 61
ccagcaaaaaatgtgacgattttgg

SEQ ID NO: 195947 - DNA, 25 bp, Artificial
  probe
  misc_feature (1)..(25): SEQ ID NO: 1867; WAN024F8C_at; Start 59; Stop 83
tggagggaagtaacattcacgtctt

SEQ ID NO: 195948 - DNA, 25 bp, Artificial
  probe
  misc_feature (1)..(25): SEQ ID NO: 1867; WAN024F8C_at; Start 31; Stop 55
gacttgccagcaaaaaatgtgacga

SEQ ID NO: 195949 - DNA, 25 bp, Artificial
  probe
  misc_feature (1)..(25): SEQ ID NO: 1867; WAN024F8C_at; Start 65; Stop 89
gaagtaacattcacgtcttgccttc

SEQ ID NO: 195950 - DNA, 25 bp, Artificial
  probe
  misc_feature (1)..(25): SEQ ID NO: 1867; WAN024F8C_at; Start 22; Stop 46
gatatgctggacttgccagcaaaaa

SEQ ID NO: 195951 - DNA, 25 bp, Artificial
  probe
  misc_feature (1)..(25): SEQ ID NO: 1867; WAN024F8C_at; Start 64; Stop 88
ggaagtaacattcacgtcttgcctt

SEQ ID NO: 195952 - DNA, 25 bp, Artificial
  probe
  misc_feature (1)..(25): SEQ ID NO: 1867; WAN024F8C_at; Start 1; Stop 25
atgatttgtcaatttatccgcgata

SEQ ID NO: 195953 - DNA, 25 bp, Artificial
  probe
  misc_feature (1)..(25): SEQ ID NO: 1867; WAN024F8C_at; Start 50; Stop 74
tgacgattttggagggaagtaacat

SEQ ID NO: 195954 - DNA, 25 bp, Artificial
  probe
  misc_feature (1)..(25): SEQ ID NO: 1867; WAN024F8C_at; Start 33; Stop 57
cttgccagcaaaaaatgtgacgatt

SEQ ID NO: 195955 - DNA, 25 bp, Artificial
  probe
  misc_feature (1)..(25): SEQ ID NO: 1867; WAN024F8C_at; Start 27; Stop 51
gctggacttgccagcaaaaaatgtg

SEQ ID NO: 195956 - DNA, 25 bp, Artificial
  probe
  misc_feature (1)..(25): SEQ ID NO: 1867; WAN024F8C_at; Start 81; Stop 105
cttgccttccatgccctactcagcg

SEQ ID NO: 195957 - DNA, 25 bp, Artificial
  probe
  misc_feature (1)..(25): SEQ ID NO: 1867; WAN024F8C_at; Start 45; Stop 69
aaatgtgacgattttggagggaagt

SEQ ID NO: 195958 - DNA, 25 bp, Artificial
  probe
  misc_feature (1)..(25): SEQ ID NO: 1867; WAN024F8C_at; Start 48; Stop 72
tgtgacgattttggagggaagtaac

SEQ ID NO: 195959 - DNA, 25 bp, Artificial
  probe
  misc_feature (1)..(25): SEQ ID NO: 1867; WAN024F8C_at; Start 24; Stop 48
tatgctggacttgccagcaaaaaat

SEQ ID NO: 195960 - DNA, 25 bp, Artificial
  probe
  misc_feature (1)..(25): SEQ ID NO: 1899; WAN024F8D_at; Start 175; Stop 199
gtgcaggatttttataccagtatag

SEQ ID NO: 195961 - DNA, 25 bp, Artificial
  probe
  misc_feature (1)..(25): SEQ ID NO: 1899; WAN024F8D_at; Start 239; Stop 263
ttgagattcaagtccatcatcagaa

SEQ ID NO: 195962 - DNA, 25 bp, Artificial
  probe
  misc_feature (1)..(25): SEQ ID NO: 1899; WAN024F8D_at; Start 214; Stop 238
ttggataacggtactcaagtaatta

SEQ ID NO: 195963 - DNA, 25 bp, Artificial
  probe
  misc_feature (1)..(25): SEQ ID NO: 1899; WAN024F8D_at; Start 209; Stop 233
cggagttggataacggtactcaagt

SEQ ID NO: 195964 - DNA, 25 bp, Artificial
  probe
  misc_feature (1)..(25): SEQ ID NO: 1899; WAN024F8D_at; Start 233; Stop 257
taattattgagattcaagtccatca

SEQ ID NO: 195965 - DNA, 25 bp, Artificial
  probe
  misc_feature (1)..(25): SEQ ID NO: 1899; WAN024F8D_at; Start 268; Stop 292
ttcatcaatcacttgtgggcttacc

SEQ ID NO: 195966 - DNA, 25 bp, Artificial
  probe
  misc_feature (1)..(25): SEQ ID NO: 1899; WAN024F8D_at; Start 204; Stop 228
cttggcggagttggataacggtact

SEQ ID NO: 195967 - DNA, 25 bp, Artificial
  probe
  misc_feature (1)..(25): SEQ ID NO: 1899; WAN024F8D_at; Start 241; Stop 265
gagattcaagtccatcatcagaatt

SEQ ID NO: 195968 - DNA, 25 bp, Artificial
  probe
  misc_feature (1)..(25): SEQ ID NO: 1899; WAN024F8D_at; Start 272; Stop 296
tcaatcacttgtgggcttacctgtg

SEQ ID NO: 195969 - DNA, 25 bp, Artificial
  probe
  misc_feature (1)..(25): SEQ ID NO: 1899; WAN024F8D_at; Start 281; Stop 305
tgtgggcttacctgtgcagtcaggt

SEQ ID NO: 195970 - DNA, 25 bp, Artificial
  probe
  misc_feature (1)..(25): SEQ ID NO: 1899; WAN024F8D_at; Start 149; Stop 173
acgtattactctccatgccttactc

SEQ ID NO: 195971 - DNA, 25 bp, Artificial
  probe
  misc_feature (1)..(25): SEQ ID NO: 1899; WAN024F8D_at; Start 203; Stop 227
tcttggcggagttggataacggtac

SEQ ID NO: 195972 - DNA, 25 bp, Artificial
  probe
  misc_feature (1)..(25): SEQ ID NO: 1899; WAN024F8D_at; Start 243; Stop 267
gattcaagtccatcatcagaatttt

SEQ ID NO: 195973 - DNA, 25 bp, Artificial
  probe
  misc_feature (1)..(25): SEQ ID NO: 1899; WAN024F8D_at; Start 146; Stop 170
ttcacgtattactctccatgcctta

SEQ ID NO: 195974 - DNA, 25 bp, Artificial
  probe
  misc_feature (1)..(25): SEQ ID NO: 1899; WAN024F8D_at; Start 219; Stop 243
taacggtactcaagtaattattgag

SEQ ID NO: 195975 - DNA, 25 bp, Artificial
  probe
  misc_feature (1)..(25): SEQ ID NO: 1899; WAN024F8D_at; Start 284; Stop 308
gggcttacctgtgcagtcaggttaa

SEQ ID NO: 195976 - DNA, 25 bp, Artificial
  probe
  misc_feature (1)..(25): SEQ ID NO: 1899; WAN024F8D_at; Start 278; Stop 302
acttgtgggcttacctgtgcagtca

SEQ ID NO: 195977 - DNA, 25 bp, Artificial
  probe
  misc_feature (1)..(25): SEQ ID NO: 1899; WAN024F8D_at; Start 229; Stop 253
caagtaattattgagattcaagtcc

SEQ ID NO: 195978 - DNA, 25 bp, Artificial
  probe
  misc_feature (1)..(25): SEQ ID NO: 1899; WAN024F8D_at; Start 279; Stop 303
cttgtgggcttacctgtgcagtcag

SEQ ID NO: 195979 - DNA, 25 bp, Artificial
  probe
  misc_feature (1)..(25): SEQ ID NO: 1899; WAN024F8D_at; Start 263; Stop 287
attttttcatcaatcacttgtgggc

SEQ ID NO: 195980 - DNA, 25 bp, Artificial
  probe
  misc_feature (1)..(25): SEQ ID NO: 1899; WAN024F8D_at; Start 286; Stop 310
gcttacctgtgcagtcaggttaatc

SEQ ID NO: 195981 - DNA, 25 bp, Artificial
  probe
  misc_feature (1)..(25): SEQ ID NO: 1899; WAN024F8D_at; Start 183; Stop 207
tttttataccagtatagacgtcttg

SEQ ID NO: 195982 - DNA, 25 bp, Artificial
  probe
  misc_feature (1)..(25): SEQ ID NO: 1899; WAN024F8D_at; Start 180; Stop 204
ggatttttataccagtatagacgtc

SEQ ID NO: 195983 - DNA, 25 bp, Artificial
  probe
  misc_feature (1)..(25): SEQ ID NO: 1899; WAN024F8D_at; Start 237; Stop 261
tattgagattcaagtccatcatcag

SEQ ID NO: 195984 - DNA, 25 bp, Artificial
  probe
  misc_feature (1)..(25): SEQ ID NO: 1899; WAN024F8D_at; Start 277; Stop 301
cacttgtgggcttacctgtgcagtc

SEQ ID NO: 195985 - DNA, 25 bp, Artificial
  probe
  misc_feature (1)..(25): SEQ ID NO: 1899; WAN024F8D_at; Start 266; Stop 290
ttttcatcaatcacttgtgggctta

SEQ ID NO: 195986 - DNA, 25 bp, Artificial
  probe
  misc_feature (1)..(25): SEQ ID NO: 1899; WAN024F8D_at; Start 270; Stop 294
catcaatcacttgtgggcttacctg

SEQ ID NO: 195987 - DNA, 25 bp, Artificial
  probe
  misc_feature (1)..(25): SEQ ID NO: 1899; WAN024F8D_at; Start 205; Stop 229
ttggcggagttggataacggtactc

SEQ ID NO: 195988 - DNA, 25 bp, Artificial
  probe
  misc_feature (1)..(25): SEQ ID NO: 1899; WAN024F8D_at; Start 207; Stop 231
ggcggagttggataacggtactcaa

SEQ ID NO: 195989 - DNA, 25 bp, Artificial
  probe
  misc_feature (1)..(25): SEQ ID NO: 1899; WAN024F8D_at; Start 144; Stop 168
tattcacgtattactctccatgcct

SEQ ID NO: 195990 - DNA, 25 bp, Artificial
  probe
  misc_feature (1)..(25): SEQ ID NO: 1899; WAN024F8D_at; Start 177; Stop 201
gcaggatttttataccagtatagac

SEQ ID NO: 195991 - DNA, 25 bp, Artificial
  probe
  misc_feature (1)..(25): SEQ ID NO: 1899; WAN024F8D_at; Start 212; Stop 236
agttggataacggtactcaagtaat

SEQ ID NO: 195992 - DNA, 25 bp, Artificial
  probe
  misc_feature (1)..(25): SEQ ID NO: 1899; WAN024F8D_at; Start 283; Stop 307
tgggcttacctgtgcagtcaggtta

SEQ ID NO: 195993 - DNA, 25 bp, Artificial
  probe
  misc_feature (1)..(25): SEQ ID NO: 1899; WAN024F8D_at; Start 276; Stop 300
tcacttgtgggcttacctgtgcagt

SEQ ID NO: 195994 - DNA, 25 bp, Artificial
  probe
  misc_feature (1)..(25): SEQ ID NO: 1156; WAN024F8E_at; Start 1274; Stop 1298
tctgggttgccatgacagttcaact

SEQ ID NO: 195995 - DNA, 25 bp, Artificial
  probe
  misc_feature (1)..(25): SEQ ID NO: 1156; WAN024F8E_at; Start 826; Stop 850
cagacggcagctcgacgcattatga

SEQ ID NO: 195996 - DNA, 25 bp, Artificial
  probe
  misc_feature (1)..(25): SEQ ID NO: 1156; WAN024F8E_at; Start 689; Stop 713
tcaaatgggacaaaagcttgtacgc

SEQ ID NO: 195997 - DNA, 25 bp, Artificial
  probe
  misc_feature (1)..(25): SEQ ID NO: 1156; WAN024F8E_at; Start 848; Stop 872
tgacctttgcccttcttcctatgac

SEQ ID NO: 195998 - DNA, 25 bp, Artificial
  probe
  misc_feature (1)..(25): SEQ ID NO: 1156; WAN024F8E_at; Start 169; Stop 193
gcgacgacagcgatttttgacctga

SEQ ID NO: 195999 - DNA, 25 bp, Artificial
  probe
  misc_feature (1)..(25): SEQ ID NO: 1156; WAN024F8E_at; Start 575; Stop 599
tgggagttcaatccgcaggacttgc

SEQ ID NO: 196000 - DNA, 25 bp, Artificial
  probe
  misc_feature (1)..(25): SEQ ID NO: 1156; WAN024F8E_at; Start 1128; Stop 1152
gatttatcgcaattgcttgcagggc

SEQ ID NO: 196001 - DNA, 25 bp, Artificial
  probe
  misc_feature (1)..(25): SEQ ID NO: 1156; WAN024F8E_at; Start 560; Stop 584
ttacgcaattgcatctgggagttca

SEQ ID NO: 196002 - DNA, 25 bp, Artificial
  probe
  misc_feature (1)..(25): SEQ ID NO: 1156; WAN024F8E_at; Start 456; Stop 480
taatctttttgcaggcttgttgcgg

SEQ ID NO: 196003 - DNA, 25 bp, Artificial
  probe
  misc_feature (1)..(25): SEQ ID NO: 1156; WAN024F8E_at; Start 750; Stop 774
gagttcaattgtatctatcggcagt

SEQ ID NO: 196004 - DNA, 25 bp, Artificial
  probe
  misc_feature (1)..(25): SEQ ID NO: 1156; WAN024F8E_at; Start 108; Stop 132
cactgctgatgtcttgattgttgga

SEQ ID NO: 196005 - DNA, 25 bp, Artificial
  probe
  misc_feature (1)..(25): SEQ ID NO: 1156; WAN024F8E_at; Start 528; Stop 552
cttggttaatgtggttctggatctc

SEQ ID NO: 196006 - DNA, 25 bp, Artificial
  probe
  misc_feature (1)..(25): SEQ ID NO: 1156; WAN024F8E_at; Start 11; Stop 35
aacgaacagtggacctgatacatgg

SEQ ID NO: 196007 - DNA, 25 bp, Artificial
  probe
  misc_feature (1)..(25): SEQ ID NO: 1156; WAN024F8E_at; Start 1230; Stop 1254
tccttgggcaggatataagggtgtt

SEQ ID NO: 196008 - DNA, 25 bp, Artificial
  probe
  misc_feature (1)..(25): SEQ ID NO: 1156; WAN024F8E_at; Start 429; Stop 453
gacctgtgtaggtgtcagctttgct

SEQ ID NO: 196009 - DNA, 25 bp, Artificial
  probe
  misc_feature (1)..(25): SEQ ID NO: 1156; WAN024F8E_at; Start 284; Stop 308
cagtagcagccacctggattttagg

SEQ ID NO: 196010 - DNA, 25 bp, Artificial
  probe
  misc_feature (1)..(25): SEQ ID NO: 1156; WAN024F8E_at; Start 367; Stop 391
caatacttagatactcctgcagaaa

SEQ ID NO: 196011 - DNA, 25 bp, Artificial
  probe
  misc_feature (1)..(25): SEQ ID NO: 1156; WAN024F8E_at; Start 138; Stop 162
tcttggtcaagaatccttggctgca

SEQ ID NO: 196012 - DNA, 25 bp, Artificial
  probe
  misc_feature (1)..(25): SEQ ID NO: 1156; WAN024F8E_at; Start 870; Stop 894
gaccgctatttctgcatcaatgacg

SEQ ID NO: 196013 - DNA, 25 bp, Artificial
  probe
  misc_feature (1)..(25): SEQ ID NO: 1156; WAN024F8E_at; Start 961; Stop 985
agtcgtttaagtatatcctgggcag

SEQ ID NO: 196014 - DNA, 25 bp, Artificial
  probe
  misc_feature (1)..(25): SEQ ID NO: 1156; WAN024F8E_at; Start 1071; Stop 1095
tggaagtctctatctgcaaatcagt

SEQ ID NO: 196015 - DNA, 25 bp, Artificial
  probe
  misc_feature (1)..(25): SEQ ID NO: 1156; WAN024F8E_at; Start 1035; Stop 1059
cttggctagttcgacagatggttac

SEQ ID NO: 196016 - DNA, 25 bp, Artificial
  probe
  misc_feature (1)..(25): SEQ ID NO: 1156; WAN024F8E_at; Start 590; Stop 614
caggacttgctaccattatttcgca

SEQ ID NO: 196017 - DNA, 25 bp, Artificial
  probe
  misc_feature (1)..(25): SEQ ID NO: 1156; WAN024F8E_at; Start 204; Stop 228
tacacttggtgttggcaatggcatg

SEQ ID NO: 196018 - DNA, 25 bp, Artificial
  probe
  misc_feature (1)..(25): SEQ ID NO: 1156; WAN024F8E_at; Start 270; Stop 294
taaaatcaaggaagcagtagcagcc

SEQ ID NO: 196019 - DNA, 25 bp, Artificial
  probe
  misc_feature (1)..(25): SEQ ID NO: 1156; WAN024F8E_at; Start 613; Stop 637
caaggtttatcagcggttctctgct

SEQ ID NO: 196020 - DNA, 25 bp, Artificial
  probe
  misc_feature (1)..(25): SEQ ID NO: 1156; WAN024F8E_at; Start 152; Stop 176
ccttggctgcagtaggagcgacgac

SEQ ID NO: 196021 - DNA, 25 bp, Artificial
  probe
  misc_feature (1)..(25): SEQ ID NO: 1156; WAN024F8E_at; Start 886; Stop 910
tcaatgacgacctttgcttctcaga

SEQ ID NO: 196022 - DNA, 25 bp, Artificial
  probe
  misc_feature (1)..(25): SEQ ID NO: 1156; WAN024F8E_at; Start 651; Stop 675
taaaagtgtgccagaactcttgcca

SEQ ID NO: 196023 - DNA, 25 bp, Artificial
  probe
  misc_feature (1)..(25): SEQ ID NO: 1156; WAN024F8E_at; Start 483; Stop 507
tattggtgacagtctagcagccctg

SEQ ID NO: 196024 - DNA, 25 bp, Artificial
  probe
  misc_feature (1)..(25): SEQ ID NO: 1156; WAN024F8E_at; Start 499; Stop 523
gcagccctgggatttctgattttct

SEQ ID NO: 196025 - DNA, 25 bp, Artificial
  probe
  misc_feature (1)..(25): SEQ ID NO: 1156; WAN024F8E_at; Start 335; Stop 359
tgctgggctttcttggcttgtatcc

SEQ ID NO: 196026 - DNA, 25 bp, Artificial
  probe
  misc_feature (1)..(25): SEQ ID NO: 1156; WAN024F8E_at; Start 942; Stop 966
tcaaggtcttcgaatcggcagtcgt

SEQ ID NO: 196027 - DNA, 25 bp, Artificial
  probe
  misc_feature (1)..(25): SEQ ID NO: 1156; WAN024F8E_at; Start 704; Stop 728
gcttgtacgcggatctcttggagca

SEQ ID NO: 196028 - DNA, 25 bp, Artificial
  probe
  misc_feature (1)..(25): SEQ ID NO: 5758; WAN024F8F_at; Start 70; Stop 94
ttcgataccagaataagtaccggtc

SEQ ID NO: 196029 - DNA, 25 bp, Artificial
  probe
  misc_feature (1)..(25): SEQ ID NO: 5758; WAN024F8F_at; Start 124; Stop 148
gtcttgtttgacaccgacaaccagt

SEQ ID NO: 196030 - DNA, 25 bp, Artificial
  probe
  misc_feature (1)..(25): SEQ ID NO: 5758; WAN024F8F_at; Start 180; Stop 204
tatcagcctggactggtttggcagc

SEQ ID NO: 196031 - DNA, 25 bp, Artificial
  probe
  misc_feature (1)..(25): SEQ ID NO: 5758; WAN024F8F_at; Start 82; Stop 106
ataagtaccggtcttgggatctttg

SEQ ID NO: 196032 - DNA, 25 bp, Artificial
  probe
  misc_feature (1)..(25): SEQ ID NO: 5758; WAN024F8F_at; Start 7; Stop 31
tgtaaccggcacatagcgaatcttg

SEQ ID NO: 196033 - DNA, 25 bp, Artificial
  probe
  misc_feature (1)..(25): SEQ ID NO: 5758; WAN024F8F_at; Start 35; Stop 59
ttgagttcatcagctaccatcttgg

SEQ ID NO: 196034 - DNA, 25 bp, Artificial
  probe
  misc_feature (1)..(25): SEQ ID NO: 5758; WAN024F8F_at; Start 77; Stop 101
ccagaataagtaccggtcttgggat

SEQ ID NO: 196035 - DNA, 25 bp, Artificial
  probe
  misc_feature (1)..(25): SEQ ID NO: 5758; WAN024F8F_at; Start 94; Stop 118
cttgggatctttgtaaccaaaattg

SEQ ID NO: 196036 - DNA, 25 bp, Artificial
  probe
  misc_feature (1)..(25): SEQ ID NO: 5758; WAN024F8F_at; Start 197; Stop 221
ttggcagcagcaaggccgaaaaggc

SEQ ID NO: 196037 - DNA, 25 bp, Artificial
  probe
  misc_feature (1)..(25): SEQ ID NO: 5758; WAN024F8F_at; Start 119; Stop 143
ggaacgtcttgtttgacaccgacaa

SEQ ID NO: 196038 - DNA, 25 bp, Artificial
  probe
  misc_feature (1)..(25): SEQ ID NO: 5758; WAN024F8F_at; Start 73; Stop 97
gataccagaataagtaccggtcttg

SEQ ID NO: 196039 - DNA, 25 bp, Artificial
  probe
  misc_feature (1)..(25): SEQ ID NO: 5758; WAN024F8F_at; Start 24; Stop 48
gaatcttgaccttgagttcatcagc

SEQ ID NO: 196040 - DNA, 25 bp, Artificial
  probe
  misc_feature (1)..(25): SEQ ID NO: 5758; WAN024F8F_at; Start 115; Stop 139
attgggaacgtcttgtttgacaccg

SEQ ID NO: 196041 - DNA, 25 bp, Artificial
  probe
  misc_feature (1)..(25): SEQ ID NO: 5758; WAN024F8F_at; Start 138; Stop 162
cgacaaccagttcgcctcttttttg

SEQ ID NO: 196042 - DNA, 25 bp, Artificial
  probe
  misc_feature (1)..(25): SEQ ID NO: 5758; WAN024F8F_at; Start 18; Stop 42
catagcgaatcttgaccttgagttc

SEQ ID NO: 196043 - DNA, 25 bp, Artificial
  probe
  misc_feature (1)..(25): SEQ ID NO: 5758; WAN024F8F_at; Start 128; Stop 152
tgtttgacaccgacaaccagttcgc

SEQ ID NO: 196044 - DNA, 25 bp, Artificial
  probe
  misc_feature (1)..(25): SEQ ID NO: 5758; WAN024F8F_at; Start 153; Stop 177
ctcttttttgaatgtctgcgatact

SEQ ID NO: 196045 - DNA, 25 bp, Artificial
  probe
  misc_feature (1)..(25): SEQ ID NO: 5758; WAN024F8F_at; Start 191; Stop 215
actggtttggcagcagcaaggccga

SEQ ID NO: 196046 - DNA, 25 bp, Artificial
  probe
  misc_feature (1)..(25): SEQ ID NO: 5758; WAN024F8F_at; Start 38; Stop 62
agttcatcagctaccatcttggcca

SEQ ID NO: 196047 - DNA, 25 bp, Artificial
  probe
  misc_feature (1)..(25): SEQ ID NO: 5758; WAN024F8F_at; Start 61; Stop 85
caagtcggtttcgataccagaataa

SEQ ID NO: 196048 - DNA, 25 bp, Artificial
  probe
  misc_feature (1)..(25): SEQ ID NO: 5758; WAN024F8F_at; Start 49; Stop 73
taccatcttggccaagtcggtttcg

SEQ ID NO: 196049 - DNA, 25 bp, Artificial
  probe
  misc_feature (1)..(25): SEQ ID NO: 5758; WAN024F8F_at; Start 65; Stop 89
tcggtttcgataccagaataagtac

SEQ ID NO: 196050 - DNA, 25 bp, Artificial
  probe
  misc_feature (1)..(25): SEQ ID NO: 5758; WAN024F8F_at; Start 203; Stop 227
gcagcaaggccgaaaaggctaatca

SEQ ID NO: 196051 - DNA, 25 bp, Artificial
  probe
  misc_feature (1)..(25): SEQ ID NO: 5758; WAN024F8F_at; Start 130; Stop 154
tttgacaccgacaaccagttcgcct

SEQ ID NO: 196052 - DNA, 25 bp, Artificial
  probe
  misc_feature (1)..(25): SEQ ID NO: 5758; WAN024F8F_at; Start 44; Stop 68
tcagctaccatcttggccaagtcgg

SEQ ID NO: 196053 - DNA, 25 bp, Artificial
  probe
  misc_feature (1)..(25): SEQ ID NO: 5758; WAN024F8F_at; Start 58; Stop 82
ggccaagtcggtttcgataccagaa

SEQ ID NO: 196054 - DNA, 25 bp, Artificial
  probe
  misc_feature (1)..(25): SEQ ID NO: 5758; WAN024F8F_at; Start 14; Stop 38
ggcacatagcgaatcttgaccttga

SEQ ID NO: 196055 - DNA, 25 bp, Artificial
  probe
  misc_feature (1)..(25): SEQ ID NO: 5758; WAN024F8F_at; Start 54; Stop 78
tcttggccaagtcggtttcgatacc

SEQ ID NO: 196056 - DNA, 25 bp, Artificial
  probe
  misc_feature (1)..(25): SEQ ID NO: 5758; WAN024F8F_at; Start 207; Stop 231
caaggccgaaaaggctaatcaataa

SEQ ID NO: 196057 - DNA, 25 bp, Artificial
  probe
  misc_feature (1)..(25): SEQ ID NO: 5758; WAN024F8F_at; Start 142; Stop 166
aaccagttcgcctcttttttgaatg

SEQ ID NO: 196058 - DNA, 25 bp, Artificial
  probe
  misc_feature (1)..(25): SEQ ID NO: 5758; WAN024F8F_at; Start 151; Stop 175
gcctcttttttgaatgtctgcgata

SEQ ID NO: 196059 - DNA, 25 bp, Artificial
  probe
  misc_feature (1)..(25): SEQ ID NO: 5758; WAN024F8F_at; Start 4; Stop 28
tgctgtaaccggcacatagcgaatc

SEQ ID NO: 196060 - DNA, 25 bp, Artificial
  probe
  misc_feature (1)..(25): SEQ ID NO: 5758; WAN024F8F_at; Start 29; Stop 53
ttgaccttgagttcatcagctacca

SEQ ID NO: 196061 - DNA, 25 bp, Artificial
  probe
  misc_feature (1)..(25): SEQ ID NO: 5758; WAN024F8F_at; Start 10; Stop 34
aaccggcacatagcgaatcttgacc

SEQ ID NO: 196062 - DNA, 25 bp, Artificial
  probe
  misc_feature (1)..(25): SEQ ID NO: 4805; WAN024F8G_at; Start 70; Stop 94
caaaaaagaggcgaactggttgtcg

SEQ ID NO: 196063 - DNA, 25 bp, Artificial
  probe
  misc_feature (1)..(25): SEQ ID NO: 4805; WAN024F8G_at; Start 395; Stop 419
taaacggcaaaaccatcggagtcgc

SEQ ID NO: 196064 - DNA, 25 bp, Artificial
  probe
  misc_feature (1)..(25): SEQ ID NO: 4805; WAN024F8G_at; Start 698; Stop 722
gcaaggatggtagtttgcagaaact

SEQ ID NO: 196065 - DNA, 25 bp, Artificial
  probe
  misc_feature (1)..(25): SEQ ID NO: 4805; WAN024F8G_at; Start 410; Stop 434
tcggagtcgcccaaggttctatcac

SEQ ID NO: 196066 - DNA, 25 bp, Artificial
  probe
  misc_feature (1)..(25): SEQ ID NO: 4805; WAN024F8G_at; Start 151; Stop 175
tctggtatcgaaaccgacttggcca

SEQ ID NO: 196067 - DNA, 25 bp, Artificial
  probe
  misc_feature (1)..(25): SEQ ID NO: 4805; WAN024F8G_at; Start 676; Stop 700
gataacttggttactaaatggagca

SEQ ID NO: 196068 - DNA, 25 bp, Artificial
  probe
  misc_feature (1)..(25): SEQ ID NO: 4805; WAN024F8G_at; Start 740; Stop 764
tcaaaccatctagccatactgcaga

SEQ ID NO: 196069 - DNA, 25 bp, Artificial
  probe
  misc_feature (1)..(25): SEQ ID NO: 4805; WAN024F8G_at; Start 126; Stop 150
caaagatcccaagaccggtacttat

SEQ ID NO: 196070 - DNA, 25 bp, Artificial
  probe
  misc_feature (1)..(25): SEQ ID NO: 4805; WAN024F8G_at; Start 490; Stop 514
gaacttggttcctacccagaattga

SEQ ID NO: 196071 - DNA, 25 bp, Artificial
  probe
  misc_feature (1)..(25): SEQ ID NO: 4805; WAN024F8G_at; Start 57; Stop 81
tatcgcagacattcaaaaaagaggc

SEQ ID NO: 196072 - DNA, 25 bp, Artificial
  probe
  misc_feature (1)..(25): SEQ ID NO: 4805; WAN024F8G_at; Start 28; Stop 52
gctgccaaaccagtccaggctgata

SEQ ID NO: 196073 - DNA, 25 bp, Artificial
  probe
  misc_feature (1)..(25): SEQ ID NO: 4805; WAN024F8G_at; Start 599; Stop 623
tactagatgatagtttcaagccatc

SEQ ID NO: 196074 - DNA, 25 bp, Artificial
  probe
  misc_feature (1)..(25): SEQ ID NO: 4805; WAN024F8G_at; Start 114; Stop 138
caattttggttacaaagatcccaag

SEQ ID NO: 196075 - DNA, 25 bp, Artificial
  probe
  misc_feature (1)..(25): SEQ ID NO: 4805; WAN024F8G_at; Start 15; Stop 39
tttcggccttgctgctgccaaacca

SEQ ID NO: 196076 - DNA, 25 bp, Artificial
  probe
  misc_feature (1)..(25): SEQ ID NO: 4805; WAN024F8G_at; Start 271; Stop 295
gatatcgcgacctttaccatcacgg

SEQ ID NO: 196077 - DNA, 25 bp, Artificial
  probe
  misc_feature (1)..(25): SEQ ID NO: 4805; WAN024F8G_at; Start 90; Stop 114
tgtcggtgtcaaacaagacgttccc

SEQ ID NO: 196078 - DNA, 25 bp, Artificial
  probe
  misc_feature (1)..(25): SEQ ID NO: 4805; WAN024F8G_at; Start 372; Stop 396
caaaatcaaaaagattgaggaccta

SEQ ID NO: 196079 - DNA, 25 bp, Artificial
  probe
  misc_feature (1)..(25): SEQ ID NO: 4805; WAN024F8G_at; Start 387; Stop 411
tgaggacctaaacggcaaaaccatc

SEQ ID NO: 196080 - DNA, 25 bp, Artificial
  probe
  misc_feature (1)..(25): SEQ ID NO: 4805; WAN024F8G_at; Start 138; Stop 162
gaccggtacttattctggtatcgaa

SEQ ID NO: 196081 - DNA, 25 bp, Artificial
  probe
  misc_feature (1)..(25): SEQ ID NO: 4805; WAN024F8G_at; Start 357; Stop 381
ggtcaataaatctgccaaaatcaaa

SEQ ID NO: 196082 - DNA, 25 bp, Artificial
  probe
  misc_feature (1)..(25): SEQ ID NO: 4805; WAN024F8G_at; Start 257; Stop 281
aacaggtcgatatggatatcgcgac

SEQ ID NO: 196083 - DNA, 25 bp, Artificial
  probe
  misc_feature (1)..(25): SEQ ID NO: 4805; WAN024F8G_at; Start 714; Stop 738
gcagaaactttatgaccgttacaag

SEQ ID NO: 196084 - DNA, 25 bp, Artificial
  probe
  misc_feature (1)..(25): SEQ ID NO: 4805; WAN024F8G_at; Start 213; Stop 237
tgtgccggttacagcacaaacccgc

SEQ ID NO: 196085 - DNA, 25 bp, Artificial
  probe
  misc_feature (1)..(25): SEQ ID NO: 4805; WAN024F8G_at; Start 285; Stop 309
taccatcacggacgaacgcaaaaaa

SEQ ID NO: 196086 - DNA, 25 bp, Artificial
  probe
  misc_feature (1)..(25): SEQ ID NO: 4805; WAN024F8G_at; Start 652; Stop 676
aatacagagctcaacgactatcttg

SEQ ID NO: 196087 - DNA, 25 bp, Artificial
  probe
  misc_feature (1)..(25): SEQ ID NO: 4805; WAN024F8G_at; Start 338; Stop 362
cagacgcttctggatttttggtcaa

SEQ ID NO: 196088 - DNA, 25 bp, Artificial
  probe
  misc_feature (1)..(25): SEQ ID NO: 4805; WAN024F8G_at; Start 614; Stop 638
tcaagccatctgactacggtattgt

SEQ ID NO: 196089 - DNA, 25 bp, Artificial
  probe
  misc_feature (1)..(25): SEQ ID NO: 4805; WAN024F8G_at; Start 243; Stop 267
ccttctagacaatgaacaggtcgat

SEQ ID NO: 196090 - DNA, 25 bp, Artificial
  probe
  misc_feature (1)..(25): SEQ ID NO: 4805; WAN024F8G_at; Start 545; Stop 569
ccttttccgttgaccgctctattct

SEQ ID NO: 196091 - DNA, 25 bp, Artificial
  probe
  misc_feature (1)..(25): SEQ ID NO: 4805; WAN024F8G_at; Start 180; Stop 204
ggtagctgatgaactcaaggtcaag

SEQ ID NO: 196092 - DNA, 25 bp, Artificial
  probe
  misc_feature (1)..(25): SEQ ID NO: 4805; WAN024F8G_at; Start 726; Stop 750
tgaccgttacaagctcaaaccatct

SEQ ID NO: 196093 - DNA, 25 bp, Artificial
  probe
  misc_feature (1)..(25): SEQ ID NO: 4805; WAN024F8G_at; Start 2; Stop 26
tattgattagccttttcggccttgc

SEQ ID NO: 196094 - DNA, 25 bp, Artificial
  probe
  misc_feature (1)..(25): SEQ ID NO: 4805; WAN024F8G_at; Start 319; Stop 343
tttaccagtccctactacacagacg

SEQ ID NO: 196095 - DNA, 25 bp, Artificial
  probe
  misc_feature (1)..(25): SEQ ID NO: 4805; WAN024F8G_at; Start 637; Stop 661
gttaccaagaaatcaaatacagagc

SEQ ID NO: 196096 - DNA, 25 bp, Artificial
  probe
  misc_feature (1)..(25): SEQ ID NO: 5596; WAN024F8H_at; Start 138; Stop 162
gagaatacggtcatcttcccctgaa

SEQ ID NO: 196097 - DNA, 25 bp, Artificial
  probe
  misc_feature (1)..(25): SEQ ID NO: 5596; WAN024F8H_at; Start 237; Stop 261
gatgacttccatatcgatttcttga

SEQ ID NO: 196098 - DNA, 25 bp, Artificial
  probe
  misc_feature (1)..(25): SEQ ID NO: 5596; WAN024F8H_at; Start 47; Stop 71
tatccgctaccttcttttgcaaggc

SEQ ID NO: 196099 - DNA, 25 bp, Artificial
  probe
  misc_feature (1)..(25): SEQ ID NO: 5596; WAN024F8H_at; Start 93; Stop 117
caagaccgcctcttcattatcagaa

SEQ ID NO: 196100 - DNA, 25 bp, Artificial
  probe
  misc_feature (1)..(25): SEQ ID NO: 5596; WAN024F8H_at; Start 2; Stop 26
tggtacgaggcttagcagtatacac

SEQ ID NO: 196101 - DNA, 25 bp, Artificial
  probe
  misc_feature (1)..(25): SEQ ID NO: 5596; WAN024F8H_at; Start 165; Stop 189
aatatctgccaattccctgtcacgg

SEQ ID NO: 196102 - DNA, 25 bp, Artificial
  probe
  misc_feature (1)..(25): SEQ ID NO: 5596; WAN024F8H_at; Start 230; Stop 254
cagccttgatgacttccatatcgat

SEQ ID NO: 196103 - DNA, 25 bp, Artificial
  probe
  misc_feature (1)..(25): SEQ ID NO: 5596; WAN024F8H_at; Start 71; Stop 95
cagataaacggcgagcatattccaa

SEQ ID NO: 196104 - DNA, 25 bp, Artificial
  probe
  misc_feature (1)..(25): SEQ ID NO: 5596; WAN024F8H_at; Start 219; Stop 243
caattgggtttcagccttgatgact

SEQ ID NO: 196105 - DNA, 25 bp, Artificial
  probe
  misc_feature (1)..(25): SEQ ID NO: 5596; WAN024F8H_at; Start 22; Stop 46
tacacgcgcatgaccatgaaaatct

SEQ ID NO: 196106 - DNA, 25 bp, Artificial
  probe
  misc_feature (1)..(25): SEQ ID NO: 5596; WAN024F8H_at; Start 225; Stop 249
ggtttcagccttgatgacttccata

SEQ ID NO: 196107 - DNA, 25 bp, Artificial
  probe
  misc_feature (1)..(25): SEQ ID NO: 5596; WAN024F8H_at; Start 81; Stop 105
gcgagcatattccaagaccgcctct

SEQ ID NO: 196108 - DNA, 25 bp, Artificial
  probe
  misc_feature (1)..(25): SEQ ID NO: 5596; WAN024F8H_at; Start 110; Stop 134
tatcagaagagcaaggaccaatcac

SEQ ID NO: 196109 - DNA, 25 bp, Artificial
  probe
  misc_feature (1)..(25): SEQ ID NO: 5596; WAN024F8H_at; Start 7; Stop 31
cgaggcttagcagtatacacgcgca

SEQ ID NO: 196110 - DNA, 25 bp, Artificial
  probe
  misc_feature (1)..(25): SEQ ID NO: 5596; WAN024F8H_at; Start 159; Stop 183
tgaaataatatctgccaattccctg

SEQ ID NO: 196111 - DNA, 25 bp, Artificial
  probe
  misc_feature (1)..(25): SEQ ID NO: 5596; WAN024F8H_at; Start 151; Stop 175
tcttcccctgaaataatatctgcca

SEQ ID NO: 196112 - DNA, 25 bp, Artificial
  probe
  misc_feature (1)..(25): SEQ ID NO: 5596; WAN024F8H_at; Start 65; Stop 89
gcaaggcagataaacggcgagcata

SEQ ID NO: 196113 - DNA, 25 bp, Artificial
  probe
  misc_feature (1)..(25): SEQ ID NO: 5596; WAN024F8H_at; Start 29; Stop 53
gcatgaccatgaaaatcttatccgc

SEQ ID NO: 196114 - DNA, 25 bp, Artificial
  probe
  misc_feature (1)..(25): SEQ ID NO: 5596; WAN024F8H_at; Start 35; Stop 59
ccatgaaaatcttatccgctacctt

SEQ ID NO: 196115 - DNA, 25 bp, Artificial
  probe
  misc_feature (1)..(25): SEQ ID NO: 5596; WAN024F8H_at; Start 62; Stop 86
tttgcaaggcagataaacggcgagc

SEQ ID NO: 196116 - DNA, 25 bp, Artificial
  probe
  misc_feature (1)..(25): SEQ ID NO: 5596; WAN024F8H_at; Start 183; Stop 207
gtcacggctttccttgagtctcaag

SEQ ID NO: 196117 - DNA, 25 bp, Artificial
  probe
  misc_feature (1)..(25): SEQ ID NO: 5596; WAN024F8H_at; Start 124; Stop 148
ggaccaatcaccaagagaatacggt

SEQ ID NO: 196118 - DNA, 25 bp, Artificial
  probe
  misc_feature (1)..(25): SEQ ID NO: 5596; WAN024F8H_at; Start 214; Stop 238
gcagacaattgggtttcagccttga

SEQ ID NO: 196119 - DNA, 25 bp, Artificial
  probe
  misc_feature (1)..(25): SEQ ID NO: 5596; WAN024F8H_at; Start 75; Stop 99
taaacggcgagcatattccaagacc

SEQ ID NO: 196120 - DNA, 25 bp, Artificial
  probe
  misc_feature (1)..(25): SEQ ID NO: 5596; WAN024F8H_at; Start 175; Stop 199
aattccctgtcacggctttccttga

SEQ ID NO: 196121 - DNA, 25 bp, Artificial
  probe
  misc_feature (1)..(25): SEQ ID NO: 5596; WAN024F8H_at; Start 11; Stop 35
gcttagcagtatacacgcgcatgac

SEQ ID NO: 196122 - DNA, 25 bp, Artificial
  probe
  misc_feature (1)..(25): SEQ ID NO: 5596; WAN024F8H_at; Start 210; Stop 234
ttccgcagacaattgggtttcagcc

SEQ ID NO: 196123 - DNA, 25 bp, Artificial
  probe
  misc_feature (1)..(25): SEQ ID NO: 5596; WAN024F8H_at; Start 143; Stop 167
tacggtcatcttcccctgaaataat

SEQ ID NO: 196124 - DNA, 25 bp, Artificial
  probe
  misc_feature (1)..(25): SEQ ID NO: 5596; WAN024F8H_at; Start 203; Stop 227
tcaaggcttccgcagacaattgggt

SEQ ID NO: 196125 - DNA, 25 bp, Artificial
  probe
  misc_feature (1)..(25): SEQ ID NO: 5596; WAN024F8H_at; Start 118; Stop 142
gagcaaggaccaatcaccaagagaa

SEQ ID NO: 196126 - DNA, 25 bp, Artificial
  probe
  misc_feature (1)..(25): SEQ ID NO: 5596; WAN024F8H_at; Start 106; Stop 130
tcattatcagaagagcaaggaccaa

SEQ ID NO: 196127 - DNA, 25 bp, Artificial
  probe
  misc_feature (1)..(25): SEQ ID NO: 5596; WAN024F8H_at; Start 59; Stop 83
tcttttgcaaggcagataaacggcg

SEQ ID NO: 196128 - DNA, 25 bp, Artificial
  probe
  misc_feature (1)..(25): SEQ ID NO: 5596; WAN024F8H_at; Start 194; Stop 218
ccttgagtctcaaggcttccgcaga

SEQ ID NO: 196129 - DNA, 25 bp, Artificial
  probe
  misc_feature (1)..(25): SEQ ID NO: 5596; WAN024F8H_at; Start 14; Stop 38
tagcagtatacacgcgcatgaccat

SEQ ID NO: 196130 - DNA, 25 bp, Artificial
  probe
  misc_feature (1)..(25): SEQ ID NO: 2447; WAN024F8I_at; Start 249; Stop 273
catgcgcgtgtatactgctaagcct

SEQ ID NO: 196131 - DNA, 25 bp, Artificial
  probe
  misc_feature (1)..(25): SEQ ID NO: 2447; WAN024F8I_at; Start 357; Stop 381
tgtgcgccagttgcactaccgcgtg

SEQ ID NO: 196132 - DNA, 25 bp, Artificial
  probe
  misc_feature (1)..(25): SEQ ID NO: 2447; WAN024F8I_at; Start 386; Stop 410
cagagactggtttgacaacggcaga

SEQ ID NO: 196133 - DNA, 25 bp, Artificial
  probe
  misc_feature (1)..(25): SEQ ID NO: 2447; WAN024F8I_at; Start 533; Stop 557
tagggatgaaaaatccaacctcagg

SEQ ID NO: 196134 - DNA, 25 bp, Artificial
  probe
  misc_feature (1)..(25): SEQ ID NO: 2447; WAN024F8I_at; Start 636; Stop 660
gacatcaggtaatcctttggcccat

SEQ ID NO: 196135 - DNA, 25 bp, Artificial
  probe
  misc_feature (1)..(25): SEQ ID NO: 2447; WAN024F8I_at; Start 265; Stop 289
gctaagcctcgtaccaatggagacg

SEQ ID NO: 196136 - DNA, 25 bp, Artificial
  probe
  misc_feature (1)..(25): SEQ ID NO: 2447; WAN024F8I_at; Start 44; Stop 68
tcaaggctgaaacccaattgtctgc

SEQ ID NO: 196137 - DNA, 25 bp, Artificial
  probe
  misc_feature (1)..(25): SEQ ID NO: 2447; WAN024F8I_at; Start 465; Stop 489
tgccgttggagctcgttctgtggaa

SEQ ID NO: 196138 - DNA, 25 bp, Artificial
  probe
  misc_feature (1)..(25): SEQ ID NO: 2447; WAN024F8I_at; Start 371; Stop 395
actaccgcgtgattacagagactgg

SEQ ID NO: 196139 - DNA, 25 bp, Artificial
  probe
  misc_feature (1)..(25): SEQ ID NO: 2447; WAN024F8I_at; Start 496; Stop 520
gagcaccgctttgtggcttctggga

SEQ ID NO: 196140 - DNA, 25 bp, Artificial
  probe
  misc_feature (1)..(25): SEQ ID NO: 2447; WAN024F8I_at; Start 183; Stop 207
ggtcttggaatatgctcgccgttta

SEQ ID NO: 196141 - DNA, 25 bp, Artificial
  probe
  misc_feature (1)..(25): SEQ ID NO: 2447; WAN024F8I_at; Start 401; Stop 425
caacggcagatgagatgctttatcc

SEQ ID NO: 196142 - DNA, 25 bp, Artificial
  probe
  misc_feature (1)..(25): SEQ ID NO: 2447; WAN024F8I_at; Start 75; Stop 99
cttgagactcaaggaaagccgtgac

SEQ ID NO: 196143 - DNA, 25 bp, Artificial
  probe
  misc_feature (1)..(25): SEQ ID NO: 2447; WAN024F8I_at; Start 618; Stop 642
tcatgggcaggaagttgagacatca

SEQ ID NO: 196144 - DNA, 25 bp, Artificial
  probe
  misc_feature (1)..(25): SEQ ID NO: 2447; WAN024F8I_at; Start 830; Stop 854
gaattgttcgccagaccttgcagaa

SEQ ID NO: 196145 - DNA, 25 bp, Artificial
  probe
  misc_feature (1)..(25): SEQ ID NO: 2447; WAN024F8I_at; Start 654; Stop 678
ggcccatgttatcctccgtggagca

SEQ ID NO: 196146 - DNA, 25 bp, Artificial
  probe
  misc_feature (1)..(25): SEQ ID NO: 2447; WAN024F8I_at; Start 93; Stop 117
ccgtgacagggaattggcagatatt

SEQ ID NO: 196147 - DNA, 25 bp, Artificial
  probe
  misc_feature (1)..(25): SEQ ID NO: 2447; WAN024F8I_at; Start 672; Stop 696
tggagcagtcaacgagtatggcaat

SEQ ID NO: 196148 - DNA, 25 bp, Artificial
  probe
  misc_feature (1)..(25): SEQ ID NO: 2447; WAN024F8I_at; Start 987; Stop 1011
tacagaggccttggtagaagagatt

SEQ ID NO: 196149 - DNA, 25 bp, Artificial
  probe
  misc_feature (1)..(25): SEQ ID NO: 2447; WAN024F8I_at; Start 435; Stop 459
gatcttggtggatgacttggtcagc

SEQ ID NO: 196150 - DNA, 25 bp, Artificial
  probe
  misc_feature (1)..(25): SEQ ID NO: 2447; WAN024F8I_at; Start 29; Stop 53
tcgatatggaagtcatcaaggctga

SEQ ID NO: 196151 - DNA, 25 bp, Artificial
  probe
  misc_feature (1)..(25): SEQ ID NO: 2447; WAN024F8I_at; Start 304; Stop 328
gttcaccagccagatacttctaagg

SEQ ID NO: 196152 - DNA, 25 bp, Artificial
  probe
  misc_feature (1)..(25): SEQ ID NO: 2447; WAN024F8I_at; Start 735; Stop 759
cattgaacgctatgaaaccatggga

SEQ ID NO: 196153 - DNA, 25 bp, Artificial
  probe
  misc_feature (1)..(25): SEQ ID NO: 2447; WAN024F8I_at; Start 603; Stop 627
gcaaaccttcctttatcatgggcag

SEQ ID NO: 196154 - DNA, 25 bp, Artificial
  probe
  misc_feature (1)..(25): SEQ ID NO: 2447; WAN024F8I_at; Start 450; Stop 474
cttggtcagctaccatgccgttgga

SEQ ID NO: 196155 - DNA, 25 bp, Artificial
  probe
  misc_feature (1)..(25): SEQ ID NO: 2447; WAN024F8I_at; Start 138; Stop 162
tattctcttggtgattggtccttgc

SEQ ID NO: 196156 - DNA, 25 bp, Artificial
  probe
  misc_feature (1)..(25): SEQ ID NO: 2447; WAN024F8I_at; Start 910; Stop 934
tacctagcagatggtcgtcaaaacc

SEQ ID NO: 196157 - DNA, 25 bp, Artificial
  probe
  misc_feature (1)..(25): SEQ ID NO: 2447; WAN024F8I_at; Start 783; Stop 807
tgacaccaaccatgataactcaggc

SEQ ID NO: 196158 - DNA, 25 bp, Artificial
  probe
  misc_feature (1)..(25): SEQ ID NO: 2447; WAN024F8I_at; Start 953; Stop 977
gctctattactgacccttgcctagg

SEQ ID NO: 196159 - DNA, 25 bp, Artificial
  probe
  misc_feature (1)..(25): SEQ ID NO: 2447; WAN024F8I_at; Start 234; Stop 258
taagattttcatggtcatgcgcgtg

SEQ ID NO: 196160 - DNA, 25 bp, Artificial
  probe
  misc_feature (1)..(25): SEQ ID NO: 2447; WAN024F8I_at; Start 481; Stop 505
tctgtggaagaccaagagcaccgct

SEQ ID NO: 196161 - DNA, 25 bp, Artificial
  probe
  misc_feature (1)..(25): SEQ ID NO: 2447; WAN024F8I_at; Start 212; Stop 236
ccttgcaaaagaaggtagcggataa

SEQ ID NO: 196162 - DNA, 25 bp, Artificial
  probe
  misc_feature (1)..(25): SEQ ID NO: 2447; WAN024F8I_at; Start 967; Stop 991
ccttgcctaggttgggaaaatacag

SEQ ID NO: 196163 - DNA, 25 bp, Artificial
  probe
  misc_feature (1)..(25): SEQ ID NO: 2447; WAN024F8I_at; Start 802; Stop 826
tcaggcaagcaatatatggagcaga

SEQ ID NO: 196164 - DNA, 25 bp, Artificial
  probe
  misc_feature (1)..(25): SEQ ID NO: 7216; WAN024F8J_at; Start 9; Stop 33
aatttcggaggtgaaagatgctaga

SEQ ID NO: 196165 - DNA, 25 bp, Artificial
  probe
  misc_feature (1)..(25): SEQ ID NO: 7216; WAN024F8J_at; Start 15; Stop 39
ggaggtgaaagatgctagaagtaag

SEQ ID NO: 196166 - DNA, 25 bp, Artificial
  probe
  misc_feature (1)..(25): SEQ ID NO: 7216; WAN024F8J_at; Start 10; Stop 34
atttcggaggtgaaagatgctagaa

SEQ ID NO: 196167 - DNA, 25 bp, Artificial
  probe
  misc_feature (1)..(25): SEQ ID NO: 7216; WAN024F8J_at; Start 8; Stop 32
aaatttcggaggtgaaagatgctag

SEQ ID NO: 196168 - DNA, 25 bp, Artificial
  probe
  misc_feature (1)..(25): SEQ ID NO: 7216; WAN024F8J_at; Start 5; Stop 29
aagaaatttcggaggtgaaagatgc

SEQ ID NO: 196169 - DNA, 25 bp, Artificial
  probe
  misc_feature (1)..(25): SEQ ID NO: 7216; WAN024F8J_at; Start 16; Stop 40
gaggtgaaagatgctagaagtaaga

SEQ ID NO: 196170 - DNA, 25 bp, Artificial
  probe
  misc_feature (1)..(25): SEQ ID NO: 7216; WAN024F8J_at; Start 13; Stop 37
tcggaggtgaaagatgctagaagta

SEQ ID NO: 196171 - DNA, 25 bp, Artificial
  probe
  misc_feature (1)..(25): SEQ ID NO: 7216; WAN024F8J_at; Start 6; Stop 30
agaaatttcggaggtgaaagatgct

SEQ ID NO: 196172 - DNA, 25 bp, Artificial
  probe
  misc_feature (1)..(25): SEQ ID NO: 7216; WAN024F8J_at; Start 4; Stop 28
aaagaaatttcggaggtgaaagatg

SEQ ID NO: 196173 - DNA, 25 bp, Artificial
  probe
  misc_feature (1)..(25): SEQ ID NO: 7216; WAN024F8J_at; Start 2; Stop 26
tgaaagaaatttcggaggtgaaaga

SEQ ID NO: 196174 - DNA, 25 bp, Artificial
  probe
  misc_feature (1)..(25): SEQ ID NO: 7216; WAN024F8J_at; Start 7; Stop 31
gaaatttcggaggtgaaagatgcta

SEQ ID NO: 196175 - DNA, 25 bp, Artificial
  probe
  misc_feature (1)..(25): SEQ ID NO: 7216; WAN024F8J_at; Start 14; Stop 38
cggaggtgaaagatgctagaagtaa

SEQ ID NO: 196176 - DNA, 25 bp, Artificial
  probe
  misc_feature (1)..(25): SEQ ID NO: 6579; WAN024F8K_at; Start 155; Stop 179
caaaatacgacctggtcgcgcttga

SEQ ID NO: 196177 - DNA, 25 bp, Artificial
  probe
  misc_feature (1)..(25): SEQ ID NO: 6579; WAN024F8K_at; Start 15; Stop 39
tcaggcagataaccaatccgagcat

SEQ ID NO: 196178 - DNA, 25 bp, Artificial
  probe
  misc_feature (1)..(25): SEQ ID NO: 6579; WAN024F8K_at; Start 8; Stop 32
gcgttcttcaggcagataaccaatc

SEQ ID NO: 196179 - DNA, 25 bp, Artificial
  probe
  misc_feature (1)..(25): SEQ ID NO: 6579; WAN024F8K_at; Start 132; Stop 156
gcaccattttttccgactagtccca

SEQ ID NO: 196180 - DNA, 25 bp, Artificial
  probe
  misc_feature (1)..(25): SEQ ID NO: 6579; WAN024F8K_at; Start 145; Stop 169
cgactagtcccaaaatacgacctgg

SEQ ID NO: 196181 - DNA, 25 bp, Artificial
  probe
  misc_feature (1)..(25): SEQ ID NO: 6579; WAN024F8K_at; Start 78; Stop 102
tctccctgatattctaggaatttca

SEQ ID NO: 196182 - DNA, 25 bp, Artificial
  probe
  misc_feature (1)..(25): SEQ ID NO: 6579; WAN024F8K_at; Start 18; Stop 42
ggcagataaccaatccgagcatagg

SEQ ID NO: 196183 - DNA, 25 bp, Artificial
  probe
  misc_feature (1)..(25): SEQ ID NO: 6579; WAN024F8K_at; Start 164; Stop 188
acctggtcgcgcttgaaagtcaata

SEQ ID NO: 196184 - DNA, 25 bp, Artificial
  probe
  misc_feature (1)..(25): SEQ ID NO: 6579; WAN024F8K_at; Start 127; Stop 151
ttccagcaccattttttccgactag

SEQ ID NO: 196185 - DNA, 25 bp, Artificial
  probe
  misc_feature (1)..(25): SEQ ID NO: 6579; WAN024F8K_at; Start 52; Stop 76
gaatatcctgaccatccagaccgat

SEQ ID NO: 196186 - DNA, 25 bp, Artificial
  probe
  misc_feature (1)..(25): SEQ ID NO: 6579; WAN024F8K_at; Start 158; Stop 182
aatacgacctggtcgcgcttgaaag

SEQ ID NO: 196187 - DNA, 25 bp, Artificial
  probe
  misc_feature (1)..(25): SEQ ID NO: 6579; WAN024F8K_at; Start 42; Stop 66
gtctcctgacgaatatcctgaccat

SEQ ID NO: 196188 - DNA, 25 bp, Artificial
  probe
  misc_feature (1)..(25): SEQ ID NO: 6579; WAN024F8K_at; Start 28; Stop 52
caatccgagcataggtctcctgacg

SEQ ID NO: 196189 - DNA, 25 bp, Artificial
  probe
  misc_feature (1)..(25): SEQ ID NO: 6579; WAN024F8K_at; Start 90; Stop 114
tctaggaatttcaaaatactatgga

SEQ ID NO: 196190 - DNA, 25 bp, Artificial
  probe
  misc_feature (1)..(25): SEQ ID NO: 6579; WAN024F8K_at; Start 5; Stop 29
gatgcgttcttcaggcagataacca

SEQ ID NO: 196191 - DNA, 25 bp, Artificial
  probe
  misc_feature (1)..(25): SEQ ID NO: 6579; WAN024F8K_at; Start 73; Stop 97
cgatttctccctgatattctaggaa

SEQ ID NO: 196192 - DNA, 25 bp, Artificial
  probe
  misc_feature (1)..(25): SEQ ID NO: 6579; WAN024F8K_at; Start 152; Stop 176
tcccaaaatacgacctggtcgcgct

SEQ ID NO: 196193 - DNA, 25 bp, Artificial
  probe
  misc_feature (1)..(25): SEQ ID NO: 6579; WAN024F8K_at; Start 149; Stop 173
tagtcccaaaatacgacctggtcgc

SEQ ID NO: 196194 - DNA, 25 bp, Artificial
  probe
  misc_feature (1)..(25): SEQ ID NO: 6579; WAN024F8K_at; Start 33; Stop 57
cgagcataggtctcctgacgaatat

SEQ ID NO: 196195 - DNA, 25 bp, Artificial
  probe
  misc_feature (1)..(25): SEQ ID NO: 6579; WAN024F8K_at; Start 24; Stop 48
taaccaatccgagcataggtctcct

SEQ ID NO: 196196 - DNA, 25 bp, Artificial
  probe
  misc_feature (1)..(25): SEQ ID NO: 6579; WAN024F8K_at; Start 115; Stop 139
aaatcgttgtttttccagcaccatt

SEQ ID NO: 196197 - DNA, 25 bp, Artificial
  probe
  misc_feature (1)..(25): SEQ ID NO: 6579; WAN024F8K_at; Start 113; Stop 137
gaaaatcgttgtttttccagcacca

SEQ ID NO: 196198 - DNA, 25 bp, Artificial
  probe
  misc_feature (1)..(25): SEQ ID NO: 6579; WAN024F8K_at; Start 2; Stop 26
tgagatgcgttcttcaggcagataa

SEQ ID NO: 196199 - DNA, 25 bp, Artificial
  probe
  misc_feature (1)..(25): SEQ ID NO: 6579; WAN024F8K_at; Start 55; Stop 79
tatcctgaccatccagaccgatttc

SEQ ID NO: 196200 - DNA, 25 bp, Artificial
  probe
  misc_feature (1)..(25): SEQ ID NO: 6579; WAN024F8K_at; Start 36; Stop 60
gcataggtctcctgacgaatatcct

SEQ ID NO: 196201 - DNA, 25 bp, Artificial
  probe
  misc_feature (1)..(25): SEQ ID NO: 6579; WAN024F8K_at; Start 45; Stop 69
tcctgacgaatatcctgaccatcca

SEQ ID NO: 196202 - DNA, 25 bp, Artificial
  probe
  misc_feature (1)..(25): SEQ ID NO: 6579; WAN024F8K_at; Start 31; Stop 55
tccgagcataggtctcctgacgaat

SEQ ID NO: 196203 - DNA, 25 bp, Artificial
  probe
  misc_feature (1)..(25): SEQ ID NO: 6579; WAN024F8K_at; Start 48; Stop 72
tgacgaatatcctgaccatccagac

SEQ ID NO: 196204 - DNA, 25 bp, Artificial
  probe
  misc_feature (1)..(25): SEQ ID NO: 6579; WAN024F8K_at; Start 163; Stop 187
gacctggtcgcgcttgaaagtcaat

SEQ ID NO: 196205 - DNA, 25 bp, Artificial
  probe
  misc_feature (1)..(25): SEQ ID NO: 6579; WAN024F8K_at; Start 20; Stop 44
cagataaccaatccgagcataggtc

SEQ ID NO: 196206 - DNA, 25 bp, Artificial
  probe
  misc_feature (1)..(25): SEQ ID NO: 6579; WAN024F8K_at; Start 64; Stop 88
catccagaccgatttctccctgata

SEQ ID NO: 196207 - DNA, 25 bp, Artificial
  probe
  misc_feature (1)..(25): SEQ ID NO: 6579; WAN024F8K_at; Start 100; Stop 124
tcaaaatactatggaaaatcgttgt

SEQ ID NO: 196208 - DNA, 25 bp, Artificial
  probe
  misc_feature (1)..(25): SEQ ID NO: 6579; WAN024F8K_at; Start 39; Stop 63
taggtctcctgacgaatatcctgac

SEQ ID NO: 196209 - DNA, 25 bp, Artificial
  probe
  misc_feature (1)..(25): SEQ ID NO: 6579; WAN024F8K_at; Start 12; Stop 36
tcttcaggcagataaccaatccgag

SEQ ID NO: 196210 - DNA, 25 bp, Artificial
  probe
  misc_feature (1)..(25): SEQ ID NO: 4048; WAN024F8L_at; Start 127; Stop 151
gagcaattctgtattaactgggtcc

SEQ ID NO: 196211 - DNA, 25 bp, Artificial
  probe
  misc_feature (1)..(25): SEQ ID NO: 4048; WAN024F8L_at; Start 113; Stop 137
aaaatgacttgtttgagcaattctg

SEQ ID NO: 196212 - DNA, 25 bp, Artificial
  probe
  misc_feature (1)..(25): SEQ ID NO: 4048; WAN024F8L_at; Start 160; Stop 184
aaaaggctcatccaagataatcagg

SEQ ID NO: 196213 - DNA, 25 bp, Artificial
  probe
  misc_feature (1)..(25): SEQ ID NO: 4048; WAN024F8L_at; Start 20; Stop 44
tctcggatcatcagaatatcgtcac

SEQ ID NO: 196214 - DNA, 25 bp, Artificial
  probe
  misc_feature (1)..(25): SEQ ID NO: 4048; WAN024F8L_at; Start 204; Stop 228
taataatgagctgaatcttctgctg

SEQ ID NO: 196215 - DNA, 25 bp, Artificial
  probe
  misc_feature (1)..(25): SEQ ID NO: 4048; WAN024F8L_at; Start 11; Stop 35
acacggccatctcggatcatcagaa

SEQ ID NO: 196216 - DNA, 25 bp, Artificial
  probe
  misc_feature (1)..(25): SEQ ID NO: 4048; WAN024F8L_at; Start 78; Stop 102
aaaagataatggttgctccgcgctc

SEQ ID NO: 196217 - DNA, 25 bp, Artificial
  probe
  misc_feature (1)..(25): SEQ ID NO: 4048; WAN024F8L_at; Start 82; Stop 106
gataatggttgctccgcgctctttt

SEQ ID NO: 196218 - DNA, 25 bp, Artificial
  probe
  misc_feature (1)..(25): SEQ ID NO: 4048; WAN024F8L_at; Start 210; Stop 234
tgagctgaatcttctgctgatttcc

SEQ ID NO: 196219 - DNA, 25 bp, Artificial
  probe
  misc_feature (1)..(25): SEQ ID NO: 4048; WAN024F8L_at; Start 199; Stop 223
cagagtaataatgagctgaatcttc

SEQ ID NO: 196220 - DNA, 25 bp, Artificial
  probe
  misc_feature (1)..(25): SEQ ID NO: 4048; WAN024F8L_at; Start 177; Stop 201
taatcaggtctggttcatgaatcag

SEQ ID NO: 196221 - DNA, 25 bp, Artificial
  probe
  misc_feature (1)..(25): SEQ ID NO: 4048; WAN024F8L_at; Start 168; Stop 192
catccaagataatcaggtctggttc

SEQ ID NO: 196222 - DNA, 25 bp, Artificial
  probe
  misc_feature (1)..(25): SEQ ID NO: 4048; WAN024F8L_at; Start 51; Stop 75
cctcaacattggtcatgacatggtc

SEQ ID NO: 196223 - DNA, 25 bp, Artificial
  probe
  misc_feature (1)..(25): SEQ ID NO: 4048; WAN024F8L_at; Start 88; Stop 112
ggttgctccgcgctctttttcctga

SEQ ID NO: 196224 - DNA, 25 bp, Artificial
  probe
  misc_feature (1)..(25): SEQ ID NO: 4048; WAN024F8L_at; Start 60; Stop 84
tggtcatgacatggtcagaaaagat

SEQ ID NO: 196225 - DNA, 25 bp, Artificial
  probe
  misc_feature (1)..(25): SEQ ID NO: 4048; WAN024F8L_at; Start 164; Stop 188
ggctcatccaagataatcaggtctg

SEQ ID NO: 196226 - DNA, 25 bp, Artificial
  probe
  misc_feature (1)..(25): SEQ ID NO: 4048; WAN024F8L_at; Start 33; Stop 57
gaatatcgtcacaaagttcctcaac

SEQ ID NO: 196227 - DNA, 25 bp, Artificial
  probe
  misc_feature (1)..(25): SEQ ID NO: 4048; WAN024F8L_at; Start 138; Stop 162
tattaactgggtccaatccactaaa

SEQ ID NO: 196228 - DNA, 25 bp, Artificial
  probe
  misc_feature (1)..(25): SEQ ID NO: 4048; WAN024F8L_at; Start 25; Stop 49
gatcatcagaatatcgtcacaaagt

SEQ ID NO: 196229 - DNA, 25 bp, Artificial
  probe
  misc_feature (1)..(25): SEQ ID NO: 4048; WAN024F8L_at; Start 134; Stop 158
tctgtattaactgggtccaatccac

SEQ ID NO: 196230 - DNA, 25 bp, Artificial
  probe
  misc_feature (1)..(25): SEQ ID NO: 4048; WAN024F8L_at; Start 216; Stop 240
gaatcttctgctgatttccttttga

SEQ ID NO: 196231 - DNA, 25 bp, Artificial
  probe
  misc_feature (1)..(25): SEQ ID NO: 4048; WAN024F8L_at; Start 107; Stop 131
tcctgaaaaatgacttgtttgagca

SEQ ID NO: 196232 - DNA, 25 bp, Artificial
  probe
  misc_feature (1)..(25): SEQ ID NO: 4048; WAN024F8L_at; Start 16; Stop 40
gccatctcggatcatcagaatatcg

SEQ ID NO: 196233 - DNA, 25 bp, Artificial
  probe
  misc_feature (1)..(25): SEQ ID NO: 4048; WAN024F8L_at; Start 181; Stop 205
caggtctggttcatgaatcagagta

SEQ ID NO: 196234 - DNA, 25 bp, Artificial
  probe
  misc_feature (1)..(25): SEQ ID NO: 4048; WAN024F8L_at; Start 154; Stop 178
tccactaaaaggctcatccaagata

SEQ ID NO: 196235 - DNA, 25 bp, Artificial
  probe
  misc_feature (1)..(25): SEQ ID NO: 4048; WAN024F8L_at; Start 54; Stop 78
caacattggtcatgacatggtcaga

SEQ ID NO: 196236 - DNA, 25 bp, Artificial
  probe
  misc_feature (1)..(25): SEQ ID NO: 4048; WAN024F8L_at; Start 69; Stop 93
catggtcagaaaagataatggttgc

SEQ ID NO: 196237 - DNA, 25 bp, Artificial
  probe
  misc_feature (1)..(25): SEQ ID NO: 4048; WAN024F8L_at; Start 74; Stop 98
tcagaaaagataatggttgctccgc

SEQ ID NO: 196238 - DNA, 25 bp, Artificial
  probe
  misc_feature (1)..(25): SEQ ID NO: 4048; WAN024F8L_at; Start 44; Stop 68
caaagttcctcaacattggtcatga

SEQ ID NO: 196239 - DNA, 25 bp, Artificial
  probe
  misc_feature (1)..(25): SEQ ID NO: 4048; WAN024F8L_at; Start 192; Stop 216
catgaatcagagtaataatgagctg

SEQ ID NO: 196240 - DNA, 25 bp, Artificial
  probe
  misc_feature (1)..(25): SEQ ID NO: 4048; WAN024F8L_at; Start 129; Stop 153
gcaattctgtattaactgggtccaa

SEQ ID NO: 196241 - DNA, 25 bp, Artificial
  probe
  misc_feature (1)..(25): SEQ ID NO: 4048; WAN024F8L_at; Start 38; Stop 62
tcgtcacaaagttcctcaacattgg

SEQ ID NO: 196242 - DNA, 25 bp, Artificial
  probe
  misc_feature (1)..(25): SEQ ID NO: 4048; WAN024F8L_at; Start 1; Stop 25
gtgcaagaccacacggccatctcgg

SEQ ID NO: 196243 - DNA, 25 bp, Artificial
  probe
  misc_feature (1)..(25): SEQ ID NO: 4048; WAN024F8L_at; Start 92; Stop 116
gctccgcgctctttttcctgaaaaa

SEQ ID NO: 196244 - DNA, 25 bp, Artificial
  probe
  misc_feature (1)..(25): SEQ ID NO: 2067; WAN024F8M_at; Start 92; Stop 116
gactagtcggaaaaaatggtgctgg

SEQ ID NO: 196245 - DNA, 25 bp, Artificial
  probe
  misc_feature (1)..(25): SEQ ID NO: 2067; WAN024F8M_at; Start 526; Stop 550
gagcgcggagcaaccattatctttt

SEQ ID NO: 196246 - DNA, 25 bp, Artificial
  probe
  misc_feature (1)..(25): SEQ ID NO: 2067; WAN024F8M_at; Start 261; Stop 285
tcttgaacaagttcgctacttggcg

SEQ ID NO: 196247 - DNA, 25 bp, Artificial
  probe
  misc_feature (1)..(25): SEQ ID NO: 2067; WAN024F8M_at; Start 213; Stop 237
gattggttatctgcctgaagaacgc

SEQ ID NO: 196248 - DNA, 25 bp, Artificial
  probe
  misc_feature (1)..(25): SEQ ID NO: 2067; WAN024F8M_at; Start 57; Stop 81
tattgactttcaagcgcgaccaggt

SEQ ID NO: 196249 - DNA, 25 bp, Artificial
  probe
  misc_feature (1)..(25): SEQ ID NO: 2067; WAN024F8M_at; Start 228; Stop 252
tgaagaacgcagtctcatgcctaaa

SEQ ID NO: 196250 - DNA, 25 bp, Artificial
  probe
  misc_feature (1)..(25): SEQ ID NO: 2067; WAN024F8M_at; Start 807; Stop 831
gactcaaggtcaatatatcgcaaca

SEQ ID NO: 196251 - DNA, 25 bp, Artificial
  probe
  misc_feature (1)..(25): SEQ ID NO: 2067; WAN024F8M_at; Start 663; Stop 687
aacgcgtctctttgtttcaagtgaa

SEQ ID NO: 196252 - DNA, 25 bp, Artificial
  probe
  misc_feature (1)..(25): SEQ ID NO: 2067; WAN024F8M_at; Start 512; Stop 536
tttttcaggaaaaagagcgcggagc

SEQ ID NO: 196253 - DNA, 25 bp, Artificial
  probe
  misc_feature (1)..(25): SEQ ID NO: 2067; WAN024F8M_at; Start 377; Stop 401
tcaagagtctgtcaaaaggaaatca

SEQ ID NO: 196254 - DNA, 25 bp, Artificial
  probe
  misc_feature (1)..(25): SEQ ID NO: 2067; WAN024F8M_at; Start 423; Stop 447
tactctgattcatgaaccagacctg

SEQ ID NO: 196255 - DNA, 25 bp, Artificial
  probe
  misc_feature (1)..(25): SEQ ID NO: 2067; WAN024F8M_at; Start 277; Stop 301
tacttggcgactctaaaaggcatgg

SEQ ID NO: 196256 - DNA, 25 bp, Artificial
  probe
  misc_feature (1)..(25): SEQ ID NO: 2067; WAN024F8M_at; Start 154; Stop 178
gaatatcagggagaaatcggtctgg

SEQ ID NO: 196257 - DNA, 25 bp, Artificial
  probe
  misc_feature (1)..(25): SEQ ID NO: 2067; WAN024F8M_at; Start 705; Stop 729
ggaaaatcttcctcatgtcaaacag

SEQ ID NO: 196258 - DNA, 25 bp, Artificial
  probe
  misc_feature (1)..(25): SEQ ID NO: 2067; WAN024F8M_at; Start 758; Stop 782
aattgattttggaggatgagagcgc

SEQ ID NO: 196259 - DNA, 25 bp, Artificial
  probe
  misc_feature (1)..(25): SEQ ID NO: 2067; WAN024F8M_at; Start 178; Stop 202
gatggtcaggatattcgtcaggaga

SEQ ID NO: 196260 - DNA, 25 bp, Artificial
  probe
  misc_feature (1)..(25): SEQ ID NO: 2067; WAN024F8M_at; Start 553; Stop 577
gaccatgtcatgaccaatgttgagg

SEQ ID NO: 196261 - DNA, 25 bp, Artificial
  probe
  misc_feature (1)..(25): SEQ ID NO: 2067; WAN024F8M_at; Start 841; Stop 865
caagcgccaactatcgatgaaatct

SEQ ID NO: 196262 - DNA, 25 bp, Artificial
  probe
  misc_feature (1)..(25): SEQ ID NO: 2067; WAN024F8M_at; Start 680; Stop 704
caagtgaacgaagcaaggaagaatt

SEQ ID NO: 196263 - DNA, 25 bp, Artificial
  probe
  misc_feature (1)..(25): SEQ ID NO: 2067; WAN024F8M_at; Start 73; Stop 97
cgaccaggtcgtattttgggactag

SEQ ID NO: 196264 - DNA, 25 bp, Artificial
  probe
  misc_feature (1)..(25): SEQ ID NO: 2067; WAN024F8M_at; Start 394; Stop 418
ggaaatcagcagaagattcagctca

SEQ ID NO: 196265 - DNA, 25 bp, Artificial
  probe
  misc_feature (1)..(25): SEQ ID NO: 2067; WAN024F8M_at; Start 863; Stop 887
tctttaaactagaatcaggagtgga

SEQ ID NO: 196266 - DNA, 25 bp, Artificial
  probe
  misc_feature (1)..(25): SEQ ID NO: 2067; WAN024F8M_at; Start 620; Stop 644
tcttgcacggaccagttcaggatgt

SEQ ID NO: 196267 - DNA, 25 bp, Artificial
  probe
  misc_feature (1)..(25): SEQ ID NO: 2067; WAN024F8M_at; Start 774; Stop 798
tgagagcgctggaagggaactcttc

SEQ ID NO: 196268 - DNA, 25 bp, Artificial
  probe
  misc_feature (1)..(25): SEQ ID NO: 2067; WAN024F8M_at; Start 476; Stop 500
tggacccagttaatacagaattgct

SEQ ID NO: 196269 - DNA, 25 bp, Artificial
  probe
  misc_feature (1)..(25): SEQ ID NO: 2067; WAN024F8M_at; Start 243; Stop 267
catgcctaaattgacagttcttgaa

SEQ ID NO: 196270 - DNA, 25 bp, Artificial
  probe
  misc_feature (1)..(25): SEQ ID NO: 2067; WAN024F8M_at; Start 319; Stop 343
gaaaaactccctcaatggatgaaga

SEQ ID NO: 196271 - DNA, 25 bp, Artificial
  probe
  misc_feature (1)..(25): SEQ ID NO: 2067; WAN024F8M_at; Start 826; Stop 850
gcaacatttgaccaacaagcgccaa

SEQ ID NO: 196272 - DNA, 25 bp, Artificial
  probe
  misc_feature (1)..(25): SEQ ID NO: 2067; WAN024F8M_at; Start 648; Stop 672
caatcaatacgggaaaacgcgtctc

SEQ ID NO: 196273 - DNA, 25 bp, Artificial
  probe
  misc_feature (1)..(25): SEQ ID NO: 2067; WAN024F8M_at; Start 636; Stop 660
tcaggatgtccgcaatcaatacggg

SEQ ID NO: 196274 - DNA, 25 bp, Artificial
  probe
  misc_feature (1)..(25): SEQ ID NO: 2067; WAN024F8M_at; Start 460; Stop 484
gagccttttagtggattggacccag

SEQ ID NO: 196275 - DNA, 25 bp, Artificial
  probe
  misc_feature (1)..(25): SEQ ID NO: 2067; WAN024F8M_at; Start 440; Stop 464
cagacctgattatcttggatgagcc

SEQ ID NO: 196276 - DNA, 25 bp, Artificial
  probe
  misc_feature (1)..(25): SEQ ID NO: 2067; WAN024F8M_at; Start 296; Stop 320
gcatggatgccaaagaagtcaaaga

SEQ ID NO: 196277 - DNA, 25 bp, Artificial
  probe
  misc_feature (1)..(25): SEQ ID NO: 2067; WAN024F8M_at; Start 727; Stop 751
caggtgagcttgaccaaacaaggca

SEQ ID NO: 196278 - DNA, 25 bp, Artificial
  probe
  misc_feature (1)..(25): SEQ ID NO: 1892; WAN024F8N_at; Start 339; Stop 363
tgccttggcaaacggtgtcactgtc

SEQ ID NO: 196279 - DNA, 25 bp, Artificial
  probe
  misc_feature (1)..(25): SEQ ID NO: 1892; WAN024F8N_at; Start 518; Stop 542
gactttcagtaaacccagctcgtag

SEQ ID NO: 196280 - DNA, 25 bp, Artificial
  probe
  misc_feature (1)..(25): SEQ ID NO: 1892; WAN024F8N_at; Start 470; Stop 494
tcggtttgtcattgatggcgatgat

SEQ ID NO: 196281 - DNA, 25 bp, Artificial
  probe
  misc_feature (1)..(25): SEQ ID NO: 1892; WAN024F8N_at; Start 616; Stop 640
ggtggagttcttgcagcccttgttg

SEQ ID NO: 196282 - DNA, 25 bp, Artificial
  probe
  misc_feature (1)..(25): SEQ ID NO: 1892; WAN024F8N_at; Start 639; Stop 663
tgcaaaaaatttccttggaacagaa

SEQ ID NO: 196283 - DNA, 25 bp, Artificial
  probe
  misc_feature (1)..(25): SEQ ID NO: 1892; WAN024F8N_at; Start 486; Stop 510
ggcgatgattcttgtcggattgaag

SEQ ID NO: 196284 - DNA, 25 bp, Artificial
  probe
  misc_feature (1)..(25): SEQ ID NO: 1892; WAN024F8N_at; Start 549; Stop 573
accagctgtcttggtaggcggcgca

SEQ ID NO: 196285 - DNA, 25 bp, Artificial
  probe
  misc_feature (1)..(25): SEQ ID NO: 1892; WAN024F8N_at; Start 500; Stop 524
tcggattgaagattactggactttc

SEQ ID NO: 196286 - DNA, 25 bp, Artificial
  probe
  misc_feature (1)..(25): SEQ ID NO: 1892; WAN024F8N_at; Start 163; Stop 187
tcaggtgctcacttgaacccggctg

SEQ ID NO: 196287 - DNA, 25 bp, Artificial
  probe
  misc_feature (1)..(25): SEQ ID NO: 1892; WAN024F8N_at; Start 246; Stop 270
ccttggtcaggttgttggagctttc

SEQ ID NO: 196288 - DNA, 25 bp, Artificial
  probe
  misc_feature (1)..(25): SEQ ID NO: 1892; WAN024F8N_at; Start 606; Stop 630
accaatcgctggtggagttcttgca

SEQ ID NO: 196289 - DNA, 25 bp, Artificial
  probe
  misc_feature (1)..(25): SEQ ID NO: 1892; WAN024F8N_at; Start 593; Stop 617
ttttcatccttgcaccaatcgctgg

SEQ ID NO: 196290 - DNA, 25 bp, Artificial
  probe
  misc_feature (1)..(25): SEQ ID NO: 1892; WAN024F8N_at; Start 628; Stop 652
gcagcccttgttgcaaaaaatttcc

SEQ ID NO: 196291 - DNA, 25 bp, Artificial
  probe
  misc_feature (1)..(25): SEQ ID NO: 1892; WAN024F8N_at; Start 370; Stop 394
ggtttcttgtttgaagtcatcgcaa

SEQ ID NO: 196292 - DNA, 25 bp, Artificial
  probe
  misc_feature (1)..(25): SEQ ID NO: 1892; WAN024F8N_at; Start 135; Stop 159
ggtggcagcctactcaatcggaact

SEQ ID NO: 196293 - DNA, 25 bp, Artificial
  probe
  misc_feature (1)..(25): SEQ ID NO: 1892; WAN024F8N_at; Start 93; Stop 117
tggtcaccttggaatcgcctttgcc

SEQ ID NO: 196294 - DNA, 25 bp, Artificial
  probe
  misc_feature (1)..(25): SEQ ID NO: 1892; WAN024F8N_at; Start 208; Stop 232
aacaaacgtttgtcatcttcagaac

SEQ ID NO: 196295 - DNA, 25 bp, Artificial
  probe
  misc_feature (1)..(25): SEQ ID NO: 1892; WAN024F8N_at; Start 177; Stop 201
gaacccggctgtttcgattgctatg

SEQ ID NO: 196296 - DNA, 25 bp, Artificial
  probe
  misc_feature (1)..(25): SEQ ID NO: 1892; WAN024F8N_at; Start 191; Stop 215
cgattgctatgtttgtaaacaaacg

SEQ ID NO: 196297 - DNA, 25 bp, Artificial
  probe
  misc_feature (1)..(25): SEQ ID NO: 1892; WAN024F8N_at; Start 84; Stop 108
tgatggccttggtcaccttggaatc

SEQ ID NO: 196298 - DNA, 25 bp, Artificial
  probe
  misc_feature (1)..(25): SEQ ID NO: 1892; WAN024F8N_at; Start 330; Stop 354
tggtgaaaatgccttggcaaacggt

SEQ ID NO: 196299 - DNA, 25 bp, Artificial
  probe
  misc_feature (1)..(25): SEQ ID NO: 1892; WAN024F8N_at; Start 12; Stop 36
tgttgctgagttaatcggtacgttc

SEQ ID NO: 196300 - DNA, 25 bp, Artificial
  probe
  misc_feature (1)..(25): SEQ ID NO: 1892; WAN024F8N_at; Start 105; Stop 129
aatcgcctttgcctttggtttggca

SEQ ID NO: 196301 - DNA, 25 bp, Artificial
  probe
  misc_feature (1)..(25): SEQ ID NO: 1892; WAN024F8N_at; Start 534; Stop 558
agctcgtagcttggcaccagctgtc

SEQ ID NO: 196302 - DNA, 25 bp, Artificial
  probe
  misc_feature (1)..(25): SEQ ID NO: 1892; WAN024F8N_at; Start 348; Stop 372
aaacggtgtcactgtctttggtggt

SEQ ID NO: 196303 - DNA, 25 bp, Artificial
  probe
  misc_feature (1)..(25): SEQ ID NO: 1892; WAN024F8N_at; Start 56; Stop 80
caggagctgttgtttttggaaatgg

SEQ ID NO: 196304 - DNA, 25 bp, Artificial
  probe
  misc_feature (1)..(25): SEQ ID NO: 1892; WAN024F8N_at; Start 149; Stop 173
caatcggaactgtttcaggtgctca

SEQ ID NO: 196305 - DNA, 25 bp, Artificial
  probe
  misc_feature (1)..(25): SEQ ID NO: 1892; WAN024F8N_at; Start 576; Stop 600
ccttcaacaagtttggattttcatc

SEQ ID NO: 196306 - DNA, 25 bp, Artificial
  probe
  misc_feature (1)..(25): SEQ ID NO: 1892; WAN024F8N_at; Start 382; Stop 406
gaagtcatcgcaactttcttgtttg

SEQ ID NO: 196307 - DNA, 25 bp, Artificial
  probe
  misc_feature (1)..(25): SEQ ID NO: 1892; WAN024F8N_at; Start 232; Stop 256
cttgtaaactacatccttggtcagg

SEQ ID NO: 196308 - DNA, 25 bp, Artificial
  probe
  misc_feature (1)..(25): SEQ ID NO: 1892; WAN024F8N_at; Start 456; Stop 480
tgctggtttggtaatcggtttgtca

SEQ ID NO: 196309 - DNA, 25 bp, Artificial
  probe
  misc_feature (1)..(25): SEQ ID NO: 1892; WAN024F8N_at; Start 123; Stop 147
tttggcaatcgtggtggcagcctac

SEQ ID NO: 196310 - DNA, 25 bp, Artificial
  probe
  misc_feature (1)..(25): SEQ ID NO: 1892; WAN024F8N_at; Start 260; Stop 284
ttggagctttcatcgcttctggcgc

SEQ ID NO: 196311 - DNA, 25 bp, Artificial
  probe
  misc_feature (1)..(25): SEQ ID NO: 1892; WAN024F8N_at; Start 411; Stop 435
ggttatcatgactgtgacttcagaa

SEQ ID NO: 196312 - DNA, 25 bp, Artificial
  probe
  misc_feature (1)..(25): SEQ ID NO: 7663; WAN024F8O_at; Start 45; Stop 69
cctaatctaccacactaggaagccg

SEQ ID NO: 196313 - DNA, 25 bp, Artificial
  probe
  misc_feature (1)..(25): SEQ ID NO: 7663; WAN024F8O_at; Start 37; Stop 61
aaaattagcctaatctaccacacta

SEQ ID NO: 196314 - DNA, 25 bp, Artificial
  probe
  misc_feature (1)..(25): SEQ ID NO: 7663; WAN024F8O_at; Start 49; Stop 73
atctaccacactaggaagccgatcc

SEQ ID NO: 196315 - DNA, 25 bp, Artificial
  probe
  misc_feature (1)..(25): SEQ ID NO: 7663; WAN024F8O_at; Start 32; Stop 56
taccaaaaattagcctaatctacca

SEQ ID NO: 196316 - DNA, 25 bp, Artificial
  probe
  misc_feature (1)..(25): SEQ ID NO: 7663; WAN024F8O_at; Start 59; Stop 83
ctaggaagccgatccaagaagatag

SEQ ID NO: 196317 - DNA, 25 bp, Artificial
  probe
  misc_feature (1)..(25): SEQ ID NO: 7663; WAN024F8O_at; Start 56; Stop 80
acactaggaagccgatccaagaaga

SEQ ID NO: 196318 - DNA, 25 bp, Artificial
  probe
  misc_feature (1)..(25): SEQ ID NO: 7663; WAN024F8O_at; Start 60; Stop 84
taggaagccgatccaagaagataga

SEQ ID NO: 196319 - DNA, 25 bp, Artificial
  probe
  misc_feature (1)..(25): SEQ ID NO: 7663; WAN024F8O_at; Start 34; Stop 58
ccaaaaattagcctaatctaccaca

SEQ ID NO: 196320 - DNA, 25 bp, Artificial
  probe
  misc_feature (1)..(25): SEQ ID NO: 7663; WAN024F8O_at; Start 48; Stop 72
aatctaccacactaggaagccgatc

SEQ ID NO: 196321 - DNA, 25 bp, Artificial
  probe
  misc_feature (1)..(25): SEQ ID NO: 7663; WAN024F8O_at; Start 35; Stop 59
caaaaattagcctaatctaccacac

SEQ ID NO: 196322 - DNA, 25 bp, Artificial
  probe
  misc_feature (1)..(25): SEQ ID NO: 7663; WAN024F8O_at; Start 58; Stop 82
actaggaagccgatccaagaagata

SEQ ID NO: 196323 - DNA, 25 bp, Artificial
  probe
  misc_feature (1)..(25): SEQ ID NO: 7663; WAN024F8O_at; Start 38; Stop 62
aaattagcctaatctaccacactag

SEQ ID NO: 196324 - DNA, 25 bp, Artificial
  probe
  misc_feature (1)..(25): SEQ ID NO: 7663; WAN024F8O_at; Start 44; Stop 68
gcctaatctaccacactaggaagcc

SEQ ID NO: 196325 - DNA, 25 bp, Artificial
  probe
  misc_feature (1)..(25): SEQ ID NO: 7663; WAN024F8O_at; Start 40; Stop 64
attagcctaatctaccacactagga

SEQ ID NO: 196326 - DNA, 25 bp, Artificial
  probe
  misc_feature (1)..(25): SEQ ID NO: 7663; WAN024F8O_at; Start 43; Stop 67
agcctaatctaccacactaggaagc

SEQ ID NO: 196327 - DNA, 25 bp, Artificial
  probe
  misc_feature (1)..(25): SEQ ID NO: 7663; WAN024F8O_at; Start 30; Stop 54
tataccaaaaattagcctaatctac

SEQ ID NO: 196328 - DNA, 25 bp, Artificial
  probe
  misc_feature (1)..(25): SEQ ID NO: 7663; WAN024F8O_at; Start 53; Stop 77
accacactaggaagccgatccaaga

SEQ ID NO: 196329 - DNA, 25 bp, Artificial
  probe
  misc_feature (1)..(25): SEQ ID NO: 7663; WAN024F8O_at; Start 36; Stop 60
aaaaattagcctaatctaccacact

SEQ ID NO: 196330 - DNA, 25 bp, Artificial
  probe
  misc_feature (1)..(25): SEQ ID NO: 7663; WAN024F8O_at; Start 54; Stop 78
ccacactaggaagccgatccaagaa

SEQ ID NO: 196331 - DNA, 25 bp, Artificial
  probe
  misc_feature (1)..(25): SEQ ID NO: 7663; WAN024F8O_at; Start 52; Stop 76
taccacactaggaagccgatccaag

SEQ ID NO: 196332 - DNA, 25 bp, Artificial
  probe
  misc_feature (1)..(25): SEQ ID NO: 7663; WAN024F8O_at; Start 57; Stop 81
cactaggaagccgatccaagaagat

SEQ ID NO: 196333 - DNA, 25 bp, Artificial
  probe
  misc_feature (1)..(25): SEQ ID NO: 7663; WAN024F8O_at; Start 51; Stop 75
ctaccacactaggaagccgatccaa

SEQ ID NO: 196334 - DNA, 25 bp, Artificial
  probe
  misc_feature (1)..(25): SEQ ID NO: 7663; WAN024F8O_at; Start 50; Stop 74
tctaccacactaggaagccgatcca

SEQ ID NO: 196335 - DNA, 25 bp, Artificial
  probe
  misc_feature (1)..(25): SEQ ID NO: 7663; WAN024F8O_at; Start 41; Stop 65
ttagcctaatctaccacactaggaa

SEQ ID NO: 196336 - DNA, 25 bp, Artificial
  probe
  misc_feature (1)..(25): SEQ ID NO: 7663; WAN024F8O_at; Start 42; Stop 66
tagcctaatctaccacactaggaag

SEQ ID NO: 196337 - DNA, 25 bp, Artificial
  probe
  misc_feature (1)..(25): SEQ ID NO: 7663; WAN024F8O_at; Start 46; Stop 70
ctaatctaccacactaggaagccga

SEQ ID NO: 196338 - DNA, 25 bp, Artificial
  probe
  misc_feature (1)..(25): SEQ ID NO: 7663; WAN024F8O_at; Start 47; Stop 71
taatctaccacactaggaagccgat

SEQ ID NO: 196339 - DNA, 25 bp, Artificial
  probe
  misc_feature (1)..(25): SEQ ID NO: 7663; WAN024F8O_at; Start 55; Stop 79
cacactaggaagccgatccaagaag

SEQ ID NO: 196340 - DNA, 25 bp, Artificial
  probe
  misc_feature (1)..(25): SEQ ID NO: 7663; WAN024F8O_at; Start 39; Stop 63
aattagcctaatctaccacactagg

SEQ ID NO: 196341 - DNA, 25 bp, Artificial
  probe
  misc_feature (1)..(25): SEQ ID NO: 4055; WAN024F8P_at; Start 55; Stop 79
atagacagcctgacgactgacaccg

SEQ ID NO: 196342 - DNA, 25 bp, Artificial
  probe
  misc_feature (1)..(25): SEQ ID NO: 4055; WAN024F8P_at; Start 141; Stop 165
tttgcttatctgtcaaaagcgccgc

SEQ ID NO: 196343 - DNA, 25 bp, Artificial
  probe
  misc_feature (1)..(25): SEQ ID NO: 4055; WAN024F8P_at; Start 85; Stop 109
ctcggcaatttcagcaaggctgtaa

SEQ ID NO: 196344 - DNA, 25 bp, Artificial
  probe
  misc_feature (1)..(25): SEQ ID NO: 4055; WAN024F8P_at; Start 88; Stop 112
ggcaatttcagcaaggctgtaatca

SEQ ID NO: 196345 - DNA, 25 bp, Artificial
  probe
  misc_feature (1)..(25): SEQ ID NO: 4055; WAN024F8P_at; Start 156; Stop 180
aaagcgccgcataaaattcaaagag

SEQ ID NO: 196346 - DNA, 25 bp, Artificial
  probe
  misc_feature (1)..(25): SEQ ID NO: 4055; WAN024F8P_at; Start 98; Stop 122
gcaaggctgtaatcatcagcgtagt

SEQ ID NO: 196347 - DNA, 25 bp, Artificial
  probe
  misc_feature (1)..(25): SEQ ID NO: 4055; WAN024F8P_at; Start 40; Stop 64
tcgcttgatattgtcatagacagcc

SEQ ID NO: 196348 - DNA, 25 bp, Artificial
  probe
  misc_feature (1)..(25): SEQ ID NO: 4055; WAN024F8P_at; Start 48; Stop 72
tattgtcatagacagcctgacgact

SEQ ID NO: 196349 - DNA, 25 bp, Artificial
  probe
  misc_feature (1)..(25): SEQ ID NO: 4055; WAN024F8P_at; Start 107; Stop 131
taatcatcagcgtagtagagctcga

SEQ ID NO: 196350 - DNA, 25 bp, Artificial
  probe
  misc_feature (1)..(25): SEQ ID NO: 4055; WAN024F8P_at; Start 126; Stop 150
gctcgatataattcatttgcttatc

SEQ ID NO: 196351 - DNA, 25 bp, Artificial
  probe
  misc_feature (1)..(25): SEQ ID NO: 4055; WAN024F8P_at; Start 160; Stop 184
cgccgcataaaattcaaagagcgca

SEQ ID NO: 196352 - DNA, 25 bp, Artificial
  probe
  misc_feature (1)..(25): SEQ ID NO: 4055; WAN024F8P_at; Start 50; Stop 74
ttgtcatagacagcctgacgactga

SEQ ID NO: 196353 - DNA, 25 bp, Artificial
  probe
  misc_feature (1)..(25): SEQ ID NO: 4055; WAN024F8P_at; Start 154; Stop 178
caaaagcgccgcataaaattcaaag

SEQ ID NO: 196354 - DNA, 25 bp, Artificial
  probe
  misc_feature (1)..(25): SEQ ID NO: 4055; WAN024F8P_at; Start 83; Stop 107
tcctcggcaatttcagcaaggctgt

SEQ ID NO: 196355 - DNA, 25 bp, Artificial
  probe
  misc_feature (1)..(25): SEQ ID NO: 4055; WAN024F8P_at; Start 53; Stop 77
tcatagacagcctgacgactgacac

SEQ ID NO: 196356 - DNA, 25 bp, Artificial
  probe
  misc_feature (1)..(25): SEQ ID NO: 4055; WAN024F8P_at; Start 103; Stop 127
gctgtaatcatcagcgtagtagagc

SEQ ID NO: 196357 - DNA, 25 bp, Artificial
  probe
  misc_feature (1)..(25): SEQ ID NO: 4055; WAN024F8P_at; Start 116; Stop 140
gcgtagtagagctcgatataattca

SEQ ID NO: 196358 - DNA, 25 bp, Artificial
  probe
  misc_feature (1)..(25): SEQ ID NO: 4055; WAN024F8P_at; Start 146; Stop 170
ttatctgtcaaaagcgccgcataaa

SEQ ID NO: 196359 - DNA, 25 bp, Artificial
  probe
  misc_feature (1)..(25): SEQ ID NO: 4055; WAN024F8P_at; Start 182; Stop 206
gcattcatacgattggttttttcga

SEQ ID NO: 196360 - DNA, 25 bp, Artificial
  probe
  misc_feature (1)..(25): SEQ ID NO: 4055; WAN024F8P_at; Start 45; Stop 69
tgatattgtcatagacagcctgacg

SEQ ID NO: 196361 - DNA, 25 bp, Artificial
  probe
  misc_feature (1)..(25): SEQ ID NO: 4055; WAN024F8P_at; Start 144; Stop 168
gcttatctgtcaaaagcgccgcata

SEQ ID NO: 196362 - DNA, 25 bp, Artificial
  probe
  misc_feature (1)..(25): SEQ ID NO: 4055; WAN024F8P_at; Start 174; Stop 198
caaagagcgcattcatacgattggt

SEQ ID NO: 196363 - DNA, 25 bp, Artificial
  probe
  misc_feature (1)..(25): SEQ ID NO: 4055; WAN024F8P_at; Start 35; Stop 59
tctgttcgcttgatattgtcataga

SEQ ID NO: 196364 - DNA, 25 bp, Artificial
  probe
  misc_feature (1)..(25): SEQ ID NO: 4055; WAN024F8P_at; Start 59; Stop 83
acagcctgacgactgacaccgaact

SEQ ID NO: 196365 - DNA, 25 bp, Artificial
  probe
  misc_feature (1)..(25): SEQ ID NO: 4055; WAN024F8P_at; Start 94; Stop 118
ttcagcaaggctgtaatcatcagcg

SEQ ID NO: 196366 - DNA, 25 bp, Artificial
  probe
  misc_feature (1)..(25): SEQ ID NO: 4055; WAN024F8P_at; Start 65; Stop 89
tgacgactgacaccgaactcctcgg

SEQ ID NO: 196367 - DNA, 25 bp, Artificial
  probe
  misc_feature (1)..(25): SEQ ID NO: 4055; WAN024F8P_at; Start 111; Stop 135
catcagcgtagtagagctcgatata

SEQ ID NO: 196368 - DNA, 25 bp, Artificial
  probe
  misc_feature (1)..(25): SEQ ID NO: 4055; WAN024F8P_at; Start 164; Stop 188
gcataaaattcaaagagcgcattca

SEQ ID NO: 196369 - DNA, 25 bp, Artificial
  probe
  misc_feature (1)..(25): SEQ ID NO: 4055; WAN024F8P_at; Start 121; Stop 145
gtagagctcgatataattcatttgc

SEQ ID NO: 196370 - DNA, 25 bp, Artificial
  probe
  misc_feature (1)..(25): SEQ ID NO: 4055; WAN024F8P_at; Start 168; Stop 192
aaaattcaaagagcgcattcatacg

SEQ ID NO: 196371 - DNA, 25 bp, Artificial
  probe
  misc_feature (1)..(25): SEQ ID NO: 4055; WAN024F8P_at; Start 79; Stop 103
gaactcctcggcaatttcagcaagg

SEQ ID NO: 196372 - DNA, 25 bp, Artificial
  probe
  misc_feature (1)..(25): SEQ ID NO: 4055; WAN024F8P_at; Start 69; Stop 93
gactgacaccgaactcctcggcaat

SEQ ID NO: 196373 - DNA, 25 bp, Artificial
  probe
  misc_feature (1)..(25): SEQ ID NO: 4055; WAN024F8P_at; Start 178; Stop 202
gagcgcattcatacgattggttttt

SEQ ID NO: 196374 - DNA, 25 bp, Artificial
  probe
  misc_feature (1)..(25): SEQ ID NO: 4055; WAN024F8P_at; Start 173; Stop 197
tcaaagagcgcattcatacgattgg

SEQ ID NO: 196375 - DNA, 25 bp, Artificial
  probe
  misc_feature (1)..(25): SEQ ID NO: 4117; WAN024F8Q_at; Start 121; Stop 145
gatgaccccagtcacttccaactga

SEQ ID NO: 196376 - DNA, 25 bp, Artificial
  probe
  misc_feature (1)..(25): SEQ ID NO: 4117; WAN024F8Q_at; Start 137; Stop 161
tccaactgagcattaaactcacgcg

SEQ ID NO: 196377 - DNA, 25 bp, Artificial
  probe
  misc_feature (1)..(25): SEQ ID NO: 4117; WAN024F8Q_at; Start 320; Stop 344
tgggcttgctccaaaccttgacgta

SEQ ID NO: 196378 - DNA, 25 bp, Artificial
  probe
  misc_feature (1)..(25): SEQ ID NO: 4117; WAN024F8Q_at; Start 284; Stop 308
gcagtatcaatcaagacatagtcgt

SEQ ID NO: 196379 - DNA, 25 bp, Artificial
  probe
  misc_feature (1)..(25): SEQ ID NO: 4117; WAN024F8Q_at; Start 93; Stop 117
cacgagtatcgccatcaatcttggt

SEQ ID NO: 196380 - DNA, 25 bp, Artificial
  probe
  misc_feature (1)..(25): SEQ ID NO: 4117; WAN024F8Q_at; Start 2; Stop 26
tggaaggtttcaatgtccgtaatct

SEQ ID NO: 196381 - DNA, 25 bp, Artificial
  probe
  misc_feature (1)..(25): SEQ ID NO: 4117; WAN024F8Q_at; Start 406; Stop 430
caaggtcttaagctggtcaatggca

SEQ ID NO: 196382 - DNA, 25 bp, Artificial
  probe
  misc_feature (1)..(25): SEQ ID NO: 4117; WAN024F8Q_at; Start 180; Stop 204
gaccaatcatagcatcaacgacaag

SEQ ID NO: 196383 - DNA, 25 bp, Artificial
  probe
  misc_feature (1)..(25): SEQ ID NO: 4117; WAN024F8Q_at; Start 48; Stop 72
tgattggttttccagtaatgtgacg

SEQ ID NO: 196384 - DNA, 25 bp, Artificial
  probe
  misc_feature (1)..(25): SEQ ID NO: 4117; WAN024F8Q_at; Start 204; Stop 228
gcaagatttcatttggttgagccaa

SEQ ID NO: 196385 - DNA, 25 bp, Artificial
  probe
  misc_feature (1)..(25): SEQ ID NO: 4117; WAN024F8Q_at; Start 386; Stop 410
ggcacatcaatctgttgtcccaagg

SEQ ID NO: 196386 - DNA, 25 bp, Artificial
  probe
  misc_feature (1)..(25): SEQ ID NO: 4117; WAN024F8Q_at; Start 275; Stop 299
aaacgacccgcagtatcaatcaaga

SEQ ID NO: 196387 - DNA, 25 bp, Artificial
  probe
  misc_feature (1)..(25): SEQ ID NO: 4117; WAN024F8Q_at; Start 107; Stop 131
tcaatcttggtaaggatgaccccag

SEQ ID NO: 196388 - DNA, 25 bp, Artificial
  probe
  misc_feature (1)..(25): SEQ ID NO: 4117; WAN024F8Q_at; Start 63; Stop 87
taatgtgacgaacagacagagcagc

SEQ ID NO: 196389 - DNA, 25 bp, Artificial
  probe
  misc_feature (1)..(25): SEQ ID NO: 4117; WAN024F8Q_at; Start 394; Stop 418
aatctgttgtcccaaggtcttaagc

SEQ ID NO: 196390 - DNA, 25 bp, Artificial
  probe
  misc_feature (1)..(25): SEQ ID NO: 4117; WAN024F8Q_at; Start 239; Stop 263
tcacgaagctcattcatgaggagct

SEQ ID NO: 196391 - DNA, 25 bp, Artificial
  probe
  misc_feature (1)..(25): SEQ ID NO: 4117; WAN024F8Q_at; Start 365; Stop 389
tctgttccaagtgcaaagacaggca

SEQ ID NO: 196392 - DNA, 25 bp, Artificial
  probe
  misc_feature (1)..(25): SEQ ID NO: 4117; WAN024F8Q_at; Start 189; Stop 213
tagcatcaacgacaagcaagatttc

SEQ ID NO: 196393 - DNA, 25 bp, Artificial
  probe
  misc_feature (1)..(25): SEQ ID NO: 4117; WAN024F8Q_at; Start 423; Stop 447
caatggcagctggacgataaatatc

SEQ ID NO: 196394 - DNA, 25 bp, Artificial
  probe
  misc_feature (1)..(25): SEQ ID NO: 4117; WAN024F8Q_at; Start 264; Stop 288
catcaatctgcaaacgacccgcagt

SEQ ID NO: 196395 - DNA, 25 bp, Artificial
  probe
  misc_feature (1)..(25): SEQ ID NO: 4117; WAN024F8Q_at; Start 338; Stop 362
tgacgtacaatctcaacagctggta

SEQ ID NO: 196396 - DNA, 25 bp, Artificial
  probe
  misc_feature (1)..(25): SEQ ID NO: 4117; WAN024F8Q_at; Start 457; Stop 481
catcaaaggacgagcattttcttct

SEQ ID NO: 196397 - DNA, 25 bp, Artificial
  probe
  misc_feature (1)..(25): SEQ ID NO: 4117; WAN024F8Q_at; Start 253; Stop 277
catgaggagctcatcaatctgcaaa

SEQ ID NO: 196398 - DNA, 25 bp, Artificial
  probe
  misc_feature (1)..(25): SEQ ID NO: 4117; WAN024F8Q_at; Start 150; Stop 174
taaactcacgcgcaacattggctgc

SEQ ID NO: 196399 - DNA, 25 bp, Artificial
  probe
  misc_feature (1)..(25): SEQ ID NO: 4117; WAN024F8Q_at; Start 351; Stop 375
caacagctggtacttctgttccaag

SEQ ID NO: 196400 - DNA, 25 bp, Artificial
  probe
  misc_feature (1)..(25): SEQ ID NO: 4117; WAN024F8Q_at; Start 17; Stop 41
tccgtaatcttttcacctgtaccag

SEQ ID NO: 196401 - DNA, 25 bp, Artificial
  probe
  misc_feature (1)..(25): SEQ ID NO: 4117; WAN024F8Q_at; Start 222; Stop 246
gagccaatgctttcacatcacgaag

SEQ ID NO: 196402 - DNA, 25 bp, Artificial
  probe
  misc_feature (1)..(25): SEQ ID NO: 4117; WAN024F8Q_at; Start 431; Stop 455
gctggacgataaatatccgccgcaa

SEQ ID NO: 196403 - DNA, 25 bp, Artificial
  probe
  misc_feature (1)..(25): SEQ ID NO: 4117; WAN024F8Q_at; Start 168; Stop 192
tggctgcttcctgaccaatcatagc

SEQ ID NO: 196404 - DNA, 25 bp, Artificial
  probe
  misc_feature (1)..(25): SEQ ID NO: 4117; WAN024F8Q_at; Start 475; Stop 499
ttcttctttcttgagtttgttggcc

SEQ ID NO: 196405 - DNA, 25 bp, Artificial
  probe
  misc_feature (1)..(25): SEQ ID NO: 4117; WAN024F8Q_at; Start 78; Stop 102
acagagcagcaccaccacgagtatc

SEQ ID NO: 196406 - DNA, 25 bp, Artificial
  probe
  misc_feature (1)..(25): SEQ ID NO: 4117; WAN024F8Q_at; Start 30; Stop 54
cacctgtaccagtgaacttgattgg

SEQ ID NO: 196407 - DNA, 25 bp, Artificial
  probe
  misc_feature (1)..(25): SEQ ID NO: 4117; WAN024F8Q_at; Start 300; Stop 324
catagtcgttatgattagtttgggc

SEQ ID NO: 196408 - DNA, 25 bp, Artificial
  probe
  misc_feature (1)..(25): SEQ ID NO: 4117; WAN024F8Q_at; Start 376; Stop 400
tgcaaagacaggcacatcaatctgt

SEQ ID NO: 196409 - DNA, 25 bp, Artificial
  probe
  misc_feature (1)..(25): SEQ ID NO: 5747; WAN024F8R_at; Start 426; Stop 450
tgtcatcgaagacacaatggcacgt

SEQ ID NO: 196410 - DNA, 25 bp, Artificial
  probe
  misc_feature (1)..(25): SEQ ID NO: 5747; WAN024F8R_at; Start 396; Stop 420
taacaaatctgggttttcacgctct

SEQ ID NO: 196411 - DNA, 25 bp, Artificial
  probe
  misc_feature (1)..(25): SEQ ID NO: 5747; WAN024F8R_at; Start 65; Stop 89
tcatggcaaattcaccaattttacc

SEQ ID NO: 196412 - DNA, 25 bp, Artificial
  probe
  misc_feature (1)..(25): SEQ ID NO: 5747; WAN024F8R_at; Start 443; Stop 467
tggcacgtttacgagcaatctggcg

SEQ ID NO: 196413 - DNA, 25 bp, Artificial
  probe
  misc_feature (1)..(25): SEQ ID NO: 5747; WAN024F8R_at; Start 323; Stop 347
ccttgatgaatttattgacttcgac

SEQ ID NO: 196414 - DNA, 25 bp, Artificial
  probe
  misc_feature (1)..(25): SEQ ID NO: 5747; WAN024F8R_at; Start 348; Stop 372
gaatgtatttccagaaccagcagca

SEQ ID NO: 196415 - DNA, 25 bp, Artificial
  probe
  misc_feature (1)..(25): SEQ ID NO: 5747; WAN024F8R_at; Start 308; Stop 332
tagcctggttaaagtccttgatgaa

SEQ ID NO: 196416 - DNA, 25 bp, Artificial
  probe
  misc_feature (1)..(25): SEQ ID NO: 5747; WAN024F8R_at; Start 24; Stop 48
cgctttcttcattttgttagccata

SEQ ID NO: 196417 - DNA, 25 bp, Artificial
  probe
  misc_feature (1)..(25): SEQ ID NO: 5747; WAN024F8R_at; Start 90; Stop 114
tttcaaaccgccaccaaacatctgg

SEQ ID NO: 196418 - DNA, 25 bp, Artificial
  probe
  misc_feature (1)..(25): SEQ ID NO: 5747; WAN024F8R_at; Start 135; Stop 159
tcctccgagagctgataagtcaggc

SEQ ID NO: 196419 - DNA, 25 bp, Artificial
  probe
  misc_feature (1)..(25): SEQ ID NO: 5747; WAN024F8R_at; Start 38; Stop 62
tgttagccatacgtttcatggactg

SEQ ID NO: 196420 - DNA, 25 bp, Artificial
  probe
  misc_feature (1)..(25): SEQ ID NO: 5747; WAN024F8R_at; Start 379; Stop 403
cggcgacggcttggatttaacaaat

SEQ ID NO: 196421 - DNA, 25 bp, Artificial
  probe
  misc_feature (1)..(25): SEQ ID NO: 5747; WAN024F8R_at; Start 372; Stop 396
aatacgacggcgacggcttggattt

SEQ ID NO: 196422 - DNA, 25 bp, Artificial
  probe
  misc_feature (1)..(25): SEQ ID NO: 5747; WAN024F8R_at; Start 104; Stop 128
caaacatctggctcatatctggcat

SEQ ID NO: 196423 - DNA, 25 bp, Artificial
  probe
  misc_feature (1)..(25): SEQ ID NO: 5747; WAN024F8R_at; Start 150; Stop 174
taagtcaggcataccgccttgtccc

SEQ ID NO: 196424 - DNA, 25 bp, Artificial
  probe
  misc_feature (1)..(25): SEQ ID NO: 5747; WAN024F8R_at; Start 261; Stop 285
catcattttattcatatccccagac

SEQ ID NO: 196425 - DNA, 25 bp, Artificial
  probe
  misc_feature (1)..(25): SEQ ID NO: 5747; WAN024F8R_at; Start 283; Stop 307
gacataacaccctgcatgagctgtt

SEQ ID NO: 196426 - DNA, 25 bp, Artificial
  probe
  misc_feature (1)..(25): SEQ ID NO: 5747; WAN024F8R_at; Start 269; Stop 293
tattcatatccccagacataacacc

SEQ ID NO: 196427 - DNA, 25 bp, Artificial
  probe
  misc_feature (1)..(25): SEQ ID NO: 5747; WAN024F8R_at; Start 436; Stop 460
gacacaatggcacgtttacgagcaa

SEQ ID NO: 196428 - DNA, 25 bp, Artificial
  probe
  misc_feature (1)..(25): SEQ ID NO: 5747; WAN024F8R_at; Start 2; Stop 26
tgtcttacttgcgtttcttcttcgc

SEQ ID NO: 196429 - DNA, 25 bp, Artificial
  probe
  misc_feature (1)..(25): SEQ ID NO: 5747; WAN024F8R_at; Start 195; Stop 219
catatccattcctcccatatttggc

SEQ ID NO: 196430 - DNA, 25 bp, Artificial
  probe
  misc_feature (1)..(25): SEQ ID NO: 5747; WAN024F8R_at; Start 412; Stop 436
tcacgctcttcaggtgtcatcgaag

SEQ ID NO: 196431 - DNA, 25 bp, Artificial
  probe
  misc_feature (1)..(25): SEQ ID NO: 5747; WAN024F8R_at; Start 169; Stop 193
tgtcccatcattccttcaagggcag

SEQ ID NO: 196432 - DNA, 25 bp, Artificial
  probe
  misc_feature (1)..(25): SEQ ID NO: 5747; WAN024F8R_at; Start 110; Stop 134
tctggctcatatctggcattcctgc

SEQ ID NO: 196433 - DNA, 25 bp, Artificial
  probe
  misc_feature (1)..(25): SEQ ID NO: 5747; WAN024F8R_at; Start 357; Stop 381
tccagaaccagcagcaatacgacgg

SEQ ID NO: 196434 - DNA, 25 bp, Artificial
  probe
  misc_feature (1)..(25): SEQ ID NO: 5747; WAN024F8R_at; Start 455; Stop 479
gagcaatctggcgttcatccacctt

SEQ ID NO: 196435 - DNA, 25 bp, Artificial
  probe
  misc_feature (1)..(25): SEQ ID NO: 5747; WAN024F8R_at; Start 184; Stop 208
tcaagggcagacatatccattcctc

SEQ ID NO: 196436 - DNA, 25 bp, Artificial
  probe
  misc_feature (1)..(25): SEQ ID NO: 5747; WAN024F8R_at; Start 209; Stop 233
ccatatttggcatatttttaggaag

SEQ ID NO: 196437 - DNA, 25 bp, Artificial
  probe
  misc_feature (1)..(25): SEQ ID NO: 5747; WAN024F8R_at; Start 297; Stop 321
catgagctgtttagcctggttaaag

SEQ ID NO: 196438 - DNA, 25 bp, Artificial
  probe
  misc_feature (1)..(25): SEQ ID NO: 5747; WAN024F8R_at; Start 338; Stop 362
tgacttcgacgaatgtatttccaga

SEQ ID NO: 196439 - DNA, 25 bp, Artificial
  probe
  misc_feature (1)..(25): SEQ ID NO: 5747; WAN024F8R_at; Start 56; Stop 80
tggactgtttcatggcaaattcacc

SEQ ID NO: 196440 - DNA, 25 bp, Artificial
  probe
  misc_feature (1)..(25): SEQ ID NO: 5747; WAN024F8R_at; Start 241; Stop 265
ggattaatccccatttgcttcatca

SEQ ID NO: 196441 - DNA, 25 bp, Artificial
  probe
  misc_feature (1)..(25): SEQ ID NO: 5747; WAN024F8R_at; Start 464; Stop 488
ggcgttcatccaccttcatgttttg

SEQ ID NO: 196442 - DNA, 25 bp, Artificial
  probe
  misc_feature (1)..(25): SEQ ID NO: 5747; WAN024F8R_at; Start 123; Stop 147
tggcattcctgctcctccgagagct

SEQ ID NO: 196443 - DNA, 25 bp, Artificial
  probe
  misc_feature (1)..(25): SEQ ID NO: 5163; WAN024F8S_at; Start 170; Stop 194
taagtgtatcaatgacctcatgccc

SEQ ID NO: 196444 - DNA, 25 bp, Artificial
  probe
  misc_feature (1)..(25): SEQ ID NO: 5163; WAN024F8S_at; Start 106; Stop 130
gtatcagaacctaaaacggctgtca

SEQ ID NO: 196445 - DNA, 25 bp, Artificial
  probe
  misc_feature (1)..(25): SEQ ID NO: 5163; WAN024F8S_at; Start 204; Stop 228
ctcacgaactttcttgataaagtcc

SEQ ID NO: 196446 - DNA, 25 bp, Artificial
  probe
  misc_feature (1)..(25): SEQ ID NO: 5163; WAN024F8S_at; Start 195; Stop 219
gactgcacgctcacgaactttcttg

SEQ ID NO: 196447 - DNA, 25 bp, Artificial
  probe
  misc_feature (1)..(25): SEQ ID NO: 5163; WAN024F8S_at; Start 495; Stop 519
tagtccgagtacatgtgcaatttca

SEQ ID NO: 196448 - DNA, 25 bp, Artificial
  probe
  misc_feature (1)..(25): SEQ ID NO: 5163; WAN024F8S_at; Start 156; Stop 180
ctgttgcgcaggattaagtgtatca

SEQ ID NO: 196449 - DNA, 25 bp, Artificial
  probe
  misc_feature (1)..(25): SEQ ID NO: 5163; WAN024F8S_at; Start 413; Stop 437
taaaatttctatctgctcctgcaga

SEQ ID NO: 196450 - DNA, 25 bp, Artificial
  probe
  misc_feature (1)..(25): SEQ ID NO: 5163; WAN024F8S_at; Start 134; Stop 158
cctcatcaacgattttaataatctg

SEQ ID NO: 196451 - DNA, 25 bp, Artificial
  probe
  misc_feature (1)..(25): SEQ ID NO: 5163; WAN024F8S_at; Start 286; Stop 310
gcctcttggacatcagattcagaga

SEQ ID NO: 196452 - DNA, 25 bp, Artificial
  probe
  misc_feature (1)..(25): SEQ ID NO: 5163; WAN024F8S_at; Start 387; Stop 411
tcttattctctattatcaatgcttg

SEQ ID NO: 196453 - DNA, 25 bp, Artificial
  probe
  misc_feature (1)..(25): SEQ ID NO: 5163; WAN024F8S_at; Start 294; Stop 318
gacatcagattcagagatttttcct

SEQ ID NO: 196454 - DNA, 25 bp, Artificial
  probe
  misc_feature (1)..(25): SEQ ID NO: 5163; WAN024F8S_at; Start 144; Stop 168
gattttaataatctgttgcgcagga

SEQ ID NO: 196455 - DNA, 25 bp, Artificial
  probe
  misc_feature (1)..(25): SEQ ID NO: 5163; WAN024F8S_at; Start 229; Stop 253
tttacaacaggcaaggcaacgtcgg

SEQ ID NO: 196456 - DNA, 25 bp, Artificial
  probe
  misc_feature (1)..(25): SEQ ID NO: 5163; WAN024F8S_at; Start 499; Stop 523
ccgagtacatgtgcaatttcatctc

SEQ ID NO: 196457 - DNA, 25 bp, Artificial
  probe
  misc_feature (1)..(25): SEQ ID NO: 5163; WAN024F8S_at; Start 339; Stop 363
gacgttctgcaaacgttctgttaaa

SEQ ID NO: 196458 - DNA, 25 bp, Artificial
  probe
  misc_feature (1)..(25): SEQ ID NO: 5163; WAN024F8S_at; Start 176; Stop 200
tatcaatgacctcatgcccgactgc

SEQ ID NO: 196459 - DNA, 25 bp, Artificial
  probe
  misc_feature (1)..(25): SEQ ID NO: 5163; WAN024F8S_at; Start 325; Stop 349
cgtagatttttaaagacgttctgca

SEQ ID NO: 196460 - DNA, 25 bp, Artificial
  probe
  misc_feature (1)..(25): SEQ ID NO: 5163; WAN024F8S_at; Start 100; Stop 124
tctgccgtatcagaacctaaaacgg

SEQ ID NO: 196461 - DNA, 25 bp, Artificial
  probe
  misc_feature (1)..(25): SEQ ID NO: 5163; WAN024F8S_at; Start 68; Stop 92
tgatggttggaatcttaggtgactt

SEQ ID NO: 196462 - DNA, 25 bp, Artificial
  probe
  misc_feature (1)..(25): SEQ ID NO: 5163; WAN024F8S_at; Start 281; Stop 305
tggttgcctcttggacatcagattc

SEQ ID NO: 196463 - DNA, 25 bp, Artificial
  probe
  misc_feature (1)..(25): SEQ ID NO: 5163; WAN024F8S_at; Start 403; Stop 427
caatgcttgttaaaatttctatctg

SEQ ID NO: 196464 - DNA, 25 bp, Artificial
  probe
  misc_feature (1)..(25): SEQ ID NO: 5163; WAN024F8S_at; Start 368; Stop 392
caaatgccatttttcttcctcttat

SEQ ID NO: 196465 - DNA, 25 bp, Artificial
  probe
  misc_feature (1)..(25): SEQ ID NO: 5163; WAN024F8S_at; Start 272; Stop 296
gaatttctttggttgcctcttggac

SEQ ID NO: 196466 - DNA, 25 bp, Artificial
  probe
  misc_feature (1)..(25): SEQ ID NO: 5163; WAN024F8S_at; Start 48; Stop 72
ttgtaaaccaaccatcatgatgatg

SEQ ID NO: 196467 - DNA, 25 bp, Artificial
  probe
  misc_feature (1)..(25): SEQ ID NO: 5163; WAN024F8S_at; Start 246; Stop 270
aacgtcggcctcgagcaaggccaag

SEQ ID NO: 196468 - DNA, 25 bp, Artificial
  probe
  misc_feature (1)..(25): SEQ ID NO: 5163; WAN024F8S_at; Start 234; Stop 258
aacaggcaaggcaacgtcggcctcg

SEQ ID NO: 196469 - DNA, 25 bp, Artificial
  probe
  misc_feature (1)..(25): SEQ ID NO: 5163; WAN024F8S_at; Start 258; Stop 282
gagcaaggccaagcgaatttctttg

SEQ ID NO: 196470 - DNA, 25 bp, Artificial
  probe
  misc_feature (1)..(25): SEQ ID NO: 5163; WAN024F8S_at; Start 162; Stop 186
cgcaggattaagtgtatcaatgacc

SEQ ID NO: 196471 - DNA, 25 bp, Artificial
  probe
  misc_feature (1)..(25): SEQ ID NO: 5163; WAN024F8S_at; Start 352; Stop 376
cgttctgttaaactttcaaatgcca

SEQ ID NO: 196472 - DNA, 25 bp, Artificial
  probe
  misc_feature (1)..(25): SEQ ID NO: 5163; WAN024F8S_at; Start 60; Stop 84
catcatgatgatggttggaatctta

SEQ ID NO: 196473 - DNA, 25 bp, Artificial
  probe
  misc_feature (1)..(25): SEQ ID NO: 5163; WAN024F8S_at; Start 43; Stop 67
gccccttgtaaaccaaccatcatga

SEQ ID NO: 196474 - DNA, 25 bp, Artificial
  probe
  misc_feature (1)..(25): SEQ ID NO: 5163; WAN024F8S_at; Start 219; Stop 243
gataaagtcctttacaacaggcaag

SEQ ID NO: 196475 - DNA, 25 bp, Artificial
  probe
  misc_feature (1)..(25): SEQ ID NO: 5163; WAN024F8S_at; Start 88; Stop 112
gacttgataatttctgccgtatcag

SEQ ID NO: 196476 - DNA, 25 bp, Artificial
  probe
  misc_feature (1)..(25): SEQ ID NO: 5163; WAN024F8S_at; Start 82; Stop 106
ttaggtgacttgataatttctgccg

SEQ ID NO: 196477 - DNA, 25 bp, Artificial
  probe
  misc_feature (1)..(25): SEQ ID NO: 2162; WAN024F8T_at; Start 22; Stop 46
cgtatgaatgcgctctttgaatttt

SEQ ID NO: 196478 - DNA, 25 bp, Artificial
  probe
  misc_feature (1)..(25): SEQ ID NO: 2162; WAN024F8T_at; Start 27; Stop 51
gaatgcgctctttgaattttatgcg

SEQ ID NO: 196479 - DNA, 25 bp, Artificial
  probe
  misc_feature (1)..(25): SEQ ID NO: 2162; WAN024F8T_at; Start 46; Stop 70
tatgcggcgcttttgacagataagc

SEQ ID NO: 196480 - DNA, 25 bp, Artificial
  probe
  misc_feature (1)..(25): SEQ ID NO: 2162; WAN024F8T_at; Start 168; Stop 192
caagcgaacagaaaagattctggaa

SEQ ID NO: 196481 - DNA, 25 bp, Artificial
  probe
  misc_feature (1)..(25): SEQ ID NO: 2162; WAN024F8T_at; Start 49; Stop 73
gcggcgcttttgacagataagcaaa

SEQ ID NO: 196482 - DNA, 25 bp, Artificial
  probe
  misc_feature (1)..(25): SEQ ID NO: 2162; WAN024F8T_at; Start 12; Stop 36
aaaaaccaatcgtatgaatgcgctc

SEQ ID NO: 196483 - DNA, 25 bp, Artificial
  probe
  misc_feature (1)..(25): SEQ ID NO: 2162; WAN024F8T_at; Start 187; Stop 211
ctggaagattatgagatgaaattgc

SEQ ID NO: 196484 - DNA, 25 bp, Artificial
  probe
  misc_feature (1)..(25): SEQ ID NO: 2162; WAN024F8T_at; Start 33; Stop 57
gctctttgaattttatgcggcgctt

SEQ ID NO: 196485 - DNA, 25 bp, Artificial
  probe
  misc_feature (1)..(25): SEQ ID NO: 2162; WAN024F8T_at; Start 30; Stop 54
tgcgctctttgaattttatgcggcg

SEQ ID NO: 196486 - DNA, 25 bp, Artificial
  probe
  misc_feature (1)..(25): SEQ ID NO: 2162; WAN024F8T_at; Start 10; Stop 34
gaaaaaaccaatcgtatgaatgcgc

SEQ ID NO: 196487 - DNA, 25 bp, Artificial
  probe
  misc_feature (1)..(25): SEQ ID NO: 2162; WAN024F8T_at; Start 14; Stop 38
aaaccaatcgtatgaatgcgctctt

SEQ ID NO: 196488 - DNA, 25 bp, Artificial
  probe
  misc_feature (1)..(25): SEQ ID NO: 2162; WAN024F8T_at; Start 145; Stop 169
cgtcaggctgtctatgacaatatca

SEQ ID NO: 196489 - DNA, 25 bp, Artificial
  probe
  misc_feature (1)..(25): SEQ ID NO: 2162; WAN024F8T_at; Start 292; Stop 316
gagcagatagaaattttaacaagca

SEQ ID NO: 196490 - DNA, 25 bp, Artificial
  probe
  misc_feature (1)..(25): SEQ ID NO: 2162; WAN024F8T_at; Start 4; Stop 28
gaaatcgaaaaaaccaatcgtatga

SEQ ID NO: 196491 - DNA, 25 bp, Artificial
  probe
  misc_feature (1)..(25): SEQ ID NO: 2162; WAN024F8T_at; Start 285; Stop 309
tctgcaggagcagatagaaatttta

SEQ ID NO: 196492 - DNA, 25 bp, Artificial
  probe
  misc_feature (1)..(25): SEQ ID NO: 2162; WAN024F8T_at; Start 159; Stop 183
tgacaatatcaagcgaacagaaaag

SEQ ID NO: 196493 - DNA, 25 bp, Artificial
  probe
  misc_feature (1)..(25): SEQ ID NO: 2162; WAN024F8T_at; Start 198; Stop 222
tgagatgaaattgcacatgtactcg

SEQ ID NO: 196494 - DNA, 25 bp, Artificial
  probe
  misc_feature (1)..(25): SEQ ID NO: 2162; WAN024F8T_at; Start 53; Stop 77
cgcttttgacagataagcaaatgaa

SEQ ID NO: 196495 - DNA, 25 bp, Artificial
  probe
  misc_feature (1)..(25): SEQ ID NO: 2162; WAN024F8T_at; Start 151; Stop 175
gctgtctatgacaatatcaagcgaa

SEQ ID NO: 196496 - DNA, 25 bp, Artificial
  probe
  misc_feature (1)..(25): SEQ ID NO: 2162; WAN024F8T_at; Start 17; Stop 41
ccaatcgtatgaatgcgctctttga

SEQ ID NO: 196497 - DNA, 25 bp, Artificial
  probe
  misc_feature (1)..(25): SEQ ID NO: 2162; WAN024F8T_at; Start 200; Stop 224
agatgaaattgcacatgtactcgga

SEQ ID NO: 196498 - DNA, 25 bp, Artificial
  probe
  misc_feature (1)..(25): SEQ ID NO: 2162; WAN024F8T_at; Start 289; Stop 313
caggagcagatagaaattttaacaa

SEQ ID NO: 196499 - DNA, 25 bp, Artificial
  probe
  misc_feature (1)..(25): SEQ ID NO: 2162; WAN024F8T_at; Start 178; Stop 202
gaaaagattctggaagattatgaga

SEQ ID NO: 196500 - DNA, 25 bp, Artificial
  probe
  misc_feature (1)..(25): SEQ ID NO: 2162; WAN024F8T_at; Start 35; Stop 59
tctttgaattttatgcggcgctttt

SEQ ID NO: 196501 - DNA, 25 bp, Artificial
  probe
  misc_feature (1)..(25): SEQ ID NO: 2162; WAN024F8T_at; Start 287; Stop 311
tgcaggagcagatagaaattttaac

SEQ ID NO: 196502 - DNA, 25 bp, Artificial
  probe
  misc_feature (1)..(25): SEQ ID NO: 2162; WAN024F8T_at; Start 155; Stop 179
tctatgacaatatcaagcgaacaga

SEQ ID NO: 196503 - DNA, 25 bp, Artificial
  probe
  misc_feature (1)..(25): SEQ ID NO: 2162; WAN024F8T_at; Start 147; Stop 171
tcaggctgtctatgacaatatcaag

SEQ ID NO: 196504 - DNA, 25 bp, Artificial
  probe
  misc_feature (1)..(25): SEQ ID NO: 2162; WAN024F8T_at; Start 59; Stop 83
tgacagataagcaaatgaattatat

SEQ ID NO: 196505 - DNA, 25 bp, Artificial
  probe
  misc_feature (1)..(25): SEQ ID NO: 2162; WAN024F8T_at; Start 165; Stop 189
tatcaagcgaacagaaaagattctg

SEQ ID NO: 196506 - DNA, 25 bp, Artificial
  probe
  misc_feature (1)..(25): SEQ ID NO: 2162; WAN024F8T_at; Start 142; Stop 166
agtcgtcaggctgtctatgacaata

SEQ ID NO: 196507 - DNA, 25 bp, Artificial
  probe
  misc_feature (1)..(25): SEQ ID NO: 2162; WAN024F8T_at; Start 44; Stop 68
tttatgcggcgcttttgacagataa

SEQ ID NO: 196508 - DNA, 25 bp, Artificial
  probe
  misc_feature (1)..(25): SEQ ID NO: 2162; WAN024F8T_at; Start 171; Stop 195
gcgaacagaaaagattctggaagat

SEQ ID NO: 196509 - DNA, 25 bp, Artificial
  probe
  misc_feature (1)..(25): SEQ ID NO: 2162; WAN024F8T_at; Start 297; Stop 321
gatagaaattttaacaagcattgat

SEQ ID NO: 196510 - DNA, 25 bp, Artificial
  probe
  misc_feature (1)..(25): SEQ ID NO: 2162; WAN024F8T_at; Start 19; Stop 43
aatcgtatgaatgcgctctttgaat

SEQ ID NO: 196511 - DNA, 25 bp, Artificial
  probe
  misc_feature (1)..(25): SEQ ID NO: 2449; WAN024F8U_at; Start 808; Stop 832
ccaatcaagttcactggtacaggtg

SEQ ID NO: 196512 - DNA, 25 bp, Artificial
  probe
  misc_feature (1)..(25): SEQ ID NO: 2449; WAN024F8U_at; Start 435; Stop 459
cattgaccagcttaagaccttggga

SEQ ID NO: 196513 - DNA, 25 bp, Artificial
  probe
  misc_feature (1)..(25): SEQ ID NO: 2449; WAN024F8U_at; Start 670; Stop 694
gctatgattggtcaggaagcagcca

SEQ ID NO: 196514 - DNA, 25 bp, Artificial
  probe
  misc_feature (1)..(25): SEQ ID NO: 2449; WAN024F8U_at; Start 500; Stop 524
taccagctgttgagattgtacgtca

SEQ ID NO: 196515 - DNA, 25 bp, Artificial
  probe
  misc_feature (1)..(25): SEQ ID NO: 2449; WAN024F8U_at; Start 1398; Stop 1422
aatgatgggacaaggcggtatgcct

SEQ ID NO: 196516 - DNA, 25 bp, Artificial
  probe
  misc_feature (1)..(25): SEQ ID NO: 2449; WAN024F8U_at; Start 951; Stop 975
ccttgaaatggctgagaagatgcgc

SEQ ID NO: 196517 - DNA, 25 bp, Artificial
  probe
  misc_feature (1)..(25): SEQ ID NO: 2449; WAN024F8U_at; Start 1444; Stop 1468
gcaggaatgccagatatgagccaga

SEQ ID NO: 196518 - DNA, 25 bp, Artificial
  probe
  misc_feature (1)..(25): SEQ ID NO: 2449; WAN024F8U_at; Start 97; Stop 121
aaagaaattcgcttggccttgctcg

SEQ ID NO: 196519 - DNA, 25 bp, Artificial
  probe
  misc_feature (1)..(25): SEQ ID NO: 2449; WAN024F8U_at; Start 1174; Stop 1198
gatttgttaaatccaagccgtcgcc

SEQ ID NO: 196520 - DNA, 25 bp, Artificial
  probe
  misc_feature (1)..(25): SEQ ID NO: 2449; WAN024F8U_at; Start 518; Stop 542
tacgtcaaggtttggagcaagccca

SEQ ID NO: 196521 - DNA, 25 bp, Artificial
  probe
  misc_feature (1)..(25): SEQ ID NO: 2449; WAN024F8U_at; Start 760; Stop 784
gatactcgtggtggtgctgctctgt

SEQ ID NO: 196522 - DNA, 25 bp, Artificial
  probe
  misc_feature (1)..(25): SEQ ID NO: 2449; WAN024F8U_at; Start 741; Stop 765
ccttaccaagattgatggcgatact

SEQ ID NO: 196523 - DNA, 25 bp, Artificial
  probe
  misc_feature (1)..(25): SEQ ID NO: 2449; WAN024F8U_at; Start 1125; Stop 1149
taaacgtgccattgtgtcttcgatg

SEQ ID NO: 196524 - DNA, 25 bp, Artificial
  probe
  misc_feature (1)..(25): SEQ ID NO: 2449; WAN024F8U_at; Start 1108; Stop 1132
gaacgccagattgctcgtaaacgtg

SEQ ID NO: 196525 - DNA, 25 bp, Artificial
  probe
  misc_feature (1)..(25): SEQ ID NO: 2449; WAN024F8U_at; Start 1049; Stop 1073
tgctcaagatgattccaggtatggc

SEQ ID NO: 196526 - DNA, 25 bp, Artificial
  probe
  misc_feature (1)..(25): SEQ ID NO: 2449; WAN024F8U_at; Start 420; Stop 444
ttatcgtccagctgccattgaccag

SEQ ID NO: 196527 - DNA, 25 bp, Artificial
  probe
  misc_feature (1)..(25): SEQ ID NO: 2449; WAN024F8U_at; Start 73; Stop 97
gaatctgatgtccaagaggcaacca

SEQ ID NO: 196528 - DNA, 25 bp, Artificial
  probe
  misc_feature (1)..(25): SEQ ID NO: 2449; WAN024F8U_at; Start 374; Stop 398
tcaagaaagaagaaaatgctcgtcc

SEQ ID NO: 196529 - DNA, 25 bp, Artificial
  probe
  misc_feature (1)..(25): SEQ ID NO: 2449; WAN024F8U_at; Start 270; Stop 294
tacggcagaaattatcaagtcacct

SEQ ID NO: 196530 - DNA, 25 bp, Artificial
  probe
  misc_feature (1)..(25): SEQ ID NO: 2449; WAN024F8U_at; Start 966; Stop 990
gaagatgcgcgaaaacacctttgat

SEQ ID NO: 196531 - DNA, 25 bp, Artificial
  probe
  misc_feature (1)..(25): SEQ ID NO: 2449; WAN024F8U_at; Start 344; Stop 368
caacctttgctggtaaattggccaa

SEQ ID NO: 196532 - DNA, 25 bp, Artificial
  probe
  misc_feature (1)..(25): SEQ ID NO: 2449; WAN024F8U_at; Start 559; Stop 583
tatgtcttgattgatactgcgggtc

SEQ ID NO: 196533 - DNA, 25 bp, Artificial
  probe
  misc_feature (1)..(25): SEQ ID NO: 2449; WAN024F8U_at; Start 483; Stop 507
tgcacttggaacagaagtaccagct

SEQ ID NO: 196534 - DNA, 25 bp, Artificial
  probe
  misc_feature (1)..(25): SEQ ID NO: 2449; WAN024F8U_at; Start 865; Stop 889
gaccgcatgtctagccgtatccttg

SEQ ID NO: 196535 - DNA, 25 bp, Artificial
  probe
  misc_feature (1)..(25): SEQ ID NO: 2449; WAN024F8U_at; Start 1373; Stop 1397
gaatggatatgtctgcccttgaagg

SEQ ID NO: 196536 - DNA, 25 bp, Artificial
  probe
  misc_feature (1)..(25): SEQ ID NO: 2449; WAN024F8U_at; Start 931; Stop 955
gaatacgatgaacaaaaagcccttg

SEQ ID NO: 196537 - DNA, 25 bp, Artificial
  probe
  misc_feature (1)..(25): SEQ ID NO: 2449; WAN024F8U_at; Start 1264; Stop 1288
caggctaaacagctcatgcagggtg

SEQ ID NO: 196538 - DNA, 25 bp, Artificial
  probe
  misc_feature (1)..(25): SEQ ID NO: 2449; WAN024F8U_at; Start 124; Stop 148
gccgacgttgccttgcctgttgtaa

SEQ ID NO: 196539 - DNA, 25 bp, Artificial
  probe
  misc_feature (1)..(25): SEQ ID NO: 2449; WAN024F8U_at; Start 1090; Stop 1114
caaaacatgaaggtggatgaacgcc

SEQ ID NO: 196540 - DNA, 25 bp, Artificial
  probe
  misc_feature (1)..(25): SEQ ID NO: 2449; WAN024F8U_at; Start 692; Stop 716
ccaatgttgcgcgtgagtttaatgc

SEQ ID NO: 196541 - DNA, 25 bp, Artificial
  probe
  misc_feature (1)..(25): SEQ ID NO: 2449; WAN024F8U_at; Start 452; Stop 476
ccttgggacaacagattgatgtgcc

SEQ ID NO: 196542 - DNA, 25 bp, Artificial
  probe
  misc_feature (1)..(25): SEQ ID NO: 2449; WAN024F8U_at; Start 1210; Stop 1234
gctggttctggaaatacattcgtcg

SEQ ID NO: 196543 - DNA, 25 bp, Artificial
  probe
  misc_feature (1)..(25): SEQ ID NO: 2449; WAN024F8U_at; Start 1420; Stop 1444
cctgacttatcagctctcggaggag

SEQ ID NO: 196544 - DNA, 25 bp, Artificial
  probe
  misc_feature (1)..(25): SEQ ID NO: 2449; WAN024F8U_at; Start 582; Stop 606
tcgtttgcagattgatgagctcctc

SEQ ID NO: 196545 - DNA, 25 bp, Artificial
  probe
  misc_feature (1)..(25): SEQ ID NO: 7657; WAN024F8V_at; Start 138; Stop 162
catgatcataggcatccgcagcttg

SEQ ID NO: 196546 - DNA, 25 bp, Artificial
  probe
  misc_feature (1)..(25): SEQ ID NO: 7657; WAN024F8V_at; Start 93; Stop 117
tagcatcaatcgcatagcgaaggtc

SEQ ID NO: 196547 - DNA, 25 bp, Artificial
  probe
  misc_feature (1)..(25): SEQ ID NO: 7657; WAN024F8V_at; Start 178; Stop 202
gataagctccaaaacttccttattg

SEQ ID NO: 196548 - DNA, 25 bp, Artificial
  probe
  misc_feature (1)..(25): SEQ ID NO: 7657; WAN024F8V_at; Start 56; Stop 80
aattcaggtttccaccccaactcat

SEQ ID NO: 196549 - DNA, 25 bp, Artificial
  probe
  misc_feature (1)..(25): SEQ ID NO: 7657; WAN024F8V_at; Start 141; Stop 165
gatcataggcatccgcagcttgtcc

SEQ ID NO: 196550 - DNA, 25 bp, Artificial
  probe
  misc_feature (1)..(25): SEQ ID NO: 7657; WAN024F8V_at; Start 14; Stop 38
taccacttgattgttgccttgagcc

SEQ ID NO: 196551 - DNA, 25 bp, Artificial
  probe
  misc_feature (1)..(25): SEQ ID NO: 7657; WAN024F8V_at; Start 119; Stop 143
tgtcctgcacggtcagtcacatgat

SEQ ID NO: 196552 - DNA, 25 bp, Artificial
  probe
  misc_feature (1)..(25): SEQ ID NO: 7657; WAN024F8V_at; Start 218; Stop 242
gccccaatcaagtaggtttcaccga

SEQ ID NO: 196553 - DNA, 25 bp, Artificial
  probe
  misc_feature (1)..(25): SEQ ID NO: 7657; WAN024F8V_at; Start 115; Stop 139
gtcatgtcctgcacggtcagtcaca

SEQ ID NO: 196554 - DNA, 25 bp, Artificial
  probe
  misc_feature (1)..(25): SEQ ID NO: 7657; WAN024F8V_at; Start 166; Stop 190
catttccttaaggataagctccaaa

SEQ ID NO: 196555 - DNA, 25 bp, Artificial
  probe
  misc_feature (1)..(25): SEQ ID NO: 7657; WAN024F8V_at; Start 134; Stop 158
gtcacatgatcataggcatccgcag

SEQ ID NO: 196556 - DNA, 25 bp, Artificial
  probe
  misc_feature (1)..(25): SEQ ID NO: 7657; WAN024F8V_at; Start 146; Stop 170
taggcatccgcagcttgtcccattt

SEQ ID NO: 196557 - DNA, 25 bp, Artificial
  probe
  misc_feature (1)..(25): SEQ ID NO: 7657; WAN024F8V_at; Start 111; Stop 135
gaaggtcatgtcctgcacggtcagt

SEQ ID NO: 196558 - DNA, 25 bp, Artificial
  probe
  misc_feature (1)..(25): SEQ ID NO: 7657; WAN024F8V_at; Start 197; Stop 221
ttattgttcttctcaccatcagccc

SEQ ID NO: 196559 - DNA, 25 bp, Artificial
  probe
  misc_feature (1)..(25): SEQ ID NO: 7657; WAN024F8V_at; Start 80; Stop 104
tcacggagcttgctagcatcaatcg

SEQ ID NO: 196560 - DNA, 25 bp, Artificial
  probe
  misc_feature (1)..(25): SEQ ID NO: 7657; WAN024F8V_at; Start 212; Stop 236
ccatcagccccaatcaagtaggttt

SEQ ID NO: 196561 - DNA, 25 bp, Artificial
  probe
  misc_feature (1)..(25): SEQ ID NO: 7657; WAN024F8V_at; Start 84; Stop 108
ggagcttgctagcatcaatcgcata

SEQ ID NO: 196562 - DNA, 25 bp, Artificial
  probe
  misc_feature (1)..(25): SEQ ID NO: 7657; WAN024F8V_at; Start 17; Stop 41
cacttgattgttgccttgagcccag

SEQ ID NO: 196563 - DNA, 25 bp, Artificial
  probe
  misc_feature (1)..(25): SEQ ID NO: 7657; WAN024F8V_at; Start 107; Stop 131
tagcgaaggtcatgtcctgcacggt

SEQ ID NO: 196564 - DNA, 25 bp, Artificial
  probe
  misc_feature (1)..(25): SEQ ID NO: 7657; WAN024F8V_at; Start 128; Stop 152
cggtcagtcacatgatcataggcat

SEQ ID NO: 196565 - DNA, 25 bp, Artificial
  probe
  misc_feature (1)..(25): SEQ ID NO: 7657; WAN024F8V_at; Start 22; Stop 46
gattgttgccttgagcccagcttca

SEQ ID NO: 196566 - DNA, 25 bp, Artificial
  probe
  misc_feature (1)..(25): SEQ ID NO: 7657; WAN024F8V_at; Start 237; Stop 261
caccgatttgcccttttgtcaagat

SEQ ID NO: 196567 - DNA, 25 bp, Artificial
  probe
  misc_feature (1)..(25): SEQ ID NO: 7657; WAN024F8V_at; Start 124; Stop 148
tgcacggtcagtcacatgatcatag

SEQ ID NO: 196568 - DNA, 25 bp, Artificial
  probe
  misc_feature (1)..(25): SEQ ID NO: 7657; WAN024F8V_at; Start 100; Stop 124
aatcgcatagcgaaggtcatgtcct

SEQ ID NO: 196569 - DNA, 25 bp, Artificial
  probe
  misc_feature (1)..(25): SEQ ID NO: 7657; WAN024F8V_at; Start 29; Stop 53
gccttgagcccagcttcaaagttgg

SEQ ID NO: 196570 - DNA, 25 bp, Artificial
  probe
  misc_feature (1)..(25): SEQ ID NO: 7657; WAN024F8V_at; Start 39; Stop 63
cagcttcaaagttggtaaattcagg

SEQ ID NO: 196571 - DNA, 25 bp, Artificial
  probe
  misc_feature (1)..(25): SEQ ID NO: 7657; WAN024F8V_at; Start 252; Stop 276
ttgtcaagattgtccaaactcctga

SEQ ID NO: 196572 - DNA, 25 bp, Artificial
  probe
  misc_feature (1)..(25): SEQ ID NO: 7657; WAN024F8V_at; Start 225; Stop 249
tcaagtaggtttcaccgatttgccc

SEQ ID NO: 196573 - DNA, 25 bp, Artificial
  probe
  misc_feature (1)..(25): SEQ ID NO: 7657; WAN024F8V_at; Start 233; Stop 257
gtttcaccgatttgcccttttgtca

SEQ ID NO: 196574 - DNA, 25 bp, Artificial
  probe
  misc_feature (1)..(25): SEQ ID NO: 7657; WAN024F8V_at; Start 155; Stop 179
gcagcttgtcccatttccttaagga

SEQ ID NO: 196575 - DNA, 25 bp, Artificial
  probe
  misc_feature (1)..(25): SEQ ID NO: 7657; WAN024F8V_at; Start 73; Stop 97
caactcatcacggagcttgctagca

SEQ ID NO: 196576 - DNA, 25 bp, Artificial
  probe
  misc_feature (1)..(25): SEQ ID NO: 7657; WAN024F8V_at; Start 33; Stop 57
tgagcccagcttcaaagttggtaaa

SEQ ID NO: 196577 - DNA, 25 bp, Artificial
  probe
  misc_feature (1)..(25): SEQ ID NO: 7657; WAN024F8V_at; Start 245; Stop 269
tgcccttttgtcaagattgtccaaa

SEQ ID NO: 196578 - DNA, 25 bp, Artificial
  probe
  misc_feature (1)..(25): SEQ ID NO: 7657; WAN024F8V_at; Start 3; Stop 27
ggttatctgtataccacttgattgt

SEQ ID NO: 196579 - DNA, 25 bp, Artificial
  probe
  misc_feature (1)..(25): SEQ ID NO: 6692; WAN024F8W_at; Start 79; Stop 103
gcggcagtcaaagctcaagacctaa

SEQ ID NO: 196580 - DNA, 25 bp, Artificial
  probe
  misc_feature (1)..(25): SEQ ID NO: 6692; WAN024F8W_at; Start 75; Stop 99
atacgcggcagtcaaagctcaagac

SEQ ID NO: 196581 - DNA, 25 bp, Artificial
  probe
  misc_feature (1)..(25): SEQ ID NO: 6692; WAN024F8W_at; Start 78; Stop 102
cgcggcagtcaaagctcaagaccta

SEQ ID NO: 196582 - DNA, 25 bp, Artificial
  probe
  misc_feature (1)..(25): SEQ ID NO: 6692; WAN024F8W_at; Start 77; Stop 101
acgcggcagtcaaagctcaagacct

SEQ ID NO: 196583 - DNA, 25 bp, Artificial
  probe
  misc_feature (1)..(25): SEQ ID NO: 6692; WAN024F8W_at; Start 76; Stop 100
tacgcggcagtcaaagctcaagacc

SEQ ID NO: 196584 - DNA, 25 bp, Artificial
  probe
  misc_feature (1)..(25): SEQ ID NO: 6559; WAN024F8X_at; Start 329; Stop 353
tagaagcggctcgtaaatacgacat

SEQ ID NO: 196585 - DNA, 25 bp, Artificial
  probe
  misc_feature (1)..(25): SEQ ID NO: 6559; WAN024F8X_at; Start 124; Stop 148
gcaggtaatcgtgccaatatcgagg

SEQ ID NO: 196586 - DNA, 25 bp, Artificial
  probe
  misc_feature (1)..(25): SEQ ID NO: 6559; WAN024F8X_at; Start 384; Stop 408
ctatggtgacctgcctctgcgtgaa

SEQ ID NO: 196587 - DNA, 25 bp, Artificial
  probe
  misc_feature (1)..(25): SEQ ID NO: 6559; WAN024F8X_at; Start 816; Stop 840
gcaacccgctgacgcttatgaccat

SEQ ID NO: 196588 - DNA, 25 bp, Artificial
  probe
  misc_feature (1)..(25): SEQ ID NO: 6559; WAN024F8X_at; Start 847; Stop 871
gatcgagctggtcacgacttgcgtt

SEQ ID NO: 196589 - DNA, 25 bp, Artificial
  probe
  misc_feature (1)..(25): SEQ ID NO: 6559; WAN024F8X_at; Start 634; Stop 658
ggtatcaagccaaaactctacggag

SEQ ID NO: 196590 - DNA, 25 bp, Artificial
  probe
  misc_feature (1)..(25): SEQ ID NO: 6559; WAN024F8X_at; Start 934; Stop 958
gaagcaggcctcaaagagaccatca

SEQ ID NO: 196591 - DNA, 25 bp, Artificial
  probe
  misc_feature (1)..(25): SEQ ID NO: 6559; WAN024F8X_at; Start 791; Stop 815
tagagctcattctcaaggagatggg

SEQ ID NO: 196592 - DNA, 25 bp, Artificial
  probe
  misc_feature (1)..(25): SEQ ID NO: 6559; WAN024F8X_at; Start 862; Stop 886
gacttgcgttatgcgattgatgcta

SEQ ID NO: 196593 - DNA, 25 bp, Artificial
  probe
  misc_feature (1)..(25): SEQ ID NO: 6559; WAN024F8X_at; Start 177; Stop 201
tgttggagatattgctgatgcagcc

SEQ ID NO: 196594 - DNA, 25 bp, Artificial
  probe
  misc_feature (1)..(25): SEQ ID NO: 6559; WAN024F8X_at; Start 832; Stop 856
tatgaccatgtgaccgatcgagctg

SEQ ID NO: 196595 - DNA, 25 bp, Artificial
  probe
  misc_feature (1)..(25): SEQ ID NO: 6559; WAN024F8X_at; Start 529; Stop 553
cgctcatttggtgttaaagcaacga

SEQ ID NO: 196596 - DNA, 25 bp, Artificial
  probe
  misc_feature (1)..(25): SEQ ID NO: 6559; WAN024F8X_at; Start 759; Stop 783
tgctgacggtgagaagaacaacaag

SEQ ID NO: 196597 - DNA, 25 bp, Artificial
  probe
  misc_feature (1)..(25): SEQ ID NO: 6559; WAN024F8X_at; Start 262; Stop 286
aatgataactcgctcaatgacccga

SEQ ID NO: 196598 - DNA, 25 bp, Artificial
  probe
  misc_feature (1)..(25): SEQ ID NO: 6559; WAN024F8X_at; Start 650; Stop 674
tctacggagaaggtaagaatgtgcg

SEQ ID NO: 196599 - DNA, 25 bp, Artificial
  probe
  misc_feature (1)..(25): SEQ ID NO: 6559; WAN024F8X_at; Start 919; Stop 943
gagtttaccaactttgaagcaggcc

SEQ ID NO: 196600 - DNA, 25 bp, Artificial
  probe
  misc_feature (1)..(25): SEQ ID NO: 6559; WAN024F8X_at; Start 138; Stop 162
caatatcgaggaaattttaggcgac

SEQ ID NO: 196601 - DNA, 25 bp, Artificial
  probe
  misc_feature (1)..(25): SEQ ID NO: 6559; WAN024F8X_at; Start 232; Stop 256
gctatcgttcactatgcggcagaaa

SEQ ID NO: 196602 - DNA, 25 bp, Artificial
  probe
  misc_feature (1)..(25): SEQ ID NO: 6559; WAN024F8X_at; Start 94; Stop 118
catgtgacagtgctggacaagctga

SEQ ID NO: 196603 - DNA, 25 bp, Artificial
  probe
  misc_feature (1)..(25): SEQ ID NO: 6559; WAN024F8X_at; Start 666; Stop 690
gaatgtgcgtgactggattcacacc

SEQ ID NO: 196604 - DNA, 25 bp, Artificial
  probe
  misc_feature (1)..(25): SEQ ID NO: 6559; WAN024F8X_at; Start 314; Stop 338
gaacttacacacttttagaagcggc

SEQ ID NO: 196605 - DNA, 25 bp, Artificial
  probe
  misc_feature (1)..(25): SEQ ID NO: 6559; WAN024F8X_at; Start 742; Stop 766
gaaacttacttgattggtgctgacg

SEQ ID NO: 196606 - DNA, 25 bp, Artificial
  probe
  misc_feature (1)..(25): SEQ ID NO: 6559; WAN024F8X_at; Start 694; Stop 718
gaccattcatcaggcgtttggacga

SEQ ID NO: 196607 - DNA, 25 bp, Artificial
  probe
  misc_feature (1)..(25): SEQ ID NO: 6559; WAN024F8X_at; Start 217; Stop 241
gcggctgaagcggatgctatcgttc

SEQ ID NO: 196608 - DNA, 25 bp, Artificial
  probe
  misc_feature (1)..(25): SEQ ID NO: 6559; WAN024F8X_at; Start 591; Stop 615
tatcgagaagttcattccgcgccag

SEQ ID NO: 196609 - DNA, 25 bp, Artificial
  probe
  misc_feature (1)..(25): SEQ ID NO: 6559; WAN024F8X_at; Start 606; Stop 630
tccgcgccagattacgaatatcttg

SEQ ID NO: 196610 - DNA, 25 bp, Artificial
  probe
  misc_feature (1)..(25): SEQ ID NO: 6559; WAN024F8X_at; Start 510; Stop 534
gatcgttaaagcttgggtgcgctca

SEQ ID NO: 196611 - DNA, 25 bp, Artificial
  probe
  misc_feature (1)..(25): SEQ ID NO: 6559; WAN024F8X_at; Start 453; Stop 477
tgaaaccaagtacaatccaagctcg

SEQ ID NO: 196612 - DNA, 25 bp, Artificial
  probe
  misc_feature (1)..(25): SEQ ID NO: 6559; WAN024F8X_at; Start 431; Stop 455
gcctaggtgagaaatttaccgctga

SEQ ID NO: 196613 - DNA, 25 bp, Artificial
  probe
  misc_feature (1)..(25): SEQ ID NO: 6559; WAN024F8X_at; Start 1009; Stop 1033
gaggctaactatgctaaaacgcaac

SEQ ID NO: 196614 - DNA, 25 bp, Artificial
  probe
  misc_feature (1)..(25): SEQ ID NO: 6559; WAN024F8X_at; Start 399; Stop 423
tctgcgtgaagatttgccaggtcat

SEQ ID NO: 196615 - DNA, 25 bp, Artificial
  probe
  misc_feature (1)..(25): SEQ ID NO: 6559; WAN024F8X_at; Start 722; Stop 746
tgaccaagggtcaaatcggtgaaac

SEQ ID NO: 196616 - DNA, 25 bp, Artificial
  probe
  misc_feature (1)..(25): SEQ ID NO: 6559; WAN024F8X_at; Start 78; Stop 102
taactttccagatgtccatgtgaca

SEQ ID NO: 196617 - DNA, 25 bp, Artificial
  probe
  misc_feature (1)..(25): SEQ ID NO: 6559; WAN024F8X_at; Start 576; Stop 600
tggtccataccagcatatcgagaag

SEQ ID NO: 196618 - DNA, 25 bp, Artificial
  probe
  misc_feature (1)..(25): SEQ ID NO: 1731; WAN024F8Y_at; Start 805; Stop 829
gatggtagccttacagcagctcgtc

SEQ ID NO: 196619 - DNA, 25 bp, Artificial
  probe
  misc_feature (1)..(25): SEQ ID NO: 1731; WAN024F8Y_at; Start 1345; Stop 1369
aaagttcagcgcgtccaatctatga

SEQ ID NO: 196620 - DNA, 25 bp, Artificial
  probe
  misc_feature (1)..(25): SEQ ID NO: 1731; WAN024F8Y_at; Start 1062; Stop 1086
tcagttgaatggacaaactggagca

SEQ ID NO: 196621 - DNA, 25 bp, Artificial
  probe
  misc_feature (1)..(25): SEQ ID NO: 1731; WAN024F8Y_at; Start 1956; Stop 1980
tcaagaagatctcgcaaaacatgtg

SEQ ID NO: 196622 - DNA, 25 bp, Artificial
  probe
  misc_feature (1)..(25): SEQ ID NO: 1731; WAN024F8Y_at; Start 566; Stop 590
tgcttgcgccagttaatgaagagtt

SEQ ID NO: 196623 - DNA, 25 bp, Artificial
  probe
  misc_feature (1)..(25): SEQ ID NO: 1731; WAN024F8Y_at; Start 693; Stop 717
tgaatttgcgaaaaatccgaactac

SEQ ID NO: 196624 - DNA, 25 bp, Artificial
  probe
  misc_feature (1)..(25): SEQ ID NO: 1731; WAN024F8Y_at; Start 1219; Stop 1243
caggatggtctttacaatccagaaa

SEQ ID NO: 196625 - DNA, 25 bp, Artificial
  probe
  misc_feature (1)..(25): SEQ ID NO: 1731; WAN024F8Y_at; Start 859; Stop 883
cttgagaagagtatgaaggacaata

SEQ ID NO: 196626 - DNA, 25 bp, Artificial
  probe
  misc_feature (1)..(25): SEQ ID NO: 1731; WAN024F8Y_at; Start 1701; Stop 1725
tgataaatacgctgcagcccaagct

SEQ ID NO: 196627 - DNA, 25 bp, Artificial
  probe
  misc_feature (1)..(25): SEQ ID NO: 1731; WAN024F8Y_at; Start 211; Stop 235
gaaaatgatcgctacgggaactttg

SEQ ID NO: 196628 - DNA, 25 bp, Artificial
  probe
  misc_feature (1)..(25): SEQ ID NO: 1731; WAN024F8Y_at; Start 818; Stop 842
cagcagctcgtctctatccaacaag

SEQ ID NO: 196629 - DNA, 25 bp, Artificial
  probe
  misc_feature (1)..(25): SEQ ID NO: 1731; WAN024F8Y_at; Start 1867; Stop 1891
gaacttcaagacaaggcagtcactg

SEQ ID NO: 196630 - DNA, 25 bp, Artificial
  probe
  misc_feature (1)..(25): SEQ ID NO: 1731; WAN024F8Y_at; Start 769; Stop 793
ggtcaagataccagcaaacctgcag

SEQ ID NO: 196631 - DNA, 25 bp, Artificial
  probe
  misc_feature (1)..(25): SEQ ID NO: 1731; WAN024F8Y_at; Start 510; Stop 534
tcagtacactttgaacaaaccagaa

SEQ ID NO: 196632 - DNA, 25 bp, Artificial
  probe
  misc_feature (1)..(25): SEQ ID NO: 1731; WAN024F8Y_at; Start 790; Stop 814
gcagaaaactttaaagatggtagcc

SEQ ID NO: 196633 - DNA, 25 bp, Artificial
  probe
  misc_feature (1)..(25): SEQ ID NO: 1731; WAN024F8Y_at; Start 1805; Stop 1829
caataccatttgcattgtcaggaaa

SEQ ID NO: 196634 - DNA, 25 bp, Artificial
  probe
  misc_feature (1)..(25): SEQ ID NO: 1731; WAN024F8Y_at; Start 1612; Stop 1636
aatgtagctgctaaaaaagtaggtc

SEQ ID NO: 196635 - DNA, 25 bp, Artificial
  probe
  misc_feature (1)..(25): SEQ ID NO: 1731; WAN024F8Y_at; Start 1334; Stop 1358
cagcaactacaaaagttcagcgcgt

SEQ ID NO: 196636 - DNA, 25 bp, Artificial
  probe
  misc_feature (1)..(25): SEQ ID NO: 1731; WAN024F8Y_at; Start 1512; Stop 1536
gggtccagactttgccgatccatca

SEQ ID NO: 196637 - DNA, 25 bp, Artificial
  probe
  misc_feature (1)..(25): SEQ ID NO: 1731; WAN024F8Y_at; Start 1581; Stop 1605
aacatatttagggtttgactcaggg

SEQ ID NO: 196638 - DNA, 25 bp, Artificial
  probe
  misc_feature (1)..(25): SEQ ID NO: 1731; WAN024F8Y_at; Start 1633; Stop 1657
ggtctatatgactacgaaaaattgg

SEQ ID NO: 196639 - DNA, 25 bp, Artificial
  probe
  misc_feature (1)..(25): SEQ ID NO: 1731; WAN024F8Y_at; Start 976; Stop 1000
caaaaggcatcgactaaaaaggctc

SEQ ID NO: 196640 - DNA, 25 bp, Artificial
  probe
  misc_feature (1)..(25): SEQ ID NO: 1731; WAN024F8Y_at; Start 922; Stop 946
ggtacaaatattgaccgtcagtcct

SEQ ID NO: 196641 - DNA, 25 bp, Artificial
  probe
  misc_feature (1)..(25): SEQ ID NO: 1731; WAN024F8Y_at; Start 709; Stop 733
ccgaactactgggataaggacaatg

SEQ ID NO: 196642 - DNA, 25 bp, Artificial
  probe
  misc_feature (1)..(25): SEQ ID NO: 1731; WAN024F8Y_at; Start 750; Stop 774
taaattgtcattctgggatggtcaa

SEQ ID NO: 196643 - DNA, 25 bp, Artificial
  probe
  misc_feature (1)..(25): SEQ ID NO: 1731; WAN024F8Y_at; Start 832; Stop 856
tatccaacaagtgcaagtttcgcag

SEQ ID NO: 196644 - DNA, 25 bp, Artificial
  probe
  misc_feature (1)..(25): SEQ ID NO: 1731; WAN024F8Y_at; Start 553; Stop 577
acaaccatgggtgtgcttgcgccag

SEQ ID NO: 196645 - DNA, 25 bp, Artificial
  probe
  misc_feature (1)..(25): SEQ ID NO: 1731; WAN024F8Y_at; Start 1751; Stop 1775
ttccaactacatctcgtacagggcg

SEQ ID NO: 196646 - DNA, 25 bp, Artificial
  probe
  misc_feature (1)..(25): SEQ ID NO: 1731; WAN024F8Y_at; Start 1189; Stop 1213
gaatggaaggatgttaatcttgcag

SEQ ID NO: 196647 - DNA, 25 bp, Artificial
  probe
  misc_feature (1)..(25): SEQ ID NO: 1731; WAN024F8Y_at; Start 1903; Stop 1927
caaaaagctcaggaaaaatggatga

SEQ ID NO: 196648 - DNA, 25 bp, Artificial
  probe
  misc_feature (1)..(25): SEQ ID NO: 1731; WAN024F8Y_at; Start 1115; Stop 1139
caccaacatttgttcaagcagatgg

SEQ ID NO: 196649 - DNA, 25 bp, Artificial
  probe
  misc_feature (1)..(25): SEQ ID NO: 1731; WAN024F8Y_at; Start 1470; Stop 1494
tgctgctggcgaagactgggattta

SEQ ID NO: 196650 - DNA, 25 bp, Artificial
  probe
  misc_feature (1)..(25): SEQ ID NO: 1731; WAN024F8Y_at; Start 1561; Stop 1585
tctgtaggagaaagtactaaaacat

SEQ ID NO: 196651 - DNA, 25 bp, Artificial
  probe
  misc_feature (1)..(25): SEQ ID NO: 1731; WAN024F8Y_at; Start 1360; Stop 1384
caatctatgaaacaatccttggaag

SEQ ID NO: 196652 - DNA, 25 bp, Artificial
  probe
  misc_feature (1)..(25): SEQ ID NO: 46; WAN024F8Z-3_at; Start 689; Stop 713
tcatttgtcaaatgatgcgacagaa

SEQ ID NO: 196653 - DNA, 25 bp, Artificial
  probe
  misc_feature (1)..(25): SEQ ID NO: 46; WAN024F8Z-3_at; Start 553; Stop 577
ttaccatgcaaaatcttgcgaaaac

SEQ ID NO: 196654 - DNA, 25 bp, Artificial
  probe
  misc_feature (1)..(25): SEQ ID NO: 46; WAN024F8Z-3_at; Start 618; Stop 642
ccgacttggactcgtaccttggctg

SEQ ID NO: 196655 - DNA, 25 bp, Artificial
  probe
  misc_feature (1)..(25): SEQ ID NO: 46; WAN024F8Z-3_at; Start 424; Stop 448
gaccagatccacagacagaatatgg

SEQ ID NO: 196656 - DNA, 25 bp, Artificial
  probe
  misc_feature (1)..(25): SEQ ID NO: 46; WAN024F8Z-3_at; Start 774; Stop 798
ccagtagattccagtcaatttccag

SEQ ID NO: 196657 - DNA, 25 bp, Artificial
  probe
  misc_feature (1)..(25): SEQ ID NO: 46; WAN024F8Z-3_at; Start 36; Stop 60
ggaagagttacatattagaaaggtc

SEQ ID NO: 196658 - DNA, 25 bp, Artificial
  probe
  misc_feature (1)..(25): SEQ ID NO: 46; WAN024F8Z-3_at; Start 800; Stop 824
caaagctaaacgtccgctaaactca

SEQ ID NO: 196659 - DNA, 25 bp, Artificial
  probe
  misc_feature (1)..(25): SEQ ID NO: 46; WAN024F8Z-3_at; Start 479; Stop 503
tgagaagcatgtgtctaatttctat

SEQ ID NO: 196660 - DNA, 25 bp, Artificial
  probe
  misc_feature (1)..(25): SEQ ID NO: 46; WAN024F8Z-3_at; Start 134; Stop 158
tgaagaatacgtggcagtagatgtg

SEQ ID NO: 196661 - DNA, 25 bp, Artificial
  probe
  misc_feature (1)..(25): SEQ ID NO: 46; WAN024F8Z-3_at; Start 606; Stop 630
cagtacggtcgtccgacttggactc

SEQ ID NO: 196662 - DNA, 25 bp, Artificial
  probe
  misc_feature (1)..(25): SEQ ID NO: 46; WAN024F8Z-3_at; Start 808; Stop 832
aacgtccgctaaactcaacgatgag

SEQ ID NO: 196663 - DNA, 25 bp, Artificial
  probe
  misc_feature (1)..(25): SEQ ID NO: 46; WAN024F8Z-3_at; Start 402; Stop 426
caagagtgggaagttgatgaccgac

SEQ ID NO: 196664 - DNA, 25 bp, Artificial
  probe
  misc_feature (1)..(25): SEQ ID NO: 46; WAN024F8Z-3_at; Start 23; Stop 47
tattgctatattgggaagagttaca

SEQ ID NO: 196665 - DNA, 25 bp, Artificial
  probe
  misc_feature (1)..(25): SEQ ID NO: 46; WAN024F8Z-3_at; Start 471; Stop 495
gagttagttgagaagcatgtgtcta

SEQ ID NO: 196666 - DNA, 25 bp, Artificial
  probe
  misc_feature (1)..(25): SEQ ID NO: 46; WAN024F8Z-3_at; Start 549; Stop 573
gtttttaccatgcaaaatcttgcga

SEQ ID NO: 196667 - DNA, 25 bp, Artificial
  probe
  misc_feature (1)..(25): SEQ ID NO: 46; WAN024F8Z-3_at; Start 579; Stop 603
cataagactttaacagttgtaaatg

SEQ ID NO: 196668 - DNA, 25 bp, Artificial
  probe
  misc_feature (1)..(25): SEQ ID NO: 46; WAN024F8Z-3_at; Start 56; Stop 80
aggtctagagatgattttaattaca

SEQ ID NO: 196669 - DNA, 25 bp, Artificial
  probe
  misc_feature (1)..(25): SEQ ID NO: 46; WAN024F8Z-3_at; Start 248; Stop 272
cgctgttgatgcagcagaggatgaa

SEQ ID NO: 196670 - DNA, 25 bp, Artificial
  probe
  misc_feature (1)..(25): SEQ ID NO: 46; WAN024F8Z-3_at; Start 131; Stop 155
taatgaagaatacgtggcagtagat

SEQ ID NO: 196671 - DNA, 25 bp, Artificial
  probe
  misc_feature (1)..(25): SEQ ID NO: 46; WAN024F8Z-3_at; Start 408; Stop 432
tgggaagttgatgaccgaccagatc

SEQ ID NO: 196672 - DNA, 25 bp, Artificial
  probe
  misc_feature (1)..(25): SEQ ID NO: 46; WAN024F8Z-3_at; Start 299; Stop 323
tgtgacggggacaaaaaatgtcgca

SEQ ID NO: 196673 - DNA, 25 bp, Artificial
  probe
  misc_feature (1)..(25): SEQ ID NO: 46; WAN024F8Z-3_at; Start 729; Stop 753
gattttgcagttgaaattttgaaag

SEQ ID NO: 196674 - DNA, 25 bp, Artificial
  probe
  misc_feature (1)..(25): SEQ ID NO: 46; WAN024F8Z-3_at; Start 44; Stop 68
tacatattagaaaggtctagagatg

SEQ ID NO: 196675 - DNA, 25 bp, Artificial
  probe
  misc_feature (1)..(25): SEQ ID NO: 46; WAN024F8Z-3_at; Start 414; Stop 438
gttgatgaccgaccagatccacaga

SEQ ID NO: 196676 - DNA, 25 bp, Artificial
  probe
  misc_feature (1)..(25): SEQ ID NO: 46; WAN024F8Z-3_at; Start 891; Stop 915
gaattttacaaacaagaagtgagat

SEQ ID NO: 196677 - DNA, 25 bp, Artificial
  probe
  misc_feature (1)..(25): SEQ ID NO: 46; WAN024F8Z-3_at; Start 14; Stop 38
gctgctttttattgctatattggga

SEQ ID NO: 196678 - DNA, 25 bp, Artificial
  probe
  misc_feature (1)..(25): SEQ ID NO: 46; WAN024F8Z-3_at; Start 5; Stop 29
caggaaatagctgctttttattgct

SEQ ID NO: 196679 - DNA, 25 bp, Artificial
  probe
  misc_feature (1)..(25): SEQ ID NO: 46; WAN024F8Z-3_at; Start 286; Stop 310
acttcgccatcaatgtgacggggac

SEQ ID NO: 196680 - DNA, 25 bp, Artificial
  probe
  misc_feature (1)..(25): SEQ ID NO: 46; WAN024F8Z-3_at; Start 243; Stop 267
tacaccgctgttgatgcagcagagg

SEQ ID NO: 196681 - DNA, 25 bp, Artificial
  probe
  misc_feature (1)..(25): SEQ ID NO: 46; WAN024F8Z-3_at; Start 203; Stop 227
tgaagaggtgaaaccgactttagtc

SEQ ID NO: 196682 - DNA, 25 bp, Artificial
  probe
  misc_feature (1)..(25): SEQ ID NO: 46; WAN024F8Z-3_at; Start 342; Stop 366
ggtgcaactctagtttatatttcta

SEQ ID NO: 196683 - DNA, 25 bp, Artificial
  probe
  misc_feature (1)..(25): SEQ ID NO: 46; WAN024F8Z-3_at; Start 879; Stop 903
gatgcattgcaagaattttacaaac

SEQ ID NO: 196684 - DNA, 25 bp, Artificial
  probe
  misc_feature (1)..(25): SEQ ID NO: 46; WAN024F8Z-3_at; Start 718; Stop 742
caacatggtatgattttgcagttga

SEQ ID NO: 196685 - DNA, 25 bp, Artificial
  probe
  misc_feature (1)..(25): SEQ ID NO: 46; WAN024F8Z-3_at; Start 866; Stop 890
tccaacttggcaagatgcattgcaa

SEQ ID NO: 196686 - DNA, 25 bp, Artificial
  probe
  misc_feature (1)..(25): SEQ ID NO: 1458; WAN024F8Z-5_at; Start 191; Stop 215
ctgatgcggagttggtagacaagtt

SEQ ID NO: 196687 - DNA, 25 bp, Artificial
  probe
  misc_feature (1)..(25): SEQ ID NO: 1458; WAN024F8Z-5_at; Start 842; Stop 866
tgactgaccgtgcaggacatgacct

SEQ ID NO: 196688 - DNA, 25 bp, Artificial
  probe
  misc_feature (1)..(25): SEQ ID NO: 1458; WAN024F8Z-5_at; Start 825; Stop 849
ggatgcctatgatcatgtgactgac

SEQ ID NO: 196689 - DNA, 25 bp, Artificial
  probe
  misc_feature (1)..(25): SEQ ID NO: 1458; WAN024F8Z-5_at; Start 951; Stop 975
aacaatcaagtggtatacagataac

SEQ ID NO: 196690 - DNA, 25 bp, Artificial
  probe
  misc_feature (1)..(25): SEQ ID NO: 1458; WAN024F8Z-5_at; Start 55; Stop 79
aactttgtccattatgtttacgaga

SEQ ID NO: 196691 - DNA, 25 bp, Artificial
  probe
  misc_feature (1)..(25): SEQ ID NO: 1458; WAN024F8Z-5_at; Start 238; Stop 262
gttcattatgcagcggaaagccaca

SEQ ID NO: 196692 - DNA, 25 bp, Artificial
  probe
  misc_feature (1)..(25): SEQ ID NO: 1458; WAN024F8Z-5_at; Start 318; Stop 342
ctatactcttttagaagctgctcgt

SEQ ID NO: 196693 - DNA, 25 bp, Artificial
  probe
  misc_feature (1)..(25): SEQ ID NO: 1458; WAN024F8Z-5_at; Start 101; Stop 125
cagtcctagataagttgacttatgc

SEQ ID NO: 196694 - DNA, 25 bp, Artificial
  probe
  misc_feature (1)..(25): SEQ ID NO: 1458; WAN024F8Z-5_at; Start 243; Stop 267
ttatgcagcggaaagccacaatgat

SEQ ID NO: 196695 - DNA, 25 bp, Artificial
  probe
  misc_feature (1)..(25): SEQ ID NO: 1458; WAN024F8Z-5_at; Start 223; Stop 247
caagcagatgctatcgttcattatg

SEQ ID NO: 196696 - DNA, 25 bp, Artificial
  probe
  misc_feature (1)..(25): SEQ ID NO: 1458; WAN024F8Z-5_at; Start 685; Stop 709
cataccaatgaccattcttcaggag

SEQ ID NO: 196697 - DNA, 25 bp, Artificial
  probe
  misc_feature (1)..(25): SEQ ID NO: 1458; WAN024F8Z-5_at; Start 934; Stop 958
gaagctgggctcaaggcaacaatca

SEQ ID NO: 196698 - DNA, 25 bp, Artificial
  probe
  misc_feature (1)..(25): SEQ ID NO: 1458; WAN024F8Z-5_at; Start 234; Stop 258
tatcgttcattatgcagcggaaagc

SEQ ID NO: 196699 - DNA, 25 bp, Artificial
  probe
  misc_feature (1)..(25): SEQ ID NO: 1458; WAN024F8Z-5_at; Start 928; Stop 952
aactttgaagctgggctcaaggcaa

SEQ ID NO: 196700 - DNA, 25 bp, Artificial
  probe
  misc_feature (1)..(25): SEQ ID NO: 1458; WAN024F8Z-5_at; Start 97; Stop 121
gtgacagtcctagataagttgactt

SEQ ID NO: 196701 - DNA, 25 bp, Artificial
  probe
  misc_feature (1)..(25): SEQ ID NO: 1458; WAN024F8Z-5_at; Start 798; Stop 822
tatccttaaggaaatgggacaagct

SEQ ID NO: 196702 - DNA, 25 bp, Artificial
  probe
  misc_feature (1)..(25): SEQ ID NO: 1458; WAN024F8Z-5_at; Start 687; Stop 711
taccaatgaccattcttcaggagtt

SEQ ID NO: 196703 - DNA, 25 bp, Artificial
  probe
  misc_feature (1)..(25): SEQ ID NO: 1458; WAN024F8Z-5_at; Start 860; Stop 884
atgaccttcgctatgcgattgatgc

SEQ ID NO: 196704 - DNA, 25 bp, Artificial
  probe
  misc_feature (1)..(25): SEQ ID NO: 1458; WAN024F8Z-5_at; Start 832; Stop 856
tatgatcatgtgactgaccgtgcag

SEQ ID NO: 196705 - DNA, 25 bp, Artificial
  probe
  misc_feature (1)..(25): SEQ ID NO: 1458; WAN024F8Z-5_at; Start 280; Stop 304
gatccatcgccatttattcatacta

SEQ ID NO: 196706 - DNA, 25 bp, Artificial
  probe
  misc_feature (1)..(25): SEQ ID NO: 1458; WAN024F8Z-5_at; Start 64; Stop 88
cattatgtttacgagaactttccag

SEQ ID NO: 196707 - DNA, 25 bp, Artificial
  probe
  misc_feature (1)..(25): SEQ ID NO: 1458; WAN024F8Z-5_at; Start 945; Stop 969
caaggcaacaatcaagtggtataca

SEQ ID NO: 196708 - DNA, 25 bp, Artificial
  probe
  misc_feature (1)..(25): SEQ ID NO: 1458; WAN024F8Z-5_at; Start 854; Stop 878
caggacatgaccttcgctatgcgat

SEQ ID NO: 196709 - DNA, 25 bp, Artificial
  probe
  misc_feature (1)..(25): SEQ ID NO: 1458; WAN024F8Z-5_at; Start 835; Stop 859
gatcatgtgactgaccgtgcaggac

SEQ ID NO: 196710 - DNA, 25 bp, Artificial
  probe
  misc_feature (1)..(25): SEQ ID NO: 1458; WAN024F8Z-5_at; Start 847; Stop 871
gaccgtgcaggacatgaccttcgct

SEQ ID NO: 196711 - DNA, 25 bp, Artificial
  probe
  misc_feature (1)..(25): SEQ ID NO: 1458; WAN024F8Z-5_at; Start 970; Stop 994
gataaccaagaatggtggaaagcag

SEQ ID NO: 196712 - DNA, 25 bp, Artificial
  probe
  misc_feature (1)..(25): SEQ ID NO: 1458; WAN024F8Z-5_at; Start 558; Stop 582
caactgttcaaataactacggtcct

SEQ ID NO: 196713 - DNA, 25 bp, Artificial
  probe
  misc_feature (1)..(25): SEQ ID NO: 1458; WAN024F8Z-5_at; Start 229; Stop 253
gatgctatcgttcattatgcagcgg

SEQ ID NO: 196714 - DNA, 25 bp, Artificial
  probe
  misc_feature (1)..(25): SEQ ID NO: 1458; WAN024F8Z-5_at; Start 556; Stop 580
tccaactgttcaaataactacggtc

SEQ ID NO: 196715 - DNA, 25 bp, Artificial
  probe
  misc_feature (1)..(25): SEQ ID NO: 1458; WAN024F8Z-5_at; Start 323; Stop 347
ctcttttagaagctgctcgtaagta

SEQ ID NO: 196716 - DNA, 25 bp, Artificial
  probe
  misc_feature (1)..(25): SEQ ID NO: 1458; WAN024F8Z-5_at; Start 287; Stop 311
cgccatttattcatactaacttcat

SEQ ID NO: 196717 - DNA, 25 bp, Artificial
  probe
  misc_feature (1)..(25): SEQ ID NO: 1458; WAN024F8Z-5_at; Start 742; Stop 766
gaaacctacttgattggggctgatg

SEQ ID NO: 196718 - DNA, 25 bp, Artificial
  probe
  misc_feature (1)..(25): SEQ ID NO: 1458; WAN024F8Z-5_at; Start 187; Stop 211
attgctgatgcggagttggtagaca

SEQ ID NO: 196719 - DNA, 25 bp, Artificial
  probe
  misc_feature (1)..(25): SEQ ID NO: 1458; WAN024F8Z-5_at; Start 939; Stop 963
tgggctcaaggcaacaatcaagtgg

SEQ ID NO: 196720 - DNA, 25 bp, Artificial
  probe
  misc_feature (1)..(25): SEQ ID NO: 7602; WAN024F92_at; Start 190; Stop 214
aatggccgtgtcatgcaagtaggtc

SEQ ID NO: 196721 - DNA, 25 bp, Artificial
  probe
  misc_feature (1)..(25): SEQ ID NO: 7602; WAN024F92_at; Start 188; Stop 212
gaaatggccgtgtcatgcaagtagg

SEQ ID NO: 196722 - DNA, 25 bp, Artificial
  probe
  misc_feature (1)..(25): SEQ ID NO: 7602; WAN024F92_at; Start 105; Stop 129
caaccgtaactcaacagctcaaaat

SEQ ID NO: 196723 - DNA, 25 bp, Artificial
  probe
  misc_feature (1)..(25): SEQ ID NO: 7602; WAN024F92_at; Start 157; Stop 181
cctgaactagggttcttttcacatg

SEQ ID NO: 196724 - DNA, 25 bp, Artificial
  probe
  misc_feature (1)..(25): SEQ ID NO: 7602; WAN024F92_at; Start 3; Stop 27
ggaaaggacaagagtaatggatatc

SEQ ID NO: 196725 - DNA, 25 bp, Artificial
  probe
  misc_feature (1)..(25): SEQ ID NO: 7602; WAN024F92_at; Start 110; Stop 134
gtaactcaacagctcaaaatgaggc

SEQ ID NO: 196726 - DNA, 25 bp, Artificial
  probe
  misc_feature (1)..(25): SEQ ID NO: 7602; WAN024F92_at; Start 96; Stop 120
ctcaacaggcaaccgtaactcaaca

SEQ ID NO: 196727 - DNA, 25 bp, Artificial
  probe
  misc_feature (1)..(25): SEQ ID NO: 7602; WAN024F92_at; Start 133; Stop 157
gctgattaccactatagaaaggacc

SEQ ID NO: 196728 - DNA, 25 bp, Artificial
  probe
  misc_feature (1)..(25): SEQ ID NO: 7602; WAN024F92_at; Start 144; Stop 168
ctatagaaaggaccctgaactaggg

SEQ ID NO: 196729 - DNA, 25 bp, Artificial
  probe
  misc_feature (1)..(25): SEQ ID NO: 7602; WAN024F92_at; Start 185; Stop 209
tcggaaatggccgtgtcatgcaagt

SEQ ID NO: 196730 - DNA, 25 bp, Artificial
  probe
  misc_feature (1)..(25): SEQ ID NO: 7602; WAN024F92_at; Start 142; Stop 166
cactatagaaaggaccctgaactag

SEQ ID NO: 196731 - DNA, 25 bp, Artificial
  probe
  misc_feature (1)..(25): SEQ ID NO: 7602; WAN024F92_at; Start 5; Stop 29
aaaggacaagagtaatggatatcga

SEQ ID NO: 196732 - DNA, 25 bp, Artificial
  probe
  misc_feature (1)..(25): SEQ ID NO: 7602; WAN024F92_at; Start 178; Stop 202
catgttgtcggaaatggccgtgtca

SEQ ID NO: 196733 - DNA, 25 bp, Artificial
  probe
  misc_feature (1)..(25): SEQ ID NO: 7602; WAN024F92_at; Start 180; Stop 204
tgttgtcggaaatggccgtgtcatg

SEQ ID NO: 196734 - DNA, 25 bp, Artificial
  probe
  misc_feature (1)..(25): SEQ ID NO: 7602; WAN024F92_at; Start 120; Stop 144
agctcaaaatgaggctgattaccac

SEQ ID NO: 196735 - DNA, 25 bp, Artificial
  probe
  misc_feature (1)..(25): SEQ ID NO: 7602; WAN024F92_at; Start 101; Stop 125
caggcaaccgtaactcaacagctca

SEQ ID NO: 196736 - DNA, 25 bp, Artificial
  probe
  misc_feature (1)..(25): SEQ ID NO: 7602; WAN024F92_at; Start 130; Stop 154
gaggctgattaccactatagaaagg

SEQ ID NO: 196737 - DNA, 25 bp, Artificial
  probe
  misc_feature (1)..(25): SEQ ID NO: 7602; WAN024F92_at; Start 129; Stop 153
tgaggctgattaccactatagaaag

SEQ ID NO: 196738 - DNA, 25 bp, Artificial
  probe
  misc_feature (1)..(25): SEQ ID NO: 7602; WAN024F92_at; Start 174; Stop 198
ttcacatgttgtcggaaatggccgt

SEQ ID NO: 196739 - DNA, 25 bp, Artificial
  probe
  misc_feature (1)..(25): SEQ ID NO: 7602; WAN024F92_at; Start 126; Stop 150
aaatgaggctgattaccactataga

SEQ ID NO: 196740 - DNA, 25 bp, Artificial
  probe
  misc_feature (1)..(25): SEQ ID NO: 7602; WAN024F92_at; Start 164; Stop 188
tagggttcttttcacatgttgtcgg

SEQ ID NO: 196741 - DNA, 25 bp, Artificial
  probe
  misc_feature (1)..(25): SEQ ID NO: 7602; WAN024F92_at; Start 103; Stop 127
ggcaaccgtaactcaacagctcaaa

SEQ ID NO: 196742 - DNA, 25 bp, Artificial
  probe
  misc_feature (1)..(25): SEQ ID NO: 7602; WAN024F92_at; Start 136; Stop 160
gattaccactatagaaaggaccctg

SEQ ID NO: 196743 - DNA, 25 bp, Artificial
  probe
  misc_feature (1)..(25): SEQ ID NO: 7602; WAN024F92_at; Start 114; Stop 138
ctcaacagctcaaaatgaggctgat

SEQ ID NO: 196744 - DNA, 25 bp, Artificial
  probe
  misc_feature (1)..(25): SEQ ID NO: 7602; WAN024F92_at; Start 186; Stop 210
cggaaatggccgtgtcatgcaagta

SEQ ID NO: 196745 - DNA, 25 bp, Artificial
  probe
  misc_feature (1)..(25): SEQ ID NO: 7602; WAN024F92_at; Start 9; Stop 33
gacaagagtaatggatatcgataga

SEQ ID NO: 196746 - DNA, 25 bp, Artificial
  probe
  misc_feature (1)..(25): SEQ ID NO: 7602; WAN024F92_at; Start 139; Stop 163
taccactatagaaaggaccctgaac

SEQ ID NO: 196747 - DNA, 25 bp, Artificial
  probe
  misc_feature (1)..(25): SEQ ID NO: 7602; WAN024F92_at; Start 167; Stop 191
ggttcttttcacatgttgtcggaaa

SEQ ID NO: 196748 - DNA, 25 bp, Artificial
  probe
  misc_feature (1)..(25): SEQ ID NO: 7602; WAN024F92_at; Start 83; Stop 107
aagtacacgcccactcaacaggcaa

SEQ ID NO: 196749 - DNA, 25 bp, Artificial
  probe
  misc_feature (1)..(25): SEQ ID NO: 7602; WAN024F92_at; Start 123; Stop 147
tcaaaatgaggctgattaccactat

SEQ ID NO: 196750 - DNA, 25 bp, Artificial
  probe
  misc_feature (1)..(25): SEQ ID NO: 7602; WAN024F92_at; Start 160; Stop 184
gaactagggttcttttcacatgttg

SEQ ID NO: 196751 - DNA, 25 bp, Artificial
  probe
  misc_feature (1)..(25): SEQ ID NO: 7602; WAN024F92_at; Start 176; Stop 200
cacatgttgtcggaaatggccgtgt

SEQ ID NO: 196752 - DNA, 25 bp, Artificial
  probe
  misc_feature (1)..(25): SEQ ID NO: 7602; WAN024F92_at; Start 172; Stop 196
ttttcacatgttgtcggaaatggcc

SEQ ID NO: 196753 - DNA, 25 bp, Artificial
  probe
  misc_feature (1)..(25): SEQ ID NO: 7602; WAN024F92_at; Start 99; Stop 123
aacaggcaaccgtaactcaacagct

SEQ ID NO: 196754 - DNA, 25 bp, Artificial
  probe
  misc_feature (1)..(25): SEQ ID NO: 6787; WAN024F93_at; Start 79; Stop 103
tcaactgggaatccgcattcaaccg

SEQ ID NO: 196755 - DNA, 25 bp, Artificial
  probe
  misc_feature (1)..(25): SEQ ID NO: 6787; WAN024F93_at; Start 232; Stop 256
tggaatgctgagacctatgcagcgg

SEQ ID NO: 196756 - DNA, 25 bp, Artificial
  probe
  misc_feature (1)..(25): SEQ ID NO: 6787; WAN024F93_at; Start 126; Stop 150
ctggcggaaagacccagaattaggt

SEQ ID NO: 196757 - DNA, 25 bp, Artificial
  probe
  misc_feature (1)..(25): SEQ ID NO: 6787; WAN024F93_at; Start 167; Stop 191
ttgggaacggttgcatcatgcaggt

SEQ ID NO: 196758 - DNA, 25 bp, Artificial
  probe
  misc_feature (1)..(25): SEQ ID NO: 6787; WAN024F93_at; Start 155; Stop 179
tctcgcacattgttgggaacggttg

SEQ ID NO: 196759 - DNA, 25 bp, Artificial
  probe
  misc_feature (1)..(25): SEQ ID NO: 6787; WAN024F93_at; Start 121; Stop 145
tatcactggcggaaagacccagaat

SEQ ID NO: 196760 - DNA, 25 bp, Artificial
  probe
  misc_feature (1)..(25): SEQ ID NO: 6787; WAN024F93_at; Start 559; Stop 583
tatttcaacgaagaaggtgccatga

SEQ ID NO: 196761 - DNA, 25 bp, Artificial
  probe
  misc_feature (1)..(25): SEQ ID NO: 6787; WAN024F93_at; Start 146; Stop 170
taggttttttctcgcacattgttgg

SEQ ID NO: 196762 - DNA, 25 bp, Artificial
  probe
  misc_feature (1)..(25): SEQ ID NO: 6787; WAN024F93_at; Start 434; Stop 458
cagaccacgttgacccttatccata

SEQ ID NO: 196763 - DNA, 25 bp, Artificial
  probe
  misc_feature (1)..(25): SEQ ID NO: 6787; WAN024F93_at; Start 228; Stop 252
cggttggaatgctgagacctatgca

SEQ ID NO: 196764 - DNA, 25 bp, Artificial
  probe
  misc_feature (1)..(25): SEQ ID NO: 6787; WAN024F93_at; Start 111; Stop 135
tgaagcggattatcactggcggaaa

SEQ ID NO: 196765 - DNA, 25 bp, Artificial
  probe
  misc_feature (1)..(25): SEQ ID NO: 6787; WAN024F93_at; Start 160; Stop 184
cacattgttgggaacggttgcatca

SEQ ID NO: 196766 - DNA, 25 bp, Artificial
  probe
  misc_feature (1)..(25): SEQ ID NO: 6787; WAN024F93_at; Start 62; Stop 86
ggcaagtacacgcacactcaactgg

SEQ ID NO: 196767 - DNA, 25 bp, Artificial
  probe
  misc_feature (1)..(25): SEQ ID NO: 6787; WAN024F93_at; Start 139; Stop 163
ccagaattaggttttttctcgcaca

SEQ ID NO: 196768 - DNA, 25 bp, Artificial
  probe
  misc_feature (1)..(25): SEQ ID NO: 6787; WAN024F93_at; Start 442; Stop 466
gttgacccttatccatatcttgcta

SEQ ID NO: 196769 - DNA, 25 bp, Artificial
  probe
  misc_feature (1)..(25): SEQ ID NO: 6787; WAN024F93_at; Start 338; Stop 362
cagatgaagcaggtttgccgaaaac

SEQ ID NO: 196770 - DNA, 25 bp, Artificial
  probe
  misc_feature (1)..(25): SEQ ID NO: 6787; WAN024F93_at; Start 448; Stop 472
ccttatccatatcttgctaaatggg

SEQ ID NO: 196771 - DNA, 25 bp, Artificial
  probe
  misc_feature (1)..(25): SEQ ID NO: 6787; WAN024F93_at; Start 516; Stop 540
gacgattgaaacaggctggaagaaa

SEQ ID NO: 196772 - DNA, 25 bp, Artificial
  probe
  misc_feature (1)..(25): SEQ ID NO: 6787; WAN024F93_at; Start 83; Stop 107
ctgggaatccgcattcaaccgtaca

SEQ ID NO: 196773 - DNA, 25 bp, Artificial
  probe
  misc_feature (1)..(25): SEQ ID NO: 6787; WAN024F93_at; Start 702; Stop 726
agacggaacactggcagacaggcca

SEQ ID NO: 196774 - DNA, 25 bp, Artificial
  probe
  misc_feature (1)..(25): SEQ ID NO: 6787; WAN024F93_at; Start 511; Stop 535
ggcttgacgattgaaacaggctgga

SEQ ID NO: 196775 - DNA, 25 bp, Artificial
  probe
  misc_feature (1)..(25): SEQ ID NO: 6787; WAN024F93_at; Start 698; Stop 722
aaccagacggaacactggcagacag

SEQ ID NO: 196776 - DNA, 25 bp, Artificial
  probe
  misc_feature (1)..(25): SEQ ID NO: 6787; WAN024F93_at; Start 73; Stop 97
gcacactcaactgggaatccgcatt

SEQ ID NO: 196777 - DNA, 25 bp, Artificial
  probe
  misc_feature (1)..(25): SEQ ID NO: 6787; WAN024F93_at; Start 68; Stop 92
tacacgcacactcaactgggaatcc

SEQ ID NO: 196778 - DNA, 25 bp, Artificial
  probe
  misc_feature (1)..(25): SEQ ID NO: 6787; WAN024F93_at; Start 174; Stop 198
cggttgcatcatgcaggtaggacct

SEQ ID NO: 196779 - DNA, 25 bp, Artificial
  probe
  misc_feature (1)..(25): SEQ ID NO: 6787; WAN024F93_at; Start 323; Stop 347
tcttacgcaatctagcagatgaagc

SEQ ID NO: 196780 - DNA, 25 bp, Artificial
  probe
  misc_feature (1)..(25): SEQ ID NO: 6787; WAN024F93_at; Start 240; Stop 264
tgagacctatgcagcggttgaactg

SEQ ID NO: 196781 - DNA, 25 bp, Artificial
  probe
  misc_feature (1)..(25): SEQ ID NO: 6787; WAN024F93_at; Start 333; Stop 357
tctagcagatgaagcaggtttgccg

SEQ ID NO: 196782 - DNA, 25 bp, Artificial
  probe
  misc_feature (1)..(25): SEQ ID NO: 6787; WAN024F93_at; Start 116; Stop 140
cggattatcactggcggaaagaccc

SEQ ID NO: 196783 - DNA, 25 bp, Artificial
  probe
  misc_feature (1)..(25): SEQ ID NO: 6787; WAN024F93_at; Start 299; Stop 323
cggactaccgcctttatatcgaact

SEQ ID NO: 196784 - DNA, 25 bp, Artificial
  probe
  misc_feature (1)..(25): SEQ ID NO: 6787; WAN024F93_at; Start 714; Stop 738
ggcagacaggccagaattcacagta

SEQ ID NO: 196785 - DNA, 25 bp, Artificial
  probe
  misc_feature (1)..(25): SEQ ID NO: 6787; WAN024F93_at; Start 305; Stop 329
accgcctttatatcgaactcttacg

SEQ ID NO: 196786 - DNA, 25 bp, Artificial
  probe
  misc_feature (1)..(25): SEQ ID NO: 6787; WAN024F93_at; Start 720; Stop 744
caggccagaattcacagtagagcca

SEQ ID NO: 196787 - DNA, 25 bp, Artificial
  probe
  misc_feature (1)..(25): SEQ ID NO: 6787; WAN024F93_at; Start 544; Stop 568
gctgataagtggtactatttcaacg

SEQ ID NO: 196788 - DNA, 25 bp, Artificial
  probe
  misc_feature (1)..(25): SEQ ID NO: 5298; WAN024F94_at; Start 7; Stop 31
gatatggatatggatccacatggtc

SEQ ID NO: 196789 - DNA, 25 bp, Artificial
  probe
  misc_feature (1)..(25): SEQ ID NO: 5298; WAN024F94_at; Start 30; Stop 54
tctgagtggttgtttggttggttat

SEQ ID NO: 196790 - DNA, 25 bp, Artificial
  probe
  misc_feature (1)..(25): SEQ ID NO: 5298; WAN024F94_at; Start 20; Stop 44
atccacatggtctgagtggttgttt

SEQ ID NO: 196791 - DNA, 25 bp, Artificial
  probe
  misc_feature (1)..(25): SEQ ID NO: 5298; WAN024F94_at; Start 17; Stop 41
tggatccacatggtctgagtggttg

SEQ ID NO: 196792 - DNA, 25 bp, Artificial
  probe
  misc_feature (1)..(25): SEQ ID NO: 5298; WAN024F94_at; Start 48; Stop 72
tggttattggtacagtattcatgcg

SEQ ID NO: 196793 - DNA, 25 bp, Artificial
  probe
  misc_feature (1)..(25): SEQ ID NO: 5298; WAN024F94_at; Start 45; Stop 69
ggttggttattggtacagtattcat

SEQ ID NO: 196794 - DNA, 25 bp, Artificial
  probe
  misc_feature (1)..(25): SEQ ID NO: 5298; WAN024F94_at; Start 24; Stop 48
acatggtctgagtggttgtttggtt

SEQ ID NO: 196795 - DNA, 25 bp, Artificial
  probe
  misc_feature (1)..(25): SEQ ID NO: 5298; WAN024F94_at; Start 4; Stop 28
caagatatggatatggatccacatg

SEQ ID NO: 196796 - DNA, 25 bp, Artificial
  probe
  misc_feature (1)..(25): SEQ ID NO: 5298; WAN024F94_at; Start 43; Stop 67
ttggttggttattggtacagtattc

SEQ ID NO: 196797 - DNA, 25 bp, Artificial
  probe
  misc_feature (1)..(25): SEQ ID NO: 5298; WAN024F94_at; Start 40; Stop 64
tgtttggttggttattggtacagta

SEQ ID NO: 196798 - DNA, 25 bp, Artificial
  probe
  misc_feature (1)..(25): SEQ ID NO: 5298; WAN024F94_at; Start 21; Stop 45
tccacatggtctgagtggttgtttg

SEQ ID NO: 196799 - DNA, 25 bp, Artificial
  probe
  misc_feature (1)..(25): SEQ ID NO: 5298; WAN024F94_at; Start 19; Stop 43
gatccacatggtctgagtggttgtt

SEQ ID NO: 196800 - DNA, 25 bp, Artificial
  probe
  misc_feature (1)..(25): SEQ ID NO: 5298; WAN024F94_at; Start 50; Stop 74
gttattggtacagtattcatgcgtc

SEQ ID NO: 196801 - DNA, 25 bp, Artificial
  probe
  misc_feature (1)..(25): SEQ ID NO: 5298; WAN024F94_at; Start 16; Stop 40
atggatccacatggtctgagtggtt

SEQ ID NO: 196802 - DNA, 25 bp, Artificial
  probe
  misc_feature (1)..(25): SEQ ID NO: 5298; WAN024F94_at; Start 12; Stop 36
ggatatggatccacatggtctgagt

SEQ ID NO: 196803 - DNA, 25 bp, Artificial
  probe
  misc_feature (1)..(25): SEQ ID NO: 5298; WAN024F94_at; Start 23; Stop 47
cacatggtctgagtggttgtttggt

SEQ ID NO: 196804 - DNA, 25 bp, Artificial
  probe
  misc_feature (1)..(25): SEQ ID NO: 5298; WAN024F94_at; Start 8; Stop 32
atatggatatggatccacatggtct

SEQ ID NO: 196805 - DNA, 25 bp, Artificial
  probe
  misc_feature (1)..(25): SEQ ID NO: 5298; WAN024F94_at; Start 13; Stop 37
gatatggatccacatggtctgagtg

SEQ ID NO: 196806 - DNA, 25 bp, Artificial
  probe
  misc_feature (1)..(25): SEQ ID NO: 5298; WAN024F94_at; Start 11; Stop 35
tggatatggatccacatggtctgag

SEQ ID NO: 196807 - DNA, 25 bp, Artificial
  probe
  misc_feature (1)..(25): SEQ ID NO: 5298; WAN024F94_at; Start 14; Stop 38
atatggatccacatggtctgagtgg

SEQ ID NO: 196808 - DNA, 25 bp, Artificial
  probe
  misc_feature (1)..(25): SEQ ID NO: 5298; WAN024F94_at; Start 5; Stop 29
aagatatggatatggatccacatgg

SEQ ID NO: 196809 - DNA, 25 bp, Artificial
  probe
  misc_feature (1)..(25): SEQ ID NO: 5298; WAN024F94_at; Start 44; Stop 68
tggttggttattggtacagtattca

SEQ ID NO: 196810 - DNA, 25 bp, Artificial
  probe
  misc_feature (1)..(25): SEQ ID NO: 5298; WAN024F94_at; Start 31; Stop 55
ctgagtggttgtttggttggttatt

SEQ ID NO: 196811 - DNA, 25 bp, Artificial
  probe
  misc_feature (1)..(25): SEQ ID NO: 5298; WAN024F94_at; Start 2; Stop 26
tgcaagatatggatatggatccaca

SEQ ID NO: 196812 - DNA, 25 bp, Artificial
  probe
  misc_feature (1)..(25): SEQ ID NO: 5298; WAN024F94_at; Start 9; Stop 33
tatggatatggatccacatggtctg

SEQ ID NO: 196813 - DNA, 25 bp, Artificial
  probe
  misc_feature (1)..(25): SEQ ID NO: 5298; WAN024F94_at; Start 47; Stop 71
ttggttattggtacagtattcatgc

SEQ ID NO: 196814 - DNA, 25 bp, Artificial
  probe
  misc_feature (1)..(25): SEQ ID NO: 5298; WAN024F94_at; Start 49; Stop 73
ggttattggtacagtattcatgcgt

SEQ ID NO: 196815 - DNA, 25 bp, Artificial
  probe
  misc_feature (1)..(25): SEQ ID NO: 5298; WAN024F94_at; Start 10; Stop 34
atggatatggatccacatggtctga

SEQ ID NO: 196816 - DNA, 25 bp, Artificial
  probe
  misc_feature (1)..(25): SEQ ID NO: 5298; WAN024F94_at; Start 3; Stop 27
gcaagatatggatatggatccacat

SEQ ID NO: 196817 - DNA, 25 bp, Artificial
  probe
  misc_feature (1)..(25): SEQ ID NO: 5298; WAN024F94_at; Start 18; Stop 42
ggatccacatggtctgagtggttgt

SEQ ID NO: 196818 - DNA, 25 bp, Artificial
  probe
  misc_feature (1)..(25): SEQ ID NO: 5298; WAN024F94_at; Start 22; Stop 46
ccacatggtctgagtggttgtttgg

SEQ ID NO: 196819 - DNA, 25 bp, Artificial
  probe
  misc_feature (1)..(25): SEQ ID NO: 5298; WAN024F94_at; Start 15; Stop 39
tatggatccacatggtctgagtggt

SEQ ID NO: 196820 - DNA, 25 bp, Artificial
  probe
  misc_feature (1)..(25): SEQ ID NO: 5298; WAN024F94_at; Start 51; Stop 75
ttattggtacagtattcatgcgtct

SEQ ID NO: 196821 - DNA, 25 bp, Artificial
  probe
  misc_feature (1)..(25): SEQ ID NO: 5298; WAN024F94_at; Start 1; Stop 25
ttgcaagatatggatatggatccac

SEQ ID NO: 196822 - DNA, 25 bp, Artificial
  probe
  misc_feature (1)..(25): SEQ ID NO: 2339; WAN024F95_at; Start 513; Stop 537
cttgagcgctgcaacaggctggcag

SEQ ID NO: 196823 - DNA, 25 bp, Artificial
  probe
  misc_feature (1)..(25): SEQ ID NO: 2339; WAN024F95_at; Start 385; Stop 409
ggtatcaagacgcatgaatactgta

SEQ ID NO: 196824 - DNA, 25 bp, Artificial
  probe
  misc_feature (1)..(25): SEQ ID NO: 2339; WAN024F95_at; Start 487; Stop 511
cagtttaagcaagacatcgaaaacg

SEQ ID NO: 196825 - DNA, 25 bp, Artificial
  probe
  misc_feature (1)..(25): SEQ ID NO: 2339; WAN024F95_at; Start 352; Stop 376
ttgccgaagactcttgatacagacg

SEQ ID NO: 196826 - DNA, 25 bp, Artificial
  probe
  misc_feature (1)..(25): SEQ ID NO: 2339; WAN024F95_at; Start 490; Stop 514
tttaagcaagacatcgaaaacggct

SEQ ID NO: 196827 - DNA, 25 bp, Artificial
  probe
  misc_feature (1)..(25): SEQ ID NO: 2339; WAN024F95_at; Start 356; Stop 380
cgaagactcttgatacagacgactt

SEQ ID NO: 196828 - DNA, 25 bp, Artificial
  probe
  misc_feature (1)..(25): SEQ ID NO: 2339; WAN024F95_at; Start 444; Stop 468
ggatccatatccatatcttgcaagt

SEQ ID NO: 196829 - DNA, 25 bp, Artificial
  probe
  misc_feature (1)..(25): SEQ ID NO: 2339; WAN024F95_at; Start 497; Stop 521
aagacatcgaaaacggcttgagcgc

SEQ ID NO: 196830 - DNA, 25 bp, Artificial
  probe
  misc_feature (1)..(25): SEQ ID NO: 2339; WAN024F95_at; Start 615; Stop 639
ctggtattatttcgatggctcaggc

SEQ ID NO: 196831 - DNA, 25 bp, Artificial
  probe
  misc_feature (1)..(25): SEQ ID NO: 2339; WAN024F95_at; Start 393; Stop 417
gacgcatgaatactgtaccaataac

SEQ ID NO: 196832 - DNA, 25 bp, Artificial
  probe
  misc_feature (1)..(25): SEQ ID NO: 2339; WAN024F95_at; Start 426; Stop 450
caaccactcagaccatgtggatcca

SEQ ID NO: 196833 - DNA, 25 bp, Artificial
  probe
  misc_feature (1)..(25): SEQ ID NO: 2339; WAN024F95_at; Start 448; Stop 472
ccatatccatatcttgcaagttggg

SEQ ID NO: 196834 - DNA, 25 bp, Artificial
  probe
  misc_feature (1)..(25): SEQ ID NO: 2339; WAN024F95_at; Start 387; Stop 411
tatcaagacgcatgaatactgtacc

SEQ ID NO: 196835 - DNA, 25 bp, Artificial
  probe
  misc_feature (1)..(25): SEQ ID NO: 2339; WAN024F95_at; Start 495; Stop 519
gcaagacatcgaaaacggcttgagc

SEQ ID NO: 196836 - DNA, 25 bp, Artificial
  probe
  misc_feature (1)..(25): SEQ ID NO: 2339; WAN024F95_at; Start 506; Stop 530
aaaacggcttgagcgctgcaacagg

SEQ ID NO: 196837 - DNA, 25 bp, Artificial
  probe
  misc_feature (1)..(25): SEQ ID NO: 2339; WAN024F95_at; Start 400; Stop 424
gaatactgtaccaataaccaaccaa

SEQ ID NO: 196838 - DNA, 25 bp, Artificial
  probe
  misc_feature (1)..(25): SEQ ID NO: 2339; WAN024F95_at; Start 504; Stop 528
cgaaaacggcttgagcgctgcaaca

SEQ ID NO: 196839 - DNA, 25 bp, Artificial
  probe
  misc_feature (1)..(25): SEQ ID NO: 2339; WAN024F95_at; Start 433; Stop 457
tcagaccatgtggatccatatccat

SEQ ID NO: 196840 - DNA, 25 bp, Artificial
  probe
  misc_feature (1)..(25): SEQ ID NO: 2339; WAN024F95_at; Start 354; Stop 378
gccgaagactcttgatacagacgac

SEQ ID NO: 196841 - DNA, 25 bp, Artificial
  probe
  misc_feature (1)..(25): SEQ ID NO: 2339; WAN024F95_at; Start 624; Stop 648
tttcgatggctcaggctatatgctt

SEQ ID NO: 196842 - DNA, 25 bp, Artificial
  probe
  misc_feature (1)..(25): SEQ ID NO: 2339; WAN024F95_at; Start 441; Stop 465
tgtggatccatatccatatcttgca

SEQ ID NO: 196843 - DNA, 25 bp, Artificial
  probe
  misc_feature (1)..(25): SEQ ID NO: 2339; WAN024F95_at; Start 516; Stop 540
gagcgctgcaacaggctggcagaaa

SEQ ID NO: 196844 - DNA, 25 bp, Artificial
  probe
  misc_feature (1)..(25): SEQ ID NO: 2339; WAN024F95_at; Start 519; Stop 543
cgctgcaacaggctggcagaaaaat

SEQ ID NO: 196845 - DNA, 25 bp, Artificial
  probe
  misc_feature (1)..(25): SEQ ID NO: 2339; WAN024F95_at; Start 458; Stop 482
atcttgcaagttggggcattagccg

SEQ ID NO: 196846 - DNA, 25 bp, Artificial
  probe
  misc_feature (1)..(25): SEQ ID NO: 2339; WAN024F95_at; Start 617; Stop 641
ggtattatttcgatggctcaggcta

SEQ ID NO: 196847 - DNA, 25 bp, Artificial
  probe
  misc_feature (1)..(25): SEQ ID NO: 2339; WAN024F95_at; Start 501; Stop 525
catcgaaaacggcttgagcgctgca

SEQ ID NO: 196848 - DNA, 25 bp, Artificial
  probe
  misc_feature (1)..(25): SEQ ID NO: 2339; WAN024F95_at; Start 358; Stop 382
aagactcttgatacagacgacttgg

SEQ ID NO: 196849 - DNA, 25 bp, Artificial
  probe
  misc_feature (1)..(25): SEQ ID NO: 2339; WAN024F95_at; Start 396; Stop 420
gcatgaatactgtaccaataaccaa

SEQ ID NO: 196850 - DNA, 25 bp, Artificial
  probe
  misc_feature (1)..(25): SEQ ID NO: 2339; WAN024F95_at; Start 622; Stop 646
tatttcgatggctcaggctatatgc

SEQ ID NO: 196851 - DNA, 25 bp, Artificial
  probe
  misc_feature (1)..(25): SEQ ID NO: 2339; WAN024F95_at; Start 436; Stop 460
gaccatgtggatccatatccatatc

SEQ ID NO: 196852 - DNA, 25 bp, Artificial
  probe
  misc_feature (1)..(25): SEQ ID NO: 2339; WAN024F95_at; Start 390; Stop 414
caagacgcatgaatactgtaccaat

SEQ ID NO: 196853 - DNA, 25 bp, Artificial
  probe
  misc_feature (1)..(25): SEQ ID NO: 2339; WAN024F95_at; Start 524; Stop 548
caacaggctggcagaaaaatggcac

SEQ ID NO: 196854 - DNA, 25 bp, Artificial
  probe
  misc_feature (1)..(25): SEQ ID NO: 2339; WAN024F95_at; Start 430; Stop 454
cactcagaccatgtggatccatatc

SEQ ID NO: 196855 - DNA, 25 bp, Artificial
  probe
  misc_feature (1)..(25): SEQ ID NO: 2339; WAN024F95_at; Start 492; Stop 516
taagcaagacatcgaaaacggcttg

SEQ ID NO: 196856 - DNA, 25 bp, Artificial
  probe
  misc_feature (1)..(25): SEQ ID NO: 2166; WAN024F96_at; Start 520; Stop 544
attgaaacaggctggcagaagaatg

SEQ ID NO: 196857 - DNA, 25 bp, Artificial
  probe
  misc_feature (1)..(25): SEQ ID NO: 2166; WAN024F96_at; Start 521; Stop 545
ttgaaacaggctggcagaagaatga

SEQ ID NO: 196858 - DNA, 25 bp, Artificial
  probe
  misc_feature (1)..(25): SEQ ID NO: 2166; WAN024F96_at; Start 524; Stop 548
aaacaggctggcagaagaatgacac

SEQ ID NO: 196859 - DNA, 25 bp, Artificial
  probe
  misc_feature (1)..(25): SEQ ID NO: 2166; WAN024F96_at; Start 594; Stop 618
gtttgagaaaatcaatggcacttgg

SEQ ID NO: 196860 - DNA, 25 bp, Artificial
  probe
  misc_feature (1)..(25): SEQ ID NO: 2166; WAN024F96_at; Start 596; Stop 620
ttgagaaaatcaatggcacttggta

SEQ ID NO: 196861 - DNA, 25 bp, Artificial
  probe
  misc_feature (1)..(25): SEQ ID NO: 2166; WAN024F96_at; Start 595; Stop 619
tttgagaaaatcaatggcacttggt

SEQ ID NO: 196862 - DNA, 25 bp, Artificial
  probe
  misc_feature (1)..(25): SEQ ID NO: 2166; WAN024F96_at; Start 523; Stop 547
gaaacaggctggcagaagaatgaca

SEQ ID NO: 196863 - DNA, 25 bp, Artificial
  probe
  misc_feature (1)..(25): SEQ ID NO: 2166; WAN024F96_at; Start 522; Stop 546
tgaaacaggctggcagaagaatgac

SEQ ID NO: 196864 - DNA, 25 bp, Artificial
  probe
  misc_feature (1)..(25): SEQ ID NO: 5325; WAN024F97_at; Start 133; Stop 157
aatttgacgctggtattttatggac

SEQ ID NO: 196865 - DNA, 25 bp, Artificial
  probe
  misc_feature (1)..(25): SEQ ID NO: 5325; WAN024F97_at; Start 204; Stop 228
tctcattgcagtcaattcagacatg

SEQ ID NO: 196866 - DNA, 25 bp, Artificial
  probe
  misc_feature (1)..(25): SEQ ID NO: 5325; WAN024F97_at; Start 190; Stop 214
ggaactcagttcagtctcattgcag

SEQ ID NO: 196867 - DNA, 25 bp, Artificial
  probe
  misc_feature (1)..(25): SEQ ID NO: 5325; WAN024F97_at; Start 136; Stop 160
ttgacgctggtattttatggactcg

SEQ ID NO: 196868 - DNA, 25 bp, Artificial
  probe
  misc_feature (1)..(25): SEQ ID NO: 5325; WAN024F97_at; Start 157; Stop 181
ctcggaaagaatattagcggagtct

SEQ ID NO: 196869 - DNA, 25 bp, Artificial
  probe
  misc_feature (1)..(25): SEQ ID NO: 5325; WAN024F97_at; Start 64; Stop 88
cttagaaaaaagttgggagctgatg

SEQ ID NO: 196870 - DNA, 25 bp, Artificial
  probe
  misc_feature (1)..(25): SEQ ID NO: 5325; WAN024F97_at; Start 191; Stop 215
gaactcagttcagtctcattgcagt

SEQ ID NO: 196871 - DNA, 25 bp, Artificial
  probe
  misc_feature (1)..(25): SEQ ID NO: 5325; WAN024F97_at; Start 196; Stop 220
cagttcagtctcattgcagtcaatt

SEQ ID NO: 196872 - DNA, 25 bp, Artificial
  probe
  misc_feature (1)..(25): SEQ ID NO: 5325; WAN024F97_at; Start 36; Stop 60
aatggatttaagtaataaagcttca

SEQ ID NO: 196873 - DNA, 25 bp, Artificial
  probe
  misc_feature (1)..(25): SEQ ID NO: 5325; WAN024F97_at; Start 138; Stop 162
gacgctggtattttatggactcgga

SEQ ID NO: 196874 - DNA, 25 bp, Artificial
  probe
  misc_feature (1)..(25): SEQ ID NO: 5325; WAN024F97_at; Start 184; Stop 208
tataaaggaactcagttcagtctca

SEQ ID NO: 196875 - DNA, 25 bp, Artificial
  probe
  misc_feature (1)..(25): SEQ ID NO: 5325; WAN024F97_at; Start 161; Stop 185
gaaagaatattagcggagtctgtta

SEQ ID NO: 196876 - DNA, 25 bp, Artificial
  probe
  misc_feature (1)..(25): SEQ ID NO: 5325; WAN024F97_at; Start 123; Stop 147
aaagatagaaaatttgacgctggta

SEQ ID NO: 196877 - DNA, 25 bp, Artificial
  probe
  misc_feature (1)..(25): SEQ ID NO: 5325; WAN024F97_at; Start 141; Stop 165
gctggtattttatggactcggaaag

SEQ ID NO: 196878 - DNA, 25 bp, Artificial
  probe
  misc_feature (1)..(25): SEQ ID NO: 5325; WAN024F97_at; Start 194; Stop 218
ctcagttcagtctcattgcagtcaa

SEQ ID NO: 196879 - DNA, 25 bp, Artificial
  probe
  misc_feature (1)..(25): SEQ ID NO: 5325; WAN024F97_at; Start 140; Stop 164
cgctggtattttatggactcggaaa

SEQ ID NO: 196880 - DNA, 25 bp, Artificial
  probe
  misc_feature (1)..(25): SEQ ID NO: 5325; WAN024F97_at; Start 173; Stop 197
gcggagtctgttataaaggaactca

SEQ ID NO: 196881 - DNA, 25 bp, Artificial
  probe
  misc_feature (1)..(25): SEQ ID NO: 5325; WAN024F97_at; Start 179; Stop 203
tctgttataaaggaactcagttcag

SEQ ID NO: 196882 - DNA, 25 bp, Artificial
  probe
  misc_feature (1)..(25): SEQ ID NO: 5325; WAN024F97_at; Start 126; Stop 150
gatagaaaatttgacgctggtattt

SEQ ID NO: 196883 - DNA, 25 bp, Artificial
  probe
  misc_feature (1)..(25): SEQ ID NO: 5325; WAN024F97_at; Start 153; Stop 177
tggactcggaaagaatattagcgga

SEQ ID NO: 196884 - DNA, 25 bp, Artificial
  probe
  misc_feature (1)..(25): SEQ ID NO: 5325; WAN024F97_at; Start 151; Stop 175
tatggactcggaaagaatattagcg

SEQ ID NO: 196885 - DNA, 25 bp, Artificial
  probe
  misc_feature (1)..(25): SEQ ID NO: 5325; WAN024F97_at; Start 159; Stop 183
cggaaagaatattagcggagtctgt

SEQ ID NO: 196886 - DNA, 25 bp, Artificial
  probe
  misc_feature (1)..(25): SEQ ID NO: 5325; WAN024F97_at; Start 69; Stop 93
aaaaaagttgggagctgatggtgaa

SEQ ID NO: 196887 - DNA, 25 bp, Artificial
  probe
  misc_feature (1)..(25): SEQ ID NO: 5325; WAN024F97_at; Start 175; Stop 199
ggagtctgttataaaggaactcagt

SEQ ID NO: 196888 - DNA, 25 bp, Artificial
  probe
  misc_feature (1)..(25): SEQ ID NO: 5325; WAN024F97_at; Start 66; Stop 90
tagaaaaaagttgggagctgatggt

SEQ ID NO: 196889 - DNA, 25 bp, Artificial
  probe
  misc_feature (1)..(25): SEQ ID NO: 5325; WAN024F97_at; Start 47; Stop 71
gtaataaagcttcaaatcttagaaa

SEQ ID NO: 196890 - DNA, 25 bp, Artificial
  probe
  misc_feature (1)..(25): SEQ ID NO: 5325; WAN024F97_at; Start 98; Stop 122
cgatagatatttttaaattggtaca

SEQ ID NO: 196891 - DNA, 25 bp, Artificial
  probe
  misc_feature (1)..(25): SEQ ID NO: 5325; WAN024F97_at; Start 61; Stop 85
aatcttagaaaaaagttgggagctg

SEQ ID NO: 196892 - DNA, 25 bp, Artificial
  probe
  misc_feature (1)..(25): SEQ ID NO: 5325; WAN024F97_at; Start 165; Stop 189
gaatattagcggagtctgttataaa

SEQ ID NO: 196893 - DNA, 25 bp, Artificial
  probe
  misc_feature (1)..(25): SEQ ID NO: 5325; WAN024F97_at; Start 168; Stop 192
tattagcggagtctgttataaagga

SEQ ID NO: 196894 - DNA, 25 bp, Artificial
  probe
  misc_feature (1)..(25): SEQ ID NO: 5325; WAN024F97_at; Start 171; Stop 195
tagcggagtctgttataaaggaact

SEQ ID NO: 196895 - DNA, 25 bp, Artificial
  probe
  misc_feature (1)..(25): SEQ ID NO: 5325; WAN024F97_at; Start 143; Stop 167
tggtattttatggactcggaaagaa

SEQ ID NO: 196896 - DNA, 25 bp, Artificial
  probe
  misc_feature (1)..(25): SEQ ID NO: 5325; WAN024F97_at; Start 200; Stop 224
tcagtctcattgcagtcaattcaga

SEQ ID NO: 196897 - DNA, 25 bp, Artificial
  probe
  misc_feature (1)..(25): SEQ ID NO: 5325; WAN024F97_at; Start 95; Stop 119
cgccgatagatatttttaaattggt

SEQ ID NO: 196898 - DNA, 25 bp, Artificial
  probe
  misc_feature (1)..(25): SEQ ID NO: 3115; WAN024F98_at; Start 50; Stop 74
gaatatcttcaaatcttactcaaga

SEQ ID NO: 196899 - DNA, 25 bp, Artificial
  probe
  misc_feature (1)..(25): SEQ ID NO: 3115; WAN024F98_at; Start 11; Stop 35
taaatgtatgtgatgttggaaaaag

SEQ ID NO: 196900 - DNA, 25 bp, Artificial
  probe
  misc_feature (1)..(25): SEQ ID NO: 3115; WAN024F98_at; Start 61; Stop 85
aatcttactcaagataagattgctg

SEQ ID NO: 196901 - DNA, 25 bp, Artificial
  probe
  misc_feature (1)..(25): SEQ ID NO: 3115; WAN024F98_at; Start 21; Stop 45
tgatgttggaaaaagaataaaagaa

SEQ ID NO: 196902 - DNA, 25 bp, Artificial
  probe
  misc_feature (1)..(25): SEQ ID NO: 3115; WAN024F98_at; Start 93; Stop 117
gtctttgaatcaaagcatgattgcc

SEQ ID NO: 196903 - DNA, 25 bp, Artificial
  probe
  misc_feature (1)..(25): SEQ ID NO: 3115; WAN024F98_at; Start 73; Stop 97
gataagattgctgagtatttgtctt

SEQ ID NO: 196904 - DNA, 25 bp, Artificial
  probe
  misc_feature (1)..(25): SEQ ID NO: 3115; WAN024F98_at; Start 96; Stop 120
tttgaatcaaagcatgattgccaaa

SEQ ID NO: 196905 - DNA, 25 bp, Artificial
  probe
  misc_feature (1)..(25): SEQ ID NO: 3115; WAN024F98_at; Start 99; Stop 123
gaatcaaagcatgattgccaaaatg

SEQ ID NO: 196906 - DNA, 25 bp, Artificial
  probe
  misc_feature (1)..(25): SEQ ID NO: 3115; WAN024F98_at; Start 81; Stop 105
tgctgagtatttgtctttgaatcaa

SEQ ID NO: 196907 - DNA, 25 bp, Artificial
  probe
  misc_feature (1)..(25): SEQ ID NO: 3115; WAN024F98_at; Start 84; Stop 108
tgagtatttgtctttgaatcaaagc

SEQ ID NO: 196908 - DNA, 25 bp, Artificial
  probe
  misc_feature (1)..(25): SEQ ID NO: 3115; WAN024F98_at; Start 102; Stop 126
tcaaagcatgattgccaaaatggaa

SEQ ID NO: 196909 - DNA, 25 bp, Artificial
  probe
  misc_feature (1)..(25): SEQ ID NO: 3115; WAN024F98_at; Start 87; Stop 111
gtatttgtctttgaatcaaagcatg

SEQ ID NO: 196910 - DNA, 25 bp, Artificial
  probe
  misc_feature (1)..(25): SEQ ID NO: 3115; WAN024F98_at; Start 82; Stop 106
gctgagtatttgtctttgaatcaaa

SEQ ID NO: 196911 - DNA, 25 bp, Artificial
  probe
  misc_feature (1)..(25): SEQ ID NO: 3115; WAN024F98_at; Start 15; Stop 39
tgtatgtgatgttggaaaaagaata

SEQ ID NO: 196912 - DNA, 25 bp, Artificial
  probe
  misc_feature (1)..(25): SEQ ID NO: 3115; WAN024F98_at; Start 101; Stop 125
atcaaagcatgattgccaaaatgga

SEQ ID NO: 196913 - DNA, 25 bp, Artificial
  probe
  misc_feature (1)..(25): SEQ ID NO: 3115; WAN024F98_at; Start 55; Stop 79
tcttcaaatcttactcaagataaga

SEQ ID NO: 196914 - DNA, 25 bp, Artificial
  probe
  misc_feature (1)..(25): SEQ ID NO: 3115; WAN024F98_at; Start 43; Stop 67
gaacttagaatatcttcaaatctta

SEQ ID NO: 196915 - DNA, 25 bp, Artificial
  probe
  misc_feature (1)..(25): SEQ ID NO: 3115; WAN024F98_at; Start 19; Stop 43
tgtgatgttggaaaaagaataaaag

SEQ ID NO: 196916 - DNA, 25 bp, Artificial
  probe
  misc_feature (1)..(25): SEQ ID NO: 3115; WAN024F98_at; Start 17; Stop 41
tatgtgatgttggaaaaagaataaa

SEQ ID NO: 196917 - DNA, 25 bp, Artificial
  probe
  misc_feature (1)..(25): SEQ ID NO: 3115; WAN024F98_at; Start 85; Stop 109
gagtatttgtctttgaatcaaagca

SEQ ID NO: 196918 - DNA, 25 bp, Artificial
  probe
  misc_feature (1)..(25): SEQ ID NO: 3115; WAN024F98_at; Start 12; Stop 36
aaatgtatgtgatgttggaaaaaga

SEQ ID NO: 196919 - DNA, 25 bp, Artificial
  probe
  misc_feature (1)..(25): SEQ ID NO: 3115; WAN024F98_at; Start 95; Stop 119
ctttgaatcaaagcatgattgccaa

SEQ ID NO: 196920 - DNA, 25 bp, Artificial
  probe
  misc_feature (1)..(25): SEQ ID NO: 3115; WAN024F98_at; Start 97; Stop 121
ttgaatcaaagcatgattgccaaaa

SEQ ID NO: 196921 - DNA, 25 bp, Artificial
  probe
  misc_feature (1)..(25): SEQ ID NO: 3115; WAN024F98_at; Start 103; Stop 127
caaagcatgattgccaaaatggaaa

SEQ ID NO: 196922 - DNA, 25 bp, Artificial
  probe
  misc_feature (1)..(25): SEQ ID NO: 3115; WAN024F98_at; Start 94; Stop 118
tctttgaatcaaagcatgattgcca

SEQ ID NO: 196923 - DNA, 25 bp, Artificial
  probe
  misc_feature (1)..(25): SEQ ID NO: 3115; WAN024F98_at; Start 78; Stop 102
gattgctgagtatttgtctttgaat

SEQ ID NO: 196924 - DNA, 25 bp, Artificial
  probe
  misc_feature (1)..(25): SEQ ID NO: 3115; WAN024F98_at; Start 100; Stop 124
aatcaaagcatgattgccaaaatgg

SEQ ID NO: 196925 - DNA, 25 bp, Artificial
  probe
  misc_feature (1)..(25): SEQ ID NO: 3115; WAN024F98_at; Start 77; Stop 101
agattgctgagtatttgtctttgaa

SEQ ID NO: 196926 - DNA, 25 bp, Artificial
  probe
  misc_feature (1)..(25): SEQ ID NO: 3115; WAN024F98_at; Start 9; Stop 33
gataaatgtatgtgatgttggaaaa

SEQ ID NO: 196927 - DNA, 25 bp, Artificial
  probe
  misc_feature (1)..(25): SEQ ID NO: 3115; WAN024F98_at; Start 35; Stop 59
gaataaaagaacttagaatatcttc

SEQ ID NO: 196928 - DNA, 25 bp, Artificial
  probe
  misc_feature (1)..(25): SEQ ID NO: 3115; WAN024F98_at; Start 98; Stop 122
tgaatcaaagcatgattgccaaaat

SEQ ID NO: 196929 - DNA, 25 bp, Artificial
  probe
  misc_feature (1)..(25): SEQ ID NO: 3115; WAN024F98_at; Start 75; Stop 99
taagattgctgagtatttgtctttg

SEQ ID NO: 196930 - DNA, 25 bp, Artificial
  probe
  misc_feature (1)..(25): SEQ ID NO: 3115; WAN024F98_at; Start 59; Stop 83
caaatcttactcaagataagattgc

SEQ ID NO: 196931 - DNA, 25 bp, Artificial
  probe
  misc_feature (1)..(25): SEQ ID NO: 3115; WAN024F98_at; Start 80; Stop 104
ttgctgagtatttgtctttgaatca

SEQ ID NO: 196932 - DNA, 25 bp, Artificial
  probe
  misc_feature (1)..(25): SEQ ID NO: 3443; WAN024F99_at; Start 54; Stop 78
gattggtgaaggagatgaaactgaa

SEQ ID NO: 196933 - DNA, 25 bp, Artificial
  probe
  misc_feature (1)..(25): SEQ ID NO: 3443; WAN024F99_at; Start 253; Stop 277
gatggataccttgatgcagaagaaa

SEQ ID NO: 196934 - DNA, 25 bp, Artificial
  probe
  misc_feature (1)..(25): SEQ ID NO: 3443; WAN024F99_at; Start 38; Stop 62
cagtcagtcttatcttgattggtga

SEQ ID NO: 196935 - DNA, 25 bp, Artificial
  probe
  misc_feature (1)..(25): SEQ ID NO: 3443; WAN024F99_at; Start 27; Stop 51
gaagaagagttcagtcagtcttatc

SEQ ID NO: 196936 - DNA, 25 bp, Artificial
  probe
  misc_feature (1)..(25): SEQ ID NO: 3443; WAN024F99_at; Start 170; Stop 194
ctcatcttgaagtagaagatattat

SEQ ID NO: 196937 - DNA, 25 bp, Artificial
  probe
  misc_feature (1)..(25): SEQ ID NO: 3443; WAN024F99_at; Start 60; Stop 84
tgaaggagatgaaactgaaagaaaa

SEQ ID NO: 196938 - DNA, 25 bp, Artificial
  probe
  misc_feature (1)..(25): SEQ ID NO: 3443; WAN024F99_at; Start 22; Stop 46
gaggtgaagaagagttcagtcagtc

SEQ ID NO: 196939 - DNA, 25 bp, Artificial
  probe
  misc_feature (1)..(25): SEQ ID NO: 3443; WAN024F99_at; Start 323; Stop 347
gctatgatacaagtttatatcgtcc

SEQ ID NO: 196940 - DNA, 25 bp, Artificial
  probe
  misc_feature (1)..(25): SEQ ID NO: 3443; WAN024F99_at; Start 300; Stop 324
tatagagacagcttcaagattaggc

SEQ ID NO: 196941 - DNA, 25 bp, Artificial
  probe
  misc_feature (1)..(25): SEQ ID NO: 3443; WAN024F99_at; Start 245; Stop 269
tgaggaatgatggataccttgatgc

SEQ ID NO: 196942 - DNA, 25 bp, Artificial
  probe
  misc_feature (1)..(25): SEQ ID NO: 3443; WAN024F99_at; Start 152; Stop 176
gagaaaatgccaatagaactcatct

SEQ ID NO: 196943 - DNA, 25 bp, Artificial
  probe
  misc_feature (1)..(25): SEQ ID NO: 3443; WAN024F99_at; Start 332; Stop 356
caagtttatatcgtcctttgtcaga

SEQ ID NO: 196944 - DNA, 25 bp, Artificial
  probe
  misc_feature (1)..(25): SEQ ID NO: 3443; WAN024F99_at; Start 125; Stop 149
cactgtataggatggttgaggaaat

SEQ ID NO: 196945 - DNA, 25 bp, Artificial
  probe
  misc_feature (1)..(25): SEQ ID NO: 3443; WAN024F99_at; Start 249; Stop 273
gaatgatggataccttgatgcagaa

SEQ ID NO: 196946 - DNA, 25 bp, Artificial
  probe
  misc_feature (1)..(25): SEQ ID NO: 3443; WAN024F99_at; Start 18; Stop 42
tgatgaggtgaagaagagttcagtc

SEQ ID NO: 196947 - DNA, 25 bp, Artificial
  probe
  misc_feature (1)..(25): SEQ ID NO: 3443; WAN024F99_at; Start 163; Stop 187
aatagaactcatcttgaagtagaag

SEQ ID NO: 196948 - DNA, 25 bp, Artificial
  probe
  misc_feature (1)..(25): SEQ ID NO: 3443; WAN024F99_at; Start 42; Stop 66
cagtcttatcttgattggtgaagga

SEQ ID NO: 196949 - DNA, 25 bp, Artificial
  probe
  misc_feature (1)..(25): SEQ ID NO: 3443; WAN024F99_at; Start 30; Stop 54
gaagagttcagtcagtcttatcttg

SEQ ID NO: 196950 - DNA, 25 bp, Artificial
  probe
  misc_feature (1)..(25): SEQ ID NO: 3443; WAN024F99_at; Start 185; Stop 209
aagatattataaaattgggtcagtt

SEQ ID NO: 196951 - DNA, 25 bp, Artificial
  probe
  misc_feature (1)..(25): SEQ ID NO: 3443; WAN024F99_at; Start 294; Stop 318
tagtgttatagagacagcttcaaga

SEQ ID NO: 196952 - DNA, 25 bp, Artificial
  probe
  misc_feature (1)..(25): SEQ ID NO: 3443; WAN024F99_at; Start 308; Stop 332
cagcttcaagattaggctatgatac

SEQ ID NO: 196953 - DNA, 25 bp, Artificial
  probe
  misc_feature (1)..(25): SEQ ID NO: 3443; WAN024F99_at; Start 7; Stop 31
catctttattatgatgaggtgaaga

SEQ ID NO: 196954 - DNA, 25 bp, Artificial
  probe
  misc_feature (1)..(25): SEQ ID NO: 3443; WAN024F99_at; Start 257; Stop 281
gataccttgatgcagaagaaattaa

SEQ ID NO: 196955 - DNA, 25 bp, Artificial
  probe
  misc_feature (1)..(25): SEQ ID NO: 3443; WAN024F99_at; Start 121; Stop 145
tcttcactgtataggatggttgagg

SEQ ID NO: 196956 - DNA, 25 bp, Artificial
  probe
  misc_feature (1)..(25): SEQ ID NO: 3443; WAN024F99_at; Start 202; Stop 226
ggtcagttttatggtatcagtcata

SEQ ID NO: 196957 - DNA, 25 bp, Artificial
  probe
  misc_feature (1)..(25): SEQ ID NO: 3443; WAN024F99_at; Start 160; Stop 184
gccaatagaactcatcttgaagtag

SEQ ID NO: 196958 - DNA, 25 bp, Artificial
  probe
  misc_feature (1)..(25): SEQ ID NO: 3443; WAN024F99_at; Start 340; Stop 364
tatcgtcctttgtcagaaagtaaaa

SEQ ID NO: 196959 - DNA, 25 bp, Artificial
  probe
  misc_feature (1)..(25): SEQ ID NO: 3443; WAN024F99_at; Start 304; Stop 328
gagacagcttcaagattaggctatg

SEQ ID NO: 196960 - DNA, 25 bp, Artificial
  probe
  misc_feature (1)..(25): SEQ ID NO: 3443; WAN024F99_at; Start 111; Stop 135
aattttcccatcttcactgtatagg

SEQ ID NO: 196961 - DNA, 25 bp, Artificial
  probe
  misc_feature (1)..(25): SEQ ID NO: 3443; WAN024F99_at; Start 287; Stop 311
tggatattagtgttatagagacagc

SEQ ID NO: 196962 - DNA, 25 bp, Artificial
  probe
  misc_feature (1)..(25): SEQ ID NO: 3443; WAN024F99_at; Start 197; Stop 221
aattgggtcagttttatggtatcag

SEQ ID NO: 196963 - DNA, 25 bp, Artificial
  probe
  misc_feature (1)..(25): SEQ ID NO: 3443; WAN024F99_at; Start 313; Stop 337
tcaagattaggctatgatacaagtt

SEQ ID NO: 196964 - DNA, 25 bp, Artificial
  probe
  misc_feature (1)..(25): SEQ ID NO: 3443; WAN024F99_at; Start 265; Stop 289
gatgcagaagaaattaaaaatatgg

SEQ ID NO: 196965 - DNA, 25 bp, Artificial
  probe
  misc_feature (1)..(25): SEQ ID NO: 3443; WAN024F99_at; Start 238; Stop 262
tatagattgaggaatgatggatacc

SEQ ID NO: 196966 - DNA, 25 bp, Artificial
  probe
  misc_feature (1)..(25): SEQ ID NO: 5059; WAN024F9A_at; Start 184; Stop 208
tcagctgagattgtgagcatagaca

SEQ ID NO: 196967 - DNA, 25 bp, Artificial
  probe
  misc_feature (1)..(25): SEQ ID NO: 5059; WAN024F9A_at; Start 196; Stop 220
gtgagcatagacattggaactgaag

SEQ ID NO: 196968 - DNA, 25 bp, Artificial
  probe
  misc_feature (1)..(25): SEQ ID NO: 5059; WAN024F9A_at; Start 177; Stop 201
taagggttcagctgagattgtgagc

SEQ ID NO: 196969 - DNA, 25 bp, Artificial
  probe
  misc_feature (1)..(25): SEQ ID NO: 5059; WAN024F9A_at; Start 389; Stop 413
caacaggagatatactgattgaagc

SEQ ID NO: 196970 - DNA, 25 bp, Artificial
  probe
  misc_feature (1)..(25): SEQ ID NO: 5059; WAN024F9A_at; Start 300; Stop 324
cttagcgaaaaagcataatgggata

SEQ ID NO: 196971 - DNA, 25 bp, Artificial
  probe
  misc_feature (1)..(25): SEQ ID NO: 5059; WAN024F9A_at; Start 261; Stop 285
taacaagattattggtaagggagaa

SEQ ID NO: 196972 - DNA, 25 bp, Artificial
  probe
  misc_feature (1)..(25): SEQ ID NO: 5059; WAN024F9A_at; Start 47; Stop 71
tatgggttggcactgaacatctttt

SEQ ID NO: 196973 - DNA, 25 bp, Artificial
  probe
  misc_feature (1)..(25): SEQ ID NO: 5059; WAN024F9A_at; Start 225; Stop 249
cgcattatatagagatttaacaaga

SEQ ID NO: 196974 - DNA, 25 bp, Artificial
  probe
  misc_feature (1)..(25): SEQ ID NO: 5059; WAN024F9A_at; Start 50; Stop 74
gggttggcactgaacatcttttaga

SEQ ID NO: 196975 - DNA, 25 bp, Artificial
  probe
  misc_feature (1)..(25): SEQ ID NO: 5059; WAN024F9A_at; Start 111; Stop 135
ggtgtatgatgaaatcaatatacct

SEQ ID NO: 196976 - DNA, 25 bp, Artificial
  probe
  misc_feature (1)..(25): SEQ ID NO: 5059; WAN024F9A_at; Start 121; Stop 145
gaaatcaatatacctacaattcccc

SEQ ID NO: 196977 - DNA, 25 bp, Artificial
  probe
  misc_feature (1)..(25): SEQ ID NO: 5059; WAN024F9A_at; Start 312; Stop 336
gcataatgggatattaggaagtaat

SEQ ID NO: 196978 - DNA, 25 bp, Artificial
  probe
  misc_feature (1)..(25): SEQ ID NO: 5059; WAN024F9A_at; Start 90; Stop 114
taaaattgttattccacaagaggtg

SEQ ID NO: 196979 - DNA, 25 bp, Artificial
  probe
  misc_feature (1)..(25): SEQ ID NO: 5059; WAN024F9A_at; Start 10; Stop 34
cgtgtatttattgatgcagattgta

SEQ ID NO: 196980 - DNA, 25 bp, Artificial
  probe
  misc_feature (1)..(25): SEQ ID NO: 5059; WAN024F9A_at; Start 392; Stop 416
caggagatatactgattgaagcgtt

SEQ ID NO: 196981 - DNA, 25 bp, Artificial
  probe
  misc_feature (1)..(25): SEQ ID NO: 5059; WAN024F9A_at; Start 212; Stop 236
gaactgaagaatacgcattatatag

SEQ ID NO: 196982 - DNA, 25 bp, Artificial
  probe
  misc_feature (1)..(25): SEQ ID NO: 5059; WAN024F9A_at; Start 329; Stop 353
gaagtaataacctaagagatgttaa

SEQ ID NO: 196983 - DNA, 25 bp, Artificial
  probe
  misc_feature (1)..(25): SEQ ID NO: 5059; WAN024F9A_at; Start 207; Stop 231
cattggaactgaagaatacgcatta

SEQ ID NO: 196984 - DNA, 25 bp, Artificial
  probe
  misc_feature (1)..(25): SEQ ID NO: 5059; WAN024F9A_at; Start 234; Stop 258
tagagatttaacaagaaatcatgat

SEQ ID NO: 196985 - DNA, 25 bp, Artificial
  probe
  misc_feature (1)..(25): SEQ ID NO: 5059; WAN024F9A_at; Start 192; Stop 216
gattgtgagcatagacattggaact

SEQ ID NO: 196986 - DNA, 25 bp, Artificial
  probe
  misc_feature (1)..(25): SEQ ID NO: 5059; WAN024F9A_at; Start 140; Stop 164
ttccccatttaaaatctaggataga

SEQ ID NO: 196987 - DNA, 25 bp, Artificial
  probe
  misc_feature (1)..(25): SEQ ID NO: 5059; WAN024F9A_at; Start 326; Stop 350
taggaagtaataacctaagagatgt

SEQ ID NO: 196988 - DNA, 25 bp, Artificial
  probe
  misc_feature (1)..(25): SEQ ID NO: 5059; WAN024F9A_at; Start 137; Stop 161
caattccccatttaaaatctaggat

SEQ ID NO: 196989 - DNA, 25 bp, Artificial
  probe
  misc_feature (1)..(25): SEQ ID NO: 5059; WAN024F9A_at; Start 356; Stop 380
catatgtagaagaattttctttaga

SEQ ID NO: 196990 - DNA, 25 bp, Artificial
  probe
  misc_feature (1)..(25): SEQ ID NO: 5059; WAN024F9A_at; Start 18; Stop 42
tattgatgcagattgtatttcagta

SEQ ID NO: 196991 - DNA, 25 bp, Artificial
  probe
  misc_feature (1)..(25): SEQ ID NO: 5059; WAN024F9A_at; Start 35; Stop 59
tttcagtatttttatgggttggcac

SEQ ID NO: 196992 - DNA, 25 bp, Artificial
  probe
  misc_feature (1)..(25): SEQ ID NO: 5059; WAN024F9A_at; Start 397; Stop 421
gatatactgattgaagcgtttaaag

SEQ ID NO: 196993 - DNA, 25 bp, Artificial
  probe
  misc_feature (1)..(25): SEQ ID NO: 5059; WAN024F9A_at; Start 216; Stop 240
tgaagaatacgcattatatagagat

SEQ ID NO: 196994 - DNA, 25 bp, Artificial
  probe
  misc_feature (1)..(25): SEQ ID NO: 5059; WAN024F9A_at; Start 103; Stop 127
ccacaagaggtgtatgatgaaatca

SEQ ID NO: 196995 - DNA, 25 bp, Artificial
  probe
  misc_feature (1)..(25): SEQ ID NO: 5059; WAN024F9A_at; Start 5; Stop 29
ctagtcgtgtatttattgatgcaga

SEQ ID NO: 196996 - DNA, 25 bp, Artificial
  probe
  misc_feature (1)..(25): SEQ ID NO: 5059; WAN024F9A_at; Start 61; Stop 85
gaacatcttttagaaaagctctatt

SEQ ID NO: 196997 - DNA, 25 bp, Artificial
  probe
  misc_feature (1)..(25): SEQ ID NO: 5059; WAN024F9A_at; Start 41; Stop 65
tatttttatgggttggcactgaaca

SEQ ID NO: 196998 - DNA, 25 bp, Artificial
  probe
  misc_feature (1)..(25): SEQ ID NO: 5059; WAN024F9A_at; Start 55; Stop 79
ggcactgaacatcttttagaaaagc

SEQ ID NO: 196999 - DNA, 25 bp, Artificial
  probe
  misc_feature (1)..(25): SEQ ID NO: 5059; WAN024F9A_at; Start 96; Stop 120
tgttattccacaagaggtgtatgat

SEQ ID NO: 197000 - DNA, 25 bp, Artificial
  probe
  misc_feature (1)..(25): SEQ ID NO: 5238; WAN024F9B_at; Start 180; Stop 204
tatgatagaagagccggatctagct

SEQ ID NO: 197001 - DNA, 25 bp, Artificial
  probe
  misc_feature (1)..(25): SEQ ID NO: 5238; WAN024F9B_at; Start 63; Stop 87
ggctgtgaagaatcatatgtatatc

SEQ ID NO: 197002 - DNA, 25 bp, Artificial
  probe
  misc_feature (1)..(25): SEQ ID NO: 5238; WAN024F9B_at; Start 170; Stop 194
tcaagaactttatgatagaagagcc

SEQ ID NO: 197003 - DNA, 25 bp, Artificial
  probe
  misc_feature (1)..(25): SEQ ID NO: 5238; WAN024F9B_at; Start 356; Stop 380
ggctgatttcgctgaacaagtctga

SEQ ID NO: 197004 - DNA, 25 bp, Artificial
  probe
  misc_feature (1)..(25): SEQ ID NO: 5238; WAN024F9B_at; Start 303; Stop 327
caatgtctcagaagaattgtacgag

SEQ ID NO: 197005 - DNA, 25 bp, Artificial
  probe
  misc_feature (1)..(25): SEQ ID NO: 5238; WAN024F9B_at; Start 118; Stop 142
gagttggttaaaaatcagaccttca

SEQ ID NO: 197006 - DNA, 25 bp, Artificial
  probe
  misc_feature (1)..(25): SEQ ID NO: 5238; WAN024F9B_at; Start 185; Stop 209
tagaagagccggatctagctcgtaa

SEQ ID NO: 197007 - DNA, 25 bp, Artificial
  probe
  misc_feature (1)..(25): SEQ ID NO: 5238; WAN024F9B_at; Start 42; Stop 66
tccgactattagtagcgatttggct

SEQ ID NO: 197008 - DNA, 25 bp, Artificial
  probe
  misc_feature (1)..(25): SEQ ID NO: 5238; WAN024F9B_at; Start 293; Stop 317
gacggcgacgcaatgtctcagaaga

SEQ ID NO: 197009 - DNA, 25 bp, Artificial
  probe
  misc_feature (1)..(25): SEQ ID NO: 5238; WAN024F9B_at; Start 342; Stop 366
cttagtccaaccacggctgatttcg

SEQ ID NO: 197010 - DNA, 25 bp, Artificial
  probe
  misc_feature (1)..(25): SEQ ID NO: 5238; WAN024F9B_at; Start 309; Stop 333
ctcagaagaattgtacgaggaaatt

SEQ ID NO: 197011 - DNA, 25 bp, Artificial
  probe
  misc_feature (1)..(25): SEQ ID NO: 5238; WAN024F9B_at; Start 175; Stop 199
aactttatgatagaagagccggatc

SEQ ID NO: 197012 - DNA, 25 bp, Artificial
  probe
  misc_feature (1)..(25): SEQ ID NO: 5238; WAN024F9B_at; Start 94; Stop 118
gacaacagcatgactaaaaacaaag

SEQ ID NO: 197013 - DNA, 25 bp, Artificial
  probe
  misc_feature (1)..(25): SEQ ID NO: 5238; WAN024F9B_at; Start 86; Stop 110
tctgtattgacaacagcatgactaa

SEQ ID NO: 197014 - DNA, 25 bp, Artificial
  probe
  misc_feature (1)..(25): SEQ ID NO: 5238; WAN024F9B_at; Start 211; Stop 235
ccttttacaagaccaaccttgattg

SEQ ID NO: 197015 - DNA, 25 bp, Artificial
  probe
  misc_feature (1)..(25): SEQ ID NO: 5238; WAN024F9B_at; Start 78; Stop 102
tatgtatatctgtattgacaacagc

SEQ ID NO: 197016 - DNA, 25 bp, Artificial
  probe
  misc_feature (1)..(25): SEQ ID NO: 5238; WAN024F9B_at; Start 379; Stop 403
gagtttatgcaactcaatccaggaa

SEQ ID NO: 197017 - DNA, 25 bp, Artificial
  probe
  misc_feature (1)..(25): SEQ ID NO: 5238; WAN024F9B_at; Start 202; Stop 226
gctcgtaatccttttacaagaccaa

SEQ ID NO: 197018 - DNA, 25 bp, Artificial
  probe
  misc_feature (1)..(25): SEQ ID NO: 5238; WAN024F9B_at; Start 140; Stop 164
tcaaaccagctctcttgaccagacg

SEQ ID NO: 197019 - DNA, 25 bp, Artificial
  probe
  misc_feature (1)..(25): SEQ ID NO: 5238; WAN024F9B_at; Start 349; Stop 373
caaccacggctgatttcgctgaaca

SEQ ID NO: 197020 - DNA, 25 bp, Artificial
  probe
  misc_feature (1)..(25): SEQ ID NO: 5238; WAN024F9B_at; Start 384; Stop 408
tatgcaactcaatccaggaacttat

SEQ ID NO: 197021 - DNA, 25 bp, Artificial
  probe
  misc_feature (1)..(25): SEQ ID NO: 5238; WAN024F9B_at; Start 365; Stop 389
cgctgaacaagtctgagtttatgca

SEQ ID NO: 197022 - DNA, 25 bp, Artificial
  probe
  misc_feature (1)..(25): SEQ ID NO: 5238; WAN024F9B_at; Start 146; Stop 170
cagctctcttgaccagacgtttggt

SEQ ID NO: 197023 - DNA, 25 bp, Artificial
  probe
  misc_feature (1)..(25): SEQ ID NO: 5238; WAN024F9B_at; Start 296; Stop 320
ggcgacgcaatgtctcagaagaatt

SEQ ID NO: 197024 - DNA, 25 bp, Artificial
  probe
  misc_feature (1)..(25): SEQ ID NO: 5238; WAN024F9B_at; Start 53; Stop 77
gtagcgatttggctgtgaagaatca

SEQ ID NO: 197025 - DNA, 25 bp, Artificial
  probe
  misc_feature (1)..(25): SEQ ID NO: 5238; WAN024F9B_at; Start 221; Stop 245
gaccaaccttgattgacttagataa

SEQ ID NO: 197026 - DNA, 25 bp, Artificial
  probe
  misc_feature (1)..(25): SEQ ID NO: 5238; WAN024F9B_at; Start 1; Stop 25
ttgattaagagaggagatgttgtag

SEQ ID NO: 197027 - DNA, 25 bp, Artificial
  probe
  misc_feature (1)..(25): SEQ ID NO: 5238; WAN024F9B_at; Start 158; Stop 182
ccagacgtttggtcaagaactttat

SEQ ID NO: 197028 - DNA, 25 bp, Artificial
  probe
  misc_feature (1)..(25): SEQ ID NO: 5238; WAN024F9B_at; Start 235; Stop 259
gacttagataaggtatttatgttgg

SEQ ID NO: 197029 - DNA, 25 bp, Artificial
  probe
  misc_feature (1)..(25): SEQ ID NO: 5238; WAN024F9B_at; Start 126; Stop 150
taaaaatcagaccttcaaaccagct

SEQ ID NO: 197030 - DNA, 25 bp, Artificial
  probe
  misc_feature (1)..(25): SEQ ID NO: 5238; WAN024F9B_at; Start 102; Stop 126
catgactaaaaacaaagagttggtt

SEQ ID NO: 197031 - DNA, 25 bp, Artificial
  probe
  misc_feature (1)..(25): SEQ ID NO: 5238; WAN024F9B_at; Start 34; Stop 58
ttgccttttccgactattagtagcg

SEQ ID NO: 197032 - DNA, 25 bp, Artificial
  probe
  misc_feature (1)..(25): SEQ ID NO: 5238; WAN024F9B_at; Start 287; Stop 311
tagccagacggcgacgcaatgtctc

SEQ ID NO: 197033 - DNA, 25 bp, Artificial
  probe
  misc_feature (1)..(25): SEQ ID NO: 5238; WAN024F9B_at; Start 190; Stop 214
gagccggatctagctcgtaatcctt

SEQ ID NO: 197034 - DNA, 25 bp, Artificial
  probe
  misc_feature (1)..(25): SEQ ID NO: 5354; WAN024F9C_at; Start 238; Stop 262
gagttcctgctcgatatctttaatc

SEQ ID NO: 197035 - DNA, 25 bp, Artificial
  probe
  misc_feature (1)..(25): SEQ ID NO: 5354; WAN024F9C_at; Start 153; Stop 177
tatcaacaggactcgcctccaattc

SEQ ID NO: 197036 - DNA, 25 bp, Artificial
  probe
  misc_feature (1)..(25): SEQ ID NO: 5354; WAN024F9C_at; Start 281; Stop 305
ttctcgcgattatccaaaaaacgca

SEQ ID NO: 197037 - DNA, 25 bp, Artificial
  probe
  misc_feature (1)..(25): SEQ ID NO: 5354; WAN024F9C_at; Start 298; Stop 322
aaaacgcacaacctgaccttgcggc

SEQ ID NO: 197038 - DNA, 25 bp, Artificial
  probe
  misc_feature (1)..(25): SEQ ID NO: 5354; WAN024F9C_at; Start 268; Stop 292
caagtcttggtttttctcgcgatta

SEQ ID NO: 197039 - DNA, 25 bp, Artificial
  probe
  misc_feature (1)..(25): SEQ ID NO: 5354; WAN024F9C_at; Start 73; Stop 97
tgtctatgcgttcaaaaaagcctta

SEQ ID NO: 197040 - DNA, 25 bp, Artificial
  probe
  misc_feature (1)..(25): SEQ ID NO: 5354; WAN024F9C_at; Start 96; Stop 120
taacctgttgcatctgagaacgtgc

SEQ ID NO: 197041 - DNA, 25 bp, Artificial
  probe
  misc_feature (1)..(25): SEQ ID NO: 5354; WAN024F9C_at; Start 200; Stop 224
cgcttaaccagattactagcaacag

SEQ ID NO: 197042 - DNA, 25 bp, Artificial
  probe
  misc_feature (1)..(25): SEQ ID NO: 5354; WAN024F9C_at; Start 132; Stop 156
gacgaacaaacttagcccgcttatc

SEQ ID NO: 197043 - DNA, 25 bp, Artificial
  probe
  misc_feature (1)..(25): SEQ ID NO: 5354; WAN024F9C_at; Start 62; Stop 86
catcaactgcttgtctatgcgttca

SEQ ID NO: 197044 - DNA, 25 bp, Artificial
  probe
  misc_feature (1)..(25): SEQ ID NO: 5354; WAN024F9C_at; Start 104; Stop 128
tgcatctgagaacgtgctttgtccg

SEQ ID NO: 197045 - DNA, 25 bp, Artificial
  probe
  misc_feature (1)..(25): SEQ ID NO: 5354; WAN024F9C_at; Start 326; Stop 350
cccataaattcaatgccgcaacgtt

SEQ ID NO: 197046 - DNA, 25 bp, Artificial
  probe
  misc_feature (1)..(25): SEQ ID NO: 5354; WAN024F9C_at; Start 252; Stop 276
tatctttaatcaagaccaagtcttg

SEQ ID NO: 197047 - DNA, 25 bp, Artificial
  probe
  misc_feature (1)..(25): SEQ ID NO: 5354; WAN024F9C_at; Start 48; Stop 72
tcatcaatgtcttccatcaactgct

SEQ ID NO: 197048 - DNA, 25 bp, Artificial
  probe
  misc_feature (1)..(25): SEQ ID NO: 5354; WAN024F9C_at; Start 379; Stop 403
ttgatgaccaaaacgcttaaagact

SEQ ID NO: 197049 - DNA, 25 bp, Artificial
  probe
  misc_feature (1)..(25): SEQ ID NO: 5354; WAN024F9C_at; Start 265; Stop 289
gaccaagtcttggtttttctcgcga

SEQ ID NO: 197050 - DNA, 25 bp, Artificial
  probe
  misc_feature (1)..(25): SEQ ID NO: 5354; WAN024F9C_at; Start 316; Stop 340
ttgcggcccacccataaattcaatg

SEQ ID NO: 197051 - DNA, 25 bp, Artificial
  probe
  misc_feature (1)..(25): SEQ ID NO: 5354; WAN024F9C_at; Start 350; Stop 374
ttggcttccttttgcaccatcaggt

SEQ ID NO: 197052 - DNA, 25 bp, Artificial
  probe
  misc_feature (1)..(25): SEQ ID NO: 5354; WAN024F9C_at; Start 125; Stop 149
tccgtcagacgaacaaacttagccc

SEQ ID NO: 197053 - DNA, 25 bp, Artificial
  probe
  misc_feature (1)..(25): SEQ ID NO: 5354; WAN024F9C_at; Start 16; Stop 40
cgagaactttctcaaaaatcagtaa

SEQ ID NO: 197054 - DNA, 25 bp, Artificial
  probe
  misc_feature (1)..(25): SEQ ID NO: 5354; WAN024F9C_at; Start 226; Stop 250
cttggtaatattgagttcctgctcg

SEQ ID NO: 197055 - DNA, 25 bp, Artificial
  probe
  misc_feature (1)..(25): SEQ ID NO: 5354; WAN024F9C_at; Start 144; Stop 168
tagcccgcttatcaacaggactcgc

SEQ ID NO: 197056 - DNA, 25 bp, Artificial
  probe
  misc_feature (1)..(25): SEQ ID NO: 5354; WAN024F9C_at; Start 288; Stop 312
gattatccaaaaaacgcacaacctg

SEQ ID NO: 197057 - DNA, 25 bp, Artificial
  probe
  misc_feature (1)..(25): SEQ ID NO: 5354; WAN024F9C_at; Start 2; Stop 26
tgcctgtagttgaccgagaactttc

SEQ ID NO: 197058 - DNA, 25 bp, Artificial
  probe
  misc_feature (1)..(25): SEQ ID NO: 5354; WAN024F9C_at; Start 113; Stop 137
gaacgtgctttgtccgtcagacgaa

SEQ ID NO: 197059 - DNA, 25 bp, Artificial
  probe
  misc_feature (1)..(25): SEQ ID NO: 5354; WAN024F9C_at; Start 170; Stop 194
tccaattccaccaaaccattttgca

SEQ ID NO: 197060 - DNA, 25 bp, Artificial
  probe
  misc_feature (1)..(25): SEQ ID NO: 5354; WAN024F9C_at; Start 181; Stop 205
caaaccattttgcactatacgctta

SEQ ID NO: 197061 - DNA, 25 bp, Artificial
  probe
  misc_feature (1)..(25): SEQ ID NO: 5354; WAN024F9C_at; Start 6; Stop 30
tgtagttgaccgagaactttctcaa

SEQ ID NO: 197062 - DNA, 25 bp, Artificial
  probe
  misc_feature (1)..(25): SEQ ID NO: 5354; WAN024F9C_at; Start 34; Stop 58
tcagtaattcatcttcatcaatgtc

SEQ ID NO: 197063 - DNA, 25 bp, Artificial
  probe
  misc_feature (1)..(25): SEQ ID NO: 5354; WAN024F9C_at; Start 191; Stop 215
tgcactatacgcttaaccagattac

SEQ ID NO: 197064 - DNA, 25 bp, Artificial
  probe
  misc_feature (1)..(25): SEQ ID NO: 5354; WAN024F9C_at; Start 344; Stop 368
caacgtttggcttccttttgcacca

SEQ ID NO: 197065 - DNA, 25 bp, Artificial
  probe
  misc_feature (1)..(25): SEQ ID NO: 5354; WAN024F9C_at; Start 335; Stop 359
tcaatgccgcaacgtttggcttcct

SEQ ID NO: 197066 - DNA, 25 bp, Artificial
  probe
  misc_feature (1)..(25): SEQ ID NO: 5354; WAN024F9C_at; Start 139; Stop 163
aaacttagcccgcttatcaacagga

SEQ ID NO: 197067 - DNA, 25 bp, Artificial
  probe
  misc_feature (1)..(25): SEQ ID NO: 5354; WAN024F9C_at; Start 85; Stop 109
caaaaaagccttaacctgttgcatc

SEQ ID NO: 197068 - DNA, 25 bp, Artificial
  probe
  misc_feature (1)..(25): SEQ ID NO: 2614; WAN024F9D_at; Start 373; Stop 397
gaagatgaattactgatttttgaga

SEQ ID NO: 197069 - DNA, 25 bp, Artificial
  probe
  misc_feature (1)..(25): SEQ ID NO: 2614; WAN024F9D_at; Start 258; Stop 282
tcctgttgataagcgggctaagttt

SEQ ID NO: 197070 - DNA, 25 bp, Artificial
  probe
  misc_feature (1)..(25): SEQ ID NO: 2614; WAN024F9D_at; Start 58; Stop 82
caaaaggaagccaaacgttgcggca

SEQ ID NO: 197071 - DNA, 25 bp, Artificial
  probe
  misc_feature (1)..(25): SEQ ID NO: 2614; WAN024F9D_at; Start 400; Stop 424
gttctcggtcaactacaggcaaaat

SEQ ID NO: 197072 - DNA, 25 bp, Artificial
  probe
  misc_feature (1)..(25): SEQ ID NO: 2614; WAN024F9D_at; Start 408; Stop 432
tcaactacaggcaaaatatcaaggg

SEQ ID NO: 197073 - DNA, 25 bp, Artificial
  probe
  misc_feature (1)..(25): SEQ ID NO: 2614; WAN024F9D_at; Start 265; Stop 289
gataagcgggctaagtttgttcgtc

SEQ ID NO: 197074 - DNA, 25 bp, Artificial
  probe
  misc_feature (1)..(25): SEQ ID NO: 2614; WAN024F9D_at; Start 273; Stop 297
ggctaagtttgttcgtctgacggac

SEQ ID NO: 197075 - DNA, 25 bp, Artificial
  probe
  misc_feature (1)..(25): SEQ ID NO: 2614; WAN024F9D_at; Start 364; Stop 388
gacattgatgaagatgaattactga

SEQ ID NO: 197076 - DNA, 25 bp, Artificial
  probe
  misc_feature (1)..(25): SEQ ID NO: 2614; WAN024F9D_at; Start 81; Stop 105
cattgaatttatgggtgggccgcaa

SEQ ID NO: 197077 - DNA, 25 bp, Artificial
  probe
  misc_feature (1)..(25): SEQ ID NO: 2614; WAN024F9D_at; Start 197; Stop 221
ctgttgctagtaatctggttaagcg

SEQ ID NO: 197078 - DNA, 25 bp, Artificial
  probe
  misc_feature (1)..(25): SEQ ID NO: 2614; WAN024F9D_at; Start 129; Stop 153
taatcgcgagaaaaaccaagacttg

SEQ ID NO: 197079 - DNA, 25 bp, Artificial
  probe
  misc_feature (1)..(25): SEQ ID NO: 2614; WAN024F9D_at; Start 126; Stop 150
ggataatcgcgagaaaaaccaagac

SEQ ID NO: 197080 - DNA, 25 bp, Artificial
  probe
  misc_feature (1)..(25): SEQ ID NO: 2614; WAN024F9D_at; Start 148; Stop 172
gacttggtcttgattaaagatatcg

SEQ ID NO: 197081 - DNA, 25 bp, Artificial
  probe
  misc_feature (1)..(25): SEQ ID NO: 2614; WAN024F9D_at; Start 227; Stop 251
tgcaaaatggtttggtggaattgga

SEQ ID NO: 197082 - DNA, 25 bp, Artificial
  probe
  misc_feature (1)..(25): SEQ ID NO: 2614; WAN024F9D_at; Start 342; Stop 366
catagacaagcagttgatggaagac

SEQ ID NO: 197083 - DNA, 25 bp, Artificial
  probe
  misc_feature (1)..(25): SEQ ID NO: 2614; WAN024F9D_at; Start 331; Stop 355
ttttttgaacgcatagacaagcagt

SEQ ID NO: 197084 - DNA, 25 bp, Artificial
  probe
  misc_feature (1)..(25): SEQ ID NO: 2614; WAN024F9D_at; Start 348; Stop 372
caagcagttgatggaagacattgat

SEQ ID NO: 197085 - DNA, 25 bp, Artificial
  probe
  misc_feature (1)..(25): SEQ ID NO: 2614; WAN024F9D_at; Start 132; Stop 156
tcgcgagaaaaaccaagacttggtc

SEQ ID NO: 197086 - DNA, 25 bp, Artificial
  probe
  misc_feature (1)..(25): SEQ ID NO: 2614; WAN024F9D_at; Start 415; Stop 439
caggcaaaatatcaagggaatagga

SEQ ID NO: 197087 - DNA, 25 bp, Artificial
  probe
  misc_feature (1)..(25): SEQ ID NO: 2614; WAN024F9D_at; Start 64; Stop 88
gaagccaaacgttgcggcattgaat

SEQ ID NO: 197088 - DNA, 25 bp, Artificial
  probe
  misc_feature (1)..(25): SEQ ID NO: 2614; WAN024F9D_at; Start 352; Stop 376
cagttgatggaagacattgatgaag

SEQ ID NO: 197089 - DNA, 25 bp, Artificial
  probe
  misc_feature (1)..(25): SEQ ID NO: 2614; WAN024F9D_at; Start 422; Stop 446
aatatcaagggaataggaggagaga

SEQ ID NO: 197090 - DNA, 25 bp, Artificial
  probe
  misc_feature (1)..(25): SEQ ID NO: 2614; WAN024F9D_at; Start 244; Stop 268
gaattggaggcgagtcctgttgata

SEQ ID NO: 197091 - DNA, 25 bp, Artificial
  probe
  misc_feature (1)..(25): SEQ ID NO: 2614; WAN024F9D_at; Start 53; Stop 77
tggtgcaaaaggaagccaaacgttg

SEQ ID NO: 197092 - DNA, 25 bp, Artificial
  probe
  misc_feature (1)..(25): SEQ ID NO: 2614; WAN024F9D_at; Start 94; Stop 118
ggtgggccgcaaggtcaggttgtgc

SEQ ID NO: 197093 - DNA, 25 bp, Artificial
  probe
  misc_feature (1)..(25): SEQ ID NO: 2614; WAN024F9D_at; Start 47; Stop 71
acctgatggtgcaaaaggaagccaa

SEQ ID NO: 197094 - DNA, 25 bp, Artificial
  probe
  misc_feature (1)..(25): SEQ ID NO: 2614; WAN024F9D_at; Start 216; Stop 240
taagcgtatagtgcaaaatggtttg

SEQ ID NO: 197095 - DNA, 25 bp, Artificial
  probe
  misc_feature (1)..(25): SEQ ID NO: 2614; WAN024F9D_at; Start 278; Stop 302
agtttgttcgtctgacggacaaagc

SEQ ID NO: 197096 - DNA, 25 bp, Artificial
  probe
  misc_feature (1)..(25): SEQ ID NO: 2614; WAN024F9D_at; Start 10; Stop 34
ccgatgttagtctttaagcgttttg

SEQ ID NO: 197097 - DNA, 25 bp, Artificial
  probe
  misc_feature (1)..(25): SEQ ID NO: 2614; WAN024F9D_at; Start 207; Stop 231
taatctggttaagcgtatagtgcaa

SEQ ID NO: 197098 - DNA, 25 bp, Artificial
  probe
  misc_feature (1)..(25): SEQ ID NO: 2614; WAN024F9D_at; Start 71; Stop 95
aacgttgcggcattgaatttatggg

SEQ ID NO: 197099 - DNA, 25 bp, Artificial
  probe
  misc_feature (1)..(25): SEQ ID NO: 2614; WAN024F9D_at; Start 337; Stop 361
gaacgcatagacaagcagttgatgg

SEQ ID NO: 197100 - DNA, 25 bp, Artificial
  probe
  misc_feature (1)..(25): SEQ ID NO: 2614; WAN024F9D_at; Start 18; Stop 42
agtctttaagcgttttggtcatcaa

SEQ ID NO: 197101 - DNA, 25 bp, Artificial
  probe
  misc_feature (1)..(25): SEQ ID NO: 2614; WAN024F9D_at; Start 254; Stop 278
cgagtcctgttgataagcgggctaa

SEQ ID NO: 197102 - DNA, 25 bp, Artificial
  probe
  misc_feature (1)..(25): SEQ ID NO: 3766; WAN024F9E_at; Start 12; Stop 36
tcagctggatagagcattcgccttc

SEQ ID NO: 197103 - DNA, 25 bp, Artificial
  probe
  misc_feature (1)..(25): SEQ ID NO: 3766; WAN024F9E_at; Start 37; Stop 61
taagcgaacggtcgcaggttcgaat

SEQ ID NO: 197104 - DNA, 25 bp, Artificial
  probe
  misc_feature (1)..(25): SEQ ID NO: 3766; WAN024F9E_at; Start 2; Stop 26
gtctcatagctcagctggatagagc

SEQ ID NO: 197105 - DNA, 25 bp, Artificial
  probe
  misc_feature (1)..(25): SEQ ID NO: 3766; WAN024F9E_at; Start 21; Stop 45
tagagcattcgccttctaagcgaac

SEQ ID NO: 197106 - DNA, 25 bp, Artificial
  probe
  misc_feature (1)..(25): SEQ ID NO: 3766; WAN024F9E_at; Start 36; Stop 60
ctaagcgaacggtcgcaggttcgaa

SEQ ID NO: 197107 - DNA, 25 bp, Artificial
  probe
  misc_feature (1)..(25): SEQ ID NO: 3766; WAN024F9E_at; Start 14; Stop 38
agctggatagagcattcgccttcta

SEQ ID NO: 197108 - DNA, 25 bp, Artificial
  probe
  misc_feature (1)..(25): SEQ ID NO: 3766; WAN024F9E_at; Start 5; Stop 29
tcatagctcagctggatagagcatt

SEQ ID NO: 197109 - DNA, 25 bp, Artificial
  probe
  misc_feature (1)..(25): SEQ ID NO: 3766; WAN024F9E_at; Start 6; Stop 30
catagctcagctggatagagcattc

SEQ ID NO: 197110 - DNA, 25 bp, Artificial
  probe
  misc_feature (1)..(25): SEQ ID NO: 3766; WAN024F9E_at; Start 31; Stop 55
gccttctaagcgaacggtcgcaggt

SEQ ID NO: 197111 - DNA, 25 bp, Artificial
  probe
  misc_feature (1)..(25): SEQ ID NO: 3766; WAN024F9E_at; Start 22; Stop 46
agagcattcgccttctaagcgaacg

SEQ ID NO: 197112 - DNA, 25 bp, Artificial
  probe
  misc_feature (1)..(25): SEQ ID NO: 3766; WAN024F9E_at; Start 24; Stop 48
agcattcgccttctaagcgaacggt

SEQ ID NO: 197113 - DNA, 25 bp, Artificial
  probe
  misc_feature (1)..(25): SEQ ID NO: 3766; WAN024F9E_at; Start 26; Stop 50
cattcgccttctaagcgaacggtcg

SEQ ID NO: 197114 - DNA, 25 bp, Artificial
  probe
  misc_feature (1)..(25): SEQ ID NO: 3766; WAN024F9E_at; Start 27; Stop 51
attcgccttctaagcgaacggtcgc

SEQ ID NO: 197115 - DNA, 25 bp, Artificial
  probe
  misc_feature (1)..(25): SEQ ID NO: 3766; WAN024F9E_at; Start 32; Stop 56
ccttctaagcgaacggtcgcaggtt

SEQ ID NO: 197116 - DNA, 25 bp, Artificial
  probe
  misc_feature (1)..(25): SEQ ID NO: 3766; WAN024F9E_at; Start 23; Stop 47
gagcattcgccttctaagcgaacgg

SEQ ID NO: 197117 - DNA, 25 bp, Artificial
  probe
  misc_feature (1)..(25): SEQ ID NO: 3766; WAN024F9E_at; Start 3; Stop 27
tctcatagctcagctggatagagca

SEQ ID NO: 197118 - DNA, 25 bp, Artificial
  probe
  misc_feature (1)..(25): SEQ ID NO: 3766; WAN024F9E_at; Start 10; Stop 34
gctcagctggatagagcattcgcct

SEQ ID NO: 197119 - DNA, 25 bp, Artificial
  probe
  misc_feature (1)..(25): SEQ ID NO: 3766; WAN024F9E_at; Start 28; Stop 52
ttcgccttctaagcgaacggtcgca

SEQ ID NO: 197120 - DNA, 25 bp, Artificial
  probe
  misc_feature (1)..(25): SEQ ID NO: 3766; WAN024F9E_at; Start 1; Stop 25
ggtctcatagctcagctggatagag

SEQ ID NO: 197121 - DNA, 25 bp, Artificial
  probe
  misc_feature (1)..(25): SEQ ID NO: 3766; WAN024F9E_at; Start 18; Stop 42
ggatagagcattcgccttctaagcg

SEQ ID NO: 197122 - DNA, 25 bp, Artificial
  probe
  misc_feature (1)..(25): SEQ ID NO: 3766; WAN024F9E_at; Start 9; Stop 33
agctcagctggatagagcattcgcc

SEQ ID NO: 197123 - DNA, 25 bp, Artificial
  probe
  misc_feature (1)..(25): SEQ ID NO: 3766; WAN024F9E_at; Start 17; Stop 41
tggatagagcattcgccttctaagc

SEQ ID NO: 197124 - DNA, 25 bp, Artificial
  probe
  misc_feature (1)..(25): SEQ ID NO: 3766; WAN024F9E_at; Start 15; Stop 39
gctggatagagcattcgccttctaa

SEQ ID NO: 197125 - DNA, 25 bp, Artificial
  probe
  misc_feature (1)..(25): SEQ ID NO: 3766; WAN024F9E_at; Start 25; Stop 49
gcattcgccttctaagcgaacggtc

SEQ ID NO: 197126 - DNA, 25 bp, Artificial
  probe
  misc_feature (1)..(25): SEQ ID NO: 3766; WAN024F9E_at; Start 33; Stop 57
cttctaagcgaacggtcgcaggttc

SEQ ID NO: 197127 - DNA, 25 bp, Artificial
  probe
  misc_feature (1)..(25): SEQ ID NO: 3766; WAN024F9E_at; Start 8; Stop 32
tagctcagctggatagagcattcgc

SEQ ID NO: 197128 - DNA, 25 bp, Artificial
  probe
  misc_feature (1)..(25): SEQ ID NO: 3766; WAN024F9E_at; Start 4; Stop 28
ctcatagctcagctggatagagcat

SEQ ID NO: 197129 - DNA, 25 bp, Artificial
  probe
  misc_feature (1)..(25): SEQ ID NO: 3766; WAN024F9E_at; Start 30; Stop 54
cgccttctaagcgaacggtcgcagg

SEQ ID NO: 197130 - DNA, 25 bp, Artificial
  probe
  misc_feature (1)..(25): SEQ ID NO: 3766; WAN024F9E_at; Start 7; Stop 31
atagctcagctggatagagcattcg

SEQ ID NO: 197131 - DNA, 25 bp, Artificial
  probe
  misc_feature (1)..(25): SEQ ID NO: 3766; WAN024F9E_at; Start 11; Stop 35
ctcagctggatagagcattcgcctt

SEQ ID NO: 197132 - DNA, 25 bp, Artificial
  probe
  misc_feature (1)..(25): SEQ ID NO: 3766; WAN024F9E_at; Start 16; Stop 40
ctggatagagcattcgccttctaag

SEQ ID NO: 197133 - DNA, 25 bp, Artificial
  probe
  misc_feature (1)..(25): SEQ ID NO: 3766; WAN024F9E_at; Start 13; Stop 37
cagctggatagagcattcgccttct

SEQ ID NO: 197134 - DNA, 25 bp, Artificial
  probe
  misc_feature (1)..(25): SEQ ID NO: 3766; WAN024F9E_at; Start 35; Stop 59
tctaagcgaacggtcgcaggttcga

SEQ ID NO: 197135 - DNA, 25 bp, Artificial
  probe
  misc_feature (1)..(25): SEQ ID NO: 3766; WAN024F9E_at; Start 19; Stop 43
gatagagcattcgccttctaagcga

SEQ ID NO: 197136 - DNA, 25 bp, Artificial
  probe
  misc_feature (1)..(25): SEQ ID NO: 3683; WAN024F9F_at; Start 27; Stop 51
gctggactcaaaatccagtgtccgc

SEQ ID NO: 197137 - DNA, 25 bp, Artificial
  probe
  misc_feature (1)..(25): SEQ ID NO: 3683; WAN024F9F_at; Start 30; Stop 54
ggactcaaaatccagtgtccgcaag

SEQ ID NO: 197138 - DNA, 25 bp, Artificial
  probe
  misc_feature (1)..(25): SEQ ID NO: 3683; WAN024F9F_at; Start 36; Stop 60
aaaatccagtgtccgcaaggacgtg

SEQ ID NO: 197139 - DNA, 25 bp, Artificial
  probe
  misc_feature (1)..(25): SEQ ID NO: 3683; WAN024F9F_at; Start 45; Stop 69
tgtccgcaaggacgtgccggttcga

SEQ ID NO: 197140 - DNA, 25 bp, Artificial
  probe
  misc_feature (1)..(25): SEQ ID NO: 3683; WAN024F9F_at; Start 28; Stop 52
ctggactcaaaatccagtgtccgca

SEQ ID NO: 197141 - DNA, 25 bp, Artificial
  probe
  misc_feature (1)..(25): SEQ ID NO: 3683; WAN024F9F_at; Start 40; Stop 64
tccagtgtccgcaaggacgtgccgg

SEQ ID NO: 197142 - DNA, 25 bp, Artificial
  probe
  misc_feature (1)..(25): SEQ ID NO: 3683; WAN024F9F_at; Start 31; Stop 55
gactcaaaatccagtgtccgcaagg

SEQ ID NO: 197143 - DNA, 25 bp, Artificial
  probe
  misc_feature (1)..(25): SEQ ID NO: 3683; WAN024F9F_at; Start 16; Stop 40
ttggcagacgcgctggactcaaaat

SEQ ID NO: 197144 - DNA, 25 bp, Artificial
  probe
  misc_feature (1)..(25): SEQ ID NO: 3683; WAN024F9F_at; Start 33; Stop 57
ctcaaaatccagtgtccgcaaggac

SEQ ID NO: 197145 - DNA, 25 bp, Artificial
  probe
  misc_feature (1)..(25): SEQ ID NO: 3683; WAN024F9F_at; Start 25; Stop 49
gcgctggactcaaaatccagtgtcc

SEQ ID NO: 197146 - DNA, 25 bp, Artificial
  probe
  misc_feature (1)..(25): SEQ ID NO: 3683; WAN024F9F_at; Start 22; Stop 46
gacgcgctggactcaaaatccagtg

SEQ ID NO: 197147 - DNA, 25 bp, Artificial
  probe
  misc_feature (1)..(25): SEQ ID NO: 3683; WAN024F9F_at; Start 47; Stop 71
tccgcaaggacgtgccggttcgacc

SEQ ID NO: 197148 - DNA, 25 bp, Artificial
  probe
  misc_feature (1)..(25): SEQ ID NO: 3683; WAN024F9F_at; Start 42; Stop 66
cagtgtccgcaaggacgtgccggtt

SEQ ID NO: 197149 - DNA, 25 bp, Artificial
  probe
  misc_feature (1)..(25): SEQ ID NO: 3683; WAN024F9F_at; Start 34; Stop 58
tcaaaatccagtgtccgcaaggacg

SEQ ID NO: 197150 - DNA, 25 bp, Artificial
  probe
  misc_feature (1)..(25): SEQ ID NO: 3683; WAN024F9F_at; Start 29; Stop 53
tggactcaaaatccagtgtccgcaa

SEQ ID NO: 197151 - DNA, 25 bp, Artificial
  probe
  misc_feature (1)..(25): SEQ ID NO: 3683; WAN024F9F_at; Start 32; Stop 56
actcaaaatccagtgtccgcaagga

SEQ ID NO: 197152 - DNA, 25 bp, Artificial
  probe
  misc_feature (1)..(25): SEQ ID NO: 3683; WAN024F9F_at; Start 14; Stop 38
aattggcagacgcgctggactcaaa

SEQ ID NO: 197153 - DNA, 25 bp, Artificial
  probe
  misc_feature (1)..(25): SEQ ID NO: 3683; WAN024F9F_at; Start 26; Stop 50
cgctggactcaaaatccagtgtccg

SEQ ID NO: 197154 - DNA, 25 bp, Artificial
  probe
  misc_feature (1)..(25): SEQ ID NO: 3683; WAN024F9F_at; Start 24; Stop 48
cgcgctggactcaaaatccagtgtc

SEQ ID NO: 197155 - DNA, 25 bp, Artificial
  probe
  misc_feature (1)..(25): SEQ ID NO: 3683; WAN024F9F_at; Start 21; Stop 45
agacgcgctggactcaaaatccagt

SEQ ID NO: 197156 - DNA, 25 bp, Artificial
  probe
  misc_feature (1)..(25): SEQ ID NO: 3683; WAN024F9F_at; Start 35; Stop 59
caaaatccagtgtccgcaaggacgt

SEQ ID NO: 197157 - DNA, 25 bp, Artificial
  probe
  misc_feature (1)..(25): SEQ ID NO: 3683; WAN024F9F_at; Start 46; Stop 70
gtccgcaaggacgtgccggttcgac

SEQ ID NO: 197158 - DNA, 25 bp, Artificial
  probe
  misc_feature (1)..(25): SEQ ID NO: 3683; WAN024F9F_at; Start 20; Stop 44
cagacgcgctggactcaaaatccag

SEQ ID NO: 197159 - DNA, 25 bp, Artificial
  probe
  misc_feature (1)..(25): SEQ ID NO: 3683; WAN024F9F_at; Start 23; Stop 47
acgcgctggactcaaaatccagtgt

SEQ ID NO: 197160 - DNA, 25 bp, Artificial
  probe
  misc_feature (1)..(25): SEQ ID NO: 3683; WAN024F9F_at; Start 13; Stop 37
gaattggcagacgcgctggactcaa

SEQ ID NO: 197161 - DNA, 25 bp, Artificial
  probe
  misc_feature (1)..(25): SEQ ID NO: 3683; WAN024F9F_at; Start 37; Stop 61
aaatccagtgtccgcaaggacgtgc

SEQ ID NO: 197162 - DNA, 25 bp, Artificial
  probe
  misc_feature (1)..(25): SEQ ID NO: 3683; WAN024F9F_at; Start 19; Stop 43
gcagacgcgctggactcaaaatcca

SEQ ID NO: 197163 - DNA, 25 bp, Artificial
  probe
  misc_feature (1)..(25): SEQ ID NO: 3683; WAN024F9F_at; Start 17; Stop 41
tggcagacgcgctggactcaaaatc

SEQ ID NO: 197164 - DNA, 25 bp, Artificial
  probe
  misc_feature (1)..(25): SEQ ID NO: 3683; WAN024F9F_at; Start 41; Stop 65
ccagtgtccgcaaggacgtgccggt

SEQ ID NO: 197165 - DNA, 25 bp, Artificial
  probe
  misc_feature (1)..(25): SEQ ID NO: 3683; WAN024F9F_at; Start 44; Stop 68
gtgtccgcaaggacgtgccggttcg

SEQ ID NO: 197166 - DNA, 25 bp, Artificial
  probe
  misc_feature (1)..(25): SEQ ID NO: 3683; WAN024F9F_at; Start 12; Stop 36
ggaattggcagacgcgctggactca

SEQ ID NO: 197167 - DNA, 25 bp, Artificial
  probe
  misc_feature (1)..(25): SEQ ID NO: 3683; WAN024F9F_at; Start 43; Stop 67
agtgtccgcaaggacgtgccggttc

SEQ ID NO: 197168 - DNA, 25 bp, Artificial
  probe
  misc_feature (1)..(25): SEQ ID NO: 3683; WAN024F9F_at; Start 18; Stop 42
ggcagacgcgctggactcaaaatcc

SEQ ID NO: 197169 - DNA, 25 bp, Artificial
  probe
  misc_feature (1)..(25): SEQ ID NO: 3683; WAN024F9F_at; Start 39; Stop 63
atccagtgtccgcaaggacgtgccg

SEQ ID NO: 197170 - DNA, 25 bp, Artificial
  probe
  misc_feature (1)..(25): SEQ ID NO: 4011; WAN024F9G_at; Start 159; Stop 183
tctagacctgtcagaaattctcttc

SEQ ID NO: 197171 - DNA, 25 bp, Artificial
  probe
  misc_feature (1)..(25): SEQ ID NO: 4011; WAN024F9G_at; Start 128; Stop 152
tgactttttacaaggggacaggtga

SEQ ID NO: 197172 - DNA, 25 bp, Artificial
  probe
  misc_feature (1)..(25): SEQ ID NO: 4011; WAN024F9G_at; Start 100; Stop 124
ctcttgcaagagtcaaaggctccga

SEQ ID NO: 197173 - DNA, 25 bp, Artificial
  probe
  misc_feature (1)..(25): SEQ ID NO: 4011; WAN024F9G_at; Start 188; Stop 212
aaacagaagggagcaagatctacgc

SEQ ID NO: 197174 - DNA, 25 bp, Artificial
  probe
  misc_feature (1)..(25): SEQ ID NO: 4011; WAN024F9G_at; Start 183; Stop 207
ctttgaaacagaagggagcaagatc

SEQ ID NO: 197175 - DNA, 25 bp, Artificial
  probe
  misc_feature (1)..(25): SEQ ID NO: 4011; WAN024F9G_at; Start 6; Stop 30
gaagttacgaattgagattgacggc

SEQ ID NO: 197176 - DNA, 25 bp, Artificial
  probe
  misc_feature (1)..(25): SEQ ID NO: 4011; WAN024F9G_at; Start 427; Stop 451
gaaaatctaagaaacatgaggtaac

SEQ ID NO: 197177 - DNA, 25 bp, Artificial
  probe
  misc_feature (1)..(25): SEQ ID NO: 4011; WAN024F9G_at; Start 210; Stop 234
cgctcataaccagaaggaagcttat

SEQ ID NO: 197178 - DNA, 25 bp, Artificial
  probe
  misc_feature (1)..(25): SEQ ID NO: 4011; WAN024F9G_at; Start 234; Stop 258
tgaggttcgcctcaagctctatgag

SEQ ID NO: 197179 - DNA, 25 bp, Artificial
  probe
  misc_feature (1)..(25): SEQ ID NO: 4011; WAN024F9G_at; Start 148; Stop 172
ggtgaatattatctagacctgtcag

SEQ ID NO: 197180 - DNA, 25 bp, Artificial
  probe
  misc_feature (1)..(25): SEQ ID NO: 4011; WAN024F9G_at; Start 170; Stop 194
cagaaattctcttctttgaaacaga

SEQ ID NO: 197181 - DNA, 25 bp, Artificial
  probe
  misc_feature (1)..(25): SEQ ID NO: 4011; WAN024F9G_at; Start 219; Stop 243
ccagaaggaagcttatgaggttcgc

SEQ ID NO: 197182 - DNA, 25 bp, Artificial
  probe
  misc_feature (1)..(25): SEQ ID NO: 4011; WAN024F9G_at; Start 25; Stop 49
gacggcaatttagaggagactgaaa

SEQ ID NO: 197183 - DNA, 25 bp, Artificial
  probe
  misc_feature (1)..(25): SEQ ID NO: 4011; WAN024F9G_at; Start 104; Stop 128
tgcaagagtcaaaggctccgaggtt

SEQ ID NO: 197184 - DNA, 25 bp, Artificial
  probe
  misc_feature (1)..(25): SEQ ID NO: 4011; WAN024F9G_at; Start 353; Stop 377
gaacgggcaccatttccttttatca

SEQ ID NO: 197185 - DNA, 25 bp, Artificial
  probe
  misc_feature (1)..(25): SEQ ID NO: 4011; WAN024F9G_at; Start 193; Stop 217
gaagggagcaagatctacgctcata

SEQ ID NO: 197186 - DNA, 25 bp, Artificial
  probe
  misc_feature (1)..(25): SEQ ID NO: 4011; WAN024F9G_at; Start 66; Stop 90
cactttgacagatgaaattgcagac

SEQ ID NO: 197187 - DNA, 25 bp, Artificial
  probe
  misc_feature (1)..(25): SEQ ID NO: 4011; WAN024F9G_at; Start 142; Stop 166
gggacaggtgaatattatctagacc

SEQ ID NO: 197188 - DNA, 25 bp, Artificial
  probe
  misc_feature (1)..(25): SEQ ID NO: 4011; WAN024F9G_at; Start 341; Stop 365
agtccttttcaggaacgggcaccat

SEQ ID NO: 197189 - DNA, 25 bp, Artificial
  probe
  misc_feature (1)..(25): SEQ ID NO: 4011; WAN024F9G_at; Start 222; Stop 246
gaaggaagcttatgaggttcgcctc

SEQ ID NO: 197190 - DNA, 25 bp, Artificial
  probe
  misc_feature (1)..(25): SEQ ID NO: 4011; WAN024F9G_at; Start 63; Stop 87
ccccactttgacagatgaaattgca

SEQ ID NO: 197191 - DNA, 25 bp, Artificial
  probe
  misc_feature (1)..(25): SEQ ID NO: 4011; WAN024F9G_at; Start 109; Stop 133
gagtcaaaggctccgaggttgactt

SEQ ID NO: 197192 - DNA, 25 bp, Artificial
  probe
  misc_feature (1)..(25): SEQ ID NO: 4011; WAN024F9G_at; Start 202; Stop 226
aagatctacgctcataaccagaagg

SEQ ID NO: 197193 - DNA, 25 bp, Artificial
  probe
  misc_feature (1)..(25): SEQ ID NO: 4011; WAN024F9G_at; Start 226; Stop 250
gaagcttatgaggttcgcctcaagc

SEQ ID NO: 197194 - DNA, 25 bp, Artificial
  probe
  misc_feature (1)..(25): SEQ ID NO: 4011; WAN024F9G_at; Start 337; Stop 361
gacaagtccttttcaggaacgggca

SEQ ID NO: 197195 - DNA, 25 bp, Artificial
  probe
  misc_feature (1)..(25): SEQ ID NO: 4011; WAN024F9G_at; Start 33; Stop 57
tttagaggagactgaaattgtcatc

SEQ ID NO: 197196 - DNA, 25 bp, Artificial
  probe
  misc_feature (1)..(25): SEQ ID NO: 4011; WAN024F9G_at; Start 41; Stop 65
agactgaaattgtcatcaagacccc

SEQ ID NO: 197197 - DNA, 25 bp, Artificial
  probe
  misc_feature (1)..(25): SEQ ID NO: 4011; WAN024F9G_at; Start 420; Stop 444
cctaaaagaaaatctaagaaacatg

SEQ ID NO: 197198 - DNA, 25 bp, Artificial
  probe
  misc_feature (1)..(25): SEQ ID NO: 4011; WAN024F9G_at; Start 240; Stop 264
tcgcctcaagctctatgagttggag

SEQ ID NO: 197199 - DNA, 25 bp, Artificial
  probe
  misc_feature (1)..(25): SEQ ID NO: 4011; WAN024F9G_at; Start 206; Stop 230
tctacgctcataaccagaaggaagc

SEQ ID NO: 197200 - DNA, 25 bp, Artificial
  probe
  misc_feature (1)..(25): SEQ ID NO: 4011; WAN024F9G_at; Start 71; Stop 95
tgacagatgaaattgcagacttgca

SEQ ID NO: 197201 - DNA, 25 bp, Artificial
  probe
  misc_feature (1)..(25): SEQ ID NO: 4011; WAN024F9G_at; Start 404; Stop 428
ggcattaccaatccctcctaaaaga

SEQ ID NO: 197202 - DNA, 25 bp, Artificial
  probe
  misc_feature (1)..(25): SEQ ID NO: 4011; WAN024F9G_at; Start 74; Stop 98
cagatgaaattgcagacttgcaacg

SEQ ID NO: 197203 - DNA, 25 bp, Artificial
  probe
  misc_feature (1)..(25): SEQ ID NO: 4011; WAN024F9G_at; Start 21; Stop 45
gattgacggcaatttagaggagact

SEQ ID NO: 197204 - DNA, 25 bp, Artificial
  probe
  misc_feature (1)..(25): SEQ ID NO: 3750; WAN024F9H_at; Start 29; Stop 53
tgccttacaagcagagggtcagcgg

SEQ ID NO: 197205 - DNA, 25 bp, Artificial
  probe
  misc_feature (1)..(25): SEQ ID NO: 3750; WAN024F9H_at; Start 21; Stop 45
agagcatctgccttacaagcagagg

SEQ ID NO: 197206 - DNA, 25 bp, Artificial
  probe
  misc_feature (1)..(25): SEQ ID NO: 3750; WAN024F9H_at; Start 12; Stop 36
tcagctgggagagcatctgccttac

SEQ ID NO: 197207 - DNA, 25 bp, Artificial
  probe
  misc_feature (1)..(25): SEQ ID NO: 3750; WAN024F9H_at; Start 22; Stop 46
gagcatctgccttacaagcagaggg

SEQ ID NO: 197208 - DNA, 25 bp, Artificial
  probe
  misc_feature (1)..(25): SEQ ID NO: 3750; WAN024F9H_at; Start 20; Stop 44
gagagcatctgccttacaagcagag

SEQ ID NO: 197209 - DNA, 25 bp, Artificial
  probe
  misc_feature (1)..(25): SEQ ID NO: 3750; WAN024F9H_at; Start 33; Stop 57
ttacaagcagagggtcagcggttcg

SEQ ID NO: 197210 - DNA, 25 bp, Artificial
  probe
  misc_feature (1)..(25): SEQ ID NO: 3750; WAN024F9H_at; Start 25; Stop 49
catctgccttacaagcagagggtca

SEQ ID NO: 197211 - DNA, 25 bp, Artificial
  probe
  misc_feature (1)..(25): SEQ ID NO: 3750; WAN024F9H_at; Start 27; Stop 51
tctgccttacaagcagagggtcagc

SEQ ID NO: 197212 - DNA, 25 bp, Artificial
  probe
  misc_feature (1)..(25): SEQ ID NO: 3750; WAN024F9H_at; Start 17; Stop 41
tgggagagcatctgccttacaagca

SEQ ID NO: 197213 - DNA, 25 bp, Artificial
  probe
  misc_feature (1)..(25): SEQ ID NO: 3750; WAN024F9H_at; Start 30; Stop 54
gccttacaagcagagggtcagcggt

SEQ ID NO: 197214 - DNA, 25 bp, Artificial
  probe
  misc_feature (1)..(25): SEQ ID NO: 3750; WAN024F9H_at; Start 31; Stop 55
ccttacaagcagagggtcagcggtt

SEQ ID NO: 197215 - DNA, 25 bp, Artificial
  probe
  misc_feature (1)..(25): SEQ ID NO: 3750; WAN024F9H_at; Start 32; Stop 56
cttacaagcagagggtcagcggttc

SEQ ID NO: 197216 - DNA, 25 bp, Artificial
  probe
  misc_feature (1)..(25): SEQ ID NO: 3750; WAN024F9H_at; Start 24; Stop 48
gcatctgccttacaagcagagggtc

SEQ ID NO: 197217 - DNA, 25 bp, Artificial
  probe
  misc_feature (1)..(25): SEQ ID NO: 3750; WAN024F9H_at; Start 14; Stop 38
agctgggagagcatctgccttacaa

SEQ ID NO: 197218 - DNA, 25 bp, Artificial
  probe
  misc_feature (1)..(25): SEQ ID NO: 3750; WAN024F9H_at; Start 23; Stop 47
agcatctgccttacaagcagagggt

SEQ ID NO: 197219 - DNA, 25 bp, Artificial
  probe
  misc_feature (1)..(25): SEQ ID NO: 3750; WAN024F9H_at; Start 26; Stop 50
atctgccttacaagcagagggtcag

SEQ ID NO: 197220 - DNA, 25 bp, Artificial
  probe
  misc_feature (1)..(25): SEQ ID NO: 3750; WAN024F9H_at; Start 15; Stop 39
gctgggagagcatctgccttacaag

SEQ ID NO: 197221 - DNA, 25 bp, Artificial
  probe
  misc_feature (1)..(25): SEQ ID NO: 3750; WAN024F9H_at; Start 28; Stop 52
ctgccttacaagcagagggtcagcg

SEQ ID NO: 197222 - DNA, 25 bp, Artificial
  probe
  misc_feature (1)..(25): SEQ ID NO: 3750; WAN024F9H_at; Start 18; Stop 42
gggagagcatctgccttacaagcag

SEQ ID NO: 197223 - DNA, 25 bp, Artificial
  probe
  misc_feature (1)..(25): SEQ ID NO: 3750; WAN024F9H_at; Start 34; Stop 58
tacaagcagagggtcagcggttcga

SEQ ID NO: 197224 - DNA, 25 bp, Artificial
  probe
  misc_feature (1)..(25): SEQ ID NO: 3750; WAN024F9H_at; Start 35; Stop 59
acaagcagagggtcagcggttcgat

SEQ ID NO: 197225 - DNA, 25 bp, Artificial
  probe
  misc_feature (1)..(25): SEQ ID NO: 3750; WAN024F9H_at; Start 13; Stop 37
cagctgggagagcatctgccttaca

SEQ ID NO: 197226 - DNA, 25 bp, Artificial
  probe
  misc_feature (1)..(25): SEQ ID NO: 3750; WAN024F9H_at; Start 19; Stop 43
ggagagcatctgccttacaagcaga

SEQ ID NO: 197227 - DNA, 25 bp, Artificial
  probe
  misc_feature (1)..(25): SEQ ID NO: 3750; WAN024F9H_at; Start 11; Stop 35
ctcagctgggagagcatctgcctta

SEQ ID NO: 197228 - DNA, 25 bp, Artificial
  probe
  misc_feature (1)..(25): SEQ ID NO: 3750; WAN024F9H_at; Start 16; Stop 40
ctgggagagcatctgccttacaagc

SEQ ID NO: 197229 - DNA, 25 bp, Artificial
  probe
  misc_feature (1)..(25): SEQ ID NO: 3765; WAN024F9I_at; Start 31; Stop 55
cctgtcacggcgaagatcgcgggtt

SEQ ID NO: 197230 - DNA, 25 bp, Artificial
  probe
  misc_feature (1)..(25): SEQ ID NO: 3765; WAN024F9I_at; Start 33; Stop 57
tgtcacggcgaagatcgcgggttcg

SEQ ID NO: 197231 - DNA, 25 bp, Artificial
  probe
  misc_feature (1)..(25): SEQ ID NO: 3765; WAN024F9I_at; Start 14; Stop 38
agcggttatcacgtcgccctgtcac

SEQ ID NO: 197232 - DNA, 25 bp, Artificial
  probe
  misc_feature (1)..(25): SEQ ID NO: 3765; WAN024F9I_at; Start 42; Stop 66
gaagatcgcgggttcgattcccgtc

SEQ ID NO: 197233 - DNA, 25 bp, Artificial
  probe
  misc_feature (1)..(25): SEQ ID NO: 3765; WAN024F9I_at; Start 19; Stop 43
ttatcacgtcgccctgtcacggcga

SEQ ID NO: 197234 - DNA, 25 bp, Artificial
  probe
  misc_feature (1)..(25): SEQ ID NO: 3765; WAN024F9I_at; Start 18; Stop 42
gttatcacgtcgccctgtcacggcg

SEQ ID NO: 197235 - DNA, 25 bp, Artificial
  probe
  misc_feature (1)..(25): SEQ ID NO: 3765; WAN024F9I_at; Start 15; Stop 39
gcggttatcacgtcgccctgtcacg

SEQ ID NO: 197236 - DNA, 25 bp, Artificial
  probe
  misc_feature (1)..(25): SEQ ID NO: 3765; WAN024F9I_at; Start 2; Stop 26
gtcccgtagtgtagcggttatcacg

SEQ ID NO: 197237 - DNA, 25 bp, Artificial
  probe
  misc_feature (1)..(25): SEQ ID NO: 3765; WAN024F9I_at; Start 39; Stop 63
ggcgaagatcgcgggttcgattccc

SEQ ID NO: 197238 - DNA, 25 bp, Artificial
  probe
  misc_feature (1)..(25): SEQ ID NO: 3765; WAN024F9I_at; Start 36; Stop 60
cacggcgaagatcgcgggttcgatt

SEQ ID NO: 197239 - DNA, 25 bp, Artificial
  probe
  misc_feature (1)..(25): SEQ ID NO: 3765; WAN024F9I_at; Start 24; Stop 48
acgtcgccctgtcacggcgaagatc

SEQ ID NO: 197240 - DNA, 25 bp, Artificial
  probe
  misc_feature (1)..(25): SEQ ID NO: 3765; WAN024F9I_at; Start 9; Stop 33
agtgtagcggttatcacgtcgccct

SEQ ID NO: 197241 - DNA, 25 bp, Artificial
  probe
  misc_feature (1)..(25): SEQ ID NO: 3765; WAN024F9I_at; Start 10; Stop 34
gtgtagcggttatcacgtcgccctg

SEQ ID NO: 197242 - DNA, 25 bp, Artificial
  probe
  misc_feature (1)..(25): SEQ ID NO: 3765; WAN024F9I_at; Start 6; Stop 30
cgtagtgtagcggttatcacgtcgc

SEQ ID NO: 197243 - DNA, 25 bp, Artificial
  probe
  misc_feature (1)..(25): SEQ ID NO: 3765; WAN024F9I_at; Start 3; Stop 27
tcccgtagtgtagcggttatcacgt

SEQ ID NO: 197244 - DNA, 25 bp, Artificial
  probe
  misc_feature (1)..(25): SEQ ID NO: 3765; WAN024F9I_at; Start 20; Stop 44
tatcacgtcgccctgtcacggcgaa

SEQ ID NO: 197245 - DNA, 25 bp, Artificial
  probe
  misc_feature (1)..(25): SEQ ID NO: 3765; WAN024F9I_at; Start 40; Stop 64
gcgaagatcgcgggttcgattcccg

SEQ ID NO: 197246 - DNA, 25 bp, Artificial
  probe
  misc_feature (1)..(25): SEQ ID NO: 3765; WAN024F9I_at; Start 12; Stop 36
gtagcggttatcacgtcgccctgtc

SEQ ID NO: 197247 - DNA, 25 bp, Artificial
  probe
  misc_feature (1)..(25): SEQ ID NO: 3765; WAN024F9I_at; Start 32; Stop 56
ctgtcacggcgaagatcgcgggttc

SEQ ID NO: 197248 - DNA, 25 bp, Artificial
  probe
  misc_feature (1)..(25): SEQ ID NO: 3765; WAN024F9I_at; Start 13; Stop 37
tagcggttatcacgtcgccctgtca

SEQ ID NO: 197249 - DNA, 25 bp, Artificial
  probe
  misc_feature (1)..(25): SEQ ID NO: 3765; WAN024F9I_at; Start 26; Stop 50
gtcgccctgtcacggcgaagatcgc

SEQ ID NO: 197250 - DNA, 25 bp, Artificial
  probe
  misc_feature (1)..(25): SEQ ID NO: 3765; WAN024F9I_at; Start 30; Stop 54
ccctgtcacggcgaagatcgcgggt

SEQ ID NO: 197251 - DNA, 25 bp, Artificial
  probe
  misc_feature (1)..(25): SEQ ID NO: 3765; WAN024F9I_at; Start 16; Stop 40
cggttatcacgtcgccctgtcacgg

SEQ ID NO: 197252 - DNA, 25 bp, Artificial
  probe
  misc_feature (1)..(25): SEQ ID NO: 3765; WAN024F9I_at; Start 7; Stop 31
gtagtgtagcggttatcacgtcgcc

SEQ ID NO: 197253 - DNA, 25 bp, Artificial
  probe
  misc_feature (1)..(25): SEQ ID NO: 3765; WAN024F9I_at; Start 11; Stop 35
tgtagcggttatcacgtcgccctgt

SEQ ID NO: 197254 - DNA, 25 bp, Artificial
  probe
  misc_feature (1)..(25): SEQ ID NO: 3765; WAN024F9I_at; Start 21; Stop 45
atcacgtcgccctgtcacggcgaag

SEQ ID NO: 197255 - DNA, 25 bp, Artificial
  probe
  misc_feature (1)..(25): SEQ ID NO: 3765; WAN024F9I_at; Start 23; Stop 47
cacgtcgccctgtcacggcgaagat

SEQ ID NO: 197256 - DNA, 25 bp, Artificial
  probe
  misc_feature (1)..(25): SEQ ID NO: 3765; WAN024F9I_at; Start 37; Stop 61
acggcgaagatcgcgggttcgattc

SEQ ID NO: 197257 - DNA, 25 bp, Artificial
  probe
  misc_feature (1)..(25): SEQ ID NO: 3765; WAN024F9I_at; Start 41; Stop 65
cgaagatcgcgggttcgattcccgt

SEQ ID NO: 197258 - DNA, 25 bp, Artificial
  probe
  misc_feature (1)..(25): SEQ ID NO: 3765; WAN024F9I_at; Start 25; Stop 49
cgtcgccctgtcacggcgaagatcg

SEQ ID NO: 197259 - DNA, 25 bp, Artificial
  probe
  misc_feature (1)..(25): SEQ ID NO: 3765; WAN024F9I_at; Start 1; Stop 25
ggtcccgtagtgtagcggttatcac

SEQ ID NO: 197260 - DNA, 25 bp, Artificial
  probe
  misc_feature (1)..(25): SEQ ID NO: 3765; WAN024F9I_at; Start 22; Stop 46
tcacgtcgccctgtcacggcgaaga

SEQ ID NO: 197261 - DNA, 25 bp, Artificial
  probe
  misc_feature (1)..(25): SEQ ID NO: 3765; WAN024F9I_at; Start 35; Stop 59
tcacggcgaagatcgcgggttcgat

SEQ ID NO: 197262 - DNA, 25 bp, Artificial
  probe
  misc_feature (1)..(25): SEQ ID NO: 3765; WAN024F9I_at; Start 8; Stop 32
tagtgtagcggttatcacgtcgccc

SEQ ID NO: 197263 - DNA, 25 bp, Artificial
  probe
  misc_feature (1)..(25): SEQ ID NO: 3695; WAN024F9J_at; Start 29; Stop 53
cagatttaggatctggcgcttaacg

SEQ ID NO: 197264 - DNA, 25 bp, Artificial
  probe
  misc_feature (1)..(25): SEQ ID NO: 3695; WAN024F9J_at; Start 35; Stop 59
taggatctggcgcttaacggcgtgg

SEQ ID NO: 197265 - DNA, 25 bp, Artificial
  probe
  misc_feature (1)..(25): SEQ ID NO: 3695; WAN024F9J_at; Start 33; Stop 57
tttaggatctggcgcttaacggcgt

SEQ ID NO: 197266 - DNA, 25 bp, Artificial
  probe
  misc_feature (1)..(25): SEQ ID NO: 3695; WAN024F9J_at; Start 15; Stop 39
attggcagacgcaccagatttagga

SEQ ID NO: 197267 - DNA, 25 bp, Artificial
  probe
  misc_feature (1)..(25): SEQ ID NO: 3695; WAN024F9J_at; Start 21; Stop 45
agacgcaccagatttaggatctggc

SEQ ID NO: 197268 - DNA, 25 bp, Artificial
  probe
  misc_feature (1)..(25): SEQ ID NO: 3695; WAN024F9J_at; Start 16; Stop 40
ttggcagacgcaccagatttaggat

SEQ ID NO: 197269 - DNA, 25 bp, Artificial
  probe
  misc_feature (1)..(25): SEQ ID NO: 3695; WAN024F9J_at; Start 38; Stop 62
gatctggcgcttaacggcgtggggg

SEQ ID NO: 197270 - DNA, 25 bp, Artificial
  probe
  misc_feature (1)..(25): SEQ ID NO: 3695; WAN024F9J_at; Start 39; Stop 63
atctggcgcttaacggcgtgggggt

SEQ ID NO: 197271 - DNA, 25 bp, Artificial
  probe
  misc_feature (1)..(25): SEQ ID NO: 3695; WAN024F9J_at; Start 28; Stop 52
ccagatttaggatctggcgcttaac

SEQ ID NO: 197272 - DNA, 25 bp, Artificial
  probe
  misc_feature (1)..(25): SEQ ID NO: 3695; WAN024F9J_at; Start 34; Stop 58
ttaggatctggcgcttaacggcgtg

SEQ ID NO: 197273 - DNA, 25 bp, Artificial
  probe
  misc_feature (1)..(25): SEQ ID NO: 3695; WAN024F9J_at; Start 24; Stop 48
cgcaccagatttaggatctggcgct

SEQ ID NO: 197274 - DNA, 25 bp, Artificial
  probe
  misc_feature (1)..(25): SEQ ID NO: 3695; WAN024F9J_at; Start 25; Stop 49
gcaccagatttaggatctggcgctt

SEQ ID NO: 197275 - DNA, 25 bp, Artificial
  probe
  misc_feature (1)..(25): SEQ ID NO: 3695; WAN024F9J_at; Start 42; Stop 66
tggcgcttaacggcgtgggggttca

SEQ ID NO: 197276 - DNA, 25 bp, Artificial
  probe
  misc_feature (1)..(25): SEQ ID NO: 3695; WAN024F9J_at; Start 27; Stop 51
accagatttaggatctggcgcttaa

SEQ ID NO: 197277 - DNA, 25 bp, Artificial
  probe
  misc_feature (1)..(25): SEQ ID NO: 3695; WAN024F9J_at; Start 20; Stop 44
cagacgcaccagatttaggatctgg

SEQ ID NO: 197278 - DNA, 25 bp, Artificial
  probe
  misc_feature (1)..(25): SEQ ID NO: 3695; WAN024F9J_at; Start 32; Stop 56
atttaggatctggcgcttaacggcg

SEQ ID NO: 197279 - DNA, 25 bp, Artificial
  probe
  misc_feature (1)..(25): SEQ ID NO: 3695; WAN024F9J_at; Start 23; Stop 47
acgcaccagatttaggatctggcgc

SEQ ID NO: 197280 - DNA, 25 bp, Artificial
  probe
  misc_feature (1)..(25): SEQ ID NO: 3695; WAN024F9J_at; Start 14; Stop 38
aattggcagacgcaccagatttagg

SEQ ID NO: 197281 - DNA, 25 bp, Artificial
  probe
  misc_feature (1)..(25): SEQ ID NO: 3695; WAN024F9J_at; Start 30; Stop 54
agatttaggatctggcgcttaacgg

SEQ ID NO: 197282 - DNA, 25 bp, Artificial
  probe
  misc_feature (1)..(25): SEQ ID NO: 3695; WAN024F9J_at; Start 17; Stop 41
tggcagacgcaccagatttaggatc

SEQ ID NO: 197283 - DNA, 25 bp, Artificial
  probe
  misc_feature (1)..(25): SEQ ID NO: 3695; WAN024F9J_at; Start 13; Stop 37
gaattggcagacgcaccagatttag

SEQ ID NO: 197284 - DNA, 25 bp, Artificial
  probe
  misc_feature (1)..(25): SEQ ID NO: 3695; WAN024F9J_at; Start 37; Stop 61
ggatctggcgcttaacggcgtgggg

SEQ ID NO: 197285 - DNA, 25 bp, Artificial
  probe
  misc_feature (1)..(25): SEQ ID NO: 3695; WAN024F9J_at; Start 36; Stop 60
aggatctggcgcttaacggcgtggg

SEQ ID NO: 197286 - DNA, 25 bp, Artificial
  probe
  misc_feature (1)..(25): SEQ ID NO: 3695; WAN024F9J_at; Start 12; Stop 36
ggaattggcagacgcaccagattta

SEQ ID NO: 197287 - DNA, 25 bp, Artificial
  probe
  misc_feature (1)..(25): SEQ ID NO: 3695; WAN024F9J_at; Start 26; Stop 50
caccagatttaggatctggcgctta

SEQ ID NO: 197288 - DNA, 25 bp, Artificial
  probe
  misc_feature (1)..(25): SEQ ID NO: 3695; WAN024F9J_at; Start 22; Stop 46
gacgcaccagatttaggatctggcg

SEQ ID NO: 197289 - DNA, 25 bp, Artificial
  probe
  misc_feature (1)..(25): SEQ ID NO: 3695; WAN024F9J_at; Start 18; Stop 42
ggcagacgcaccagatttaggatct

SEQ ID NO: 197290 - DNA, 25 bp, Artificial
  probe
  misc_feature (1)..(25): SEQ ID NO: 3695; WAN024F9J_at; Start 31; Stop 55
gatttaggatctggcgcttaacggc

SEQ ID NO: 197291 - DNA, 25 bp, Artificial
  probe
  misc_feature (1)..(25): SEQ ID NO: 3695; WAN024F9J_at; Start 19; Stop 43
gcagacgcaccagatttaggatctg

SEQ ID NO: 197292 - DNA, 25 bp, Artificial
  probe
  misc_feature (1)..(25): SEQ ID NO: 3684; WAN024F9K_at; Start 31; Stop 55
atttgtaatcagagggtcgcgtgtt

SEQ ID NO: 197293 - DNA, 25 bp, Artificial
  probe
  misc_feature (1)..(25): SEQ ID NO: 3684; WAN024F9K_at; Start 21; Stop 45
agagcatctgatttgtaatcagagg

SEQ ID NO: 197294 - DNA, 25 bp, Artificial
  probe
  misc_feature (1)..(25): SEQ ID NO: 3684; WAN024F9K_at; Start 35; Stop 59
gtaatcagagggtcgcgtgttcaag

SEQ ID NO: 197295 - DNA, 25 bp, Artificial
  probe
  misc_feature (1)..(25): SEQ ID NO: 3684; WAN024F9K_at; Start 34; Stop 58
tgtaatcagagggtcgcgtgttcaa

SEQ ID NO: 197296 - DNA, 25 bp, Artificial
  probe
  misc_feature (1)..(25): SEQ ID NO: 3684; WAN024F9K_at; Start 22; Stop 46
gagcatctgatttgtaatcagaggg

SEQ ID NO: 197297 - DNA, 25 bp, Artificial
  probe
  misc_feature (1)..(25): SEQ ID NO: 3684; WAN024F9K_at; Start 13; Stop 37
cagttggtagagcatctgatttgta

SEQ ID NO: 197298 - DNA, 25 bp, Artificial
  probe
  misc_feature (1)..(25): SEQ ID NO: 3684; WAN024F9K_at; Start 25; Stop 49
catctgatttgtaatcagagggtcg

SEQ ID NO: 197299 - DNA, 25 bp, Artificial
  probe
  misc_feature (1)..(25): SEQ ID NO: 3684; WAN024F9K_at; Start 12; Stop 36
tcagttggtagagcatctgatttgt

SEQ ID NO: 197300 - DNA, 25 bp, Artificial
  probe
  misc_feature (1)..(25): SEQ ID NO: 3684; WAN024F9K_at; Start 40; Stop 64
cagagggtcgcgtgttcaagtcatg

SEQ ID NO: 197301 - DNA, 25 bp, Artificial
  probe
  misc_feature (1)..(25): SEQ ID NO: 3684; WAN024F9K_at; Start 45; Stop 69
ggtcgcgtgttcaagtcatgtagcc

SEQ ID NO: 197302 - DNA, 25 bp, Artificial
  probe
  misc_feature (1)..(25): SEQ ID NO: 3684; WAN024F9K_at; Start 41; Stop 65
agagggtcgcgtgttcaagtcatgt

SEQ ID NO: 197303 - DNA, 25 bp, Artificial
  probe
  misc_feature (1)..(25): SEQ ID NO: 3684; WAN024F9K_at; Start 17; Stop 41
tggtagagcatctgatttgtaatca

SEQ ID NO: 197304 - DNA, 25 bp, Artificial
  probe
  misc_feature (1)..(25): SEQ ID NO: 3684; WAN024F9K_at; Start 27; Stop 51
tctgatttgtaatcagagggtcgcg

SEQ ID NO: 197305 - DNA, 25 bp, Artificial
  probe
  misc_feature (1)..(25): SEQ ID NO: 3684; WAN024F9K_at; Start 30; Stop 54
gatttgtaatcagagggtcgcgtgt

SEQ ID NO: 197306 - DNA, 25 bp, Artificial
  probe
  misc_feature (1)..(25): SEQ ID NO: 3684; WAN024F9K_at; Start 47; Stop 71
tcgcgtgttcaagtcatgtagccgg

SEQ ID NO: 197307 - DNA, 25 bp, Artificial
  probe
  misc_feature (1)..(25): SEQ ID NO: 3684; WAN024F9K_at; Start 18; Stop 42
ggtagagcatctgatttgtaatcag

SEQ ID NO: 197308 - DNA, 25 bp, Artificial
  probe
  misc_feature (1)..(25): SEQ ID NO: 3684; WAN024F9K_at; Start 46; Stop 70
gtcgcgtgttcaagtcatgtagccg

SEQ ID NO: 197309 - DNA, 25 bp, Artificial
  probe
  misc_feature (1)..(25): SEQ ID NO: 3684; WAN024F9K_at; Start 42; Stop 66
gagggtcgcgtgttcaagtcatgta

SEQ ID NO: 197310 - DNA, 25 bp, Artificial
  probe
  misc_feature (1)..(25): SEQ ID NO: 3684; WAN024F9K_at; Start 23; Stop 47
agcatctgatttgtaatcagagggt

SEQ ID NO: 197311 - DNA, 25 bp, Artificial
  probe
  misc_feature (1)..(25): SEQ ID NO: 3684; WAN024F9K_at; Start 29; Stop 53
tgatttgtaatcagagggtcgcgtg

SEQ ID NO: 197312 - DNA, 25 bp, Artificial
  probe
  misc_feature (1)..(25): SEQ ID NO: 3684; WAN024F9K_at; Start 48; Stop 72
cgcgtgttcaagtcatgtagccggc

SEQ ID NO: 197313 - DNA, 25 bp, Artificial
  probe
  misc_feature (1)..(25): SEQ ID NO: 3684; WAN024F9K_at; Start 14; Stop 38
agttggtagagcatctgatttgtaa

SEQ ID NO: 197314 - DNA, 25 bp, Artificial
  probe
  misc_feature (1)..(25): SEQ ID NO: 3684; WAN024F9K_at; Start 43; Stop 67
agggtcgcgtgttcaagtcatgtag

SEQ ID NO: 197315 - DNA, 25 bp, Artificial
  probe
  misc_feature (1)..(25): SEQ ID NO: 3684; WAN024F9K_at; Start 28; Stop 52
ctgatttgtaatcagagggtcgcgt

SEQ ID NO: 197316 - DNA, 25 bp, Artificial
  probe
  misc_feature (1)..(25): SEQ ID NO: 3684; WAN024F9K_at; Start 16; Stop 40
ttggtagagcatctgatttgtaatc

SEQ ID NO: 197317 - DNA, 25 bp, Artificial
  probe
  misc_feature (1)..(25): SEQ ID NO: 3684; WAN024F9K_at; Start 24; Stop 48
gcatctgatttgtaatcagagggtc

SEQ ID NO: 197318 - DNA, 25 bp, Artificial
  probe
  misc_feature (1)..(25): SEQ ID NO: 3684; WAN024F9K_at; Start 49; Stop 73
gcgtgttcaagtcatgtagccggca

SEQ ID NO: 197319 - DNA, 25 bp, Artificial
  probe
  misc_feature (1)..(25): SEQ ID NO: 3684; WAN024F9K_at; Start 19; Stop 43
gtagagcatctgatttgtaatcaga

SEQ ID NO: 197320 - DNA, 25 bp, Artificial
  probe
  misc_feature (1)..(25): SEQ ID NO: 3684; WAN024F9K_at; Start 15; Stop 39
gttggtagagcatctgatttgtaat

SEQ ID NO: 197321 - DNA, 25 bp, Artificial
  probe
  misc_feature (1)..(25): SEQ ID NO: 3684; WAN024F9K_at; Start 39; Stop 63
tcagagggtcgcgtgttcaagtcat

SEQ ID NO: 197322 - DNA, 25 bp, Artificial
  probe
  misc_feature (1)..(25): SEQ ID NO: 3684; WAN024F9K_at; Start 26; Stop 50
atctgatttgtaatcagagggtcgc

SEQ ID NO: 197323 - DNA, 25 bp, Artificial
  probe
  misc_feature (1)..(25): SEQ ID NO: 3684; WAN024F9K_at; Start 32; Stop 56
tttgtaatcagagggtcgcgtgttc

SEQ ID NO: 197324 - DNA, 25 bp, Artificial
  probe
  misc_feature (1)..(25): SEQ ID NO: 3684; WAN024F9K_at; Start 20; Stop 44
tagagcatctgatttgtaatcagag

SEQ ID NO: 197325 - DNA, 25 bp, Artificial
  probe
  misc_feature (1)..(25): SEQ ID NO: 3684; WAN024F9K_at; Start 36; Stop 60
taatcagagggtcgcgtgttcaagt

SEQ ID NO: 197326 - DNA, 25 bp, Artificial
  probe
  misc_feature (1)..(25): SEQ ID NO: 3688; WAN024F9L_at; Start 27; Stop 51
caccttgccaaggtgggggtcgcgg

SEQ ID NO: 197327 - DNA, 25 bp, Artificial
  probe
  misc_feature (1)..(25): SEQ ID NO: 3688; WAN024F9L_at; Start 15; Stop 39
gtggtagaacaccaccttgccaagg

SEQ ID NO: 197328 - DNA, 25 bp, Artificial
  probe
  misc_feature (1)..(25): SEQ ID NO: 3688; WAN024F9L_at; Start 26; Stop 50
ccaccttgccaaggtgggggtcgcg

SEQ ID NO: 197329 - DNA, 25 bp, Artificial
  probe
  misc_feature (1)..(25): SEQ ID NO: 3688; WAN024F9L_at; Start 9; Stop 33
agttcagtggtagaacaccaccttg

SEQ ID NO: 197330 - DNA, 25 bp, Artificial
  probe
  misc_feature (1)..(25): SEQ ID NO: 3688; WAN024F9L_at; Start 2; Stop 26
cgaacgtagttcagtggtagaacac

SEQ ID NO: 197331 - DNA, 25 bp, Artificial
  probe
  misc_feature (1)..(25): SEQ ID NO: 3688; WAN024F9L_at; Start 5; Stop 29
acgtagttcagtggtagaacaccac

SEQ ID NO: 197332 - DNA, 25 bp, Artificial
  probe
  misc_feature (1)..(25): SEQ ID NO: 3688; WAN024F9L_at; Start 6; Stop 30
cgtagttcagtggtagaacaccacc

SEQ ID NO: 197333 - DNA, 25 bp, Artificial
  probe
  misc_feature (1)..(25): SEQ ID NO: 3688; WAN024F9L_at; Start 1; Stop 25
gcgaacgtagttcagtggtagaaca

SEQ ID NO: 197334 - DNA, 25 bp, Artificial
  probe
  misc_feature (1)..(25): SEQ ID NO: 3688; WAN024F9L_at; Start 14; Stop 38
agtggtagaacaccaccttgccaag

SEQ ID NO: 197335 - DNA, 25 bp, Artificial
  probe
  misc_feature (1)..(25): SEQ ID NO: 3688; WAN024F9L_at; Start 3; Stop 27
gaacgtagttcagtggtagaacacc

SEQ ID NO: 197336 - DNA, 25 bp, Artificial
  probe
  misc_feature (1)..(25): SEQ ID NO: 3688; WAN024F9L_at; Start 24; Stop 48
caccaccttgccaaggtgggggtcg

SEQ ID NO: 197337 - DNA, 25 bp, Artificial
  probe
  misc_feature (1)..(25): SEQ ID NO: 3688; WAN024F9L_at; Start 20; Stop 44
agaacaccaccttgccaaggtgggg

SEQ ID NO: 197338 - DNA, 25 bp, Artificial
  probe
  misc_feature (1)..(25): SEQ ID NO: 3688; WAN024F9L_at; Start 10; Stop 34
gttcagtggtagaacaccaccttgc

SEQ ID NO: 197339 - DNA, 25 bp, Artificial
  probe
  misc_feature (1)..(25): SEQ ID NO: 3688; WAN024F9L_at; Start 7; Stop 31
gtagttcagtggtagaacaccacct

SEQ ID NO: 197340 - DNA, 25 bp, Artificial
  probe
  misc_feature (1)..(25): SEQ ID NO: 3688; WAN024F9L_at; Start 13; Stop 37
cagtggtagaacaccaccttgccaa

SEQ ID NO: 197341 - DNA, 25 bp, Artificial
  probe
  misc_feature (1)..(25): SEQ ID NO: 3688; WAN024F9L_at; Start 19; Stop 43
tagaacaccaccttgccaaggtggg

SEQ ID NO: 197342 - DNA, 25 bp, Artificial
  probe
  misc_feature (1)..(25): SEQ ID NO: 3688; WAN024F9L_at; Start 4; Stop 28
aacgtagttcagtggtagaacacca

SEQ ID NO: 197343 - DNA, 25 bp, Artificial
  probe
  misc_feature (1)..(25): SEQ ID NO: 3688; WAN024F9L_at; Start 16; Stop 40
tggtagaacaccaccttgccaaggt

SEQ ID NO: 197344 - DNA, 25 bp, Artificial
  probe
  misc_feature (1)..(25): SEQ ID NO: 3688; WAN024F9L_at; Start 18; Stop 42
gtagaacaccaccttgccaaggtgg

SEQ ID NO: 197345 - DNA, 25 bp, Artificial
  probe
  misc_feature (1)..(25): SEQ ID NO: 3688; WAN024F9L_at; Start 17; Stop 41
ggtagaacaccaccttgccaaggtg

SEQ ID NO: 197346 - DNA, 25 bp, Artificial
  probe
  misc_feature (1)..(25): SEQ ID NO: 3688; WAN024F9L_at; Start 8; Stop 32
tagttcagtggtagaacaccacctt

SEQ ID NO: 197347 - DNA, 25 bp, Artificial
  probe
  misc_feature (1)..(25): SEQ ID NO: 3688; WAN024F9L_at; Start 12; Stop 36
tcagtggtagaacaccaccttgcca

SEQ ID NO: 197348 - DNA, 25 bp, Artificial
  probe
  misc_feature (1)..(25): SEQ ID NO: 3688; WAN024F9L_at; Start 11; Stop 35
ttcagtggtagaacaccaccttgcc

SEQ ID NO: 197349 - DNA, 25 bp, Artificial
  probe
  misc_feature (1)..(25): SEQ ID NO: 3685; WAN024F9M_at; Start 32; Stop 56
acttaaaatcctgcgattggtaacg

SEQ ID NO: 197350 - DNA, 25 bp, Artificial
  probe
  misc_feature (1)..(25): SEQ ID NO: 3685; WAN024F9M_at; Start 24; Stop 48
cgcacaggacttaaaatcctgcgat

SEQ ID NO: 197351 - DNA, 25 bp, Artificial
  probe
  misc_feature (1)..(25): SEQ ID NO: 3685; WAN024F9M_at; Start 41; Stop 65
cctgcgattggtaacgatcgtaccg

SEQ ID NO: 197352 - DNA, 25 bp, Artificial
  probe
  misc_feature (1)..(25): SEQ ID NO: 3685; WAN024F9M_at; Start 16; Stop 40
ctggcagacgcacaggacttaaaat

SEQ ID NO: 197353 - DNA, 25 bp, Artificial
  probe
  misc_feature (1)..(25): SEQ ID NO: 3685; WAN024F9M_at; Start 40; Stop 64
tcctgcgattggtaacgatcgtacc

SEQ ID NO: 197354 - DNA, 25 bp, Artificial
  probe
  misc_feature (1)..(25): SEQ ID NO: 3685; WAN024F9M_at; Start 22; Stop 46
gacgcacaggacttaaaatcctgcg

SEQ ID NO: 197355 - DNA, 25 bp, Artificial
  probe
  misc_feature (1)..(25): SEQ ID NO: 3685; WAN024F9M_at; Start 25; Stop 49
gcacaggacttaaaatcctgcgatt

SEQ ID NO: 197356 - DNA, 25 bp, Artificial
  probe
  misc_feature (1)..(25): SEQ ID NO: 3685; WAN024F9M_at; Start 26; Stop 50
cacaggacttaaaatcctgcgattg

SEQ ID NO: 197357 - DNA, 25 bp, Artificial
  probe
  misc_feature (1)..(25): SEQ ID NO: 3685; WAN024F9M_at; Start 15; Stop 39
actggcagacgcacaggacttaaaa

SEQ ID NO: 197358 - DNA, 25 bp, Artificial
  probe
  misc_feature (1)..(25): SEQ ID NO: 3685; WAN024F9M_at; Start 33; Stop 57
cttaaaatcctgcgattggtaacga

SEQ ID NO: 197359 - DNA, 25 bp, Artificial
  probe
  misc_feature (1)..(25): SEQ ID NO: 3685; WAN024F9M_at; Start 34; Stop 58
ttaaaatcctgcgattggtaacgat

SEQ ID NO: 197360 - DNA, 25 bp, Artificial
  probe
  misc_feature (1)..(25): SEQ ID NO: 3685; WAN024F9M_at; Start 11; Stop 35
cggaactggcagacgcacaggactt

SEQ ID NO: 197361 - DNA, 25 bp, Artificial
  probe
  misc_feature (1)..(25): SEQ ID NO: 3685; WAN024F9M_at; Start 36; Stop 60
aaaatcctgcgattggtaacgatcg

SEQ ID NO: 197362 - DNA, 25 bp, Artificial
  probe
  misc_feature (1)..(25): SEQ ID NO: 3685; WAN024F9M_at; Start 10; Stop 34
gcggaactggcagacgcacaggact

SEQ ID NO: 197363 - DNA, 25 bp, Artificial
  probe
  misc_feature (1)..(25): SEQ ID NO: 3685; WAN024F9M_at; Start 13; Stop 37
gaactggcagacgcacaggacttaa

SEQ ID NO: 197364 - DNA, 25 bp, Artificial
  probe
  misc_feature (1)..(25): SEQ ID NO: 3685; WAN024F9M_at; Start 29; Stop 53
aggacttaaaatcctgcgattggta

SEQ ID NO: 197365 - DNA, 25 bp, Artificial
  probe
  misc_feature (1)..(25): SEQ ID NO: 3685; WAN024F9M_at; Start 21; Stop 45
agacgcacaggacttaaaatcctgc

SEQ ID NO: 197366 - DNA, 25 bp, Artificial
  probe
  misc_feature (1)..(25): SEQ ID NO: 3685; WAN024F9M_at; Start 35; Stop 59
taaaatcctgcgattggtaacgatc

SEQ ID NO: 197367 - DNA, 25 bp, Artificial
  probe
  misc_feature (1)..(25): SEQ ID NO: 3685; WAN024F9M_at; Start 14; Stop 38
aactggcagacgcacaggacttaaa

SEQ ID NO: 197368 - DNA, 25 bp, Artificial
  probe
  misc_feature (1)..(25): SEQ ID NO: 3685; WAN024F9M_at; Start 23; Stop 47
acgcacaggacttaaaatcctgcga

SEQ ID NO: 197369 - DNA, 25 bp, Artificial
  probe
  misc_feature (1)..(25): SEQ ID NO: 3685; WAN024F9M_at; Start 28; Stop 52
caggacttaaaatcctgcgattggt

SEQ ID NO: 197370 - DNA, 25 bp, Artificial
  probe
  misc_feature (1)..(25): SEQ ID NO: 3685; WAN024F9M_at; Start 43; Stop 67
tgcgattggtaacgatcgtaccggt

SEQ ID NO: 197371 - DNA, 25 bp, Artificial
  probe
  misc_feature (1)..(25): SEQ ID NO: 3685; WAN024F9M_at; Start 30; Stop 54
ggacttaaaatcctgcgattggtaa

SEQ ID NO: 197372 - DNA, 25 bp, Artificial
  probe
  misc_feature (1)..(25): SEQ ID NO: 3685; WAN024F9M_at; Start 39; Stop 63
atcctgcgattggtaacgatcgtac

SEQ ID NO: 197373 - DNA, 25 bp, Artificial
  probe
  misc_feature (1)..(25): SEQ ID NO: 3685; WAN024F9M_at; Start 31; Stop 55
gacttaaaatcctgcgattggtaac

SEQ ID NO: 197374 - DNA, 25 bp, Artificial
  probe
  misc_feature (1)..(25): SEQ ID NO: 3685; WAN024F9M_at; Start 12; Stop 36
ggaactggcagacgcacaggactta

SEQ ID NO: 197375 - DNA, 25 bp, Artificial
  probe
  misc_feature (1)..(25): SEQ ID NO: 3685; WAN024F9M_at; Start 19; Stop 43
gcagacgcacaggacttaaaatcct

SEQ ID NO: 197376 - DNA, 25 bp, Artificial
  probe
  misc_feature (1)..(25): SEQ ID NO: 3685; WAN024F9M_at; Start 38; Stop 62
aatcctgcgattggtaacgatcgta

SEQ ID NO: 197377 - DNA, 25 bp, Artificial
  probe
  misc_feature (1)..(25): SEQ ID NO: 3685; WAN024F9M_at; Start 42; Stop 66
ctgcgattggtaacgatcgtaccgg

SEQ ID NO: 197378 - DNA, 25 bp, Artificial
  probe
  misc_feature (1)..(25): SEQ ID NO: 3685; WAN024F9M_at; Start 17; Stop 41
tggcagacgcacaggacttaaaatc

SEQ ID NO: 197379 - DNA, 25 bp, Artificial
  probe
  misc_feature (1)..(25): SEQ ID NO: 3685; WAN024F9M_at; Start 18; Stop 42
ggcagacgcacaggacttaaaatcc

SEQ ID NO: 197380 - DNA, 25 bp, Artificial
  probe
  misc_feature (1)..(25): SEQ ID NO: 3685; WAN024F9M_at; Start 20; Stop 44
cagacgcacaggacttaaaatcctg

SEQ ID NO: 197381 - DNA, 25 bp, Artificial
  probe
  misc_feature (1)..(25): SEQ ID NO: 3685; WAN024F9M_at; Start 27; Stop 51
acaggacttaaaatcctgcgattgg

SEQ ID NO: 197382 - DNA, 25 bp, Artificial
  probe
  misc_feature (1)..(25): SEQ ID NO: 3685; WAN024F9M_at; Start 37; Stop 61
aaatcctgcgattggtaacgatcgt

SEQ ID NO: 197383 - DNA, 25 bp, Artificial
  probe
  misc_feature (1)..(25): SEQ ID NO: 3672; WAN024F9N_at; Start 4; Stop 28
cccttagctcaactggatagagtac

SEQ ID NO: 197384 - DNA, 25 bp, Artificial
  probe
  misc_feature (1)..(25): SEQ ID NO: 3672; WAN024F9N_at; Start 12; Stop 36
tcaactggatagagtacctgactac

SEQ ID NO: 197385 - DNA, 25 bp, Artificial
  probe
  misc_feature (1)..(25): SEQ ID NO: 3672; WAN024F9N_at; Start 10; Stop 34
gctcaactggatagagtacctgact

SEQ ID NO: 197386 - DNA, 25 bp, Artificial
  probe
  misc_feature (1)..(25): SEQ ID NO: 3672; WAN024F9N_at; Start 40; Stop 64
tcaggcggttagaggttcgactcct

SEQ ID NO: 197387 - DNA, 25 bp, Artificial
  probe
  misc_feature (1)..(25): SEQ ID NO: 3672; WAN024F9N_at; Start 23; Stop 47
gagtacctgactacgaatcaggcgg

SEQ ID NO: 197388 - DNA, 25 bp, Artificial
  probe
  misc_feature (1)..(25): SEQ ID NO: 3672; WAN024F9N_at; Start 41; Stop 65
caggcggttagaggttcgactcctc

SEQ ID NO: 197389 - DNA, 25 bp, Artificial
  probe
  misc_feature (1)..(25): SEQ ID NO: 3672; WAN024F9N_at; Start 26; Stop 50
tacctgactacgaatcaggcggtta

SEQ ID NO: 197390 - DNA, 25 bp, Artificial
  probe
  misc_feature (1)..(25): SEQ ID NO: 3672; WAN024F9N_at; Start 24; Stop 48
agtacctgactacgaatcaggcggt

SEQ ID NO: 197391 - DNA, 25 bp, Artificial
  probe
  misc_feature (1)..(25): SEQ ID NO: 3672; WAN024F9N_at; Start 37; Stop 61
gaatcaggcggttagaggttcgact

SEQ ID NO: 197392 - DNA, 25 bp, Artificial
  probe
  misc_feature (1)..(25): SEQ ID NO: 3672; WAN024F9N_at; Start 13; Stop 37
caactggatagagtacctgactacg

SEQ ID NO: 197393 - DNA, 25 bp, Artificial
  probe
  misc_feature (1)..(25): SEQ ID NO: 3672; WAN024F9N_at; Start 7; Stop 31
ttagctcaactggatagagtacctg

SEQ ID NO: 197394 - DNA, 25 bp, Artificial
  probe
  misc_feature (1)..(25): SEQ ID NO: 3672; WAN024F9N_at; Start 50; Stop 74
agaggttcgactcctctagggtgca

SEQ ID NO: 197395 - DNA, 25 bp, Artificial
  probe
  misc_feature (1)..(25): SEQ ID NO: 3672; WAN024F9N_at; Start 11; Stop 35
ctcaactggatagagtacctgacta

SEQ ID NO: 197396 - DNA, 25 bp, Artificial
  probe
  misc_feature (1)..(25): SEQ ID NO: 3672; WAN024F9N_at; Start 5; Stop 29
ccttagctcaactggatagagtacc

SEQ ID NO: 197397 - DNA, 25 bp, Artificial
  probe
  misc_feature (1)..(25): SEQ ID NO: 3672; WAN024F9N_at; Start 28; Stop 52
cctgactacgaatcaggcggttaga

SEQ ID NO: 197398 - DNA, 25 bp, Artificial
  probe
  misc_feature (1)..(25): SEQ ID NO: 3672; WAN024F9N_at; Start 43; Stop 67
ggcggttagaggttcgactcctcta

SEQ ID NO: 197399 - DNA, 25 bp, Artificial
  probe
  misc_feature (1)..(25): SEQ ID NO: 3672; WAN024F9N_at; Start 38; Stop 62
aatcaggcggttagaggttcgactc

SEQ ID NO: 197400 - DNA, 25 bp, Artificial
  probe
  misc_feature (1)..(25): SEQ ID NO: 3672; WAN024F9N_at; Start 45; Stop 69
cggttagaggttcgactcctctagg

SEQ ID NO: 197401 - DNA, 25 bp, Artificial
  probe
  misc_feature (1)..(25): SEQ ID NO: 3672; WAN024F9N_at; Start 1; Stop 25
gcacccttagctcaactggatagag

SEQ ID NO: 197402 - DNA, 25 bp, Artificial
  probe
  misc_feature (1)..(25): SEQ ID NO: 3672; WAN024F9N_at; Start 31; Stop 55
gactacgaatcaggcggttagaggt

SEQ ID NO: 197403 - DNA, 25 bp, Artificial
  probe
  misc_feature (1)..(25): SEQ ID NO: 3672; WAN024F9N_at; Start 15; Stop 39
actggatagagtacctgactacgaa

SEQ ID NO: 197404 - DNA, 25 bp, Artificial
  probe
  misc_feature (1)..(25): SEQ ID NO: 3672; WAN024F9N_at; Start 14; Stop 38
aactggatagagtacctgactacga

SEQ ID NO: 197405 - DNA, 25 bp, Artificial
  probe
  misc_feature (1)..(25): SEQ ID NO: 3672; WAN024F9N_at; Start 21; Stop 45
tagagtacctgactacgaatcaggc

SEQ ID NO: 197406 - DNA, 25 bp, Artificial
  probe
  misc_feature (1)..(25): SEQ ID NO: 3672; WAN024F9N_at; Start 39; Stop 63
atcaggcggttagaggttcgactcc

SEQ ID NO: 197407 - DNA, 25 bp, Artificial
  probe
  misc_feature (1)..(25): SEQ ID NO: 3672; WAN024F9N_at; Start 2; Stop 26
cacccttagctcaactggatagagt

SEQ ID NO: 197408 - DNA, 25 bp, Artificial
  probe
  misc_feature (1)..(25): SEQ ID NO: 3672; WAN024F9N_at; Start 18; Stop 42
ggatagagtacctgactacgaatca

SEQ ID NO: 197409 - DNA, 25 bp, Artificial
  probe
  misc_feature (1)..(25): SEQ ID NO: 3672; WAN024F9N_at; Start 35; Stop 59
acgaatcaggcggttagaggttcga

SEQ ID NO: 197410 - DNA, 25 bp, Artificial
  probe
  misc_feature (1)..(25): SEQ ID NO: 3672; WAN024F9N_at; Start 8; Stop 32
tagctcaactggatagagtacctga

SEQ ID NO: 197411 - DNA, 25 bp, Artificial
  probe
  misc_feature (1)..(25): SEQ ID NO: 3672; WAN024F9N_at; Start 19; Stop 43
gatagagtacctgactacgaatcag

SEQ ID NO: 197412 - DNA, 25 bp, Artificial
  probe
  misc_feature (1)..(25): SEQ ID NO: 3672; WAN024F9N_at; Start 49; Stop 73
tagaggttcgactcctctagggtgc

SEQ ID NO: 197413 - DNA, 25 bp, Artificial
  probe
  misc_feature (1)..(25): SEQ ID NO: 3672; WAN024F9N_at; Start 9; Stop 33
agctcaactggatagagtacctgac

SEQ ID NO: 197414 - DNA, 25 bp, Artificial
  probe
  misc_feature (1)..(25): SEQ ID NO: 3672; WAN024F9N_at; Start 17; Stop 41
tggatagagtacctgactacgaatc

SEQ ID NO: 197415 - DNA, 25 bp, Artificial
  probe
  misc_feature (1)..(25): SEQ ID NO: 3672; WAN024F9N_at; Start 30; Stop 54
tgactacgaatcaggcggttagagg

SEQ ID NO: 197416 - DNA, 25 bp, Artificial
  probe
  misc_feature (1)..(25): SEQ ID NO: 3672; WAN024F9N_at; Start 16; Stop 40
ctggatagagtacctgactacgaat

SEQ ID NO: 197417 - DNA, 25 bp, Artificial
  probe
  misc_feature (1)..(25): SEQ ID NO: 3259; WAN024F9O_at; Start 34; Stop 58
ttgggaccaaggtgtcgcaggttcg

SEQ ID NO: 197418 - DNA, 25 bp, Artificial
  probe
  misc_feature (1)..(25): SEQ ID NO: 3259; WAN024F9O_at; Start 33; Stop 57
tttgggaccaaggtgtcgcaggttc

SEQ ID NO: 197419 - DNA, 25 bp, Artificial
  probe
  misc_feature (1)..(25): SEQ ID NO: 3259; WAN024F9O_at; Start 30; Stop 54
tggtttgggaccaaggtgtcgcagg

SEQ ID NO: 197420 - DNA, 25 bp, Artificial
  probe
  misc_feature (1)..(25): SEQ ID NO: 3259; WAN024F9O_at; Start 2; Stop 26
gggaagtagctcagcttggtagagt

SEQ ID NO: 197421 - DNA, 25 bp, Artificial
  probe
  misc_feature (1)..(25): SEQ ID NO: 3259; WAN024F9O_at; Start 37; Stop 61
ggaccaaggtgtcgcaggttcgaat

SEQ ID NO: 197422 - DNA, 25 bp, Artificial
  probe
  misc_feature (1)..(25): SEQ ID NO: 3259; WAN024F9O_at; Start 29; Stop 53
ttggtttgggaccaaggtgtcgcag

SEQ ID NO: 197423 - DNA, 25 bp, Artificial
  probe
  misc_feature (1)..(25): SEQ ID NO: 3259; WAN024F9O_at; Start 35; Stop 59
tgggaccaaggtgtcgcaggttcga

SEQ ID NO: 197424 - DNA, 25 bp, Artificial
  probe
  misc_feature (1)..(25): SEQ ID NO: 3259; WAN024F9O_at; Start 36; Stop 60
gggaccaaggtgtcgcaggttcgaa

SEQ ID NO: 197425 - DNA, 25 bp, Artificial
  probe
  misc_feature (1)..(25): SEQ ID NO: 3259; WAN024F9O_at; Start 1; Stop 25
cgggaagtagctcagcttggtagag

SEQ ID NO: 197426 - DNA, 25 bp, Artificial
  probe
  misc_feature (1)..(25): SEQ ID NO: 3259; WAN024F9O_at; Start 28; Stop 52
cttggtttgggaccaaggtgtcgca

SEQ ID NO: 197427 - DNA, 25 bp, Artificial
  probe
  misc_feature (1)..(25): SEQ ID NO: 3743; WAN024F9P_at; Start 21; Stop 45
tagagcgtccggttcatacccggga

SEQ ID NO: 197428 - DNA, 25 bp, Artificial
  probe
  misc_feature (1)..(25): SEQ ID NO: 3743; WAN024F9P_at; Start 12; Stop 36
tcagctggctagagcgtccggttca

SEQ ID NO: 197429 - DNA, 25 bp, Artificial
  probe
  misc_feature (1)..(25): SEQ ID NO: 3743; WAN024F9P_at; Start 19; Stop 43
gctagagcgtccggttcatacccgg

SEQ ID NO: 197430 - DNA, 25 bp, Artificial
  probe
  misc_feature (1)..(25): SEQ ID NO: 3743; WAN024F9P_at; Start 20; Stop 44
ctagagcgtccggttcatacccggg

SEQ ID NO: 197431 - DNA, 25 bp, Artificial
  probe
  misc_feature (1)..(25): SEQ ID NO: 3743; WAN024F9P_at; Start 3; Stop 27
cggtgtagctcagctggctagagcg

SEQ ID NO: 197432 - DNA, 25 bp, Artificial
  probe
  misc_feature (1)..(25): SEQ ID NO: 3743; WAN024F9P_at; Start 2; Stop 26
gcggtgtagctcagctggctagagc

SEQ ID NO: 197433 - DNA, 25 bp, Artificial
  probe
  misc_feature (1)..(25): SEQ ID NO: 3743; WAN024F9P_at; Start 5; Stop 29
gtgtagctcagctggctagagcgtc

SEQ ID NO: 197434 - DNA, 25 bp, Artificial
  probe
  misc_feature (1)..(25): SEQ ID NO: 3743; WAN024F9P_at; Start 18; Stop 42
ggctagagcgtccggttcatacccg

SEQ ID NO: 197435 - DNA, 25 bp, Artificial
  probe
  misc_feature (1)..(25): SEQ ID NO: 3743; WAN024F9P_at; Start 17; Stop 41
tggctagagcgtccggttcataccc

SEQ ID NO: 197436 - DNA, 25 bp, Artificial
  probe
  misc_feature (1)..(25): SEQ ID NO: 3743; WAN024F9P_at; Start 14; Stop 38
agctggctagagcgtccggttcata

SEQ ID NO: 197437 - DNA, 25 bp, Artificial
  probe
  misc_feature (1)..(25): SEQ ID NO: 3743; WAN024F9P_at; Start 6; Stop 30
tgtagctcagctggctagagcgtcc

SEQ ID NO: 197438 - DNA, 25 bp, Artificial
  probe
  misc_feature (1)..(25): SEQ ID NO: 3743; WAN024F9P_at; Start 22; Stop 46
agagcgtccggttcatacccgggag

SEQ ID NO: 197439 - DNA, 25 bp, Artificial
  probe
  misc_feature (1)..(25): SEQ ID NO: 3743; WAN024F9P_at; Start 1; Stop 25
ggcggtgtagctcagctggctagag

SEQ ID NO: 197440 - DNA, 25 bp, Artificial
  probe
  misc_feature (1)..(25): SEQ ID NO: 3743; WAN024F9P_at; Start 15; Stop 39
gctggctagagcgtccggttcatac

SEQ ID NO: 197441 - DNA, 25 bp, Artificial
  probe
  misc_feature (1)..(25): SEQ ID NO: 3743; WAN024F9P_at; Start 4; Stop 28
ggtgtagctcagctggctagagcgt

SEQ ID NO: 197442 - DNA, 25 bp, Artificial
  probe
  misc_feature (1)..(25): SEQ ID NO: 3743; WAN024F9P_at; Start 10; Stop 34
gctcagctggctagagcgtccggtt

SEQ ID NO: 197443 - DNA, 25 bp, Artificial
  probe
  misc_feature (1)..(25): SEQ ID NO: 3743; WAN024F9P_at; Start 9; Stop 33
agctcagctggctagagcgtccggt

SEQ ID NO: 197444 - DNA, 25 bp, Artificial
  probe
  misc_feature (1)..(25): SEQ ID NO: 3743; WAN024F9P_at; Start 16; Stop 40
ctggctagagcgtccggttcatacc

SEQ ID NO: 197445 - DNA, 25 bp, Artificial
  probe
  misc_feature (1)..(25): SEQ ID NO: 3743; WAN024F9P_at; Start 13; Stop 37
cagctggctagagcgtccggttcat

SEQ ID NO: 197446 - DNA, 25 bp, Artificial
  probe
  misc_feature (1)..(25): SEQ ID NO: 3743; WAN024F9P_at; Start 8; Stop 32
tagctcagctggctagagcgtccgg

SEQ ID NO: 197447 - DNA, 25 bp, Artificial
  probe
  misc_feature (1)..(25): SEQ ID NO: 3743; WAN024F9P_at; Start 11; Stop 35
ctcagctggctagagcgtccggttc

SEQ ID NO: 197448 - DNA, 25 bp, Artificial
  probe
  misc_feature (1)..(25): SEQ ID NO: 3743; WAN024F9P_at; Start 7; Stop 31
gtagctcagctggctagagcgtccg

SEQ ID NO: 197449 - DNA, 25 bp, Artificial
  probe
  misc_feature (1)..(25): SEQ ID NO: 3726; WAN024F9Q_at; Start 1; Stop 25
ggacctttagctcagctggttagag

SEQ ID NO: 197450 - DNA, 25 bp, Artificial
  probe
  misc_feature (1)..(25): SEQ ID NO: 3726; WAN024F9Q_at; Start 21; Stop 45
tagagctctcggctcataaccgagt

SEQ ID NO: 197451 - DNA, 25 bp, Artificial
  probe
  misc_feature (1)..(25): SEQ ID NO: 3726; WAN024F9Q_at; Start 50; Stop 74
gtaggttcaagtcctacaaggtcca

SEQ ID NO: 197452 - DNA, 25 bp, Artificial
  probe
  misc_feature (1)..(25): SEQ ID NO: 3726; WAN024F9Q_at; Start 48; Stop 72
tcgtaggttcaagtcctacaaggtc

SEQ ID NO: 197453 - DNA, 25 bp, Artificial
  probe
  misc_feature (1)..(25): SEQ ID NO: 3726; WAN024F9Q_at; Start 7; Stop 31
ttagctcagctggttagagctctcg

SEQ ID NO: 197454 - DNA, 25 bp, Artificial
  probe
  misc_feature (1)..(25): SEQ ID NO: 3726; WAN024F9Q_at; Start 32; Stop 56
gctcataaccgagtggtcgtaggtt

SEQ ID NO: 197455 - DNA, 25 bp, Artificial
  probe
  misc_feature (1)..(25): SEQ ID NO: 3726; WAN024F9Q_at; Start 23; Stop 47
gagctctcggctcataaccgagtgg

SEQ ID NO: 197456 - DNA, 25 bp, Artificial
  probe
  misc_feature (1)..(25): SEQ ID NO: 3726; WAN024F9Q_at; Start 40; Stop 64
ccgagtggtcgtaggttcaagtcct

SEQ ID NO: 197457 - DNA, 25 bp, Artificial
  probe
  misc_feature (1)..(25): SEQ ID NO: 3726; WAN024F9Q_at; Start 11; Stop 35
ctcagctggttagagctctcggctc

SEQ ID NO: 197458 - DNA, 25 bp, Artificial
  probe
  misc_feature (1)..(25): SEQ ID NO: 3726; WAN024F9Q_at; Start 24; Stop 48
agctctcggctcataaccgagtggt

SEQ ID NO: 197459 - DNA, 25 bp, Artificial
  probe
  misc_feature (1)..(25): SEQ ID NO: 3726; WAN024F9Q_at; Start 5; Stop 29
ctttagctcagctggttagagctct

SEQ ID NO: 197460 - DNA, 25 bp, Artificial
  probe
  misc_feature (1)..(25): SEQ ID NO: 3726; WAN024F9Q_at; Start 41; Stop 65
cgagtggtcgtaggttcaagtccta

SEQ ID NO: 197461 - DNA, 25 bp, Artificial
  probe
  misc_feature (1)..(25): SEQ ID NO: 3726; WAN024F9Q_at; Start 2; Stop 26
gacctttagctcagctggttagagc

SEQ ID NO: 197462 - DNA, 25 bp, Artificial
  probe
  misc_feature (1)..(25): SEQ ID NO: 3726; WAN024F9Q_at; Start 27; Stop 51
tctcggctcataaccgagtggtcgt

SEQ ID NO: 197463 - DNA, 25 bp, Artificial
  probe
  misc_feature (1)..(25): SEQ ID NO: 3726; WAN024F9Q_at; Start 15; Stop 39
gctggttagagctctcggctcataa

SEQ ID NO: 197464 - DNA, 25 bp, Artificial
  probe
  misc_feature (1)..(25): SEQ ID NO: 3726; WAN024F9Q_at; Start 42; Stop 66
gagtggtcgtaggttcaagtcctac

SEQ ID NO: 197465 - DNA, 25 bp, Artificial
  probe
  misc_feature (1)..(25): SEQ ID NO: 3726; WAN024F9Q_at; Start 14; Stop 38
agctggttagagctctcggctcata

SEQ ID NO: 197466 - DNA, 25 bp, Artificial
  probe
  misc_feature (1)..(25): SEQ ID NO: 3726; WAN024F9Q_at; Start 45; Stop 69
tggtcgtaggttcaagtcctacaag

SEQ ID NO: 197467 - DNA, 25 bp, Artificial
  probe
  misc_feature (1)..(25): SEQ ID NO: 3726; WAN024F9Q_at; Start 22; Stop 46
agagctctcggctcataaccgagtg

SEQ ID NO: 197468 - DNA, 25 bp, Artificial
  probe
  misc_feature (1)..(25): SEQ ID NO: 3726; WAN024F9Q_at; Start 12; Stop 36
tcagctggttagagctctcggctca

SEQ ID NO: 197469 - DNA, 25 bp, Artificial
  probe
  misc_feature (1)..(25): SEQ ID NO: 3726; WAN024F9Q_at; Start 25; Stop 49
gctctcggctcataaccgagtggtc

SEQ ID NO: 197470 - DNA, 25 bp, Artificial
  probe
  misc_feature (1)..(25): SEQ ID NO: 3726; WAN024F9Q_at; Start 28; Stop 52
ctcggctcataaccgagtggtcgta

SEQ ID NO: 197471 - DNA, 25 bp, Artificial
  probe
  misc_feature (1)..(25): SEQ ID NO: 3726; WAN024F9Q_at; Start 43; Stop 67
agtggtcgtaggttcaagtcctaca

SEQ ID NO: 197472 - DNA, 25 bp, Artificial
  probe
  misc_feature (1)..(25): SEQ ID NO: 3726; WAN024F9Q_at; Start 30; Stop 54
cggctcataaccgagtggtcgtagg

SEQ ID NO: 197473 - DNA, 25 bp, Artificial
  probe
  misc_feature (1)..(25): SEQ ID NO: 3726; WAN024F9Q_at; Start 36; Stop 60
ataaccgagtggtcgtaggttcaag

SEQ ID NO: 197474 - DNA, 25 bp, Artificial
  probe
  misc_feature (1)..(25): SEQ ID NO: 3726; WAN024F9Q_at; Start 26; Stop 50
ctctcggctcataaccgagtggtcg

SEQ ID NO: 197475 - DNA, 25 bp, Artificial
  probe
  misc_feature (1)..(25): SEQ ID NO: 3726; WAN024F9Q_at; Start 16; Stop 40
ctggttagagctctcggctcataac

SEQ ID NO: 197476 - DNA, 25 bp, Artificial
  probe
  misc_feature (1)..(25): SEQ ID NO: 3726; WAN024F9Q_at; Start 31; Stop 55
ggctcataaccgagtggtcgtaggt

SEQ ID NO: 197477 - DNA, 25 bp, Artificial
  probe
  misc_feature (1)..(25): SEQ ID NO: 3726; WAN024F9Q_at; Start 10; Stop 34
gctcagctggttagagctctcggct

SEQ ID NO: 197478 - DNA, 25 bp, Artificial
  probe
  misc_feature (1)..(25): SEQ ID NO: 3726; WAN024F9Q_at; Start 18; Stop 42
ggttagagctctcggctcataaccg

SEQ ID NO: 197479 - DNA, 25 bp, Artificial
  probe
  misc_feature (1)..(25): SEQ ID NO: 3726; WAN024F9Q_at; Start 4; Stop 28
cctttagctcagctggttagagctc

SEQ ID NO: 197480 - DNA, 25 bp, Artificial
  probe
  misc_feature (1)..(25): SEQ ID NO: 3726; WAN024F9Q_at; Start 13; Stop 37
cagctggttagagctctcggctcat

SEQ ID NO: 197481 - DNA, 25 bp, Artificial
  probe
  misc_feature (1)..(25): SEQ ID NO: 3726; WAN024F9Q_at; Start 8; Stop 32
tagctcagctggttagagctctcgg

SEQ ID NO: 197482 - DNA, 25 bp, Artificial
  probe
  misc_feature (1)..(25): SEQ ID NO: 3726; WAN024F9Q_at; Start 35; Stop 59
cataaccgagtggtcgtaggttcaa

SEQ ID NO: 197483 - DNA, 25 bp, Artificial
  probe
  misc_feature (1)..(25): SEQ ID NO: 3256; WAN024F9R_at; Start 9; Stop 33
ggagcagctcggtagctcgtcgggc

SEQ ID NO: 197484 - DNA, 25 bp, Artificial
  probe
  misc_feature (1)..(25): SEQ ID NO: 3256; WAN024F9R_at; Start 1; Stop 25
cgcgggatggagcagctcggtagct

SEQ ID NO: 197485 - DNA, 25 bp, Artificial
  probe
  misc_feature (1)..(25): SEQ ID NO: 3256; WAN024F9R_at; Start 47; Stop 71
gtcgtaggttcaaatcctgctcccg

SEQ ID NO: 197486 - DNA, 25 bp, Artificial
  probe
  misc_feature (1)..(25): SEQ ID NO: 3256; WAN024F9R_at; Start 8; Stop 32
tggagcagctcggtagctcgtcggg

SEQ ID NO: 197487 - DNA, 25 bp, Artificial
  probe
  misc_feature (1)..(25): SEQ ID NO: 3256; WAN024F9R_at; Start 25; Stop 49
tcgtcgggctcataacccgaaggtc

SEQ ID NO: 197488 - DNA, 25 bp, Artificial
  probe
  misc_feature (1)..(25): SEQ ID NO: 3256; WAN024F9R_at; Start 48; Stop 72
tcgtaggttcaaatcctgctcccgc

SEQ ID NO: 197489 - DNA, 25 bp, Artificial
  probe
  misc_feature (1)..(25): SEQ ID NO: 3256; WAN024F9R_at; Start 20; Stop 44
gtagctcgtcgggctcataacccga

SEQ ID NO: 197490 - DNA, 25 bp, Artificial
  probe
  misc_feature (1)..(25): SEQ ID NO: 3256; WAN024F9R_at; Start 45; Stop 69
aggtcgtaggttcaaatcctgctcc

SEQ ID NO: 197491 - DNA, 25 bp, Artificial
  probe
  misc_feature (1)..(25): SEQ ID NO: 3256; WAN024F9R_at; Start 41; Stop 65
ccgaaggtcgtaggttcaaatcctg

SEQ ID NO: 197492 - DNA, 25 bp, Artificial
  probe
  misc_feature (1)..(25): SEQ ID NO: 3256; WAN024F9R_at; Start 50; Stop 74
gtaggttcaaatcctgctcccgcaa

SEQ ID NO: 197493 - DNA, 25 bp, Artificial
  probe
  misc_feature (1)..(25): SEQ ID NO: 3256; WAN024F9R_at; Start 4; Stop 28
gggatggagcagctcggtagctcgt

SEQ ID NO: 197494 - DNA, 25 bp, Artificial
  probe
  misc_feature (1)..(25): SEQ ID NO: 3256; WAN024F9R_at; Start 46; Stop 70
ggtcgtaggttcaaatcctgctccc

SEQ ID NO: 197495 - DNA, 25 bp, Artificial
  probe
  misc_feature (1)..(25): SEQ ID NO: 3256; WAN024F9R_at; Start 42; Stop 66
cgaaggtcgtaggttcaaatcctgc

SEQ ID NO: 197496 - DNA, 25 bp, Artificial
  probe
  misc_feature (1)..(25): SEQ ID NO: 3256; WAN024F9R_at; Start 49; Stop 73
cgtaggttcaaatcctgctcccgca

SEQ ID NO: 197497 - DNA, 25 bp, Artificial
  probe
  misc_feature (1)..(25): SEQ ID NO: 3256; WAN024F9R_at; Start 15; Stop 39
gctcggtagctcgtcgggctcataa

SEQ ID NO: 197498 - DNA, 25 bp, Artificial
  probe
  misc_feature (1)..(25): SEQ ID NO: 3256; WAN024F9R_at; Start 6; Stop 30
gatggagcagctcggtagctcgtcg

SEQ ID NO: 197499 - DNA, 25 bp, Artificial
  probe
  misc_feature (1)..(25): SEQ ID NO: 3256; WAN024F9R_at; Start 14; Stop 38
agctcggtagctcgtcgggctcata

SEQ ID NO: 197500 - DNA, 25 bp, Artificial
  probe
  misc_feature (1)..(25): SEQ ID NO: 3256; WAN024F9R_at; Start 2; Stop 26
gcgggatggagcagctcggtagctc

SEQ ID NO: 197501 - DNA, 25 bp, Artificial
  probe
  misc_feature (1)..(25): SEQ ID NO: 3256; WAN024F9R_at; Start 23; Stop 47
gctcgtcgggctcataacccgaagg

SEQ ID NO: 197502 - DNA, 25 bp, Artificial
  probe
  misc_feature (1)..(25): SEQ ID NO: 3256; WAN024F9R_at; Start 21; Stop 45
tagctcgtcgggctcataacccgaa

SEQ ID NO: 197503 - DNA, 25 bp, Artificial
  probe
  misc_feature (1)..(25): SEQ ID NO: 3256; WAN024F9R_at; Start 17; Stop 41
tcggtagctcgtcgggctcataacc

SEQ ID NO: 197504 - DNA, 25 bp, Artificial
  probe
  misc_feature (1)..(25): SEQ ID NO: 3256; WAN024F9R_at; Start 43; Stop 67
gaaggtcgtaggttcaaatcctgct

SEQ ID NO: 197505 - DNA, 25 bp, Artificial
  probe
  misc_feature (1)..(25): SEQ ID NO: 3256; WAN024F9R_at; Start 26; Stop 50
cgtcgggctcataacccgaaggtcg

SEQ ID NO: 197506 - DNA, 25 bp, Artificial
  probe
  misc_feature (1)..(25): SEQ ID NO: 3256; WAN024F9R_at; Start 3; Stop 27
cgggatggagcagctcggtagctcg

SEQ ID NO: 197507 - DNA, 25 bp, Artificial
  probe
  misc_feature (1)..(25): SEQ ID NO: 3256; WAN024F9R_at; Start 16; Stop 40
ctcggtagctcgtcgggctcataac

SEQ ID NO: 197508 - DNA, 25 bp, Artificial
  probe
  misc_feature (1)..(25): SEQ ID NO: 3256; WAN024F9R_at; Start 19; Stop 43
ggtagctcgtcgggctcataacccg

SEQ ID NO: 197509 - DNA, 25 bp, Artificial
  probe
  misc_feature (1)..(25): SEQ ID NO: 3256; WAN024F9R_at; Start 13; Stop 37
cagctcggtagctcgtcgggctcat

SEQ ID NO: 197510 - DNA, 25 bp, Artificial
  probe
  misc_feature (1)..(25): SEQ ID NO: 3256; WAN024F9R_at; Start 44; Stop 68
aaggtcgtaggttcaaatcctgctc

SEQ ID NO: 197511 - DNA, 25 bp, Artificial
  probe
  misc_feature (1)..(25): SEQ ID NO: 3256; WAN024F9R_at; Start 5; Stop 29
ggatggagcagctcggtagctcgtc

SEQ ID NO: 197512 - DNA, 25 bp, Artificial
  probe
  misc_feature (1)..(25): SEQ ID NO: 3256; WAN024F9R_at; Start 24; Stop 48
ctcgtcgggctcataacccgaaggt

SEQ ID NO: 197513 - DNA, 25 bp, Artificial
  probe
  misc_feature (1)..(25): SEQ ID NO: 3256; WAN024F9R_at; Start 28; Stop 52
tcgggctcataacccgaaggtcgta

SEQ ID NO: 197514 - DNA, 25 bp, Artificial
  probe
  misc_feature (1)..(25): SEQ ID NO: 3256; WAN024F9R_at; Start 11; Stop 35
agcagctcggtagctcgtcgggctc

SEQ ID NO: 197515 - DNA, 25 bp, Artificial
  probe
  misc_feature (1)..(25): SEQ ID NO: 3256; WAN024F9R_at; Start 29; Stop 53
cgggctcataacccgaaggtcgtag

SEQ ID NO: 197516 - DNA, 25 bp, Artificial
  probe
  misc_feature (1)..(25): SEQ ID NO: 3256; WAN024F9R_at; Start 22; Stop 46
agctcgtcgggctcataacccgaag

SEQ ID NO: 197517 - DNA, 25 bp, Artificial
  probe
  misc_feature (1)..(25): SEQ ID NO: 3584; WAN024F9S_at; Start 48; Stop 72
cactggttcgagcccagtacgggtc

SEQ ID NO: 197518 - DNA, 25 bp, Artificial
  probe
  misc_feature (1)..(25): SEQ ID NO: 3584; WAN024F9S_at; Start 29; Stop 53
tgacttttaatcaatgggtcactgg

SEQ ID NO: 197519 - DNA, 25 bp, Artificial
  probe
  misc_feature (1)..(25): SEQ ID NO: 3584; WAN024F9S_at; Start 19; Stop 43
gtagagcaattgacttttaatcaat

SEQ ID NO: 197520 - DNA, 25 bp, Artificial
  probe
  misc_feature (1)..(25): SEQ ID NO: 3584; WAN024F9S_at; Start 49; Stop 73
actggttcgagcccagtacgggtca

SEQ ID NO: 197521 - DNA, 25 bp, Artificial
  probe
  misc_feature (1)..(25): SEQ ID NO: 3584; WAN024F9S_at; Start 39; Stop 63
tcaatgggtcactggttcgagccca

SEQ ID NO: 197522 - DNA, 25 bp, Artificial
  probe
  misc_feature (1)..(25): SEQ ID NO: 3584; WAN024F9S_at; Start 32; Stop 56
cttttaatcaatgggtcactggttc

SEQ ID NO: 197523 - DNA, 25 bp, Artificial
  probe
  misc_feature (1)..(25): SEQ ID NO: 3584; WAN024F9S_at; Start 42; Stop 66
atgggtcactggttcgagcccagta

SEQ ID NO: 197524 - DNA, 25 bp, Artificial
  probe
  misc_feature (1)..(25): SEQ ID NO: 3584; WAN024F9S_at; Start 20; Stop 44
tagagcaattgacttttaatcaatg

SEQ ID NO: 197525 - DNA, 25 bp, Artificial
  probe
  misc_feature (1)..(25): SEQ ID NO: 3584; WAN024F9S_at; Start 30; Stop 54
gacttttaatcaatgggtcactggt

SEQ ID NO: 197526 - DNA, 25 bp, Artificial
  probe
  misc_feature (1)..(25): SEQ ID NO: 3584; WAN024F9S_at; Start 17; Stop 41
tggtagagcaattgacttttaatca

SEQ ID NO: 197527 - DNA, 25 bp, Artificial
  probe
  misc_feature (1)..(25): SEQ ID NO: 3584; WAN024F9S_at; Start 24; Stop 48
gcaattgacttttaatcaatgggtc

SEQ ID NO: 197528 - DNA, 25 bp, Artificial
  probe
  misc_feature (1)..(25): SEQ ID NO: 3584; WAN024F9S_at; Start 25; Stop 49
caattgacttttaatcaatgggtca

SEQ ID NO: 197529 - DNA, 25 bp, Artificial
  probe
  misc_feature (1)..(25): SEQ ID NO: 3584; WAN024F9S_at; Start 27; Stop 51
attgacttttaatcaatgggtcact

SEQ ID NO: 197530 - DNA, 25 bp, Artificial
  probe
  misc_feature (1)..(25): SEQ ID NO: 3584; WAN024F9S_at; Start 43; Stop 67
tgggtcactggttcgagcccagtac

SEQ ID NO: 197531 - DNA, 25 bp, Artificial
  probe
  misc_feature (1)..(25): SEQ ID NO: 3584; WAN024F9S_at; Start 45; Stop 69
ggtcactggttcgagcccagtacgg

SEQ ID NO: 197532 - DNA, 25 bp, Artificial
  probe
  misc_feature (1)..(25): SEQ ID NO: 3584; WAN024F9S_at; Start 18; Stop 42
ggtagagcaattgacttttaatcaa

SEQ ID NO: 197533 - DNA, 25 bp, Artificial
  probe
  misc_feature (1)..(25): SEQ ID NO: 3584; WAN024F9S_at; Start 46; Stop 70
gtcactggttcgagcccagtacggg

SEQ ID NO: 197534 - DNA, 25 bp, Artificial
  probe
  misc_feature (1)..(25): SEQ ID NO: 3584; WAN024F9S_at; Start 23; Stop 47
agcaattgacttttaatcaatgggt

SEQ ID NO: 197535 - DNA, 25 bp, Artificial
  probe
  misc_feature (1)..(25): SEQ ID NO: 3584; WAN024F9S_at; Start 21; Stop 45
agagcaattgacttttaatcaatgg

SEQ ID NO: 197536 - DNA, 25 bp, Artificial
  probe
  misc_feature (1)..(25): SEQ ID NO: 3584; WAN024F9S_at; Start 41; Stop 65
aatgggtcactggttcgagcccagt

SEQ ID NO: 197537 - DNA, 25 bp, Artificial
  probe
  misc_feature (1)..(25): SEQ ID NO: 3584; WAN024F9S_at; Start 22; Stop 46
gagcaattgacttttaatcaatggg

SEQ ID NO: 197538 - DNA, 25 bp, Artificial
  probe
  misc_feature (1)..(25): SEQ ID NO: 3584; WAN024F9S_at; Start 37; Stop 61
aatcaatgggtcactggttcgagcc

SEQ ID NO: 197539 - DNA, 25 bp, Artificial
  probe
  misc_feature (1)..(25): SEQ ID NO: 3584; WAN024F9S_at; Start 28; Stop 52
ttgacttttaatcaatgggtcactg

SEQ ID NO: 197540 - DNA, 25 bp, Artificial
  probe
  misc_feature (1)..(25): SEQ ID NO: 3584; WAN024F9S_at; Start 38; Stop 62
atcaatgggtcactggttcgagccc

SEQ ID NO: 197541 - DNA, 25 bp, Artificial
  probe
  misc_feature (1)..(25): SEQ ID NO: 3584; WAN024F9S_at; Start 31; Stop 55
acttttaatcaatgggtcactggtt

SEQ ID NO: 197542 - DNA, 25 bp, Artificial
  probe
  misc_feature (1)..(25): SEQ ID NO: 3584; WAN024F9S_at; Start 14; Stop 38
agttggtagagcaattgacttttaa

SEQ ID NO: 197543 - DNA, 25 bp, Artificial
  probe
  misc_feature (1)..(25): SEQ ID NO: 3584; WAN024F9S_at; Start 16; Stop 40
ttggtagagcaattgacttttaatc

SEQ ID NO: 197544 - DNA, 25 bp, Artificial
  probe
  misc_feature (1)..(25): SEQ ID NO: 3584; WAN024F9S_at; Start 47; Stop 71
tcactggttcgagcccagtacgggt

SEQ ID NO: 197545 - DNA, 25 bp, Artificial
  probe
  misc_feature (1)..(25): SEQ ID NO: 3584; WAN024F9S_at; Start 34; Stop 58
tttaatcaatgggtcactggttcga

SEQ ID NO: 197546 - DNA, 25 bp, Artificial
  probe
  misc_feature (1)..(25): SEQ ID NO: 3584; WAN024F9S_at; Start 15; Stop 39
gttggtagagcaattgacttttaat

SEQ ID NO: 197547 - DNA, 25 bp, Artificial
  probe
  misc_feature (1)..(25): SEQ ID NO: 3584; WAN024F9S_at; Start 26; Stop 50
aattgacttttaatcaatgggtcac

SEQ ID NO: 197548 - DNA, 25 bp, Artificial
  probe
  misc_feature (1)..(25): SEQ ID NO: 3584; WAN024F9S_at; Start 40; Stop 64
caatgggtcactggttcgagcccag

SEQ ID NO: 197549 - DNA, 25 bp, Artificial
  probe
  misc_feature (1)..(25): SEQ ID NO: 3584; WAN024F9S_at; Start 36; Stop 60
taatcaatgggtcactggttcgagc

SEQ ID NO: 197550 - DNA, 25 bp, Artificial
  probe
  misc_feature (1)..(25): SEQ ID NO: 3584; WAN024F9S_at; Start 35; Stop 59
ttaatcaatgggtcactggttcgag

SEQ ID NO: 197551 - DNA, 25 bp, Artificial
  probe
  misc_feature (1)..(25): SEQ ID NO: 3745; WAN024F9T_at; Start 27; Stop 51
atggattgaagctccatgtgtcggc

SEQ ID NO: 197552 - DNA, 25 bp, Artificial
  probe
  misc_feature (1)..(25): SEQ ID NO: 3745; WAN024F9T_at; Start 30; Stop 54
gattgaagctccatgtgtcggcggt

SEQ ID NO: 197553 - DNA, 25 bp, Artificial
  probe
  misc_feature (1)..(25): SEQ ID NO: 3745; WAN024F9T_at; Start 44; Stop 68
gtgtcggcggttcgattccgtctcg

SEQ ID NO: 197554 - DNA, 25 bp, Artificial
  probe
  misc_feature (1)..(25): SEQ ID NO: 3745; WAN024F9T_at; Start 47; Stop 71
tcggcggttcgattccgtctcgcgc

SEQ ID NO: 197555 - DNA, 25 bp, Artificial
  probe
  misc_feature (1)..(25): SEQ ID NO: 3745; WAN024F9T_at; Start 18; Stop 42
ggtagagcaatggattgaagctcca

SEQ ID NO: 197556 - DNA, 25 bp, Artificial
  probe
  misc_feature (1)..(25): SEQ ID NO: 3745; WAN024F9T_at; Start 36; Stop 60
agctccatgtgtcggcggttcgatt

SEQ ID NO: 197557 - DNA, 25 bp, Artificial
  probe
  misc_feature (1)..(25): SEQ ID NO: 3745; WAN024F9T_at; Start 35; Stop 59
aagctccatgtgtcggcggttcgat

SEQ ID NO: 197558 - DNA, 25 bp, Artificial
  probe
  misc_feature (1)..(25): SEQ ID NO: 3745; WAN024F9T_at; Start 38; Stop 62
ctccatgtgtcggcggttcgattcc

SEQ ID NO: 197559 - DNA, 25 bp, Artificial
  probe
  misc_feature (1)..(25): SEQ ID NO: 3745; WAN024F9T_at; Start 42; Stop 66
atgtgtcggcggttcgattccgtct

SEQ ID NO: 197560 - DNA, 25 bp, Artificial
  probe
  misc_feature (1)..(25): SEQ ID NO: 3745; WAN024F9T_at; Start 29; Stop 53
ggattgaagctccatgtgtcggcgg

SEQ ID NO: 197561 - DNA, 25 bp, Artificial
  probe
  misc_feature (1)..(25): SEQ ID NO: 3745; WAN024F9T_at; Start 22; Stop 46
gagcaatggattgaagctccatgtg

SEQ ID NO: 197562 - DNA, 25 bp, Artificial
  probe
  misc_feature (1)..(25): SEQ ID NO: 3745; WAN024F9T_at; Start 32; Stop 56
ttgaagctccatgtgtcggcggttc

SEQ ID NO: 197563 - DNA, 25 bp, Artificial
  probe
  misc_feature (1)..(25): SEQ ID NO: 3745; WAN024F9T_at; Start 21; Stop 45
agagcaatggattgaagctccatgt

SEQ ID NO: 197564 - DNA, 25 bp, Artificial
  probe
  misc_feature (1)..(25): SEQ ID NO: 3745; WAN024F9T_at; Start 46; Stop 70
gtcggcggttcgattccgtctcgcg

SEQ ID NO: 197565 - DNA, 25 bp, Artificial
  probe
  misc_feature (1)..(25): SEQ ID NO: 3745; WAN024F9T_at; Start 25; Stop 49
caatggattgaagctccatgtgtcg

SEQ ID NO: 197566 - DNA, 25 bp, Artificial
  probe
  misc_feature (1)..(25): SEQ ID NO: 3745; WAN024F9T_at; Start 34; Stop 58
gaagctccatgtgtcggcggttcga

SEQ ID NO: 197567 - DNA, 25 bp, Artificial
  probe
  misc_feature (1)..(25): SEQ ID NO: 3745; WAN024F9T_at; Start 37; Stop 61
gctccatgtgtcggcggttcgattc

SEQ ID NO: 197568 - DNA, 25 bp, Artificial
  probe
  misc_feature (1)..(25): SEQ ID NO: 3745; WAN024F9T_at; Start 15; Stop 39
gttggtagagcaatggattgaagct

SEQ ID NO: 197569 - DNA, 25 bp, Artificial
  probe
  misc_feature (1)..(25): SEQ ID NO: 3745; WAN024F9T_at; Start 48; Stop 72
cggcggttcgattccgtctcgcgcc

SEQ ID NO: 197570 - DNA, 25 bp, Artificial
  probe
  misc_feature (1)..(25): SEQ ID NO: 3745; WAN024F9T_at; Start 14; Stop 38
agttggtagagcaatggattgaagc

SEQ ID NO: 197571 - DNA, 25 bp, Artificial
  probe
  misc_feature (1)..(25): SEQ ID NO: 3745; WAN024F9T_at; Start 43; Stop 67
tgtgtcggcggttcgattccgtctc

SEQ ID NO: 197572 - DNA, 25 bp, Artificial
  probe
  misc_feature (1)..(25): SEQ ID NO: 3745; WAN024F9T_at; Start 17; Stop 41
tggtagagcaatggattgaagctcc

SEQ ID NO: 197573 - DNA, 25 bp, Artificial
  probe
  misc_feature (1)..(25): SEQ ID NO: 3745; WAN024F9T_at; Start 41; Stop 65
catgtgtcggcggttcgattccgtc

SEQ ID NO: 197574 - DNA, 25 bp, Artificial
  probe
  misc_feature (1)..(25): SEQ ID NO: 3745; WAN024F9T_at; Start 19; Stop 43
gtagagcaatggattgaagctccat

SEQ ID NO: 197575 - DNA, 25 bp, Artificial
  probe
  misc_feature (1)..(25): SEQ ID NO: 3745; WAN024F9T_at; Start 49; Stop 73
ggcggttcgattccgtctcgcgcca

SEQ ID NO: 197576 - DNA, 25 bp, Artificial
  probe
  misc_feature (1)..(25): SEQ ID NO: 3745; WAN024F9T_at; Start 33; Stop 57
tgaagctccatgtgtcggcggttcg

SEQ ID NO: 197577 - DNA, 25 bp, Artificial
  probe
  misc_feature (1)..(25): SEQ ID NO: 3745; WAN024F9T_at; Start 20; Stop 44
tagagcaatggattgaagctccatg

SEQ ID NO: 197578 - DNA, 25 bp, Artificial
  probe
  misc_feature (1)..(25): SEQ ID NO: 3745; WAN024F9T_at; Start 28; Stop 52
tggattgaagctccatgtgtcggcg

SEQ ID NO: 197579 - DNA, 25 bp, Artificial
  probe
  misc_feature (1)..(25): SEQ ID NO: 3745; WAN024F9T_at; Start 16; Stop 40
ttggtagagcaatggattgaagctc

SEQ ID NO: 197580 - DNA, 25 bp, Artificial
  probe
  misc_feature (1)..(25): SEQ ID NO: 3745; WAN024F9T_at; Start 24; Stop 48
gcaatggattgaagctccatgtgtc

SEQ ID NO: 197581 - DNA, 25 bp, Artificial
  probe
  misc_feature (1)..(25): SEQ ID NO: 3745; WAN024F9T_at; Start 26; Stop 50
aatggattgaagctccatgtgtcgg

SEQ ID NO: 197582 - DNA, 25 bp, Artificial
  probe
  misc_feature (1)..(25): SEQ ID NO: 3745; WAN024F9T_at; Start 45; Stop 69
tgtcggcggttcgattccgtctcgc

SEQ ID NO: 197583 - DNA, 25 bp, Artificial
  probe
  misc_feature (1)..(25): SEQ ID NO: 3745; WAN024F9T_at; Start 31; Stop 55
attgaagctccatgtgtcggcggtt

SEQ ID NO: 197584 - DNA, 25 bp, Artificial
  probe
  misc_feature (1)..(25): SEQ ID NO: 3745; WAN024F9T_at; Start 23; Stop 47
agcaatggattgaagctccatgtgt

SEQ ID NO: 197585 - DNA, 25 bp, Artificial
  probe
  misc_feature (1)..(25): SEQ ID NO: 3037; WAN024F9U_at; Start 84; Stop 108
tccgctatttttcacgatgaccata

SEQ ID NO: 197586 - DNA, 25 bp, Artificial
  probe
  misc_feature (1)..(25): SEQ ID NO: 3037; WAN024F9U_at; Start 215; Stop 239
cgcgattgacaaaacgaccgatttc

SEQ ID NO: 197587 - DNA, 25 bp, Artificial
  probe
  misc_feature (1)..(25): SEQ ID NO: 3037; WAN024F9U_at; Start 79; Stop 103
gcatctccgctatttttcacgatga

SEQ ID NO: 197588 - DNA, 25 bp, Artificial
  probe
  misc_feature (1)..(25): SEQ ID NO: 3037; WAN024F9U_at; Start 94; Stop 118
ttcacgatgaccataaggacatcac

SEQ ID NO: 197589 - DNA, 25 bp, Artificial
  probe
  misc_feature (1)..(25): SEQ ID NO: 3037; WAN024F9U_at; Start 87; Stop 111
gctatttttcacgatgaccataagg

SEQ ID NO: 197590 - DNA, 25 bp, Artificial
  probe
  misc_feature (1)..(25): SEQ ID NO: 3037; WAN024F9U_at; Start 219; Stop 243
attgacaaaacgaccgatttccttg

SEQ ID NO: 197591 - DNA, 25 bp, Artificial
  probe
  misc_feature (1)..(25): SEQ ID NO: 3037; WAN024F9U_at; Start 250; Stop 274
tctagaacaacaaggctaggaattc

SEQ ID NO: 197592 - DNA, 25 bp, Artificial
  probe
  misc_feature (1)..(25): SEQ ID NO: 3037; WAN024F9U_at; Start 102; Stop 126
gaccataaggacatcaccgacatgt

SEQ ID NO: 197593 - DNA, 25 bp, Artificial
  probe
  misc_feature (1)..(25): SEQ ID NO: 3037; WAN024F9U_at; Start 2; Stop 26
tgttccaagctactgtttccccatt

SEQ ID NO: 197594 - DNA, 25 bp, Artificial
  probe
  misc_feature (1)..(25): SEQ ID NO: 3037; WAN024F9U_at; Start 104; Stop 128
ccataaggacatcaccgacatgttc

SEQ ID NO: 197595 - DNA, 25 bp, Artificial
  probe
  misc_feature (1)..(25): SEQ ID NO: 3037; WAN024F9U_at; Start 234; Stop 258
gatttccttgtccttttctagaaca

SEQ ID NO: 197596 - DNA, 25 bp, Artificial
  probe
  misc_feature (1)..(25): SEQ ID NO: 3037; WAN024F9U_at; Start 144; Stop 168
aatcattgtttcctttttctcctat

SEQ ID NO: 197597 - DNA, 25 bp, Artificial
  probe
  misc_feature (1)..(25): SEQ ID NO: 3037; WAN024F9U_at; Start 254; Stop 278
gaacaacaaggctaggaattccgta

SEQ ID NO: 197598 - DNA, 25 bp, Artificial
  probe
  misc_feature (1)..(25): SEQ ID NO: 3037; WAN024F9U_at; Start 5; Stop 29
tccaagctactgtttccccattttc

SEQ ID NO: 197599 - DNA, 25 bp, Artificial
  probe
  misc_feature (1)..(25): SEQ ID NO: 3037; WAN024F9U_at; Start 216; Stop 240
gcgattgacaaaacgaccgatttcc

SEQ ID NO: 197600 - DNA, 25 bp, Artificial
  probe
  misc_feature (1)..(25): SEQ ID NO: 3037; WAN024F9U_at; Start 89; Stop 113
tatttttcacgatgaccataaggac

SEQ ID NO: 197601 - DNA, 25 bp, Artificial
  probe
  misc_feature (1)..(25): SEQ ID NO: 3037; WAN024F9U_at; Start 101; Stop 125
tgaccataaggacatcaccgacatg

SEQ ID NO: 197602 - DNA, 25 bp, Artificial
  probe
  misc_feature (1)..(25): SEQ ID NO: 3037; WAN024F9U_at; Start 11; Stop 35
ctactgtttccccattttctttgag

SEQ ID NO: 197603 - DNA, 25 bp, Artificial
  probe
  misc_feature (1)..(25): SEQ ID NO: 3037; WAN024F9U_at; Start 242; Stop 266
tgtccttttctagaacaacaaggct

SEQ ID NO: 197604 - DNA, 25 bp, Artificial
  probe
  misc_feature (1)..(25): SEQ ID NO: 3037; WAN024F9U_at; Start 207; Stop 231
tttacggtcgcgattgacaaaacga

SEQ ID NO: 197605 - DNA, 25 bp, Artificial
  probe
  misc_feature (1)..(25): SEQ ID NO: 3037; WAN024F9U_at; Start 105; Stop 129
cataaggacatcaccgacatgttct

SEQ ID NO: 197606 - DNA, 25 bp, Artificial
  probe
  misc_feature (1)..(25): SEQ ID NO: 3037; WAN024F9U_at; Start 76; Stop 100
ttggcatctccgctatttttcacga

SEQ ID NO: 197607 - DNA, 25 bp, Artificial
  probe
  misc_feature (1)..(25): SEQ ID NO: 3037; WAN024F9U_at; Start 72; Stop 96
cagtttggcatctccgctatttttc

SEQ ID NO: 197608 - DNA, 25 bp, Artificial
  probe
  misc_feature (1)..(25): SEQ ID NO: 3037; WAN024F9U_at; Start 82; Stop 106
tctccgctatttttcacgatgacca

SEQ ID NO: 197609 - DNA, 25 bp, Artificial
  probe
  misc_feature (1)..(25): SEQ ID NO: 3037; WAN024F9U_at; Start 99; Stop 123
gatgaccataaggacatcaccgaca

SEQ ID NO: 197610 - DNA, 25 bp, Artificial
  probe
  misc_feature (1)..(25): SEQ ID NO: 3037; WAN024F9U_at; Start 209; Stop 233
tacggtcgcgattgacaaaacgacc

SEQ ID NO: 197611 - DNA, 25 bp, Artificial
  probe
  misc_feature (1)..(25): SEQ ID NO: 3037; WAN024F9U_at; Start 217; Stop 241
cgattgacaaaacgaccgatttcct

SEQ ID NO: 197612 - DNA, 25 bp, Artificial
  probe
  misc_feature (1)..(25): SEQ ID NO: 3037; WAN024F9U_at; Start 212; Stop 236
ggtcgcgattgacaaaacgaccgat

SEQ ID NO: 197613 - DNA, 25 bp, Artificial
  probe
  misc_feature (1)..(25): SEQ ID NO: 3037; WAN024F9U_at; Start 247; Stop 271
ttttctagaacaacaaggctaggaa

SEQ ID NO: 197614 - DNA, 25 bp, Artificial
  probe
  misc_feature (1)..(25): SEQ ID NO: 3037; WAN024F9U_at; Start 106; Stop 130
ataaggacatcaccgacatgttctt

SEQ ID NO: 197615 - DNA, 25 bp, Artificial
  probe
  misc_feature (1)..(25): SEQ ID NO: 3037; WAN024F9U_at; Start 91; Stop 115
tttttcacgatgaccataaggacat

SEQ ID NO: 197616 - DNA, 25 bp, Artificial
  probe
  misc_feature (1)..(25): SEQ ID NO: 3037; WAN024F9U_at; Start 245; Stop 269
ccttttctagaacaacaaggctagg

SEQ ID NO: 197617 - DNA, 25 bp, Artificial
  probe
  misc_feature (1)..(25): SEQ ID NO: 3037; WAN024F9U_at; Start 92; Stop 116
ttttcacgatgaccataaggacatc

SEQ ID NO: 197618 - DNA, 25 bp, Artificial
  probe
  misc_feature (1)..(25): SEQ ID NO: 3037; WAN024F9U_at; Start 96; Stop 120
cacgatgaccataaggacatcaccg

SEQ ID NO: 197619 - DNA, 25 bp, Artificial
  probe
  misc_feature (1)..(25): SEQ ID NO: 5365; WAN024F9V_at; Start 187; Stop 211
tgcgactgcaacttggcagatgttg

SEQ ID NO: 197620 - DNA, 25 bp, Artificial
  probe
  misc_feature (1)..(25): SEQ ID NO: 5365; WAN024F9V_at; Start 350; Stop 374
aaaaagacttgaccgcgctctgcaa

SEQ ID NO: 197621 - DNA, 25 bp, Artificial
  probe
  misc_feature (1)..(25): SEQ ID NO: 5365; WAN024F9V_at; Start 348; Stop 372
tcaaaaagacttgaccgcgctctgc

SEQ ID NO: 197622 - DNA, 25 bp, Artificial
  probe
  misc_feature (1)..(25): SEQ ID NO: 5365; WAN024F9V_at; Start 320; Stop 344
tggttcaaacgagcgacttgctcat

SEQ ID NO: 197623 - DNA, 25 bp, Artificial
  probe
  misc_feature (1)..(25): SEQ ID NO: 5365; WAN024F9V_at; Start 355; Stop 379
gacttgaccgcgctctgcaatttca

SEQ ID NO: 197624 - DNA, 25 bp, Artificial
  probe
  misc_feature (1)..(25): SEQ ID NO: 5365; WAN024F9V_at; Start 185; Stop 209
cttgcgactgcaacttggcagatgt

SEQ ID NO: 197625 - DNA, 25 bp, Artificial
  probe
  misc_feature (1)..(25): SEQ ID NO: 5365; WAN024F9V_at; Start 9; Stop 33
catttggcaaatgcaattcacgagg

SEQ ID NO: 197626 - DNA, 25 bp, Artificial
  probe
  misc_feature (1)..(25): SEQ ID NO: 5365; WAN024F9V_at; Start 330; Stop 354
gagcgacttgctcatctgtcaaaaa

SEQ ID NO: 197627 - DNA, 25 bp, Artificial
  probe
  misc_feature (1)..(25): SEQ ID NO: 5365; WAN024F9V_at; Start 258; Stop 282
caacaaacttaggttccttatcatt

SEQ ID NO: 197628 - DNA, 25 bp, Artificial
  probe
  misc_feature (1)..(25): SEQ ID NO: 5365; WAN024F9V_at; Start 183; Stop 207
cacttgcgactgcaacttggcagat

SEQ ID NO: 197629 - DNA, 25 bp, Artificial
  probe
  misc_feature (1)..(25): SEQ ID NO: 5365; WAN024F9V_at; Start 324; Stop 348
tcaaacgagcgacttgctcatctgt

SEQ ID NO: 197630 - DNA, 25 bp, Artificial
  probe
  misc_feature (1)..(25): SEQ ID NO: 5365; WAN024F9V_at; Start 338; Stop 362
tgctcatctgtcaaaaagacttgac

SEQ ID NO: 197631 - DNA, 25 bp, Artificial
  probe
  misc_feature (1)..(25): SEQ ID NO: 5365; WAN024F9V_at; Start 322; Stop 346
gttcaaacgagcgacttgctcatct

SEQ ID NO: 197632 - DNA, 25 bp, Artificial
  probe
  misc_feature (1)..(25): SEQ ID NO: 5365; WAN024F9V_at; Start 272; Stop 296
tccttatcattaacaatttcttctg

SEQ ID NO: 197633 - DNA, 25 bp, Artificial
  probe
  misc_feature (1)..(25): SEQ ID NO: 5365; WAN024F9V_at; Start 11; Stop 35
tttggcaaatgcaattcacgaggac

SEQ ID NO: 197634 - DNA, 25 bp, Artificial
  probe
  misc_feature (1)..(25): SEQ ID NO: 5365; WAN024F9V_at; Start 359; Stop 383
tgaccgcgctctgcaatttcaaata

SEQ ID NO: 197635 - DNA, 25 bp, Artificial
  probe
  misc_feature (1)..(25): SEQ ID NO: 5365; WAN024F9V_at; Start 344; Stop 368
tctgtcaaaaagacttgaccgcgct

SEQ ID NO: 197636 - DNA, 25 bp, Artificial
  probe
  misc_feature (1)..(25): SEQ ID NO: 5365; WAN024F9V_at; Start 336; Stop 360
cttgctcatctgtcaaaaagacttg

SEQ ID NO: 197637 - DNA, 25 bp, Artificial
  probe
  misc_feature (1)..(25): SEQ ID NO: 5365; WAN024F9V_at; Start 357; Stop 381
cttgaccgcgctctgcaatttcaaa

SEQ ID NO: 197638 - DNA, 25 bp, Artificial
  probe
  misc_feature (1)..(25): SEQ ID NO: 5365; WAN024F9V_at; Start 267; Stop 291
taggttccttatcattaacaatttc

SEQ ID NO: 197639 - DNA, 25 bp, Artificial
  probe
  misc_feature (1)..(25): SEQ ID NO: 5365; WAN024F9V_at; Start 334; Stop 358
gacttgctcatctgtcaaaaagact

SEQ ID NO: 197640 - DNA, 25 bp, Artificial
  probe
  misc_feature (1)..(25): SEQ ID NO: 5365; WAN024F9V_at; Start 360; Stop 384
gaccgcgctctgcaatttcaaataa

SEQ ID NO: 197641 - DNA, 25 bp, Artificial
  probe
  misc_feature (1)..(25): SEQ ID NO: 5365; WAN024F9V_at; Start 2; Stop 26
tgcggagcatttggcaaatgcaatt

SEQ ID NO: 197642 - DNA, 25 bp, Artificial
  probe
  misc_feature (1)..(25): SEQ ID NO: 5365; WAN024F9V_at; Start 12; Stop 36
ttggcaaatgcaattcacgaggact

SEQ ID NO: 197643 - DNA, 25 bp, Artificial
  probe
  misc_feature (1)..(25): SEQ ID NO: 5365; WAN024F9V_at; Start 317; Stop 341
tcttggttcaaacgagcgacttgct

SEQ ID NO: 197644 - DNA, 25 bp, Artificial
  probe
  misc_feature (1)..(25): SEQ ID NO: 5365; WAN024F9V_at; Start 278; Stop 302
tcattaacaatttcttctgtaaaac

SEQ ID NO: 197645 - DNA, 25 bp, Artificial
  probe
  misc_feature (1)..(25): SEQ ID NO: 5365; WAN024F9V_at; Start 346; Stop 370
tgtcaaaaagacttgaccgcgctct

SEQ ID NO: 197646 - DNA, 25 bp, Artificial
  probe
  misc_feature (1)..(25): SEQ ID NO: 5365; WAN024F9V_at; Start 314; Stop 338
aactcttggttcaaacgagcgactt

SEQ ID NO: 197647 - DNA, 25 bp, Artificial
  probe
  misc_feature (1)..(25): SEQ ID NO: 5365; WAN024F9V_at; Start 189; Stop 213
cgactgcaacttggcagatgttgag

SEQ ID NO: 197648 - DNA, 25 bp, Artificial
  probe
  misc_feature (1)..(25): SEQ ID NO: 5365; WAN024F9V_at; Start 332; Stop 356
gcgacttgctcatctgtcaaaaaga

SEQ ID NO: 197649 - DNA, 25 bp, Artificial
  probe
  misc_feature (1)..(25): SEQ ID NO: 5365; WAN024F9V_at; Start 327; Stop 351
aacgagcgacttgctcatctgtcaa

SEQ ID NO: 197650 - DNA, 25 bp, Artificial
  probe
  misc_feature (1)..(25): SEQ ID NO: 5365; WAN024F9V_at; Start 341; Stop 365
tcatctgtcaaaaagacttgaccgc

SEQ ID NO: 197651 - DNA, 25 bp, Artificial
  probe
  misc_feature (1)..(25): SEQ ID NO: 5365; WAN024F9V_at; Start 318; Stop 342
cttggttcaaacgagcgacttgctc

SEQ ID NO: 197652 - DNA, 25 bp, Artificial
  probe
  misc_feature (1)..(25): SEQ ID NO: 5365; WAN024F9V_at; Start 182; Stop 206
tcacttgcgactgcaacttggcaga

SEQ ID NO: 197653 - DNA, 25 bp, Artificial
  probe
  misc_feature (1)..(25): SEQ ID NO: 1686; WAN024F9W_at; Start 90; Stop 114
cgattgtcgttatatttatcctgcc

SEQ ID NO: 197654 - DNA, 25 bp, Artificial
  probe
  misc_feature (1)..(25): SEQ ID NO: 1686; WAN024F9W_at; Start 214; Stop 238
cctagccttgttgttctagaaaagg

SEQ ID NO: 197655 - DNA, 25 bp, Artificial
  probe
  misc_feature (1)..(25): SEQ ID NO: 1686; WAN024F9W_at; Start 9; Stop 33
gccagcaagtttagaagaattagca

SEQ ID NO: 197656 - DNA, 25 bp, Artificial
  probe
  misc_feature (1)..(25): SEQ ID NO: 1686; WAN024F9W_at; Start 100; Stop 124
tatatttatcctgccttaccagaga

SEQ ID NO: 197657 - DNA, 25 bp, Artificial
  probe
  misc_feature (1)..(25): SEQ ID NO: 1686; WAN024F9W_at; Start 240; Stop 264
caaggaaatcggtcgttttgtcaat

SEQ ID NO: 197658 - DNA, 25 bp, Artificial
  probe
  misc_feature (1)..(25): SEQ ID NO: 1686; WAN024F9W_at; Start 5; Stop 29
tacagccagcaagtttagaagaatt

SEQ ID NO: 197659 - DNA, 25 bp, Artificial
  probe
  misc_feature (1)..(25): SEQ ID NO: 1686; WAN024F9W_at; Start 25; Stop 49
gaattagcatctttagtggaaaaag

SEQ ID NO: 197660 - DNA, 25 bp, Artificial
  probe
  misc_feature (1)..(25): SEQ ID NO: 1686; WAN024F9W_at; Start 180; Stop 204
ggatttggccaaactctgggatgtt

SEQ ID NO: 197661 - DNA, 25 bp, Artificial
  probe
  misc_feature (1)..(25): SEQ ID NO: 1686; WAN024F9W_at; Start 158; Stop 182
gaatggaccgagatcagtatatgga

SEQ ID NO: 197662 - DNA, 25 bp, Artificial
  probe
  misc_feature (1)..(25): SEQ ID NO: 1686; WAN024F9W_at; Start 140; Stop 164
cagagttcacctttattcgaatgga

SEQ ID NO: 197663 - DNA, 25 bp, Artificial
  probe
  misc_feature (1)..(25): SEQ ID NO: 1686; WAN024F9W_at; Start 31; Stop 55
gcatctttagtggaaaaagcgggca

SEQ ID NO: 197664 - DNA, 25 bp, Artificial
  probe
  misc_feature (1)..(25): SEQ ID NO: 1686; WAN024F9W_at; Start 225; Stop 249
tgttctagaaaaggacaaggaaatc

SEQ ID NO: 197665 - DNA, 25 bp, Artificial
  probe
  misc_feature (1)..(25): SEQ ID NO: 1686; WAN024F9W_at; Start 2; Stop 26
tgatacagccagcaagtttagaaga

SEQ ID NO: 197666 - DNA, 25 bp, Artificial
  probe
  misc_feature (1)..(25): SEQ ID NO: 1686; WAN024F9W_at; Start 193; Stop 217
ctctgggatgtttacggaattccta

SEQ ID NO: 197667 - DNA, 25 bp, Artificial
  probe
  misc_feature (1)..(25): SEQ ID NO: 1686; WAN024F9W_at; Start 252; Stop 276
tcgttttgtcaatcgcgaccgtaaa

SEQ ID NO: 197668 - DNA, 25 bp, Artificial
  probe
  misc_feature (1)..(25): SEQ ID NO: 1686; WAN024F9W_at; Start 153; Stop 177
tattcgaatggaccgagatcagtat

SEQ ID NO: 197669 - DNA, 25 bp, Artificial
  probe
  misc_feature (1)..(25): SEQ ID NO: 1686; WAN024F9W_at; Start 11; Stop 35
cagcaagtttagaagaattagcatc

SEQ ID NO: 197670 - DNA, 25 bp, Artificial
  probe
  misc_feature (1)..(25): SEQ ID NO: 1686; WAN024F9W_at; Start 174; Stop 198
gtatatggatttggccaaactctgg

SEQ ID NO: 197671 - DNA, 25 bp, Artificial
  probe
  misc_feature (1)..(25): SEQ ID NO: 1686; WAN024F9W_at; Start 165; Stop 189
ccgagatcagtatatggatttggcc

SEQ ID NO: 197672 - DNA, 25 bp, Artificial
  probe
  misc_feature (1)..(25): SEQ ID NO: 1686; WAN024F9W_at; Start 199; Stop 223
gatgtttacggaattcctagccttg

SEQ ID NO: 197673 - DNA, 25 bp, Artificial
  probe
  misc_feature (1)..(25): SEQ ID NO: 1686; WAN024F9W_at; Start 177; Stop 201
tatggatttggccaaactctgggat

SEQ ID NO: 197674 - DNA, 25 bp, Artificial
  probe
  misc_feature (1)..(25): SEQ ID NO: 1686; WAN024F9W_at; Start 130; Stop 154
gagaccaatccagagttcaccttta

SEQ ID NO: 197675 - DNA, 25 bp, Artificial
  probe
  misc_feature (1)..(25): SEQ ID NO: 1686; WAN024F9W_at; Start 169; Stop 193
gatcagtatatggatttggccaaac

SEQ ID NO: 197676 - DNA, 25 bp, Artificial
  probe
  misc_feature (1)..(25): SEQ ID NO: 1686; WAN024F9W_at; Start 135; Stop 159
caatccagagttcacctttattcga

SEQ ID NO: 197677 - DNA, 25 bp, Artificial
  probe
  misc_feature (1)..(25): SEQ ID NO: 1686; WAN024F9W_at; Start 34; Stop 58
tctttagtggaaaaagcgggcaaga

SEQ ID NO: 197678 - DNA, 25 bp, Artificial
  probe
  misc_feature (1)..(25): SEQ ID NO: 1686; WAN024F9W_at; Start 104; Stop 128
tttatcctgccttaccagagattga

SEQ ID NO: 197679 - DNA, 25 bp, Artificial
  probe
  misc_feature (1)..(25): SEQ ID NO: 1686; WAN024F9W_at; Start 244; Stop 268
gaaatcggtcgttttgtcaatcgcg

SEQ ID NO: 197680 - DNA, 25 bp, Artificial
  probe
  misc_feature (1)..(25): SEQ ID NO: 1686; WAN024F9W_at; Start 146; Stop 170
tcacctttattcgaatggaccgaga

SEQ ID NO: 197681 - DNA, 25 bp, Artificial
  probe
  misc_feature (1)..(25): SEQ ID NO: 1686; WAN024F9W_at; Start 184; Stop 208
ttggccaaactctgggatgtttacg

SEQ ID NO: 197682 - DNA, 25 bp, Artificial
  probe
  misc_feature (1)..(25): SEQ ID NO: 1686; WAN024F9W_at; Start 205; Stop 229
tacggaattcctagccttgttgttc

SEQ ID NO: 197683 - DNA, 25 bp, Artificial
  probe
  misc_feature (1)..(25): SEQ ID NO: 1686; WAN024F9W_at; Start 187; Stop 211
gccaaactctgggatgtttacggaa

SEQ ID NO: 197684 - DNA, 25 bp, Artificial
  probe
  misc_feature (1)..(25): SEQ ID NO: 1686; WAN024F9W_at; Start 218; Stop 242
gccttgttgttctagaaaaggacaa

SEQ ID NO: 197685 - DNA, 25 bp, Artificial
  probe
  misc_feature (1)..(25): SEQ ID NO: 1686; WAN024F9W_at; Start 149; Stop 173
cctttattcgaatggaccgagatca

SEQ ID NO: 197686 - DNA, 25 bp, Artificial
  probe
  misc_feature (1)..(25): SEQ ID NO: 1686; WAN024F9W_at; Start 209; Stop 233
gaattcctagccttgttgttctaga

SEQ ID NO: 197687 - DNA, 25 bp, Artificial
  probe
  misc_feature (1)..(25): SEQ ID NO: 1877; WAN024F9X_at; Start 329; Stop 353
gtgaccacctcaacatctgccaagt

SEQ ID NO: 197688 - DNA, 25 bp, Artificial
  probe
  misc_feature (1)..(25): SEQ ID NO: 1877; WAN024F9X_at; Start 572; Stop 596
cagaagaccaagttgtcggaacacc

SEQ ID NO: 197689 - DNA, 25 bp, Artificial
  probe
  misc_feature (1)..(25): SEQ ID NO: 1877; WAN024F9X_at; Start 259; Stop 283
gaaattgttaatgataaggaaccta

SEQ ID NO: 197690 - DNA, 25 bp, Artificial
  probe
  misc_feature (1)..(25): SEQ ID NO: 1877; WAN024F9X_at; Start 564; Stop 588
tgaattatcagaagaccaagttgtc

SEQ ID NO: 197691 - DNA, 25 bp, Artificial
  probe
  misc_feature (1)..(25): SEQ ID NO: 1877; WAN024F9X_at; Start 328; Stop 352
agtgaccacctcaacatctgccaag

SEQ ID NO: 197692 - DNA, 25 bp, Artificial
  probe
  misc_feature (1)..(25): SEQ ID NO: 1877; WAN024F9X_at; Start 268; Stop 292
aatgataaggaacctaagtttgttg

SEQ ID NO: 197693 - DNA, 25 bp, Artificial
  probe
  misc_feature (1)..(25): SEQ ID NO: 1877; WAN024F9X_at; Start 39; Stop 63
ccttatggtcatcgtgaaaaatagc

SEQ ID NO: 197694 - DNA, 25 bp, Artificial
  probe
  misc_feature (1)..(25): SEQ ID NO: 1877; WAN024F9X_at; Start 208; Stop 232
gagcaagtcgctcgtttgaaccaag

SEQ ID NO: 197695 - DNA, 25 bp, Artificial
  probe
  misc_feature (1)..(25): SEQ ID NO: 1877; WAN024F9X_at; Start 248; Stop 272
gttttacagaagaaattgttaatga

SEQ ID NO: 197696 - DNA, 25 bp, Artificial
  probe
  misc_feature (1)..(25): SEQ ID NO: 1877; WAN024F9X_at; Start 34; Stop 58
gatgtccttatggtcatcgtgaaaa

SEQ ID NO: 197697 - DNA, 25 bp, Artificial
  probe
  misc_feature (1)..(25): SEQ ID NO: 1877; WAN024F9X_at; Start 54; Stop 78
gaaaaatagcggagatgccaaactg

SEQ ID NO: 197698 - DNA, 25 bp, Artificial
  probe
  misc_feature (1)..(25): SEQ ID NO: 1877; WAN024F9X_at; Start 209; Stop 233
agcaagtcgctcgtttgaaccaaga

SEQ ID NO: 197699 - DNA, 25 bp, Artificial
  probe
  misc_feature (1)..(25): SEQ ID NO: 1877; WAN024F9X_at; Start 31; Stop 55
ggtgatgtccttatggtcatcgtga

SEQ ID NO: 197700 - DNA, 25 bp, Artificial
  probe
  misc_feature (1)..(25): SEQ ID NO: 1877; WAN024F9X_at; Start 338; Stop 362
tcaacatctgccaagttgcagtcgc

SEQ ID NO: 197701 - DNA, 25 bp, Artificial
  probe
  misc_feature (1)..(25): SEQ ID NO: 1877; WAN024F9X_at; Start 27; Stop 51
tgtcggtgatgtccttatggtcatc

SEQ ID NO: 197702 - DNA, 25 bp, Artificial
  probe
  misc_feature (1)..(25): SEQ ID NO: 1877; WAN024F9X_at; Start 25; Stop 49
catgtcggtgatgtccttatggtca

SEQ ID NO: 197703 - DNA, 25 bp, Artificial
  probe
  misc_feature (1)..(25): SEQ ID NO: 1877; WAN024F9X_at; Start 44; Stop 68
tggtcatcgtgaaaaatagcggaga

SEQ ID NO: 197704 - DNA, 25 bp, Artificial
  probe
  misc_feature (1)..(25): SEQ ID NO: 1877; WAN024F9X_at; Start 20; Stop 44
aagaacatgtcggtgatgtccttat

SEQ ID NO: 197705 - DNA, 25 bp, Artificial
  probe
  misc_feature (1)..(25): SEQ ID NO: 1877; WAN024F9X_at; Start 560; Stop 584
tgcttgaattatcagaagaccaagt

SEQ ID NO: 197706 - DNA, 25 bp, Artificial
  probe
  misc_feature (1)..(25): SEQ ID NO: 1877; WAN024F9X_at; Start 22; Stop 46
gaacatgtcggtgatgtccttatgg

SEQ ID NO: 197707 - DNA, 25 bp, Artificial
  probe
  misc_feature (1)..(25): SEQ ID NO: 1877; WAN024F9X_at; Start 36; Stop 60
tgtccttatggtcatcgtgaaaaat

SEQ ID NO: 197708 - DNA, 25 bp, Artificial
  probe
  misc_feature (1)..(25): SEQ ID NO: 1877; WAN024F9X_at; Start 344; Stop 368
tctgccaagttgcagtcgcaagtga

SEQ ID NO: 197709 - DNA, 25 bp, Artificial
  probe
  misc_feature (1)..(25): SEQ ID NO: 1877; WAN024F9X_at; Start 566; Stop 590
aattatcagaagaccaagttgtcgg

SEQ ID NO: 197710 - DNA, 25 bp, Artificial
  probe
  misc_feature (1)..(25): SEQ ID NO: 1877; WAN024F9X_at; Start 569; Stop 593
tatcagaagaccaagttgtcggaac

SEQ ID NO: 197711 - DNA, 25 bp, Artificial
  probe
  misc_feature (1)..(25): SEQ ID NO: 1877; WAN024F9X_at; Start 557; Stop 581
gggtgcttgaattatcagaagacca

SEQ ID NO: 197712 - DNA, 25 bp, Artificial
  probe
  misc_feature (1)..(25): SEQ ID NO: 1877; WAN024F9X_at; Start 203; Stop 227
cagatgagcaagtcgctcgtttgaa

SEQ ID NO: 197713 - DNA, 25 bp, Artificial
  probe
  misc_feature (1)..(25): SEQ ID NO: 1877; WAN024F9X_at; Start 331; Stop 355
gaccacctcaacatctgccaagttg

SEQ ID NO: 197714 - DNA, 25 bp, Artificial
  probe
  misc_feature (1)..(25): SEQ ID NO: 1877; WAN024F9X_at; Start 50; Stop 74
tcgtgaaaaatagcggagatgccaa

SEQ ID NO: 197715 - DNA, 25 bp, Artificial
  probe
  misc_feature (1)..(25): SEQ ID NO: 1877; WAN024F9X_at; Start 42; Stop 66
tatggtcatcgtgaaaaatagcgga

SEQ ID NO: 197716 - DNA, 25 bp, Artificial
  probe
  misc_feature (1)..(25): SEQ ID NO: 1877; WAN024F9X_at; Start 47; Stop 71
tcatcgtgaaaaatagcggagatgc

SEQ ID NO: 197717 - DNA, 25 bp, Artificial
  probe
  misc_feature (1)..(25): SEQ ID NO: 1877; WAN024F9X_at; Start 340; Stop 364
aacatctgccaagttgcagtcgcaa

SEQ ID NO: 197718 - DNA, 25 bp, Artificial
  probe
  misc_feature (1)..(25): SEQ ID NO: 1877; WAN024F9X_at; Start 53; Stop 77
tgaaaaatagcggagatgccaaact

SEQ ID NO: 197719 - DNA, 25 bp, Artificial
  probe
  misc_feature (1)..(25): SEQ ID NO: 1877; WAN024F9X_at; Start 261; Stop 285
aattgttaatgataaggaacctaag

SEQ ID NO: 197720 - DNA, 25 bp, Artificial
  probe
  misc_feature (1)..(25): SEQ ID NO: 1877; WAN024F9X_at; Start 342; Stop 366
catctgccaagttgcagtcgcaagt

SEQ ID NO: 197721 - DNA, 25 bp, Artificial
  probe
  misc_feature (1)..(25): SEQ ID NO: 3693; WAN024F9Y_at; Start 34; Stop 58
ccaagctgttgtcgcgagttcgatt

SEQ ID NO: 197722 - DNA, 25 bp, Artificial
  probe
  misc_feature (1)..(25): SEQ ID NO: 3693; WAN024F9Y_at; Start 43; Stop 67
tgtcgcgagttcgattctcgtcacc

SEQ ID NO: 197723 - DNA, 25 bp, Artificial
  probe
  misc_feature (1)..(25): SEQ ID NO: 3693; WAN024F9Y_at; Start 19; Stop 43
taaaactacagccttccaagctgtt

SEQ ID NO: 197724 - DNA, 25 bp, Artificial
  probe
  misc_feature (1)..(25): SEQ ID NO: 3693; WAN024F9Y_at; Start 44; Stop 68
gtcgcgagttcgattctcgtcaccc

SEQ ID NO: 197725 - DNA, 25 bp, Artificial
  probe
  misc_feature (1)..(25): SEQ ID NO: 3693; WAN024F9Y_at; Start 31; Stop 55
cttccaagctgttgtcgcgagttcg

SEQ ID NO: 197726 - DNA, 25 bp, Artificial
  probe
  misc_feature (1)..(25): SEQ ID NO: 3693; WAN024F9Y_at; Start 26; Stop 50
acagccttccaagctgttgtcgcga

SEQ ID NO: 197727 - DNA, 25 bp, Artificial
  probe
  misc_feature (1)..(25): SEQ ID NO: 3693; WAN024F9Y_at; Start 36; Stop 60
aagctgttgtcgcgagttcgattct

SEQ ID NO: 197728 - DNA, 25 bp, Artificial
  probe
  misc_feature (1)..(25): SEQ ID NO: 3693; WAN024F9Y_at; Start 32; Stop 56
ttccaagctgttgtcgcgagttcga

SEQ ID NO: 197729 - DNA, 25 bp, Artificial
  probe
  misc_feature (1)..(25): SEQ ID NO: 3693; WAN024F9Y_at; Start 23; Stop 47
actacagccttccaagctgttgtcg

SEQ ID NO: 197730 - DNA, 25 bp, Artificial
  probe
  misc_feature (1)..(25): SEQ ID NO: 3693; WAN024F9Y_at; Start 39; Stop 63
ctgttgtcgcgagttcgattctcgt

SEQ ID NO: 197731 - DNA, 25 bp, Artificial
  probe
  misc_feature (1)..(25): SEQ ID NO: 3693; WAN024F9Y_at; Start 45; Stop 69
tcgcgagttcgattctcgtcacccg

SEQ ID NO: 197732 - DNA, 25 bp, Artificial
  probe
  misc_feature (1)..(25): SEQ ID NO: 3693; WAN024F9Y_at; Start 40; Stop 64
tgttgtcgcgagttcgattctcgtc

SEQ ID NO: 197733 - DNA, 25 bp, Artificial
  probe
  misc_feature (1)..(25): SEQ ID NO: 3693; WAN024F9Y_at; Start 29; Stop 53
gccttccaagctgttgtcgcgagtt

SEQ ID NO: 197734 - DNA, 25 bp, Artificial
  probe
  misc_feature (1)..(25): SEQ ID NO: 3693; WAN024F9Y_at; Start 28; Stop 52
agccttccaagctgttgtcgcgagt

SEQ ID NO: 197735 - DNA, 25 bp, Artificial
  probe
  misc_feature (1)..(25): SEQ ID NO: 3693; WAN024F9Y_at; Start 33; Stop 57
tccaagctgttgtcgcgagttcgat

SEQ ID NO: 197736 - DNA, 25 bp, Artificial
  probe
  misc_feature (1)..(25): SEQ ID NO: 3693; WAN024F9Y_at; Start 15; Stop 39
gtggtaaaactacagccttccaagc

SEQ ID NO: 197737 - DNA, 25 bp, Artificial
  probe
  misc_feature (1)..(25): SEQ ID NO: 3693; WAN024F9Y_at; Start 35; Stop 59
caagctgttgtcgcgagttcgattc

SEQ ID NO: 197738 - DNA, 25 bp, Artificial
  probe
  misc_feature (1)..(25): SEQ ID NO: 3693; WAN024F9Y_at; Start 27; Stop 51
cagccttccaagctgttgtcgcgag

SEQ ID NO: 197739 - DNA, 25 bp, Artificial
  probe
  misc_feature (1)..(25): SEQ ID NO: 3693; WAN024F9Y_at; Start 24; Stop 48
ctacagccttccaagctgttgtcgc

SEQ ID NO: 197740 - DNA, 25 bp, Artificial
  probe
  misc_feature (1)..(25): SEQ ID NO: 3693; WAN024F9Y_at; Start 25; Stop 49
tacagccttccaagctgttgtcgcg

SEQ ID NO: 197741 - DNA, 25 bp, Artificial
  probe
  misc_feature (1)..(25): SEQ ID NO: 3693; WAN024F9Y_at; Start 14; Stop 38
agtggtaaaactacagccttccaag

SEQ ID NO: 197742 - DNA, 25 bp, Artificial
  probe
  misc_feature (1)..(25): SEQ ID NO: 3693; WAN024F9Y_at; Start 42; Stop 66
ttgtcgcgagttcgattctcgtcac

SEQ ID NO: 197743 - DNA, 25 bp, Artificial
  probe
  misc_feature (1)..(25): SEQ ID NO: 3693; WAN024F9Y_at; Start 37; Stop 61
agctgttgtcgcgagttcgattctc

SEQ ID NO: 197744 - DNA, 25 bp, Artificial
  probe
  misc_feature (1)..(25): SEQ ID NO: 3693; WAN024F9Y_at; Start 20; Stop 44
aaaactacagccttccaagctgttg

SEQ ID NO: 197745 - DNA, 25 bp, Artificial
  probe
  misc_feature (1)..(25): SEQ ID NO: 3693; WAN024F9Y_at; Start 47; Stop 71
gcgagttcgattctcgtcacccgct

SEQ ID NO: 197746 - DNA, 25 bp, Artificial
  probe
  misc_feature (1)..(25): SEQ ID NO: 3693; WAN024F9Y_at; Start 21; Stop 45
aaactacagccttccaagctgttgt

SEQ ID NO: 197747 - DNA, 25 bp, Artificial
  probe
  misc_feature (1)..(25): SEQ ID NO: 3693; WAN024F9Y_at; Start 6; Stop 30
tgtagtttagtggtaaaactacagc

SEQ ID NO: 197748 - DNA, 25 bp, Artificial
  probe
  misc_feature (1)..(25): SEQ ID NO: 3693; WAN024F9Y_at; Start 38; Stop 62
gctgttgtcgcgagttcgattctcg

SEQ ID NO: 197749 - DNA, 25 bp, Artificial
  probe
  misc_feature (1)..(25): SEQ ID NO: 3693; WAN024F9Y_at; Start 30; Stop 54
ccttccaagctgttgtcgcgagttc

SEQ ID NO: 197750 - DNA, 25 bp, Artificial
  probe
  misc_feature (1)..(25): SEQ ID NO: 3693; WAN024F9Y_at; Start 12; Stop 36
ttagtggtaaaactacagccttcca

SEQ ID NO: 197751 - DNA, 25 bp, Artificial
  probe
  misc_feature (1)..(25): SEQ ID NO: 3693; WAN024F9Y_at; Start 22; Stop 46
aactacagccttccaagctgttgtc

SEQ ID NO: 197752 - DNA, 25 bp, Artificial
  probe
  misc_feature (1)..(25): SEQ ID NO: 3693; WAN024F9Y_at; Start 46; Stop 70
cgcgagttcgattctcgtcacccgc

SEQ ID NO: 197753 - DNA, 25 bp, Artificial
  probe
  misc_feature (1)..(25): SEQ ID NO: 3693; WAN024F9Y_at; Start 41; Stop 65
gttgtcgcgagttcgattctcgtca

SEQ ID NO: 197754 - DNA, 25 bp, Artificial
  probe
  misc_feature (1)..(25): SEQ ID NO: 3693; WAN024F9Y_at; Start 13; Stop 37
tagtggtaaaactacagccttccaa

SEQ ID NO: 197755 - DNA, 25 bp, Artificial
  probe
  misc_feature (1)..(25): SEQ ID NO: 3752; WAN024F9Z_at; Start 9; Stop 33
agctcaggtggttagagcgcacgcc

SEQ ID NO: 197756 - DNA, 25 bp, Artificial
  probe
  misc_feature (1)..(25): SEQ ID NO: 3752; WAN024F9Z_at; Start 48; Stop 72
tcggtggttcgagtccactcgtgcc

SEQ ID NO: 197757 - DNA, 25 bp, Artificial
  probe
  misc_feature (1)..(25): SEQ ID NO: 3752; WAN024F9Z_at; Start 19; Stop 43
gttagagcgcacgcctgataagcgt

SEQ ID NO: 197758 - DNA, 25 bp, Artificial
  probe
  misc_feature (1)..(25): SEQ ID NO: 3752; WAN024F9Z_at; Start 17; Stop 41
tggttagagcgcacgcctgataagc

SEQ ID NO: 197759 - DNA, 25 bp, Artificial
  probe
  misc_feature (1)..(25): SEQ ID NO: 3752; WAN024F9Z_at; Start 43; Stop 67
tgaggtcggtggttcgagtccactc

SEQ ID NO: 197760 - DNA, 25 bp, Artificial
  probe
  misc_feature (1)..(25): SEQ ID NO: 3752; WAN024F9Z_at; Start 35; Stop 59
gataagcgtgaggtcggtggttcga

SEQ ID NO: 197761 - DNA, 25 bp, Artificial
  probe
  misc_feature (1)..(25): SEQ ID NO: 3752; WAN024F9Z_at; Start 24; Stop 48
agcgcacgcctgataagcgtgaggt

SEQ ID NO: 197762 - DNA, 25 bp, Artificial
  probe
  misc_feature (1)..(25): SEQ ID NO: 3752; WAN024F9Z_at; Start 47; Stop 71
gtcggtggttcgagtccactcgtgc

SEQ ID NO: 197763 - DNA, 25 bp, Artificial
  probe
  misc_feature (1)..(25): SEQ ID NO: 3752; WAN024F9Z_at; Start 12; Stop 36
tcaggtggttagagcgcacgcctga

SEQ ID NO: 197764 - DNA, 25 bp, Artificial
  probe
  misc_feature (1)..(25): SEQ ID NO: 3752; WAN024F9Z_at; Start 10; Stop 34
gctcaggtggttagagcgcacgcct

SEQ ID NO: 197765 - DNA, 25 bp, Artificial
  probe
  misc_feature (1)..(25): SEQ ID NO: 3752; WAN024F9Z_at; Start 6; Stop 30
cgtagctcaggtggttagagcgcac

SEQ ID NO: 197766 - DNA, 25 bp, Artificial
  probe
  misc_feature (1)..(25): SEQ ID NO: 3752; WAN024F9Z_at; Start 8; Stop 32
tagctcaggtggttagagcgcacgc

SEQ ID NO: 197767 - DNA, 25 bp, Artificial
  probe
  misc_feature (1)..(25): SEQ ID NO: 3752; WAN024F9Z_at; Start 41; Stop 65
cgtgaggtcggtggttcgagtccac

SEQ ID NO: 197768 - DNA, 25 bp, Artificial
  probe
  misc_feature (1)..(25): SEQ ID NO: 3752; WAN024F9Z_at; Start 22; Stop 46
agagcgcacgcctgataagcgtgag

SEQ ID NO: 197769 - DNA, 25 bp, Artificial
  probe
  misc_feature (1)..(25): SEQ ID NO: 3752; WAN024F9Z_at; Start 49; Stop 73
cggtggttcgagtccactcgtgccc

SEQ ID NO: 197770 - DNA, 25 bp, Artificial
  probe
  misc_feature (1)..(25): SEQ ID NO: 3752; WAN024F9Z_at; Start 26; Stop 50
cgcacgcctgataagcgtgaggtcg

SEQ ID NO: 197771 - DNA, 25 bp, Artificial
  probe
  misc_feature (1)..(25): SEQ ID NO: 3752; WAN024F9Z_at; Start 36; Stop 60
ataagcgtgaggtcggtggttcgag

SEQ ID NO: 197772 - DNA, 25 bp, Artificial
  probe
  misc_feature (1)..(25): SEQ ID NO: 3752; WAN024F9Z_at; Start 25; Stop 49
gcgcacgcctgataagcgtgaggtc

SEQ ID NO: 197773 - DNA, 25 bp, Artificial
  probe
  misc_feature (1)..(25): SEQ ID NO: 3752; WAN024F9Z_at; Start 39; Stop 63
agcgtgaggtcggtggttcgagtcc

SEQ ID NO: 197774 - DNA, 25 bp, Artificial
  probe
  misc_feature (1)..(25): SEQ ID NO: 3752; WAN024F9Z_at; Start 33; Stop 57
ctgataagcgtgaggtcggtggttc

SEQ ID NO: 197775 - DNA, 25 bp, Artificial
  probe
  misc_feature (1)..(25): SEQ ID NO: 3752; WAN024F9Z_at; Start 34; Stop 58
tgataagcgtgaggtcggtggttcg

SEQ ID NO: 197776 - DNA, 25 bp, Artificial
  probe
  misc_feature (1)..(25): SEQ ID NO: 3752; WAN024F9Z_at; Start 18; Stop 42
ggttagagcgcacgcctgataagcg

SEQ ID NO: 197777 - DNA, 25 bp, Artificial
  probe
  misc_feature (1)..(25): SEQ ID NO: 3752; WAN024F9Z_at; Start 21; Stop 45
tagagcgcacgcctgataagcgtga

SEQ ID NO: 197778 - DNA, 25 bp, Artificial
  probe
  misc_feature (1)..(25): SEQ ID NO: 3752; WAN024F9Z_at; Start 32; Stop 56
cctgataagcgtgaggtcggtggtt

SEQ ID NO: 197779 - DNA, 25 bp, Artificial
  probe
  misc_feature (1)..(25): SEQ ID NO: 3752; WAN024F9Z_at; Start 13; Stop 37
caggtggttagagcgcacgcctgat

SEQ ID NO: 197780 - DNA, 25 bp, Artificial
  probe
  misc_feature (1)..(25): SEQ ID NO: 3752; WAN024F9Z_at; Start 50; Stop 74
ggtggttcgagtccactcgtgccca

SEQ ID NO: 197781 - DNA, 25 bp, Artificial
  probe
  misc_feature (1)..(25): SEQ ID NO: 3752; WAN024F9Z_at; Start 37; Stop 61
taagcgtgaggtcggtggttcgagt

SEQ ID NO: 197782 - DNA, 25 bp, Artificial
  probe
  misc_feature (1)..(25): SEQ ID NO: 3752; WAN024F9Z_at; Start 44; Stop 68
gaggtcggtggttcgagtccactcg

SEQ ID NO: 197783 - DNA, 25 bp, Artificial
  probe
  misc_feature (1)..(25): SEQ ID NO: 3752; WAN024F9Z_at; Start 45; Stop 69
aggtcggtggttcgagtccactcgt

SEQ ID NO: 197784 - DNA, 25 bp, Artificial
  probe
  misc_feature (1)..(25): SEQ ID NO: 3752; WAN024F9Z_at; Start 28; Stop 52
cacgcctgataagcgtgaggtcggt

SEQ ID NO: 197785 - DNA, 25 bp, Artificial
  probe
  misc_feature (1)..(25): SEQ ID NO: 3752; WAN024F9Z_at; Start 30; Stop 54
cgcctgataagcgtgaggtcggtgg

SEQ ID NO: 197786 - DNA, 25 bp, Artificial
  probe
  misc_feature (1)..(25): SEQ ID NO: 3752; WAN024F9Z_at; Start 11; Stop 35
ctcaggtggttagagcgcacgcctg

SEQ ID NO: 197787 - DNA, 25 bp, Artificial
  probe
  misc_feature (1)..(25): SEQ ID NO: 3752; WAN024F9Z_at; Start 31; Stop 55
gcctgataagcgtgaggtcggtggt

SEQ ID NO: 197788 - DNA, 25 bp, Artificial
  probe
  misc_feature (1)..(25): SEQ ID NO: 3752; WAN024F9Z_at; Start 40; Stop 64
gcgtgaggtcggtggttcgagtcca

SEQ ID NO: 197789 - DNA, 25 bp, Artificial
  probe
  misc_feature (1)..(25): SEQ ID NO: 3728; WAN024FA2_at; Start 61; Stop 85
cgcaagggttcgaatcccttattct

SEQ ID NO: 197790 - DNA, 25 bp, Artificial
  probe
  misc_feature (1)..(25): SEQ ID NO: 3728; WAN024FA2_at; Start 56; Stop 80
actggcgcaagggttcgaatccctt

SEQ ID NO: 197791 - DNA, 25 bp, Artificial
  probe
  misc_feature (1)..(25): SEQ ID NO: 3728; WAN024FA2_at; Start 18; Stop 42
gctgaagaggacggtttgctaaatc

SEQ ID NO: 197792 - DNA, 25 bp, Artificial
  probe
  misc_feature (1)..(25): SEQ ID NO: 3728; WAN024FA2_at; Start 49; Stop 73
tcgggtaactggcgcaagggttcga

SEQ ID NO: 197793 - DNA, 25 bp, Artificial
  probe
  misc_feature (1)..(25): SEQ ID NO: 3728; WAN024FA2_at; Start 9; Stop 33
actcaagaggctgaagaggacggtt

SEQ ID NO: 197794 - DNA, 25 bp, Artificial
  probe
  misc_feature (1)..(25): SEQ ID NO: 3728; WAN024FA2_at; Start 1; Stop 25
ggagaattactcaagaggctgaaga

SEQ ID NO: 197795 - DNA, 25 bp, Artificial
  probe
  misc_feature (1)..(25): SEQ ID NO: 3728; WAN024FA2_at; Start 23; Stop 47
agaggacggtttgctaaatcgttag

SEQ ID NO: 197796 - DNA, 25 bp, Artificial
  probe
  misc_feature (1)..(25): SEQ ID NO: 3728; WAN024FA2_at; Start 54; Stop 78
taactggcgcaagggttcgaatccc

SEQ ID NO: 197797 - DNA, 25 bp, Artificial
  probe
  misc_feature (1)..(25): SEQ ID NO: 3728; WAN024FA2_at; Start 4; Stop 28
gaattactcaagaggctgaagagga

SEQ ID NO: 197798 - DNA, 25 bp, Artificial
  probe
  misc_feature (1)..(25): SEQ ID NO: 3728; WAN024FA2_at; Start 12; Stop 36
caagaggctgaagaggacggtttgc

SEQ ID NO: 197799 - DNA, 25 bp, Artificial
  probe
  misc_feature (1)..(25): SEQ ID NO: 3728; WAN024FA2_at; Start 52; Stop 76
ggtaactggcgcaagggttcgaatc

SEQ ID NO: 197800 - DNA, 25 bp, Artificial
  probe
  misc_feature (1)..(25): SEQ ID NO: 3728; WAN024FA2_at; Start 20; Stop 44
tgaagaggacggtttgctaaatcgt

SEQ ID NO: 197801 - DNA, 25 bp, Artificial
  probe
  misc_feature (1)..(25): SEQ ID NO: 3728; WAN024FA2_at; Start 62; Stop 86
gcaagggttcgaatcccttattctc

SEQ ID NO: 197802 - DNA, 25 bp, Artificial
  probe
  misc_feature (1)..(25): SEQ ID NO: 3728; WAN024FA2_at; Start 13; Stop 37
aagaggctgaagaggacggtttgct

SEQ ID NO: 197803 - DNA, 25 bp, Artificial
  probe
  misc_feature (1)..(25): SEQ ID NO: 3728; WAN024FA2_at; Start 55; Stop 79
aactggcgcaagggttcgaatccct

SEQ ID NO: 197804 - DNA, 25 bp, Artificial
  probe
  misc_feature (1)..(25): SEQ ID NO: 3728; WAN024FA2_at; Start 53; Stop 77
gtaactggcgcaagggttcgaatcc

SEQ ID NO: 197805 - DNA, 25 bp, Artificial
  probe
  misc_feature (1)..(25): SEQ ID NO: 3728; WAN024FA2_at; Start 3; Stop 27
agaattactcaagaggctgaagagg

SEQ ID NO: 197806 - DNA, 25 bp, Artificial
  probe
  misc_feature (1)..(25): SEQ ID NO: 3728; WAN024FA2_at; Start 41; Stop 65
tcgttaggtcgggtaactggcgcaa

SEQ ID NO: 197807 - DNA, 25 bp, Artificial
  probe
  misc_feature (1)..(25): SEQ ID NO: 3728; WAN024FA2_at; Start 11; Stop 35
tcaagaggctgaagaggacggtttg

SEQ ID NO: 197808 - DNA, 25 bp, Artificial
  probe
  misc_feature (1)..(25): SEQ ID NO: 3728; WAN024FA2_at; Start 2; Stop 26
gagaattactcaagaggctgaagag

SEQ ID NO: 197809 - DNA, 25 bp, Artificial
  probe
  misc_feature (1)..(25): SEQ ID NO: 3728; WAN024FA2_at; Start 10; Stop 34
ctcaagaggctgaagaggacggttt

SEQ ID NO: 197810 - DNA, 25 bp, Artificial
  probe
  misc_feature (1)..(25): SEQ ID NO: 3728; WAN024FA2_at; Start 16; Stop 40
aggctgaagaggacggtttgctaaa

SEQ ID NO: 197811 - DNA, 25 bp, Artificial
  probe
  misc_feature (1)..(25): SEQ ID NO: 3728; WAN024FA2_at; Start 60; Stop 84
gcgcaagggttcgaatcccttattc

SEQ ID NO: 197812 - DNA, 25 bp, Artificial
  probe
  misc_feature (1)..(25): SEQ ID NO: 3728; WAN024FA2_at; Start 17; Stop 41
ggctgaagaggacggtttgctaaat

SEQ ID NO: 197813 - DNA, 25 bp, Artificial
  probe
  misc_feature (1)..(25): SEQ ID NO: 3728; WAN024FA2_at; Start 15; Stop 39
gaggctgaagaggacggtttgctaa

SEQ ID NO: 197814 - DNA, 25 bp, Artificial
  probe
  misc_feature (1)..(25): SEQ ID NO: 3728; WAN024FA2_at; Start 57; Stop 81
ctggcgcaagggttcgaatccctta

SEQ ID NO: 197815 - DNA, 25 bp, Artificial
  probe
  misc_feature (1)..(25): SEQ ID NO: 3728; WAN024FA2_at; Start 58; Stop 82
tggcgcaagggttcgaatcccttat

SEQ ID NO: 197816 - DNA, 25 bp, Artificial
  probe
  misc_feature (1)..(25): SEQ ID NO: 3728; WAN024FA2_at; Start 40; Stop 64
atcgttaggtcgggtaactggcgca

SEQ ID NO: 197817 - DNA, 25 bp, Artificial
  probe
  misc_feature (1)..(25): SEQ ID NO: 3728; WAN024FA2_at; Start 19; Stop 43
ctgaagaggacggtttgctaaatcg

SEQ ID NO: 197818 - DNA, 25 bp, Artificial
  probe
  misc_feature (1)..(25): SEQ ID NO: 3728; WAN024FA2_at; Start 7; Stop 31
ttactcaagaggctgaagaggacgg

SEQ ID NO: 197819 - DNA, 25 bp, Artificial
  probe
  misc_feature (1)..(25): SEQ ID NO: 3728; WAN024FA2_at; Start 42; Stop 66
cgttaggtcgggtaactggcgcaag

SEQ ID NO: 197820 - DNA, 25 bp, Artificial
  probe
  misc_feature (1)..(25): SEQ ID NO: 3728; WAN024FA2_at; Start 8; Stop 32
tactcaagaggctgaagaggacggt

SEQ ID NO: 197821 - DNA, 25 bp, Artificial
  probe
  misc_feature (1)..(25): SEQ ID NO: 3728; WAN024FA2_at; Start 14; Stop 38
agaggctgaagaggacggtttgcta

SEQ ID NO: 197822 - DNA, 25 bp, Artificial
  probe
  misc_feature (1)..(25): SEQ ID NO: 3728; WAN024FA2_at; Start 5; Stop 29
aattactcaagaggctgaagaggac

SEQ ID NO: 197823 - DNA, 25 bp, Artificial
  probe
  misc_feature (1)..(25): SEQ ID NO: 3686; WAN024FA3_at; Start 37; Stop 61
aatccgtgggtcacaggttcgatcc

SEQ ID NO: 197824 - DNA, 25 bp, Artificial
  probe
  misc_feature (1)..(25): SEQ ID NO: 3686; WAN024FA3_at; Start 32; Stop 56
ctcttaatccgtgggtcacaggttc

SEQ ID NO: 197825 - DNA, 25 bp, Artificial
  probe
  misc_feature (1)..(25): SEQ ID NO: 3686; WAN024FA3_at; Start 36; Stop 60
taatccgtgggtcacaggttcgatc

SEQ ID NO: 197826 - DNA, 25 bp, Artificial
  probe
  misc_feature (1)..(25): SEQ ID NO: 3686; WAN024FA3_at; Start 28; Stop 52
cggactcttaatccgtgggtcacag

SEQ ID NO: 197827 - DNA, 25 bp, Artificial
  probe
  misc_feature (1)..(25): SEQ ID NO: 3686; WAN024FA3_at; Start 20; Stop 44
cagagcagcggactcttaatccgtg

SEQ ID NO: 197828 - DNA, 25 bp, Artificial
  probe
  misc_feature (1)..(25): SEQ ID NO: 3686; WAN024FA3_at; Start 4; Stop 28
tccttagctcagctggcagagcagc

SEQ ID NO: 197829 - DNA, 25 bp, Artificial
  probe
  misc_feature (1)..(25): SEQ ID NO: 3686; WAN024FA3_at; Start 2; Stop 26
cctccttagctcagctggcagagca

SEQ ID NO: 197830 - DNA, 25 bp, Artificial
  probe
  misc_feature (1)..(25): SEQ ID NO: 3686; WAN024FA3_at; Start 26; Stop 50
agcggactcttaatccgtgggtcac

SEQ ID NO: 197831 - DNA, 25 bp, Artificial
  probe
  misc_feature (1)..(25): SEQ ID NO: 3686; WAN024FA3_at; Start 24; Stop 48
gcagcggactcttaatccgtgggtc

SEQ ID NO: 197832 - DNA, 25 bp, Artificial
  probe
  misc_feature (1)..(25): SEQ ID NO: 3686; WAN024FA3_at; Start 23; Stop 47
agcagcggactcttaatccgtgggt

SEQ ID NO: 197833 - DNA, 25 bp, Artificial
  probe
  misc_feature (1)..(25): SEQ ID NO: 3686; WAN024FA3_at; Start 6; Stop 30
cttagctcagctggcagagcagcgg

SEQ ID NO: 197834 - DNA, 25 bp, Artificial
  probe
  misc_feature (1)..(25): SEQ ID NO: 3686; WAN024FA3_at; Start 41; Stop 65
cgtgggtcacaggttcgatccctgt

SEQ ID NO: 197835 - DNA, 25 bp, Artificial
  probe
  misc_feature (1)..(25): SEQ ID NO: 3686; WAN024FA3_at; Start 1; Stop 25
gcctccttagctcagctggcagagc

SEQ ID NO: 197836 - DNA, 25 bp, Artificial
  probe
  misc_feature (1)..(25): SEQ ID NO: 3686; WAN024FA3_at; Start 13; Stop 37
cagctggcagagcagcggactctta

SEQ ID NO: 197837 - DNA, 25 bp, Artificial
  probe
  misc_feature (1)..(25): SEQ ID NO: 3686; WAN024FA3_at; Start 40; Stop 64
ccgtgggtcacaggttcgatccctg

SEQ ID NO: 197838 - DNA, 25 bp, Artificial
  probe
  misc_feature (1)..(25): SEQ ID NO: 3686; WAN024FA3_at; Start 27; Stop 51
gcggactcttaatccgtgggtcaca

SEQ ID NO: 197839 - DNA, 25 bp, Artificial
  probe
  misc_feature (1)..(25): SEQ ID NO: 3686; WAN024FA3_at; Start 30; Stop 54
gactcttaatccgtgggtcacaggt

SEQ ID NO: 197840 - DNA, 25 bp, Artificial
  probe
  misc_feature (1)..(25): SEQ ID NO: 3686; WAN024FA3_at; Start 34; Stop 58
cttaatccgtgggtcacaggttcga

SEQ ID NO: 197841 - DNA, 25 bp, Artificial
  probe
  misc_feature (1)..(25): SEQ ID NO: 3686; WAN024FA3_at; Start 43; Stop 67
tgggtcacaggttcgatccctgtag

SEQ ID NO: 197842 - DNA, 25 bp, Artificial
  probe
  misc_feature (1)..(25): SEQ ID NO: 3686; WAN024FA3_at; Start 45; Stop 69
ggtcacaggttcgatccctgtaggg

SEQ ID NO: 197843 - DNA, 25 bp, Artificial
  probe
  misc_feature (1)..(25): SEQ ID NO: 3686; WAN024FA3_at; Start 21; Stop 45
agagcagcggactcttaatccgtgg

SEQ ID NO: 197844 - DNA, 25 bp, Artificial
  probe
  misc_feature (1)..(25): SEQ ID NO: 3686; WAN024FA3_at; Start 19; Stop 43
gcagagcagcggactcttaatccgt

SEQ ID NO: 197845 - DNA, 25 bp, Artificial
  probe
  misc_feature (1)..(25): SEQ ID NO: 3686; WAN024FA3_at; Start 11; Stop 35
ctcagctggcagagcagcggactct

SEQ ID NO: 197846 - DNA, 25 bp, Artificial
  probe
  misc_feature (1)..(25): SEQ ID NO: 3686; WAN024FA3_at; Start 14; Stop 38
agctggcagagcagcggactcttaa

SEQ ID NO: 197847 - DNA, 25 bp, Artificial
  probe
  misc_feature (1)..(25): SEQ ID NO: 3686; WAN024FA3_at; Start 5; Stop 29
ccttagctcagctggcagagcagcg

SEQ ID NO: 197848 - DNA, 25 bp, Artificial
  probe
  misc_feature (1)..(25): SEQ ID NO: 3686; WAN024FA3_at; Start 38; Stop 62
atccgtgggtcacaggttcgatccc

SEQ ID NO: 197849 - DNA, 25 bp, Artificial
  probe
  misc_feature (1)..(25): SEQ ID NO: 3686; WAN024FA3_at; Start 25; Stop 49
cagcggactcttaatccgtgggtca

SEQ ID NO: 197850 - DNA, 25 bp, Artificial
  probe
  misc_feature (1)..(25): SEQ ID NO: 3686; WAN024FA3_at; Start 9; Stop 33
agctcagctggcagagcagcggact

SEQ ID NO: 197851 - DNA, 25 bp, Artificial
  probe
  misc_feature (1)..(25): SEQ ID NO: 3686; WAN024FA3_at; Start 31; Stop 55
actcttaatccgtgggtcacaggtt

SEQ ID NO: 197852 - DNA, 25 bp, Artificial
  probe
  misc_feature (1)..(25): SEQ ID NO: 3686; WAN024FA3_at; Start 35; Stop 59
ttaatccgtgggtcacaggttcgat

SEQ ID NO: 197853 - DNA, 25 bp, Artificial
  probe
  misc_feature (1)..(25): SEQ ID NO: 3686; WAN024FA3_at; Start 39; Stop 63
tccgtgggtcacaggttcgatccct

SEQ ID NO: 197854 - DNA, 25 bp, Artificial
  probe
  misc_feature (1)..(25): SEQ ID NO: 3686; WAN024FA3_at; Start 12; Stop 36
tcagctggcagagcagcggactctt

SEQ ID NO: 197855 - DNA, 25 bp, Artificial
  probe
  misc_feature (1)..(25): SEQ ID NO: 3686; WAN024FA3_at; Start 18; Stop 42
ggcagagcagcggactcttaatccg

SEQ ID NO: 197856 - DNA, 25 bp, Artificial
  probe
  misc_feature (1)..(25): SEQ ID NO: 3686; WAN024FA3_at; Start 15; Stop 39
gctggcagagcagcggactcttaat

SEQ ID NO: 197857 - DNA, 25 bp, Artificial
  probe
  misc_feature (1)..(25): SEQ ID NO: 3692; WAN024FA4_at; Start 27; Stop 51
gcaggactaaggatcctgtgaccgc

SEQ ID NO: 197858 - DNA, 25 bp, Artificial
  probe
  misc_feature (1)..(25): SEQ ID NO: 3692; WAN024FA4_at; Start 39; Stop 63
atcctgtgaccgctttaggtcgtga

SEQ ID NO: 197859 - DNA, 25 bp, Artificial
  probe
  misc_feature (1)..(25): SEQ ID NO: 3692; WAN024FA4_at; Start 50; Stop 74
gctttaggtcgtgagggttcaagtc

SEQ ID NO: 197860 - DNA, 25 bp, Artificial
  probe
  misc_feature (1)..(25): SEQ ID NO: 3692; WAN024FA4_at; Start 37; Stop 61
ggatcctgtgaccgctttaggtcgt

SEQ ID NO: 197861 - DNA, 25 bp, Artificial
  probe
  misc_feature (1)..(25): SEQ ID NO: 3692; WAN024FA4_at; Start 34; Stop 58
taaggatcctgtgaccgctttaggt

SEQ ID NO: 197862 - DNA, 25 bp, Artificial
  probe
  misc_feature (1)..(25): SEQ ID NO: 3692; WAN024FA4_at; Start 38; Stop 62
gatcctgtgaccgctttaggtcgtg

SEQ ID NO: 197863 - DNA, 25 bp, Artificial
  probe
  misc_feature (1)..(25): SEQ ID NO: 3692; WAN024FA4_at; Start 30; Stop 54
ggactaaggatcctgtgaccgcttt

SEQ ID NO: 197864 - DNA, 25 bp, Artificial
  probe
  misc_feature (1)..(25): SEQ ID NO: 3692; WAN024FA4_at; Start 54; Stop 78
taggtcgtgagggttcaagtccctc

SEQ ID NO: 197865 - DNA, 25 bp, Artificial
  probe
  misc_feature (1)..(25): SEQ ID NO: 3692; WAN024FA4_at; Start 58; Stop 82
tcgtgagggttcaagtccctctctc

SEQ ID NO: 197866 - DNA, 25 bp, Artificial
  probe
  misc_feature (1)..(25): SEQ ID NO: 3692; WAN024FA4_at; Start 40; Stop 64
tcctgtgaccgctttaggtcgtgag

SEQ ID NO: 197867 - DNA, 25 bp, Artificial
  probe
  misc_feature (1)..(25): SEQ ID NO: 3692; WAN024FA4_at; Start 36; Stop 60
aggatcctgtgaccgctttaggtcg

SEQ ID NO: 197868 - DNA, 25 bp, Artificial
  probe
  misc_feature (1)..(25): SEQ ID NO: 3692; WAN024FA4_at; Start 32; Stop 56
actaaggatcctgtgaccgctttag

SEQ ID NO: 197869 - DNA, 25 bp, Artificial
  probe
  misc_feature (1)..(25): SEQ ID NO: 3692; WAN024FA4_at; Start 56; Stop 80
ggtcgtgagggttcaagtccctctc

SEQ ID NO: 197870 - DNA, 25 bp, Artificial
  probe
  misc_feature (1)..(25): SEQ ID NO: 3692; WAN024FA4_at; Start 31; Stop 55
gactaaggatcctgtgaccgcttta

SEQ ID NO: 197871 - DNA, 25 bp, Artificial
  probe
  misc_feature (1)..(25): SEQ ID NO: 3692; WAN024FA4_at; Start 46; Stop 70
gaccgctttaggtcgtgagggttca

SEQ ID NO: 197872 - DNA, 25 bp, Artificial
  probe
  misc_feature (1)..(25): SEQ ID NO: 3692; WAN024FA4_at; Start 60; Stop 84
gtgagggttcaagtccctctctccg

SEQ ID NO: 197873 - DNA, 25 bp, Artificial
  probe
  misc_feature (1)..(25): SEQ ID NO: 3692; WAN024FA4_at; Start 59; Stop 83
cgtgagggttcaagtccctctctcc

SEQ ID NO: 197874 - DNA, 25 bp, Artificial
  probe
  misc_feature (1)..(25): SEQ ID NO: 3692; WAN024FA4_at; Start 45; Stop 69
tgaccgctttaggtcgtgagggttc

SEQ ID NO: 197875 - DNA, 25 bp, Artificial
  probe
  misc_feature (1)..(25): SEQ ID NO: 3692; WAN024FA4_at; Start 42; Stop 66
ctgtgaccgctttaggtcgtgaggg

SEQ ID NO: 197876 - DNA, 25 bp, Artificial
  probe
  misc_feature (1)..(25): SEQ ID NO: 3692; WAN024FA4_at; Start 55; Stop 79
aggtcgtgagggttcaagtccctct

SEQ ID NO: 197877 - DNA, 25 bp, Artificial
  probe
  misc_feature (1)..(25): SEQ ID NO: 3692; WAN024FA4_at; Start 62; Stop 86
gagggttcaagtccctctctccgca

SEQ ID NO: 197878 - DNA, 25 bp, Artificial
  probe
  misc_feature (1)..(25): SEQ ID NO: 3692; WAN024FA4_at; Start 57; Stop 81
gtcgtgagggttcaagtccctctct

SEQ ID NO: 197879 - DNA, 25 bp, Artificial
  probe
  misc_feature (1)..(25): SEQ ID NO: 3692; WAN024FA4_at; Start 49; Stop 73
cgctttaggtcgtgagggttcaagt

SEQ ID NO: 197880 - DNA, 25 bp, Artificial
  probe
  misc_feature (1)..(25): SEQ ID NO: 3692; WAN024FA4_at; Start 28; Stop 52
caggactaaggatcctgtgaccgct

SEQ ID NO: 197881 - DNA, 25 bp, Artificial
  probe
  misc_feature (1)..(25): SEQ ID NO: 3692; WAN024FA4_at; Start 41; Stop 65
cctgtgaccgctttaggtcgtgagg

SEQ ID NO: 197882 - DNA, 25 bp, Artificial
  probe
  misc_feature (1)..(25): SEQ ID NO: 3692; WAN024FA4_at; Start 48; Stop 72
ccgctttaggtcgtgagggttcaag

SEQ ID NO: 197883 - DNA, 25 bp, Artificial
  probe
  misc_feature (1)..(25): SEQ ID NO: 3692; WAN024FA4_at; Start 35; Stop 59
aaggatcctgtgaccgctttaggtc

SEQ ID NO: 197884 - DNA, 25 bp, Artificial
  probe
  misc_feature (1)..(25): SEQ ID NO: 3692; WAN024FA4_at; Start 61; Stop 85
tgagggttcaagtccctctctccgc

SEQ ID NO: 197885 - DNA, 25 bp, Artificial
  probe
  misc_feature (1)..(25): SEQ ID NO: 3692; WAN024FA4_at; Start 33; Stop 57
ctaaggatcctgtgaccgctttagg

SEQ ID NO: 197886 - DNA, 25 bp, Artificial
  probe
  misc_feature (1)..(25): SEQ ID NO: 3692; WAN024FA4_at; Start 43; Stop 67
tgtgaccgctttaggtcgtgagggt

SEQ ID NO: 197887 - DNA, 25 bp, Artificial
  probe
  misc_feature (1)..(25): SEQ ID NO: 3692; WAN024FA4_at; Start 29; Stop 53
aggactaaggatcctgtgaccgctt

SEQ ID NO: 197888 - DNA, 25 bp, Artificial
  probe
  misc_feature (1)..(25): SEQ ID NO: 3706; WAN024FA5_at; Start 1; Stop 25
gctcccttagttcaatggatataac

SEQ ID NO: 197889 - DNA, 25 bp, Artificial
  probe
  misc_feature (1)..(25): SEQ ID NO: 3706; WAN024FA5_at; Start 39; Stop 63
ggagtagttgcaggttcgattcctg

SEQ ID NO: 197890 - DNA, 25 bp, Artificial
  probe
  misc_feature (1)..(25): SEQ ID NO: 3706; WAN024FA5_at; Start 13; Stop 37
caatggatataacaactccctccta

SEQ ID NO: 197891 - DNA, 25 bp, Artificial
  probe
  misc_feature (1)..(25): SEQ ID NO: 3706; WAN024FA5_at; Start 36; Stop 60
taaggagtagttgcaggttcgattc

SEQ ID NO: 197892 - DNA, 25 bp, Artificial
  probe
  misc_feature (1)..(25): SEQ ID NO: 3706; WAN024FA5_at; Start 38; Stop 62
aggagtagttgcaggttcgattcct

SEQ ID NO: 197893 - DNA, 25 bp, Artificial
  probe
  misc_feature (1)..(25): SEQ ID NO: 3706; WAN024FA5_at; Start 37; Stop 61
aaggagtagttgcaggttcgattcc

SEQ ID NO: 197894 - DNA, 25 bp, Artificial
  probe
  misc_feature (1)..(25): SEQ ID NO: 3706; WAN024FA5_at; Start 35; Stop 59
ctaaggagtagttgcaggttcgatt

SEQ ID NO: 197895 - DNA, 25 bp, Artificial
  probe
  misc_feature (1)..(25): SEQ ID NO: 3706; WAN024FA5_at; Start 30; Stop 54
ccctcctaaggagtagttgcaggtt

SEQ ID NO: 197896 - DNA, 25 bp, Artificial
  probe
  misc_feature (1)..(25): SEQ ID NO: 3706; WAN024FA5_at; Start 44; Stop 68
agttgcaggttcgattcctgcaggg

SEQ ID NO: 197897 - DNA, 25 bp, Artificial
  probe
  misc_feature (1)..(25): SEQ ID NO: 3706; WAN024FA5_at; Start 40; Stop 64
gagtagttgcaggttcgattcctgc

SEQ ID NO: 197898 - DNA, 25 bp, Artificial
  probe
  misc_feature (1)..(25): SEQ ID NO: 3706; WAN024FA5_at; Start 10; Stop 34
gttcaatggatataacaactccctc

SEQ ID NO: 197899 - DNA, 25 bp, Artificial
  probe
  misc_feature (1)..(25): SEQ ID NO: 3706; WAN024FA5_at; Start 9; Stop 33
agttcaatggatataacaactccct

SEQ ID NO: 197900 - DNA, 25 bp, Artificial
  probe
  misc_feature (1)..(25): SEQ ID NO: 3706; WAN024FA5_at; Start 20; Stop 44
tataacaactccctcctaaggagta

SEQ ID NO: 197901 - DNA, 25 bp, Artificial
  probe
  misc_feature (1)..(25): SEQ ID NO: 3706; WAN024FA5_at; Start 29; Stop 53
tccctcctaaggagtagttgcaggt

SEQ ID NO: 197902 - DNA, 25 bp, Artificial
  probe
  misc_feature (1)..(25): SEQ ID NO: 3706; WAN024FA5_at; Start 8; Stop 32
tagttcaatggatataacaactccc

SEQ ID NO: 197903 - DNA, 25 bp, Artificial
  probe
  misc_feature (1)..(25): SEQ ID NO: 3706; WAN024FA5_at; Start 21; Stop 45
ataacaactccctcctaaggagtag

SEQ ID NO: 197904 - DNA, 25 bp, Artificial
  probe
  misc_feature (1)..(25): SEQ ID NO: 3706; WAN024FA5_at; Start 24; Stop 48
acaactccctcctaaggagtagttg

SEQ ID NO: 197905 - DNA, 25 bp, Artificial
  probe
  misc_feature (1)..(25): SEQ ID NO: 3706; WAN024FA5_at; Start 31; Stop 55
cctcctaaggagtagttgcaggttc

SEQ ID NO: 197906 - DNA, 25 bp, Artificial
  probe
  misc_feature (1)..(25): SEQ ID NO: 3706; WAN024FA5_at; Start 41; Stop 65
agtagttgcaggttcgattcctgca

SEQ ID NO: 197907 - DNA, 25 bp, Artificial
  probe
  misc_feature (1)..(25): SEQ ID NO: 3706; WAN024FA5_at; Start 42; Stop 66
gtagttgcaggttcgattcctgcag

SEQ ID NO: 197908 - DNA, 25 bp, Artificial
  probe
  misc_feature (1)..(25): SEQ ID NO: 3706; WAN024FA5_at; Start 16; Stop 40
tggatataacaactccctcctaagg

SEQ ID NO: 197909 - DNA, 25 bp, Artificial
  probe
  misc_feature (1)..(25): SEQ ID NO: 3706; WAN024FA5_at; Start 12; Stop 36
tcaatggatataacaactccctcct

SEQ ID NO: 197910 - DNA, 25 bp, Artificial
  probe
  misc_feature (1)..(25): SEQ ID NO: 3706; WAN024FA5_at; Start 2; Stop 26
ctcccttagttcaatggatataaca

SEQ ID NO: 197911 - DNA, 25 bp, Artificial
  probe
  misc_feature (1)..(25): SEQ ID NO: 3706; WAN024FA5_at; Start 26; Stop 50
aactccctcctaaggagtagttgca

SEQ ID NO: 197912 - DNA, 25 bp, Artificial
  probe
  misc_feature (1)..(25): SEQ ID NO: 3706; WAN024FA5_at; Start 32; Stop 56
ctcctaaggagtagttgcaggttcg

SEQ ID NO: 197913 - DNA, 25 bp, Artificial
  probe
  misc_feature (1)..(25): SEQ ID NO: 3706; WAN024FA5_at; Start 33; Stop 57
tcctaaggagtagttgcaggttcga

SEQ ID NO: 197914 - DNA, 25 bp, Artificial
  probe
  misc_feature (1)..(25): SEQ ID NO: 3706; WAN024FA5_at; Start 4; Stop 28
cccttagttcaatggatataacaac

SEQ ID NO: 197915 - DNA, 25 bp, Artificial
  probe
  misc_feature (1)..(25): SEQ ID NO: 3706; WAN024FA5_at; Start 34; Stop 58
cctaaggagtagttgcaggttcgat

SEQ ID NO: 197916 - DNA, 25 bp, Artificial
  probe
  misc_feature (1)..(25): SEQ ID NO: 3706; WAN024FA5_at; Start 18; Stop 42
gatataacaactccctcctaaggag

SEQ ID NO: 197917 - DNA, 25 bp, Artificial
  probe
  misc_feature (1)..(25): SEQ ID NO: 3706; WAN024FA5_at; Start 17; Stop 41
ggatataacaactccctcctaagga

SEQ ID NO: 197918 - DNA, 25 bp, Artificial
  probe
  misc_feature (1)..(25): SEQ ID NO: 3706; WAN024FA5_at; Start 43; Stop 67
tagttgcaggttcgattcctgcagg

SEQ ID NO: 197919 - DNA, 25 bp, Artificial
  probe
  misc_feature (1)..(25): SEQ ID NO: 3706; WAN024FA5_at; Start 5; Stop 29
ccttagttcaatggatataacaact

SEQ ID NO: 197920 - DNA, 25 bp, Artificial
  probe
  misc_feature (1)..(25): SEQ ID NO: 3706; WAN024FA5_at; Start 11; Stop 35
ttcaatggatataacaactccctcc

SEQ ID NO: 197921 - DNA, 25 bp, Artificial
  probe
  misc_feature (1)..(25): SEQ ID NO: 3706; WAN024FA5_at; Start 27; Stop 51
actccctcctaaggagtagttgcag

SEQ ID NO: 197922 - DNA, 25 bp, Artificial
  probe
  misc_feature (1)..(25): SEQ ID NO: 3235; WAN024FA6_at; Start 25; Stop 49
cgtaagattccggttcttgagatgg

SEQ ID NO: 197923 - DNA, 25 bp, Artificial
  probe
  misc_feature (1)..(25): SEQ ID NO: 3235; WAN024FA6_at; Start 16; Stop 40
tggatatcacgtaagattccggttc

SEQ ID NO: 197924 - DNA, 25 bp, Artificial
  probe
  misc_feature (1)..(25): SEQ ID NO: 3235; WAN024FA6_at; Start 13; Stop 37
taatggatatcacgtaagattccgg

SEQ ID NO: 197925 - DNA, 25 bp, Artificial
  probe
  misc_feature (1)..(25): SEQ ID NO: 3235; WAN024FA6_at; Start 43; Stop 67
gagatgggggttcgattccctcagg

SEQ ID NO: 197926 - DNA, 25 bp, Artificial
  probe
  misc_feature (1)..(25): SEQ ID NO: 3235; WAN024FA6_at; Start 20; Stop 44
tatcacgtaagattccggttcttga

SEQ ID NO: 197927 - DNA, 25 bp, Artificial
  probe
  misc_feature (1)..(25): SEQ ID NO: 3235; WAN024FA6_at; Start 21; Stop 45
atcacgtaagattccggttcttgag

SEQ ID NO: 197928 - DNA, 25 bp, Artificial
  probe
  misc_feature (1)..(25): SEQ ID NO: 3235; WAN024FA6_at; Start 29; Stop 53
agattccggttcttgagatgggggt

SEQ ID NO: 197929 - DNA, 25 bp, Artificial
  probe
  misc_feature (1)..(25): SEQ ID NO: 3235; WAN024FA6_at; Start 23; Stop 47
cacgtaagattccggttcttgagat

SEQ ID NO: 197930 - DNA, 25 bp, Artificial
  probe
  misc_feature (1)..(25): SEQ ID NO: 3235; WAN024FA6_at; Start 19; Stop 43
atatcacgtaagattccggttcttg

SEQ ID NO: 197931 - DNA, 25 bp, Artificial
  probe
  misc_feature (1)..(25): SEQ ID NO: 3235; WAN024FA6_at; Start 10; Stop 34
gtgtaatggatatcacgtaagattc

SEQ ID NO: 197932 - DNA, 25 bp, Artificial
  probe
  misc_feature (1)..(25): SEQ ID NO: 3235; WAN024FA6_at; Start 2; Stop 26
cacccttagtgtaatggatatcacg

SEQ ID NO: 197933 - DNA, 25 bp, Artificial
  probe
  misc_feature (1)..(25): SEQ ID NO: 3235; WAN024FA6_at; Start 27; Stop 51
taagattccggttcttgagatgggg

SEQ ID NO: 197934 - DNA, 25 bp, Artificial
  probe
  misc_feature (1)..(25): SEQ ID NO: 3235; WAN024FA6_at; Start 8; Stop 32
tagtgtaatggatatcacgtaagat

SEQ ID NO: 197935 - DNA, 25 bp, Artificial
  probe
  misc_feature (1)..(25): SEQ ID NO: 3235; WAN024FA6_at; Start 44; Stop 68
agatgggggttcgattccctcaggg

SEQ ID NO: 197936 - DNA, 25 bp, Artificial
  probe
  misc_feature (1)..(25): SEQ ID NO: 3235; WAN024FA6_at; Start 14; Stop 38
aatggatatcacgtaagattccggt

SEQ ID NO: 197937 - DNA, 25 bp, Artificial
  probe
  misc_feature (1)..(25): SEQ ID NO: 3235; WAN024FA6_at; Start 3; Stop 27
acccttagtgtaatggatatcacgt

SEQ ID NO: 197938 - DNA, 25 bp, Artificial
  probe
  misc_feature (1)..(25): SEQ ID NO: 3235; WAN024FA6_at; Start 7; Stop 31
ttagtgtaatggatatcacgtaaga

SEQ ID NO: 197939 - DNA, 25 bp, Artificial
  probe
  misc_feature (1)..(25): SEQ ID NO: 3235; WAN024FA6_at; Start 40; Stop 64
cttgagatgggggttcgattccctc

SEQ ID NO: 197940 - DNA, 25 bp, Artificial
  probe
  misc_feature (1)..(25): SEQ ID NO: 3235; WAN024FA6_at; Start 5; Stop 29
ccttagtgtaatggatatcacgtaa

SEQ ID NO: 197941 - DNA, 25 bp, Artificial
  probe
  misc_feature (1)..(25): SEQ ID NO: 3235; WAN024FA6_at; Start 12; Stop 36
gtaatggatatcacgtaagattccg

SEQ ID NO: 197942 - DNA, 25 bp, Artificial
  probe
  misc_feature (1)..(25): SEQ ID NO: 3235; WAN024FA6_at; Start 17; Stop 41
ggatatcacgtaagattccggttct

SEQ ID NO: 197943 - DNA, 25 bp, Artificial
  probe
  misc_feature (1)..(25): SEQ ID NO: 3235; WAN024FA6_at; Start 11; Stop 35
tgtaatggatatcacgtaagattcc

SEQ ID NO: 197944 - DNA, 25 bp, Artificial
  probe
  misc_feature (1)..(25): SEQ ID NO: 3235; WAN024FA6_at; Start 46; Stop 70
atgggggttcgattccctcagggtg

SEQ ID NO: 197945 - DNA, 25 bp, Artificial
  probe
  misc_feature (1)..(25): SEQ ID NO: 3235; WAN024FA6_at; Start 18; Stop 42
gatatcacgtaagattccggttctt

SEQ ID NO: 197946 - DNA, 25 bp, Artificial
  probe
  misc_feature (1)..(25): SEQ ID NO: 3235; WAN024FA6_at; Start 42; Stop 66
tgagatgggggttcgattccctcag

SEQ ID NO: 197947 - DNA, 25 bp, Artificial
  probe
  misc_feature (1)..(25): SEQ ID NO: 3235; WAN024FA6_at; Start 9; Stop 33
agtgtaatggatatcacgtaagatt

SEQ ID NO: 197948 - DNA, 25 bp, Artificial
  probe
  misc_feature (1)..(25): SEQ ID NO: 3235; WAN024FA6_at; Start 33; Stop 57
tccggttcttgagatgggggttcga

SEQ ID NO: 197949 - DNA, 25 bp, Artificial
  probe
  misc_feature (1)..(25): SEQ ID NO: 3235; WAN024FA6_at; Start 15; Stop 39
atggatatcacgtaagattccggtt

SEQ ID NO: 197950 - DNA, 25 bp, Artificial
  probe
  misc_feature (1)..(25): SEQ ID NO: 3235; WAN024FA6_at; Start 26; Stop 50
gtaagattccggttcttgagatggg

SEQ ID NO: 197951 - DNA, 25 bp, Artificial
  probe
  misc_feature (1)..(25): SEQ ID NO: 3235; WAN024FA6_at; Start 4; Stop 28
cccttagtgtaatggatatcacgta

SEQ ID NO: 197952 - DNA, 25 bp, Artificial
  probe
  misc_feature (1)..(25): SEQ ID NO: 3235; WAN024FA6_at; Start 6; Stop 30
cttagtgtaatggatatcacgtaag

SEQ ID NO: 197953 - DNA, 25 bp, Artificial
  probe
  misc_feature (1)..(25): SEQ ID NO: 3235; WAN024FA6_at; Start 22; Stop 46
tcacgtaagattccggttcttgaga

SEQ ID NO: 197954 - DNA, 25 bp, Artificial
  probe
  misc_feature (1)..(25): SEQ ID NO: 3235; WAN024FA6_at; Start 41; Stop 65
ttgagatgggggttcgattccctca

SEQ ID NO: 197955 - DNA, 25 bp, Artificial
  probe
  misc_feature (1)..(25): SEQ ID NO: 3235; WAN024FA6_at; Start 1; Stop 25
ccacccttagtgtaatggatatcac

SEQ ID NO: 197956 - DNA, 25 bp, Artificial
  probe
  misc_feature (1)..(25): SEQ ID NO: 3709; WAN024FA7_at; Start 24; Stop 48
gcgcatccatggtaaggatgaggtc

SEQ ID NO: 197957 - DNA, 25 bp, Artificial
  probe
  misc_feature (1)..(25): SEQ ID NO: 3709; WAN024FA7_at; Start 41; Stop 65
atgaggtcgccggttcaatcccggc

SEQ ID NO: 197958 - DNA, 25 bp, Artificial
  probe
  misc_feature (1)..(25): SEQ ID NO: 3709; WAN024FA7_at; Start 48; Stop 72
cgccggttcaatcccggcaattagc

SEQ ID NO: 197959 - DNA, 25 bp, Artificial
  probe
  misc_feature (1)..(25): SEQ ID NO: 3709; WAN024FA7_at; Start 30; Stop 54
ccatggtaaggatgaggtcgccggt

SEQ ID NO: 197960 - DNA, 25 bp, Artificial
  probe
  misc_feature (1)..(25): SEQ ID NO: 3709; WAN024FA7_at; Start 36; Stop 60
taaggatgaggtcgccggttcaatc

SEQ ID NO: 197961 - DNA, 25 bp, Artificial
  probe
  misc_feature (1)..(25): SEQ ID NO: 3709; WAN024FA7_at; Start 44; Stop 68
aggtcgccggttcaatcccggcaat

SEQ ID NO: 197962 - DNA, 25 bp, Artificial
  probe
  misc_feature (1)..(25): SEQ ID NO: 3709; WAN024FA7_at; Start 43; Stop 67
gaggtcgccggttcaatcccggcaa

SEQ ID NO: 197963 - DNA, 25 bp, Artificial
  probe
  misc_feature (1)..(25): SEQ ID NO: 3709; WAN024FA7_at; Start 5; Stop 29
atttagctcagttggcagagcgcat

SEQ ID NO: 197964 - DNA, 25 bp, Artificial
  probe
  misc_feature (1)..(25): SEQ ID NO: 3709; WAN024FA7_at; Start 42; Stop 66
tgaggtcgccggttcaatcccggca

SEQ ID NO: 197965 - DNA, 25 bp, Artificial
  probe
  misc_feature (1)..(25): SEQ ID NO: 3709; WAN024FA7_at; Start 17; Stop 41
tggcagagcgcatccatggtaagga

SEQ ID NO: 197966 - DNA, 25 bp, Artificial
  probe
  misc_feature (1)..(25): SEQ ID NO: 3709; WAN024FA7_at; Start 27; Stop 51
catccatggtaaggatgaggtcgcc

SEQ ID NO: 197967 - DNA, 25 bp, Artificial
  probe
  misc_feature (1)..(25): SEQ ID NO: 3709; WAN024FA7_at; Start 6; Stop 30
tttagctcagttggcagagcgcatc

SEQ ID NO: 197968 - DNA, 25 bp, Artificial
  probe
  misc_feature (1)..(25): SEQ ID NO: 3709; WAN024FA7_at; Start 4; Stop 28
gatttagctcagttggcagagcgca

SEQ ID NO: 197969 - DNA, 25 bp, Artificial
  probe
  misc_feature (1)..(25): SEQ ID NO: 3709; WAN024FA7_at; Start 26; Stop 50
gcatccatggtaaggatgaggtcgc

SEQ ID NO: 197970 - DNA, 25 bp, Artificial
  probe
  misc_feature (1)..(25): SEQ ID NO: 3709; WAN024FA7_at; Start 31; Stop 55
catggtaaggatgaggtcgccggtt

SEQ ID NO: 197971 - DNA, 25 bp, Artificial
  probe
  misc_feature (1)..(25): SEQ ID NO: 3709; WAN024FA7_at; Start 49; Stop 73
gccggttcaatcccggcaattagca

SEQ ID NO: 197972 - DNA, 25 bp, Artificial
  probe
  misc_feature (1)..(25): SEQ ID NO: 3709; WAN024FA7_at; Start 21; Stop 45
agagcgcatccatggtaaggatgag

SEQ ID NO: 197973 - DNA, 25 bp, Artificial
  probe
  misc_feature (1)..(25): SEQ ID NO: 3709; WAN024FA7_at; Start 2; Stop 26
ctgatttagctcagttggcagagcg

SEQ ID NO: 197974 - DNA, 25 bp, Artificial
  probe
  misc_feature (1)..(25): SEQ ID NO: 3709; WAN024FA7_at; Start 25; Stop 49
cgcatccatggtaaggatgaggtcg

SEQ ID NO: 197975 - DNA, 25 bp, Artificial
  probe
  misc_feature (1)..(25): SEQ ID NO: 3709; WAN024FA7_at; Start 35; Stop 59
gtaaggatgaggtcgccggttcaat

SEQ ID NO: 197976 - DNA, 25 bp, Artificial
  probe
  misc_feature (1)..(25): SEQ ID NO: 3709; WAN024FA7_at; Start 3; Stop 27
tgatttagctcagttggcagagcgc

SEQ ID NO: 197977 - DNA, 25 bp, Artificial
  probe
  misc_feature (1)..(25): SEQ ID NO: 3709; WAN024FA7_at; Start 23; Stop 47
agcgcatccatggtaaggatgaggt

SEQ ID NO: 197978 - DNA, 25 bp, Artificial
  probe
  misc_feature (1)..(25): SEQ ID NO: 3709; WAN024FA7_at; Start 47; Stop 71
tcgccggttcaatcccggcaattag

SEQ ID NO: 197979 - DNA, 25 bp, Artificial
  probe
  misc_feature (1)..(25): SEQ ID NO: 3709; WAN024FA7_at; Start 9; Stop 33
agctcagttggcagagcgcatccat

SEQ ID NO: 197980 - DNA, 25 bp, Artificial
  probe
  misc_feature (1)..(25): SEQ ID NO: 3709; WAN024FA7_at; Start 12; Stop 36
tcagttggcagagcgcatccatggt

SEQ ID NO: 197981 - DNA, 25 bp, Artificial
  probe
  misc_feature (1)..(25): SEQ ID NO: 3709; WAN024FA7_at; Start 16; Stop 40
ttggcagagcgcatccatggtaagg

SEQ ID NO: 197982 - DNA, 25 bp, Artificial
  probe
  misc_feature (1)..(25): SEQ ID NO: 3709; WAN024FA7_at; Start 46; Stop 70
gtcgccggttcaatcccggcaatta

SEQ ID NO: 197983 - DNA, 25 bp, Artificial
  probe
  misc_feature (1)..(25): SEQ ID NO: 3709; WAN024FA7_at; Start 8; Stop 32
tagctcagttggcagagcgcatcca

SEQ ID NO: 197984 - DNA, 25 bp, Artificial
  probe
  misc_feature (1)..(25): SEQ ID NO: 3709; WAN024FA7_at; Start 10; Stop 34
gctcagttggcagagcgcatccatg

SEQ ID NO: 197985 - DNA, 25 bp, Artificial
  probe
  misc_feature (1)..(25): SEQ ID NO: 3709; WAN024FA7_at; Start 20; Stop 44
cagagcgcatccatggtaaggatga

SEQ ID NO: 197986 - DNA, 25 bp, Artificial
  probe
  misc_feature (1)..(25): SEQ ID NO: 3709; WAN024FA7_at; Start 29; Stop 53
tccatggtaaggatgaggtcgccgg

SEQ ID NO: 197987 - DNA, 25 bp, Artificial
  probe
  misc_feature (1)..(25): SEQ ID NO: 3709; WAN024FA7_at; Start 11; Stop 35
ctcagttggcagagcgcatccatgg

SEQ ID NO: 197988 - DNA, 25 bp, Artificial
  probe
  misc_feature (1)..(25): SEQ ID NO: 3709; WAN024FA7_at; Start 1; Stop 25
gctgatttagctcagttggcagagc

SEQ ID NO: 197989 - DNA, 25 bp, Artificial
  probe
  misc_feature (1)..(25): SEQ ID NO: 3709; WAN024FA7_at; Start 28; Stop 52
atccatggtaaggatgaggtcgccg

SEQ ID NO: 197990 - DNA, 25 bp, Artificial
  probe
  misc_feature (1)..(25): SEQ ID NO: 3939; WAN024FA8_at; Start 66; Stop 90
aatcgtaatcaatatacttcagtgc

SEQ ID NO: 197991 - DNA, 25 bp, Artificial
  probe
  misc_feature (1)..(25): SEQ ID NO: 3939; WAN024FA8_at; Start 128; Stop 152
tagtaagaagttccattatcacgaa

SEQ ID NO: 197992 - DNA, 25 bp, Artificial
  probe
  misc_feature (1)..(25): SEQ ID NO: 3939; WAN024FA8_at; Start 263; Stop 287
ccaataatggcgttttctgttgttt

SEQ ID NO: 197993 - DNA, 25 bp, Artificial
  probe
  misc_feature (1)..(25): SEQ ID NO: 3939; WAN024FA8_at; Start 41; Stop 65
ccatctgtaaaaattttaacatcca

SEQ ID NO: 197994 - DNA, 25 bp, Artificial
  probe
  misc_feature (1)..(25): SEQ ID NO: 3939; WAN024FA8_at; Start 240; Stop 264
taacaagtgtatgatcgttgacacc

SEQ ID NO: 197995 - DNA, 25 bp, Artificial
  probe
  misc_feature (1)..(25): SEQ ID NO: 3939; WAN024FA8_at; Start 188; Stop 212
aagtaaacaatagccggttctcgag

SEQ ID NO: 197996 - DNA, 25 bp, Artificial
  probe
  misc_feature (1)..(25): SEQ ID NO: 3939; WAN024FA8_at; Start 233; Stop 257
ctttcggtaacaagtgtatgatcgt

SEQ ID NO: 197997 - DNA, 25 bp, Artificial
  probe
  misc_feature (1)..(25): SEQ ID NO: 3939; WAN024FA8_at; Start 57; Stop 81
taacatccaaatcgtaatcaatata

SEQ ID NO: 197998 - DNA, 25 bp, Artificial
  probe
  misc_feature (1)..(25): SEQ ID NO: 3939; WAN024FA8_at; Start 199; Stop 223
agccggttctcgagtgacccaacga

SEQ ID NO: 197999 - DNA, 25 bp, Artificial
  probe
  misc_feature (1)..(25): SEQ ID NO: 3939; WAN024FA8_at; Start 87; Stop 111
gtgcttcttcatccagatagtaggg

SEQ ID NO: 198000 - DNA, 25 bp, Artificial
  probe
  misc_feature (1)..(25): SEQ ID NO: 3939; WAN024FA8_at; Start 257; Stop 281
ttgacaccaataatggcgttttctg

SEQ ID NO: 198001 - DNA, 25 bp, Artificial
  probe
  misc_feature (1)..(25): SEQ ID NO: 3939; WAN024FA8_at; Start 252; Stop 276
gatcgttgacaccaataatggcgtt

SEQ ID NO: 198002 - DNA, 25 bp, Artificial
  probe
  misc_feature (1)..(25): SEQ ID NO: 3939; WAN024FA8_at; Start 180; Stop 204
tcttgtgaaagtaaacaatagccgg

SEQ ID NO: 198003 - DNA, 25 bp, Artificial
  probe
  misc_feature (1)..(25): SEQ ID NO: 3939; WAN024FA8_at; Start 222; Stop 246
gacgaccatcactttcggtaacaag

SEQ ID NO: 198004 - DNA, 25 bp, Artificial
  probe
  misc_feature (1)..(25): SEQ ID NO: 3939; WAN024FA8_at; Start 249; Stop 273
tatgatcgttgacaccaataatggc

SEQ ID NO: 198005 - DNA, 25 bp, Artificial
  probe
  misc_feature (1)..(25): SEQ ID NO: 3939; WAN024FA8_at; Start 218; Stop 242
caacgacgaccatcactttcggtaa

SEQ ID NO: 198006 - DNA, 25 bp, Artificial
  probe
  misc_feature (1)..(25): SEQ ID NO: 3939; WAN024FA8_at; Start 168; Stop 192
taaaccaatatttcttgtgaaagta

SEQ ID NO: 198007 - DNA, 25 bp, Artificial
  probe
  misc_feature (1)..(25): SEQ ID NO: 3939; WAN024FA8_at; Start 195; Stop 219
caatagccggttctcgagtgaccca

SEQ ID NO: 198008 - DNA, 25 bp, Artificial
  probe
  misc_feature (1)..(25): SEQ ID NO: 3939; WAN024FA8_at; Start 183; Stop 207
tgtgaaagtaaacaatagccggttc

SEQ ID NO: 198009 - DNA, 25 bp, Artificial
  probe
  misc_feature (1)..(25): SEQ ID NO: 3939; WAN024FA8_at; Start 203; Stop 227
ggttctcgagtgacccaacgacgac

SEQ ID NO: 198010 - DNA, 25 bp, Artificial
  probe
  misc_feature (1)..(25): SEQ ID NO: 3939; WAN024FA8_at; Start 78; Stop 102
tatacttcagtgcttcttcatccag

SEQ ID NO: 198011 - DNA, 25 bp, Artificial
  probe
  misc_feature (1)..(25): SEQ ID NO: 3939; WAN024FA8_at; Start 225; Stop 249
gaccatcactttcggtaacaagtgt

SEQ ID NO: 198012 - DNA, 25 bp, Artificial
  probe
  misc_feature (1)..(25): SEQ ID NO: 3939; WAN024FA8_at; Start 212; Stop 236
gtgacccaacgacgaccatcacttt

SEQ ID NO: 198013 - DNA, 25 bp, Artificial
  probe
  misc_feature (1)..(25): SEQ ID NO: 3939; WAN024FA8_at; Start 141; Stop 165
cattatcacgaatcatggcaatgat

SEQ ID NO: 198014 - DNA, 25 bp, Artificial
  probe
  misc_feature (1)..(25): SEQ ID NO: 3939; WAN024FA8_at; Start 134; Stop 158
gaagttccattatcacgaatcatgg

SEQ ID NO: 198015 - DNA, 25 bp, Artificial
  probe
  misc_feature (1)..(25): SEQ ID NO: 3939; WAN024FA8_at; Start 110; Stop 134
gggctagccatattgcaatagtaag

SEQ ID NO: 198016 - DNA, 25 bp, Artificial
  probe
  misc_feature (1)..(25): SEQ ID NO: 3939; WAN024FA8_at; Start 153; Stop 177
tcatggcaatgatattaaaccaata

SEQ ID NO: 198017 - DNA, 25 bp, Artificial
  probe
  misc_feature (1)..(25): SEQ ID NO: 3939; WAN024FA8_at; Start 11; Stop 35
tactcttcaacgtccaagagacgtt

SEQ ID NO: 198018 - DNA, 25 bp, Artificial
  probe
  misc_feature (1)..(25): SEQ ID NO: 3939; WAN024FA8_at; Start 192; Stop 216
aaacaatagccggttctcgagtgac

SEQ ID NO: 198019 - DNA, 25 bp, Artificial
  probe
  misc_feature (1)..(25): SEQ ID NO: 3939; WAN024FA8_at; Start 118; Stop 142
catattgcaatagtaagaagttcca

SEQ ID NO: 198020 - DNA, 25 bp, Artificial
  probe
  misc_feature (1)..(25): SEQ ID NO: 3939; WAN024FA8_at; Start 25; Stop 49
caagagacgtttttccccatctgta

SEQ ID NO: 198021 - DNA, 25 bp, Artificial
  probe
  misc_feature (1)..(25): SEQ ID NO: 3939; WAN024FA8_at; Start 5; Stop 29
cgctcgtactcttcaacgtccaaga

SEQ ID NO: 198022 - DNA, 25 bp, Artificial
  probe
  misc_feature (1)..(25): SEQ ID NO: 3939; WAN024FA8_at; Start 95; Stop 119
tcatccagatagtaggggctagcca

SEQ ID NO: 198023 - DNA, 25 bp, Artificial
  probe
  misc_feature (1)..(25): SEQ ID NO: 3939; WAN024FA8_at; Start 1; Stop 25
gtgacgctcgtactcttcaacgtcc

SEQ ID NO: 198024 - DNA, 25 bp, Artificial
  probe
  misc_feature (1)..(25): SEQ ID NO: 1117; WAN024FA9_at; Start 136; Stop 160
cttgttaccgaaagtgatggtcgtc

SEQ ID NO: 198025 - DNA, 25 bp, Artificial
  probe
  misc_feature (1)..(25): SEQ ID NO: 1117; WAN024FA9_at; Start 462; Stop 486
tggacgtggtcctttctcagaagcc

SEQ ID NO: 198026 - DNA, 25 bp, Artificial
  probe
  misc_feature (1)..(25): SEQ ID NO: 1117; WAN024FA9_at; Start 451; Stop 475
tggattaacaatggacgtggtcctt

SEQ ID NO: 198027 - DNA, 25 bp, Artificial
  probe
  misc_feature (1)..(25): SEQ ID NO: 1117; WAN024FA9_at; Start 16; Stop 40
gaaggcgactttattacaattcaaa

SEQ ID NO: 198028 - DNA, 25 bp, Artificial
  probe
  misc_feature (1)..(25): SEQ ID NO: 1117; WAN024FA9_at; Start 476; Stop 500
tctcagaagcctatgtaaacatttg

SEQ ID NO: 198029 - DNA, 25 bp, Artificial
  probe
  misc_feature (1)..(25): SEQ ID NO: 1117; WAN024FA9_at; Start 2; Stop 26
tgaagcttccaaaagaaggcgactt

SEQ ID NO: 198030 - DNA, 25 bp, Artificial
  probe
  misc_feature (1)..(25): SEQ ID NO: 1117; WAN024FA9_at; Start 190; Stop 214
tactttcacaagaaatattggttta

SEQ ID NO: 198031 - DNA, 25 bp, Artificial
  probe
  misc_feature (1)..(25): SEQ ID NO: 1117; WAN024FA9_at; Start 165; Stop 189
ggtcactcgagaaccggctattgtt

SEQ ID NO: 198032 - DNA, 25 bp, Artificial
  probe
  misc_feature (1)..(25): SEQ ID NO: 1117; WAN024FA9_at; Start 159; Stop 183
tcgttgggtcactcgagaaccggct

SEQ ID NO: 198033 - DNA, 25 bp, Artificial
  probe
  misc_feature (1)..(25): SEQ ID NO: 1117; WAN024FA9_at; Start 150; Stop 174
tgatggtcgtcgttgggtcactcga

SEQ ID NO: 198034 - DNA, 25 bp, Artificial
  probe
  misc_feature (1)..(25): SEQ ID NO: 1117; WAN024FA9_at; Start 390; Stop 414
aatgaattattctgatgacttggac

SEQ ID NO: 198035 - DNA, 25 bp, Artificial
  probe
  misc_feature (1)..(25): SEQ ID NO: 1117; WAN024FA9_at; Start 237; Stop 261
taatggaacttcttactattgcaat

SEQ ID NO: 198036 - DNA, 25 bp, Artificial
  probe
  misc_feature (1)..(25): SEQ ID NO: 1117; WAN024FA9_at; Start 490; Stop 514
gtaaacatttggtacaagcgctatg

SEQ ID NO: 198037 - DNA, 25 bp, Artificial
  probe
  misc_feature (1)..(25): SEQ ID NO: 1117; WAN024FA9_at; Start 32; Stop 56
caattcaaagttataagcatgatgg

SEQ ID NO: 198038 - DNA, 25 bp, Artificial
  probe
  misc_feature (1)..(25): SEQ ID NO: 1117; WAN024FA9_at; Start 43; Stop 67
tataagcatgatgggagtctccacc

SEQ ID NO: 198039 - DNA, 25 bp, Artificial
  probe
  misc_feature (1)..(25): SEQ ID NO: 1117; WAN024FA9_at; Start 290; Stop 314
aagcactgaagtatattgattacga

SEQ ID NO: 198040 - DNA, 25 bp, Artificial
  probe
  misc_feature (1)..(25): SEQ ID NO: 1117; WAN024FA9_at; Start 73; Stop 97
tggcgggacaccatggtactaaaaa

SEQ ID NO: 198041 - DNA, 25 bp, Artificial
  probe
  misc_feature (1)..(25): SEQ ID NO: 1117; WAN024FA9_at; Start 403; Stop 427
gatgacttggactatattttaaaag

SEQ ID NO: 198042 - DNA, 25 bp, Artificial
  probe
  misc_feature (1)..(25): SEQ ID NO: 1117; WAN024FA9_at; Start 79; Stop 103
gacaccatggtactaaaaacaacag

SEQ ID NO: 198043 - DNA, 25 bp, Artificial
  probe
  misc_feature (1)..(25): SEQ ID NO: 1117; WAN024FA9_at; Start 511; Stop 535
tatgtagaactaaagaatcggtaac

SEQ ID NO: 198044 - DNA, 25 bp, Artificial
  probe
  misc_feature (1)..(25): SEQ ID NO: 1117; WAN024FA9_at; Start 95; Stop 119
aaacaacagaaaacgccattattgg

SEQ ID NO: 198045 - DNA, 25 bp, Artificial
  probe
  misc_feature (1)..(25): SEQ ID NO: 1117; WAN024FA9_at; Start 228; Stop 252
gattcgtgataatggaacttcttac

SEQ ID NO: 198046 - DNA, 25 bp, Artificial
  probe
  misc_feature (1)..(25): SEQ ID NO: 1117; WAN024FA9_at; Start 205; Stop 229
tattggtttaatatcattgccatga

SEQ ID NO: 198047 - DNA, 25 bp, Artificial
  probe
  misc_feature (1)..(25): SEQ ID NO: 1117; WAN024FA9_at; Start 67; Stop 91
cgaacttggcgggacaccatggtac

SEQ ID NO: 198048 - DNA, 25 bp, Artificial
  probe
  misc_feature (1)..(25): SEQ ID NO: 1117; WAN024FA9_at; Start 501; Stop 525
gtacaagcgctatgtagaactaaag

SEQ ID NO: 198049 - DNA, 25 bp, Artificial
  probe
  misc_feature (1)..(25): SEQ ID NO: 1117; WAN024FA9_at; Start 425; Stop 449
aagaacatgtcaaaattcttgttga

SEQ ID NO: 198050 - DNA, 25 bp, Artificial
  probe
  misc_feature (1)..(25): SEQ ID NO: 1117; WAN024FA9_at; Start 110; Stop 134
ccattattggtgtcaacgatcatac

SEQ ID NO: 198051 - DNA, 25 bp, Artificial
  probe
  misc_feature (1)..(25): SEQ ID NO: 1117; WAN024FA9_at; Start 103; Stop 127
gaaaacgccattattggtgtcaacg

SEQ ID NO: 198052 - DNA, 25 bp, Artificial
  probe
  misc_feature (1)..(25): SEQ ID NO: 1117; WAN024FA9_at; Start 375; Stop 399
gcgtcacaaacgcaaaatgaattat

SEQ ID NO: 198053 - DNA, 25 bp, Artificial
  probe
  misc_feature (1)..(25): SEQ ID NO: 1117; WAN024FA9_at; Start 370; Stop 394
tacgagcgtcacaaacgcaaaatga

SEQ ID NO: 198054 - DNA, 25 bp, Artificial
  probe
  misc_feature (1)..(25): SEQ ID NO: 1117; WAN024FA9_at; Start 219; Stop 243
cattgccatgattcgtgataatgga

SEQ ID NO: 198055 - DNA, 25 bp, Artificial
  probe
  misc_feature (1)..(25): SEQ ID NO: 1117; WAN024FA9_at; Start 175; Stop 199
gaaccggctattgtttactttcaca

SEQ ID NO: 198056 - DNA, 25 bp, Artificial
  probe
  misc_feature (1)..(25): SEQ ID NO: 1117; WAN024FA9_at; Start 52; Stop 76
gatgggagtctccaccgaacttggc

SEQ ID NO: 198057 - DNA, 25 bp, Artificial
  probe
  misc_feature (1)..(25): SEQ ID NO: 1117; WAN024FA9_at; Start 123; Stop 147
caacgatcatacacttgttaccgaa

SEQ ID NO: 198058 - DNA, 25 bp, Artificial
  probe
  misc_feature (1)..(25): SEQ ID NO: 4716; WAN024FAA_at; Start 14; Stop 38
agcggtaaggcaagggactttgact

SEQ ID NO: 198059 - DNA, 25 bp, Artificial
  probe
  misc_feature (1)..(25): SEQ ID NO: 4716; WAN024FAA_at; Start 42; Stop 66
tcatgcgttggttcgaatccagcta

SEQ ID NO: 198060 - DNA, 25 bp, Artificial
  probe
  misc_feature (1)..(25): SEQ ID NO: 4716; WAN024FAA_at; Start 6; Stop 30
tatagccaagcggtaaggcaaggga

SEQ ID NO: 198061 - DNA, 25 bp, Artificial
  probe
  misc_feature (1)..(25): SEQ ID NO: 4716; WAN024FAA_at; Start 37; Stop 61
ctccctcatgcgttggttcgaatcc

SEQ ID NO: 198062 - DNA, 25 bp, Artificial
  probe
  misc_feature (1)..(25): SEQ ID NO: 4716; WAN024FAA_at; Start 48; Stop 72
gttggttcgaatccagctaccccag

SEQ ID NO: 198063 - DNA, 25 bp, Artificial
  probe
  misc_feature (1)..(25): SEQ ID NO: 4716; WAN024FAA_at; Start 27; Stop 51
gggactttgactccctcatgcgttg

SEQ ID NO: 198064 - DNA, 25 bp, Artificial
  probe
  misc_feature (1)..(25): SEQ ID NO: 4716; WAN024FAA_at; Start 8; Stop 32
tagccaagcggtaaggcaagggact

SEQ ID NO: 198065 - DNA, 25 bp, Artificial
  probe
  misc_feature (1)..(25): SEQ ID NO: 4716; WAN024FAA_at; Start 32; Stop 56
tttgactccctcatgcgttggttcg

SEQ ID NO: 198066 - DNA, 25 bp, Artificial
  probe
  misc_feature (1)..(25): SEQ ID NO: 4716; WAN024FAA_at; Start 47; Stop 71
cgttggttcgaatccagctacccca

SEQ ID NO: 198067 - DNA, 25 bp, Artificial
  probe
  misc_feature (1)..(25): SEQ ID NO: 4716; WAN024FAA_at; Start 21; Stop 45
aggcaagggactttgactccctcat

SEQ ID NO: 198068 - DNA, 25 bp, Artificial
  probe
  misc_feature (1)..(25): SEQ ID NO: 4716; WAN024FAA_at; Start 39; Stop 63
ccctcatgcgttggttcgaatccag

SEQ ID NO: 198069 - DNA, 25 bp, Artificial
  probe
  misc_feature (1)..(25): SEQ ID NO: 4716; WAN024FAA_at; Start 25; Stop 49
aagggactttgactccctcatgcgt

SEQ ID NO: 198070 - DNA, 25 bp, Artificial
  probe
  misc_feature (1)..(25): SEQ ID NO: 4716; WAN024FAA_at; Start 29; Stop 53
gactttgactccctcatgcgttggt

SEQ ID NO: 198071 - DNA, 25 bp, Artificial
  probe
  misc_feature (1)..(25): SEQ ID NO: 4716; WAN024FAA_at; Start 30; Stop 54
actttgactccctcatgcgttggtt

SEQ ID NO: 198072 - DNA, 25 bp, Artificial
  probe
  misc_feature (1)..(25): SEQ ID NO: 4716; WAN024FAA_at; Start 9; Stop 33
agccaagcggtaaggcaagggactt

SEQ ID NO: 198073 - DNA, 25 bp, Artificial
  probe
  misc_feature (1)..(25): SEQ ID NO: 4716; WAN024FAA_at; Start 26; Stop 50
agggactttgactccctcatgcgtt

SEQ ID NO: 198074 - DNA, 25 bp, Artificial
  probe
  misc_feature (1)..(25): SEQ ID NO: 4716; WAN024FAA_at; Start 19; Stop 43
taaggcaagggactttgactccctc

SEQ ID NO: 198075 - DNA, 25 bp, Artificial
  probe
  misc_feature (1)..(25): SEQ ID NO: 4716; WAN024FAA_at; Start 20; Stop 44
aaggcaagggactttgactccctca

SEQ ID NO: 198076 - DNA, 25 bp, Artificial
  probe
  misc_feature (1)..(25): SEQ ID NO: 4716; WAN024FAA_at; Start 41; Stop 65
ctcatgcgttggttcgaatccagct

SEQ ID NO: 198077 - DNA, 25 bp, Artificial
  probe
  misc_feature (1)..(25): SEQ ID NO: 4716; WAN024FAA_at; Start 44; Stop 68
atgcgttggttcgaatccagctacc

SEQ ID NO: 198078 - DNA, 25 bp, Artificial
  probe
  misc_feature (1)..(25): SEQ ID NO: 4716; WAN024FAA_at; Start 38; Stop 62
tccctcatgcgttggttcgaatcca

SEQ ID NO: 198079 - DNA, 25 bp, Artificial
  probe
  misc_feature (1)..(25): SEQ ID NO: 4716; WAN024FAA_at; Start 45; Stop 69
tgcgttggttcgaatccagctaccc

SEQ ID NO: 198080 - DNA, 25 bp, Artificial
  probe
  misc_feature (1)..(25): SEQ ID NO: 4716; WAN024FAA_at; Start 40; Stop 64
cctcatgcgttggttcgaatccagc

SEQ ID NO: 198081 - DNA, 25 bp, Artificial
  probe
  misc_feature (1)..(25): SEQ ID NO: 4716; WAN024FAA_at; Start 33; Stop 57
ttgactccctcatgcgttggttcga

SEQ ID NO: 198082 - DNA, 25 bp, Artificial
  probe
  misc_feature (1)..(25): SEQ ID NO: 4716; WAN024FAA_at; Start 31; Stop 55
ctttgactccctcatgcgttggttc

SEQ ID NO: 198083 - DNA, 25 bp, Artificial
  probe
  misc_feature (1)..(25): SEQ ID NO: 4716; WAN024FAA_at; Start 23; Stop 47
gcaagggactttgactccctcatgc

SEQ ID NO: 198084 - DNA, 25 bp, Artificial
  probe
  misc_feature (1)..(25): SEQ ID NO: 4716; WAN024FAA_at; Start 7; Stop 31
atagccaagcggtaaggcaagggac

SEQ ID NO: 198085 - DNA, 25 bp, Artificial
  probe
  misc_feature (1)..(25): SEQ ID NO: 4716; WAN024FAA_at; Start 46; Stop 70
gcgttggttcgaatccagctacccc

SEQ ID NO: 198086 - DNA, 25 bp, Artificial
  probe
  misc_feature (1)..(25): SEQ ID NO: 4716; WAN024FAA_at; Start 43; Stop 67
catgcgttggttcgaatccagctac

SEQ ID NO: 198087 - DNA, 25 bp, Artificial
  probe
  misc_feature (1)..(25): SEQ ID NO: 4716; WAN024FAA_at; Start 15; Stop 39
gcggtaaggcaagggactttgactc

SEQ ID NO: 198088 - DNA, 25 bp, Artificial
  probe
  misc_feature (1)..(25): SEQ ID NO: 4716; WAN024FAA_at; Start 36; Stop 60
actccctcatgcgttggttcgaatc

SEQ ID NO: 198089 - DNA, 25 bp, Artificial
  probe
  misc_feature (1)..(25): SEQ ID NO: 4716; WAN024FAA_at; Start 34; Stop 58
tgactccctcatgcgttggttcgaa

SEQ ID NO: 198090 - DNA, 25 bp, Artificial
  probe
  misc_feature (1)..(25): SEQ ID NO: 4716; WAN024FAA_at; Start 22; Stop 46
ggcaagggactttgactccctcatg

SEQ ID NO: 198091 - DNA, 25 bp, Artificial
  probe
  misc_feature (1)..(25): SEQ ID NO: 4716; WAN024FAA_at; Start 24; Stop 48
caagggactttgactccctcatgcg

SEQ ID NO: 198092 - DNA, 25 bp, Artificial
  probe
  misc_feature (1)..(25): SEQ ID NO: 4619; WAN024FAB_at; Start 7; Stop 31
atagctcagttggtagtagcgcatg

SEQ ID NO: 198093 - DNA, 25 bp, Artificial
  probe
  misc_feature (1)..(25): SEQ ID NO: 4619; WAN024FAB_at; Start 11; Stop 35
ctcagttggtagtagcgcatgactg

SEQ ID NO: 198094 - DNA, 25 bp, Artificial
  probe
  misc_feature (1)..(25): SEQ ID NO: 4619; WAN024FAB_at; Start 39; Stop 63
atcatgatgtcgtaggttcgagtcc

SEQ ID NO: 198095 - DNA, 25 bp, Artificial
  probe
  misc_feature (1)..(25): SEQ ID NO: 4619; WAN024FAB_at; Start 44; Stop 68
gatgtcgtaggttcgagtcctactg

SEQ ID NO: 198096 - DNA, 25 bp, Artificial
  probe
  misc_feature (1)..(25): SEQ ID NO: 4619; WAN024FAB_at; Start 48; Stop 72
tcgtaggttcgagtcctactggcgg

SEQ ID NO: 198097 - DNA, 25 bp, Artificial
  probe
  misc_feature (1)..(25): SEQ ID NO: 4619; WAN024FAB_at; Start 17; Stop 41
tggtagtagcgcatgactgttaatc

SEQ ID NO: 198098 - DNA, 25 bp, Artificial
  probe
  misc_feature (1)..(25): SEQ ID NO: 4619; WAN024FAB_at; Start 42; Stop 66
atgatgtcgtaggttcgagtcctac

SEQ ID NO: 198099 - DNA, 25 bp, Artificial
  probe
  misc_feature (1)..(25): SEQ ID NO: 4619; WAN024FAB_at; Start 23; Stop 47
tagcgcatgactgttaatcatgatg

SEQ ID NO: 198100 - DNA, 25 bp, Artificial
  probe
  misc_feature (1)..(25): SEQ ID NO: 4619; WAN024FAB_at; Start 12; Stop 36
tcagttggtagtagcgcatgactgt

SEQ ID NO: 198101 - DNA, 25 bp, Artificial
  probe
  misc_feature (1)..(25): SEQ ID NO: 4619; WAN024FAB_at; Start 37; Stop 61
taatcatgatgtcgtaggttcgagt

SEQ ID NO: 198102 - DNA, 25 bp, Artificial
  probe
  misc_feature (1)..(25): SEQ ID NO: 4619; WAN024FAB_at; Start 36; Stop 60
ttaatcatgatgtcgtaggttcgag

SEQ ID NO: 198103 - DNA, 25 bp, Artificial
  probe
  misc_feature (1)..(25): SEQ ID NO: 4619; WAN024FAB_at; Start 50; Stop 74
gtaggttcgagtcctactggcggag

SEQ ID NO: 198104 - DNA, 25 bp, Artificial
  probe
  misc_feature (1)..(25): SEQ ID NO: 4619; WAN024FAB_at; Start 26; Stop 50
cgcatgactgttaatcatgatgtcg

SEQ ID NO: 198105 - DNA, 25 bp, Artificial
  probe
  misc_feature (1)..(25): SEQ ID NO: 4619; WAN024FAB_at; Start 18; Stop 42
ggtagtagcgcatgactgttaatca

SEQ ID NO: 198106 - DNA, 25 bp, Artificial
  probe
  misc_feature (1)..(25): SEQ ID NO: 4619; WAN024FAB_at; Start 33; Stop 57
ctgttaatcatgatgtcgtaggttc

SEQ ID NO: 198107 - DNA, 25 bp, Artificial
  probe
  misc_feature (1)..(25): SEQ ID NO: 4619; WAN024FAB_at; Start 13; Stop 37
cagttggtagtagcgcatgactgtt

SEQ ID NO: 198108 - DNA, 25 bp, Artificial
  probe
  misc_feature (1)..(25): SEQ ID NO: 4619; WAN024FAB_at; Start 10; Stop 34
gctcagttggtagtagcgcatgact

SEQ ID NO: 198109 - DNA, 25 bp, Artificial
  probe
  misc_feature (1)..(25): SEQ ID NO: 4619; WAN024FAB_at; Start 31; Stop 55
gactgttaatcatgatgtcgtaggt

SEQ ID NO: 198110 - DNA, 25 bp, Artificial
  probe
  misc_feature (1)..(25): SEQ ID NO: 4619; WAN024FAB_at; Start 40; Stop 64
tcatgatgtcgtaggttcgagtcct

SEQ ID NO: 198111 - DNA, 25 bp, Artificial
  probe
  misc_feature (1)..(25): SEQ ID NO: 4619; WAN024FAB_at; Start 43; Stop 67
tgatgtcgtaggttcgagtcctact

SEQ ID NO: 198112 - DNA, 25 bp, Artificial
  probe
  misc_feature (1)..(25): SEQ ID NO: 4619; WAN024FAB_at; Start 8; Stop 32
tagctcagttggtagtagcgcatga

SEQ ID NO: 198113 - DNA, 25 bp, Artificial
  probe
  misc_feature (1)..(25): SEQ ID NO: 4619; WAN024FAB_at; Start 41; Stop 65
catgatgtcgtaggttcgagtccta

SEQ ID NO: 198114 - DNA, 25 bp, Artificial
  probe
  misc_feature (1)..(25): SEQ ID NO: 4619; WAN024FAB_at; Start 38; Stop 62
aatcatgatgtcgtaggttcgagtc

SEQ ID NO: 198115 - DNA, 25 bp, Artificial
  probe
  misc_feature (1)..(25): SEQ ID NO: 4619; WAN024FAB_at; Start 49; Stop 73
cgtaggttcgagtcctactggcgga

SEQ ID NO: 198116 - DNA, 25 bp, Artificial
  probe
  misc_feature (1)..(25): SEQ ID NO: 4619; WAN024FAB_at; Start 19; Stop 43
gtagtagcgcatgactgttaatcat

SEQ ID NO: 198117 - DNA, 25 bp, Artificial
  probe
  misc_feature (1)..(25): SEQ ID NO: 4619; WAN024FAB_at; Start 21; Stop 45
agtagcgcatgactgttaatcatga

SEQ ID NO: 198118 - DNA, 25 bp, Artificial
  probe
  misc_feature (1)..(25): SEQ ID NO: 4619; WAN024FAB_at; Start 9; Stop 33
agctcagttggtagtagcgcatgac

SEQ ID NO: 198119 - DNA, 25 bp, Artificial
  probe
  misc_feature (1)..(25): SEQ ID NO: 4619; WAN024FAB_at; Start 6; Stop 30
catagctcagttggtagtagcgcat

SEQ ID NO: 198120 - DNA, 25 bp, Artificial
  probe
  misc_feature (1)..(25): SEQ ID NO: 4619; WAN024FAB_at; Start 30; Stop 54
tgactgttaatcatgatgtcgtagg

SEQ ID NO: 198121 - DNA, 25 bp, Artificial
  probe
  misc_feature (1)..(25): SEQ ID NO: 4619; WAN024FAB_at; Start 34; Stop 58
tgttaatcatgatgtcgtaggttcg

SEQ ID NO: 198122 - DNA, 25 bp, Artificial
  probe
  misc_feature (1)..(25): SEQ ID NO: 4619; WAN024FAB_at; Start 20; Stop 44
tagtagcgcatgactgttaatcatg

SEQ ID NO: 198123 - DNA, 25 bp, Artificial
  probe
  misc_feature (1)..(25): SEQ ID NO: 4619; WAN024FAB_at; Start 28; Stop 52
catgactgttaatcatgatgtcgta

SEQ ID NO: 198124 - DNA, 25 bp, Artificial
  probe
  misc_feature (1)..(25): SEQ ID NO: 4619; WAN024FAB_at; Start 35; Stop 59
gttaatcatgatgtcgtaggttcga

SEQ ID NO: 198125 - DNA, 25 bp, Artificial
  probe
  misc_feature (1)..(25): SEQ ID NO: 4619; WAN024FAB_at; Start 46; Stop 70
tgtcgtaggttcgagtcctactggc

SEQ ID NO: 198126 - DNA, 25 bp, Artificial
  probe
  misc_feature (1)..(25): SEQ ID NO: 3303; WAN024FAC_at; Start 54; Stop 78
cagaagttaagccctagaacgccgg

SEQ ID NO: 198127 - DNA, 25 bp, Artificial
  probe
  misc_feature (1)..(25): SEQ ID NO: 3303; WAN024FAC_at; Start 104; Stop 128
agatagggaagtcgcttagctttaa

SEQ ID NO: 198128 - DNA, 25 bp, Artificial
  probe
  misc_feature (1)..(25): SEQ ID NO: 3303; WAN024FAC_at; Start 43; Stop 67
catgccgaacacagaagttaagccc

SEQ ID NO: 198129 - DNA, 25 bp, Artificial
  probe
  misc_feature (1)..(25): SEQ ID NO: 3303; WAN024FAC_at; Start 118; Stop 142
cttagctttaatccgccatagctca

SEQ ID NO: 198130 - DNA, 25 bp, Artificial
  probe
  misc_feature (1)..(25): SEQ ID NO: 3303; WAN024FAC_at; Start 48; Stop 72
cgaacacagaagttaagccctagaa

SEQ ID NO: 198131 - DNA, 25 bp, Artificial
  probe
  misc_feature (1)..(25): SEQ ID NO: 3303; WAN024FAC_at; Start 5; Stop 29
gagttaagtgacgatagcctaggag

SEQ ID NO: 198132 - DNA, 25 bp, Artificial
  probe
  misc_feature (1)..(25): SEQ ID NO: 3303; WAN024FAC_at; Start 1; Stop 25
ctcagagttaagtgacgatagccta

SEQ ID NO: 198133 - DNA, 25 bp, Artificial
  probe
  misc_feature (1)..(25): SEQ ID NO: 3303; WAN024FAC_at; Start 37; Stop 61
tgtacccatgccgaacacagaagtt

SEQ ID NO: 198134 - DNA, 25 bp, Artificial
  probe
  misc_feature (1)..(25): SEQ ID NO: 3303; WAN024FAC_at; Start 9; Stop 33
taagtgacgatagcctaggagatac

SEQ ID NO: 198135 - DNA, 25 bp, Artificial
  probe
  misc_feature (1)..(25): SEQ ID NO: 3303; WAN024FAC_at; Start 46; Stop 70
gccgaacacagaagttaagccctag

SEQ ID NO: 198136 - DNA, 25 bp, Artificial
  probe
  misc_feature (1)..(25): SEQ ID NO: 3303; WAN024FAC_at; Start 45; Stop 69
tgccgaacacagaagttaagcccta

SEQ ID NO: 198137 - DNA, 25 bp, Artificial
  probe
  misc_feature (1)..(25): SEQ ID NO: 3303; WAN024FAC_at; Start 7; Stop 31
gttaagtgacgatagcctaggagat

SEQ ID NO: 198138 - DNA, 25 bp, Artificial
  probe
  misc_feature (1)..(25): SEQ ID NO: 3303; WAN024FAC_at; Start 97; Stop 121
ccctgtgagatagggaagtcgctta

SEQ ID NO: 198139 - DNA, 25 bp, Artificial
  probe
  misc_feature (1)..(25): SEQ ID NO: 3303; WAN024FAC_at; Start 19; Stop 43
tagcctaggagatacacctgtaccc

SEQ ID NO: 198140 - DNA, 25 bp, Artificial
  probe
  misc_feature (1)..(25): SEQ ID NO: 3303; WAN024FAC_at; Start 50; Stop 74
aacacagaagttaagccctagaacg

SEQ ID NO: 198141 - DNA, 25 bp, Artificial
  probe
  misc_feature (1)..(25): SEQ ID NO: 3303; WAN024FAC_at; Start 17; Stop 41
gatagcctaggagatacacctgtac

SEQ ID NO: 198142 - DNA, 25 bp, Artificial
  probe
  misc_feature (1)..(25): SEQ ID NO: 3303; WAN024FAC_at; Start 26; Stop 50
ggagatacacctgtacccatgccga

SEQ ID NO: 198143 - DNA, 25 bp, Artificial
  probe
  misc_feature (1)..(25): SEQ ID NO: 3303; WAN024FAC_at; Start 96; Stop 120
cccctgtgagatagggaagtcgctt

SEQ ID NO: 198144 - DNA, 25 bp, Artificial
  probe
  misc_feature (1)..(25): SEQ ID NO: 3303; WAN024FAC_at; Start 39; Stop 63
tacccatgccgaacacagaagttaa

SEQ ID NO: 198145 - DNA, 25 bp, Artificial
  probe
  misc_feature (1)..(25): SEQ ID NO: 3303; WAN024FAC_at; Start 21; Stop 45
gcctaggagatacacctgtacccat

SEQ ID NO: 198146 - DNA, 25 bp, Artificial
  probe
  misc_feature (1)..(25): SEQ ID NO: 3303; WAN024FAC_at; Start 63; Stop 87
agccctagaacgccggaagtagttg

SEQ ID NO: 198147 - DNA, 25 bp, Artificial
  probe
  misc_feature (1)..(25): SEQ ID NO: 3303; WAN024FAC_at; Start 102; Stop 126
tgagatagggaagtcgcttagcttt

SEQ ID NO: 198148 - DNA, 25 bp, Artificial
  probe
  misc_feature (1)..(25): SEQ ID NO: 3303; WAN024FAC_at; Start 99; Stop 123
ctgtgagatagggaagtcgcttagc

SEQ ID NO: 198149 - DNA, 25 bp, Artificial
  probe
  misc_feature (1)..(25): SEQ ID NO: 3303; WAN024FAC_at; Start 52; Stop 76
cacagaagttaagccctagaacgcc

SEQ ID NO: 198150 - DNA, 25 bp, Artificial
  probe
  misc_feature (1)..(25): SEQ ID NO: 3303; WAN024FAC_at; Start 116; Stop 140
cgcttagctttaatccgccatagct

SEQ ID NO: 198151 - DNA, 25 bp, Artificial
  probe
  misc_feature (1)..(25): SEQ ID NO: 3303; WAN024FAC_at; Start 16; Stop 40
cgatagcctaggagatacacctgta

SEQ ID NO: 198152 - DNA, 25 bp, Artificial
  probe
  misc_feature (1)..(25): SEQ ID NO: 3303; WAN024FAC_at; Start 12; Stop 36
gtgacgatagcctaggagatacacc

SEQ ID NO: 198153 - DNA, 25 bp, Artificial
  probe
  misc_feature (1)..(25): SEQ ID NO: 3303; WAN024FAC_at; Start 14; Stop 38
gacgatagcctaggagatacacctg

SEQ ID NO: 198154 - DNA, 25 bp, Artificial
  probe
  misc_feature (1)..(25): SEQ ID NO: 3303; WAN024FAC_at; Start 41; Stop 65
cccatgccgaacacagaagttaagc

SEQ ID NO: 198155 - DNA, 25 bp, Artificial
  probe
  misc_feature (1)..(25): SEQ ID NO: 3303; WAN024FAC_at; Start 3; Stop 27
cagagttaagtgacgatagcctagg

SEQ ID NO: 198156 - DNA, 25 bp, Artificial
  probe
  misc_feature (1)..(25): SEQ ID NO: 3303; WAN024FAC_at; Start 100; Stop 124
tgtgagatagggaagtcgcttagct

SEQ ID NO: 198157 - DNA, 25 bp, Artificial
  probe
  misc_feature (1)..(25): SEQ ID NO: 3303; WAN024FAC_at; Start 24; Stop 48
taggagatacacctgtacccatgcc

SEQ ID NO: 198158 - DNA, 25 bp, Artificial
  probe
  misc_feature (1)..(25): SEQ ID NO: 3303; WAN024FAC_at; Start 27; Stop 51
gagatacacctgtacccatgccgaa

SEQ ID NO: 198159 - DNA, 25 bp, Artificial
  probe
  misc_feature (1)..(25): SEQ ID NO: 3303; WAN024FAC_at; Start 29; Stop 53
gatacacctgtacccatgccgaaca

SEQ ID NO: 198160 - DNA, 25 bp, Artificial
  probe
  misc_feature (1)..(25): SEQ ID NO: 3774; WAN024FAD_at; Start 571; Stop 595
cccgttaatgggtgagagcgtgcct

SEQ ID NO: 198161 - DNA, 25 bp, Artificial
  probe
  misc_feature (1)..(25): SEQ ID NO: 3774; WAN024FAD_at; Start 2654; Stop 2678
ctagtacgagaggaccagagtggac

SEQ ID NO: 198162 - DNA, 25 bp, Artificial
  probe
  misc_feature (1)..(25): SEQ ID NO: 3774; WAN024FAD_at; Start 223; Stop 247
aaagcgattgccttagtagcggcga

SEQ ID NO: 198163 - DNA, 25 bp, Artificial
  probe
  misc_feature (1)..(25): SEQ ID NO: 3774; WAN024FAD_at; Start 2124; Stop 2148
taggagtctaagagatcgggacgcc

SEQ ID NO: 198164 - DNA, 25 bp, Artificial
  probe
  misc_feature (1)..(25): SEQ ID NO: 3774; WAN024FAD_at; Start 2359; Stop 2383
tacaactcgagcagggacgaaagtc

SEQ ID NO: 198165 - DNA, 25 bp, Artificial
  probe
  misc_feature (1)..(25): SEQ ID NO: 3774; WAN024FAD_at; Start 694; Stop 718
tgacgtagacccgaaaccatgtgac

SEQ ID NO: 198166 - DNA, 25 bp, Artificial
  probe
  misc_feature (1)..(25): SEQ ID NO: 3774; WAN024FAD_at; Start 2554; Stop 2578
tgttcgcccattaaagcggcacgcg

SEQ ID NO: 198167 - DNA, 25 bp, Artificial
  probe
  misc_feature (1)..(25): SEQ ID NO: 3774; WAN024FAD_at; Start 2412; Stop 2436
gaagggccatcgctcaacggataaa

SEQ ID NO: 198168 - DNA, 25 bp, Artificial
  probe
  misc_feature (1)..(25): SEQ ID NO: 3774; WAN024FAD_at; Start 977; Stop 1001
cagactgcgagtgctaagatccgta

SEQ ID NO: 198169 - DNA, 25 bp, Artificial
  probe
  misc_feature (1)..(25): SEQ ID NO: 3774; WAN024FAD_at; Start 29; Stop 53
tgccttggcactaggagccgacgaa

SEQ ID NO: 198170 - DNA, 25 bp, Artificial
  probe
  misc_feature (1)..(25): SEQ ID NO: 3774; WAN024FAD_at; Start 2334; Stop 2358
tataagggagcttgactgcgagagc

SEQ ID NO: 198171 - DNA, 25 bp, Artificial
  probe
  misc_feature (1)..(25): SEQ ID NO: 3774; WAN024FAD_at; Start 1581; Stop 1605
tgacgtcacactgccaagaaaagct

SEQ ID NO: 198172 - DNA, 25 bp, Artificial
  probe
  misc_feature (1)..(25): SEQ ID NO: 3774; WAN024FAD_at; Start 393; Stop 417
cagtatcctgagtacggcgggacac

SEQ ID NO: 198173 - DNA, 25 bp, Artificial
  probe
  misc_feature (1)..(25): SEQ ID NO: 3774; WAN024FAD_at; Start 1982; Stop 2006
gatttgggcactgtctcaacgagag

SEQ ID NO: 198174 - DNA, 25 bp, Artificial
  probe
  misc_feature (1)..(25): SEQ ID NO: 3774; WAN024FAD_at; Start 635; Stop 659
ttaagttgaagagacggagccgtag

SEQ ID NO: 198175 - DNA, 25 bp, Artificial
  probe
  misc_feature (1)..(25): SEQ ID NO: 3774; WAN024FAD_at; Start 1245; Stop 1269
tataccgtgaggagtgctggaacgc

SEQ ID NO: 198176 - DNA, 25 bp, Artificial
  probe
  misc_feature (1)..(25): SEQ ID NO: 3774; WAN024FAD_at; Start 2061; Stop 2085
aagaccccatggagctttactgcag

SEQ ID NO: 198177 - DNA, 25 bp, Artificial
  probe
  misc_feature (1)..(25): SEQ ID NO: 3774; WAN024FAD_at; Start 2702; Stop 2726
ttgccaaaggcatcgctgggtagct

SEQ ID NO: 198178 - DNA, 25 bp, Artificial
  probe
  misc_feature (1)..(25): SEQ ID NO: 3774; WAN024FAD_at; Start 2760; Stop 2784
agtgtgaaacccacctcaagatgag

SEQ ID NO: 198179 - DNA, 25 bp, Artificial
  probe
  misc_feature (1)..(25): SEQ ID NO: 3774; WAN024FAD_at; Start 1877; Stop 1901
gaaggtatgaattgaagccccagta

SEQ ID NO: 198180 - DNA, 25 bp, Artificial
  probe
  misc_feature (1)..(25): SEQ ID NO: 3774; WAN024FAD_at; Start 473; Stop 497
tgaccgatagtgaaccagtaccgtg

SEQ ID NO: 198181 - DNA, 25 bp, Artificial
  probe
  misc_feature (1)..(25): SEQ ID NO: 3774; WAN024FAD_at; Start 2213; Stop 2237
gatccctatcggagacagtgtctga

SEQ ID NO: 198182 - DNA, 25 bp, Artificial
  probe
  misc_feature (1)..(25): SEQ ID NO: 3774; WAN024FAD_at; Start 62; Stop 86
caaacgacgatatgccttgggtagc

SEQ ID NO: 198183 - DNA, 25 bp, Artificial
  probe
  misc_feature (1)..(25): SEQ ID NO: 3774; WAN024FAD_at; Start 651; Stop 675
gagccgtagggaaaccgagtctgaa

SEQ ID NO: 198184 - DNA, 25 bp, Artificial
  probe
  misc_feature (1)..(25): SEQ ID NO: 3774; WAN024FAD_at; Start 1683; Stop 1707
gaactctcgttaaggaactcggcaa

SEQ ID NO: 198185 - DNA, 25 bp, Artificial
  probe
  misc_feature (1)..(25): SEQ ID NO: 3774; WAN024FAD_at; Start 2028; Stop 2052
tgtgaagatgcaggttacccgcgac

SEQ ID NO: 198186 - DNA, 25 bp, Artificial
  probe
  misc_feature (1)..(25): SEQ ID NO: 3774; WAN024FAD_at; Start 1834; Stop 1858
cctgcccggtgctggaaggttaaga

SEQ ID NO: 198187 - DNA, 25 bp, Artificial
  probe
  misc_feature (1)..(25): SEQ ID NO: 3774; WAN024FAD_at; Start 1746; Stop 1770
aagtcagccgcagtgaataggccca

SEQ ID NO: 198188 - DNA, 25 bp, Artificial
  probe
  misc_feature (1)..(25): SEQ ID NO: 3774; WAN024FAD_at; Start 2139; Stop 2163
tcgggacgccagtttcgaaggagac

SEQ ID NO: 198189 - DNA, 25 bp, Artificial
  probe
  misc_feature (1)..(25): SEQ ID NO: 3774; WAN024FAD_at; Start 531; Stop 555
gaaatagaacctgaaaccgtgtgcc

SEQ ID NO: 198190 - DNA, 25 bp, Artificial
  probe
  misc_feature (1)..(25): SEQ ID NO: 3774; WAN024FAD_at; Start 1147; Stop 1171
tgaccctgcgccgaaaatgtaccgg

SEQ ID NO: 198191 - DNA, 25 bp, Artificial
  probe
  misc_feature (1)..(25): SEQ ID NO: 3774; WAN024FAD_at; Start 9; Stop 33
taataagggcgcacggtggatgcct

SEQ ID NO: 198192 - DNA, 25 bp, Artificial
  probe
  misc_feature (1)..(25): SEQ ID NO: 3774; WAN024FAD_at; Start 593; Stop 617
ccttttgtagaatgaaccggcgagt

SEQ ID NO: 198193 - DNA, 25 bp, Artificial
  probe
  misc_feature (1)..(25): SEQ ID NO: 3774; WAN024FAD_at; Start 2154; Stop 2178
cgaaggagacgctgttgggatacta

SEQ ID NO: 198194 - DNA, 25 bp, Artificial
  probe
  misc_feature (1)..(25): SEQ ID NO: 3754; WAN024FAE_at; Start 49; Stop 73
agcggttcgatcccgctaggctcca

SEQ ID NO: 198195 - DNA, 25 bp, Artificial
  probe
  misc_feature (1)..(25): SEQ ID NO: 3754; WAN024FAE_at; Start 12; Stop 36
tcagctgggagagcgcctgctttgc

SEQ ID NO: 198196 - DNA, 25 bp, Artificial
  probe
  misc_feature (1)..(25): SEQ ID NO: 3754; WAN024FAE_at; Start 17; Stop 41
tgggagagcgcctgctttgcacgca

SEQ ID NO: 198197 - DNA, 25 bp, Artificial
  probe
  misc_feature (1)..(25): SEQ ID NO: 3754; WAN024FAE_at; Start 33; Stop 57
ttgcacgcaggaggtcagcggttcg

SEQ ID NO: 198198 - DNA, 25 bp, Artificial
  probe
  misc_feature (1)..(25): SEQ ID NO: 3754; WAN024FAE_at; Start 26; Stop 50
gcctgctttgcacgcaggaggtcag

SEQ ID NO: 198199 - DNA, 25 bp, Artificial
  probe
  misc_feature (1)..(25): SEQ ID NO: 3754; WAN024FAE_at; Start 23; Stop 47
agcgcctgctttgcacgcaggaggt

SEQ ID NO: 198200 - DNA, 25 bp, Artificial
  probe
  misc_feature (1)..(25): SEQ ID NO: 3754; WAN024FAE_at; Start 31; Stop 55
ctttgcacgcaggaggtcagcggtt

SEQ ID NO: 198201 - DNA, 25 bp, Artificial
  probe
  misc_feature (1)..(25): SEQ ID NO: 3754; WAN024FAE_at; Start 16; Stop 40
ctgggagagcgcctgctttgcacgc

SEQ ID NO: 198202 - DNA, 25 bp, Artificial
  probe
  misc_feature (1)..(25): SEQ ID NO: 3754; WAN024FAE_at; Start 19; Stop 43
ggagagcgcctgctttgcacgcagg

SEQ ID NO: 198203 - DNA, 25 bp, Artificial
  probe
  misc_feature (1)..(25): SEQ ID NO: 3754; WAN024FAE_at; Start 21; Stop 45
agagcgcctgctttgcacgcaggag

SEQ ID NO: 198204 - DNA, 25 bp, Artificial
  probe
  misc_feature (1)..(25): SEQ ID NO: 3754; WAN024FAE_at; Start 15; Stop 39
gctgggagagcgcctgctttgcacg

SEQ ID NO: 198205 - DNA, 25 bp, Artificial
  probe
  misc_feature (1)..(25): SEQ ID NO: 3754; WAN024FAE_at; Start 29; Stop 53
tgctttgcacgcaggaggtcagcgg

SEQ ID NO: 198206 - DNA, 25 bp, Artificial
  probe
  misc_feature (1)..(25): SEQ ID NO: 3754; WAN024FAE_at; Start 25; Stop 49
cgcctgctttgcacgcaggaggtca

SEQ ID NO: 198207 - DNA, 25 bp, Artificial
  probe
  misc_feature (1)..(25): SEQ ID NO: 3754; WAN024FAE_at; Start 32; Stop 56
tttgcacgcaggaggtcagcggttc

SEQ ID NO: 198208 - DNA, 25 bp, Artificial
  probe
  misc_feature (1)..(25): SEQ ID NO: 3754; WAN024FAE_at; Start 30; Stop 54
gctttgcacgcaggaggtcagcggt

SEQ ID NO: 198209 - DNA, 25 bp, Artificial
  probe
  misc_feature (1)..(25): SEQ ID NO: 3754; WAN024FAE_at; Start 14; Stop 38
agctgggagagcgcctgctttgcac

SEQ ID NO: 198210 - DNA, 25 bp, Artificial
  probe
  misc_feature (1)..(25): SEQ ID NO: 3754; WAN024FAE_at; Start 28; Stop 52
ctgctttgcacgcaggaggtcagcg

SEQ ID NO: 198211 - DNA, 25 bp, Artificial
  probe
  misc_feature (1)..(25): SEQ ID NO: 3754; WAN024FAE_at; Start 18; Stop 42
gggagagcgcctgctttgcacgcag

SEQ ID NO: 198212 - DNA, 25 bp, Artificial
  probe
  misc_feature (1)..(25): SEQ ID NO: 3754; WAN024FAE_at; Start 24; Stop 48
gcgcctgctttgcacgcaggaggtc

SEQ ID NO: 198213 - DNA, 25 bp, Artificial
  probe
  misc_feature (1)..(25): SEQ ID NO: 3754; WAN024FAE_at; Start 34; Stop 58
tgcacgcaggaggtcagcggttcga

SEQ ID NO: 198214 - DNA, 25 bp, Artificial
  probe
  misc_feature (1)..(25): SEQ ID NO: 3754; WAN024FAE_at; Start 20; Stop 44
gagagcgcctgctttgcacgcagga

SEQ ID NO: 198215 - DNA, 25 bp, Artificial
  probe
  misc_feature (1)..(25): SEQ ID NO: 3754; WAN024FAE_at; Start 22; Stop 46
gagcgcctgctttgcacgcaggagg

SEQ ID NO: 198216 - DNA, 25 bp, Artificial
  probe
  misc_feature (1)..(25): SEQ ID NO: 3754; WAN024FAE_at; Start 27; Stop 51
cctgctttgcacgcaggaggtcagc

SEQ ID NO: 198217 - DNA, 25 bp, Artificial
  probe
  misc_feature (1)..(25): SEQ ID NO: 3754; WAN024FAE_at; Start 13; Stop 37
cagctgggagagcgcctgctttgca

SEQ ID NO: 198218 - DNA, 25 bp, Artificial
  probe
  misc_feature (1)..(25): SEQ ID NO: 3754; WAN024FAE_at; Start 11; Stop 35
ctcagctgggagagcgcctgctttg

SEQ ID NO: 198219 - DNA, 25 bp, Artificial
  probe
  misc_feature (1)..(25): SEQ ID NO: 3754; WAN024FAE_at; Start 35; Stop 59
gcacgcaggaggtcagcggttcgat

SEQ ID NO: 198220 - DNA, 25 bp, Artificial
  probe
  misc_feature (1)..(25): SEQ ID NO: 982; WAN024FAG_at; Start 142; Stop 166
accccaggtcaagtcttacctgaag

SEQ ID NO: 198221 - DNA, 25 bp, Artificial
  probe
  misc_feature (1)..(25): SEQ ID NO: 982; WAN024FAG_at; Start 377; Stop 401
tcttaaaagaaactgtagatacagc

SEQ ID NO: 198222 - DNA, 25 bp, Artificial
  probe
  misc_feature (1)..(25): SEQ ID NO: 982; WAN024FAG_at; Start 170; Stop 194
catcgggaacgaaagagggtgactt

SEQ ID NO: 198223 - DNA, 25 bp, Artificial
  probe
  misc_feature (1)..(25): SEQ ID NO: 982; WAN024FAG_at; Start 438; Stop 462
tactcctgaacaagtaaaaggtgga

SEQ ID NO: 198224 - DNA, 25 bp, Artificial
  probe
  misc_feature (1)..(25): SEQ ID NO: 982; WAN024FAG_at; Start 14; Stop 38
caaatcaaagatatactcgttggtc

SEQ ID NO: 198225 - DNA, 25 bp, Artificial
  probe
  misc_feature (1)..(25): SEQ ID NO: 982; WAN024FAG_at; Start 155; Stop 179
tcttacctgaagagacatcgggaac

SEQ ID NO: 198226 - DNA, 25 bp, Artificial
  probe
  misc_feature (1)..(25): SEQ ID NO: 982; WAN024FAG_at; Start 158; Stop 182
tacctgaagagacatcgggaacgaa

SEQ ID NO: 198227 - DNA, 25 bp, Artificial
  probe
  misc_feature (1)..(25): SEQ ID NO: 982; WAN024FAG_at; Start 311; Stop 335
cttctagtctggatacactttttga

SEQ ID NO: 198228 - DNA, 25 bp, Artificial
  probe
  misc_feature (1)..(25): SEQ ID NO: 982; WAN024FAG_at; Start 361; Stop 385
ccagagctaacagatgtcttaaaag

SEQ ID NO: 198229 - DNA, 25 bp, Artificial
  probe
  misc_feature (1)..(25): SEQ ID NO: 982; WAN024FAG_at; Start 333; Stop 357
tgaaaaagatgaagaagctcaaaaa

SEQ ID NO: 198230 - DNA, 25 bp, Artificial
  probe
  misc_feature (1)..(25): SEQ ID NO: 982; WAN024FAG_at; Start 261; Stop 285
ttcacttccgacacctacagaaaga

SEQ ID NO: 198231 - DNA, 25 bp, Artificial
  probe
  misc_feature (1)..(25): SEQ ID NO: 982; WAN024FAG_at; Start 316; Stop 340
agtctggatacactttttgaaaaag

SEQ ID NO: 198232 - DNA, 25 bp, Artificial
  probe
  misc_feature (1)..(25): SEQ ID NO: 982; WAN024FAG_at; Start 396; Stop 420
tacagctgatgtggatgggacacaa

SEQ ID NO: 198233 - DNA, 25 bp, Artificial
  probe
  misc_feature (1)..(25): SEQ ID NO: 982; WAN024FAG_at; Start 35; Stop 59
ggtctattcgccgtctcagtgtcgg

SEQ ID NO: 198234 - DNA, 25 bp, Artificial
  probe
  misc_feature (1)..(25): SEQ ID NO: 982; WAN024FAG_at; Start 221; Stop 245
tcactcaagcgaaacctgagggcgt

SEQ ID NO: 198235 - DNA, 25 bp, Artificial
  probe
  misc_feature (1)..(25): SEQ ID NO: 982; WAN024FAG_at; Start 354; Stop 378
aaaaaatccagagctaacagatgtc

SEQ ID NO: 198236 - DNA, 25 bp, Artificial
  probe
  misc_feature (1)..(25): SEQ ID NO: 982; WAN024FAG_at; Start 274; Stop 298
cctacagaaagaactgaagtgagcg

SEQ ID NO: 198237 - DNA, 25 bp, Artificial
  probe
  misc_feature (1)..(25): SEQ ID NO: 982; WAN024FAG_at; Start 2; Stop 26
tgaaattcaatccaaatcaaagata

SEQ ID NO: 198238 - DNA, 25 bp, Artificial
  probe
  misc_feature (1)..(25): SEQ ID NO: 982; WAN024FAG_at; Start 65; Stop 89
cctcagttgttgtggctagtggctt

SEQ ID NO: 198239 - DNA, 25 bp, Artificial
  probe
  misc_feature (1)..(25): SEQ ID NO: 982; WAN024FAG_at; Start 82; Stop 106
agtggcttctttgtcctagttggtc

SEQ ID NO: 198240 - DNA, 25 bp, Artificial
  probe
  misc_feature (1)..(25): SEQ ID NO: 982; WAN024FAG_at; Start 421; Stop 445
gcaagtccagcagaaactactcctg

SEQ ID NO: 198241 - DNA, 25 bp, Artificial
  probe
  misc_feature (1)..(25): SEQ ID NO: 982; WAN024FAG_at; Start 283; Stop 307
agaactgaagtgagcgaggaaacaa

SEQ ID NO: 198242 - DNA, 25 bp, Artificial
  probe
  misc_feature (1)..(25): SEQ ID NO: 982; WAN024FAG_at; Start 392; Stop 416
tagatacagctgatgtggatgggac

SEQ ID NO: 198243 - DNA, 25 bp, Artificial
  probe
  misc_feature (1)..(25): SEQ ID NO: 982; WAN024FAG_at; Start 45; Stop 69
ccgtctcagtgtcggtgttgcctca

SEQ ID NO: 198244 - DNA, 25 bp, Artificial
  probe
  misc_feature (1)..(25): SEQ ID NO: 982; WAN024FAG_at; Start 430; Stop 454
gcagaaactactcctgaacaagtaa

SEQ ID NO: 198245 - DNA, 25 bp, Artificial
  probe
  misc_feature (1)..(25): SEQ ID NO: 982; WAN024FAG_at; Start 228; Stop 252
agcgaaacctgagggcgttactgga

SEQ ID NO: 198246 - DNA, 25 bp, Artificial
  probe
  misc_feature (1)..(25): SEQ ID NO: 982; WAN024FAG_at; Start 194; Stop 218
tatcagaaaaaccaggagacaccgt

SEQ ID NO: 198247 - DNA, 25 bp, Artificial
  probe
  misc_feature (1)..(25): SEQ ID NO: 982; WAN024FAG_at; Start 459; Stop 483
tggagtgaaagaaaatacaaaagac

SEQ ID NO: 198248 - DNA, 25 bp, Artificial
  probe
  misc_feature (1)..(25): SEQ ID NO: 982; WAN024FAG_at; Start 50; Stop 74
tcagtgtcggtgttgcctcagttgt

SEQ ID NO: 198249 - DNA, 25 bp, Artificial
  probe
  misc_feature (1)..(25): SEQ ID NO: 982; WAN024FAG_at; Start 209; Stop 233
gagacaccgttctcactcaagcgaa

SEQ ID NO: 198250 - DNA, 25 bp, Artificial
  probe
  misc_feature (1)..(25): SEQ ID NO: 982; WAN024FAG_at; Start 443; Stop 467
ctgaacaagtaaaaggtggagtgaa

SEQ ID NO: 198251 - DNA, 25 bp, Artificial
  probe
  misc_feature (1)..(25): SEQ ID NO: 982; WAN024FAG_at; Start 407; Stop 431
tggatgggacacaagcaagtccagc

SEQ ID NO: 198252 - DNA, 25 bp, Artificial
  probe
  misc_feature (1)..(25): SEQ ID NO: 982; WAN024FAG_at; Start 23; Stop 47
gatatactcgttggtctattcgccg

SEQ ID NO: 198253 - DNA, 25 bp, Artificial
  probe
  misc_feature (1)..(25): SEQ ID NO: 982; WAN024FAG_at; Start 184; Stop 208
gagggtgacttatcagaaaaaccag

SEQ ID NO: 198254 - DNA, 25 bp, Artificial
  probe
  misc_feature (1)..(25): SEQ ID NO: 2780; WAN024FAH_at; Start 436; Stop 460
gtcgtctatcaaatcaccaaatctg

SEQ ID NO: 198255 - DNA, 25 bp, Artificial
  probe
  misc_feature (1)..(25): SEQ ID NO: 2780; WAN024FAH_at; Start 224; Stop 248
tgcgagaatatctgctgaatcatat

SEQ ID NO: 198256 - DNA, 25 bp, Artificial
  probe
  misc_feature (1)..(25): SEQ ID NO: 2780; WAN024FAH_at; Start 94; Stop 118
cgttatttgattgggcgtgaggacc

SEQ ID NO: 198257 - DNA, 25 bp, Artificial
  probe
  misc_feature (1)..(25): SEQ ID NO: 2780; WAN024FAH_at; Start 445; Stop 469
caaatcaccaaatctgtttatggat

SEQ ID NO: 198258 - DNA, 25 bp, Artificial
  probe
  misc_feature (1)..(25): SEQ ID NO: 2780; WAN024FAH_at; Start 254; Stop 278
tcacgacggtgatttccagtaccct

SEQ ID NO: 198259 - DNA, 25 bp, Artificial
  probe
  misc_feature (1)..(25): SEQ ID NO: 2780; WAN024FAH_at; Start 322; Stop 346
caattgtggacctatattcagcaga

SEQ ID NO: 198260 - DNA, 25 bp, Artificial
  probe
  misc_feature (1)..(25): SEQ ID NO: 2780; WAN024FAH_at; Start 216; Stop 240
tcccaaaatgcgagaatatctgctg

SEQ ID NO: 198261 - DNA, 25 bp, Artificial
  probe
  misc_feature (1)..(25): SEQ ID NO: 2780; WAN024FAH_at; Start 376; Stop 400
aagaccatgttgagccgtttgacca

SEQ ID NO: 198262 - DNA, 25 bp, Artificial
  probe
  misc_feature (1)..(25): SEQ ID NO: 2780; WAN024FAH_at; Start 118; Stop 142
cagtctgtcaatgagcaagtgatga

SEQ ID NO: 198263 - DNA, 25 bp, Artificial
  probe
  misc_feature (1)..(25): SEQ ID NO: 2780; WAN024FAH_at; Start 109; Stop 133
cgtgaggaccagtctgtcaatgagc

SEQ ID NO: 198264 - DNA, 25 bp, Artificial
  probe
  misc_feature (1)..(25): SEQ ID NO: 2780; WAN024FAH_at; Start 40; Stop 64
tttacgccccttcagcaggtcaaga

SEQ ID NO: 198265 - DNA, 25 bp, Artificial
  probe
  misc_feature (1)..(25): SEQ ID NO: 2780; WAN024FAH_at; Start 133; Stop 157
caagtgatgattaagtgcattgacc

SEQ ID NO: 198266 - DNA, 25 bp, Artificial
  probe
  misc_feature (1)..(25): SEQ ID NO: 2780; WAN024FAH_at; Start 263; Stop 287
tgatttccagtaccctgctcaaccg

SEQ ID NO: 198267 - DNA, 25 bp, Artificial
  probe
  misc_feature (1)..(25): SEQ ID NO: 2780; WAN024FAH_at; Start 336; Stop 360
tattcagcagaaaaatccagaagtc

SEQ ID NO: 198268 - DNA, 25 bp, Artificial
  probe
  misc_feature (1)..(25): SEQ ID NO: 2780; WAN024FAH_at; Start 278; Stop 302
tgctcaaccgatctggaacagcgga

SEQ ID NO: 198269 - DNA, 25 bp, Artificial
  probe
  misc_feature (1)..(25): SEQ ID NO: 2780; WAN024FAH_at; Start 413; Stop 437
tgccagatcgcaaactgtccaatgt

SEQ ID NO: 198270 - DNA, 25 bp, Artificial
  probe
  misc_feature (1)..(25): SEQ ID NO: 2780; WAN024FAH_at; Start 293; Stop 317
gaacagcggagcatctggcaaaaaa

SEQ ID NO: 198271 - DNA, 25 bp, Artificial
  probe
  misc_feature (1)..(25): SEQ ID NO: 2780; WAN024FAH_at; Start 386; Stop 410
tgagccgtttgaccaaacattctgt

SEQ ID NO: 198272 - DNA, 25 bp, Artificial
  probe
  misc_feature (1)..(25): SEQ ID NO: 2780; WAN024FAH_at; Start 159; Stop 183
gcaactcaaggtcaatcgactcttg

SEQ ID NO: 198273 - DNA, 25 bp, Artificial
  probe
  misc_feature (1)..(25): SEQ ID NO: 2780; WAN024FAH_at; Start 314; Stop 338
aaaaacgccaattgtggacctatat

SEQ ID NO: 198274 - DNA, 25 bp, Artificial
  probe
  misc_feature (1)..(25): SEQ ID NO: 2780; WAN024FAH_at; Start 3; Stop 27
gcctgaacatactttttatgtcgat

SEQ ID NO: 198275 - DNA, 25 bp, Artificial
  probe
  misc_feature (1)..(25): SEQ ID NO: 2780; WAN024FAH_at; Start 423; Stop 447
caaactgtccaatgtcgtctatcaa

SEQ ID NO: 198276 - DNA, 25 bp, Artificial
  probe
  misc_feature (1)..(25): SEQ ID NO: 2780; WAN024FAH_at; Start 25; Stop 49
gataatctctttgtctttacgcccc

SEQ ID NO: 198277 - DNA, 25 bp, Artificial
  probe
  misc_feature (1)..(25): SEQ ID NO: 2780; WAN024FAH_at; Start 289; Stop 313
tctggaacagcggagcatctggcaa

SEQ ID NO: 198278 - DNA, 25 bp, Artificial
  probe
  misc_feature (1)..(25): SEQ ID NO: 2780; WAN024FAH_at; Start 352; Stop 376
ccagaagtctttcaggctattcgta

SEQ ID NO: 198279 - DNA, 25 bp, Artificial
  probe
  misc_feature (1)..(25): SEQ ID NO: 2780; WAN024FAH_at; Start 185; Stop 209
tagaccaacttgatttgtcccaagt

SEQ ID NO: 198280 - DNA, 25 bp, Artificial
  probe
  misc_feature (1)..(25): SEQ ID NO: 2780; WAN024FAH_at; Start 205; Stop 229
caagtgagtcatcccaaaatgcgag

SEQ ID NO: 198281 - DNA, 25 bp, Artificial
  probe
  misc_feature (1)..(25): SEQ ID NO: 2780; WAN024FAH_at; Start 196; Stop 220
gatttgtcccaagtgagtcatccca

SEQ ID NO: 198282 - DNA, 25 bp, Artificial
  probe
  misc_feature (1)..(25): SEQ ID NO: 2780; WAN024FAH_at; Start 78; Stop 102
gcctgtcgatttctatcgttatttg

SEQ ID NO: 198283 - DNA, 25 bp, Artificial
  probe
  misc_feature (1)..(25): SEQ ID NO: 2780; WAN024FAH_at; Start 54; Stop 78
gcaggtcaagaccatgtactatctg

SEQ ID NO: 198284 - DNA, 25 bp, Artificial
  probe
  misc_feature (1)..(25): SEQ ID NO: 2780; WAN024FAH_at; Start 400; Stop 424
aaacattctgtcttgccagatcgca

SEQ ID NO: 198285 - DNA, 25 bp, Artificial
  probe
  misc_feature (1)..(25): SEQ ID NO: 2780; WAN024FAH_at; Start 368; Stop 392
ctattcgtaagaccatgttgagccg

SEQ ID NO: 198286 - DNA, 25 bp, Artificial
  probe
  misc_feature (1)..(25): SEQ ID NO: 2780; WAN024FAH_at; Start 144; Stop 168
taagtgcattgaccagcaactcaag

SEQ ID NO: 198287 - DNA, 25 bp, Artificial
  probe
  misc_feature (1)..(25): SEQ ID NO: 2780; WAN024FAH_at; Start 63; Stop 87
gaccatgtactatctgcctgtcgat

SEQ ID NO: 198288 - DNA, 25 bp, Artificial
  probe
  misc_feature (1)..(25): SEQ ID NO: 4615; WAN024FAI_at; Start 126; Stop 150
gctgaatataggtccacaattggcg

SEQ ID NO: 198289 - DNA, 25 bp, Artificial
  probe
  misc_feature (1)..(25): SEQ ID NO: 4615; WAN024FAI_at; Start 498; Stop 522
tccgataaatcagcgagtgcatcat

SEQ ID NO: 198290 - DNA, 25 bp, Artificial
  probe
  misc_feature (1)..(25): SEQ ID NO: 4615; WAN024FAI_at; Start 298; Stop 322
gaccttgagttgctggtcaatgcac

SEQ ID NO: 198291 - DNA, 25 bp, Artificial
  probe
  misc_feature (1)..(25): SEQ ID NO: 4615; WAN024FAI_at; Start 525; Stop 549
tatactggcctttggagaaatttcc

SEQ ID NO: 198292 - DNA, 25 bp, Artificial
  probe
  misc_feature (1)..(25): SEQ ID NO: 4615; WAN024FAI_at; Start 367; Stop 391
caaataacgatagaaatcgacaggc

SEQ ID NO: 198293 - DNA, 25 bp, Artificial
  probe
  misc_feature (1)..(25): SEQ ID NO: 4615; WAN024FAI_at; Start 189; Stop 213
gcagggtactggaaatcaccgtcgt

SEQ ID NO: 198294 - DNA, 25 bp, Artificial
  probe
  misc_feature (1)..(25): SEQ ID NO: 4615; WAN024FAI_at; Start 221; Stop 245
atatgattcagcagatattctcgca

SEQ ID NO: 198295 - DNA, 25 bp, Artificial
  probe
  misc_feature (1)..(25): SEQ ID NO: 4615; WAN024FAI_at; Start 40; Stop 64
cagtttgcgatctggcaagacagaa

SEQ ID NO: 198296 - DNA, 25 bp, Artificial
  probe
  misc_feature (1)..(25): SEQ ID NO: 4615; WAN024FAI_at; Start 229; Stop 253
cagcagatattctcgcattttggga

SEQ ID NO: 198297 - DNA, 25 bp, Artificial
  probe
  misc_feature (1)..(25): SEQ ID NO: 4615; WAN024FAI_at; Start 26; Stop 50
tagacgacattggacagtttgcgat

SEQ ID NO: 198298 - DNA, 25 bp, Artificial
  probe
  misc_feature (1)..(25): SEQ ID NO: 4615; WAN024FAI_at; Start 107; Stop 131
aagacttctggatttttctgctgaa

SEQ ID NO: 198299 - DNA, 25 bp, Artificial
  probe
  misc_feature (1)..(25): SEQ ID NO: 4615; WAN024FAI_at; Start 9; Stop 33
cagatttggtgatttgatagacgac

SEQ ID NO: 198300 - DNA, 25 bp, Artificial
  probe
  misc_feature (1)..(25): SEQ ID NO: 4615; WAN024FAI_at; Start 174; Stop 198
ttccagatcggttgagcagggtact

SEQ ID NO: 198301 - DNA, 25 bp, Artificial
  probe
  misc_feature (1)..(25): SEQ ID NO: 4615; WAN024FAI_at; Start 324; Stop 348
taatcatcacttgctcattgacaga

SEQ ID NO: 198302 - DNA, 25 bp, Artificial
  probe
  misc_feature (1)..(25): SEQ ID NO: 4615; WAN024FAI_at; Start 470; Stop 494
tagaactggctagcacgcaacaaat

SEQ ID NO: 198303 - DNA, 25 bp, Artificial
  probe
  misc_feature (1)..(25): SEQ ID NO: 4615; WAN024FAI_at; Start 155; Stop 179
tttgccagatgctccgctgttccag

SEQ ID NO: 198304 - DNA, 25 bp, Artificial
  probe
  misc_feature (1)..(25): SEQ ID NO: 4615; WAN024FAI_at; Start 423; Stop 447
gcgtaaagacaaagagattatcgac

SEQ ID NO: 198305 - DNA, 25 bp, Artificial
  probe
  misc_feature (1)..(25): SEQ ID NO: 4615; WAN024FAI_at; Start 69; Stop 93
tggtcaaacggctcaacatggtctt

SEQ ID NO: 198306 - DNA, 25 bp, Artificial
  probe
  misc_feature (1)..(25): SEQ ID NO: 4615; WAN024FAI_at; Start 477; Stop 501
ggctagcacgcaacaaatctgtccg

SEQ ID NO: 198307 - DNA, 25 bp, Artificial
  probe
  misc_feature (1)..(25): SEQ ID NO: 4615; WAN024FAI_at; Start 286; Stop 310
caagagtcgattgaccttgagttgc

SEQ ID NO: 198308 - DNA, 25 bp, Artificial
  probe
  misc_feature (1)..(25): SEQ ID NO: 4615; WAN024FAI_at; Start 383; Stop 407
tcgacaggcagatagtacatggtct

SEQ ID NO: 198309 - DNA, 25 bp, Artificial
  probe
  misc_feature (1)..(25): SEQ ID NO: 4615; WAN024FAI_at; Start 443; Stop 467
tcgacataaaaagtatgttcaggca

SEQ ID NO: 198310 - DNA, 25 bp, Artificial
  probe
  misc_feature (1)..(25): SEQ ID NO: 4615; WAN024FAI_at; Start 93; Stop 117
tacgaatagcctgaaagacttctgg

SEQ ID NO: 198311 - DNA, 25 bp, Artificial
  probe
  misc_feature (1)..(25): SEQ ID NO: 4615; WAN024FAI_at; Start 82; Stop 106
caacatggtcttacgaatagcctga

SEQ ID NO: 198312 - DNA, 25 bp, Artificial
  probe
  misc_feature (1)..(25): SEQ ID NO: 4615; WAN024FAI_at; Start 167; Stop 191
tccgctgttccagatcggttgagca

SEQ ID NO: 198313 - DNA, 25 bp, Artificial
  probe
  misc_feature (1)..(25): SEQ ID NO: 4615; WAN024FAI_at; Start 541; Stop 565
gaaatttccgacctggtcccagcca

SEQ ID NO: 198314 - DNA, 25 bp, Artificial
  probe
  misc_feature (1)..(25): SEQ ID NO: 4615; WAN024FAI_at; Start 309; Stop 333
gctggtcaatgcacttaatcatcac

SEQ ID NO: 198315 - DNA, 25 bp, Artificial
  probe
  misc_feature (1)..(25): SEQ ID NO: 4615; WAN024FAI_at; Start 398; Stop 422
tacatggtcttgacctgctgaaggg

SEQ ID NO: 198316 - DNA, 25 bp, Artificial
  probe
  misc_feature (1)..(25): SEQ ID NO: 4615; WAN024FAI_at; Start 244; Stop 268
cattttgggatgactcacttgggac

SEQ ID NO: 198317 - DNA, 25 bp, Artificial
  probe
  misc_feature (1)..(25): SEQ ID NO: 4615; WAN024FAI_at; Start 338; Stop 362
tcattgacagactggtcctcacgcc

SEQ ID NO: 198318 - DNA, 25 bp, Artificial
  probe
  misc_feature (1)..(25): SEQ ID NO: 4615; WAN024FAI_at; Start 351; Stop 375
ggtcctcacgcccaatcaaataacg

SEQ ID NO: 198319 - DNA, 25 bp, Artificial
  probe
  misc_feature (1)..(25): SEQ ID NO: 4615; WAN024FAI_at; Start 259; Stop 283
cacttgggacaaatcaagttggtct

SEQ ID NO: 198320 - DNA, 25 bp, Artificial
  probe
  misc_feature (1)..(25): SEQ ID NO: 4615; WAN024FAI_at; Start 490; Stop 514
caaatctgtccgataaatcagcgag

SEQ ID NO: 198321 - DNA, 25 bp, Artificial
  probe
  misc_feature (1)..(25): SEQ ID NO: 4615; WAN024FAI_at; Start 55; Stop 79
caagacagaatgtttggtcaaacgg

SEQ ID NO: 198322 - DNA, 25 bp, Artificial
  probe
  misc_feature (1)..(25): SEQ ID NO: 1148; WAN024FAJ_at; Start 286; Stop 310
cctcgtgcctacttgaaaattcttg

SEQ ID NO: 198323 - DNA, 25 bp, Artificial
  probe
  misc_feature (1)..(25): SEQ ID NO: 1148; WAN024FAJ_at; Start 510; Stop 534
gacagatttgttgcgtgctagccag

SEQ ID NO: 198324 - DNA, 25 bp, Artificial
  probe
  misc_feature (1)..(25): SEQ ID NO: 1148; WAN024FAJ_at; Start 263; Stop 287
ttgacagtgatgactgggtggatcc

SEQ ID NO: 198325 - DNA, 25 bp, Artificial
  probe
  misc_feature (1)..(25): SEQ ID NO: 1148; WAN024FAJ_at; Start 399; Stop 423
gaagagtatgagttacgattcagtc

SEQ ID NO: 198326 - DNA, 25 bp, Artificial
  probe
  misc_feature (1)..(25): SEQ ID NO: 1148; WAN024FAJ_at; Start 136; Stop 160
gaaatcgctgagtgtttagctagca

SEQ ID NO: 198327 - DNA, 25 bp, Artificial
  probe
  misc_feature (1)..(25): SEQ ID NO: 1148; WAN024FAJ_at; Start 491; Stop 515
tgcactcgctgatttatcggacaga

SEQ ID NO: 198328 - DNA, 25 bp, Artificial
  probe
  misc_feature (1)..(25): SEQ ID NO: 1148; WAN024FAJ_at; Start 436; Stop 460
cagatttttggctgggaccaggtcg

SEQ ID NO: 198329 - DNA, 25 bp, Artificial
  probe
  misc_feature (1)..(25): SEQ ID NO: 1148; WAN024FAJ_at; Start 270; Stop 294
tgatgactgggtggatcctcgtgcc

SEQ ID NO: 198330 - DNA, 25 bp, Artificial
  probe
  misc_feature (1)..(25): SEQ ID NO: 1148; WAN024FAJ_at; Start 205; Stop 229
catggcggtgcggtcaatcgtggct

SEQ ID NO: 198331 - DNA, 25 bp, Artificial
  probe
  misc_feature (1)..(25): SEQ ID NO: 1148; WAN024FAJ_at; Start 427; Stop 451
cctgttcggcagatttttggctggg

SEQ ID NO: 198332 - DNA, 25 bp, Artificial
  probe
  misc_feature (1)..(25): SEQ ID NO: 1148; WAN024FAJ_at; Start 252; Stop 276
ttttaaagtagttgacagtgatgac

SEQ ID NO: 198333 - DNA, 25 bp, Artificial
  probe
  misc_feature (1)..(25): SEQ ID NO: 1148; WAN024FAJ_at; Start 85; Stop 109
gagcaagttgggattttgattatca

SEQ ID NO: 198334 - DNA, 25 bp, Artificial
  probe
  misc_feature (1)..(25): SEQ ID NO: 1148; WAN024FAJ_at; Start 488; Stop 512
tgatgcactcgctgatttatcggac

SEQ ID NO: 198335 - DNA, 25 bp, Artificial
  probe
  misc_feature (1)..(25): SEQ ID NO: 1148; WAN024FAJ_at; Start 152; Stop 176
tagctagcaagtatcctaatatcgt

SEQ ID NO: 198336 - DNA, 25 bp, Artificial
  probe
  misc_feature (1)..(25): SEQ ID NO: 1148; WAN024FAJ_at; Start 460; Stop 484
ggaaatttctccaaaggccagtata

SEQ ID NO: 198337 - DNA, 25 bp, Artificial
  probe
  misc_feature (1)..(25): SEQ ID NO: 1148; WAN024FAJ_at; Start 118; Stop 142
tctcaggatcagactcaggaaatcg

SEQ ID NO: 198338 - DNA, 25 bp, Artificial
  probe
  misc_feature (1)..(25): SEQ ID NO: 1148; WAN024FAJ_at; Start 500; Stop 524
tgatttatcggacagatttgttgcg

SEQ ID NO: 198339 - DNA, 25 bp, Artificial
  probe
  misc_feature (1)..(25): SEQ ID NO: 1148; WAN024FAJ_at; Start 177; Stop 201
tagagccatctatcaggaaaataaa

SEQ ID NO: 198340 - DNA, 25 bp, Artificial
  probe
  misc_feature (1)..(25): SEQ ID NO: 1148; WAN024FAJ_at; Start 123; Stop 147
ggatcagactcaggaaatcgctgag

SEQ ID NO: 198341 - DNA, 25 bp, Artificial
  probe
  misc_feature (1)..(25): SEQ ID NO: 1148; WAN024FAJ_at; Start 52; Stop 76
cattactgtgtggagtcgctagtga

SEQ ID NO: 198342 - DNA, 25 bp, Artificial
  probe
  misc_feature (1)..(25): SEQ ID NO: 1148; WAN024FAJ_at; Start 67; Stop 91
tcgctagtgattggtggtgagcaag

SEQ ID NO: 198343 - DNA, 25 bp, Artificial
  probe
  misc_feature (1)..(25): SEQ ID NO: 1148; WAN024FAJ_at; Start 238; Stop 262
gcttctgggcgctattttaaagtag

SEQ ID NO: 198344 - DNA, 25 bp, Artificial
  probe
  misc_feature (1)..(25): SEQ ID NO: 1148; WAN024FAJ_at; Start 169; Stop 193
aatatcgttagagccatctatcagg

SEQ ID NO: 198345 - DNA, 25 bp, Artificial
  probe
  misc_feature (1)..(25): SEQ ID NO: 1148; WAN024FAJ_at; Start 159; Stop 183
caagtatcctaatatcgttagagcc

SEQ ID NO: 198346 - DNA, 25 bp, Artificial
  probe
  misc_feature (1)..(25): SEQ ID NO: 1148; WAN024FAJ_at; Start 300; Stop 324
gaaaattcttgaaaccttgcaggaa

SEQ ID NO: 198347 - DNA, 25 bp, Artificial
  probe
  misc_feature (1)..(25): SEQ ID NO: 1148; WAN024FAJ_at; Start 101; Stop 125
tgattatcaatgacgggtctcagga

SEQ ID NO: 198348 - DNA, 25 bp, Artificial
  probe
  misc_feature (1)..(25): SEQ ID NO: 1148; WAN024FAJ_at; Start 446; Stop 470
gctgggaccaggtcggaaatttctc

SEQ ID NO: 198349 - DNA, 25 bp, Artificial
  probe
  misc_feature (1)..(25): SEQ ID NO: 1148; WAN024FAJ_at; Start 29; Stop 53
gctataatgcagcagcctatcttca

SEQ ID NO: 198350 - DNA, 25 bp, Artificial
  probe
  misc_feature (1)..(25): SEQ ID NO: 1148; WAN024FAJ_at; Start 143; Stop 167
ctgagtgtttagctagcaagtatcc

SEQ ID NO: 198351 - DNA, 25 bp, Artificial
  probe
  misc_feature (1)..(25): SEQ ID NO: 1148; WAN024FAJ_at; Start 521; Stop 545
tgcgtgctagccagttctaactaat

SEQ ID NO: 198352 - DNA, 25 bp, Artificial
  probe
  misc_feature (1)..(25): SEQ ID NO: 1148; WAN024FAJ_at; Start 108; Stop 132
caatgacgggtctcaggatcagact

SEQ ID NO: 198353 - DNA, 25 bp, Artificial
  probe
  misc_feature (1)..(25): SEQ ID NO: 1148; WAN024FAJ_at; Start 412; Stop 436
tacgattcagtcttgcctgttcggc

SEQ ID NO: 198354 - DNA, 25 bp, Artificial
  probe
  misc_feature (1)..(25): SEQ ID NO: 1148; WAN024FAJ_at; Start 42; Stop 66
agcctatcttcattactgtgtggag

SEQ ID NO: 198355 - DNA, 25 bp, Artificial
  probe
  misc_feature (1)..(25): SEQ ID NO: 1148; WAN024FAJ_at; Start 278; Stop 302
gggtggatcctcgtgcctacttgaa

SEQ ID NO: 198356 - DNA, 25 bp, Artificial
  probe
  misc_feature (1)..(25): SEQ ID NO: 4943; WAN024FAK_at; Start 43; Stop 67
aaaacagctgggaagaagaaccaag

SEQ ID NO: 198357 - DNA, 25 bp, Artificial
  probe
  misc_feature (1)..(25): SEQ ID NO: 4943; WAN024FAK_at; Start 126; Stop 150
gagtgcaatctcaccaaccaccatg

SEQ ID NO: 198358 - DNA, 25 bp, Artificial
  probe
  misc_feature (1)..(25): SEQ ID NO: 4943; WAN024FAK_at; Start 195; Stop 219
tggatccatgaagaggagcttaaag

SEQ ID NO: 198359 - DNA, 25 bp, Artificial
  probe
  misc_feature (1)..(25): SEQ ID NO: 4943; WAN024FAK_at; Start 117; Stop 141
gaagatcccgagtgcaatctcacca

SEQ ID NO: 198360 - DNA, 25 bp, Artificial
  probe
  misc_feature (1)..(25): SEQ ID NO: 4943; WAN024FAK_at; Start 200; Stop 224
ccatgaagaggagcttaaagttgtt

SEQ ID NO: 198361 - DNA, 25 bp, Artificial
  probe
  misc_feature (1)..(25): SEQ ID NO: 4943; WAN024FAK_at; Start 127; Stop 151
agtgcaatctcaccaaccaccatgg

SEQ ID NO: 198362 - DNA, 25 bp, Artificial
  probe
  misc_feature (1)..(25): SEQ ID NO: 4943; WAN024FAK_at; Start 162; Stop 186
gattgcggtaaagccaatcgcattc

SEQ ID NO: 198363 - DNA, 25 bp, Artificial
  probe
  misc_feature (1)..(25): SEQ ID NO: 4943; WAN024FAK_at; Start 159; Stop 183
aatgattgcggtaaagccaatcgca

SEQ ID NO: 198364 - DNA, 25 bp, Artificial
  probe
  misc_feature (1)..(25): SEQ ID NO: 4943; WAN024FAK_at; Start 133; Stop 157
atctcaccaaccaccatggcaatcg

SEQ ID NO: 198365 - DNA, 25 bp, Artificial
  probe
  misc_feature (1)..(25): SEQ ID NO: 4943; WAN024FAK_at; Start 105; Stop 129
gacacgcgcaatgaagatcccgagt

SEQ ID NO: 198366 - DNA, 25 bp, Artificial
  probe
  misc_feature (1)..(25): SEQ ID NO: 4943; WAN024FAK_at; Start 111; Stop 135
cgcaatgaagatcccgagtgcaatc

SEQ ID NO: 198367 - DNA, 25 bp, Artificial
  probe
  misc_feature (1)..(25): SEQ ID NO: 4943; WAN024FAK_at; Start 18; Stop 42
gatcaaagccactgtcaaaccagat

SEQ ID NO: 198368 - DNA, 25 bp, Artificial
  probe
  misc_feature (1)..(25): SEQ ID NO: 4943; WAN024FAK_at; Start 15; Stop 39
gaagatcaaagccactgtcaaacca

SEQ ID NO: 198369 - DNA, 25 bp, Artificial
  probe
  misc_feature (1)..(25): SEQ ID NO: 4943; WAN024FAK_at; Start 107; Stop 131
cacgcgcaatgaagatcccgagtgc

SEQ ID NO: 198370 - DNA, 25 bp, Artificial
  probe
  misc_feature (1)..(25): SEQ ID NO: 4943; WAN024FAK_at; Start 119; Stop 143
agatcccgagtgcaatctcaccaac

SEQ ID NO: 198371 - DNA, 25 bp, Artificial
  probe
  misc_feature (1)..(25): SEQ ID NO: 4943; WAN024FAK_at; Start 103; Stop 127
aagacacgcgcaatgaagatcccga

SEQ ID NO: 198372 - DNA, 25 bp, Artificial
  probe
  misc_feature (1)..(25): SEQ ID NO: 4943; WAN024FAK_at; Start 2; Stop 26
tgaagacttgcttgaagatcaaagc

SEQ ID NO: 198373 - DNA, 25 bp, Artificial
  probe
  misc_feature (1)..(25): SEQ ID NO: 4943; WAN024FAK_at; Start 33; Stop 57
caaaccagataaaacagctgggaag

SEQ ID NO: 198374 - DNA, 25 bp, Artificial
  probe
  misc_feature (1)..(25): SEQ ID NO: 4943; WAN024FAK_at; Start 101; Stop 125
tcaagacacgcgcaatgaagatccc

SEQ ID NO: 198375 - DNA, 25 bp, Artificial
  probe
  misc_feature (1)..(25): SEQ ID NO: 4943; WAN024FAK_at; Start 165; Stop 189
tgcggtaaagccaatcgcattcatg

SEQ ID NO: 198376 - DNA, 25 bp, Artificial
  probe
  misc_feature (1)..(25): SEQ ID NO: 4943; WAN024FAK_at; Start 192; Stop 216
ttttggatccatgaagaggagctta

SEQ ID NO: 198377 - DNA, 25 bp, Artificial
  probe
  misc_feature (1)..(25): SEQ ID NO: 4943; WAN024FAK_at; Start 174; Stop 198
gccaatcgcattcatgaattttgga

SEQ ID NO: 198378 - DNA, 25 bp, Artificial
  probe
  misc_feature (1)..(25): SEQ ID NO: 4943; WAN024FAK_at; Start 189; Stop 213
gaattttggatccatgaagaggagc

SEQ ID NO: 198379 - DNA, 25 bp, Artificial
  probe
  misc_feature (1)..(25): SEQ ID NO: 4943; WAN024FAK_at; Start 203; Stop 227
tgaagaggagcttaaagttgtttaa

SEQ ID NO: 198380 - DNA, 25 bp, Artificial
  probe
  misc_feature (1)..(25): SEQ ID NO: 4943; WAN024FAK_at; Start 180; Stop 204
cgcattcatgaattttggatccatg

SEQ ID NO: 198381 - DNA, 25 bp, Artificial
  probe
  misc_feature (1)..(25): SEQ ID NO: 4943; WAN024FAK_at; Start 10; Stop 34
tgcttgaagatcaaagccactgtca

SEQ ID NO: 198382 - DNA, 25 bp, Artificial
  probe
  misc_feature (1)..(25): SEQ ID NO: 4943; WAN024FAK_at; Start 21; Stop 45
caaagccactgtcaaaccagataaa

SEQ ID NO: 198383 - DNA, 25 bp, Artificial
  probe
  misc_feature (1)..(25): SEQ ID NO: 4943; WAN024FAK_at; Start 6; Stop 30
gacttgcttgaagatcaaagccact

SEQ ID NO: 198384 - DNA, 25 bp, Artificial
  probe
  misc_feature (1)..(25): SEQ ID NO: 4943; WAN024FAK_at; Start 114; Stop 138
aatgaagatcccgagtgcaatctca

SEQ ID NO: 198385 - DNA, 25 bp, Artificial
  probe
  misc_feature (1)..(25): SEQ ID NO: 4943; WAN024FAK_at; Start 30; Stop 54
tgtcaaaccagataaaacagctggg

SEQ ID NO: 198386 - DNA, 25 bp, Artificial
  probe
  misc_feature (1)..(25): SEQ ID NO: 4943; WAN024FAK_at; Start 25; Stop 49
gccactgtcaaaccagataaaacag

SEQ ID NO: 198387 - DNA, 25 bp, Artificial
  probe
  misc_feature (1)..(25): SEQ ID NO: 4943; WAN024FAK_at; Start 168; Stop 192
ggtaaagccaatcgcattcatgaat

SEQ ID NO: 198388 - DNA, 25 bp, Artificial
  probe
  misc_feature (1)..(25): SEQ ID NO: 4943; WAN024FAK_at; Start 40; Stop 64
gataaaacagctgggaagaagaacc

SEQ ID NO: 198389 - DNA, 25 bp, Artificial
  probe
  misc_feature (1)..(25): SEQ ID NO: 4943; WAN024FAK_at; Start 109; Stop 133
cgcgcaatgaagatcccgagtgcaa

SEQ ID NO: 198390 - DNA, 25 bp, Artificial
  probe
  misc_feature (1)..(25): SEQ ID NO: 5717; WAN024FAL_at; Start 213; Stop 237
ggatgatcgaaatcactacaattaa

SEQ ID NO: 198391 - DNA, 25 bp, Artificial
  probe
  misc_feature (1)..(25): SEQ ID NO: 5717; WAN024FAL_at; Start 168; Stop 192
catgcttctcctcttaaatttcaaa

SEQ ID NO: 198392 - DNA, 25 bp, Artificial
  probe
  misc_feature (1)..(25): SEQ ID NO: 5717; WAN024FAL_at; Start 123; Stop 147
tagaatgtatttgccaatcagggct

SEQ ID NO: 198393 - DNA, 25 bp, Artificial
  probe
  misc_feature (1)..(25): SEQ ID NO: 5717; WAN024FAL_at; Start 101; Stop 125
tcagaaccgatcctagaatcaatag

SEQ ID NO: 198394 - DNA, 25 bp, Artificial
  probe
  misc_feature (1)..(25): SEQ ID NO: 5717; WAN024FAL_at; Start 89; Stop 113
gcggcactaaaatcagaaccgatcc

SEQ ID NO: 198395 - DNA, 25 bp, Artificial
  probe
  misc_feature (1)..(25): SEQ ID NO: 5717; WAN024FAL_at; Start 11; Stop 35
tgaagttggttggaaagccaaagaa

SEQ ID NO: 198396 - DNA, 25 bp, Artificial
  probe
  misc_feature (1)..(25): SEQ ID NO: 5717; WAN024FAL_at; Start 62; Stop 86
tgaaggaactaaagagggtagcaag

SEQ ID NO: 198397 - DNA, 25 bp, Artificial
  probe
  misc_feature (1)..(25): SEQ ID NO: 5717; WAN024FAL_at; Start 208; Stop 232
caattggatgatcgaaatcactaca

SEQ ID NO: 198398 - DNA, 25 bp, Artificial
  probe
  misc_feature (1)..(25): SEQ ID NO: 5717; WAN024FAL_at; Start 40; Stop 64
tctacaatatccttagtgggtttga

SEQ ID NO: 198399 - DNA, 25 bp, Artificial
  probe
  misc_feature (1)..(25): SEQ ID NO: 5717; WAN024FAL_at; Start 160; Stop 184
tgtttcatcatgcttctcctcttaa

SEQ ID NO: 198400 - DNA, 25 bp, Artificial
  probe
  misc_feature (1)..(25): SEQ ID NO: 5717; WAN024FAL_at; Start 92; Stop 116
gcactaaaatcagaaccgatcctag

SEQ ID NO: 198401 - DNA, 25 bp, Artificial
  probe
  misc_feature (1)..(25): SEQ ID NO: 5717; WAN024FAL_at; Start 7; Stop 31
catgtgaagttggttggaaagccaa

SEQ ID NO: 198402 - DNA, 25 bp, Artificial
  probe
  misc_feature (1)..(25): SEQ ID NO: 5717; WAN024FAL_at; Start 44; Stop 68
caatatccttagtgggtttgaagga

SEQ ID NO: 198403 - DNA, 25 bp, Artificial
  probe
  misc_feature (1)..(25): SEQ ID NO: 5717; WAN024FAL_at; Start 128; Stop 152
tgtatttgccaatcagggcttttct

SEQ ID NO: 198404 - DNA, 25 bp, Artificial
  probe
  misc_feature (1)..(25): SEQ ID NO: 5717; WAN024FAL_at; Start 137; Stop 161
caatcagggcttttctttcatcttg

SEQ ID NO: 198405 - DNA, 25 bp, Artificial
  probe
  misc_feature (1)..(25): SEQ ID NO: 5717; WAN024FAL_at; Start 104; Stop 128
gaaccgatcctagaatcaatagaat

SEQ ID NO: 198406 - DNA, 25 bp, Artificial
  probe
  misc_feature (1)..(25): SEQ ID NO: 5717; WAN024FAL_at; Start 204; Stop 228
ctctcaattggatgatcgaaatcac

SEQ ID NO: 198407 - DNA, 25 bp, Artificial
  probe
  misc_feature (1)..(25): SEQ ID NO: 5717; WAN024FAL_at; Start 86; Stop 110
ggagcggcactaaaatcagaaccga

SEQ ID NO: 198408 - DNA, 25 bp, Artificial
  probe
  misc_feature (1)..(25): SEQ ID NO: 5717; WAN024FAL_at; Start 77; Stop 101
gggtagcaaggagcggcactaaaat

SEQ ID NO: 198409 - DNA, 25 bp, Artificial
  probe
  misc_feature (1)..(25): SEQ ID NO: 5717; WAN024FAL_at; Start 135; Stop 159
gccaatcagggcttttctttcatct

SEQ ID NO: 198410 - DNA, 25 bp, Artificial
  probe
  misc_feature (1)..(25): SEQ ID NO: 5717; WAN024FAL_at; Start 20; Stop 44
ttggaaagccaaagaaattatctac

SEQ ID NO: 198411 - DNA, 25 bp, Artificial
  probe
  misc_feature (1)..(25): SEQ ID NO: 5717; WAN024FAL_at; Start 95; Stop 119
ctaaaatcagaaccgatcctagaat

SEQ ID NO: 198412 - DNA, 25 bp, Artificial
  probe
  misc_feature (1)..(25): SEQ ID NO: 5717; WAN024FAL_at; Start 5; Stop 29
cccatgtgaagttggttggaaagcc

SEQ ID NO: 198413 - DNA, 25 bp, Artificial
  probe
  misc_feature (1)..(25): SEQ ID NO: 5717; WAN024FAL_at; Start 60; Stop 84
tttgaaggaactaaagagggtagca

SEQ ID NO: 198414 - DNA, 25 bp, Artificial
  probe
  misc_feature (1)..(25): SEQ ID NO: 5717; WAN024FAL_at; Start 142; Stop 166
agggcttttctttcatcttgtttca

SEQ ID NO: 198415 - DNA, 25 bp, Artificial
  probe
  misc_feature (1)..(25): SEQ ID NO: 5717; WAN024FAL_at; Start 107; Stop 131
ccgatcctagaatcaatagaatgta

SEQ ID NO: 198416 - DNA, 25 bp, Artificial
  probe
  misc_feature (1)..(25): SEQ ID NO: 5717; WAN024FAL_at; Start 154; Stop 178
tcatcttgtttcatcatgcttctcc

SEQ ID NO: 198417 - DNA, 25 bp, Artificial
  probe
  misc_feature (1)..(25): SEQ ID NO: 5717; WAN024FAL_at; Start 195; Stop 219
tcttagatactctcaattggatgat

SEQ ID NO: 198418 - DNA, 25 bp, Artificial
  probe
  misc_feature (1)..(25): SEQ ID NO: 5717; WAN024FAL_at; Start 35; Stop 59
aattatctacaatatccttagtggg

SEQ ID NO: 198419 - DNA, 25 bp, Artificial
  probe
  misc_feature (1)..(25): SEQ ID NO: 5717; WAN024FAL_at; Start 200; Stop 224
gatactctcaattggatgatcgaaa

SEQ ID NO: 198420 - DNA, 25 bp, Artificial
  probe
  misc_feature (1)..(25): SEQ ID NO: 5717; WAN024FAL_at; Start 120; Stop 144
caatagaatgtatttgccaatcagg

SEQ ID NO: 198421 - DNA, 25 bp, Artificial
  probe
  misc_feature (1)..(25): SEQ ID NO: 5717; WAN024FAL_at; Start 1; Stop 25
ttgtcccatgtgaagttggttggaa

SEQ ID NO: 198422 - DNA, 25 bp, Artificial
  probe
  misc_feature (1)..(25): SEQ ID NO: 5717; WAN024FAL_at; Start 182; Stop 206
taaatttcaaatttcttagatactc

SEQ ID NO: 198423 - DNA, 25 bp, Artificial
  probe
  misc_feature (1)..(25): SEQ ID NO: 5717; WAN024FAL_at; Start 83; Stop 107
caaggagcggcactaaaatcagaac

SEQ ID NO: 198424 - DNA, 25 bp, Artificial
  probe
  misc_feature (1)..(25): SEQ ID NO: 1396; WAN024FAM_at; Start 219; Stop 243
catattcggtcataccagcaagcgg

SEQ ID NO: 198425 - DNA, 25 bp, Artificial
  probe
  misc_feature (1)..(25): SEQ ID NO: 1396; WAN024FAM_at; Start 210; Stop 234
ccgtaaaggcatattcggtcatacc

SEQ ID NO: 198426 - DNA, 25 bp, Artificial
  probe
  misc_feature (1)..(25): SEQ ID NO: 1396; WAN024FAM_at; Start 148; Stop 172
ggtcaaggtatggaagtctgcttca

SEQ ID NO: 198427 - DNA, 25 bp, Artificial
  probe
  misc_feature (1)..(25): SEQ ID NO: 1396; WAN024FAM_at; Start 133; Stop 157
caagacatagttcatggtcaaggta

SEQ ID NO: 198428 - DNA, 25 bp, Artificial
  probe
  misc_feature (1)..(25): SEQ ID NO: 1396; WAN024FAM_at; Start 159; Stop 183
ggaagtctgcttcactggtccagta

SEQ ID NO: 198429 - DNA, 25 bp, Artificial
  probe
  misc_feature (1)..(25): SEQ ID NO: 1396; WAN024FAM_at; Start 82; Stop 106
cgggttaaagaaggcattcaaatca

SEQ ID NO: 198430 - DNA, 25 bp, Artificial
  probe
  misc_feature (1)..(25): SEQ ID NO: 1396; WAN024FAM_at; Start 203; Stop 227
tgacgatccgtaaaggcatattcgg

SEQ ID NO: 198431 - DNA, 25 bp, Artificial
  probe
  misc_feature (1)..(25): SEQ ID NO: 1396; WAN024FAM_at; Start 67; Stop 91
cacatccgctttcatcgggttaaag

SEQ ID NO: 198432 - DNA, 25 bp, Artificial
  probe
  misc_feature (1)..(25): SEQ ID NO: 1396; WAN024FAM_at; Start 15; Stop 39
ccatgcccaatatttttgtaatact

SEQ ID NO: 198433 - DNA, 25 bp, Artificial
  probe
  misc_feature (1)..(25): SEQ ID NO: 1396; WAN024FAM_at; Start 31; Stop 55
tgtaatacttttttcatagtctctc

SEQ ID NO: 198434 - DNA, 25 bp, Artificial
  probe
  misc_feature (1)..(25): SEQ ID NO: 1396; WAN024FAM_at; Start 138; Stop 162
catagttcatggtcaaggtatggaa

SEQ ID NO: 198435 - DNA, 25 bp, Artificial
  probe
  misc_feature (1)..(25): SEQ ID NO: 1396; WAN024FAM_at; Start 189; Stop 213
gcaaccagaccaagtgacgatccgt

SEQ ID NO: 198436 - DNA, 25 bp, Artificial
  probe
  misc_feature (1)..(25): SEQ ID NO: 1396; WAN024FAM_at; Start 4; Stop 28
accacaaaagcccatgcccaatatt

SEQ ID NO: 198437 - DNA, 25 bp, Artificial
  probe
  misc_feature (1)..(25): SEQ ID NO: 1396; WAN024FAM_at; Start 198; Stop 222
ccaagtgacgatccgtaaaggcata

SEQ ID NO: 198438 - DNA, 25 bp, Artificial
  probe
  misc_feature (1)..(25): SEQ ID NO: 1396; WAN024FAM_at; Start 213; Stop 237
taaaggcatattcggtcataccagc

SEQ ID NO: 198439 - DNA, 25 bp, Artificial
  probe
  misc_feature (1)..(25): SEQ ID NO: 1396; WAN024FAM_at; Start 185; Stop 209
tgttgcaaccagaccaagtgacgat

SEQ ID NO: 198440 - DNA, 25 bp, Artificial
  probe
  misc_feature (1)..(25): SEQ ID NO: 1396; WAN024FAM_at; Start 144; Stop 168
tcatggtcaaggtatggaagtctgc

SEQ ID NO: 198441 - DNA, 25 bp, Artificial
  probe
  misc_feature (1)..(25): SEQ ID NO: 1396; WAN024FAM_at; Start 47; Stop 71
tagtctctctactcctaatccacat

SEQ ID NO: 198442 - DNA, 25 bp, Artificial
  probe
  misc_feature (1)..(25): SEQ ID NO: 1396; WAN024FAM_at; Start 121; Stop 145
tttatcaccggtcaagacatagttc

SEQ ID NO: 198443 - DNA, 25 bp, Artificial
  probe
  misc_feature (1)..(25): SEQ ID NO: 1396; WAN024FAM_at; Start 128; Stop 152
ccggtcaagacatagttcatggtca

SEQ ID NO: 198444 - DNA, 25 bp, Artificial
  probe
  misc_feature (1)..(25): SEQ ID NO: 1396; WAN024FAM_at; Start 222; Stop 246
attcggtcataccagcaagcggtga

SEQ ID NO: 198445 - DNA, 25 bp, Artificial
  probe
  misc_feature (1)..(25): SEQ ID NO: 1396; WAN024FAM_at; Start 178; Stop 202
ccagtattgttgcaaccagaccaag

SEQ ID NO: 198446 - DNA, 25 bp, Artificial
  probe
  misc_feature (1)..(25): SEQ ID NO: 1396; WAN024FAM_at; Start 95; Stop 119
gcattcaaatcattgaccatgcctt

SEQ ID NO: 198447 - DNA, 25 bp, Artificial
  probe
  misc_feature (1)..(25): SEQ ID NO: 1396; WAN024FAM_at; Start 63; Stop 87
aatccacatccgctttcatcgggtt

SEQ ID NO: 198448 - DNA, 25 bp, Artificial
  probe
  misc_feature (1)..(25): SEQ ID NO: 1396; WAN024FAM_at; Start 194; Stop 218
cagaccaagtgacgatccgtaaagg

SEQ ID NO: 198449 - DNA, 25 bp, Artificial
  probe
  misc_feature (1)..(25): SEQ ID NO: 1396; WAN024FAM_at; Start 11; Stop 35
aagcccatgcccaatatttttgtaa

SEQ ID NO: 198450 - DNA, 25 bp, Artificial
  probe
  misc_feature (1)..(25): SEQ ID NO: 1396; WAN024FAM_at; Start 73; Stop 97
cgctttcatcgggttaaagaaggca

SEQ ID NO: 198451 - DNA, 25 bp, Artificial
  probe
  misc_feature (1)..(25): SEQ ID NO: 1396; WAN024FAM_at; Start 182; Stop 206
tattgttgcaaccagaccaagtgac

SEQ ID NO: 198452 - DNA, 25 bp, Artificial
  probe
  misc_feature (1)..(25): SEQ ID NO: 1396; WAN024FAM_at; Start 170; Stop 194
tcactggtccagtattgttgcaacc

SEQ ID NO: 198453 - DNA, 25 bp, Artificial
  probe
  misc_feature (1)..(25): SEQ ID NO: 1396; WAN024FAM_at; Start 156; Stop 180
tatggaagtctgcttcactggtcca

SEQ ID NO: 198454 - DNA, 25 bp, Artificial
  probe
  misc_feature (1)..(25): SEQ ID NO: 1396; WAN024FAM_at; Start 174; Stop 198
tggtccagtattgttgcaaccagac

SEQ ID NO: 198455 - DNA, 25 bp, Artificial
  probe
  misc_feature (1)..(25): SEQ ID NO: 1396; WAN024FAM_at; Start 78; Stop 102
tcatcgggttaaagaaggcattcaa

SEQ ID NO: 198456 - DNA, 25 bp, Artificial
  probe
  misc_feature (1)..(25): SEQ ID NO: 1396; WAN024FAM_at; Start 91; Stop 115
gaaggcattcaaatcattgaccatg

SEQ ID NO: 198457 - DNA, 25 bp, Artificial
  probe
  misc_feature (1)..(25): SEQ ID NO: 1396; WAN024FAM_at; Start 125; Stop 149
tcaccggtcaagacatagttcatgg

SEQ ID NO: 198458 - DNA, 25 bp, Artificial
  probe
  misc_feature (1)..(25): SEQ ID NO: 5313; WAN024FAN_at; Start 234; Stop 258
aagcgccgagcccaaacaaagctaa

SEQ ID NO: 198459 - DNA, 25 bp, Artificial
  probe
  misc_feature (1)..(25): SEQ ID NO: 5313; WAN024FAN_at; Start 177; Stop 201
tctggttgaaatactcgatggtcac

SEQ ID NO: 198460 - DNA, 25 bp, Artificial
  probe
  misc_feature (1)..(25): SEQ ID NO: 5313; WAN024FAN_at; Start 47; Stop 71
tctcctgcgagaacgcgtgtcttca

SEQ ID NO: 198461 - DNA, 25 bp, Artificial
  probe
  misc_feature (1)..(25): SEQ ID NO: 5313; WAN024FAN_at; Start 78; Stop 102
caccagcatttggtacattgacgac

SEQ ID NO: 198462 - DNA, 25 bp, Artificial
  probe
  misc_feature (1)..(25): SEQ ID NO: 5313; WAN024FAN_at; Start 188; Stop 212
tactcgatggtcactgtgccatccg

SEQ ID NO: 198463 - DNA, 25 bp, Artificial
  probe
  misc_feature (1)..(25): SEQ ID NO: 5313; WAN024FAN_at; Start 23; Stop 47
taaatattgaccacatcaggcacat

SEQ ID NO: 198464 - DNA, 25 bp, Artificial
  probe
  misc_feature (1)..(25): SEQ ID NO: 5313; WAN024FAN_at; Start 2; Stop 26
tgcagttcgatggactgtgggtaaa

SEQ ID NO: 198465 - DNA, 25 bp, Artificial
  probe
  misc_feature (1)..(25): SEQ ID NO: 5313; WAN024FAN_at; Start 20; Stop 44
gggtaaatattgaccacatcaggca

SEQ ID NO: 198466 - DNA, 25 bp, Artificial
  probe
  misc_feature (1)..(25): SEQ ID NO: 5313; WAN024FAN_at; Start 162; Stop 186
tggtcatttcttttttctggttgaa

SEQ ID NO: 198467 - DNA, 25 bp, Artificial
  probe
  misc_feature (1)..(25): SEQ ID NO: 5313; WAN024FAN_at; Start 202; Stop 226
tgtgccatccgcagatttaccatag

SEQ ID NO: 198468 - DNA, 25 bp, Artificial
  probe
  misc_feature (1)..(25): SEQ ID NO: 5313; WAN024FAN_at; Start 52; Stop 76
tgcgagaacgcgtgtcttcaatact

SEQ ID NO: 198469 - DNA, 25 bp, Artificial
  probe
  misc_feature (1)..(25): SEQ ID NO: 5313; WAN024FAN_at; Start 144; Stop 168
tgatttcttccaaggttttggtcat

SEQ ID NO: 198470 - DNA, 25 bp, Artificial
  probe
  misc_feature (1)..(25): SEQ ID NO: 5313; WAN024FAN_at; Start 207; Stop 231
catccgcagatttaccatagttgga

SEQ ID NO: 198471 - DNA, 25 bp, Artificial
  probe
  misc_feature (1)..(25): SEQ ID NO: 5313; WAN024FAN_at; Start 70; Stop 94
caatacttcaccagcatttggtaca

SEQ ID NO: 198472 - DNA, 25 bp, Artificial
  probe
  misc_feature (1)..(25): SEQ ID NO: 5313; WAN024FAN_at; Start 134; Stop 158
aaatcacgagtgatttcttccaagg

SEQ ID NO: 198473 - DNA, 25 bp, Artificial
  probe
  misc_feature (1)..(25): SEQ ID NO: 5313; WAN024FAN_at; Start 84; Stop 108
catttggtacattgacgactttgac

SEQ ID NO: 198474 - DNA, 25 bp, Artificial
  probe
  misc_feature (1)..(25): SEQ ID NO: 5313; WAN024FAN_at; Start 27; Stop 51
tattgaccacatcaggcacatctcc

SEQ ID NO: 198475 - DNA, 25 bp, Artificial
  probe
  misc_feature (1)..(25): SEQ ID NO: 5313; WAN024FAN_at; Start 137; Stop 161
tcacgagtgatttcttccaaggttt

SEQ ID NO: 198476 - DNA, 25 bp, Artificial
  probe
  misc_feature (1)..(25): SEQ ID NO: 5313; WAN024FAN_at; Start 210; Stop 234
ccgcagatttaccatagttggagca

SEQ ID NO: 198477 - DNA, 25 bp, Artificial
  probe
  misc_feature (1)..(25): SEQ ID NO: 5313; WAN024FAN_at; Start 140; Stop 164
cgagtgatttcttccaaggttttgg

SEQ ID NO: 198478 - DNA, 25 bp, Artificial
  probe
  misc_feature (1)..(25): SEQ ID NO: 5313; WAN024FAN_at; Start 121; Stop 145
gttttccttctcaaaatcacgagtg

SEQ ID NO: 198479 - DNA, 25 bp, Artificial
  probe
  misc_feature (1)..(25): SEQ ID NO: 5313; WAN024FAN_at; Start 215; Stop 239
gatttaccatagttggagcaagcgc

SEQ ID NO: 198480 - DNA, 25 bp, Artificial
  probe
  misc_feature (1)..(25): SEQ ID NO: 5313; WAN024FAN_at; Start 195; Stop 219
tggtcactgtgccatccgcagattt

SEQ ID NO: 198481 - DNA, 25 bp, Artificial
  probe
  misc_feature (1)..(25): SEQ ID NO: 5313; WAN024FAN_at; Start 34; Stop 58
cacatcaggcacatctcctgcgaga

SEQ ID NO: 198482 - DNA, 25 bp, Artificial
  probe
  misc_feature (1)..(25): SEQ ID NO: 5313; WAN024FAN_at; Start 61; Stop 85
gcgtgtcttcaatacttcaccagca

SEQ ID NO: 198483 - DNA, 25 bp, Artificial
  probe
  misc_feature (1)..(25): SEQ ID NO: 5313; WAN024FAN_at; Start 111; Stop 135
tgatcttagggttttccttctcaaa

SEQ ID NO: 198484 - DNA, 25 bp, Artificial
  probe
  misc_feature (1)..(25): SEQ ID NO: 5313; WAN024FAN_at; Start 41; Stop 65
ggcacatctcctgcgagaacgcgtg

SEQ ID NO: 198485 - DNA, 25 bp, Artificial
  probe
  misc_feature (1)..(25): SEQ ID NO: 5313; WAN024FAN_at; Start 184; Stop 208
gaaatactcgatggtcactgtgcca

SEQ ID NO: 198486 - DNA, 25 bp, Artificial
  probe
  misc_feature (1)..(25): SEQ ID NO: 5313; WAN024FAN_at; Start 91; Stop 115
tacattgacgactttgaccttgatc

SEQ ID NO: 198487 - DNA, 25 bp, Artificial
  probe
  misc_feature (1)..(25): SEQ ID NO: 5313; WAN024FAN_at; Start 97; Stop 121
gacgactttgaccttgatcttaggg

SEQ ID NO: 198488 - DNA, 25 bp, Artificial
  probe
  misc_feature (1)..(25): SEQ ID NO: 5313; WAN024FAN_at; Start 99; Stop 123
cgactttgaccttgatcttagggtt

SEQ ID NO: 198489 - DNA, 25 bp, Artificial
  probe
  misc_feature (1)..(25): SEQ ID NO: 5313; WAN024FAN_at; Start 10; Stop 34
gatggactgtgggtaaatattgacc

SEQ ID NO: 198490 - DNA, 25 bp, Artificial
  probe
  misc_feature (1)..(25): SEQ ID NO: 5313; WAN024FAN_at; Start 55; Stop 79
gagaacgcgtgtcttcaatacttca

SEQ ID NO: 198491 - DNA, 25 bp, Artificial
  probe
  misc_feature (1)..(25): SEQ ID NO: 5313; WAN024FAN_at; Start 45; Stop 69
catctcctgcgagaacgcgtgtctt

SEQ ID NO: 198492 - DNA, 25 bp, Artificial
  probe
  misc_feature (1)..(25): SEQ ID NO: 2474; WAN024FAO_at; Start 303; Stop 327
gaatcgagattttgatatagccaac

SEQ ID NO: 198493 - DNA, 25 bp, Artificial
  probe
  misc_feature (1)..(25): SEQ ID NO: 2474; WAN024FAO_at; Start 138; Stop 162
cccggttcaagacaaggagtggcaa

SEQ ID NO: 198494 - DNA, 25 bp, Artificial
  probe
  misc_feature (1)..(25): SEQ ID NO: 2474; WAN024FAO_at; Start 370; Stop 394
caagatcaaaccaaaggtattagcc

SEQ ID NO: 198495 - DNA, 25 bp, Artificial
  probe
  misc_feature (1)..(25): SEQ ID NO: 2474; WAN024FAO_at; Start 429; Stop 453
tcatgatgacttggaaaggtacgaa

SEQ ID NO: 198496 - DNA, 25 bp, Artificial
  probe
  misc_feature (1)..(25): SEQ ID NO: 2474; WAN024FAO_at; Start 48; Stop 72
ccacgtaagaggcaaagcttggtcc

SEQ ID NO: 198497 - DNA, 25 bp, Artificial
  probe
  misc_feature (1)..(25): SEQ ID NO: 2474; WAN024FAO_at; Start 1; Stop 25
atggcgttggaagaagagatagaca

SEQ ID NO: 198498 - DNA, 25 bp, Artificial
  probe
  misc_feature (1)..(25): SEQ ID NO: 2474; WAN024FAO_at; Start 36; Stop 60
tgataatgccgaccacgtaagaggc

SEQ ID NO: 198499 - DNA, 25 bp, Artificial
  probe
  misc_feature (1)..(25): SEQ ID NO: 2474; WAN024FAO_at; Start 150; Stop 174
caaggagtggcaacatgaagtcatt

SEQ ID NO: 198500 - DNA, 25 bp, Artificial
  probe
  misc_feature (1)..(25): SEQ ID NO: 2474; WAN024FAO_at; Start 402; Stop 426
gtttactcatcataaccgtaatcgg

SEQ ID NO: 198501 - DNA, 25 bp, Artificial
  probe
  misc_feature (1)..(25): SEQ ID NO: 2474; WAN024FAO_at; Start 165; Stop 189
tgaagtcattccagaaccaaagggc

SEQ ID NO: 198502 - DNA, 25 bp, Artificial
  probe
  misc_feature (1)..(25): SEQ ID NO: 2474; WAN024FAO_at; Start 333; Stop 357
gaaagagggtctgtggaatcgcata

SEQ ID NO: 198503 - DNA, 25 bp, Artificial
  probe
  misc_feature (1)..(25): SEQ ID NO: 2474; WAN024FAO_at; Start 260; Stop 284
tgattagccccatcgatctctgctg

SEQ ID NO: 198504 - DNA, 25 bp, Artificial
  probe
  misc_feature (1)..(25): SEQ ID NO: 2474; WAN024FAO_at; Start 178; Stop 202
gaaccaaagggcattgatgatcatg

SEQ ID NO: 198505 - DNA, 25 bp, Artificial
  probe
  misc_feature (1)..(25): SEQ ID NO: 2474; WAN024FAO_at; Start 346; Stop 370
tggaatcgcataggtcaagtagagc

SEQ ID NO: 198506 - DNA, 25 bp, Artificial
  probe
  misc_feature (1)..(25): SEQ ID NO: 2474; WAN024FAO_at; Start 414; Stop 438
taaccgtaatcggaatcatgatgac

SEQ ID NO: 198507 - DNA, 25 bp, Artificial
  probe
  misc_feature (1)..(25): SEQ ID NO: 2474; WAN024FAO_at; Start 318; Stop 342
tatagccaacatagagaaagagggt

SEQ ID NO: 198508 - DNA, 25 bp, Artificial
  probe
  misc_feature (1)..(25): SEQ ID NO: 2474; WAN024FAO_at; Start 250; Stop 274
ggttgtaaattgattagccccatcg

SEQ ID NO: 198509 - DNA, 25 bp, Artificial
  probe
  misc_feature (1)..(25): SEQ ID NO: 2474; WAN024FAO_at; Start 291; Stop 315
ccagactttctggaatcgagatttt

SEQ ID NO: 198510 - DNA, 25 bp, Artificial
  probe
  misc_feature (1)..(25): SEQ ID NO: 2474; WAN024FAO_at; Start 74; Stop 98
tagtcgttgaaatattggcctgcgt

SEQ ID NO: 198511 - DNA, 25 bp, Artificial
  probe
  misc_feature (1)..(25): SEQ ID NO: 2474; WAN024FAO_at; Start 210; Stop 234
catgcatcggtttcatcattgggaa

SEQ ID NO: 198512 - DNA, 25 bp, Artificial
  probe
  misc_feature (1)..(25): SEQ ID NO: 2474; WAN024FAO_at; Start 89; Stop 113
tggcctgcgtagttgtattggaaca

SEQ ID NO: 198513 - DNA, 25 bp, Artificial
  probe
  misc_feature (1)..(25): SEQ ID NO: 2474; WAN024FAO_at; Start 13; Stop 37
gaagagatagacaatggtgatactg

SEQ ID NO: 198514 - DNA, 25 bp, Artificial
  probe
  misc_feature (1)..(25): SEQ ID NO: 2474; WAN024FAO_at; Start 274; Stop 298
gatctctgctgcttcatccagactt

SEQ ID NO: 198515 - DNA, 25 bp, Artificial
  probe
  misc_feature (1)..(25): SEQ ID NO: 2474; WAN024FAO_at; Start 440; Stop 464
tggaaaggtacgaagattccgagga

SEQ ID NO: 198516 - DNA, 25 bp, Artificial
  probe
  misc_feature (1)..(25): SEQ ID NO: 2474; WAN024FAO_at; Start 195; Stop 219
tgatcatggttgtcgcatgcatcgg

SEQ ID NO: 198517 - DNA, 25 bp, Artificial
  probe
  misc_feature (1)..(25): SEQ ID NO: 2474; WAN024FAO_at; Start 24; Stop 48
caatggtgatactgataatgccgac

SEQ ID NO: 198518 - DNA, 25 bp, Artificial
  probe
  misc_feature (1)..(25): SEQ ID NO: 2474; WAN024FAO_at; Start 59; Stop 83
gcaaagcttggtccgtagtcgttga

SEQ ID NO: 198519 - DNA, 25 bp, Artificial
  probe
  misc_feature (1)..(25): SEQ ID NO: 2474; WAN024FAO_at; Start 118; Stop 142
cagagtccacattttggaatcccgg

SEQ ID NO: 198520 - DNA, 25 bp, Artificial
  probe
  misc_feature (1)..(25): SEQ ID NO: 2474; WAN024FAO_at; Start 386; Stop 410
gtattagccaaaccgagtttactca

SEQ ID NO: 198521 - DNA, 25 bp, Artificial
  probe
  misc_feature (1)..(25): SEQ ID NO: 2474; WAN024FAO_at; Start 132; Stop 156
tggaatcccggttcaagacaaggag

SEQ ID NO: 198522 - DNA, 25 bp, Artificial
  probe
  misc_feature (1)..(25): SEQ ID NO: 2474; WAN024FAO_at; Start 235; Stop 259
gatgatgcggaaataggttgtaaat

SEQ ID NO: 198523 - DNA, 25 bp, Artificial
  probe
  misc_feature (1)..(25): SEQ ID NO: 2474; WAN024FAO_at; Start 104; Stop 128
tattggaacaaaggcagagtccaca

SEQ ID NO: 198524 - DNA, 25 bp, Artificial
  probe
  misc_feature (1)..(25): SEQ ID NO: 2474; WAN024FAO_at; Start 223; Stop 247
catcattgggaagatgatgcggaaa

SEQ ID NO: 198525 - DNA, 25 bp, Artificial
  probe
  misc_feature (1)..(25): SEQ ID NO: 2474; WAN024FAO_at; Start 356; Stop 380
taggtcaagtagagcaagatcaaac

SEQ ID NO: 198526 - DNA, 25 bp, Artificial
  probe
  misc_feature (1)..(25): SEQ ID NO: 1482; WAN024FAP_at; Start 218; Stop 242
cacgtgcgaaggctccgataacatc

SEQ ID NO: 198527 - DNA, 25 bp, Artificial
  probe
  misc_feature (1)..(25): SEQ ID NO: 1482; WAN024FAP_at; Start 280; Stop 304
ccattgatgcgaaggatgtccatga

SEQ ID NO: 198528 - DNA, 25 bp, Artificial
  probe
  misc_feature (1)..(25): SEQ ID NO: 1482; WAN024FAP_at; Start 254; Stop 278
caccttcccagttcttttgcttaga

SEQ ID NO: 198529 - DNA, 25 bp, Artificial
  probe
  misc_feature (1)..(25): SEQ ID NO: 1482; WAN024FAP_at; Start 18; Stop 42
catatattccacaaaggcattggct

SEQ ID NO: 198530 - DNA, 25 bp, Artificial
  probe
  misc_feature (1)..(25): SEQ ID NO: 1482; WAN024FAP_at; Start 374; Stop 398
gatttgcttcttttcctccacctgt

SEQ ID NO: 198531 - DNA, 25 bp, Artificial
  probe
  misc_feature (1)..(25): SEQ ID NO: 1482; WAN024FAP_at; Start 358; Stop 382
gaataacgaaggtattgatttgctt

SEQ ID NO: 198532 - DNA, 25 bp, Artificial
  probe
  misc_feature (1)..(25): SEQ ID NO: 1482; WAN024FAP_at; Start 29; Stop 53
caaaggcattggcttcttttggatg

SEQ ID NO: 198533 - DNA, 25 bp, Artificial
  probe
  misc_feature (1)..(25): SEQ ID NO: 1482; WAN024FAP_at; Start 11; Stop 35
gacgggtcatatattccacaaaggc

SEQ ID NO: 198534 - DNA, 25 bp, Artificial
  probe
  misc_feature (1)..(25): SEQ ID NO: 1482; WAN024FAP_at; Start 90; Stop 114
cgcaccaacggttaagctttgtcct

SEQ ID NO: 198535 - DNA, 25 bp, Artificial
  probe
  misc_feature (1)..(25): SEQ ID NO: 1482; WAN024FAP_at; Start 156; Stop 180
cggtttttgttcattaatcgctgtg

SEQ ID NO: 198536 - DNA, 25 bp, Artificial
  probe
  misc_feature (1)..(25): SEQ ID NO: 1482; WAN024FAP_at; Start 341; Stop 365
taatggcatttggttgagaataacg

SEQ ID NO: 198537 - DNA, 25 bp, Artificial
  probe
  misc_feature (1)..(25): SEQ ID NO: 1482; WAN024FAP_at; Start 392; Stop 416
cacctgttgctgtcgcaaaggctaa

SEQ ID NO: 198538 - DNA, 25 bp, Artificial
  probe
  misc_feature (1)..(25): SEQ ID NO: 1482; WAN024FAP_at; Start 81; Stop 105
caagtctcccgcaccaacggttaag

SEQ ID NO: 198539 - DNA, 25 bp, Artificial
  probe
  misc_feature (1)..(25): SEQ ID NO: 1482; WAN024FAP_at; Start 309; Stop 333
gatatcatctttcataatcggatcc

SEQ ID NO: 198540 - DNA, 25 bp, Artificial
  probe
  misc_feature (1)..(25): SEQ ID NO: 1482; WAN024FAP_at; Start 347; Stop 371
catttggttgagaataacgaaggta

SEQ ID NO: 198541 - DNA, 25 bp, Artificial
  probe
  misc_feature (1)..(25): SEQ ID NO: 1482; WAN024FAP_at; Start 4; Stop 28
acttctggacgggtcatatattcca

SEQ ID NO: 198542 - DNA, 25 bp, Artificial
  probe
  misc_feature (1)..(25): SEQ ID NO: 1482; WAN024FAP_at; Start 384; Stop 408
ttttcctccacctgttgctgtcgca

SEQ ID NO: 198543 - DNA, 25 bp, Artificial
  probe
  misc_feature (1)..(25): SEQ ID NO: 1482; WAN024FAP_at; Start 234; Stop 258
gataacatcggtatagccagcacct

SEQ ID NO: 198544 - DNA, 25 bp, Artificial
  probe
  misc_feature (1)..(25): SEQ ID NO: 1482; WAN024FAP_at; Start 167; Stop 191
cattaatcgctgtgatcgcccaaga

SEQ ID NO: 198545 - DNA, 25 bp, Artificial
  probe
  misc_feature (1)..(25): SEQ ID NO: 1482; WAN024FAP_at; Start 109; Stop 133
tgtcctttttcttttcctggaatca

SEQ ID NO: 198546 - DNA, 25 bp, Artificial
  probe
  misc_feature (1)..(25): SEQ ID NO: 1482; WAN024FAP_at; Start 121; Stop 145
tttcctggaatcatgaaggtcccaa

SEQ ID NO: 198547 - DNA, 25 bp, Artificial
  probe
  misc_feature (1)..(25): SEQ ID NO: 1482; WAN024FAP_at; Start 199; Stop 223
ggtgtcatgaggacatccccacgtg

SEQ ID NO: 198548 - DNA, 25 bp, Artificial
  probe
  misc_feature (1)..(25): SEQ ID NO: 1482; WAN024FAP_at; Start 329; Stop 353
gatccgacaatttaatggcatttgg

SEQ ID NO: 198549 - DNA, 25 bp, Artificial
  probe
  misc_feature (1)..(25): SEQ ID NO: 1482; WAN024FAP_at; Start 69; Stop 93
gatagaccatgccaagtctcccgca

SEQ ID NO: 198550 - DNA, 25 bp, Artificial
  probe
  misc_feature (1)..(25): SEQ ID NO: 1482; WAN024FAP_at; Start 41; Stop 65
cttcttttggatgtttggtggtggc

SEQ ID NO: 198551 - DNA, 25 bp, Artificial
  probe
  misc_feature (1)..(25): SEQ ID NO: 1482; WAN024FAP_at; Start 293; Stop 317
ggatgtccatgaccttgatatcatc

SEQ ID NO: 198552 - DNA, 25 bp, Artificial
  probe
  misc_feature (1)..(25): SEQ ID NO: 1482; WAN024FAP_at; Start 177; Stop 201
tgtgatcgcccaagacccatttggt

SEQ ID NO: 198553 - DNA, 25 bp, Artificial
  probe
  misc_feature (1)..(25): SEQ ID NO: 1482; WAN024FAP_at; Start 188; Stop 212
aagacccatttggtgtcatgaggac

SEQ ID NO: 198554 - DNA, 25 bp, Artificial
  probe
  misc_feature (1)..(25): SEQ ID NO: 1482; WAN024FAP_at; Start 323; Stop 347
taatcggatccgacaatttaatggc

SEQ ID NO: 198555 - DNA, 25 bp, Artificial
  probe
  misc_feature (1)..(25): SEQ ID NO: 1482; WAN024FAP_at; Start 285; Stop 309
gatgcgaaggatgtccatgaccttg

SEQ ID NO: 198556 - DNA, 25 bp, Artificial
  probe
  misc_feature (1)..(25): SEQ ID NO: 1482; WAN024FAP_at; Start 243; Stop 267
ggtatagccagcaccttcccagttc

SEQ ID NO: 198557 - DNA, 25 bp, Artificial
  probe
  misc_feature (1)..(25): SEQ ID NO: 1482; WAN024FAP_at; Start 132; Stop 156
catgaaggtcccaatcttaaagttc

SEQ ID NO: 198558 - DNA, 25 bp, Artificial
  probe
  misc_feature (1)..(25): SEQ ID NO: 1482; WAN024FAP_at; Start 206; Stop 230
tgaggacatccccacgtgcgaaggc

SEQ ID NO: 198559 - DNA, 25 bp, Artificial
  probe
  misc_feature (1)..(25): SEQ ID NO: 1482; WAN024FAP_at; Start 54; Stop 78
tttggtggtggctgagatagaccat

SEQ ID NO: 198560 - DNA, 25 bp, Artificial
  probe
  misc_feature (1)..(25): SEQ ID NO: 2745; WAN024FAQ_at; Start 898; Stop 922
caaagcttaaccgttggtgcgggag

SEQ ID NO: 198561 - DNA, 25 bp, Artificial
  probe
  misc_feature (1)..(25): SEQ ID NO: 2745; WAN024FAQ_at; Start 736; Stop 760
caaaagaactgggaaggtgctggct

SEQ ID NO: 198562 - DNA, 25 bp, Artificial
  probe
  misc_feature (1)..(25): SEQ ID NO: 2745; WAN024FAQ_at; Start 481; Stop 505
cctgaaacctgggatgaatttgaac

SEQ ID NO: 198563 - DNA, 25 bp, Artificial
  probe
  misc_feature (1)..(25): SEQ ID NO: 2745; WAN024FAQ_at; Start 1221; Stop 1245
gaatgccttctttaacccgatgaaa

SEQ ID NO: 198564 - DNA, 25 bp, Artificial
  probe
  misc_feature (1)..(25): SEQ ID NO: 2745; WAN024FAQ_at; Start 343; Stop 367
gactacctgaaacgcgtgaaaaatg

SEQ ID NO: 198565 - DNA, 25 bp, Artificial
  probe
  misc_feature (1)..(25): SEQ ID NO: 2745; WAN024FAQ_at; Start 766; Stop 790
gatgttatcggagccttcgcacgtg

SEQ ID NO: 198566 - DNA, 25 bp, Artificial
  probe
  misc_feature (1)..(25): SEQ ID NO: 2745; WAN024FAQ_at; Start 600; Stop 624
tgcgacagcaacaggtggaggaaaa

SEQ ID NO: 198567 - DNA, 25 bp, Artificial
  probe
  misc_feature (1)..(25): SEQ ID NO: 2745; WAN024FAQ_at; Start 973; Stop 997
gcctttgtggaatatatgacccgtc

SEQ ID NO: 198568 - DNA, 25 bp, Artificial
  probe
  misc_feature (1)..(25): SEQ ID NO: 2745; WAN024FAQ_at; Start 1121; Stop 1145
tggtctggttgcaacaatactggac

SEQ ID NO: 198569 - DNA, 25 bp, Artificial
  probe
  misc_feature (1)..(25): SEQ ID NO: 2745; WAN024FAQ_at; Start 1138; Stop 1162
tactggaccagtgaagcagacttcc

SEQ ID NO: 198570 - DNA, 25 bp, Artificial
  probe
  misc_feature (1)..(25): SEQ ID NO: 2745; WAN024FAQ_at; Start 140; Stop 164
aaaccttggaagaaatcactcgtga

SEQ ID NO: 198571 - DNA, 25 bp, Artificial
  probe
  misc_feature (1)..(25): SEQ ID NO: 2745; WAN024FAQ_at; Start 447; Stop 471
caaagataaattcgaagaactgggc

SEQ ID NO: 198572 - DNA, 25 bp, Artificial
  probe
  misc_feature (1)..(25): SEQ ID NO: 2745; WAN024FAQ_at; Start 1099; Stop 1123
tatgcctttacggatcgtcacttgg

SEQ ID NO: 198573 - DNA, 25 bp, Artificial
  probe
  misc_feature (1)..(25): SEQ ID NO: 2745; WAN024FAQ_at; Start 57; Stop 81
gctcggcgcttgctccaactatggt

SEQ ID NO: 198574 - DNA, 25 bp, Artificial
  probe
  misc_feature (1)..(25): SEQ ID NO: 2745; WAN024FAQ_at; Start 231; Stop 255
gaagacacgcgttctcgcaggagat

SEQ ID NO: 198575 - DNA, 25 bp, Artificial
  probe
  misc_feature (1)..(25): SEQ ID NO: 2745; WAN024FAQ_at; Start 1172; Stop 1196
ccatgaactatgtcttgaccggtga

SEQ ID NO: 198576 - DNA, 25 bp, Artificial
  probe
  misc_feature (1)..(25): SEQ ID NO: 2745; WAN024FAQ_at; Start 658; Stop 682
aatgccattaaattgtcggatccga

SEQ ID NO: 198577 - DNA, 25 bp, Artificial
  probe
  misc_feature (1)..(25): SEQ ID NO: 2745; WAN024FAQ_at; Start 181; Stop 205
cctaagatcaaggtcaaagtcgtca

SEQ ID NO: 198578 - DNA, 25 bp, Artificial
  probe
  misc_feature (1)..(25): SEQ ID NO: 2745; WAN024FAQ_at; Start 102; Stop 126
gaccatcgagtatttcaaccagaaa

SEQ ID NO: 198579 - DNA, 25 bp, Artificial
  probe
  misc_feature (1)..(25): SEQ ID NO: 2745; WAN024FAQ_at; Start 81; Stop 105
taaatctgcggatggcacagtgacc

SEQ ID NO: 198580 - DNA, 25 bp, Artificial
  probe
  misc_feature (1)..(25): SEQ ID NO: 2745; WAN024FAQ_at; Start 197; Stop 221
aagtcgtcaatgtaccaaatgctgg

SEQ ID NO: 198581 - DNA, 25 bp, Artificial
  probe
  misc_feature (1)..(25): SEQ ID NO: 2745; WAN024FAQ_at; Start 793; Stop 817
gatgtcctcatgacaccaaatgggt

SEQ ID NO: 198582 - DNA, 25 bp, Artificial
  probe
  misc_feature (1)..(25): SEQ ID NO: 2745; WAN024FAQ_at; Start 704; Stop 728
tcatggacatccttcgcatcaatgg

SEQ ID NO: 198583 - DNA, 25 bp, Artificial
  probe
  misc_feature (1)..(25): SEQ ID NO: 2745; WAN024FAQ_at; Start 990; Stop 1014
gacccgtccagaagtcatgcaaaaa

SEQ ID NO: 198584 - DNA, 25 bp, Artificial
  probe
  misc_feature (1)..(25): SEQ ID NO: 2745; WAN024FAQ_at; Start 1055; Stop 1079
tcaaacaagcaggagaagattcacc

SEQ ID NO: 198585 - DNA, 25 bp, Artificial
  probe
  misc_feature (1)..(25): SEQ ID NO: 2745; WAN024FAQ_at; Start 1013; Stop 1037
aatactacgatgtggacggatctcc

SEQ ID NO: 198586 - DNA, 25 bp, Artificial
  probe
  misc_feature (1)..(25): SEQ ID NO: 2745; WAN024FAQ_at; Start 809; Stop 833
caaatgggtcttgggcgatcacagc

SEQ ID NO: 198587 - DNA, 25 bp, Artificial
  probe
  misc_feature (1)..(25): SEQ ID NO: 2745; WAN024FAQ_at; Start 585; Stop 609
caatcaattagcctttgcgacagca

SEQ ID NO: 198588 - DNA, 25 bp, Artificial
  probe
  misc_feature (1)..(25): SEQ ID NO: 2745; WAN024FAQ_at; Start 328; Stop 352
gatttgagcaacaaagactacctga

SEQ ID NO: 198589 - DNA, 25 bp, Artificial
  probe
  misc_feature (1)..(25): SEQ ID NO: 2745; WAN024FAQ_at; Start 513; Stop 537
caaagatatcgttgctaaaggacaa

SEQ ID NO: 198590 - DNA, 25 bp, Artificial
  probe
  misc_feature (1)..(25): SEQ ID NO: 2745; WAN024FAQ_at; Start 288; Stop 312
catcgaactgcaagaatgggcaaaa

SEQ ID NO: 198591 - DNA, 25 bp, Artificial
  probe
  misc_feature (1)..(25): SEQ ID NO: 2745; WAN024FAQ_at; Start 1075; Stop 1099
tcaccgcttgctggtatgaccgaat

SEQ ID NO: 198592 - DNA, 25 bp, Artificial
  probe
  misc_feature (1)..(25): SEQ ID NO: 2745; WAN024FAQ_at; Start 1029; Stop 1053
cggatctccaacagcgatcgaaggg

SEQ ID NO: 198593 - DNA, 25 bp, Artificial
  probe
  misc_feature (1)..(25): SEQ ID NO: 2745; WAN024FAQ_at; Start 554; Stop 578
caggtgcagatgcttggacactcaa

SEQ ID NO: 198594 - DNA, 25 bp, Artificial
  probe
  misc_feature (1)..(25): SEQ ID NO: 2957; WAN024FAR_at; Start 550; Stop 574
ggtttgcaatctattccaactgaga

SEQ ID NO: 198595 - DNA, 25 bp, Artificial
  probe
  misc_feature (1)..(25): SEQ ID NO: 2957; WAN024FAR_at; Start 564; Stop 588
tccaactgagattacagaggcagca

SEQ ID NO: 198596 - DNA, 25 bp, Artificial
  probe
  misc_feature (1)..(25): SEQ ID NO: 2957; WAN024FAR_at; Start 805; Stop 829
gccaatgccattgccgtaatcttgt

SEQ ID NO: 198597 - DNA, 25 bp, Artificial
  probe
  misc_feature (1)..(25): SEQ ID NO: 2957; WAN024FAR_at; Start 701; Stop 725
ttgaccaagtctttgccatgaccgg

SEQ ID NO: 198598 - DNA, 25 bp, Artificial
  probe
  misc_feature (1)..(25): SEQ ID NO: 2957; WAN024FAR_at; Start 35; Stop 59
tattacaaaaatattgggcatgggc

SEQ ID NO: 198599 - DNA, 25 bp, Artificial
  probe
  misc_feature (1)..(25): SEQ ID NO: 2957; WAN024FAR_at; Start 669; Stop 693
tatcctagccctaaaaggtgggctg

SEQ ID NO: 198600 - DNA, 25 bp, Artificial
  probe
  misc_feature (1)..(25): SEQ ID NO: 2957; WAN024FAR_at; Start 614; Stop 638
aagttttctggaacattgaattgcc

SEQ ID NO: 198601 - DNA, 25 bp, Artificial
  probe
  misc_feature (1)..(25): SEQ ID NO: 2957; WAN024FAR_at; Start 685; Stop 709
ggtgggctgactgcctttgaccaag

SEQ ID NO: 198602 - DNA, 25 bp, Artificial
  probe
  misc_feature (1)..(25): SEQ ID NO: 2957; WAN024FAR_at; Start 587; Stop 611
caaggattgatggtgcgactagcaa

SEQ ID NO: 198603 - DNA, 25 bp, Artificial
  probe
  misc_feature (1)..(25): SEQ ID NO: 2957; WAN024FAR_at; Start 85; Stop 109
caagcaattttcttctatgtgccga

SEQ ID NO: 198604 - DNA, 25 bp, Artificial
  probe
  misc_feature (1)..(25): SEQ ID NO: 2957; WAN024FAR_at; Start 216; Stop 240
catgaatgcgattggctttaccgca

SEQ ID NO: 198605 - DNA, 25 bp, Artificial
  probe
  misc_feature (1)..(25): SEQ ID NO: 2957; WAN024FAR_at; Start 629; Stop 653
ttgaattgccttacttgctaccaag

SEQ ID NO: 198606 - DNA, 25 bp, Artificial
  probe
  misc_feature (1)..(25): SEQ ID NO: 2957; WAN024FAR_at; Start 371; Stop 395
tgacagtggctttgatcttcaagca

SEQ ID NO: 198607 - DNA, 25 bp, Artificial
  probe
  misc_feature (1)..(25): SEQ ID NO: 2957; WAN024FAR_at; Start 2; Stop 26
tgtggattaggagtagagagactat

SEQ ID NO: 198608 - DNA, 25 bp, Artificial
  probe
  misc_feature (1)..(25): SEQ ID NO: 2957; WAN024FAR_at; Start 735; Stop 759
aaacaatgccacaacctcacttggg

SEQ ID NO: 198609 - DNA, 25 bp, Artificial
  probe
  misc_feature (1)..(25): SEQ ID NO: 2957; WAN024FAR_at; Start 401; Stop 425
tcaactacggtcttccagcgattgg

SEQ ID NO: 198610 - DNA, 25 bp, Artificial
  probe
  misc_feature (1)..(25): SEQ ID NO: 2957; WAN024FAR_at; Start 386; Stop 410
tcttcaagcaagtcttcaactacgg

SEQ ID NO: 198611 - DNA, 25 bp, Artificial
  probe
  misc_feature (1)..(25): SEQ ID NO: 2957; WAN024FAR_at; Start 716; Stop 740
ccatgaccggtggtggtccaaacaa

SEQ ID NO: 198612 - DNA, 25 bp, Artificial
  probe
  misc_feature (1)..(25): SEQ ID NO: 2957; WAN024FAR_at; Start 51; Stop 75
ggcatgggcttttgtggtcatcccc

SEQ ID NO: 198613 - DNA, 25 bp, Artificial
  probe
  misc_feature (1)..(25): SEQ ID NO: 2957; WAN024FAR_at; Start 752; Stop 776
cacttgggctcttggtttataacta

SEQ ID NO: 198614 - DNA, 25 bp, Artificial
  probe
  misc_feature (1)..(25): SEQ ID NO: 2957; WAN024FAR_at; Start 573; Stop 597
gattacagaggcagcaaggattgat

SEQ ID NO: 198615 - DNA, 25 bp, Artificial
  probe
  misc_feature (1)..(25): SEQ ID NO: 2957; WAN024FAR_at; Start 600; Stop 624
tgcgactagcaagcaagttttctgg

SEQ ID NO: 198616 - DNA, 25 bp, Artificial
  probe
  misc_feature (1)..(25): SEQ ID NO: 2957; WAN024FAR_at; Start 280; Stop 304
gggatcttcattgcgcgtgtcttga

SEQ ID NO: 198617 - DNA, 25 bp, Artificial
  probe
  misc_feature (1)..(25): SEQ ID NO: 2957; WAN024FAR_at; Start 352; Stop 376
ccagctgttttatctggtttgacag

SEQ ID NO: 198618 - DNA, 25 bp, Artificial
  probe
  misc_feature (1)..(25): SEQ ID NO: 2957; WAN024FAR_at; Start 534; Stop 558
catcatcttcctagctggtttgcaa

SEQ ID NO: 198619 - DNA, 25 bp, Artificial
  probe
  misc_feature (1)..(25): SEQ ID NO: 2957; WAN024FAR_at; Start 846; Stop 870
gatttcgatcatccaattgagagta

SEQ ID NO: 198620 - DNA, 25 bp, Artificial
  probe
  misc_feature (1)..(25): SEQ ID NO: 2957; WAN024FAR_at; Start 189; Stop 213
taagctcctcttcatggatccaaaa

SEQ ID NO: 198621 - DNA, 25 bp, Artificial
  probe
  misc_feature (1)..(25): SEQ ID NO: 2957; WAN024FAR_at; Start 201; Stop 225
catggatccaaaattcatgaatgcg

SEQ ID NO: 198622 - DNA, 25 bp, Artificial
  probe
  misc_feature (1)..(25): SEQ ID NO: 2957; WAN024FAR_at; Start 100; Stop 124
tatgtgccgatgtttcaaggagcct

SEQ ID NO: 198623 - DNA, 25 bp, Artificial
  probe
  misc_feature (1)..(25): SEQ ID NO: 2957; WAN024FAR_at; Start 519; Stop 543
ggtggctatgcccatcatcatcttc

SEQ ID NO: 198624 - DNA, 25 bp, Artificial
  probe
  misc_feature (1)..(25): SEQ ID NO: 2957; WAN024FAR_at; Start 255; Stop 279
catggtggttggtgagattgcactc

SEQ ID NO: 198625 - DNA, 25 bp, Artificial
  probe
  misc_feature (1)..(25): SEQ ID NO: 2957; WAN024FAR_at; Start 132; Stop 156
ttttaccaactggacaggattgact

SEQ ID NO: 198626 - DNA, 25 bp, Artificial
  probe
  misc_feature (1)..(25): SEQ ID NO: 2957; WAN024FAR_at; Start 790; Stop 814
aaccaattcggttatgccaatgcca

SEQ ID NO: 198627 - DNA, 25 bp, Artificial
  probe
  misc_feature (1)..(25): SEQ ID NO: 2957; WAN024FAR_at; Start 270; Stop 294
gattgcactcgggatcttcattgcg

SEQ ID NO: 198628 - DNA, 25 bp, Artificial
  probe
  misc_feature (1)..(25): SEQ ID NO: 4913; WAN024FAS_at; Start 219; Stop 243
tggaggctattattggaactctgtc

SEQ ID NO: 198629 - DNA, 25 bp, Artificial
  probe
  misc_feature (1)..(25): SEQ ID NO: 4913; WAN024FAS_at; Start 382; Stop 406
caagtcatcatgattccgattacgg

SEQ ID NO: 198630 - DNA, 25 bp, Artificial
  probe
  misc_feature (1)..(25): SEQ ID NO: 4913; WAN024FAS_at; Start 508; Stop 532
aaaatctcgattccagaaagtctgg

SEQ ID NO: 198631 - DNA, 25 bp, Artificial
  probe
  misc_feature (1)..(25): SEQ ID NO: 4913; WAN024FAS_at; Start 477; Stop 501
acagaccctctttctctatgttggc

SEQ ID NO: 198632 - DNA, 25 bp, Artificial
  probe
  misc_feature (1)..(25): SEQ ID NO: 4913; WAN024FAS_at; Start 630; Stop 654
caatgccctttggttctggaatgac

SEQ ID NO: 198633 - DNA, 25 bp, Artificial
  probe
  misc_feature (1)..(25): SEQ ID NO: 4913; WAN024FAS_at; Start 648; Stop 672
gaatgacttcatgttgccactcctt

SEQ ID NO: 198634 - DNA, 25 bp, Artificial
  probe
  misc_feature (1)..(25): SEQ ID NO: 4913; WAN024FAS_at; Start 798; Stop 822
tgtctatctcttcttccaacgccat

SEQ ID NO: 198635 - DNA, 25 bp, Artificial
  probe
  misc_feature (1)..(25): SEQ ID NO: 4913; WAN024FAS_at; Start 740; Stop 764
tcaacgactacggaccaagctttgc

SEQ ID NO: 198636 - DNA, 25 bp, Artificial
  probe
  misc_feature (1)..(25): SEQ ID NO: 4913; WAN024FAS_at; Start 26; Stop 50
tgaaacaagatgaaagaaaagccct

SEQ ID NO: 198637 - DNA, 25 bp, Artificial
  probe
  misc_feature (1)..(25): SEQ ID NO: 4913; WAN024FAS_at; Start 302; Stop 326
ccatcgctcgcaatatgagtaaaag

SEQ ID NO: 198638 - DNA, 25 bp, Artificial
  probe
  misc_feature (1)..(25): SEQ ID NO: 4913; WAN024FAS_at; Start 677; Stop 701
tgaaccgggattccaaaatgtggac

SEQ ID NO: 198639 - DNA, 25 bp, Artificial
  probe
  misc_feature (1)..(25): SEQ ID NO: 4913; WAN024FAS_at; Start 41; Stop 65
gaaaagccctgattggcaaatacat

SEQ ID NO: 198640 - DNA, 25 bp, Artificial
  probe
  misc_feature (1)..(25): SEQ ID NO: 4913; WAN024FAS_at; Start 461; Stop 485
tgacctatgcgattccacagaccct

SEQ ID NO: 198641 - DNA, 25 bp, Artificial
  probe
  misc_feature (1)..(25): SEQ ID NO: 4913; WAN024FAS_at; Start 179; Stop 203
tcacatgggacaactttagccgtct

SEQ ID NO: 198642 - DNA, 25 bp, Artificial
  probe
  misc_feature (1)..(25): SEQ ID NO: 4913; WAN024FAS_at; Start 447; Stop 471
gatcttgctctacttgacctatgcg

SEQ ID NO: 198643 - DNA, 25 bp, Artificial
  probe
  misc_feature (1)..(25): SEQ ID NO: 4913; WAN024FAS_at; Start 8; Stop 32
ttaagaggagaagcatgatgaaaca

SEQ ID NO: 198644 - DNA, 25 bp, Artificial
  probe
  misc_feature (1)..(25): SEQ ID NO: 4913; WAN024FAS_at; Start 692; Stop 716
aaatgtggactctgcctttgttcca

SEQ ID NO: 198645 - DNA, 25 bp, Artificial
  probe
  misc_feature (1)..(25): SEQ ID NO: 4913; WAN024FAS_at; Start 92; Stop 116
ttttagtgccgctccttgctaccct

SEQ ID NO: 198646 - DNA, 25 bp, Artificial
  probe
  misc_feature (1)..(25): SEQ ID NO: 4913; WAN024FAS_at; Start 493; Stop 517
tatgttggctatatcaaaatctcga

SEQ ID NO: 198647 - DNA, 25 bp, Artificial
  probe
  misc_feature (1)..(25): SEQ ID NO: 4913; WAN024FAS_at; Start 198; Stop 222
ccgtctcttagctgatgggattgga

SEQ ID NO: 198648 - DNA, 25 bp, Artificial
  probe
  misc_feature (1)..(25): SEQ ID NO: 4913; WAN024FAS_at; Start 769; Stop 793
tacgtggtcggcattatcagtatca

SEQ ID NO: 198649 - DNA, 25 bp, Artificial
  probe
  misc_feature (1)..(25): SEQ ID NO: 4913; WAN024FAS_at; Start 724; Stop 748
tacgcaggccaatatttcaacgact

SEQ ID NO: 198650 - DNA, 25 bp, Artificial
  probe
  misc_feature (1)..(25): SEQ ID NO: 4913; WAN024FAS_at; Start 342; Stop 366
catgtataccctcttaatcctcgga

SEQ ID NO: 198651 - DNA, 25 bp, Artificial
  probe
  misc_feature (1)..(25): SEQ ID NO: 4913; WAN024FAS_at; Start 708; Stop 732
tttgttccaatacaactacgcaggc

SEQ ID NO: 198652 - DNA, 25 bp, Artificial
  probe
  misc_feature (1)..(25): SEQ ID NO: 4913; WAN024FAS_at; Start 129; Stop 153
caaacccactaaggatattgtagat

SEQ ID NO: 198653 - DNA, 25 bp, Artificial
  probe
  misc_feature (1)..(25): SEQ ID NO: 4913; WAN024FAS_at; Start 163; Stop 187
ggctttccaaccaacttcacatggg

SEQ ID NO: 198654 - DNA, 25 bp, Artificial
  probe
  misc_feature (1)..(25): SEQ ID NO: 4913; WAN024FAS_at; Start 755; Stop 779
caagctttgcctcttacgtggtcgg

SEQ ID NO: 198655 - DNA, 25 bp, Artificial
  probe
  misc_feature (1)..(25): SEQ ID NO: 4913; WAN024FAS_at; Start 587; Stop 611
tcttcccaatgatgaaaccgatgca

SEQ ID NO: 198656 - DNA, 25 bp, Artificial
  probe
  misc_feature (1)..(25): SEQ ID NO: 4913; WAN024FAS_at; Start 413; Stop 437
tgagtaaactcggtttggctaatac

SEQ ID NO: 198657 - DNA, 25 bp, Artificial
  probe
  misc_feature (1)..(25): SEQ ID NO: 4913; WAN024FAS_at; Start 234; Stop 258
gaactctgtcgtcatcactgtcttg

SEQ ID NO: 198658 - DNA, 25 bp, Artificial
  probe
  misc_feature (1)..(25): SEQ ID NO: 4913; WAN024FAS_at; Start 528; Stop 552
tctggatgaagcagcagagatcgat

SEQ ID NO: 198659 - DNA, 25 bp, Artificial
  probe
  misc_feature (1)..(25): SEQ ID NO: 4913; WAN024FAS_at; Start 273; Stop 297
aatgatctttatccctatggcagcc

SEQ ID NO: 198660 - DNA, 25 bp, Artificial
  probe
  misc_feature (1)..(25): SEQ ID NO: 4913; WAN024FAS_at; Start 600; Stop 624
gaaaccgatgcatgcgacaaccatg

SEQ ID NO: 198661 - DNA, 25 bp, Artificial
  probe
  misc_feature (1)..(25): SEQ ID NO: 4913; WAN024FAS_at; Start 662; Stop 686
tgccactccttgtcttgaaccggga

SEQ ID NO: 198662 - DNA, 25 bp, Artificial
  probe
  misc_feature (1)..(25): SEQ ID NO: 3130; WAN024FAT_at; Start 565; Stop 589
cataccactcgagctgttagttttt

SEQ ID NO: 198663 - DNA, 25 bp, Artificial
  probe
  misc_feature (1)..(25): SEQ ID NO: 3130; WAN024FAT_at; Start 527; Stop 551
aaacgggagaaatttcagacagtct

SEQ ID NO: 198664 - DNA, 25 bp, Artificial
  probe
  misc_feature (1)..(25): SEQ ID NO: 3130; WAN024FAT_at; Start 228; Stop 252
tgtagtaatcatgtccgtcaaggaa

SEQ ID NO: 198665 - DNA, 25 bp, Artificial
  probe
  misc_feature (1)..(25): SEQ ID NO: 3130; WAN024FAT_at; Start 172; Stop 196
attcacgaacggaaaaacagtctgg

SEQ ID NO: 198666 - DNA, 25 bp, Artificial
  probe
  misc_feature (1)..(25): SEQ ID NO: 3130; WAN024FAT_at; Start 244; Stop 268
gtcaaggaacctgattttaacagca

SEQ ID NO: 198667 - DNA, 25 bp, Artificial
  probe
  misc_feature (1)..(25): SEQ ID NO: 3130; WAN024FAT_at; Start 761; Stop 785
cagctgttgaagagggtgttattgc

SEQ ID NO: 198668 - DNA, 25 bp, Artificial
  probe
  misc_feature (1)..(25): SEQ ID NO: 3130; WAN024FAT_at; Start 250; Stop 274
gaacctgattttaacagcaatttgc

SEQ ID NO: 198669 - DNA, 25 bp, Artificial
  probe
  misc_feature (1)..(25): SEQ ID NO: 3130; WAN024FAT_at; Start 130; Stop 154
gatttctctgccgaggaaaattcag

SEQ ID NO: 198670 - DNA, 25 bp, Artificial
  probe
  misc_feature (1)..(25): SEQ ID NO: 3130; WAN024FAT_at; Start 233; Stop 257
taatcatgtccgtcaaggaacctga

SEQ ID NO: 198671 - DNA, 25 bp, Artificial
  probe
  misc_feature (1)..(25): SEQ ID NO: 3130; WAN024FAT_at; Start 119; Stop 143
gggactgggtagatttctctgccga

SEQ ID NO: 198672 - DNA, 25 bp, Artificial
  probe
  misc_feature (1)..(25): SEQ ID NO: 3130; WAN024FAT_at; Start 223; Stop 247
caagctgtagtaatcatgtccgtca

SEQ ID NO: 198673 - DNA, 25 bp, Artificial
  probe
  misc_feature (1)..(25): SEQ ID NO: 3130; WAN024FAT_at; Start 140; Stop 164
ccgaggaaaattcagaaggctatat

SEQ ID NO: 198674 - DNA, 25 bp, Artificial
  probe
  misc_feature (1)..(25): SEQ ID NO: 3130; WAN024FAT_at; Start 770; Stop 794
aagagggtgttattgcaaccttccg

SEQ ID NO: 198675 - DNA, 25 bp, Artificial
  probe
  misc_feature (1)..(25): SEQ ID NO: 3130; WAN024FAT_at; Start 745; Stop 769
tcttgtgccgtcaaaccagctgttg

SEQ ID NO: 198676 - DNA, 25 bp, Artificial
  probe
  misc_feature (1)..(25): SEQ ID NO: 3130; WAN024FAT_at; Start 522; Stop 546
tcttgaaacgggagaaatttcagac

SEQ ID NO: 198677 - DNA, 25 bp, Artificial
  probe
  misc_feature (1)..(25): SEQ ID NO: 3130; WAN024FAT_at; Start 753; Stop 777
cgtcaaaccagctgttgaagagggt

SEQ ID NO: 198678 - DNA, 25 bp, Artificial
  probe
  misc_feature (1)..(25): SEQ ID NO: 3130; WAN024FAT_at; Start 5; Stop 29
agggacaaatcattaaagccttggc

SEQ ID NO: 198679 - DNA, 25 bp, Artificial
  probe
  misc_feature (1)..(25): SEQ ID NO: 3130; WAN024FAT_at; Start 70; Stop 94
acacgcgcgcgtgggaatttccgta

SEQ ID NO: 198680 - DNA, 25 bp, Artificial
  probe
  misc_feature (1)..(25): SEQ ID NO: 3130; WAN024FAT_at; Start 400; Stop 424
tatgactttgtgaccagtaaagagg

SEQ ID NO: 198681 - DNA, 25 bp, Artificial
  probe
  misc_feature (1)..(25): SEQ ID NO: 3130; WAN024FAT_at; Start 720; Stop 744
tacttgtacccatacccatgagccg

SEQ ID NO: 198682 - DNA, 25 bp, Artificial
  probe
  misc_feature (1)..(25): SEQ ID NO: 3130; WAN024FAT_at; Start 569; Stop 593
ccactcgagctgttagtttttacaa

SEQ ID NO: 198683 - DNA, 25 bp, Artificial
  probe
  misc_feature (1)..(25): SEQ ID NO: 3130; WAN024FAT_at; Start 441; Stop 465
aacaggcaaggttacggtctttatg

SEQ ID NO: 198684 - DNA, 25 bp, Artificial
  probe
  misc_feature (1)..(25): SEQ ID NO: 3130; WAN024FAT_at; Start 124; Stop 148
tgggtagatttctctgccgaggaaa

SEQ ID NO: 198685 - DNA, 25 bp, Artificial
  probe
  misc_feature (1)..(25): SEQ ID NO: 3130; WAN024FAT_at; Start 776; Stop 800
gtgttattgcaaccttccgttttga

SEQ ID NO: 198686 - DNA, 25 bp, Artificial
  probe
  misc_feature (1)..(25): SEQ ID NO: 3130; WAN024FAT_at; Start 726; Stop 750
tacccatacccatgagccgtcttgt

SEQ ID NO: 198687 - DNA, 25 bp, Artificial
  probe
  misc_feature (1)..(25): SEQ ID NO: 3130; WAN024FAT_at; Start 136; Stop 160
tctgccgaggaaaattcagaaggct

SEQ ID NO: 198688 - DNA, 25 bp, Artificial
  probe
  misc_feature (1)..(25): SEQ ID NO: 3130; WAN024FAT_at; Start 237; Stop 261
catgtccgtcaaggaacctgatttt

SEQ ID NO: 198689 - DNA, 25 bp, Artificial
  probe
  misc_feature (1)..(25): SEQ ID NO: 3130; WAN024FAT_at; Start 738; Stop 762
tgagccgtcttgtgccgtcaaacca

SEQ ID NO: 198690 - DNA, 25 bp, Artificial
  probe
  misc_feature (1)..(25): SEQ ID NO: 3130; WAN024FAT_at; Start 748; Stop 772
tgtgccgtcaaaccagctgttgaag

SEQ ID NO: 198691 - DNA, 25 bp, Artificial
  probe
  misc_feature (1)..(25): SEQ ID NO: 3130; WAN024FAT_at; Start 716; Stop 740
tccgtacttgtacccatacccatga

SEQ ID NO: 198692 - DNA, 25 bp, Artificial
  probe
  misc_feature (1)..(25): SEQ ID NO: 3130; WAN024FAT_at; Start 735; Stop 759
ccatgagccgtcttgtgccgtcaaa

SEQ ID NO: 198693 - DNA, 25 bp, Artificial
  probe
  misc_feature (1)..(25): SEQ ID NO: 3130; WAN024FAT_at; Start 408; Stop 432
tgtgaccagtaaagaggaactcctg

SEQ ID NO: 198694 - DNA, 25 bp, Artificial
  probe
  misc_feature (1)..(25): SEQ ID NO: 3130; WAN024FAT_at; Start 264; Stop 288
cagcaatttgctggatcgtttcttg

SEQ ID NO: 198695 - DNA, 25 bp, Artificial
  probe
  misc_feature (1)..(25): SEQ ID NO: 3130; WAN024FAT_at; Start 277; Stop 301
gatcgtttcttggttcttttggagc

SEQ ID NO: 198696 - DNA, 25 bp, Artificial
  probe
  misc_feature (1)..(25): SEQ ID NO: 1234; WAN024FAU_at; Start 167; Stop 191
tacccgataagtctgattttgcaaa

SEQ ID NO: 198697 - DNA, 25 bp, Artificial
  probe
  misc_feature (1)..(25): SEQ ID NO: 1234; WAN024FAU_at; Start 24; Stop 48
gctgattcagataatagtaagctat

SEQ ID NO: 198698 - DNA, 25 bp, Artificial
  probe
  misc_feature (1)..(25): SEQ ID NO: 1234; WAN024FAU_at; Start 44; Stop 68
gctatcctatattgtaccacttttt

SEQ ID NO: 198699 - DNA, 25 bp, Artificial
  probe
  misc_feature (1)..(25): SEQ ID NO: 1234; WAN024FAU_at; Start 193; Stop 217
caatttctactactgctgttacgga

SEQ ID NO: 198700 - DNA, 25 bp, Artificial
  probe
  misc_feature (1)..(25): SEQ ID NO: 1234; WAN024FAU_at; Start 200; Stop 224
tactactgctgttacggacttatct

SEQ ID NO: 198701 - DNA, 25 bp, Artificial
  probe
  misc_feature (1)..(25): SEQ ID NO: 1234; WAN024FAU_at; Start 171; Stop 195
cgataagtctgattttgcaaatcaa

SEQ ID NO: 198702 - DNA, 25 bp, Artificial
  probe
  misc_feature (1)..(25): SEQ ID NO: 1234; WAN024FAU_at; Start 163; Stop 187
caattacccgataagtctgattttg

SEQ ID NO: 198703 - DNA, 25 bp, Artificial
  probe
  misc_feature (1)..(25): SEQ ID NO: 1234; WAN024FAU_at; Start 38; Stop 62
tagtaagctatcctatattgtacca

SEQ ID NO: 198704 - DNA, 25 bp, Artificial
  probe
  misc_feature (1)..(25): SEQ ID NO: 1234; WAN024FAU_at; Start 27; Stop 51
gattcagataatagtaagctatcct

SEQ ID NO: 198705 - DNA, 25 bp, Artificial
  probe
  misc_feature (1)..(25): SEQ ID NO: 1234; WAN024FAU_at; Start 192; Stop 216
tcaatttctactactgctgttacgg

SEQ ID NO: 198706 - DNA, 25 bp, Artificial
  probe
  misc_feature (1)..(25): SEQ ID NO: 1234; WAN024FAU_at; Start 149; Stop 173
ttcaactccattctcaattacccga

SEQ ID NO: 198707 - DNA, 25 bp, Artificial
  probe
  misc_feature (1)..(25): SEQ ID NO: 1234; WAN024FAU_at; Start 209; Stop 233
tgttacggacttatctttattttga

SEQ ID NO: 198708 - DNA, 25 bp, Artificial
  probe
  misc_feature (1)..(25): SEQ ID NO: 1234; WAN024FAU_at; Start 188; Stop 212
caaatcaatttctactactgctgtt

SEQ ID NO: 198709 - DNA, 25 bp, Artificial
  probe
  misc_feature (1)..(25): SEQ ID NO: 1234; WAN024FAU_at; Start 49; Stop 73
cctatattgtaccacttttttagca

SEQ ID NO: 198710 - DNA, 25 bp, Artificial
  probe
  misc_feature (1)..(25): SEQ ID NO: 1234; WAN024FAU_at; Start 194; Stop 218
aatttctactactgctgttacggac

SEQ ID NO: 198711 - DNA, 25 bp, Artificial
  probe
  misc_feature (1)..(25): SEQ ID NO: 1234; WAN024FAU_at; Start 186; Stop 210
tgcaaatcaatttctactactgctg

SEQ ID NO: 198712 - DNA, 25 bp, Artificial
  probe
  misc_feature (1)..(25): SEQ ID NO: 1234; WAN024FAU_at; Start 202; Stop 226
ctactgctgttacggacttatcttt

SEQ ID NO: 198713 - DNA, 25 bp, Artificial
  probe
  misc_feature (1)..(25): SEQ ID NO: 1234; WAN024FAU_at; Start 56; Stop 80
tgtaccacttttttagcaatttgaa

SEQ ID NO: 198714 - DNA, 25 bp, Artificial
  probe
  misc_feature (1)..(25): SEQ ID NO: 1234; WAN024FAU_at; Start 169; Stop 193
cccgataagtctgattttgcaaatc

SEQ ID NO: 198715 - DNA, 25 bp, Artificial
  probe
  misc_feature (1)..(25): SEQ ID NO: 1234; WAN024FAU_at; Start 196; Stop 220
tttctactactgctgttacggactt

SEQ ID NO: 198716 - DNA, 25 bp, Artificial
  probe
  misc_feature (1)..(25): SEQ ID NO: 1234; WAN024FAU_at; Start 155; Stop 179
tccattctcaattacccgataagtc

SEQ ID NO: 198717 - DNA, 25 bp, Artificial
  probe
  misc_feature (1)..(25): SEQ ID NO: 1234; WAN024FAU_at; Start 120; Stop 144
tccaccatatcaaggcttcaaaatg

SEQ ID NO: 198718 - DNA, 25 bp, Artificial
  probe
  misc_feature (1)..(25): SEQ ID NO: 1234; WAN024FAU_at; Start 160; Stop 184
tctcaattacccgataagtctgatt

SEQ ID NO: 198719 - DNA, 25 bp, Artificial
  probe
  misc_feature (1)..(25): SEQ ID NO: 1234; WAN024FAU_at; Start 165; Stop 189
attacccgataagtctgattttgca

SEQ ID NO: 198720 - DNA, 25 bp, Artificial
  probe
  misc_feature (1)..(25): SEQ ID NO: 1234; WAN024FAU_at; Start 115; Stop 139
ttttatccaccatatcaaggcttca

SEQ ID NO: 198721 - DNA, 25 bp, Artificial
  probe
  misc_feature (1)..(25): SEQ ID NO: 1234; WAN024FAU_at; Start 153; Stop 177
actccattctcaattacccgataag

SEQ ID NO: 198722 - DNA, 25 bp, Artificial
  probe
  misc_feature (1)..(25): SEQ ID NO: 1234; WAN024FAU_at; Start 198; Stop 222
tctactactgctgttacggacttat

SEQ ID NO: 198723 - DNA, 25 bp, Artificial
  probe
  misc_feature (1)..(25): SEQ ID NO: 1234; WAN024FAU_at; Start 118; Stop 142
tatccaccatatcaaggcttcaaaa

SEQ ID NO: 198724 - DNA, 25 bp, Artificial
  probe
  misc_feature (1)..(25): SEQ ID NO: 1234; WAN024FAU_at; Start 113; Stop 137
tattttatccaccatatcaaggctt

SEQ ID NO: 198725 - DNA, 25 bp, Artificial
  probe
  misc_feature (1)..(25): SEQ ID NO: 1234; WAN024FAU_at; Start 204; Stop 228
actgctgttacggacttatctttat

SEQ ID NO: 198726 - DNA, 25 bp, Artificial
  probe
  misc_feature (1)..(25): SEQ ID NO: 1234; WAN024FAU_at; Start 216; Stop 240
gacttatctttattttgacgtttga

SEQ ID NO: 198727 - DNA, 25 bp, Artificial
  probe
  misc_feature (1)..(25): SEQ ID NO: 1234; WAN024FAU_at; Start 110; Stop 134
ccctattttatccaccatatcaagg

SEQ ID NO: 198728 - DNA, 25 bp, Artificial
  probe
  misc_feature (1)..(25): SEQ ID NO: 1234; WAN024FAU_at; Start 40; Stop 64
gtaagctatcctatattgtaccact

SEQ ID NO: 198729 - DNA, 25 bp, Artificial
  probe
  misc_feature (1)..(25): SEQ ID NO: 1234; WAN024FAU_at; Start 157; Stop 181
cattctcaattacccgataagtctg

SEQ ID NO: 198730 - DNA, 25 bp, Artificial
  probe
  misc_feature (1)..(25): SEQ ID NO: 5546; WAN024FAV_at; Start 677; Stop 701
tattggacaaagttcgagatatcgc

SEQ ID NO: 198731 - DNA, 25 bp, Artificial
  probe
  misc_feature (1)..(25): SEQ ID NO: 5546; WAN024FAV_at; Start 826; Stop 850
tacagttccagaacagagcgtttgg

SEQ ID NO: 198732 - DNA, 25 bp, Artificial
  probe
  misc_feature (1)..(25): SEQ ID NO: 5546; WAN024FAV_at; Start 1084; Stop 1108
gtcaagtattttctcgctcgtctaa

SEQ ID NO: 198733 - DNA, 25 bp, Artificial
  probe
  misc_feature (1)..(25): SEQ ID NO: 5546; WAN024FAV_at; Start 1328; Stop 1352
ggactactgagatagagacaccaac

SEQ ID NO: 198734 - DNA, 25 bp, Artificial
  probe
  misc_feature (1)..(25): SEQ ID NO: 5546; WAN024FAV_at; Start 125; Stop 149
gagatgctattggaggagttcacct

SEQ ID NO: 198735 - DNA, 25 bp, Artificial
  probe
  misc_feature (1)..(25): SEQ ID NO: 5546; WAN024FAV_at; Start 57; Stop 81
gattacctattctgatagccttgga

SEQ ID NO: 198736 - DNA, 25 bp, Artificial
  probe
  misc_feature (1)..(25): SEQ ID NO: 5546; WAN024FAV_at; Start 438; Stop 462
tcgtgcaccaaagcaagagattgtg

SEQ ID NO: 198737 - DNA, 25 bp, Artificial
  probe
  misc_feature (1)..(25): SEQ ID NO: 5546; WAN024FAV_at; Start 1141; Stop 1165
tactatgtgggtctattagcaggca

SEQ ID NO: 198738 - DNA, 25 bp, Artificial
  probe
  misc_feature (1)..(25): SEQ ID NO: 5546; WAN024FAV_at; Start 885; Stop 909
tacgacgctagatacccatgatggg

SEQ ID NO: 198739 - DNA, 25 bp, Artificial
  probe
  misc_feature (1)..(25): SEQ ID NO: 5546; WAN024FAV_at; Start 422; Stop 446
tttacaagcgtaaggatcgtgcacc

SEQ ID NO: 198740 - DNA, 25 bp, Artificial
  probe
  misc_feature (1)..(25): SEQ ID NO: 5546; WAN024FAV_at; Start 322; Stop 346
tatcaagaaaaacatgaagccagtg

SEQ ID NO: 198741 - DNA, 25 bp, Artificial
  probe
  misc_feature (1)..(25): SEQ ID NO: 5546; WAN024FAV_at; Start 851; Stop 875
ctaagtggttaaagatgagcccgat

SEQ ID NO: 198742 - DNA, 25 bp, Artificial
  probe
  misc_feature (1)..(25): SEQ ID NO: 5546; WAN024FAV_at; Start 789; Stop 813
tgattttgctcttccaatggtgaca

SEQ ID NO: 198743 - DNA, 25 bp, Artificial
  probe
  misc_feature (1)..(25): SEQ ID NO: 5546; WAN024FAV_at; Start 866; Stop 890
tgagcccgatgaagcaatttacgac

SEQ ID NO: 198744 - DNA, 25 bp, Artificial
  probe
  misc_feature (1)..(25): SEQ ID NO: 5546; WAN024FAV_at; Start 926; Stop 950
tcaaggatatcctgaccgatgagga

SEQ ID NO: 198745 - DNA, 25 bp, Artificial
  probe
  misc_feature (1)..(25): SEQ ID NO: 5546; WAN024FAV_at; Start 193; Stop 217
gttgactacgacgaagtggactcag

SEQ ID NO: 198746 - DNA, 25 bp, Artificial
  probe
  misc_feature (1)..(25): SEQ ID NO: 5546; WAN024FAV_at; Start 1342; Stop 1366
gagacaccaacagctcacagcattg

SEQ ID NO: 198747 - DNA, 25 bp, Artificial
  probe
  misc_feature (1)..(25): SEQ ID NO: 5546; WAN024FAV_at; Start 497; Stop 521
cctttggtgaggagcagattgatct

SEQ ID NO: 198748 - DNA, 25 bp, Artificial
  probe
  misc_feature (1)..(25): SEQ ID NO: 5546; WAN024FAV_at; Start 981; Stop 1005
ggttggagccaatgtcaaacgtaag

SEQ ID NO: 198749 - DNA, 25 bp, Artificial
  probe
  misc_feature (1)..(25): SEQ ID NO: 5546; WAN024FAV_at; Start 481; Stop 505
gaacatttgtggaatacctttggtg

SEQ ID NO: 198750 - DNA, 25 bp, Artificial
  probe
  misc_feature (1)..(25): SEQ ID NO: 5546; WAN024FAV_at; Start 1241; Stop 1265
tagcaaaagaagtgcaacgacctgt

SEQ ID NO: 198751 - DNA, 25 bp, Artificial
  probe
  misc_feature (1)..(25): SEQ ID NO: 5546; WAN024FAV_at; Start 182; Stop 206
gatttgcgccagttgactacgacga

SEQ ID NO: 198752 - DNA, 25 bp, Artificial
  probe
  misc_feature (1)..(25): SEQ ID NO: 5546; WAN024FAV_at; Start 1052; Stop 1076
caacctactattcagcgcttggaga

SEQ ID NO: 198753 - DNA, 25 bp, Artificial
  probe
  misc_feature (1)..(25): SEQ ID NO: 5546; WAN024FAV_at; Start 1417; Stop 1441
gatttgcaaaatcagacttatcggg

SEQ ID NO: 198754 - DNA, 25 bp, Artificial
  probe
  misc_feature (1)..(25): SEQ ID NO: 5546; WAN024FAV_at; Start 941; Stop 965
ccgatgaggagattgactatgcttc

SEQ ID NO: 198755 - DNA, 25 bp, Artificial
  probe
  misc_feature (1)..(25): SEQ ID NO: 5546; WAN024FAV_at; Start 966; Stop 990
aaatgaactctataaggttggagcc

SEQ ID NO: 198756 - DNA, 25 bp, Artificial
  probe
  misc_feature (1)..(25): SEQ ID NO: 5546; WAN024FAV_at; Start 1384; Stop 1408
aaagataagtccgtaacagcagtag

SEQ ID NO: 198757 - DNA, 25 bp, Artificial
  probe
  misc_feature (1)..(25): SEQ ID NO: 5546; WAN024FAV_at; Start 558; Stop 582
taagaccattcagcacttggcaagt

SEQ ID NO: 198758 - DNA, 25 bp, Artificial
  probe
  misc_feature (1)..(25): SEQ ID NO: 5546; WAN024FAV_at; Start 1256; Stop 1280
aacgacctgttgtgaaggcccttct

SEQ ID NO: 198759 - DNA, 25 bp, Artificial
  probe
  misc_feature (1)..(25): SEQ ID NO: 5546; WAN024FAV_at; Start 1216; Stop 1240
cgtcattactatagcaacgaggaaa

SEQ ID NO: 198760 - DNA, 25 bp, Artificial
  probe
  misc_feature (1)..(25): SEQ ID NO: 5546; WAN024FAV_at; Start 1009; Stop 1033
tctagtgccgagtataacaacttag

SEQ ID NO: 198761 - DNA, 25 bp, Artificial
  probe
  misc_feature (1)..(25): SEQ ID NO: 5546; WAN024FAV_at; Start 388; Stop 412
gaaaaccgtccgacacagtctgatg

SEQ ID NO: 198762 - DNA, 25 bp, Artificial
  probe
  misc_feature (1)..(25): SEQ ID NO: 5546; WAN024FAV_at; Start 1112; Stop 1136
aagcttttgccccaggtattcctca

SEQ ID NO: 198763 - DNA, 25 bp, Artificial
  probe
  misc_feature (1)..(25): SEQ ID NO: 5546; WAN024FAV_at; Start 996; Stop 1020
caaacgtaagtactctagtgccgag

SEQ ID NO: 198764 - DNA, 25 bp, Artificial
  probe
  misc_feature (1)..(25): SEQ ID NO: 4909; WAN024FAW_at; Start 1062; Stop 1086
ccttacagtggttgctgtgcacgga

SEQ ID NO: 198765 - DNA, 25 bp, Artificial
  probe
  misc_feature (1)..(25): SEQ ID NO: 4909; WAN024FAW_at; Start 768; Stop 792
gggtactttagactcttctatggaa

SEQ ID NO: 198766 - DNA, 25 bp, Artificial
  probe
  misc_feature (1)..(25): SEQ ID NO: 4909; WAN024FAW_at; Start 609; Stop 633
gaactttactcaaaatcgaactgcc

SEQ ID NO: 198767 - DNA, 25 bp, Artificial
  probe
  misc_feature (1)..(25): SEQ ID NO: 4909; WAN024FAW_at; Start 927; Stop 951
tattgatacgattctgagttacgga

SEQ ID NO: 198768 - DNA, 25 bp, Artificial
  probe
  misc_feature (1)..(25): SEQ ID NO: 4909; WAN024FAW_at; Start 801; Stop 825
ttctatctgggatgctgggatggcc

SEQ ID NO: 198769 - DNA, 25 bp, Artificial
  probe
  misc_feature (1)..(25): SEQ ID NO: 4909; WAN024FAW_at; Start 626; Stop 650
gaactgcctttcctgctattatcgc

SEQ ID NO: 198770 - DNA, 25 bp, Artificial
  probe
  misc_feature (1)..(25): SEQ ID NO: 4909; WAN024FAW_at; Start 436; Stop 460
aatatgcaggtgtggcatcagaacc

SEQ ID NO: 198771 - DNA, 25 bp, Artificial
  probe
  misc_feature (1)..(25): SEQ ID NO: 4909; WAN024FAW_at; Start 982; Stop 1006
tctgttgctcctgttcgcttgatga

SEQ ID NO: 198772 - DNA, 25 bp, Artificial
  probe
  misc_feature (1)..(25): SEQ ID NO: 4909; WAN024FAW_at; Start 294; Stop 318
gcactatcagtcgattttatcccat

SEQ ID NO: 198773 - DNA, 25 bp, Artificial
  probe
  misc_feature (1)..(25): SEQ ID NO: 4909; WAN024FAW_at; Start 421; Stop 445
gcttttctttcacccaatatgcagg

SEQ ID NO: 198774 - DNA, 25 bp, Artificial
  probe
  misc_feature (1)..(25): SEQ ID NO: 4909; WAN024FAW_at; Start 1159; Stop 1183
gagcatcgaatgttggtatcggaca

SEQ ID NO: 198775 - DNA, 25 bp, Artificial
  probe
  misc_feature (1)..(25): SEQ ID NO: 4909; WAN024FAW_at; Start 897; Stop 921
tccttatcatgaacatgcccacagt

SEQ ID NO: 198776 - DNA, 25 bp, Artificial
  probe
  misc_feature (1)..(25): SEQ ID NO: 4909; WAN024FAW_at; Start 1097; Stop 1121
tggctctcttctggattcagtcagg

SEQ ID NO: 198777 - DNA, 25 bp, Artificial
  probe
  misc_feature (1)..(25): SEQ ID NO: 4909; WAN024FAW_at; Start 526; Stop 550
gctttctatctgtttacaacgacca

SEQ ID NO: 198778 - DNA, 25 bp, Artificial
  probe
  misc_feature (1)..(25): SEQ ID NO: 4909; WAN024FAW_at; Start 237; Stop 261
aaattggatgggtcttgtggcttca

SEQ ID NO: 198779 - DNA, 25 bp, Artificial
  probe
  misc_feature (1)..(25): SEQ ID NO: 4909; WAN024FAW_at; Start 815; Stop 839
ctgggatggccttgtttaagcaaaa

SEQ ID NO: 198780 - DNA, 25 bp, Artificial
  probe
  misc_feature (1)..(25): SEQ ID NO: 4909; WAN024FAW_at; Start 1142; Stop 1166
tgtgcagtattccattggagcatcg

SEQ ID NO: 198781 - DNA, 25 bp, Artificial
  probe
  misc_feature (1)..(25): SEQ ID NO: 4909; WAN024FAW_at; Start 347; Stop 371
tcttgtttggtagtgtcttgtcagc

SEQ ID NO: 198782 - DNA, 25 bp, Artificial
  probe
  misc_feature (1)..(25): SEQ ID NO: 4909; WAN024FAW_at; Start 849; Stop 873
gggtgaagggccattgacctatatg

SEQ ID NO: 198783 - DNA, 25 bp, Artificial
  probe
  misc_feature (1)..(25): SEQ ID NO: 4909; WAN024FAW_at; Start 1173; Stop 1197
ggtatcggacatgacggattaacta

SEQ ID NO: 198784 - DNA, 25 bp, Artificial
  probe
  misc_feature (1)..(25): SEQ ID NO: 4909; WAN024FAW_at; Start 143; Stop 167
caggagacatgaaaagtattcttca

SEQ ID NO: 198785 - DNA, 25 bp, Artificial
  probe
  misc_feature (1)..(25): SEQ ID NO: 4909; WAN024FAW_at; Start 716; Stop 740
tcttcgcgattggtttgagtttcct

SEQ ID NO: 198786 - DNA, 25 bp, Artificial
  probe
  misc_feature (1)..(25): SEQ ID NO: 4909; WAN024FAW_at; Start 912; Stop 936
tgcccacagtctttatattgatacg

SEQ ID NO: 198787 - DNA, 25 bp, Artificial
  probe
  misc_feature (1)..(25): SEQ ID NO: 4909; WAN024FAW_at; Start 126; Stop 150
tatcagtttgatttttacaggagac

SEQ ID NO: 198788 - DNA, 25 bp, Artificial
  probe
  misc_feature (1)..(25): SEQ ID NO: 4909; WAN024FAW_at; Start 564; Stop 588
gaaagtattctgtgtgattgcaggc

SEQ ID NO: 198789 - DNA, 25 bp, Artificial
  probe
  misc_feature (1)..(25): SEQ ID NO: 4909; WAN024FAW_at; Start 786; Stop 810
tatggaagaacgcatttctatctgg

SEQ ID NO: 198790 - DNA, 25 bp, Artificial
  probe
  misc_feature (1)..(25): SEQ ID NO: 4909; WAN024FAW_at; Start 645; Stop 669
tatcgctggagcaattatctatctc

SEQ ID NO: 198791 - DNA, 25 bp, Artificial
  probe
  misc_feature (1)..(25): SEQ ID NO: 4909; WAN024FAW_at; Start 880; Stop 904
tatcctcggatacatgctccttatc

SEQ ID NO: 198792 - DNA, 25 bp, Artificial
  probe
  misc_feature (1)..(25): SEQ ID NO: 4909; WAN024FAW_at; Start 1079; Stop 1103
tgcacggaatttttgacttggctct

SEQ ID NO: 198793 - DNA, 25 bp, Artificial
  probe
  misc_feature (1)..(25): SEQ ID NO: 4909; WAN024FAW_at; Start 252; Stop 276
tgtggcttcagtaggaatgtttcta

SEQ ID NO: 198794 - DNA, 25 bp, Artificial
  probe
  misc_feature (1)..(25): SEQ ID NO: 4909; WAN024FAW_at; Start 453; Stop 477
tcagaaccgggcagaagtgaccttc

SEQ ID NO: 198795 - DNA, 25 bp, Artificial
  probe
  misc_feature (1)..(25): SEQ ID NO: 4909; WAN024FAW_at; Start 741; Stop 765
cttttctagtgatttgggagttcga

SEQ ID NO: 198796 - DNA, 25 bp, Artificial
  probe
  misc_feature (1)..(25): SEQ ID NO: 4909; WAN024FAW_at; Start 997; Stop 1021
cgcttgatgatggatatgagtcagg

SEQ ID NO: 198797 - DNA, 25 bp, Artificial
  probe
  misc_feature (1)..(25): SEQ ID NO: 4909; WAN024FAW_at; Start 225; Stop 249
cattcttgcacaaaattggatgggt

SEQ ID NO: 198798 - DNA, 25 bp, Artificial
  probe
  misc_feature (1)..(25): SEQ ID NO: 1813; WAN024FAX_at; Start 31; Stop 55
gactacagtgaaaataggaaatttg

SEQ ID NO: 198799 - DNA, 25 bp, Artificial
  probe
  misc_feature (1)..(25): SEQ ID NO: 1813; WAN024FAX_at; Start 70; Stop 94
gagtttaggaagacatacagtaaaa

SEQ ID NO: 198800 - DNA, 25 bp, Artificial
  probe
  misc_feature (1)..(25): SEQ ID NO: 1813; WAN024FAX_at; Start 16; Stop 40
gttcgaagtgtcaaagactacagtg

SEQ ID NO: 198801 - DNA, 25 bp, Artificial
  probe
  misc_feature (1)..(25): SEQ ID NO: 1813; WAN024FAX_at; Start 102; Stop 126
cggacggaacaatgtgattttggaa

SEQ ID NO: 198802 - DNA, 25 bp, Artificial
  probe
  misc_feature (1)..(25): SEQ ID NO: 1813; WAN024FAX_at; Start 18; Stop 42
tcgaagtgtcaaagactacagtgaa

SEQ ID NO: 198803 - DNA, 25 bp, Artificial
  probe
  misc_feature (1)..(25): SEQ ID NO: 1813; WAN024FAX_at; Start 12; Stop 36
tgtcgttcgaagtgtcaaagactac

SEQ ID NO: 198804 - DNA, 25 bp, Artificial
  probe
  misc_feature (1)..(25): SEQ ID NO: 1813; WAN024FAX_at; Start 104; Stop 128
gacggaacaatgtgattttggaatt

SEQ ID NO: 198805 - DNA, 25 bp, Artificial
  probe
  misc_feature (1)..(25): SEQ ID NO: 1813; WAN024FAX_at; Start 45; Stop 69
taggaaatttgacgcagaaactttg

SEQ ID NO: 198806 - DNA, 25 bp, Artificial
  probe
  misc_feature (1)..(25): SEQ ID NO: 1813; WAN024FAX_at; Start 93; Stop 117
aatgaaatacggacggaacaatgtg

SEQ ID NO: 198807 - DNA, 25 bp, Artificial
  probe
  misc_feature (1)..(25): SEQ ID NO: 1813; WAN024FAX_at; Start 75; Stop 99
taggaagacatacagtaaaatgaaa

SEQ ID NO: 198808 - DNA, 25 bp, Artificial
  probe
  misc_feature (1)..(25): SEQ ID NO: 1813; WAN024FAX_at; Start 85; Stop 109
tacagtaaaatgaaatacggacgga

SEQ ID NO: 198809 - DNA, 25 bp, Artificial
  probe
  misc_feature (1)..(25): SEQ ID NO: 1813; WAN024FAX_at; Start 144; Stop 168
caatattgtagaagtatcattctag

SEQ ID NO: 198810 - DNA, 25 bp, Artificial
  probe
  misc_feature (1)..(25): SEQ ID NO: 1813; WAN024FAX_at; Start 66; Stop 90
tttggagtttaggaagacatacagt

SEQ ID NO: 198811 - DNA, 25 bp, Artificial
  probe
  misc_feature (1)..(25): SEQ ID NO: 1813; WAN024FAX_at; Start 68; Stop 92
tggagtttaggaagacatacagtaa

SEQ ID NO: 198812 - DNA, 25 bp, Artificial
  probe
  misc_feature (1)..(25): SEQ ID NO: 1813; WAN024FAX_at; Start 64; Stop 88
actttggagtttaggaagacataca

SEQ ID NO: 198813 - DNA, 25 bp, Artificial
  probe
  misc_feature (1)..(25): SEQ ID NO: 1813; WAN024FAX_at; Start 81; Stop 105
gacatacagtaaaatgaaatacgga

SEQ ID NO: 198814 - DNA, 25 bp, Artificial
  probe
  misc_feature (1)..(25): SEQ ID NO: 1813; WAN024FAX_at; Start 96; Stop 120
gaaatacggacggaacaatgtgatt

SEQ ID NO: 198815 - DNA, 25 bp, Artificial
  probe
  misc_feature (1)..(25): SEQ ID NO: 1813; WAN024FAX_at; Start 57; Stop 81
cgcagaaactttggagtttaggaag

SEQ ID NO: 198816 - DNA, 25 bp, Artificial
  probe
  misc_feature (1)..(25): SEQ ID NO: 1813; WAN024FAX_at; Start 27; Stop 51
caaagactacagtgaaaataggaaa

SEQ ID NO: 198817 - DNA, 25 bp, Artificial
  probe
  misc_feature (1)..(25): SEQ ID NO: 1813; WAN024FAX_at; Start 100; Stop 124
tacggacggaacaatgtgattttgg

SEQ ID NO: 198818 - DNA, 25 bp, Artificial
  probe
  misc_feature (1)..(25): SEQ ID NO: 1813; WAN024FAX_at; Start 50; Stop 74
aatttgacgcagaaactttggagtt

SEQ ID NO: 198819 - DNA, 25 bp, Artificial
  probe
  misc_feature (1)..(25): SEQ ID NO: 1813; WAN024FAX_at; Start 48; Stop 72
gaaatttgacgcagaaactttggag

SEQ ID NO: 198820 - DNA, 25 bp, Artificial
  probe
  misc_feature (1)..(25): SEQ ID NO: 1813; WAN024FAX_at; Start 20; Stop 44
gaagtgtcaaagactacagtgaaaa

SEQ ID NO: 198821 - DNA, 25 bp, Artificial
  probe
  misc_feature (1)..(25): SEQ ID NO: 1813; WAN024FAX_at; Start 24; Stop 48
tgtcaaagactacagtgaaaatagg

SEQ ID NO: 198822 - DNA, 25 bp, Artificial
  probe
  misc_feature (1)..(25): SEQ ID NO: 1813; WAN024FAX_at; Start 7; Stop 31
caaattgtcgttcgaagtgtcaaag

SEQ ID NO: 198823 - DNA, 25 bp, Artificial
  probe
  misc_feature (1)..(25): SEQ ID NO: 1813; WAN024FAX_at; Start 83; Stop 107
catacagtaaaatgaaatacggacg

SEQ ID NO: 198824 - DNA, 25 bp, Artificial
  probe
  misc_feature (1)..(25): SEQ ID NO: 1813; WAN024FAX_at; Start 54; Stop 78
tgacgcagaaactttggagtttagg

SEQ ID NO: 198825 - DNA, 25 bp, Artificial
  probe
  misc_feature (1)..(25): SEQ ID NO: 1813; WAN024FAX_at; Start 42; Stop 66
aaataggaaatttgacgcagaaact

SEQ ID NO: 198826 - DNA, 25 bp, Artificial
  probe
  misc_feature (1)..(25): SEQ ID NO: 1813; WAN024FAX_at; Start 36; Stop 60
cagtgaaaataggaaatttgacgca

SEQ ID NO: 198827 - DNA, 25 bp, Artificial
  probe
  misc_feature (1)..(25): SEQ ID NO: 1813; WAN024FAX_at; Start 14; Stop 38
tcgttcgaagtgtcaaagactacag

SEQ ID NO: 198828 - DNA, 25 bp, Artificial
  probe
  misc_feature (1)..(25): SEQ ID NO: 1813; WAN024FAX_at; Start 1; Stop 25
atgattcaaattgtcgttcgaagtg

SEQ ID NO: 198829 - DNA, 25 bp, Artificial
  probe
  misc_feature (1)..(25): SEQ ID NO: 1813; WAN024FAX_at; Start 141; Stop 165
taacaatattgtagaagtatcattc

SEQ ID NO: 198830 - DNA, 25 bp, Artificial
  probe
  misc_feature (1)..(25): SEQ ID NO: 1813; WAN024FAX_at; Start 3; Stop 27
gattcaaattgtcgttcgaagtgtc

SEQ ID NO: 198831 - DNA, 25 bp, Artificial
  probe
  misc_feature (1)..(25): SEQ ID NO: 1813; WAN024FAX_at; Start 9; Stop 33
aattgtcgttcgaagtgtcaaagac

SEQ ID NO: 198832 - DNA, 25 bp, Artificial
  probe
  misc_feature (1)..(25): SEQ ID NO: 5248; WAN024FAY_at; Start 146; Stop 170
tagttatcacgtttatcagccgttg

SEQ ID NO: 198833 - DNA, 25 bp, Artificial
  probe
  misc_feature (1)..(25): SEQ ID NO: 5248; WAN024FAY_at; Start 67; Stop 91
catgctacttgccttttcttgcaac

SEQ ID NO: 198834 - DNA, 25 bp, Artificial
  probe
  misc_feature (1)..(25): SEQ ID NO: 5248; WAN024FAY_at; Start 59; Stop 83
gaagaatccatgctacttgcctttt

SEQ ID NO: 198835 - DNA, 25 bp, Artificial
  probe
  misc_feature (1)..(25): SEQ ID NO: 5248; WAN024FAY_at; Start 115; Stop 139
gtagcccatacgctcaaacacagta

SEQ ID NO: 198836 - DNA, 25 bp, Artificial
  probe
  misc_feature (1)..(25): SEQ ID NO: 5248; WAN024FAY_at; Start 214; Stop 238
tcgaggaaccaaggtatagataatc

SEQ ID NO: 198837 - DNA, 25 bp, Artificial
  probe
  misc_feature (1)..(25): SEQ ID NO: 5248; WAN024FAY_at; Start 77; Stop 101
gccttttcttgcaactctttagtat

SEQ ID NO: 198838 - DNA, 25 bp, Artificial
  probe
  misc_feature (1)..(25): SEQ ID NO: 5248; WAN024FAY_at; Start 152; Stop 176
tcacgtttatcagccgttgtcgcaa

SEQ ID NO: 198839 - DNA, 25 bp, Artificial
  probe
  misc_feature (1)..(25): SEQ ID NO: 5248; WAN024FAY_at; Start 208; Stop 232
caattttcgaggaaccaaggtatag

SEQ ID NO: 198840 - DNA, 25 bp, Artificial
  probe
  misc_feature (1)..(25): SEQ ID NO: 5248; WAN024FAY_at; Start 237; Stop 261
tcgtgtaggtcaaagtcgttactaa

SEQ ID NO: 198841 - DNA, 25 bp, Artificial
  probe
  misc_feature (1)..(25): SEQ ID NO: 5248; WAN024FAY_at; Start 83; Stop 107
tcttgcaactctttagtatcgtaat

SEQ ID NO: 198842 - DNA, 25 bp, Artificial
  probe
  misc_feature (1)..(25): SEQ ID NO: 5248; WAN024FAY_at; Start 125; Stop 149
cgctcaaacacagtattttcatagt

SEQ ID NO: 198843 - DNA, 25 bp, Artificial
  probe
  misc_feature (1)..(25): SEQ ID NO: 5248; WAN024FAY_at; Start 17; Stop 41
tcataaatagctttattggtcgcat

SEQ ID NO: 198844 - DNA, 25 bp, Artificial
  probe
  misc_feature (1)..(25): SEQ ID NO: 5248; WAN024FAY_at; Start 132; Stop 156
acacagtattttcatagttatcacg

SEQ ID NO: 198845 - DNA, 25 bp, Artificial
  probe
  misc_feature (1)..(25): SEQ ID NO: 5248; WAN024FAY_at; Start 218; Stop 242
ggaaccaaggtatagataatcgtgt

SEQ ID NO: 198846 - DNA, 25 bp, Artificial
  probe
  misc_feature (1)..(25): SEQ ID NO: 5248; WAN024FAY_at; Start 37; Stop 61
cgcatttgcttctactgttacagaa

SEQ ID NO: 198847 - DNA, 25 bp, Artificial
  probe
  misc_feature (1)..(25): SEQ ID NO: 5248; WAN024FAY_at; Start 3; Stop 27
gattgatgtacttttcataaatagc

SEQ ID NO: 198848 - DNA, 25 bp, Artificial
  probe
  misc_feature (1)..(25): SEQ ID NO: 5248; WAN024FAY_at; Start 143; Stop 167
tcatagttatcacgtttatcagccg

SEQ ID NO: 198849 - DNA, 25 bp, Artificial
  probe
  misc_feature (1)..(25): SEQ ID NO: 5248; WAN024FAY_at; Start 223; Stop 247
caaggtatagataatcgtgtaggtc

SEQ ID NO: 198850 - DNA, 25 bp, Artificial
  probe
  misc_feature (1)..(25): SEQ ID NO: 5248; WAN024FAY_at; Start 230; Stop 254
tagataatcgtgtaggtcaaagtcg

SEQ ID NO: 198851 - DNA, 25 bp, Artificial
  probe
  misc_feature (1)..(25): SEQ ID NO: 5248; WAN024FAY_at; Start 98; Stop 122
gtatcgtaatactcaatgtagccca

SEQ ID NO: 198852 - DNA, 25 bp, Artificial
  probe
  misc_feature (1)..(25): SEQ ID NO: 5248; WAN024FAY_at; Start 172; Stop 196
cgcaattttattatagttaggatcc

SEQ ID NO: 198853 - DNA, 25 bp, Artificial
  probe
  misc_feature (1)..(25): SEQ ID NO: 5248; WAN024FAY_at; Start 104; Stop 128
taatactcaatgtagcccatacgct

SEQ ID NO: 198854 - DNA, 25 bp, Artificial
  probe
  misc_feature (1)..(25): SEQ ID NO: 5248; WAN024FAY_at; Start 21; Stop 45
aaatagctttattggtcgcatttgc

SEQ ID NO: 198855 - DNA, 25 bp, Artificial
  probe
  misc_feature (1)..(25): SEQ ID NO: 5248; WAN024FAY_at; Start 118; Stop 142
gcccatacgctcaaacacagtattt

SEQ ID NO: 198856 - DNA, 25 bp, Artificial
  probe
  misc_feature (1)..(25): SEQ ID NO: 5248; WAN024FAY_at; Start 110; Stop 134
tcaatgtagcccatacgctcaaaca

SEQ ID NO: 198857 - DNA, 25 bp, Artificial
  probe
  misc_feature (1)..(25): SEQ ID NO: 5248; WAN024FAY_at; Start 47; Stop 71
tctactgttacagaagaatccatgc

SEQ ID NO: 198858 - DNA, 25 bp, Artificial
  probe
  misc_feature (1)..(25): SEQ ID NO: 5248; WAN024FAY_at; Start 192; Stop 216
gatcctgcttgaaaatcaattttcg

SEQ ID NO: 198859 - DNA, 25 bp, Artificial
  probe
  misc_feature (1)..(25): SEQ ID NO: 5248; WAN024FAY_at; Start 55; Stop 79
tacagaagaatccatgctacttgcc

SEQ ID NO: 198860 - DNA, 25 bp, Artificial
  probe
  misc_feature (1)..(25): SEQ ID NO: 5248; WAN024FAY_at; Start 234; Stop 258
taatcgtgtaggtcaaagtcgttac

SEQ ID NO: 198861 - DNA, 25 bp, Artificial
  probe
  misc_feature (1)..(25): SEQ ID NO: 5248; WAN024FAY_at; Start 34; Stop 58
ggtcgcatttgcttctactgttaca

SEQ ID NO: 198862 - DNA, 25 bp, Artificial
  probe
  misc_feature (1)..(25): SEQ ID NO: 5248; WAN024FAY_at; Start 201; Stop 225
tgaaaatcaattttcgaggaaccaa

SEQ ID NO: 198863 - DNA, 25 bp, Artificial
  probe
  misc_feature (1)..(25): SEQ ID NO: 5248; WAN024FAY_at; Start 162; Stop 186
cagccgttgtcgcaattttattata

SEQ ID NO: 198864 - DNA, 25 bp, Artificial
  probe
  misc_feature (1)..(25): SEQ ID NO: 5248; WAN024FAY_at; Start 185; Stop 209
tagttaggatcctgcttgaaaatca

SEQ ID NO: 198865 - DNA, 25 bp, Artificial
  probe
  misc_feature (1)..(25): SEQ ID NO: 5248; WAN024FAY_at; Start 155; Stop 179
cgtttatcagccgttgtcgcaattt

SEQ ID NO: 198866 - DNA, 25 bp, Artificial
  probe
  misc_feature (1)..(25): SEQ ID NO: 5353; WAN024FAZ_at; Start 204; Stop 228
gataaccccaataatggcagcagga

SEQ ID NO: 198867 - DNA, 25 bp, Artificial
  probe
  misc_feature (1)..(25): SEQ ID NO: 5353; WAN024FAZ_at; Start 83; Stop 107
tacatgtaaagatgaagacaagacc

SEQ ID NO: 198868 - DNA, 25 bp, Artificial
  probe
  misc_feature (1)..(25): SEQ ID NO: 5353; WAN024FAZ_at; Start 292; Stop 316
gacaaaccttttgcacgagcgaaac

SEQ ID NO: 198869 - DNA, 25 bp, Artificial
  probe
  misc_feature (1)..(25): SEQ ID NO: 5353; WAN024FAZ_at; Start 11; Stop 35
tctcagtcaatttaatacgtgggtc

SEQ ID NO: 198870 - DNA, 25 bp, Artificial
  probe
  misc_feature (1)..(25): SEQ ID NO: 5353; WAN024FAZ_at; Start 135; Stop 159
tacagagtcaatcaacattttaccc

SEQ ID NO: 198871 - DNA, 25 bp, Artificial
  probe
  misc_feature (1)..(25): SEQ ID NO: 5353; WAN024FAZ_at; Start 144; Stop 168
aatcaacattttacccatacctggg

SEQ ID NO: 198872 - DNA, 25 bp, Artificial
  probe
  misc_feature (1)..(25): SEQ ID NO: 5353; WAN024FAZ_at; Start 297; Stop 321
accttttgcacgagcgaaacgaaca

SEQ ID NO: 198873 - DNA, 25 bp, Artificial
  probe
  misc_feature (1)..(25): SEQ ID NO: 5353; WAN024FAZ_at; Start 127; Stop 151
gatgcttttacagagtcaatcaaca

SEQ ID NO: 198874 - DNA, 25 bp, Artificial
  probe
  misc_feature (1)..(25): SEQ ID NO: 5353; WAN024FAZ_at; Start 286; Stop 310
ttttcagacaaaccttttgcacgag

SEQ ID NO: 198875 - DNA, 25 bp, Artificial
  probe
  misc_feature (1)..(25): SEQ ID NO: 5353; WAN024FAZ_at; Start 240; Stop 264
cagcggaaccatggcatttttaaag

SEQ ID NO: 198876 - DNA, 25 bp, Artificial
  probe
  misc_feature (1)..(25): SEQ ID NO: 5353; WAN024FAZ_at; Start 89; Stop 113
taaagatgaagacaagaccaacgac

SEQ ID NO: 198877 - DNA, 25 bp, Artificial
  probe
  misc_feature (1)..(25): SEQ ID NO: 5353; WAN024FAZ_at; Start 58; Stop 82
cccaaaagacgtgagaagatagaaa

SEQ ID NO: 198878 - DNA, 25 bp, Artificial
  probe
  misc_feature (1)..(25): SEQ ID NO: 5353; WAN024FAZ_at; Start 26; Stop 50
tacgtgggtcaataatagtcatcca

SEQ ID NO: 198879 - DNA, 25 bp, Artificial
  probe
  misc_feature (1)..(25): SEQ ID NO: 5353; WAN024FAZ_at; Start 306; Stop 330
acgagcgaaacgaacaaagtcttga

SEQ ID NO: 198880 - DNA, 25 bp, Artificial
  probe
  misc_feature (1)..(25): SEQ ID NO: 5353; WAN024FAZ_at; Start 184; Stop 208
tcagtaagggttgcaccaccgataa

SEQ ID NO: 198881 - DNA, 25 bp, Artificial
  probe
  misc_feature (1)..(25): SEQ ID NO: 5353; WAN024FAZ_at; Start 223; Stop 247
gcaggaattcctgaaaccagcggaa

SEQ ID NO: 198882 - DNA, 25 bp, Artificial
  probe
  misc_feature (1)..(25): SEQ ID NO: 5353; WAN024FAZ_at; Start 245; Stop 269
gaaccatggcatttttaaagatgtg

SEQ ID NO: 198883 - DNA, 25 bp, Artificial
  probe
  misc_feature (1)..(25): SEQ ID NO: 5353; WAN024FAZ_at; Start 104; Stop 128
gaccaacgaccatagagttattaga

SEQ ID NO: 198884 - DNA, 25 bp, Artificial
  probe
  misc_feature (1)..(25): SEQ ID NO: 5353; WAN024FAZ_at; Start 177; Stop 201
gactgtttcagtaagggttgcacca

SEQ ID NO: 198885 - DNA, 25 bp, Artificial
  probe
  misc_feature (1)..(25): SEQ ID NO: 5353; WAN024FAZ_at; Start 96; Stop 120
gaagacaagaccaacgaccatagag

SEQ ID NO: 198886 - DNA, 25 bp, Artificial
  probe
  misc_feature (1)..(25): SEQ ID NO: 5353; WAN024FAZ_at; Start 235; Stop 259
gaaaccagcggaaccatggcatttt

SEQ ID NO: 198887 - DNA, 25 bp, Artificial
  probe
  misc_feature (1)..(25): SEQ ID NO: 5353; WAN024FAZ_at; Start 150; Stop 174
cattttacccatacctgggaaggcg

SEQ ID NO: 198888 - DNA, 25 bp, Artificial
  probe
  misc_feature (1)..(25): SEQ ID NO: 5353; WAN024FAZ_at; Start 162; Stop 186
acctgggaaggcgaagactgtttca

SEQ ID NO: 198889 - DNA, 25 bp, Artificial
  probe
  misc_feature (1)..(25): SEQ ID NO: 5353; WAN024FAZ_at; Start 260; Stop 284
taaagatgtgtttgtttgaaatttc

SEQ ID NO: 198890 - DNA, 25 bp, Artificial
  probe
  misc_feature (1)..(25): SEQ ID NO: 5353; WAN024FAZ_at; Start 158; Stop 182
ccatacctgggaaggcgaagactgt

SEQ ID NO: 198891 - DNA, 25 bp, Artificial
  probe
  misc_feature (1)..(25): SEQ ID NO: 5353; WAN024FAZ_at; Start 212; Stop 236
caataatggcagcaggaattcctga

SEQ ID NO: 198892 - DNA, 25 bp, Artificial
  probe
  misc_feature (1)..(25): SEQ ID NO: 5353; WAN024FAZ_at; Start 67; Stop 91
cgtgagaagatagaaatacatgtaa

SEQ ID NO: 198893 - DNA, 25 bp, Artificial
  probe
  misc_feature (1)..(25): SEQ ID NO: 5353; WAN024FAZ_at; Start 1; Stop 25
ttgcctcctttctcagtcaatttaa

SEQ ID NO: 198894 - DNA, 25 bp, Artificial
  probe
  misc_feature (1)..(25): SEQ ID NO: 5353; WAN024FAZ_at; Start 303; Stop 327
tgcacgagcgaaacgaacaaagtct

SEQ ID NO: 198895 - DNA, 25 bp, Artificial
  probe
  misc_feature (1)..(25): SEQ ID NO: 5353; WAN024FAZ_at; Start 195; Stop 219
tgcaccaccgataaccccaataatg

SEQ ID NO: 198896 - DNA, 25 bp, Artificial
  probe
  misc_feature (1)..(25): SEQ ID NO: 5353; WAN024FAZ_at; Start 48; Stop 72
ccaaatatctcccaaaagacgtgag

SEQ ID NO: 198897 - DNA, 25 bp, Artificial
  probe
  misc_feature (1)..(25): SEQ ID NO: 5353; WAN024FAZ_at; Start 230; Stop 254
ttcctgaaaccagcggaaccatggc

SEQ ID NO: 198898 - DNA, 25 bp, Artificial
  probe
  misc_feature (1)..(25): SEQ ID NO: 5353; WAN024FAZ_at; Start 41; Stop 65
tagtcatccaaatatctcccaaaag

SEQ ID NO: 198899 - DNA, 25 bp, Artificial
  probe
  misc_feature (1)..(25): SEQ ID NO: 5353; WAN024FAZ_at; Start 117; Stop 141
agagttattagatgcttttacagag

SEQ ID NO: 198900 - DNA, 25 bp, Artificial
  probe
  misc_feature (1)..(25): SEQ ID NO: 653; WAN024FB2_at; Start 1094; Stop 1118
tcatccttggtttgttgggtgctcc

SEQ ID NO: 198901 - DNA, 25 bp, Artificial
  probe
  misc_feature (1)..(25): SEQ ID NO: 653; WAN024FB2_at; Start 924; Stop 948
caagaacacttggattgatagcctc

SEQ ID NO: 198902 - DNA, 25 bp, Artificial
  probe
  misc_feature (1)..(25): SEQ ID NO: 653; WAN024FB2_at; Start 1078; Stop 1102
tacgttttaccagcagtcatccttg

SEQ ID NO: 198903 - DNA, 25 bp, Artificial
  probe
  misc_feature (1)..(25): SEQ ID NO: 653; WAN024FB2_at; Start 255; Stop 279
tgtaacagtagaagcaaatgcgacc

SEQ ID NO: 198904 - DNA, 25 bp, Artificial
  probe
  misc_feature (1)..(25): SEQ ID NO: 653; WAN024FB2_at; Start 659; Stop 683
gtcaaggacaaaccaaaactgccca

SEQ ID NO: 198905 - DNA, 25 bp, Artificial
  probe
  misc_feature (1)..(25): SEQ ID NO: 653; WAN024FB2_at; Start 143; Stop 167
caacggctgataaacgtgataacta

SEQ ID NO: 198906 - DNA, 25 bp, Artificial
  probe
  misc_feature (1)..(25): SEQ ID NO: 653; WAN024FB2_at; Start 826; Stop 850
tatccatctatgattgtcagctctg

SEQ ID NO: 198907 - DNA, 25 bp, Artificial
  probe
  misc_feature (1)..(25): SEQ ID NO: 653; WAN024FB2_at; Start 1233; Stop 1257
taaaaatgccatggttccgctggtt

SEQ ID NO: 198908 - DNA, 25 bp, Artificial
  probe
  misc_feature (1)..(25): SEQ ID NO: 653; WAN024FB2_at; Start 892; Stop 916
gccgtgccacttggttcagccatgg

SEQ ID NO: 198909 - DNA, 25 bp, Artificial
  probe
  misc_feature (1)..(25): SEQ ID NO: 653; WAN024FB2_at; Start 512; Stop 536
cattggtcggttcaggaactaaaca

SEQ ID NO: 198910 - DNA, 25 bp, Artificial
  probe
  misc_feature (1)..(25): SEQ ID NO: 653; WAN024FB2_at; Start 1043; Stop 1067
cattccctatcttgggagctggaga

SEQ ID NO: 198911 - DNA, 25 bp, Artificial
  probe
  misc_feature (1)..(25): SEQ ID NO: 653; WAN024FB2_at; Start 987; Stop 1011
gattgccttggtttacatcgttcga

SEQ ID NO: 198912 - DNA, 25 bp, Artificial
  probe
  misc_feature (1)..(25): SEQ ID NO: 653; WAN024FB2_at; Start 907; Stop 931
tcagccatggctcgtttcaagaaca

SEQ ID NO: 198913 - DNA, 25 bp, Artificial
  probe
  misc_feature (1)..(25): SEQ ID NO: 653; WAN024FB2_at; Start 1366; Stop 1390
tctaataactctatggtcgttggtc

SEQ ID NO: 198914 - DNA, 25 bp, Artificial
  probe
  misc_feature (1)..(25): SEQ ID NO: 653; WAN024FB2_at; Start 1475; Stop 1499
tgactgagaaaggaggcaaataact

SEQ ID NO: 198915 - DNA, 25 bp, Artificial
  probe
  misc_feature (1)..(25): SEQ ID NO: 653; WAN024FB2_at; Start 643; Stop 667
caggttattactcaaggtcaaggac

SEQ ID NO: 198916 - DNA, 25 bp, Artificial
  probe
  misc_feature (1)..(25): SEQ ID NO: 653; WAN024FB2_at; Start 622; Stop 646
tatgctaatacaccagttcttcagg

SEQ ID NO: 198917 - DNA, 25 bp, Artificial
  probe
  misc_feature (1)..(25): SEQ ID NO: 653; WAN024FB2_at; Start 760; Stop 784
gactctcgtgaagtagctagctatg

SEQ ID NO: 198918 - DNA, 25 bp, Artificial
  probe
  misc_feature (1)..(25): SEQ ID NO: 653; WAN024FB2_at; Start 873; Stop 897
ggttcttgcctatgctcttgccgtg

SEQ ID NO: 198919 - DNA, 25 bp, Artificial
  probe
  misc_feature (1)..(25): SEQ ID NO: 653; WAN024FB2_at; Start 1291; Stop 1315
ggtggtgcaacccttactgaaacag

SEQ ID NO: 198920 - DNA, 25 bp, Artificial
  probe
  misc_feature (1)..(25): SEQ ID NO: 653; WAN024FB2_at; Start 352; Stop 376
ggtcaattctatgctactcgtgaaa

SEQ ID NO: 198921 - DNA, 25 bp, Artificial
  probe
  misc_feature (1)..(25): SEQ ID NO: 653; WAN024FB2_at; Start 678; Stop 702
tgcccaagttcagttcccaacaggt

SEQ ID NO: 198922 - DNA, 25 bp, Artificial
  probe
  misc_feature (1)..(25): SEQ ID NO: 653; WAN024FB2_at; Start 1123; Stop 1147
acagccatttggattcgtcgttaca

SEQ ID NO: 198923 - DNA, 25 bp, Artificial
  probe
  misc_feature (1)..(25): SEQ ID NO: 653; WAN024FB2_at; Start 497; Stop 521
cagctatcggatggtcattggtcgg

SEQ ID NO: 198924 - DNA, 25 bp, Artificial
  probe
  misc_feature (1)..(25): SEQ ID NO: 653; WAN024FB2_at; Start 558; Stop 582
cagtcagttcccatttgttcatcaa

SEQ ID NO: 198925 - DNA, 25 bp, Artificial
  probe
  misc_feature (1)..(25): SEQ ID NO: 653; WAN024FB2_at; Start 454; Stop 478
gaaaatccagacttgaaacgctacc

SEQ ID NO: 198926 - DNA, 25 bp, Artificial
  probe
  misc_feature (1)..(25): SEQ ID NO: 653; WAN024FB2_at; Start 1308; Stop 1332
tgaaacagtcttcgccttcccaggt

SEQ ID NO: 198927 - DNA, 25 bp, Artificial
  probe
  misc_feature (1)..(25): SEQ ID NO: 653; WAN024FB2_at; Start 174; Stop 198
tactgtgtttgagcgtatgggctac

SEQ ID NO: 198928 - DNA, 25 bp, Artificial
  probe
  misc_feature (1)..(25): SEQ ID NO: 653; WAN024FB2_at; Start 775; Stop 799
gctagctatgggaaagatgatcctt

SEQ ID NO: 198929 - DNA, 25 bp, Artificial
  probe
  misc_feature (1)..(25): SEQ ID NO: 653; WAN024FB2_at; Start 1445; Stop 1469
ggatgactattattgacccacgtat

SEQ ID NO: 198930 - DNA, 25 bp, Artificial
  probe
  misc_feature (1)..(25): SEQ ID NO: 653; WAN024FB2_at; Start 53; Stop 77
tagtaacgactttgacctacacgat

SEQ ID NO: 198931 - DNA, 25 bp, Artificial
  probe
  misc_feature (1)..(25): SEQ ID NO: 653; WAN024FB2_at; Start 1173; Stop 1197
tgttcgtttcgctcgtgcaaaaggt

SEQ ID NO: 198932 - DNA, 25 bp, Artificial
  probe
  misc_feature (1)..(25): SEQ ID NO: 653; WAN024FB2_at; Start 127; Stop 151
tataataaaattgcgacaacggctg

SEQ ID NO: 198933 - DNA, 25 bp, Artificial
  probe
  misc_feature (1)..(25): SEQ ID NO: 653; WAN024FB2_at; Start 790; Stop 814
gatgatccttatacagcgactgaaa

SEQ ID NO: 198934 - DNA, 25 bp, Artificial
  probe
  misc_feature (1)..(25): SEQ ID NO: 4031; WAN024FB3_at; Start 26; Stop 50
gaggattctgtgatggtcttgccat

SEQ ID NO: 198935 - DNA, 25 bp, Artificial
  probe
  misc_feature (1)..(25): SEQ ID NO: 4031; WAN024FB3_at; Start 80; Stop 104
acattacggaaaccgaggatcaatc

SEQ ID NO: 198936 - DNA, 25 bp, Artificial
  probe
  misc_feature (1)..(25): SEQ ID NO: 4031; WAN024FB3_at; Start 202; Stop 226
ggctgcttctttggaaacaccctca

SEQ ID NO: 198937 - DNA, 25 bp, Artificial
  probe
  misc_feature (1)..(25): SEQ ID NO: 4031; WAN024FB3_at; Start 114; Stop 138
tcaaggctggaataatcggagtaaa

SEQ ID NO: 198938 - DNA, 25 bp, Artificial
  probe
  misc_feature (1)..(25): SEQ ID NO: 4031; WAN024FB3_at; Start 67; Stop 91
gacaccttccaagacattacggaaa

SEQ ID NO: 198939 - DNA, 25 bp, Artificial
  probe
  misc_feature (1)..(25): SEQ ID NO: 4031; WAN024FB3_at; Start 209; Stop 233
tctttggaaacaccctcaatacctg

SEQ ID NO: 198940 - DNA, 25 bp, Artificial
  probe
  misc_feature (1)..(25): SEQ ID NO: 4031; WAN024FB3_at; Start 53; Stop 77
aacatcgaccaatggacaccttcca

SEQ ID NO: 198941 - DNA, 25 bp, Artificial
  probe
  misc_feature (1)..(25): SEQ ID NO: 4031; WAN024FB3_at; Start 76; Stop 100
caagacattacggaaaccgaggatc

SEQ ID NO: 198942 - DNA, 25 bp, Artificial
  probe
  misc_feature (1)..(25): SEQ ID NO: 4031; WAN024FB3_at; Start 17; Stop 41
caaaactgagaggattctgtgatgg

SEQ ID NO: 198943 - DNA, 25 bp, Artificial
  probe
  misc_feature (1)..(25): SEQ ID NO: 4031; WAN024FB3_at; Start 45; Stop 69
tgccatccaacatcgaccaatggac

SEQ ID NO: 198944 - DNA, 25 bp, Artificial
  probe
  misc_feature (1)..(25): SEQ ID NO: 4031; WAN024FB3_at; Start 146; Stop 170
gccagagtggtcataacaccttgga

SEQ ID NO: 198945 - DNA, 25 bp, Artificial
  probe
  misc_feature (1)..(25): SEQ ID NO: 4031; WAN024FB3_at; Start 29; Stop 53
gattctgtgatggtcttgccatcca

SEQ ID NO: 198946 - DNA, 25 bp, Artificial
  probe
  misc_feature (1)..(25): SEQ ID NO: 4031; WAN024FB3_at; Start 153; Stop 177
tggtcataacaccttggaccacgtt

SEQ ID NO: 198947 - DNA, 25 bp, Artificial
  probe
  misc_feature (1)..(25): SEQ ID NO: 4031; WAN024FB3_at; Start 11; Stop 35
cctgcccaaaactgagaggattctg

SEQ ID NO: 198948 - DNA, 25 bp, Artificial
  probe
  misc_feature (1)..(25): SEQ ID NO: 4031; WAN024FB3_at; Start 168; Stop 192
ggaccacgttttgattactcttagc

SEQ ID NO: 198949 - DNA, 25 bp, Artificial
  probe
  misc_feature (1)..(25): SEQ ID NO: 4031; WAN024FB3_at; Start 143; Stop 167
tccgccagagtggtcataacacctt

SEQ ID NO: 198950 - DNA, 25 bp, Artificial
  probe
  misc_feature (1)..(25): SEQ ID NO: 4031; WAN024FB3_at; Start 157; Stop 181
cataacaccttggaccacgttttga

SEQ ID NO: 198951 - DNA, 25 bp, Artificial
  probe
  misc_feature (1)..(25): SEQ ID NO: 4031; WAN024FB3_at; Start 14; Stop 38
gcccaaaactgagaggattctgtga

SEQ ID NO: 198952 - DNA, 25 bp, Artificial
  probe
  misc_feature (1)..(25): SEQ ID NO: 4031; WAN024FB3_at; Start 174; Stop 198
cgttttgattactcttagctgcaga

SEQ ID NO: 198953 - DNA, 25 bp, Artificial
  probe
  misc_feature (1)..(25): SEQ ID NO: 4031; WAN024FB3_at; Start 195; Stop 219
cagacttggctgcttctttggaaac

SEQ ID NO: 198954 - DNA, 25 bp, Artificial
  probe
  misc_feature (1)..(25): SEQ ID NO: 4031; WAN024FB3_at; Start 37; Stop 61
gatggtcttgccatccaacatcgac

SEQ ID NO: 198955 - DNA, 25 bp, Artificial
  probe
  misc_feature (1)..(25): SEQ ID NO: 4031; WAN024FB3_at; Start 41; Stop 65
gtcttgccatccaacatcgaccaat

SEQ ID NO: 198956 - DNA, 25 bp, Artificial
  probe
  misc_feature (1)..(25): SEQ ID NO: 4031; WAN024FB3_at; Start 74; Stop 98
tccaagacattacggaaaccgagga

SEQ ID NO: 198957 - DNA, 25 bp, Artificial
  probe
  misc_feature (1)..(25): SEQ ID NO: 4031; WAN024FB3_at; Start 24; Stop 48
gagaggattctgtgatggtcttgcc

SEQ ID NO: 198958 - DNA, 25 bp, Artificial
  probe
  misc_feature (1)..(25): SEQ ID NO: 4031; WAN024FB3_at; Start 32; Stop 56
tctgtgatggtcttgccatccaaca

SEQ ID NO: 198959 - DNA, 25 bp, Artificial
  probe
  misc_feature (1)..(25): SEQ ID NO: 4031; WAN024FB3_at; Start 162; Stop 186
caccttggaccacgttttgattact

SEQ ID NO: 198960 - DNA, 25 bp, Artificial
  probe
  misc_feature (1)..(25): SEQ ID NO: 4031; WAN024FB3_at; Start 186; Stop 210
tcttagctgcagacttggctgcttc

SEQ ID NO: 198961 - DNA, 25 bp, Artificial
  probe
  misc_feature (1)..(25): SEQ ID NO: 4031; WAN024FB3_at; Start 197; Stop 221
gacttggctgcttctttggaaacac

SEQ ID NO: 198962 - DNA, 25 bp, Artificial
  probe
  misc_feature (1)..(25): SEQ ID NO: 4031; WAN024FB3_at; Start 65; Stop 89
tggacaccttccaagacattacgga

SEQ ID NO: 198963 - DNA, 25 bp, Artificial
  probe
  misc_feature (1)..(25): SEQ ID NO: 4031; WAN024FB3_at; Start 59; Stop 83
gaccaatggacaccttccaagacat

SEQ ID NO: 198964 - DNA, 25 bp, Artificial
  probe
  misc_feature (1)..(25): SEQ ID NO: 4031; WAN024FB3_at; Start 205; Stop 229
tgcttctttggaaacaccctcaata

SEQ ID NO: 198965 - DNA, 25 bp, Artificial
  probe
  misc_feature (1)..(25): SEQ ID NO: 4031; WAN024FB3_at; Start 180; Stop 204
gattactcttagctgcagacttggc

SEQ ID NO: 198966 - DNA, 25 bp, Artificial
  probe
  misc_feature (1)..(25): SEQ ID NO: 4031; WAN024FB3_at; Start 183; Stop 207
tactcttagctgcagacttggctgc

SEQ ID NO: 198967 - DNA, 25 bp, Artificial
  probe
  misc_feature (1)..(25): SEQ ID NO: 4031; WAN024FB3_at; Start 148; Stop 172
cagagtggtcataacaccttggacc

SEQ ID NO: 198968 - DNA, 25 bp, Artificial
  probe
  misc_feature (1)..(25): SEQ ID NO: 5495; WAN024FB4_at; Start 76; Stop 100
tgtcaccagacctgcagccttaatg

SEQ ID NO: 198969 - DNA, 25 bp, Artificial
  probe
  misc_feature (1)..(25): SEQ ID NO: 5495; WAN024FB4_at; Start 63; Stop 87
taacaggagtttctgtcaccagacc

SEQ ID NO: 198970 - DNA, 25 bp, Artificial
  probe
  misc_feature (1)..(25): SEQ ID NO: 5495; WAN024FB4_at; Start 198; Stop 222
ccataccgatgtggatgagcaattc

SEQ ID NO: 198971 - DNA, 25 bp, Artificial
  probe
  misc_feature (1)..(25): SEQ ID NO: 5495; WAN024FB4_at; Start 157; Stop 181
tacaagactttcaaaacctttgcca

SEQ ID NO: 198972 - DNA, 25 bp, Artificial
  probe
  misc_feature (1)..(25): SEQ ID NO: 5495; WAN024FB4_at; Start 186; Stop 210
gacctactgtatccataccgatgtg

SEQ ID NO: 198973 - DNA, 25 bp, Artificial
  probe
  misc_feature (1)..(25): SEQ ID NO: 5495; WAN024FB4_at; Start 245; Stop 269
ccgatggcatgcttggtagggaaaa

SEQ ID NO: 198974 - DNA, 25 bp, Artificial
  probe
  misc_feature (1)..(25): SEQ ID NO: 5495; WAN024FB4_at; Start 230; Stop 254
tcgtcagagacaatgccgatggcat

SEQ ID NO: 198975 - DNA, 25 bp, Artificial
  probe
  misc_feature (1)..(25): SEQ ID NO: 5495; WAN024FB4_at; Start 170; Stop 194
aaacctttgccatcaagacctactg

SEQ ID NO: 198976 - DNA, 25 bp, Artificial
  probe
  misc_feature (1)..(25): SEQ ID NO: 5495; WAN024FB4_at; Start 214; Stop 238
gagcaattcaactccctcgtcagag

SEQ ID NO: 198977 - DNA, 25 bp, Artificial
  probe
  misc_feature (1)..(25): SEQ ID NO: 5495; WAN024FB4_at; Start 285; Stop 309
cattaactggagaggtcaactcacc

SEQ ID NO: 198978 - DNA, 25 bp, Artificial
  probe
  misc_feature (1)..(25): SEQ ID NO: 5495; WAN024FB4_at; Start 205; Stop 229
gatgtggatgagcaattcaactccc

SEQ ID NO: 198979 - DNA, 25 bp, Artificial
  probe
  misc_feature (1)..(25): SEQ ID NO: 5495; WAN024FB4_at; Start 69; Stop 93
gagtttctgtcaccagacctgcagc

SEQ ID NO: 198980 - DNA, 25 bp, Artificial
  probe
  misc_feature (1)..(25): SEQ ID NO: 5495; WAN024FB4_at; Start 44; Stop 68
gcatcttggttggtgatgataacag

SEQ ID NO: 198981 - DNA, 25 bp, Artificial
  probe
  misc_feature (1)..(25): SEQ ID NO: 5495; WAN024FB4_at; Start 290; Stop 314
actggagaggtcaactcaccttggc

SEQ ID NO: 198982 - DNA, 25 bp, Artificial
  probe
  misc_feature (1)..(25): SEQ ID NO: 5495; WAN024FB4_at; Start 100; Stop 124
gacatccatatcaaaacgaatcagt

SEQ ID NO: 198983 - DNA, 25 bp, Artificial
  probe
  misc_feature (1)..(25): SEQ ID NO: 5495; WAN024FB4_at; Start 132; Stop 156
caactgtaacgtgatctccttggac

SEQ ID NO: 198984 - DNA, 25 bp, Artificial
  probe
  misc_feature (1)..(25): SEQ ID NO: 5495; WAN024FB4_at; Start 28; Stop 52
aatagtcgctgtataagcatcttgg

SEQ ID NO: 198985 - DNA, 25 bp, Artificial
  probe
  misc_feature (1)..(25): SEQ ID NO: 5495; WAN024FB4_at; Start 84; Stop 108
gacctgcagccttaatgacatccat

SEQ ID NO: 198986 - DNA, 25 bp, Artificial
  probe
  misc_feature (1)..(25): SEQ ID NO: 5495; WAN024FB4_at; Start 226; Stop 250
tccctcgtcagagacaatgccgatg

SEQ ID NO: 198987 - DNA, 25 bp, Artificial
  probe
  misc_feature (1)..(25): SEQ ID NO: 5495; WAN024FB4_at; Start 254; Stop 278
tgcttggtagggaaaagaaccgtca

SEQ ID NO: 198988 - DNA, 25 bp, Artificial
  probe
  misc_feature (1)..(25): SEQ ID NO: 5495; WAN024FB4_at; Start 108; Stop 132
tatcaaaacgaatcagttgctgacc

SEQ ID NO: 198989 - DNA, 25 bp, Artificial
  probe
  misc_feature (1)..(25): SEQ ID NO: 5495; WAN024FB4_at; Start 236; Stop 260
gagacaatgccgatggcatgcttgg

SEQ ID NO: 198990 - DNA, 25 bp, Artificial
  probe
  misc_feature (1)..(25): SEQ ID NO: 5495; WAN024FB4_at; Start 209; Stop 233
tggatgagcaattcaactccctcgt

SEQ ID NO: 198991 - DNA, 25 bp, Artificial
  probe
  misc_feature (1)..(25): SEQ ID NO: 5495; WAN024FB4_at; Start 175; Stop 199
tttgccatcaagacctactgtatcc

SEQ ID NO: 198992 - DNA, 25 bp, Artificial
  probe
  misc_feature (1)..(25): SEQ ID NO: 5495; WAN024FB4_at; Start 146; Stop 170
tctccttggactacaagactttcaa

SEQ ID NO: 198993 - DNA, 25 bp, Artificial
  probe
  misc_feature (1)..(25): SEQ ID NO: 5495; WAN024FB4_at; Start 303; Stop 327
actcaccttggcttggttcaatgac

SEQ ID NO: 198994 - DNA, 25 bp, Artificial
  probe
  misc_feature (1)..(25): SEQ ID NO: 5495; WAN024FB4_at; Start 294; Stop 318
gagaggtcaactcaccttggcttgg

SEQ ID NO: 198995 - DNA, 25 bp, Artificial
  probe
  misc_feature (1)..(25): SEQ ID NO: 5495; WAN024FB4_at; Start 138; Stop 162
taacgtgatctccttggactacaag

SEQ ID NO: 198996 - DNA, 25 bp, Artificial
  probe
  misc_feature (1)..(25): SEQ ID NO: 5495; WAN024FB4_at; Start 123; Stop 147
gttgctgaccaactgtaacgtgatc

SEQ ID NO: 198997 - DNA, 25 bp, Artificial
  probe
  misc_feature (1)..(25): SEQ ID NO: 5495; WAN024FB4_at; Start 34; Stop 58
cgctgtataagcatcttggttggtg

SEQ ID NO: 198998 - DNA, 25 bp, Artificial
  probe
  misc_feature (1)..(25): SEQ ID NO: 5495; WAN024FB4_at; Start 223; Stop 247
aactccctcgtcagagacaatgccg

SEQ ID NO: 198999 - DNA, 25 bp, Artificial
  probe
  misc_feature (1)..(25): SEQ ID NO: 5495; WAN024FB4_at; Start 89; Stop 113
gcagccttaatgacatccatatcaa

SEQ ID NO: 199000 - DNA, 25 bp, Artificial
  probe
  misc_feature (1)..(25): SEQ ID NO: 5495; WAN024FB4_at; Start 298; Stop 322
ggtcaactcaccttggcttggttca

SEQ ID NO: 199001 - DNA, 25 bp, Artificial
  probe
  misc_feature (1)..(25): SEQ ID NO: 5495; WAN024FB4_at; Start 58; Stop 82
gatgataacaggagtttctgtcacc

SEQ ID NO: 199002 - DNA, 25 bp, Artificial
  probe
  misc_feature (1)..(25): SEQ ID NO: 1017; WAN024FB5_at; Start 344; Stop 368
tcattggaaatgacgtgcccatctt

SEQ ID NO: 199003 - DNA, 25 bp, Artificial
  probe
  misc_feature (1)..(25): SEQ ID NO: 1017; WAN024FB5_at; Start 287; Stop 311
tcgagtcaattccagctgttaaagg

SEQ ID NO: 199004 - DNA, 25 bp, Artificial
  probe
  misc_feature (1)..(25): SEQ ID NO: 1017; WAN024FB5_at; Start 1861; Stop 1885
gaattgctcatccacatcggtatgg

SEQ ID NO: 199005 - DNA, 25 bp, Artificial
  probe
  misc_feature (1)..(25): SEQ ID NO: 1017; WAN024FB5_at; Start 1010; Stop 1034
tcggttggacaattggacaaggact

SEQ ID NO: 199006 - DNA, 25 bp, Artificial
  probe
  misc_feature (1)..(25): SEQ ID NO: 1017; WAN024FB5_at; Start 1887; Stop 1911
tacagtaggtcttgatggcaaaggt

SEQ ID NO: 199007 - DNA, 25 bp, Artificial
  probe
  misc_feature (1)..(25): SEQ ID NO: 1017; WAN024FB5_at; Start 1761; Stop 1785
tgaaccaagccaaggtgagttgacc

SEQ ID NO: 199008 - DNA, 25 bp, Artificial
  probe
  misc_feature (1)..(25): SEQ ID NO: 1017; WAN024FB5_at; Start 1697; Stop 1721
aagaattgagtcaagcgacggatcc

SEQ ID NO: 199009 - DNA, 25 bp, Artificial
  probe
  misc_feature (1)..(25): SEQ ID NO: 1017; WAN024FB5_at; Start 1273; Stop 1297
gaggctcaggtttcacttcctgcaa

SEQ ID NO: 199010 - DNA, 25 bp, Artificial
  probe
  misc_feature (1)..(25): SEQ ID NO: 1017; WAN024FB5_at; Start 380; Stop 404
ttacagccgtttcaggtattgaggg

SEQ ID NO: 199011 - DNA, 25 bp, Artificial
  probe
  misc_feature (1)..(25): SEQ ID NO: 1017; WAN024FB5_at; Start 1671; Stop 1695
tatcagcccactaactggccaagtg

SEQ ID NO: 199012 - DNA, 25 bp, Artificial
  probe
  misc_feature (1)..(25): SEQ ID NO: 1017; WAN024FB5_at; Start 590; Stop 614
cagaatcctctcagttttgggcagg

SEQ ID NO: 199013 - DNA, 25 bp, Artificial
  probe
  misc_feature (1)..(25): SEQ ID NO: 1017; WAN024FB5_at; Start 766; Stop 790
tatgcggttgcttcaacgccagcag

SEQ ID NO: 199014 - DNA, 25 bp, Artificial
  probe
  misc_feature (1)..(25): SEQ ID NO: 1017; WAN024FB5_at; Start 1112; Stop 1136
catttgtcatcacaggtctgcacca

SEQ ID NO: 199015 - DNA, 25 bp, Artificial
  probe
  misc_feature (1)..(25): SEQ ID NO: 1017; WAN024FB5_at; Start 1983; Stop 2007
cattaaggctgcaggtctggtgaca

SEQ ID NO: 199016 - DNA, 25 bp, Artificial
  probe
  misc_feature (1)..(25): SEQ ID NO: 1017; WAN024FB5_at; Start 1377; Stop 1401
gatgactggttcagcccttgcaggc

SEQ ID NO: 199017 - DNA, 25 bp, Artificial
  probe
  misc_feature (1)..(25): SEQ ID NO: 1017; WAN024FB5_at; Start 1255; Stop 1279
catcgccatgatgagcgtgaggctc

SEQ ID NO: 199018 - DNA, 25 bp, Artificial
  probe
  misc_feature (1)..(25): SEQ ID NO: 1017; WAN024FB5_at; Start 536; Stop 560
tccgtaatgtcttggaaggtgtcca

SEQ ID NO: 199019 - DNA, 25 bp, Artificial
  probe
  misc_feature (1)..(25): SEQ ID NO: 1017; WAN024FB5_at; Start 750; Stop 774
tcagttgctcaatgcctatgcggtt

SEQ ID NO: 199020 - DNA, 25 bp, Artificial
  probe
  misc_feature (1)..(25): SEQ ID NO: 1017; WAN024FB5_at; Start 627; Stop 651
cctctggttgcctggtgaagctatc

SEQ ID NO: 199021 - DNA, 25 bp, Artificial
  probe
  misc_feature (1)..(25): SEQ ID NO: 1017; WAN024FB5_at; Start 399; Stop 423
tgagggtgtttccaaagaagcagcc

SEQ ID NO: 199022 - DNA, 25 bp, Artificial
  probe
  misc_feature (1)..(25): SEQ ID NO: 1017; WAN024FB5_at; Start 433; Stop 457
gctaagagtaatcaaaacgtggtcc

SEQ ID NO: 199023 - DNA, 25 bp, Artificial
  probe
  misc_feature (1)..(25): SEQ ID NO: 1017; WAN024FB5_at; Start 1424; Stop 1448
taactgcggcttctattggtatcgg

SEQ ID NO: 199024 - DNA, 25 bp, Artificial
  probe
  misc_feature (1)..(25): SEQ ID NO: 1017; WAN024FB5_at; Start 2089; Stop 2113
gcatctctcatggtcgctacacgaa

SEQ ID NO: 199025 - DNA, 25 bp, Artificial
  probe
  misc_feature (1)..(25): SEQ ID NO: 1017; WAN024FB5_at; Start 1582; Stop 1606
ggcgatacgaacttgcaggcagaat

SEQ ID NO: 199026 - DNA, 25 bp, Artificial
  probe
  misc_feature (1)..(25): SEQ ID NO: 1017; WAN024FB5_at; Start 1656; Stop 1680
tacttcggtagaaattatcagccca

SEQ ID NO: 199027 - DNA, 25 bp, Artificial
  probe
  misc_feature (1)..(25): SEQ ID NO: 1017; WAN024FB5_at; Start 848; Stop 872
gttaccaagcccaagttatcccagc

SEQ ID NO: 199028 - DNA, 25 bp, Artificial
  probe
  misc_feature (1)..(25): SEQ ID NO: 1017; WAN024FB5_at; Start 648; Stop 672
tatcttccagttcttaccagtaggg

SEQ ID NO: 199029 - DNA, 25 bp, Artificial
  probe
  misc_feature (1)..(25): SEQ ID NO: 1017; WAN024FB5_at; Start 1814; Stop 1838
ttttccctaccaagcatgccatcgg

SEQ ID NO: 199030 - DNA, 25 bp, Artificial
  probe
  misc_feature (1)..(25): SEQ ID NO: 1017; WAN024FB5_at; Start 1309; Stop 1333
tatctcggtgttacagaaccagctc

SEQ ID NO: 199031 - DNA, 25 bp, Artificial
  probe
  misc_feature (1)..(25): SEQ ID NO: 1017; WAN024FB5_at; Start 415; Stop 439
gaagcagccaagtctgcagctaaga

SEQ ID NO: 199032 - DNA, 25 bp, Artificial
  probe
  misc_feature (1)..(25): SEQ ID NO: 1017; WAN024FB5_at; Start 686; Stop 710
tttctcgtaagatgggaaccagcca

SEQ ID NO: 199033 - DNA, 25 bp, Artificial
  probe
  misc_feature (1)..(25): SEQ ID NO: 1017; WAN024FB5_at; Start 1160; Stop 1184
aattgattgcggatgctggtggcac

SEQ ID NO: 199034 - DNA, 25 bp, Artificial
  probe
  misc_feature (1)..(25): SEQ ID NO: 1017; WAN024FB5_at; Start 728; Stop 752
tcggaatctgtttggtatcgcctca

SEQ ID NO: 199035 - DNA, 25 bp, Artificial
  probe
  misc_feature (1)..(25): SEQ ID NO: 1017; WAN024FB5_at; Start 1833; Stop 1857
catcggcattgtctctgacgaggga

SEQ ID NO: 199036 - DNA, 25 bp, Artificial
  probe
  misc_feature (1)..(25): SEQ ID NO: 4260; WAN024FB6_at; Start 213; Stop 237
tgtccatccttatagtccaccttga

SEQ ID NO: 199037 - DNA, 25 bp, Artificial
  probe
  misc_feature (1)..(25): SEQ ID NO: 4260; WAN024FB6_at; Start 163; Stop 187
ggtaaagactcttcaactcttcaaa

SEQ ID NO: 199038 - DNA, 25 bp, Artificial
  probe
  misc_feature (1)..(25): SEQ ID NO: 4260; WAN024FB6_at; Start 186; Stop 210
aaatcaaagggagccaaggtccact

SEQ ID NO: 199039 - DNA, 25 bp, Artificial
  probe
  misc_feature (1)..(25): SEQ ID NO: 4260; WAN024FB6_at; Start 73; Stop 97
caaaacggttcaaggcacgtggttg

SEQ ID NO: 199040 - DNA, 25 bp, Artificial
  probe
  misc_feature (1)..(25): SEQ ID NO: 4260; WAN024FB6_at; Start 155; Stop 179
ccaactatggtaaagactcttcaac

SEQ ID NO: 199041 - DNA, 25 bp, Artificial
  probe
  misc_feature (1)..(25): SEQ ID NO: 4260; WAN024FB6_at; Start 111; Stop 135
caaaagagggcactccaaccgtctt

SEQ ID NO: 199042 - DNA, 25 bp, Artificial
  probe
  misc_feature (1)..(25): SEQ ID NO: 4260; WAN024FB6_at; Start 198; Stop 222
gccaaggtccacttttgtccatcct

SEQ ID NO: 199043 - DNA, 25 bp, Artificial
  probe
  misc_feature (1)..(25): SEQ ID NO: 4260; WAN024FB6_at; Start 37; Stop 61
tggtggctccttccttgcggaagtt

SEQ ID NO: 199044 - DNA, 25 bp, Artificial
  probe
  misc_feature (1)..(25): SEQ ID NO: 4260; WAN024FB6_at; Start 14; Stop 38
caggtgaatgctggctgctagcatg

SEQ ID NO: 199045 - DNA, 25 bp, Artificial
  probe
  misc_feature (1)..(25): SEQ ID NO: 4260; WAN024FB6_at; Start 179; Stop 203
ctcttcaaaatcaaagggagccaag

SEQ ID NO: 199046 - DNA, 25 bp, Artificial
  probe
  misc_feature (1)..(25): SEQ ID NO: 4260; WAN024FB6_at; Start 22; Stop 46
tgctggctgctagcatggtggctcc

SEQ ID NO: 199047 - DNA, 25 bp, Artificial
  probe
  misc_feature (1)..(25): SEQ ID NO: 4260; WAN024FB6_at; Start 49; Stop 73
ccttgcggaagttttgaatatcgac

SEQ ID NO: 199048 - DNA, 25 bp, Artificial
  probe
  misc_feature (1)..(25): SEQ ID NO: 4260; WAN024FB6_at; Start 4; Stop 28
tcccacgtgacaggtgaatgctggc

SEQ ID NO: 199049 - DNA, 25 bp, Artificial
  probe
  misc_feature (1)..(25): SEQ ID NO: 4260; WAN024FB6_at; Start 153; Stop 177
ccccaactatggtaaagactcttca

SEQ ID NO: 199050 - DNA, 25 bp, Artificial
  probe
  misc_feature (1)..(25): SEQ ID NO: 4260; WAN024FB6_at; Start 35; Stop 59
catggtggctccttccttgcggaag

SEQ ID NO: 199051 - DNA, 25 bp, Artificial
  probe
  misc_feature (1)..(25): SEQ ID NO: 4260; WAN024FB6_at; Start 2; Stop 26
tgtcccacgtgacaggtgaatgctg

SEQ ID NO: 199052 - DNA, 25 bp, Artificial
  probe
  misc_feature (1)..(25): SEQ ID NO: 4260; WAN024FB6_at; Start 69; Stop 93
tcgacaaaacggttcaaggcacgtg

SEQ ID NO: 199053 - DNA, 25 bp, Artificial
  probe
  misc_feature (1)..(25): SEQ ID NO: 4260; WAN024FB6_at; Start 203; Stop 227
ggtccacttttgtccatccttatag

SEQ ID NO: 199054 - DNA, 25 bp, Artificial
  probe
  misc_feature (1)..(25): SEQ ID NO: 4260; WAN024FB6_at; Start 172; Stop 196
tcttcaactcttcaaaatcaaaggg

SEQ ID NO: 199055 - DNA, 25 bp, Artificial
  probe
  misc_feature (1)..(25): SEQ ID NO: 4260; WAN024FB6_at; Start 126; Stop 150
caaccgtctttatcactcatttcct

SEQ ID NO: 199056 - DNA, 25 bp, Artificial
  probe
  misc_feature (1)..(25): SEQ ID NO: 4260; WAN024FB6_at; Start 116; Stop 140
gagggcactccaaccgtctttatca

SEQ ID NO: 199057 - DNA, 25 bp, Artificial
  probe
  misc_feature (1)..(25): SEQ ID NO: 4260; WAN024FB6_at; Start 32; Stop 56
tagcatggtggctccttccttgcgg

SEQ ID NO: 199058 - DNA, 25 bp, Artificial
  probe
  misc_feature (1)..(25): SEQ ID NO: 4260; WAN024FB6_at; Start 140; Stop 164
actcatttccttaccccaactatgg

SEQ ID NO: 199059 - DNA, 25 bp, Artificial
  probe
  misc_feature (1)..(25): SEQ ID NO: 4260; WAN024FB6_at; Start 64; Stop 88
gaatatcgacaaaacggttcaaggc

SEQ ID NO: 199060 - DNA, 25 bp, Artificial
  probe
  misc_feature (1)..(25): SEQ ID NO: 4260; WAN024FB6_at; Start 194; Stop 218
gggagccaaggtccacttttgtcca

SEQ ID NO: 199061 - DNA, 25 bp, Artificial
  probe
  misc_feature (1)..(25): SEQ ID NO: 4260; WAN024FB6_at; Start 26; Stop 50
ggctgctagcatggtggctccttcc

SEQ ID NO: 199062 - DNA, 25 bp, Artificial
  probe
  misc_feature (1)..(25): SEQ ID NO: 4260; WAN024FB6_at; Start 82; Stop 106
tcaaggcacgtggttgatcgtgatt

SEQ ID NO: 199063 - DNA, 25 bp, Artificial
  probe
  misc_feature (1)..(25): SEQ ID NO: 4260; WAN024FB6_at; Start 7; Stop 31
cacgtgacaggtgaatgctggctgc

SEQ ID NO: 199064 - DNA, 25 bp, Artificial
  probe
  misc_feature (1)..(25): SEQ ID NO: 4260; WAN024FB6_at; Start 184; Stop 208
caaaatcaaagggagccaaggtcca

SEQ ID NO: 199065 - DNA, 25 bp, Artificial
  probe
  misc_feature (1)..(25): SEQ ID NO: 4260; WAN024FB6_at; Start 190; Stop 214
caaagggagccaaggtccacttttg

SEQ ID NO: 199066 - DNA, 25 bp, Artificial
  probe
  misc_feature (1)..(25): SEQ ID NO: 4260; WAN024FB6_at; Start 41; Stop 65
ggctccttccttgcggaagttttga

SEQ ID NO: 199067 - DNA, 25 bp, Artificial
  probe
  misc_feature (1)..(25): SEQ ID NO: 4260; WAN024FB6_at; Start 11; Stop 35
tgacaggtgaatgctggctgctagc

SEQ ID NO: 199068 - DNA, 25 bp, Artificial
  probe
  misc_feature (1)..(25): SEQ ID NO: 4260; WAN024FB6_at; Start 176; Stop 200
caactcttcaaaatcaaagggagcc

SEQ ID NO: 199069 - DNA, 25 bp, Artificial
  probe
  misc_feature (1)..(25): SEQ ID NO: 4260; WAN024FB6_at; Start 76; Stop 100
aacggttcaaggcacgtggttgatc

SEQ ID NO: 199070 - DNA, 25 bp, Artificial
  probe
  misc_feature (1)..(25): SEQ ID NO: 1352; WAN024FB7_at; Start 979; Stop 1003
gtcgatattcaaaacttccgcaagg

SEQ ID NO: 199071 - DNA, 25 bp, Artificial
  probe
  misc_feature (1)..(25): SEQ ID NO: 1352; WAN024FB7_at; Start 591; Stop 615
taaggacgaggtttcagtggactgt

SEQ ID NO: 199072 - DNA, 25 bp, Artificial
  probe
  misc_feature (1)..(25): SEQ ID NO: 1352; WAN024FB7_at; Start 267; Stop 291
caagattgactttatgctggacatg

SEQ ID NO: 199073 - DNA, 25 bp, Artificial
  probe
  misc_feature (1)..(25): SEQ ID NO: 1352; WAN024FB7_at; Start 500; Stop 524
ccaatgtccgtaaggagcttttcaa

SEQ ID NO: 199074 - DNA, 25 bp, Artificial
  probe
  misc_feature (1)..(25): SEQ ID NO: 1352; WAN024FB7_at; Start 1311; Stop 1335
tgtagaaaatgaaatccagggtccg

SEQ ID NO: 199075 - DNA, 25 bp, Artificial
  probe
  misc_feature (1)..(25): SEQ ID NO: 1352; WAN024FB7_at; Start 161; Stop 185
gccctcaacgggataatggttacga

SEQ ID NO: 199076 - DNA, 25 bp, Artificial
  probe
  misc_feature (1)..(25): SEQ ID NO: 1352; WAN024FB7_at; Start 322; Stop 346
tggtttcagaaagccctagctggtg

SEQ ID NO: 199077 - DNA, 25 bp, Artificial
  probe
  misc_feature (1)..(25): SEQ ID NO: 1352; WAN024FB7_at; Start 815; Stop 839
tcaaggtggactataaggatggaca

SEQ ID NO: 199078 - DNA, 25 bp, Artificial
  probe
  misc_feature (1)..(25): SEQ ID NO: 1352; WAN024FB7_at; Start 522; Stop 546
caaggttgttaatttctggcgcgac

SEQ ID NO: 199079 - DNA, 25 bp, Artificial
  probe
  misc_feature (1)..(25): SEQ ID NO: 1352; WAN024FB7_at; Start 1428; Stop 1452
acaagtctacgcttttgaacgccag

SEQ ID NO: 199080 - DNA, 25 bp, Artificial
  probe
  misc_feature (1)..(25): SEQ ID NO: 1352; WAN024FB7_at; Start 671; Stop 695
tgcgtatgatgaaccaagccacttt

SEQ ID NO: 199081 - DNA, 25 bp, Artificial
  probe
  misc_feature (1)..(25): SEQ ID NO: 1352; WAN024FB7_at; Start 1498; Stop 1522
gaagtggaaatcgacttgccagcag

SEQ ID NO: 199082 - DNA, 25 bp, Artificial
  probe
  misc_feature (1)..(25): SEQ ID NO: 1352; WAN024FB7_at; Start 461; Stop 485
tatttgatgagacccaggctgacct

SEQ ID NO: 199083 - DNA, 25 bp, Artificial
  probe
  misc_feature (1)..(25): SEQ ID NO: 1352; WAN024FB7_at; Start 615; Stop 639
tcctgaaaatgaagggaagccagct

SEQ ID NO: 199084 - DNA, 25 bp, Artificial
  probe
  misc_feature (1)..(25): SEQ ID NO: 1352; WAN024FB7_at; Start 1359; Stop 1383
gattcgactgcgtaaggaaatgcca

SEQ ID NO: 199085 - DNA, 25 bp, Artificial
  probe
  misc_feature (1)..(25): SEQ ID NO: 1352; WAN024FB7_at; Start 834; Stop 858
tggacaaaagtggaccttggctccc

SEQ ID NO: 199086 - DNA, 25 bp, Artificial
  probe
  misc_feature (1)..(25): SEQ ID NO: 1352; WAN024FB7_at; Start 1404; Stop 1428
caaaccagcctttgaagatagcaaa

SEQ ID NO: 199087 - DNA, 25 bp, Artificial
  probe
  misc_feature (1)..(25): SEQ ID NO: 1352; WAN024FB7_at; Start 1188; Stop 1212
gattattcaagctaagtcgcgtgat

SEQ ID NO: 199088 - DNA, 25 bp, Artificial
  probe
  misc_feature (1)..(25): SEQ ID NO: 1352; WAN024FB7_at; Start 54; Stop 78
agacaccactgaaaacggtattggg

SEQ ID NO: 199089 - DNA, 25 bp, Artificial
  probe
  misc_feature (1)..(25): SEQ ID NO: 1352; WAN024FB7_at; Start 772; Stop 796
cctgatcgtcaggaattatccatga

SEQ ID NO: 199090 - DNA, 25 bp, Artificial
  probe
  misc_feature (1)..(25): SEQ ID NO: 1352; WAN024FB7_at; Start 1079; Stop 1103
ggatgattgacccagactatgattc

SEQ ID NO: 199091 - DNA, 25 bp, Artificial
  probe
  misc_feature (1)..(25): SEQ ID NO: 1352; WAN024FB7_at; Start 1265; Stop 1289
caggcactccttggttgaaagctgg

SEQ ID NO: 199092 - DNA, 25 bp, Artificial
  probe
  misc_feature (1)..(25): SEQ ID NO: 1352; WAN024FB7_at; Start 726; Stop 750
ggaaatgtcttctaccaccatggaa

SEQ ID NO: 199093 - DNA, 25 bp, Artificial
  probe
  misc_feature (1)..(25): SEQ ID NO: 1352; WAN024FB7_at; Start 1389; Stop 1413
ttcagaaggaagttacaaaccagcc

SEQ ID NO: 199094 - DNA, 25 bp, Artificial
  probe
  misc_feature (1)..(25): SEQ ID NO: 1352; WAN024FB7_at; Start 629; Stop 653
ggaagccagcttatacagacaaacc

SEQ ID NO: 199095 - DNA, 25 bp, Artificial
  probe
  misc_feature (1)..(25): SEQ ID NO: 1352; WAN024FB7_at; Start 191; Stop 215
cagattatatggcagtggatcctct

SEQ ID NO: 199096 - DNA, 25 bp, Artificial
  probe
  misc_feature (1)..(25): SEQ ID NO: 1352; WAN024FB7_at; Start 913; Stop 937
gataaagacggttggagtgccctct

SEQ ID NO: 199097 - DNA, 25 bp, Artificial
  probe
  misc_feature (1)..(25): SEQ ID NO: 1352; WAN024FB7_at; Start 1122; Stop 1146
tgtcgaatcgcttaatgcctatcag

SEQ ID NO: 199098 - DNA, 25 bp, Artificial
  probe
  misc_feature (1)..(25): SEQ ID NO: 1352; WAN024FB7_at; Start 1516; Stop 1540
ccagcagtctaccaaaatggacaga

SEQ ID NO: 199099 - DNA, 25 bp, Artificial
  probe
  misc_feature (1)..(25): SEQ ID NO: 1352; WAN024FB7_at; Start 304; Stop 328
tgttcgacagagcatgaatggtttc

SEQ ID NO: 199100 - DNA, 25 bp, Artificial
  probe
  misc_feature (1)..(25): SEQ ID NO: 1352; WAN024FB7_at; Start 1024; Stop 1048
gccagcattcacctgtcacgtggga

SEQ ID NO: 199101 - DNA, 25 bp, Artificial
  probe
  misc_feature (1)..(25): SEQ ID NO: 1352; WAN024FB7_at; Start 952; Stop 976
gatcaaccacgtgccttgaaccgtt

SEQ ID NO: 199102 - DNA, 25 bp, Artificial
  probe
  misc_feature (1)..(25): SEQ ID NO: 1352; WAN024FB7_at; Start 1043; Stop 1067
gtgggacaccttatatctacatggg

SEQ ID NO: 199103 - DNA, 25 bp, Artificial
  probe
  misc_feature (1)..(25): SEQ ID NO: 1352; WAN024FB7_at; Start 1163; Stop 1187
gaaagagtcagcaagaagccttcca

SEQ ID NO: 199104 - DNA, 25 bp, Artificial
  probe
  misc_feature (1)..(25): SEQ ID NO: 441; WAN024FB8_at; Start 137; Stop 161
agaaccctgcttttctgaaaaagag

SEQ ID NO: 199105 - DNA, 25 bp, Artificial
  probe
  misc_feature (1)..(25): SEQ ID NO: 441; WAN024FB8_at; Start 127; Stop 151
gacagcaaaaagaaccctgcttttc

SEQ ID NO: 199106 - DNA, 25 bp, Artificial
  probe
  misc_feature (1)..(25): SEQ ID NO: 441; WAN024FB8_at; Start 85; Stop 109
gccaccctgaccagtttgttctaca

SEQ ID NO: 199107 - DNA, 25 bp, Artificial
  probe
  misc_feature (1)..(25): SEQ ID NO: 441; WAN024FB8_at; Start 117; Stop 141
ggatggaatagacagcaaaaagaac

SEQ ID NO: 199108 - DNA, 25 bp, Artificial
  probe
  misc_feature (1)..(25): SEQ ID NO: 441; WAN024FB8_at; Start 144; Stop 168
tgcttttctgaaaaagaggtctcct

SEQ ID NO: 199109 - DNA, 25 bp, Artificial
  probe
  misc_feature (1)..(25): SEQ ID NO: 441; WAN024FB8_at; Start 12; Stop 36
tacaattgctaaaagtaaatccatc

SEQ ID NO: 199110 - DNA, 25 bp, Artificial
  probe
  misc_feature (1)..(25): SEQ ID NO: 441; WAN024FB8_at; Start 87; Stop 111
caccctgaccagtttgttctacact

SEQ ID NO: 199111 - DNA, 25 bp, Artificial
  probe
  misc_feature (1)..(25): SEQ ID NO: 441; WAN024FB8_at; Start 19; Stop 43
gctaaaagtaaatccatcatttttc

SEQ ID NO: 199112 - DNA, 25 bp, Artificial
  probe
  misc_feature (1)..(25): SEQ ID NO: 441; WAN024FB8_at; Start 14; Stop 38
caattgctaaaagtaaatccatcat

SEQ ID NO: 199113 - DNA, 25 bp, Artificial
  probe
  misc_feature (1)..(25): SEQ ID NO: 441; WAN024FB8_at; Start 122; Stop 146
gaatagacagcaaaaagaaccctgc

SEQ ID NO: 199114 - DNA, 25 bp, Artificial
  probe
  misc_feature (1)..(25): SEQ ID NO: 441; WAN024FB8_at; Start 118; Stop 142
gatggaatagacagcaaaaagaacc

SEQ ID NO: 199115 - DNA, 25 bp, Artificial
  probe
  misc_feature (1)..(25): SEQ ID NO: 441; WAN024FB8_at; Start 46; Stop 70
ctgtttctttttgagtccctttcat

SEQ ID NO: 199116 - DNA, 25 bp, Artificial
  probe
  misc_feature (1)..(25): SEQ ID NO: 441; WAN024FB8_at; Start 24; Stop 48
aagtaaatccatcatttttctcctg

SEQ ID NO: 199117 - DNA, 25 bp, Artificial
  probe
  misc_feature (1)..(25): SEQ ID NO: 441; WAN024FB8_at; Start 28; Stop 52
aaatccatcatttttctcctgtttc

SEQ ID NO: 199118 - DNA, 25 bp, Artificial
  probe
  misc_feature (1)..(25): SEQ ID NO: 441; WAN024FB8_at; Start 129; Stop 153
cagcaaaaagaaccctgcttttctg

SEQ ID NO: 199119 - DNA, 25 bp, Artificial
  probe
  misc_feature (1)..(25): SEQ ID NO: 441; WAN024FB8_at; Start 80; Stop 104
aactagccaccctgaccagtttgtt

SEQ ID NO: 199120 - DNA, 25 bp, Artificial
  probe
  misc_feature (1)..(25): SEQ ID NO: 441; WAN024FB8_at; Start 89; Stop 113
ccctgaccagtttgttctacacttt

SEQ ID NO: 199121 - DNA, 25 bp, Artificial
  probe
  misc_feature (1)..(25): SEQ ID NO: 441; WAN024FB8_at; Start 150; Stop 174
tctgaaaaagaggtctccttgctaa

SEQ ID NO: 199122 - DNA, 25 bp, Artificial
  probe
  misc_feature (1)..(25): SEQ ID NO: 441; WAN024FB8_at; Start 79; Stop 103
aaactagccaccctgaccagtttgt

SEQ ID NO: 199123 - DNA, 25 bp, Artificial
  probe
  misc_feature (1)..(25): SEQ ID NO: 441; WAN024FB8_at; Start 141; Stop 165
ccctgcttttctgaaaaagaggtct

SEQ ID NO: 199124 - DNA, 25 bp, Artificial
  probe
  misc_feature (1)..(25): SEQ ID NO: 441; WAN024FB8_at; Start 36; Stop 60
catttttctcctgtttctttttgag

SEQ ID NO: 199125 - DNA, 25 bp, Artificial
  probe
  misc_feature (1)..(25): SEQ ID NO: 441; WAN024FB8_at; Start 120; Stop 144
tggaatagacagcaaaaagaaccct

SEQ ID NO: 199126 - DNA, 25 bp, Artificial
  probe
  misc_feature (1)..(25): SEQ ID NO: 441; WAN024FB8_at; Start 2; Stop 26
gcacaatcaatacaattgctaaaag

SEQ ID NO: 199127 - DNA, 25 bp, Artificial
  probe
  misc_feature (1)..(25): SEQ ID NO: 441; WAN024FB8_at; Start 70; Stop 94
ttataccacaaactagccaccctga

SEQ ID NO: 199128 - DNA, 25 bp, Artificial
  probe
  misc_feature (1)..(25): SEQ ID NO: 441; WAN024FB8_at; Start 147; Stop 171
ttttctgaaaaagaggtctccttgc

SEQ ID NO: 199129 - DNA, 25 bp, Artificial
  probe
  misc_feature (1)..(25): SEQ ID NO: 441; WAN024FB8_at; Start 83; Stop 107
tagccaccctgaccagtttgttcta

SEQ ID NO: 199130 - DNA, 25 bp, Artificial
  probe
  misc_feature (1)..(25): SEQ ID NO: 441; WAN024FB8_at; Start 121; Stop 145
ggaatagacagcaaaaagaaccctg

SEQ ID NO: 199131 - DNA, 25 bp, Artificial
  probe
  misc_feature (1)..(25): SEQ ID NO: 441; WAN024FB8_at; Start 148; Stop 172
tttctgaaaaagaggtctccttgct

SEQ ID NO: 199132 - DNA, 25 bp, Artificial
  probe
  misc_feature (1)..(25): SEQ ID NO: 441; WAN024FB8_at; Start 91; Stop 115
ctgaccagtttgttctacactttca

SEQ ID NO: 199133 - DNA, 25 bp, Artificial
  probe
  misc_feature (1)..(25): SEQ ID NO: 441; WAN024FB8_at; Start 123; Stop 147
aatagacagcaaaaagaaccctgct

SEQ ID NO: 199134 - DNA, 25 bp, Artificial
  probe
  misc_feature (1)..(25): SEQ ID NO: 441; WAN024FB8_at; Start 146; Stop 170
cttttctgaaaaagaggtctccttg

SEQ ID NO: 199135 - DNA, 25 bp, Artificial
  probe
  misc_feature (1)..(25): SEQ ID NO: 441; WAN024FB8_at; Start 125; Stop 149
tagacagcaaaaagaaccctgcttt

SEQ ID NO: 199136 - DNA, 25 bp, Artificial
  probe
  misc_feature (1)..(25): SEQ ID NO: 441; WAN024FB8_at; Start 131; Stop 155
gcaaaaagaaccctgcttttctgaa

SEQ ID NO: 199137 - DNA, 25 bp, Artificial
  probe
  misc_feature (1)..(25): SEQ ID NO: 441; WAN024FB8_at; Start 55; Stop 79
tttgagtccctttcattataccaca

SEQ ID NO: 199138 - DNA, 25 bp, Artificial
  probe
  misc_feature (1)..(25): SEQ ID NO: 3954; WAN024FB9_at; Start 144; Stop 168
tcaaaagagtacgaactgcttcagc

SEQ ID NO: 199139 - DNA, 25 bp, Artificial
  probe
  misc_feature (1)..(25): SEQ ID NO: 3954; WAN024FB9_at; Start 141; Stop 165
cactcaaaagagtacgaactgcttc

SEQ ID NO: 199140 - DNA, 25 bp, Artificial
  probe
  misc_feature (1)..(25): SEQ ID NO: 3954; WAN024FB9_at; Start 153; Stop 177
tacgaactgcttcagcattcaaacg

SEQ ID NO: 199141 - DNA, 25 bp, Artificial
  probe
  misc_feature (1)..(25): SEQ ID NO: 3954; WAN024FB9_at; Start 124; Stop 148
tggtttttgaccatttgcactcaaa

SEQ ID NO: 199142 - DNA, 25 bp, Artificial
  probe
  misc_feature (1)..(25): SEQ ID NO: 3954; WAN024FB9_at; Start 146; Stop 170
aaaagagtacgaactgcttcagcat

SEQ ID NO: 199143 - DNA, 25 bp, Artificial
  probe
  misc_feature (1)..(25): SEQ ID NO: 3954; WAN024FB9_at; Start 128; Stop 152
ttttgaccatttgcactcaaaagag

SEQ ID NO: 199144 - DNA, 25 bp, Artificial
  probe
  misc_feature (1)..(25): SEQ ID NO: 3954; WAN024FB9_at; Start 79; Stop 103
ttggcggatgatttggtggtaaact

SEQ ID NO: 199145 - DNA, 25 bp, Artificial
  probe
  misc_feature (1)..(25): SEQ ID NO: 3954; WAN024FB9_at; Start 139; Stop 163
tgcactcaaaagagtacgaactgct

SEQ ID NO: 199146 - DNA, 25 bp, Artificial
  probe
  misc_feature (1)..(25): SEQ ID NO: 3954; WAN024FB9_at; Start 20; Stop 44
catcccagacttttccttatttatt

SEQ ID NO: 199147 - DNA, 25 bp, Artificial
  probe
  misc_feature (1)..(25): SEQ ID NO: 3954; WAN024FB9_at; Start 54; Stop 78
tattgttagcaagggctgccttttg

SEQ ID NO: 199148 - DNA, 25 bp, Artificial
  probe
  misc_feature (1)..(25): SEQ ID NO: 3954; WAN024FB9_at; Start 67; Stop 91
ggctgccttttgttggcggatgatt

SEQ ID NO: 199149 - DNA, 25 bp, Artificial
  probe
  misc_feature (1)..(25): SEQ ID NO: 3954; WAN024FB9_at; Start 59; Stop 83
ttagcaagggctgccttttgttggc

SEQ ID NO: 199150 - DNA, 25 bp, Artificial
  probe
  misc_feature (1)..(25): SEQ ID NO: 3954; WAN024FB9_at; Start 148; Stop 172
aagagtacgaactgcttcagcattc

SEQ ID NO: 199151 - DNA, 25 bp, Artificial
  probe
  misc_feature (1)..(25): SEQ ID NO: 3954; WAN024FB9_at; Start 87; Stop 111
tgatttggtggtaaacttgttgtac

SEQ ID NO: 199152 - DNA, 25 bp, Artificial
  probe
  misc_feature (1)..(25): SEQ ID NO: 3954; WAN024FB9_at; Start 69; Stop 93
ctgccttttgttggcggatgatttg

SEQ ID NO: 199153 - DNA, 25 bp, Artificial
  probe
  misc_feature (1)..(25): SEQ ID NO: 3954; WAN024FB9_at; Start 48; Stop 72
tctttttattgttagcaagggctgc

SEQ ID NO: 199154 - DNA, 25 bp, Artificial
  probe
  misc_feature (1)..(25): SEQ ID NO: 3954; WAN024FB9_at; Start 11; Stop 35
tggaactttcatcccagacttttcc

SEQ ID NO: 199155 - DNA, 25 bp, Artificial
  probe
  misc_feature (1)..(25): SEQ ID NO: 3954; WAN024FB9_at; Start 137; Stop 161
tttgcactcaaaagagtacgaactg

SEQ ID NO: 199156 - DNA, 25 bp, Artificial
  probe
  misc_feature (1)..(25): SEQ ID NO: 3954; WAN024FB9_at; Start 98; Stop 122
taaacttgttgtaccttagcttcgc

SEQ ID NO: 199157 - DNA, 25 bp, Artificial
  probe
  misc_feature (1)..(25): SEQ ID NO: 3954; WAN024FB9_at; Start 3; Stop 27
gagaagtctggaactttcatcccag

SEQ ID NO: 199158 - DNA, 25 bp, Artificial
  probe
  misc_feature (1)..(25): SEQ ID NO: 3954; WAN024FB9_at; Start 63; Stop 87
caagggctgccttttgttggcggat

SEQ ID NO: 199159 - DNA, 25 bp, Artificial
  probe
  misc_feature (1)..(25): SEQ ID NO: 3954; WAN024FB9_at; Start 135; Stop 159
catttgcactcaaaagagtacgaac

SEQ ID NO: 199160 - DNA, 25 bp, Artificial
  probe
  misc_feature (1)..(25): SEQ ID NO: 3954; WAN024FB9_at; Start 5; Stop 29
gaagtctggaactttcatcccagac

SEQ ID NO: 199161 - DNA, 25 bp, Artificial
  probe
  misc_feature (1)..(25): SEQ ID NO: 3954; WAN024FB9_at; Start 112; Stop 136
cttagcttcgcttggtttttgacca

SEQ ID NO: 199162 - DNA, 25 bp, Artificial
  probe
  misc_feature (1)..(25): SEQ ID NO: 3954; WAN024FB9_at; Start 101; Stop 125
acttgttgtaccttagcttcgcttg

SEQ ID NO: 199163 - DNA, 25 bp, Artificial
  probe
  misc_feature (1)..(25): SEQ ID NO: 3954; WAN024FB9_at; Start 121; Stop 145
gcttggtttttgaccatttgcactc

SEQ ID NO: 199164 - DNA, 25 bp, Artificial
  probe
  misc_feature (1)..(25): SEQ ID NO: 3954; WAN024FB9_at; Start 116; Stop 140
gcttcgcttggtttttgaccatttg

SEQ ID NO: 199165 - DNA, 25 bp, Artificial
  probe
  misc_feature (1)..(25): SEQ ID NO: 3954; WAN024FB9_at; Start 104; Stop 128
tgttgtaccttagcttcgcttggtt

SEQ ID NO: 199166 - DNA, 25 bp, Artificial
  probe
  misc_feature (1)..(25): SEQ ID NO: 3954; WAN024FB9_at; Start 150; Stop 174
gagtacgaactgcttcagcattcaa

SEQ ID NO: 199167 - DNA, 25 bp, Artificial
  probe
  misc_feature (1)..(25): SEQ ID NO: 3954; WAN024FB9_at; Start 82; Stop 106
gcggatgatttggtggtaaacttgt

SEQ ID NO: 199168 - DNA, 25 bp, Artificial
  probe
  misc_feature (1)..(25): SEQ ID NO: 3954; WAN024FB9_at; Start 50; Stop 74
tttttattgttagcaagggctgcct

SEQ ID NO: 199169 - DNA, 25 bp, Artificial
  probe
  misc_feature (1)..(25): SEQ ID NO: 3954; WAN024FB9_at; Start 156; Stop 180
gaactgcttcagcattcaaacgtgg

SEQ ID NO: 199170 - DNA, 25 bp, Artificial
  probe
  misc_feature (1)..(25): SEQ ID NO: 3954; WAN024FB9_at; Start 1; Stop 25
gtgagaagtctggaactttcatccc

SEQ ID NO: 199171 - DNA, 25 bp, Artificial
  probe
  misc_feature (1)..(25): SEQ ID NO: 3954; WAN024FB9_at; Start 132; Stop 156
gaccatttgcactcaaaagagtacg

SEQ ID NO: 199172 - DNA, 25 bp, Artificial
  probe
  misc_feature (1)..(25): SEQ ID NO: 3431; WAN024FBA_at; Start 198; Stop 222
tactcttttgagtgcaaatggtcaa

SEQ ID NO: 199173 - DNA, 25 bp, Artificial
  probe
  misc_feature (1)..(25): SEQ ID NO: 3431; WAN024FBA_at; Start 162; Stop 186
tgctgacaacccacgtttgaatgct

SEQ ID NO: 199174 - DNA, 25 bp, Artificial
  probe
  misc_feature (1)..(25): SEQ ID NO: 3431; WAN024FBA_at; Start 269; Stop 293
gccaacaaaaggcagcccttgctaa

SEQ ID NO: 199175 - DNA, 25 bp, Artificial
  probe
  misc_feature (1)..(25): SEQ ID NO: 3431; WAN024FBA_at; Start 77; Stop 101
tagcaattgtattgattgtgctagc

SEQ ID NO: 199176 - DNA, 25 bp, Artificial
  probe
  misc_feature (1)..(25): SEQ ID NO: 3431; WAN024FBA_at; Start 265; Stop 289
atccgccaacaaaaggcagcccttg

SEQ ID NO: 199177 - DNA, 25 bp, Artificial
  probe
  misc_feature (1)..(25): SEQ ID NO: 3431; WAN024FBA_at; Start 259; Stop 283
caaatcatccgccaacaaaaggcag

SEQ ID NO: 199178 - DNA, 25 bp, Artificial
  probe
  misc_feature (1)..(25): SEQ ID NO: 3431; WAN024FBA_at; Start 187; Stop 211
gaagcagttcgtactcttttgagtg

SEQ ID NO: 199179 - DNA, 25 bp, Artificial
  probe
  misc_feature (1)..(25): SEQ ID NO: 3431; WAN024FBA_at; Start 166; Stop 190
gacaacccacgtttgaatgctgaag

SEQ ID NO: 199180 - DNA, 25 bp, Artificial
  probe
  misc_feature (1)..(25): SEQ ID NO: 3431; WAN024FBA_at; Start 280; Stop 304
gcagcccttgctaacaataaaaaga

SEQ ID NO: 199181 - DNA, 25 bp, Artificial
  probe
  misc_feature (1)..(25): SEQ ID NO: 3431; WAN024FBA_at; Start 20; Stop 44
tgtggtataatgaaagggactcaaa

SEQ ID NO: 199182 - DNA, 25 bp, Artificial
  probe
  misc_feature (1)..(25): SEQ ID NO: 3431; WAN024FBA_at; Start 29; Stop 53
atgaaagggactcaaaaagaaacag

SEQ ID NO: 199183 - DNA, 25 bp, Artificial
  probe
  misc_feature (1)..(25): SEQ ID NO: 3431; WAN024FBA_at; Start 191; Stop 215
cagttcgtactcttttgagtgcaaa

SEQ ID NO: 199184 - DNA, 25 bp, Artificial
  probe
  misc_feature (1)..(25): SEQ ID NO: 3431; WAN024FBA_at; Start 5; Stop 29
tcagggtggctagtttgtggtataa

SEQ ID NO: 199185 - DNA, 25 bp, Artificial
  probe
  misc_feature (1)..(25): SEQ ID NO: 3431; WAN024FBA_at; Start 207; Stop 231
gagtgcaaatggtcaaaaaccaagc

SEQ ID NO: 199186 - DNA, 25 bp, Artificial
  probe
  misc_feature (1)..(25): SEQ ID NO: 3431; WAN024FBA_at; Start 128; Stop 152
tgtacttggttcgtaagcaaatcga

SEQ ID NO: 199187 - DNA, 25 bp, Artificial
  probe
  misc_feature (1)..(25): SEQ ID NO: 3431; WAN024FBA_at; Start 90; Stop 114
gattgtgctagcttttctaggagga

SEQ ID NO: 199188 - DNA, 25 bp, Artificial
  probe
  misc_feature (1)..(25): SEQ ID NO: 3431; WAN024FBA_at; Start 216; Stop 240
tggtcaaaaaccaagcgaagctaag

SEQ ID NO: 199189 - DNA, 25 bp, Artificial
  probe
  misc_feature (1)..(25): SEQ ID NO: 3431; WAN024FBA_at; Start 122; Stop 146
gaggaatgtacttggttcgtaagca

SEQ ID NO: 199190 - DNA, 25 bp, Artificial
  probe
  misc_feature (1)..(25): SEQ ID NO: 3431; WAN024FBA_at; Start 212; Stop 236
caaatggtcaaaaaccaagcgaagc

SEQ ID NO: 199191 - DNA, 25 bp, Artificial
  probe
  misc_feature (1)..(25): SEQ ID NO: 3431; WAN024FBA_at; Start 173; Stop 197
cacgtttgaatgctgaagcagttcg

SEQ ID NO: 199192 - DNA, 25 bp, Artificial
  probe
  misc_feature (1)..(25): SEQ ID NO: 3431; WAN024FBA_at; Start 274; Stop 298
caaaaggcagcccttgctaacaata

SEQ ID NO: 199193 - DNA, 25 bp, Artificial
  probe
  misc_feature (1)..(25): SEQ ID NO: 3431; WAN024FBA_at; Start 41; Stop 65
caaaaagaaacaggagaaaaatgat

SEQ ID NO: 199194 - DNA, 25 bp, Artificial
  probe
  misc_feature (1)..(25): SEQ ID NO: 3431; WAN024FBA_at; Start 63; Stop 87
gatggatttacttttagcaattgta

SEQ ID NO: 199195 - DNA, 25 bp, Artificial
  probe
  misc_feature (1)..(25): SEQ ID NO: 3431; WAN024FBA_at; Start 180; Stop 204
gaatgctgaagcagttcgtactctt

SEQ ID NO: 199196 - DNA, 25 bp, Artificial
  probe
  misc_feature (1)..(25): SEQ ID NO: 3431; WAN024FBA_at; Start 149; Stop 173
tcgaaaaagaatttgctgacaaccc

SEQ ID NO: 199197 - DNA, 25 bp, Artificial
  probe
  misc_feature (1)..(25): SEQ ID NO: 3431; WAN024FBA_at; Start 49; Stop 73
aacaggagaaaaatgatggatttac

SEQ ID NO: 199198 - DNA, 25 bp, Artificial
  probe
  misc_feature (1)..(25): SEQ ID NO: 3431; WAN024FBA_at; Start 134; Stop 158
tggttcgtaagcaaatcgaaaaaga

SEQ ID NO: 199199 - DNA, 25 bp, Artificial
  probe
  misc_feature (1)..(25): SEQ ID NO: 3431; WAN024FBA_at; Start 230; Stop 254
gcgaagctaaggtacaacaagttta

SEQ ID NO: 199200 - DNA, 25 bp, Artificial
  probe
  misc_feature (1)..(25): SEQ ID NO: 3431; WAN024FBA_at; Start 169; Stop 193
aacccacgtttgaatgctgaagcag

SEQ ID NO: 199201 - DNA, 25 bp, Artificial
  probe
  misc_feature (1)..(25): SEQ ID NO: 3431; WAN024FBA_at; Start 95; Stop 119
tgctagcttttctaggaggagctct

SEQ ID NO: 199202 - DNA, 25 bp, Artificial
  probe
  misc_feature (1)..(25): SEQ ID NO: 3431; WAN024FBA_at; Start 248; Stop 272
aagtttaccaccaaatcatccgcca

SEQ ID NO: 199203 - DNA, 25 bp, Artificial
  probe
  misc_feature (1)..(25): SEQ ID NO: 3431; WAN024FBA_at; Start 227; Stop 251
caagcgaagctaaggtacaacaagt

SEQ ID NO: 199204 - DNA, 25 bp, Artificial
  probe
  misc_feature (1)..(25): SEQ ID NO: 3431; WAN024FBA_at; Start 241; Stop 265
gtacaacaagtttaccaccaaatca

SEQ ID NO: 199205 - DNA, 25 bp, Artificial
  probe
  misc_feature (1)..(25): SEQ ID NO: 3431; WAN024FBA_at; Start 157; Stop 181
gaatttgctgacaacccacgtttga

SEQ ID NO: 199206 - DNA, 25 bp, Artificial
  probe
  misc_feature (1)..(25): SEQ ID NO: 5110; WAN024FBB_at; Start 79; Stop 103
gagaaagttgaccagctgccaagta

SEQ ID NO: 199207 - DNA, 25 bp, Artificial
  probe
  misc_feature (1)..(25): SEQ ID NO: 5110; WAN024FBB_at; Start 158; Stop 182
ccaatatagacgatttcttcatggg

SEQ ID NO: 199208 - DNA, 25 bp, Artificial
  probe
  misc_feature (1)..(25): SEQ ID NO: 5110; WAN024FBB_at; Start 188; Stop 212
tggcgcatgagctcgcgcacaacgg

SEQ ID NO: 199209 - DNA, 25 bp, Artificial
  probe
  misc_feature (1)..(25): SEQ ID NO: 5110; WAN024FBB_at; Start 168; Stop 192
cgatttcttcatggggaagctggcg

SEQ ID NO: 199210 - DNA, 25 bp, Artificial
  probe
  misc_feature (1)..(25): SEQ ID NO: 5110; WAN024FBB_at; Start 93; Stop 117
gctgccaagtatattcacgaatttg

SEQ ID NO: 199211 - DNA, 25 bp, Artificial
  probe
  misc_feature (1)..(25): SEQ ID NO: 5110; WAN024FBB_at; Start 102; Stop 126
tatattcacgaatttgctcagcagg

SEQ ID NO: 199212 - DNA, 25 bp, Artificial
  probe
  misc_feature (1)..(25): SEQ ID NO: 5110; WAN024FBB_at; Start 147; Stop 171
gcgccgaatctccaatatagacgat

SEQ ID NO: 199213 - DNA, 25 bp, Artificial
  probe
  misc_feature (1)..(25): SEQ ID NO: 5110; WAN024FBB_at; Start 63; Stop 87
tgacatccttggtcaagagaaagtt

SEQ ID NO: 199214 - DNA, 25 bp, Artificial
  probe
  misc_feature (1)..(25): SEQ ID NO: 5110; WAN024FBB_at; Start 34; Stop 58
cgcagtgttacaagcaatgacaatc

SEQ ID NO: 199215 - DNA, 25 bp, Artificial
  probe
  misc_feature (1)..(25): SEQ ID NO: 5110; WAN024FBB_at; Start 143; Stop 167
gcccgcgccgaatctccaatataga

SEQ ID NO: 199216 - DNA, 25 bp, Artificial
  probe
  misc_feature (1)..(25): SEQ ID NO: 5110; WAN024FBB_at; Start 90; Stop 114
ccagctgccaagtatattcacgaat

SEQ ID NO: 199217 - DNA, 25 bp, Artificial
  probe
  misc_feature (1)..(25): SEQ ID NO: 5110; WAN024FBB_at; Start 194; Stop 218
atgagctcgcgcacaacggtcaagc

SEQ ID NO: 199218 - DNA, 25 bp, Artificial
  probe
  misc_feature (1)..(25): SEQ ID NO: 5110; WAN024FBB_at; Start 183; Stop 207
gaagctggcgcatgagctcgcgcac

SEQ ID NO: 199219 - DNA, 25 bp, Artificial
  probe
  misc_feature (1)..(25): SEQ ID NO: 5110; WAN024FBB_at; Start 76; Stop 100
caagagaaagttgaccagctgccaa

SEQ ID NO: 199220 - DNA, 25 bp, Artificial
  probe
  misc_feature (1)..(25): SEQ ID NO: 5110; WAN024FBB_at; Start 26; Stop 50
accgcagtcgcagtgttacaagcaa

SEQ ID NO: 199221 - DNA, 25 bp, Artificial
  probe
  misc_feature (1)..(25): SEQ ID NO: 5110; WAN024FBB_at; Start 104; Stop 128
tattcacgaatttgctcagcaggac

SEQ ID NO: 199222 - DNA, 25 bp, Artificial
  probe
  misc_feature (1)..(25): SEQ ID NO: 5110; WAN024FBB_at; Start 51; Stop 75
tgacaatcattttgacatccttggt

SEQ ID NO: 199223 - DNA, 25 bp, Artificial
  probe
  misc_feature (1)..(25): SEQ ID NO: 5110; WAN024FBB_at; Start 185; Stop 209
agctggcgcatgagctcgcgcacaa

SEQ ID NO: 199224 - DNA, 25 bp, Artificial
  probe
  misc_feature (1)..(25): SEQ ID NO: 5110; WAN024FBB_at; Start 149; Stop 173
gccgaatctccaatatagacgattt

SEQ ID NO: 199225 - DNA, 25 bp, Artificial
  probe
  misc_feature (1)..(25): SEQ ID NO: 5110; WAN024FBB_at; Start 81; Stop 105
gaaagttgaccagctgccaagtata

SEQ ID NO: 199226 - DNA, 25 bp, Artificial
  probe
  misc_feature (1)..(25): SEQ ID NO: 5110; WAN024FBB_at; Start 58; Stop 82
cattttgacatccttggtcaagaga

SEQ ID NO: 199227 - DNA, 25 bp, Artificial
  probe
  misc_feature (1)..(25): SEQ ID NO: 5110; WAN024FBB_at; Start 66; Stop 90
catccttggtcaagagaaagttgac

SEQ ID NO: 199228 - DNA, 25 bp, Artificial
  probe
  misc_feature (1)..(25): SEQ ID NO: 5110; WAN024FBB_at; Start 36; Stop 60
cagtgttacaagcaatgacaatcat

SEQ ID NO: 199229 - DNA, 25 bp, Artificial
  probe
  misc_feature (1)..(25): SEQ ID NO: 5110; WAN024FBB_at; Start 30; Stop 54
cagtcgcagtgttacaagcaatgac

SEQ ID NO: 199230 - DNA, 25 bp, Artificial
  probe
  misc_feature (1)..(25): SEQ ID NO: 5110; WAN024FBB_at; Start 259; Stop 283
catacagtcttctttctagtctttt

SEQ ID NO: 199231 - DNA, 25 bp, Artificial
  probe
  misc_feature (1)..(25): SEQ ID NO: 5110; WAN024FBB_at; Start 283; Stop 307
ttttctgattgatcgttcattatga

SEQ ID NO: 199232 - DNA, 25 bp, Artificial
  probe
  misc_feature (1)..(25): SEQ ID NO: 5110; WAN024FBB_at; Start 107; Stop 131
tcacgaatttgctcagcaggacggg

SEQ ID NO: 199233 - DNA, 25 bp, Artificial
  probe
  misc_feature (1)..(25): SEQ ID NO: 5110; WAN024FBB_at; Start 114; Stop 138
tttgctcagcaggacgggggccata

SEQ ID NO: 199234 - DNA, 25 bp, Artificial
  probe
  misc_feature (1)..(25): SEQ ID NO: 5110; WAN024FBB_at; Start 88; Stop 112
gaccagctgccaagtatattcacga

SEQ ID NO: 199235 - DNA, 25 bp, Artificial
  probe
  misc_feature (1)..(25): SEQ ID NO: 5110; WAN024FBB_at; Start 238; Stop 262
aaaaccaattggtcgattatccata

SEQ ID NO: 199236 - DNA, 25 bp, Artificial
  probe
  misc_feature (1)..(25): SEQ ID NO: 5110; WAN024FBB_at; Start 84; Stop 108
agttgaccagctgccaagtatattc

SEQ ID NO: 199237 - DNA, 25 bp, Artificial
  probe
  misc_feature (1)..(25): SEQ ID NO: 5110; WAN024FBB_at; Start 248; Stop 272
ggtcgattatccatacagtcttctt

SEQ ID NO: 199238 - DNA, 25 bp, Artificial
  probe
  misc_feature (1)..(25): SEQ ID NO: 5110; WAN024FBB_at; Start 243; Stop 267
caattggtcgattatccatacagtc

SEQ ID NO: 199239 - DNA, 25 bp, Artificial
  probe
  misc_feature (1)..(25): SEQ ID NO: 5110; WAN024FBB_at; Start 255; Stop 279
tatccatacagtcttctttctagtc

SEQ ID NO: 199240 - DNA, 25 bp, Artificial
  probe
  misc_feature (1)..(25): SEQ ID NO: 2319; WAN024FBC_at; Start 454; Stop 478
gagtcaggtgccctgtcaaccagtg

SEQ ID NO: 199241 - DNA, 25 bp, Artificial
  probe
  misc_feature (1)..(25): SEQ ID NO: 2319; WAN024FBC_at; Start 410; Stop 434
tacaggtggagagcttggcctgtcc

SEQ ID NO: 199242 - DNA, 25 bp, Artificial
  probe
  misc_feature (1)..(25): SEQ ID NO: 2319; WAN024FBC_at; Start 159; Stop 183
tacttggcagctggtcaactttctc

SEQ ID NO: 199243 - DNA, 25 bp, Artificial
  probe
  misc_feature (1)..(25): SEQ ID NO: 2319; WAN024FBC_at; Start 384; Stop 408
gaaaatccatgatctggatcccgac

SEQ ID NO: 199244 - DNA, 25 bp, Artificial
  probe
  misc_feature (1)..(25): SEQ ID NO: 2319; WAN024FBC_at; Start 441; Stop 465
tgctcccttggttgagtcaggtgcc

SEQ ID NO: 199245 - DNA, 25 bp, Artificial
  probe
  misc_feature (1)..(25): SEQ ID NO: 2319; WAN024FBC_at; Start 425; Stop 449
tggcctgtcccaagtttgctccctt

SEQ ID NO: 199246 - DNA, 25 bp, Artificial
  probe
  misc_feature (1)..(25): SEQ ID NO: 2319; WAN024FBC_at; Start 95; Stop 119
tctatattggagattcggcgcgggc

SEQ ID NO: 199247 - DNA, 25 bp, Artificial
  probe
  misc_feature (1)..(25): SEQ ID NO: 2319; WAN024FBC_at; Start 483; Stop 507
caagaaggtggtctatgaaaccctg

SEQ ID NO: 199248 - DNA, 25 bp, Artificial
  probe
  misc_feature (1)..(25): SEQ ID NO: 2319; WAN024FBC_at; Start 396; Stop 420
tctggatcccgacttacaggtggag

SEQ ID NO: 199249 - DNA, 25 bp, Artificial
  probe
  misc_feature (1)..(25): SEQ ID NO: 2319; WAN024FBC_at; Start 66; Stop 90
catgcgccagcttccccatgaagaa

SEQ ID NO: 199250 - DNA, 25 bp, Artificial
  probe
  misc_feature (1)..(25): SEQ ID NO: 2319; WAN024FBC_at; Start 270; Stop 294
tcctgtcttgggtgtaattttgcca

SEQ ID NO: 199251 - DNA, 25 bp, Artificial
  probe
  misc_feature (1)..(25): SEQ ID NO: 2319; WAN024FBC_at; Start 498; Stop 522
tgaaaccctgcgtcccttggttgga

SEQ ID NO: 199252 - DNA, 25 bp, Artificial
  probe
  misc_feature (1)..(25): SEQ ID NO: 2319; WAN024FBC_at; Start 675; Stop 699
tggtcgcgatgctggaccactccat

SEQ ID NO: 199253 - DNA, 25 bp, Artificial
  probe
  misc_feature (1)..(25): SEQ ID NO: 2319; WAN024FBC_at; Start 718; Stop 742
gccagtagccaaagttttgcacaaa

SEQ ID NO: 199254 - DNA, 25 bp, Artificial
  probe
  misc_feature (1)..(25): SEQ ID NO: 2319; WAN024FBC_at; Start 569; Stop 593
gccctattatccaaaatgtgatggg

SEQ ID NO: 199255 - DNA, 25 bp, Artificial
  probe
  misc_feature (1)..(25): SEQ ID NO: 2319; WAN024FBC_at; Start 44; Stop 68
gcttgaccgttgtgcgcgagctcat

SEQ ID NO: 199256 - DNA, 25 bp, Artificial
  probe
  misc_feature (1)..(25): SEQ ID NO: 2319; WAN024FBC_at; Start 285; Stop 309
aattttgccaggagcttcggcagcc

SEQ ID NO: 199257 - DNA, 25 bp, Artificial
  probe
  misc_feature (1)..(25): SEQ ID NO: 2319; WAN024FBC_at; Start 330; Stop 354
gaaaatcggagtgattggaacgccc

SEQ ID NO: 199258 - DNA, 25 bp, Artificial
  probe
  misc_feature (1)..(25): SEQ ID NO: 2319; WAN024FBC_at; Start 469; Stop 493
tcaaccagtgttaccaagaaggtgg

SEQ ID NO: 199259 - DNA, 25 bp, Artificial
  probe
  misc_feature (1)..(25): SEQ ID NO: 2319; WAN024FBC_at; Start 345; Stop 369
tggaacgcccatgacggtacaatca

SEQ ID NO: 199260 - DNA, 25 bp, Artificial
  probe
  misc_feature (1)..(25): SEQ ID NO: 2319; WAN024FBC_at; Start 529; Stop 553
gatagcctgattttgggctgtactc

SEQ ID NO: 199261 - DNA, 25 bp, Artificial
  probe
  misc_feature (1)..(25): SEQ ID NO: 2319; WAN024FBC_at; Start 688; Stop 712
ggaccactccatcaccgtttttaca

SEQ ID NO: 199262 - DNA, 25 bp, Artificial
  probe
  misc_feature (1)..(25): SEQ ID NO: 2319; WAN024FBC_at; Start 145; Stop 169
caaattcgtgaatatacttggcagc

SEQ ID NO: 199263 - DNA, 25 bp, Artificial
  probe
  misc_feature (1)..(25): SEQ ID NO: 2319; WAN024FBC_at; Start 255; Stop 279
ggctcaactagatattcctgtcttg

SEQ ID NO: 199264 - DNA, 25 bp, Artificial
  probe
  misc_feature (1)..(25): SEQ ID NO: 2319; WAN024FBC_at; Start 131; Stop 155
cccgtcctgctgagcaaattcgtga

SEQ ID NO: 199265 - DNA, 25 bp, Artificial
  probe
  misc_feature (1)..(25): SEQ ID NO: 2319; WAN024FBC_at; Start 301; Stop 325
tcggcagccatcaagtccagtcaag

SEQ ID NO: 199266 - DNA, 25 bp, Artificial
  probe
  misc_feature (1)..(25): SEQ ID NO: 2319; WAN024FBC_at; Start 593; Stop 617
ggccaaaggttcagctcatcgatag

SEQ ID NO: 199267 - DNA, 25 bp, Artificial
  probe
  misc_feature (1)..(25): SEQ ID NO: 2319; WAN024FBC_at; Start 212; Stop 236
ttgcttgtaacactgcgactgcggt

SEQ ID NO: 199268 - DNA, 25 bp, Artificial
  probe
  misc_feature (1)..(25): SEQ ID NO: 2319; WAN024FBC_at; Start 545; Stop 569
gctgtactcattatccactccttcg

SEQ ID NO: 199269 - DNA, 25 bp, Artificial
  probe
  misc_feature (1)..(25): SEQ ID NO: 2319; WAN024FBC_at; Start 512; Stop 536
ccttggttggaaaggtggatagcct

SEQ ID NO: 199270 - DNA, 25 bp, Artificial
  probe
  misc_feature (1)..(25): SEQ ID NO: 2319; WAN024FBC_at; Start 658; Stop 682
tattttgaaatcaatcgtggtcgcg

SEQ ID NO: 199271 - DNA, 25 bp, Artificial
  probe
  misc_feature (1)..(25): SEQ ID NO: 2319; WAN024FBC_at; Start 239; Stop 263
tctgggaagaaatcaaggctcaact

SEQ ID NO: 199272 - DNA, 25 bp, Artificial
  probe
  misc_feature (1)..(25): SEQ ID NO: 2319; WAN024FBC_at; Start 703; Stop 727
cgtttttacacaacagccagtagcc

SEQ ID NO: 199273 - DNA, 25 bp, Artificial
  probe
  misc_feature (1)..(25): SEQ ID NO: 2319; WAN024FBC_at; Start 316; Stop 340
tccagtcaaggtgggaaaatcggag

SEQ ID NO: 199274 - DNA, 25 bp, Artificial
  probe
  misc_feature (1)..(25): SEQ ID NO: 2391; WAN024FBD_at; Start 470; Stop 494
tgacacgagatcacgaggtgtatcc

SEQ ID NO: 199275 - DNA, 25 bp, Artificial
  probe
  misc_feature (1)..(25): SEQ ID NO: 2391; WAN024FBD_at; Start 494; Stop 518
caggtttgtccaaggagtttagccg

SEQ ID NO: 199276 - DNA, 25 bp, Artificial
  probe
  misc_feature (1)..(25): SEQ ID NO: 2391; WAN024FBD_at; Start 307; Stop 331
gccgctatctgcctctatggtcact

SEQ ID NO: 199277 - DNA, 25 bp, Artificial
  probe
  misc_feature (1)..(25): SEQ ID NO: 2391; WAN024FBD_at; Start 14; Stop 38
ccatcattgtaatgagcgattccca

SEQ ID NO: 199278 - DNA, 25 bp, Artificial
  probe
  misc_feature (1)..(25): SEQ ID NO: 2391; WAN024FBD_at; Start 456; Stop 480
caaagtggactttttgacacgagat

SEQ ID NO: 199279 - DNA, 25 bp, Artificial
  probe
  misc_feature (1)..(25): SEQ ID NO: 2391; WAN024FBD_at; Start 23; Stop 47
taatgagcgattcccatggcgatag

SEQ ID NO: 199280 - DNA, 25 bp, Artificial
  probe
  misc_feature (1)..(25): SEQ ID NO: 2391; WAN024FBD_at; Start 441; Stop 465
tgatgatagttacttcaaagtggac

SEQ ID NO: 199281 - DNA, 25 bp, Artificial
  probe
  misc_feature (1)..(25): SEQ ID NO: 2391; WAN024FBD_at; Start 292; Stop 316
gctcaggaggaagaggccgctatct

SEQ ID NO: 199282 - DNA, 25 bp, Artificial
  probe
  misc_feature (1)..(25): SEQ ID NO: 2391; WAN024FBD_at; Start 481; Stop 505
cacgaggtgtatccaggtttgtcca

SEQ ID NO: 199283 - DNA, 25 bp, Artificial
  probe
  misc_feature (1)..(25): SEQ ID NO: 2391; WAN024FBD_at; Start 193; Stop 217
ccagaacgtctggtgactgagcttg

SEQ ID NO: 199284 - DNA, 25 bp, Artificial
  probe
  misc_feature (1)..(25): SEQ ID NO: 2391; WAN024FBD_at; Start 240; Stop 264
tcatggtcacttgtttgacatcaat

SEQ ID NO: 199285 - DNA, 25 bp, Artificial
  probe
  misc_feature (1)..(25): SEQ ID NO: 2391; WAN024FBD_at; Start 201; Stop 225
tctggtgactgagcttggttcgacc

SEQ ID NO: 199286 - DNA, 25 bp, Artificial
  probe
  misc_feature (1)..(25): SEQ ID NO: 2391; WAN024FBD_at; Start 182; Stop 206
acgccggctacccagaacgtctggt

SEQ ID NO: 199287 - DNA, 25 bp, Artificial
  probe
  misc_feature (1)..(25): SEQ ID NO: 2391; WAN024FBD_at; Start 368; Stop 392
tctttctaaatccaggttctatcag

SEQ ID NO: 199288 - DNA, 25 bp, Artificial
  probe
  misc_feature (1)..(25): SEQ ID NO: 2391; WAN024FBD_at; Start 255; Stop 279
tgacatcaatttcaactttcaaaag

SEQ ID NO: 199289 - DNA, 25 bp, Artificial
  probe
  misc_feature (1)..(25): SEQ ID NO: 2391; WAN024FBD_at; Start 167; Stop 191
ggaacatggacttctacgccggcta

SEQ ID NO: 199290 - DNA, 25 bp, Artificial
  probe
  misc_feature (1)..(25): SEQ ID NO: 2391; WAN024FBD_at; Start 394; Stop 418
caaccacgaggtaccatcagagaat

SEQ ID NO: 199291 - DNA, 25 bp, Artificial
  probe
  misc_feature (1)..(25): SEQ ID NO: 2391; WAN024FBD_at; Start 427; Stop 451
gctcgtgtggagattgatgatagtt

SEQ ID NO: 199292 - DNA, 25 bp, Artificial
  probe
  misc_feature (1)..(25): SEQ ID NO: 2391; WAN024FBD_at; Start 51; Stop 75
gattgtggaagaagtccgtgatcgc

SEQ ID NO: 199293 - DNA, 25 bp, Artificial
  probe
  misc_feature (1)..(25): SEQ ID NO: 2391; WAN024FBD_at; Start 398; Stop 422
cacgaggtaccatcagagaatgtct

SEQ ID NO: 199294 - DNA, 25 bp, Artificial
  probe
  misc_feature (1)..(25): SEQ ID NO: 2391; WAN024FBD_at; Start 216; Stop 240
tggttcgaccaagattatccaaact

SEQ ID NO: 199295 - DNA, 25 bp, Artificial
  probe
  misc_feature (1)..(25): SEQ ID NO: 2391; WAN024FBD_at; Start 274; Stop 298
caaaagttggactactgggctcagg

SEQ ID NO: 199296 - DNA, 25 bp, Artificial
  probe
  misc_feature (1)..(25): SEQ ID NO: 2391; WAN024FBD_at; Start 66; Stop 90
ccgtgatcgctatgtgggcaaagtc

SEQ ID NO: 199297 - DNA, 25 bp, Artificial
  probe
  misc_feature (1)..(25): SEQ ID NO: 2391; WAN024FBD_at; Start 228; Stop 252
gattatccaaactcatggtcacttg

SEQ ID NO: 199298 - DNA, 25 bp, Artificial
  probe
  misc_feature (1)..(25): SEQ ID NO: 2391; WAN024FBD_at; Start 162; Stop 186
taaagggaacatggacttctacgcc

SEQ ID NO: 199299 - DNA, 25 bp, Artificial
  probe
  misc_feature (1)..(25): SEQ ID NO: 2391; WAN024FBD_at; Start 353; Stop 377
tggaaggcaagatcctctttctaaa

SEQ ID NO: 199300 - DNA, 25 bp, Artificial
  probe
  misc_feature (1)..(25): SEQ ID NO: 2391; WAN024FBD_at; Start 109; Stop 133
ggcgattctgaactacgtccggatt

SEQ ID NO: 199301 - DNA, 25 bp, Artificial
  probe
  misc_feature (1)..(25): SEQ ID NO: 2391; WAN024FBD_at; Start 102; Stop 126
tcataacggcgattctgaactacgt

SEQ ID NO: 199302 - DNA, 25 bp, Artificial
  probe
  misc_feature (1)..(25): SEQ ID NO: 2391; WAN024FBD_at; Start 413; Stop 437
gagaatgtctctatgctcgtgtgga

SEQ ID NO: 199303 - DNA, 25 bp, Artificial
  probe
  misc_feature (1)..(25): SEQ ID NO: 2391; WAN024FBD_at; Start 148; Stop 172
ggcatccgcgttgttaaagggaaca

SEQ ID NO: 199304 - DNA, 25 bp, Artificial
  probe
  misc_feature (1)..(25): SEQ ID NO: 2391; WAN024FBD_at; Start 327; Stop 351
tcacttgcatgtgccaagtgcttgg

SEQ ID NO: 199305 - DNA, 25 bp, Artificial
  probe
  misc_feature (1)..(25): SEQ ID NO: 2391; WAN024FBD_at; Start 135; Stop 159
tccactttgggagggcatccgcgtt

SEQ ID NO: 199306 - DNA, 25 bp, Artificial
  probe
  misc_feature (1)..(25): SEQ ID NO: 2391; WAN024FBD_at; Start 36; Stop 60
ccatggcgatagcttgattgtggaa

SEQ ID NO: 199307 - DNA, 25 bp, Artificial
  probe
  misc_feature (1)..(25): SEQ ID NO: 2391; WAN024FBD_at; Start 318; Stop 342
cctctatggtcacttgcatgtgcca

SEQ ID NO: 199308 - DNA, 25 bp, Artificial
  probe
  misc_feature (1)..(25): SEQ ID NO: 2509; WAN024FBE_at; Start 139; Stop 163
gattttcctctgtttgaattctcca

SEQ ID NO: 199309 - DNA, 25 bp, Artificial
  probe
  misc_feature (1)..(25): SEQ ID NO: 2509; WAN024FBE_at; Start 715; Stop 739
gaattggccatggtctttgaactca

SEQ ID NO: 199310 - DNA, 25 bp, Artificial
  probe
  misc_feature (1)..(25): SEQ ID NO: 2509; WAN024FBE_at; Start 753; Stop 777
tcagttccacacaaccctagtcgta

SEQ ID NO: 199311 - DNA, 25 bp, Artificial
  probe
  misc_feature (1)..(25): SEQ ID NO: 2509; WAN024FBE_at; Start 770; Stop 794
tagtcgtagccagcccaaataagga

SEQ ID NO: 199312 - DNA, 25 bp, Artificial
  probe
  misc_feature (1)..(25): SEQ ID NO: 2509; WAN024FBE_at; Start 629; Stop 653
tccttggtggcttaccaggcgtctg

SEQ ID NO: 199313 - DNA, 25 bp, Artificial
  probe
  misc_feature (1)..(25): SEQ ID NO: 2509; WAN024FBE_at; Start 942; Stop 966
tcaccgtgccttagccgttaagaaa

SEQ ID NO: 199314 - DNA, 25 bp, Artificial
  probe
  misc_feature (1)..(25): SEQ ID NO: 2509; WAN024FBE_at; Start 601; Stop 625
gcagatgattctggtctcaaagtcg

SEQ ID NO: 199315 - DNA, 25 bp, Artificial
  probe
  misc_feature (1)..(25): SEQ ID NO: 2509; WAN024FBE_at; Start 305; Stop 329
gggccctgctcttggttgaaaatgg

SEQ ID NO: 199316 - DNA, 25 bp, Artificial
  probe
  misc_feature (1)..(25): SEQ ID NO: 2509; WAN024FBE_at; Start 811; Stop 835
gcagactggtcaggttatattaact

SEQ ID NO: 199317 - DNA, 25 bp, Artificial
  probe
  misc_feature (1)..(25): SEQ ID NO: 2509; WAN024FBE_at; Start 533; Stop 557
tgacctttgaagaaaatgcccgcct

SEQ ID NO: 199318 - DNA, 25 bp, Artificial
  probe
  misc_feature (1)..(25): SEQ ID NO: 2509; WAN024FBE_at; Start 615; Stop 639
tctcaaagtcgatgtccttggtggc

SEQ ID NO: 199319 - DNA, 25 bp, Artificial
  probe
  misc_feature (1)..(25): SEQ ID NO: 2509; WAN024FBE_at; Start 659; Stop 683
ctcgtttcgcaggtgtgggagcaac

SEQ ID NO: 199320 - DNA, 25 bp, Artificial
  probe
  misc_feature (1)..(25): SEQ ID NO: 2509; WAN024FBE_at; Start 644; Stop 668
caggcgtctggtcagctcgtttcgc

SEQ ID NO: 199321 - DNA, 25 bp, Artificial
  probe
  misc_feature (1)..(25): SEQ ID NO: 2509; WAN024FBE_at; Start 514; Stop 538
gaagtagcagaaacaggtatgacct

SEQ ID NO: 199322 - DNA, 25 bp, Artificial
  probe
  misc_feature (1)..(25): SEQ ID NO: 2509; WAN024FBE_at; Start 109; Stop 133
ggcgttaacagtttgagcgactata

SEQ ID NO: 199323 - DNA, 25 bp, Artificial
  probe
  misc_feature (1)..(25): SEQ ID NO: 2509; WAN024FBE_at; Start 927; Stop 951
aaaaaatagtcaatctcaccgtgcc

SEQ ID NO: 199324 - DNA, 25 bp, Artificial
  probe
  misc_feature (1)..(25): SEQ ID NO: 2509; WAN024FBE_at; Start 850; Stop 874
gaaaatggctttggctatgatcccc

SEQ ID NO: 199325 - DNA, 25 bp, Artificial
  probe
  misc_feature (1)..(25): SEQ ID NO: 2509; WAN024FBE_at; Start 893; Stop 917
caggtgagtcatcagctgaattaac

SEQ ID NO: 199326 - DNA, 25 bp, Artificial
  probe
  misc_feature (1)..(25): SEQ ID NO: 2509; WAN024FBE_at; Start 173; Stop 197
gagatgaagagtatggtttcccgct

SEQ ID NO: 199327 - DNA, 25 bp, Artificial
  probe
  misc_feature (1)..(25): SEQ ID NO: 2509; WAN024FBE_at; Start 963; Stop 987
gaaacttttggaggtatttccatca

SEQ ID NO: 199328 - DNA, 25 bp, Artificial
  probe
  misc_feature (1)..(25): SEQ ID NO: 2509; WAN024FBE_at; Start 841; Stop 865
cctaagggtgaaaatggctttggct

SEQ ID NO: 199329 - DNA, 25 bp, Artificial
  probe
  misc_feature (1)..(25): SEQ ID NO: 2509; WAN024FBE_at; Start 728; Stop 752
tctttgaactcaaggaccgctcggc

SEQ ID NO: 199330 - DNA, 25 bp, Artificial
  probe
  misc_feature (1)..(25): SEQ ID NO: 2509; WAN024FBE_at; Start 865; Stop 889
tatgatcccctcttccttgtaggag

SEQ ID NO: 199331 - DNA, 25 bp, Artificial
  probe
  misc_feature (1)..(25): SEQ ID NO: 2509; WAN024FBE_at; Start 505; Stop 529
gacctgcctgaagtagcagaaacag

SEQ ID NO: 199332 - DNA, 25 bp, Artificial
  probe
  misc_feature (1)..(25): SEQ ID NO: 2509; WAN024FBE_at; Start 465; Stop 489
taagttaggctacgatgtggaaaat

SEQ ID NO: 199333 - DNA, 25 bp, Artificial
  probe
  misc_feature (1)..(25): SEQ ID NO: 2509; WAN024FBE_at; Start 387; Stop 411
gacaagcaaggtcagagaaaccttg

SEQ ID NO: 199334 - DNA, 25 bp, Artificial
  probe
  misc_feature (1)..(25): SEQ ID NO: 2509; WAN024FBE_at; Start 94; Stop 118
tatagtatttttggtggcgttaaca

SEQ ID NO: 199335 - DNA, 25 bp, Artificial
  probe
  misc_feature (1)..(25): SEQ ID NO: 2509; WAN024FBE_at; Start 977; Stop 1001
tatttccatcatggcaaagcaaacc

SEQ ID NO: 199336 - DNA, 25 bp, Artificial
  probe
  misc_feature (1)..(25): SEQ ID NO: 2509; WAN024FBE_at; Start 702; Stop 726
caaactcttgcacgaattggccatg

SEQ ID NO: 199337 - DNA, 25 bp, Artificial
  probe
  misc_feature (1)..(25): SEQ ID NO: 2509; WAN024FBE_at; Start 478; Stop 502
gatgtggaaaatcttaatgactacc

SEQ ID NO: 199338 - DNA, 25 bp, Artificial
  probe
  misc_feature (1)..(25): SEQ ID NO: 2509; WAN024FBE_at; Start 792; Stop 816
ggaaagtttagttgttgaagcagac

SEQ ID NO: 199339 - DNA, 25 bp, Artificial
  probe
  misc_feature (1)..(25): SEQ ID NO: 2509; WAN024FBE_at; Start 672; Stop 696
tgtgggagcaactgaccgtgaaaat

SEQ ID NO: 199340 - DNA, 25 bp, Artificial
  probe
  misc_feature (1)..(25): SEQ ID NO: 2509; WAN024FBE_at; Start 322; Stop 346
gaaaatgggcaactcttgtatgtag

SEQ ID NO: 199341 - DNA, 25 bp, Artificial
  probe
  misc_feature (1)..(25): SEQ ID NO: 2509; WAN024FBE_at; Start 563; Stop 587
cagaaaccatttctcaattaacggg

SEQ ID NO: 199342 - DNA, 25 bp, Artificial
  probe
  misc_feature (1)..(25): SEQ ID NO: 4049; WAN024FBF_at; Start 204; Stop 228
gcaagagggtcgcatgatccgcatt

SEQ ID NO: 199343 - DNA, 25 bp, Artificial
  probe
  misc_feature (1)..(25): SEQ ID NO: 4049; WAN024FBF_at; Start 70; Stop 94
atccgtatccgccatgatttcttgg

SEQ ID NO: 199344 - DNA, 25 bp, Artificial
  probe
  misc_feature (1)..(25): SEQ ID NO: 4049; WAN024FBF_at; Start 97; Stop 121
caagtcatgctccatctgataagcc

SEQ ID NO: 199345 - DNA, 25 bp, Artificial
  probe
  misc_feature (1)..(25): SEQ ID NO: 4049; WAN024FBF_at; Start 41; Stop 65
gctacgtccgtttttgtcatatgaa

SEQ ID NO: 199346 - DNA, 25 bp, Artificial
  probe
  misc_feature (1)..(25): SEQ ID NO: 4049; WAN024FBF_at; Start 166; Stop 190
tgtcacaacgggaacacgggtatag

SEQ ID NO: 199347 - DNA, 25 bp, Artificial
  probe
  misc_feature (1)..(25): SEQ ID NO: 4049; WAN024FBF_at; Start 116; Stop 140
taagccataatatctctgagtccaa

SEQ ID NO: 199348 - DNA, 25 bp, Artificial
  probe
  misc_feature (1)..(25): SEQ ID NO: 4049; WAN024FBF_at; Start 124; Stop 148
aatatctctgagtccaatcgtccca

SEQ ID NO: 199349 - DNA, 25 bp, Artificial
  probe
  misc_feature (1)..(25): SEQ ID NO: 4049; WAN024FBF_at; Start 173; Stop 197
acgggaacacgggtataggtcatct

SEQ ID NO: 199350 - DNA, 25 bp, Artificial
  probe
  misc_feature (1)..(25): SEQ ID NO: 4049; WAN024FBF_at; Start 213; Stop 237
tcgcatgatccgcattgtgggtatc

SEQ ID NO: 199351 - DNA, 25 bp, Artificial
  probe
  misc_feature (1)..(25): SEQ ID NO: 4049; WAN024FBF_at; Start 102; Stop 126
catgctccatctgataagccataat

SEQ ID NO: 199352 - DNA, 25 bp, Artificial
  probe
  misc_feature (1)..(25): SEQ ID NO: 4049; WAN024FBF_at; Start 177; Stop 201
gaacacgggtataggtcatctgact

SEQ ID NO: 199353 - DNA, 25 bp, Artificial
  probe
  misc_feature (1)..(25): SEQ ID NO: 4049; WAN024FBF_at; Start 161; Stop 185
tcatctgtcacaacgggaacacggg

SEQ ID NO: 199354 - DNA, 25 bp, Artificial
  probe
  misc_feature (1)..(25): SEQ ID NO: 4049; WAN024FBF_at; Start 9; Stop 33
cctccgtaatggtgaaatcaggcga

SEQ ID NO: 199355 - DNA, 25 bp, Artificial
  probe
  misc_feature (1)..(25): SEQ ID NO: 4049; WAN024FBF_at; Start 195; Stop 219
tctgactgagcaagagggtcgcatg

SEQ ID NO: 199356 - DNA, 25 bp, Artificial
  probe
  misc_feature (1)..(25): SEQ ID NO: 4049; WAN024FBF_at; Start 85; Stop 109
gatttcttggctcaagtcatgctcc

SEQ ID NO: 199357 - DNA, 25 bp, Artificial
  probe
  misc_feature (1)..(25): SEQ ID NO: 4049; WAN024FBF_at; Start 147; Stop 171
caacaaactgtttttcatctgtcac

SEQ ID NO: 199358 - DNA, 25 bp, Artificial
  probe
  misc_feature (1)..(25): SEQ ID NO: 4049; WAN024FBF_at; Start 2; Stop 26
tgcaagacctccgtaatggtgaaat

SEQ ID NO: 199359 - DNA, 25 bp, Artificial
  probe
  misc_feature (1)..(25): SEQ ID NO: 4049; WAN024FBF_at; Start 182; Stop 206
cgggtataggtcatctgactgagca

SEQ ID NO: 199360 - DNA, 25 bp, Artificial
  probe
  misc_feature (1)..(25): SEQ ID NO: 4049; WAN024FBF_at; Start 155; Stop 179
tgtttttcatctgtcacaacgggaa

SEQ ID NO: 199361 - DNA, 25 bp, Artificial
  probe
  misc_feature (1)..(25): SEQ ID NO: 4049; WAN024FBF_at; Start 228; Stop 252
tgtgggtatcaatcaacacagctag

SEQ ID NO: 199362 - DNA, 25 bp, Artificial
  probe
  misc_feature (1)..(25): SEQ ID NO: 4049; WAN024FBF_at; Start 27; Stop 51
caggcgaaacaaccgctacgtccgt

SEQ ID NO: 199363 - DNA, 25 bp, Artificial
  probe
  misc_feature (1)..(25): SEQ ID NO: 4049; WAN024FBF_at; Start 221; Stop 245
tccgcattgtgggtatcaatcaaca

SEQ ID NO: 199364 - DNA, 25 bp, Artificial
  probe
  misc_feature (1)..(25): SEQ ID NO: 4049; WAN024FBF_at; Start 200; Stop 224
ctgagcaagagggtcgcatgatccg

SEQ ID NO: 199365 - DNA, 25 bp, Artificial
  probe
  misc_feature (1)..(25): SEQ ID NO: 4049; WAN024FBF_at; Start 91; Stop 115
ttggctcaagtcatgctccatctga

SEQ ID NO: 199366 - DNA, 25 bp, Artificial
  probe
  misc_feature (1)..(25): SEQ ID NO: 4049; WAN024FBF_at; Start 207; Stop 231
agagggtcgcatgatccgcattgtg

SEQ ID NO: 199367 - DNA, 25 bp, Artificial
  probe
  misc_feature (1)..(25): SEQ ID NO: 4049; WAN024FBF_at; Start 186; Stop 210
tataggtcatctgactgagcaagag

SEQ ID NO: 199368 - DNA, 25 bp, Artificial
  probe
  misc_feature (1)..(25): SEQ ID NO: 4049; WAN024FBF_at; Start 77; Stop 101
tccgccatgatttcttggctcaagt

SEQ ID NO: 199369 - DNA, 25 bp, Artificial
  probe
  misc_feature (1)..(25): SEQ ID NO: 4049; WAN024FBF_at; Start 15; Stop 39
taatggtgaaatcaggcgaaacaac

SEQ ID NO: 199370 - DNA, 25 bp, Artificial
  probe
  misc_feature (1)..(25): SEQ ID NO: 4049; WAN024FBF_at; Start 63; Stop 87
gaacgatatccgtatccgccatgat

SEQ ID NO: 199371 - DNA, 25 bp, Artificial
  probe
  misc_feature (1)..(25): SEQ ID NO: 4049; WAN024FBF_at; Start 50; Stop 74
gtttttgtcatatgaacgatatccg

SEQ ID NO: 199372 - DNA, 25 bp, Artificial
  probe
  misc_feature (1)..(25): SEQ ID NO: 4049; WAN024FBF_at; Start 58; Stop 82
catatgaacgatatccgtatccgcc

SEQ ID NO: 199373 - DNA, 25 bp, Artificial
  probe
  misc_feature (1)..(25): SEQ ID NO: 4049; WAN024FBF_at; Start 133; Stop 157
gagtccaatcgtcccaacaaactgt

SEQ ID NO: 199374 - DNA, 25 bp, Artificial
  probe
  misc_feature (1)..(25): SEQ ID NO: 4049; WAN024FBF_at; Start 22; Stop 46
gaaatcaggcgaaacaaccgctacg

SEQ ID NO: 199375 - DNA, 25 bp, Artificial
  probe
  misc_feature (1)..(25): SEQ ID NO: 4049; WAN024FBF_at; Start 192; Stop 216
tcatctgactgagcaagagggtcgc

SEQ ID NO: 199376 - DNA, 25 bp, Artificial
  probe
  misc_feature (1)..(25): SEQ ID NO: 1849; WAN024FBG_at; Start 94; Stop 118
aatgcggatcatgcgaccctcttgc

SEQ ID NO: 199377 - DNA, 25 bp, Artificial
  probe
  misc_feature (1)..(25): SEQ ID NO: 1849; WAN024FBG_at; Start 85; Stop 109
gatacccacaatgcggatcatgcga

SEQ ID NO: 199378 - DNA, 25 bp, Artificial
  probe
  misc_feature (1)..(25): SEQ ID NO: 1849; WAN024FBG_at; Start 371; Stop 395
tccaagggattattacgcgcaagtc

SEQ ID NO: 199379 - DNA, 25 bp, Artificial
  probe
  misc_feature (1)..(25): SEQ ID NO: 1849; WAN024FBG_at; Start 289; Stop 313
tcgcctgatttcaccattacggagg

SEQ ID NO: 199380 - DNA, 25 bp, Artificial
  probe
  misc_feature (1)..(25): SEQ ID NO: 1849; WAN024FBG_at; Start 323; Stop 347
agctagtagatgagtccttcttacc

SEQ ID NO: 199381 - DNA, 25 bp, Artificial
  probe
  misc_feature (1)..(25): SEQ ID NO: 1849; WAN024FBG_at; Start 389; Stop 413
gcaagtccatcctcaaggccgttaa

SEQ ID NO: 199382 - DNA, 25 bp, Artificial
  probe
  misc_feature (1)..(25): SEQ ID NO: 1849; WAN024FBG_at; Start 258; Stop 282
tcatatgacaaaaacggacgtagcg

SEQ ID NO: 199383 - DNA, 25 bp, Artificial
  probe
  misc_feature (1)..(25): SEQ ID NO: 1849; WAN024FBG_at; Start 144; Stop 168
tcccgttgtgacagatgaaaaacag

SEQ ID NO: 199384 - DNA, 25 bp, Artificial
  probe
  misc_feature (1)..(25): SEQ ID NO: 1849; WAN024FBG_at; Start 210; Stop 234
gatggagcatgacttgagccaagaa

SEQ ID NO: 199385 - DNA, 25 bp, Artificial
  probe
  misc_feature (1)..(25): SEQ ID NO: 1849; WAN024FBG_at; Start 272; Stop 296
cggacgtagcggttgtttcgcctga

SEQ ID NO: 199386 - DNA, 25 bp, Artificial
  probe
  misc_feature (1)..(25): SEQ ID NO: 1849; WAN024FBG_at; Start 378; Stop 402
gattattacgcgcaagtccatcctc

SEQ ID NO: 199387 - DNA, 25 bp, Artificial
  probe
  misc_feature (1)..(25): SEQ ID NO: 1849; WAN024FBG_at; Start 302; Stop 326
ccattacggaggtcttgcacaagct

SEQ ID NO: 199388 - DNA, 25 bp, Artificial
  probe
  misc_feature (1)..(25): SEQ ID NO: 1849; WAN024FBG_at; Start 133; Stop 157
tatacccgtgttcccgttgtgacag

SEQ ID NO: 199389 - DNA, 25 bp, Artificial
  probe
  misc_feature (1)..(25): SEQ ID NO: 1849; WAN024FBG_at; Start 155; Stop 179
cagatgaaaaacagtttgttgggac

SEQ ID NO: 199390 - DNA, 25 bp, Artificial
  probe
  misc_feature (1)..(25): SEQ ID NO: 1849; WAN024FBG_at; Start 228; Stop 252
ccaagaaatcatggcggatacggat

SEQ ID NO: 199391 - DNA, 25 bp, Artificial
  probe
  misc_feature (1)..(25): SEQ ID NO: 1849; WAN024FBG_at; Start 193; Stop 217
gatattatggcttatcagatggagc

SEQ ID NO: 199392 - DNA, 25 bp, Artificial
  probe
  misc_feature (1)..(25): SEQ ID NO: 1849; WAN024FBG_at; Start 54; Stop 78
gacccctgctaaaaatctagctgtg

SEQ ID NO: 199393 - DNA, 25 bp, Artificial
  probe
  misc_feature (1)..(25): SEQ ID NO: 1849; WAN024FBG_at; Start 3; Stop 27
gattgccaaggagtttgagactttc

SEQ ID NO: 199394 - DNA, 25 bp, Artificial
  probe
  misc_feature (1)..(25): SEQ ID NO: 1849; WAN024FBG_at; Start 403; Stop 427
aaggccgttaatgccctcttgcatg

SEQ ID NO: 199395 - DNA, 25 bp, Artificial
  probe
  misc_feature (1)..(25): SEQ ID NO: 1849; WAN024FBG_at; Start 435; Stop 459
taaggaatatgagattcgatgccaa

SEQ ID NO: 199396 - DNA, 25 bp, Artificial
  probe
  misc_feature (1)..(25): SEQ ID NO: 1849; WAN024FBG_at; Start 220; Stop 244
gacttgagccaagaaatcatggcgg

SEQ ID NO: 199397 - DNA, 25 bp, Artificial
  probe
  misc_feature (1)..(25): SEQ ID NO: 1849; WAN024FBG_at; Start 236; Stop 260
tcatggcggatacggatatcgttca

SEQ ID NO: 199398 - DNA, 25 bp, Artificial
  probe
  misc_feature (1)..(25): SEQ ID NO: 1849; WAN024FBG_at; Start 243; Stop 267
ggatacggatatcgttcatatgaca

SEQ ID NO: 199399 - DNA, 25 bp, Artificial
  probe
  misc_feature (1)..(25): SEQ ID NO: 1849; WAN024FBG_at; Start 315; Stop 339
cttgcacaagctagtagatgagtcc

SEQ ID NO: 199400 - DNA, 25 bp, Artificial
  probe
  misc_feature (1)..(25): SEQ ID NO: 1849; WAN024FBG_at; Start 50; Stop 74
ttttgacccctgctaaaaatctagc

SEQ ID NO: 199401 - DNA, 25 bp, Artificial
  probe
  misc_feature (1)..(25): SEQ ID NO: 1849; WAN024FBG_at; Start 121; Stop 145
agtcagatgacctatacccgtgttc

SEQ ID NO: 199402 - DNA, 25 bp, Artificial
  probe
  misc_feature (1)..(25): SEQ ID NO: 1849; WAN024FBG_at; Start 77; Stop 101
tgttgattgatacccacaatgcgga

SEQ ID NO: 199403 - DNA, 25 bp, Artificial
  probe
  misc_feature (1)..(25): SEQ ID NO: 1849; WAN024FBG_at; Start 166; Stop 190
cagtttgttgggacgattggactca

SEQ ID NO: 199404 - DNA, 25 bp, Artificial
  probe
  misc_feature (1)..(25): SEQ ID NO: 1849; WAN024FBG_at; Start 179; Stop 203
cgattggactcagagatattatggc

SEQ ID NO: 199405 - DNA, 25 bp, Artificial
  probe
  misc_feature (1)..(25): SEQ ID NO: 1849; WAN024FBG_at; Start 278; Stop 302
tagcggttgtttcgcctgatttcac

SEQ ID NO: 199406 - DNA, 25 bp, Artificial
  probe
  misc_feature (1)..(25): SEQ ID NO: 1849; WAN024FBG_at; Start 205; Stop 229
tatcagatggagcatgacttgagcc

SEQ ID NO: 199407 - DNA, 25 bp, Artificial
  probe
  misc_feature (1)..(25): SEQ ID NO: 1849; WAN024FBG_at; Start 359; Stop 383
cagagggtattttccaagggattat

SEQ ID NO: 199408 - DNA, 25 bp, Artificial
  probe
  misc_feature (1)..(25): SEQ ID NO: 1849; WAN024FBG_at; Start 69; Stop 93
tctagctgtgttgattgatacccac

SEQ ID NO: 199409 - DNA, 25 bp, Artificial
  probe
  misc_feature (1)..(25): SEQ ID NO: 1849; WAN024FBG_at; Start 10; Stop 34
aaggagtttgagactttcttgttgg

SEQ ID NO: 199410 - DNA, 25 bp, Artificial
  probe
  misc_feature (1)..(25): SEQ ID NO: 7542; WAN024FBH_at; Start 117; Stop 141
agctctggttgataggcgccttaga

SEQ ID NO: 199411 - DNA, 25 bp, Artificial
  probe
  misc_feature (1)..(25): SEQ ID NO: 7542; WAN024FBH_at; Start 127; Stop 151
gataggcgccttagagtattccttc

SEQ ID NO: 199412 - DNA, 25 bp, Artificial
  probe
  misc_feature (1)..(25): SEQ ID NO: 7542; WAN024FBH_at; Start 86; Stop 110
atggacaaggtctcaagggcagccc

SEQ ID NO: 199413 - DNA, 25 bp, Artificial
  probe
  misc_feature (1)..(25): SEQ ID NO: 7542; WAN024FBH_at; Start 107; Stop 131
gcccgagacaagctctggttgatag

SEQ ID NO: 199414 - DNA, 25 bp, Artificial
  probe
  misc_feature (1)..(25): SEQ ID NO: 7542; WAN024FBH_at; Start 2; Stop 26
tgcaactttgccaaggctccactcg

SEQ ID NO: 199415 - DNA, 25 bp, Artificial
  probe
  misc_feature (1)..(25): SEQ ID NO: 7542; WAN024FBH_at; Start 19; Stop 43
tccactcgagttaaccccacggatg

SEQ ID NO: 199416 - DNA, 25 bp, Artificial
  probe
  misc_feature (1)..(25): SEQ ID NO: 7542; WAN024FBH_at; Start 67; Stop 91
cggctgtttgtaggcaataatggac

SEQ ID NO: 199417 - DNA, 25 bp, Artificial
  probe
  misc_feature (1)..(25): SEQ ID NO: 7542; WAN024FBH_at; Start 94; Stop 118
ggtctcaagggcagcccgagacaag

SEQ ID NO: 199418 - DNA, 25 bp, Artificial
  probe
  misc_feature (1)..(25): SEQ ID NO: 7542; WAN024FBH_at; Start 40; Stop 64
gatggcatcaatttctatccgcgta

SEQ ID NO: 199419 - DNA, 25 bp, Artificial
  probe
  misc_feature (1)..(25): SEQ ID NO: 7542; WAN024FBH_at; Start 61; Stop 85
cgtaatcggctgtttgtaggcaata

SEQ ID NO: 199420 - DNA, 25 bp, Artificial
  probe
  misc_feature (1)..(25): SEQ ID NO: 7542; WAN024FBH_at; Start 26; Stop 50
gagttaaccccacggatggcatcaa

SEQ ID NO: 199421 - DNA, 25 bp, Artificial
  probe
  misc_feature (1)..(25): SEQ ID NO: 7542; WAN024FBH_at; Start 181; Stop 205
caatctataagcaccacttgtctca

SEQ ID NO: 199422 - DNA, 25 bp, Artificial
  probe
  misc_feature (1)..(25): SEQ ID NO: 7542; WAN024FBH_at; Start 90; Stop 114
acaaggtctcaagggcagcccgaga

SEQ ID NO: 199423 - DNA, 25 bp, Artificial
  probe
  misc_feature (1)..(25): SEQ ID NO: 7542; WAN024FBH_at; Start 30; Stop 54
taaccccacggatggcatcaatttc

SEQ ID NO: 199424 - DNA, 25 bp, Artificial
  probe
  misc_feature (1)..(25): SEQ ID NO: 7542; WAN024FBH_at; Start 45; Stop 69
catcaatttctatccgcgtaatcgg

SEQ ID NO: 199425 - DNA, 25 bp, Artificial
  probe
  misc_feature (1)..(25): SEQ ID NO: 7542; WAN024FBH_at; Start 115; Stop 139
caagctctggttgataggcgcctta

SEQ ID NO: 199426 - DNA, 25 bp, Artificial
  probe
  misc_feature (1)..(25): SEQ ID NO: 7542; WAN024FBH_at; Start 102; Stop 126
gggcagcccgagacaagctctggtt

SEQ ID NO: 199427 - DNA, 25 bp, Artificial
  probe
  misc_feature (1)..(25): SEQ ID NO: 7542; WAN024FBH_at; Start 188; Stop 212
taagcaccacttgtctcaatcaaag

SEQ ID NO: 199428 - DNA, 25 bp, Artificial
  probe
  misc_feature (1)..(25): SEQ ID NO: 7542; WAN024FBH_at; Start 113; Stop 137
gacaagctctggttgataggcgcct

SEQ ID NO: 199429 - DNA, 25 bp, Artificial
  probe
  misc_feature (1)..(25): SEQ ID NO: 7542; WAN024FBH_at; Start 58; Stop 82
ccgcgtaatcggctgtttgtaggca

SEQ ID NO: 199430 - DNA, 25 bp, Artificial
  probe
  misc_feature (1)..(25): SEQ ID NO: 7542; WAN024FBH_at; Start 168; Stop 192
gaggcttggtcaccaatctataagc

SEQ ID NO: 199431 - DNA, 25 bp, Artificial
  probe
  misc_feature (1)..(25): SEQ ID NO: 7542; WAN024FBH_at; Start 140; Stop 164
gagtattccttcaaaatctctgcaa

SEQ ID NO: 199432 - DNA, 25 bp, Artificial
  probe
  misc_feature (1)..(25): SEQ ID NO: 7542; WAN024FBH_at; Start 81; Stop 105
caataatggacaaggtctcaagggc

SEQ ID NO: 199433 - DNA, 25 bp, Artificial
  probe
  misc_feature (1)..(25): SEQ ID NO: 7542; WAN024FBH_at; Start 161; Stop 185
gcaaattgaggcttggtcaccaatc

SEQ ID NO: 199434 - DNA, 25 bp, Artificial
  probe
  misc_feature (1)..(25): SEQ ID NO: 7542; WAN024FBH_at; Start 10; Stop 34
tgccaaggctccactcgagttaacc

SEQ ID NO: 199435 - DNA, 25 bp, Artificial
  probe
  misc_feature (1)..(25): SEQ ID NO: 7542; WAN024FBH_at; Start 84; Stop 108
taatggacaaggtctcaagggcagc

SEQ ID NO: 199436 - DNA, 25 bp, Artificial
  probe
  misc_feature (1)..(25): SEQ ID NO: 7542; WAN024FBH_at; Start 75; Stop 99
tgtaggcaataatggacaaggtctc

SEQ ID NO: 199437 - DNA, 25 bp, Artificial
  probe
  misc_feature (1)..(25): SEQ ID NO: 7542; WAN024FBH_at; Start 24; Stop 48
tcgagttaaccccacggatggcatc

SEQ ID NO: 199438 - DNA, 25 bp, Artificial
  probe
  misc_feature (1)..(25): SEQ ID NO: 7542; WAN024FBH_at; Start 131; Stop 155
ggcgccttagagtattccttcaaaa

SEQ ID NO: 199439 - DNA, 25 bp, Artificial
  probe
  misc_feature (1)..(25): SEQ ID NO: 7542; WAN024FBH_at; Start 176; Stop 200
gtcaccaatctataagcaccacttg

SEQ ID NO: 199440 - DNA, 25 bp, Artificial
  probe
  misc_feature (1)..(25): SEQ ID NO: 7542; WAN024FBH_at; Start 158; Stop 182
tctgcaaattgaggcttggtcacca

SEQ ID NO: 199441 - DNA, 25 bp, Artificial
  probe
  misc_feature (1)..(25): SEQ ID NO: 7542; WAN024FBH_at; Start 7; Stop 31
ctttgccaaggctccactcgagtta

SEQ ID NO: 199442 - DNA, 25 bp, Artificial
  probe
  misc_feature (1)..(25): SEQ ID NO: 7542; WAN024FBH_at; Start 149; Stop 173
ttcaaaatctctgcaaattgaggct

SEQ ID NO: 199443 - DNA, 25 bp, Artificial
  probe
  misc_feature (1)..(25): SEQ ID NO: 7542; WAN024FBH_at; Start 52; Stop 76
ttctatccgcgtaatcggctgtttg

SEQ ID NO: 199444 - DNA, 25 bp, Artificial
  probe
  misc_feature (1)..(25): SEQ ID NO: 5737; WAN024FBI_at; Start 105; Stop 129
gctaactggcggacccgaatcccat

SEQ ID NO: 199445 - DNA, 25 bp, Artificial
  probe
  misc_feature (1)..(25): SEQ ID NO: 5737; WAN024FBI_at; Start 149; Stop 173
gagcgcttctatttttgctaaagta

SEQ ID NO: 199446 - DNA, 25 bp, Artificial
  probe
  misc_feature (1)..(25): SEQ ID NO: 5737; WAN024FBI_at; Start 138; Stop 162
gctacaaacaagagcgcttctattt

SEQ ID NO: 199447 - DNA, 25 bp, Artificial
  probe
  misc_feature (1)..(25): SEQ ID NO: 5737; WAN024FBI_at; Start 131; Stop 155
ttcacccgctacaaacaagagcgct

SEQ ID NO: 199448 - DNA, 25 bp, Artificial
  probe
  misc_feature (1)..(25): SEQ ID NO: 5737; WAN024FBI_at; Start 176; Stop 200
catctttcctctctatcaagtctag

SEQ ID NO: 199449 - DNA, 25 bp, Artificial
  probe
  misc_feature (1)..(25): SEQ ID NO: 5737; WAN024FBI_at; Start 99; Stop 123
agttcagctaactggcggacccgaa

SEQ ID NO: 199450 - DNA, 25 bp, Artificial
  probe
  misc_feature (1)..(25): SEQ ID NO: 5737; WAN024FBI_at; Start 171; Stop 195
gtactcatctttcctctctatcaag

SEQ ID NO: 199451 - DNA, 25 bp, Artificial
  probe
  misc_feature (1)..(25): SEQ ID NO: 5737; WAN024FBI_at; Start 156; Stop 180
tctatttttgctaaagtactcatct

SEQ ID NO: 199452 - DNA, 25 bp, Artificial
  probe
  misc_feature (1)..(25): SEQ ID NO: 5737; WAN024FBI_at; Start 129; Stop 153
tcttcacccgctacaaacaagagcg

SEQ ID NO: 199453 - DNA, 25 bp, Artificial
  probe
  misc_feature (1)..(25): SEQ ID NO: 5737; WAN024FBI_at; Start 200; Stop 224
gctttgaggcacttgactttcttcc

SEQ ID NO: 199454 - DNA, 25 bp, Artificial
  probe
  misc_feature (1)..(25): SEQ ID NO: 5737; WAN024FBI_at; Start 213; Stop 237
tgactttcttccttcttttccatga

SEQ ID NO: 199455 - DNA, 25 bp, Artificial
  probe
  misc_feature (1)..(25): SEQ ID NO: 5737; WAN024FBI_at; Start 70; Stop 94
gctggatgcctgtcggtggcagaga

SEQ ID NO: 199456 - DNA, 25 bp, Artificial
  probe
  misc_feature (1)..(25): SEQ ID NO: 5737; WAN024FBI_at; Start 204; Stop 228
tgaggcacttgactttcttccttct

SEQ ID NO: 199457 - DNA, 25 bp, Artificial
  probe
  misc_feature (1)..(25): SEQ ID NO: 5737; WAN024FBI_at; Start 135; Stop 159
cccgctacaaacaagagcgcttcta

SEQ ID NO: 199458 - DNA, 25 bp, Artificial
  probe
  misc_feature (1)..(25): SEQ ID NO: 5737; WAN024FBI_at; Start 187; Stop 211
tctatcaagtctagctttgaggcac

SEQ ID NO: 199459 - DNA, 25 bp, Artificial
  probe
  misc_feature (1)..(25): SEQ ID NO: 5737; WAN024FBI_at; Start 142; Stop 166
caaacaagagcgcttctatttttgc

SEQ ID NO: 199460 - DNA, 25 bp, Artificial
  probe
  misc_feature (1)..(25): SEQ ID NO: 5737; WAN024FBI_at; Start 153; Stop 177
gcttctatttttgctaaagtactca

SEQ ID NO: 199461 - DNA, 25 bp, Artificial
  probe
  misc_feature (1)..(25): SEQ ID NO: 5737; WAN024FBI_at; Start 127; Stop 151
catcttcacccgctacaaacaagag

SEQ ID NO: 199462 - DNA, 25 bp, Artificial
  probe
  misc_feature (1)..(25): SEQ ID NO: 5737; WAN024FBI_at; Start 97; Stop 121
ggagttcagctaactggcggacccg

SEQ ID NO: 199463 - DNA, 25 bp, Artificial
  probe
  misc_feature (1)..(25): SEQ ID NO: 5737; WAN024FBI_at; Start 90; Stop 114
agagagaggagttcagctaactggc

SEQ ID NO: 199464 - DNA, 25 bp, Artificial
  probe
  misc_feature (1)..(25): SEQ ID NO: 5737; WAN024FBI_at; Start 189; Stop 213
tatcaagtctagctttgaggcactt

SEQ ID NO: 199465 - DNA, 25 bp, Artificial
  probe
  misc_feature (1)..(25): SEQ ID NO: 5737; WAN024FBI_at; Start 87; Stop 111
ggcagagagaggagttcagctaact

SEQ ID NO: 199466 - DNA, 25 bp, Artificial
  probe
  misc_feature (1)..(25): SEQ ID NO: 5737; WAN024FBI_at; Start 95; Stop 119
gaggagttcagctaactggcggacc

SEQ ID NO: 199467 - DNA, 25 bp, Artificial
  probe
  misc_feature (1)..(25): SEQ ID NO: 5737; WAN024FBI_at; Start 86; Stop 110
tggcagagagaggagttcagctaac

SEQ ID NO: 199468 - DNA, 25 bp, Artificial
  probe
  misc_feature (1)..(25): SEQ ID NO: 5737; WAN024FBI_at; Start 164; Stop 188
tgctaaagtactcatctttcctctc

SEQ ID NO: 199469 - DNA, 25 bp, Artificial
  probe
  misc_feature (1)..(25): SEQ ID NO: 5737; WAN024FBI_at; Start 111; Stop 135
tggcggacccgaatcccatcttcac

SEQ ID NO: 199470 - DNA, 25 bp, Artificial
  probe
  misc_feature (1)..(25): SEQ ID NO: 5737; WAN024FBI_at; Start 182; Stop 206
tcctctctatcaagtctagctttga

SEQ ID NO: 199471 - DNA, 25 bp, Artificial
  probe
  misc_feature (1)..(25): SEQ ID NO: 5737; WAN024FBI_at; Start 146; Stop 170
caagagcgcttctatttttgctaaa

SEQ ID NO: 199472 - DNA, 25 bp, Artificial
  probe
  misc_feature (1)..(25): SEQ ID NO: 5737; WAN024FBI_at; Start 197; Stop 221
ctagctttgaggcacttgactttct

SEQ ID NO: 199473 - DNA, 25 bp, Artificial
  probe
  misc_feature (1)..(25): SEQ ID NO: 5737; WAN024FBI_at; Start 178; Stop 202
tctttcctctctatcaagtctagct

SEQ ID NO: 199474 - DNA, 25 bp, Artificial
  probe
  misc_feature (1)..(25): SEQ ID NO: 5737; WAN024FBI_at; Start 132; Stop 156
tcacccgctacaaacaagagcgctt

SEQ ID NO: 199475 - DNA, 25 bp, Artificial
  probe
  misc_feature (1)..(25): SEQ ID NO: 5737; WAN024FBI_at; Start 192; Stop 216
caagtctagctttgaggcacttgac

SEQ ID NO: 199476 - DNA, 25 bp, Artificial
  probe
  misc_feature (1)..(25): SEQ ID NO: 5737; WAN024FBI_at; Start 185; Stop 209
tctctatcaagtctagctttgaggc

SEQ ID NO: 199477 - DNA, 25 bp, Artificial
  probe
  misc_feature (1)..(25): SEQ ID NO: 5737; WAN024FBI_at; Start 100; Stop 124
gttcagctaactggcggacccgaat

SEQ ID NO: 199478 - DNA, 25 bp, Artificial
  probe
  misc_feature (1)..(25): SEQ ID NO: 1935; WAN024FBJ_at; Start 204; Stop 228
tcagcatgagctgactagccatgac

SEQ ID NO: 199479 - DNA, 25 bp, Artificial
  probe
  misc_feature (1)..(25): SEQ ID NO: 1935; WAN024FBJ_at; Start 17; Stop 41
tcttcgtaaatcaactctgtcggcg

SEQ ID NO: 199480 - DNA, 25 bp, Artificial
  probe
  misc_feature (1)..(25): SEQ ID NO: 1935; WAN024FBJ_at; Start 247; Stop 271
ttccagacgcatggcctgcagggtt

SEQ ID NO: 199481 - DNA, 25 bp, Artificial
  probe
  misc_feature (1)..(25): SEQ ID NO: 1935; WAN024FBJ_at; Start 187; Stop 211
gagtttacgactcttaatcagcatg

SEQ ID NO: 199482 - DNA, 25 bp, Artificial
  probe
  misc_feature (1)..(25): SEQ ID NO: 1935; WAN024FBJ_at; Start 31; Stop 55
ctctgtcggcgctttggaataatac

SEQ ID NO: 199483 - DNA, 25 bp, Artificial
  probe
  misc_feature (1)..(25): SEQ ID NO: 1935; WAN024FBJ_at; Start 40; Stop 64
cgctttggaataatactgggcccgt

SEQ ID NO: 199484 - DNA, 25 bp, Artificial
  probe
  misc_feature (1)..(25): SEQ ID NO: 1935; WAN024FBJ_at; Start 116; Stop 140
tcttcgatttgagagaggaggtcct

SEQ ID NO: 199485 - DNA, 25 bp, Artificial
  probe
  misc_feature (1)..(25): SEQ ID NO: 1935; WAN024FBJ_at; Start 224; Stop 248
atgaccatgtactcacccgtcactt

SEQ ID NO: 199486 - DNA, 25 bp, Artificial
  probe
  misc_feature (1)..(25): SEQ ID NO: 1935; WAN024FBJ_at; Start 82; Stop 106
caagtgctcacccaagagcttgaac

SEQ ID NO: 199487 - DNA, 25 bp, Artificial
  probe
  misc_feature (1)..(25): SEQ ID NO: 1935; WAN024FBJ_at; Start 87; Stop 111
gctcacccaagagcttgaacttgcg

SEQ ID NO: 199488 - DNA, 25 bp, Artificial
  probe
  misc_feature (1)..(25): SEQ ID NO: 1935; WAN024FBJ_at; Start 192; Stop 216
tacgactcttaatcagcatgagctg

SEQ ID NO: 199489 - DNA, 25 bp, Artificial
  probe
  misc_feature (1)..(25): SEQ ID NO: 1935; WAN024FBJ_at; Start 25; Stop 49
aatcaactctgtcggcgctttggaa

SEQ ID NO: 199490 - DNA, 25 bp, Artificial
  probe
  misc_feature (1)..(25): SEQ ID NO: 1935; WAN024FBJ_at; Start 75; Stop 99
tggcttccaagtgctcacccaagag

SEQ ID NO: 199491 - DNA, 25 bp, Artificial
  probe
  misc_feature (1)..(25): SEQ ID NO: 1935; WAN024FBJ_at; Start 146; Stop 170
aggtcatcccccaagtctgtcactt

SEQ ID NO: 199492 - DNA, 25 bp, Artificial
  probe
  misc_feature (1)..(25): SEQ ID NO: 1935; WAN024FBJ_at; Start 131; Stop 155
aggaggtcctgctccaggtcatccc

SEQ ID NO: 199493 - DNA, 25 bp, Artificial
  probe
  misc_feature (1)..(25): SEQ ID NO: 1935; WAN024FBJ_at; Start 45; Stop 69
tggaataatactgggcccgttcttg

SEQ ID NO: 199494 - DNA, 25 bp, Artificial
  probe
  misc_feature (1)..(25): SEQ ID NO: 1935; WAN024FBJ_at; Start 121; Stop 145
gatttgagagaggaggtcctgctcc

SEQ ID NO: 199495 - DNA, 25 bp, Artificial
  probe
  misc_feature (1)..(25): SEQ ID NO: 1935; WAN024FBJ_at; Start 242; Stop 266
gtcacttccagacgcatggcctgca

SEQ ID NO: 199496 - DNA, 25 bp, Artificial
  probe
  misc_feature (1)..(25): SEQ ID NO: 1935; WAN024FBJ_at; Start 59; Stop 83
gcccgttcttggtgcttggcttcca

SEQ ID NO: 199497 - DNA, 25 bp, Artificial
  probe
  misc_feature (1)..(25): SEQ ID NO: 1935; WAN024FBJ_at; Start 110; Stop 134
cgatattcttcgatttgagagagga

SEQ ID NO: 199498 - DNA, 25 bp, Artificial
  probe
  misc_feature (1)..(25): SEQ ID NO: 1935; WAN024FBJ_at; Start 128; Stop 152
gagaggaggtcctgctccaggtcat

SEQ ID NO: 199499 - DNA, 25 bp, Artificial
  probe
  misc_feature (1)..(25): SEQ ID NO: 1935; WAN024FBJ_at; Start 93; Stop 117
ccaagagcttgaacttgcgatattc

SEQ ID NO: 199500 - DNA, 25 bp, Artificial
  probe
  misc_feature (1)..(25): SEQ ID NO: 1935; WAN024FBJ_at; Start 3; Stop 27
gcacaagctccgcatcttcgtaaat

SEQ ID NO: 199501 - DNA, 25 bp, Artificial
  probe
  misc_feature (1)..(25): SEQ ID NO: 1935; WAN024FBJ_at; Start 211; Stop 235
gagctgactagccatgaccatgtac

SEQ ID NO: 199502 - DNA, 25 bp, Artificial
  probe
  misc_feature (1)..(25): SEQ ID NO: 1935; WAN024FBJ_at; Start 160; Stop 184
gtctgtcacttctgctaccttcgga

SEQ ID NO: 199503 - DNA, 25 bp, Artificial
  probe
  misc_feature (1)..(25): SEQ ID NO: 1935; WAN024FBJ_at; Start 172; Stop 196
tgctaccttcggaaggagtttacga

SEQ ID NO: 199504 - DNA, 25 bp, Artificial
  probe
  misc_feature (1)..(25): SEQ ID NO: 1935; WAN024FBJ_at; Start 6; Stop 30
caagctccgcatcttcgtaaatcaa

SEQ ID NO: 199505 - DNA, 25 bp, Artificial
  probe
  misc_feature (1)..(25): SEQ ID NO: 1935; WAN024FBJ_at; Start 36; Stop 60
tcggcgctttggaataatactgggc

SEQ ID NO: 199506 - DNA, 25 bp, Artificial
  probe
  misc_feature (1)..(25): SEQ ID NO: 1935; WAN024FBJ_at; Start 219; Stop 243
tagccatgaccatgtactcacccgt

SEQ ID NO: 199507 - DNA, 25 bp, Artificial
  probe
  misc_feature (1)..(25): SEQ ID NO: 1935; WAN024FBJ_at; Start 165; Stop 189
tcacttctgctaccttcggaaggag

SEQ ID NO: 199508 - DNA, 25 bp, Artificial
  probe
  misc_feature (1)..(25): SEQ ID NO: 1935; WAN024FBJ_at; Start 53; Stop 77
tactgggcccgttcttggtgcttgg

SEQ ID NO: 199509 - DNA, 25 bp, Artificial
  probe
  misc_feature (1)..(25): SEQ ID NO: 1935; WAN024FBJ_at; Start 99; Stop 123
gcttgaacttgcgatattcttcgat

SEQ ID NO: 199510 - DNA, 25 bp, Artificial
  probe
  misc_feature (1)..(25): SEQ ID NO: 1935; WAN024FBJ_at; Start 20; Stop 44
tcgtaaatcaactctgtcggcgctt

SEQ ID NO: 199511 - DNA, 25 bp, Artificial
  probe
  misc_feature (1)..(25): SEQ ID NO: 1935; WAN024FBJ_at; Start 68; Stop 92
tggtgcttggcttccaagtgctcac

SEQ ID NO: 199512 - DNA, 25 bp, Artificial
  probe
  misc_feature (1)..(25): SEQ ID NO: 2342; WAN024FBK_at; Start 689; Stop 713
tcatggaaaagaaggaagaaagtca

SEQ ID NO: 199513 - DNA, 25 bp, Artificial
  probe
  misc_feature (1)..(25): SEQ ID NO: 2342; WAN024FBK_at; Start 302; Stop 326
tcttgggtgagcacttggaagccaa

SEQ ID NO: 199514 - DNA, 25 bp, Artificial
  probe
  misc_feature (1)..(25): SEQ ID NO: 2342; WAN024FBK_at; Start 216; Stop 240
tccgaaggtagcagaagtgacagac

SEQ ID NO: 199515 - DNA, 25 bp, Artificial
  probe
  misc_feature (1)..(25): SEQ ID NO: 2342; WAN024FBK_at; Start 274; Stop 298
caaatcgaagaatatcgcaagttca

SEQ ID NO: 199516 - DNA, 25 bp, Artificial
  probe
  misc_feature (1)..(25): SEQ ID NO: 2342; WAN024FBK_at; Start 565; Stop 589
caggatttgttcaaggaagcccaga

SEQ ID NO: 199517 - DNA, 25 bp, Artificial
  probe
  misc_feature (1)..(25): SEQ ID NO: 2342; WAN024FBK_at; Start 134; Stop 158
tgcaggccatgcgtctggaagtgac

SEQ ID NO: 199518 - DNA, 25 bp, Artificial
  probe
  misc_feature (1)..(25): SEQ ID NO: 2342; WAN024FBK_at; Start 576; Stop 600
caaggaagcccagaatgtccaagag

SEQ ID NO: 199519 - DNA, 25 bp, Artificial
  probe
  misc_feature (1)..(25): SEQ ID NO: 2342; WAN024FBK_at; Start 679; Stop 703
gatatctatctcatggaaaagaagg

SEQ ID NO: 199520 - DNA, 25 bp, Artificial
  probe
  misc_feature (1)..(25): SEQ ID NO: 2342; WAN024FBK_at; Start 378; Stop 402
cgaagatgcggagcttgtgcatgac

SEQ ID NO: 199521 - DNA, 25 bp, Artificial
  probe
  misc_feature (1)..(25): SEQ ID NO: 2342; WAN024FBK_at; Start 289; Stop 313
cgcaagttcaagctcttgggtgagc

SEQ ID NO: 199522 - DNA, 25 bp, Artificial
  probe
  misc_feature (1)..(25): SEQ ID NO: 2342; WAN024FBK_at; Start 152; Stop 176
aagtgacgggtgagtacatggtcat

SEQ ID NO: 199523 - DNA, 25 bp, Artificial
  probe
  misc_feature (1)..(25): SEQ ID NO: 2342; WAN024FBK_at; Start 703; Stop 727
gaagaaagtcaagtgcctcaaagct

SEQ ID NO: 199524 - DNA, 25 bp, Artificial
  probe
  misc_feature (1)..(25): SEQ ID NO: 2342; WAN024FBK_at; Start 457; Stop 481
gaggagtttgcacaaaatcacacga

SEQ ID NO: 199525 - DNA, 25 bp, Artificial
  probe
  misc_feature (1)..(25): SEQ ID NO: 2342; WAN024FBK_at; Start 95; Stop 119
cggaagtcatcgaacagtatctagc

SEQ ID NO: 199526 - DNA, 25 bp, Artificial
  probe
  misc_feature (1)..(25): SEQ ID NO: 2342; WAN024FBK_at; Start 259; Stop 283
caggacctcctctctcaaatcgaag

SEQ ID NO: 199527 - DNA, 25 bp, Artificial
  probe
  misc_feature (1)..(25): SEQ ID NO: 2342; WAN024FBK_at; Start 359; Stop 383
cgccgacagagttgatttacgaaga

SEQ ID NO: 199528 - DNA, 25 bp, Artificial
  probe
  misc_feature (1)..(25): SEQ ID NO: 2342; WAN024FBK_at; Start 64; Stop 88
taccagatggatatctacgatgtgc

SEQ ID NO: 199529 - DNA, 25 bp, Artificial
  probe
  misc_feature (1)..(25): SEQ ID NO: 2342; WAN024FBK_at; Start 44; Stop 68
tcttgcatctggtttctaagtacca

SEQ ID NO: 199530 - DNA, 25 bp, Artificial
  probe
  misc_feature (1)..(25): SEQ ID NO: 2342; WAN024FBK_at; Start 540; Stop 564
gattggacgagatcaattgcgcttg

SEQ ID NO: 199531 - DNA, 25 bp, Artificial
  probe
  misc_feature (1)..(25): SEQ ID NO: 2342; WAN024FBK_at; Start 167; Stop 191
acatggtcatggctagtcagctcat

SEQ ID NO: 199532 - DNA, 25 bp, Artificial
  probe
  misc_feature (1)..(25): SEQ ID NO: 2342; WAN024FBK_at; Start 245; Stop 269
gggatgacctggagcaggacctcct

SEQ ID NO: 199533 - DNA, 25 bp, Artificial
  probe
  misc_feature (1)..(25): SEQ ID NO: 2342; WAN024FBK_at; Start 184; Stop 208
cagctcatgctgattaagagtcgta

SEQ ID NO: 199534 - DNA, 25 bp, Artificial
  probe
  misc_feature (1)..(25): SEQ ID NO: 2342; WAN024FBK_at; Start 331; Stop 355
caagaacgggcccagtattattcca

SEQ ID NO: 199535 - DNA, 25 bp, Artificial
  probe
  misc_feature (1)..(25): SEQ ID NO: 2342; WAN024FBK_at; Start 624; Stop 648
cctagagttaatcaaaacccaggag

SEQ ID NO: 199536 - DNA, 25 bp, Artificial
  probe
  misc_feature (1)..(25): SEQ ID NO: 2342; WAN024FBK_at; Start 605; Stop 629
tcaccctctttttggcaaccctaga

SEQ ID NO: 199537 - DNA, 25 bp, Artificial
  probe
  misc_feature (1)..(25): SEQ ID NO: 2342; WAN024FBK_at; Start 345; Stop 369
gtattattccaaagcgccgacagag

SEQ ID NO: 199538 - DNA, 25 bp, Artificial
  probe
  misc_feature (1)..(25): SEQ ID NO: 2342; WAN024FBK_at; Start 650; Stop 674
tgatcctcgtgcaagaggagagttt

SEQ ID NO: 199539 - DNA, 25 bp, Artificial
  probe
  misc_feature (1)..(25): SEQ ID NO: 2342; WAN024FBK_at; Start 490; Stop 514
cgggatgagtataagattgaggaca

SEQ ID NO: 199540 - DNA, 25 bp, Artificial
  probe
  misc_feature (1)..(25): SEQ ID NO: 2342; WAN024FBK_at; Start 438; Stop 462
tatcctagccaagaaaaaagaggag

SEQ ID NO: 199541 - DNA, 25 bp, Artificial
  probe
  misc_feature (1)..(25): SEQ ID NO: 2342; WAN024FBK_at; Start 317; Stop 341
tggaagccaagcaccaagaacgggc

SEQ ID NO: 199542 - DNA, 25 bp, Artificial
  probe
  misc_feature (1)..(25): SEQ ID NO: 2342; WAN024FBK_at; Start 393; Stop 417
tgtgcatgacaagacgaccattgac

SEQ ID NO: 199543 - DNA, 25 bp, Artificial
  probe
  misc_feature (1)..(25): SEQ ID NO: 2342; WAN024FBK_at; Start 204; Stop 228
tcgtaaactccttccgaaggtagca

SEQ ID NO: 199544 - DNA, 25 bp, Artificial
  probe
  misc_feature (1)..(25): SEQ ID NO: 2342; WAN024FBK_at; Start 79; Stop 103
tacgatgtgcccattacggaagtca

SEQ ID NO: 199545 - DNA, 25 bp, Artificial
  probe
  misc_feature (1)..(25): SEQ ID NO: 2342; WAN024FBK_at; Start 553; Stop 577
caattgcgcttgcaggatttgttca

SEQ ID NO: 199546 - DNA, 25 bp, Artificial
  probe
  misc_feature (1)..(25): SEQ ID NO: 1609; WAN024FBL_at; Start 161; Stop 185
tggctttgattgagacaagtggtgc

SEQ ID NO: 199547 - DNA, 25 bp, Artificial
  probe
  misc_feature (1)..(25): SEQ ID NO: 1609; WAN024FBL_at; Start 499; Stop 523
gatgagcttgagattcaagcccaag

SEQ ID NO: 199548 - DNA, 25 bp, Artificial
  probe
  misc_feature (1)..(25): SEQ ID NO: 1609; WAN024FBL_at; Start 6; Stop 30
tactttagcaaaaatagaagcgctc

SEQ ID NO: 199549 - DNA, 25 bp, Artificial
  probe
  misc_feature (1)..(25): SEQ ID NO: 1609; WAN024FBL_at; Start 291; Stop 315
tattgcctacaaacagccgattacg

SEQ ID NO: 199550 - DNA, 25 bp, Artificial
  probe
  misc_feature (1)..(25): SEQ ID NO: 1609; WAN024FBL_at; Start 306; Stop 330
gccgattacgcggatagaaattgat

SEQ ID NO: 199551 - DNA, 25 bp, Artificial
  probe
  misc_feature (1)..(25): SEQ ID NO: 1609; WAN024FBL_at; Start 471; Stop 495
aaaccatttagaagaattaccagtg

SEQ ID NO: 199552 - DNA, 25 bp, Artificial
  probe
  misc_feature (1)..(25): SEQ ID NO: 1609; WAN024FBL_at; Start 317; Stop 341
ggatagaaattgatgccatccgtgg

SEQ ID NO: 199553 - DNA, 25 bp, Artificial
  probe
  misc_feature (1)..(25): SEQ ID NO: 1609; WAN024FBL_at; Start 154; Stop 178
tccagtttggctttgattgagacaa

SEQ ID NO: 199554 - DNA, 25 bp, Artificial
  probe
  misc_feature (1)..(25): SEQ ID NO: 1609; WAN024FBL_at; Start 141; Stop 165
aaaggacccagattccagtttggct

SEQ ID NO: 199555 - DNA, 25 bp, Artificial
  probe
  misc_feature (1)..(25): SEQ ID NO: 1609; WAN024FBL_at; Start 484; Stop 508
gaattaccagtgattgatgagcttg

SEQ ID NO: 199556 - DNA, 25 bp, Artificial
  probe
  misc_feature (1)..(25): SEQ ID NO: 1609; WAN024FBL_at; Start 115; Stop 139
ttaggaaaattagcccagaagtatg

SEQ ID NO: 199557 - DNA, 25 bp, Artificial
  probe
  misc_feature (1)..(25): SEQ ID NO: 1609; WAN024FBL_at; Start 418; Stop 442
gggcgccccaacctctatgtgacta

SEQ ID NO: 199558 - DNA, 25 bp, Artificial
  probe
  misc_feature (1)..(25): SEQ ID NO: 1609; WAN024FBL_at; Start 527; Stop 551
gccaattatttggtgaaaggataga

SEQ ID NO: 199559 - DNA, 25 bp, Artificial
  probe
  misc_feature (1)..(25): SEQ ID NO: 1609; WAN024FBL_at; Start 266; Stop 290
gggctgcccttgagaccttgtccat

SEQ ID NO: 199560 - DNA, 25 bp, Artificial
  probe
  misc_feature (1)..(25): SEQ ID NO: 1609; WAN024FBL_at; Start 345; Stop 369
taactcgagtggagccttggcaaag

SEQ ID NO: 199561 - DNA, 25 bp, Artificial
  probe
  misc_feature (1)..(25): SEQ ID NO: 1609; WAN024FBL_at; Start 548; Stop 572
tagaagaagatgagaatcaataact

SEQ ID NO: 199562 - DNA, 25 bp, Artificial
  probe
  misc_feature (1)..(25): SEQ ID NO: 1609; WAN024FBL_at; Start 221; Stop 245
ttttgaaggaatactctaaggcgcc

SEQ ID NO: 199563 - DNA, 25 bp, Artificial
  probe
  misc_feature (1)..(25): SEQ ID NO: 1609; WAN024FBL_at; Start 430; Stop 454
ctctatgtgactacggattatttcc

SEQ ID NO: 199564 - DNA, 25 bp, Artificial
  probe
  misc_feature (1)..(25): SEQ ID NO: 1609; WAN024FBL_at; Start 176; Stop 200
caagtggtgcttatagattggtgac

SEQ ID NO: 199565 - DNA, 25 bp, Artificial
  probe
  misc_feature (1)..(25): SEQ ID NO: 1609; WAN024FBL_at; Start 510; Stop 534
gattcaagcccaagaaagccaatta

SEQ ID NO: 199566 - DNA, 25 bp, Artificial
  probe
  misc_feature (1)..(25): SEQ ID NO: 1609; WAN024FBL_at; Start 127; Stop 151
gcccagaagtatgaaaaggacccag

SEQ ID NO: 199567 - DNA, 25 bp, Artificial
  probe
  misc_feature (1)..(25): SEQ ID NO: 1609; WAN024FBL_at; Start 26; Stop 50
cgctcttgtttgtagcgggtgaaga

SEQ ID NO: 199568 - DNA, 25 bp, Artificial
  probe
  misc_feature (1)..(25): SEQ ID NO: 1609; WAN024FBL_at; Start 57; Stop 81
tcgggtccgccagttagctgaactc

SEQ ID NO: 199569 - DNA, 25 bp, Artificial
  probe
  misc_feature (1)..(25): SEQ ID NO: 1609; WAN024FBL_at; Start 381; Stop 405
tgacctgataaaggaagacgggaaa

SEQ ID NO: 199570 - DNA, 25 bp, Artificial
  probe
  misc_feature (1)..(25): SEQ ID NO: 1609; WAN024FBL_at; Start 194; Stop 218
tggtgaccaagcctcaatttgcaga

SEQ ID NO: 199571 - DNA, 25 bp, Artificial
  probe
  misc_feature (1)..(25): SEQ ID NO: 1609; WAN024FBL_at; Start 277; Stop 301
gagaccttgtccattattgcctaca

SEQ ID NO: 199572 - DNA, 25 bp, Artificial
  probe
  misc_feature (1)..(25): SEQ ID NO: 1609; WAN024FBL_at; Start 376; Stop 400
gcttttgacctgataaaggaagacg

SEQ ID NO: 199573 - DNA, 25 bp, Artificial
  probe
  misc_feature (1)..(25): SEQ ID NO: 1609; WAN024FBL_at; Start 20; Stop 44
tagaagcgctcttgtttgtagcggg

SEQ ID NO: 199574 - DNA, 25 bp, Artificial
  probe
  misc_feature (1)..(25): SEQ ID NO: 1609; WAN024FBL_at; Start 248; Stop 272
tcaaccagagcttgtctcgggctgc

SEQ ID NO: 199575 - DNA, 25 bp, Artificial
  probe
  misc_feature (1)..(25): SEQ ID NO: 1609; WAN024FBL_at; Start 350; Stop 374
cgagtggagccttggcaaagttgca

SEQ ID NO: 199576 - DNA, 25 bp, Artificial
  probe
  misc_feature (1)..(25): SEQ ID NO: 1609; WAN024FBL_at; Start 69; Stop 93
gttagctgaactcctctctctgcca

SEQ ID NO: 199577 - DNA, 25 bp, Artificial
  probe
  misc_feature (1)..(25): SEQ ID NO: 1609; WAN024FBL_at; Start 237; Stop 261
taaggcgcctatcaaccagagcttg

SEQ ID NO: 199578 - DNA, 25 bp, Artificial
  probe
  misc_feature (1)..(25): SEQ ID NO: 1609; WAN024FBL_at; Start 443; Stop 467
cggattatttcctagattacatggg

SEQ ID NO: 199579 - DNA, 25 bp, Artificial
  probe
  misc_feature (1)..(25): SEQ ID NO: 1609; WAN024FBL_at; Start 50; Stop 74
atgggattcgggtccgccagttagc

SEQ ID NO: 199580 - DNA, 25 bp, Artificial
  probe
  misc_feature (1)..(25): SEQ ID NO: 2942; WAN024FBM_at; Start 378; Stop 402
tttagtagcgacttcttggatgctc

SEQ ID NO: 199581 - DNA, 25 bp, Artificial
  probe
  misc_feature (1)..(25): SEQ ID NO: 2942; WAN024FBM_at; Start 256; Stop 280
gtatcagttggtttgaatttcaagg

SEQ ID NO: 199582 - DNA, 25 bp, Artificial
  probe
  misc_feature (1)..(25): SEQ ID NO: 2942; WAN024FBM_at; Start 32; Stop 56
gtccgcctccgcttagataccagag

SEQ ID NO: 199583 - DNA, 25 bp, Artificial
  probe
  misc_feature (1)..(25): SEQ ID NO: 2942; WAN024FBM_at; Start 39; Stop 63
tccgcttagataccagaggtctggt

SEQ ID NO: 199584 - DNA, 25 bp, Artificial
  probe
  misc_feature (1)..(25): SEQ ID NO: 2942; WAN024FBM_at; Start 288; Stop 312
caagaaagagaaacgagatttggca

SEQ ID NO: 199585 - DNA, 25 bp, Artificial
  probe
  misc_feature (1)..(25): SEQ ID NO: 2942; WAN024FBM_at; Start 20; Stop 44
ttgttgattcaagtccgcctccgct

SEQ ID NO: 199586 - DNA, 25 bp, Artificial
  probe
  misc_feature (1)..(25): SEQ ID NO: 2942; WAN024FBM_at; Start 83; Stop 107
catttttagcagcaggtgtttcagc

SEQ ID NO: 199587 - DNA, 25 bp, Artificial
  probe
  misc_feature (1)..(25): SEQ ID NO: 2942; WAN024FBM_at; Start 123; Stop 147
taggacaccgtcgttgctagagttg

SEQ ID NO: 199588 - DNA, 25 bp, Artificial
  probe
  misc_feature (1)..(25): SEQ ID NO: 2942; WAN024FBM_at; Start 152; Stop 176
caccgatggcaagggtacggttgat

SEQ ID NO: 199589 - DNA, 25 bp, Artificial
  probe
  misc_feature (1)..(25): SEQ ID NO: 2942; WAN024FBM_at; Start 391; Stop 415
tcttggatgctcttgtctagcttgg

SEQ ID NO: 199590 - DNA, 25 bp, Artificial
  probe
  misc_feature (1)..(25): SEQ ID NO: 2942; WAN024FBM_at; Start 236; Stop 260
ggcgtgagtcttcaaattttgtatc

SEQ ID NO: 199591 - DNA, 25 bp, Artificial
  probe
  misc_feature (1)..(25): SEQ ID NO: 2942; WAN024FBM_at; Start 347; Stop 371
tcgcaagggcttttttgtcagagct

SEQ ID NO: 199592 - DNA, 25 bp, Artificial
  probe
  misc_feature (1)..(25): SEQ ID NO: 2942; WAN024FBM_at; Start 108; Stop 132
gataagggcattttctaggacaccg

SEQ ID NO: 199593 - DNA, 25 bp, Artificial
  probe
  misc_feature (1)..(25): SEQ ID NO: 2942; WAN024FBM_at; Start 318; Stop 342
ggctgccatttttccttcattaagg

SEQ ID NO: 199594 - DNA, 25 bp, Artificial
  probe
  misc_feature (1)..(25): SEQ ID NO: 2942; WAN024FBM_at; Start 365; Stop 389
cagagctttcatttttagtagcgac

SEQ ID NO: 199595 - DNA, 25 bp, Artificial
  probe
  misc_feature (1)..(25): SEQ ID NO: 2942; WAN024FBM_at; Start 302; Stop 326
gagatttggcaccaaaggctgccat

SEQ ID NO: 199596 - DNA, 25 bp, Artificial
  probe
  misc_feature (1)..(25): SEQ ID NO: 2942; WAN024FBM_at; Start 179; Stop 203
caaagaggatgtcagggttgatttc

SEQ ID NO: 199597 - DNA, 25 bp, Artificial
  probe
  misc_feature (1)..(25): SEQ ID NO: 2942; WAN024FBM_at; Start 144; Stop 168
gttgtccccaccgatggcaagggta

SEQ ID NO: 199598 - DNA, 25 bp, Artificial
  probe
  misc_feature (1)..(25): SEQ ID NO: 2942; WAN024FBM_at; Start 191; Stop 215
cagggttgatttctttgacactttc

SEQ ID NO: 199599 - DNA, 25 bp, Artificial
  probe
  misc_feature (1)..(25): SEQ ID NO: 2942; WAN024FBM_at; Start 215; Stop 239
caaagctgacttcttgtccgtggcg

SEQ ID NO: 199600 - DNA, 25 bp, Artificial
  probe
  misc_feature (1)..(25): SEQ ID NO: 2942; WAN024FBM_at; Start 52; Stop 76
cagaggtctggtgttagttggataa

SEQ ID NO: 199601 - DNA, 25 bp, Artificial
  probe
  misc_feature (1)..(25): SEQ ID NO: 2942; WAN024FBM_at; Start 333; Stop 357
ttcattaaggaggatcgcaagggct

SEQ ID NO: 199602 - DNA, 25 bp, Artificial
  probe
  misc_feature (1)..(25): SEQ ID NO: 2942; WAN024FBM_at; Start 444; Stop 468
agtttcgccgaaggcacttgctaag

SEQ ID NO: 199603 - DNA, 25 bp, Artificial
  probe
  misc_feature (1)..(25): SEQ ID NO: 2942; WAN024FBM_at; Start 206; Stop 230
tgacactttcaaagctgacttcttg

SEQ ID NO: 199604 - DNA, 25 bp, Artificial
  probe
  misc_feature (1)..(25): SEQ ID NO: 2942; WAN024FBM_at; Start 167; Stop 191
tacggttgatgacaaagaggatgtc

SEQ ID NO: 199605 - DNA, 25 bp, Artificial
  probe
  misc_feature (1)..(25): SEQ ID NO: 2942; WAN024FBM_at; Start 227; Stop 251
cttgtccgtggcgtgagtcttcaaa

SEQ ID NO: 199606 - DNA, 25 bp, Artificial
  probe
  misc_feature (1)..(25): SEQ ID NO: 2942; WAN024FBM_at; Start 11; Stop 35
tcatgagttttgttgattcaagtcc

SEQ ID NO: 199607 - DNA, 25 bp, Artificial
  probe
  misc_feature (1)..(25): SEQ ID NO: 2942; WAN024FBM_at; Start 136; Stop 160
ttgctagagttgtccccaccgatgg

SEQ ID NO: 199608 - DNA, 25 bp, Artificial
  probe
  misc_feature (1)..(25): SEQ ID NO: 2942; WAN024FBM_at; Start 274; Stop 298
ttcaaggtttggtacaagaaagaga

SEQ ID NO: 199609 - DNA, 25 bp, Artificial
  probe
  misc_feature (1)..(25): SEQ ID NO: 2942; WAN024FBM_at; Start 476; Stop 500
tattagccttggtagaagtccagta

SEQ ID NO: 199610 - DNA, 25 bp, Artificial
  probe
  misc_feature (1)..(25): SEQ ID NO: 2942; WAN024FBM_at; Start 74; Stop 98
taatcttaccatttttagcagcagg

SEQ ID NO: 199611 - DNA, 25 bp, Artificial
  probe
  misc_feature (1)..(25): SEQ ID NO: 2942; WAN024FBM_at; Start 468; Stop 492
ggattcgatattagccttggtagaa

SEQ ID NO: 199612 - DNA, 25 bp, Artificial
  probe
  misc_feature (1)..(25): SEQ ID NO: 2942; WAN024FBM_at; Start 93; Stop 117
agcaggtgtttcagcgataagggca

SEQ ID NO: 199613 - DNA, 25 bp, Artificial
  probe
  misc_feature (1)..(25): SEQ ID NO: 2942; WAN024FBM_at; Start 453; Stop 477
gaaggcacttgctaaggattcgata

SEQ ID NO: 199614 - DNA, 25 bp, Artificial
  probe
  misc_feature (1)..(25): SEQ ID NO: 704; WAN024FBN_at; Start 696; Stop 720
atttgaagactcacgccacggacaa

SEQ ID NO: 199615 - DNA, 25 bp, Artificial
  probe
  misc_feature (1)..(25): SEQ ID NO: 704; WAN024FBN_at; Start 22; Stop 46
tatttcactgccctagtggccagct

SEQ ID NO: 199616 - DNA, 25 bp, Artificial
  probe
  misc_feature (1)..(25): SEQ ID NO: 704; WAN024FBN_at; Start 475; Stop 499
gaatccttagcaagtgccttcggcg

SEQ ID NO: 199617 - DNA, 25 bp, Artificial
  probe
  misc_feature (1)..(25): SEQ ID NO: 704; WAN024FBN_at; Start 176; Stop 200
agattgtgacctttgacctcggcgc

SEQ ID NO: 199618 - DNA, 25 bp, Artificial
  probe
  misc_feature (1)..(25): SEQ ID NO: 704; WAN024FBN_at; Start 417; Stop 441
aaccgttctcttccaagcaagcaag

SEQ ID NO: 199619 - DNA, 25 bp, Artificial
  probe
  misc_feature (1)..(25): SEQ ID NO: 704; WAN024FBN_at; Start 38; Stop 62
tggccagcttcttgctcctacttgg

SEQ ID NO: 199620 - DNA, 25 bp, Artificial
  probe
  misc_feature (1)..(25): SEQ ID NO: 704; WAN024FBN_at; Start 56; Stop 80
tacttggtgcatgtagtacaaactc

SEQ ID NO: 199621 - DNA, 25 bp, Artificial
  probe
  misc_feature (1)..(25): SEQ ID NO: 704; WAN024FBN_at; Start 245; Stop 269
gaatgcctacaaaaactgttccgac

SEQ ID NO: 199622 - DNA, 25 bp, Artificial
  probe
  misc_feature (1)..(25): SEQ ID NO: 704; WAN024FBN_at; Start 733; Stop 757
gaaagtgtcaaagaaatcaaccctg

SEQ ID NO: 199623 - DNA, 25 bp, Artificial
  probe
  misc_feature (1)..(25): SEQ ID NO: 704; WAN024FBN_at; Start 559; Stop 583
gtcgctactaaaaatgaaagctctg

SEQ ID NO: 199624 - DNA, 25 bp, Artificial
  probe
  misc_feature (1)..(25): SEQ ID NO: 704; WAN024FBN_at; Start 97; Stop 121
gagaccagtagctctgctccaacag

SEQ ID NO: 199625 - DNA, 25 bp, Artificial
  probe
  misc_feature (1)..(25): SEQ ID NO: 704; WAN024FBN_at; Start 445; Stop 469
gactactggacttctaccaaggcta

SEQ ID NO: 199626 - DNA, 25 bp, Artificial
  probe
  misc_feature (1)..(25): SEQ ID NO: 704; WAN024FBN_at; Start 624; Stop 648
ggcagcctttggtgccaaatctcgt

SEQ ID NO: 199627 - DNA, 25 bp, Artificial
  probe
  misc_feature (1)..(25): SEQ ID NO: 704; WAN024FBN_at; Start 710; Stop 734
gccacggacaagaagtcagctttga

SEQ ID NO: 199628 - DNA, 25 bp, Artificial
  probe
  misc_feature (1)..(25): SEQ ID NO: 704; WAN024FBN_at; Start 757; Stop 781
gacatcctctttgtcatcaaccgta

SEQ ID NO: 199629 - DNA, 25 bp, Artificial
  probe
  misc_feature (1)..(25): SEQ ID NO: 704; WAN024FBN_at; Start 831; Stop 855
tgcccttatcgctgaaacacctgct

SEQ ID NO: 199630 - DNA, 25 bp, Artificial
  probe
  misc_feature (1)..(25): SEQ ID NO: 704; WAN024FBN_at; Start 325; Stop 349
gatttagaagctatcgccgcccttg

SEQ ID NO: 199631 - DNA, 25 bp, Artificial
  probe
  misc_feature (1)..(25): SEQ ID NO: 704; WAN024FBN_at; Start 392; Stop 416
tagacaaattcaaagaaatcgcccc

SEQ ID NO: 199632 - DNA, 25 bp, Artificial
  probe
  misc_feature (1)..(25): SEQ ID NO: 704; WAN024FBN_at; Start 817; Stop 841
ggtgtcctagaaaatgcccttatcg

SEQ ID NO: 199633 - DNA, 25 bp, Artificial
  probe
  misc_feature (1)..(25): SEQ ID NO: 704; WAN024FBN_at; Start 539; Stop 563
tagacaagagcatccaagaagtcgc

SEQ ID NO: 199634 - DNA, 25 bp, Artificial
  probe
  misc_feature (1)..(25): SEQ ID NO: 704; WAN024FBN_at; Start 190; Stop 214
gacctcggcgctgcggatactattc

SEQ ID NO: 199635 - DNA, 25 bp, Artificial
  probe
  misc_feature (1)..(25): SEQ ID NO: 704; WAN024FBN_at; Start 867; Stop 891
taagattatccaactaacaccagac

SEQ ID NO: 199636 - DNA, 25 bp, Artificial
  probe
  misc_feature (1)..(25): SEQ ID NO: 704; WAN024FBN_at; Start 231; Stop 255
aaaaaatatcgtcggaatgcctaca

SEQ ID NO: 199637 - DNA, 25 bp, Artificial
  probe
  misc_feature (1)..(25): SEQ ID NO: 704; WAN024FBN_at; Start 774; Stop 798
caaccgtacccttgccatcggtggg

SEQ ID NO: 199638 - DNA, 25 bp, Artificial
  probe
  misc_feature (1)..(25): SEQ ID NO: 704; WAN024FBN_at; Start 606; Stop 630
ccttaatgaaggaaaaatggcagcc

SEQ ID NO: 199639 - DNA, 25 bp, Artificial
  probe
  misc_feature (1)..(25): SEQ ID NO: 704; WAN024FBN_at; Start 592; Stop 616
gcccttgcgatcctccttaatgaag

SEQ ID NO: 199640 - DNA, 25 bp, Artificial
  probe
  misc_feature (1)..(25): SEQ ID NO: 704; WAN024FBN_at; Start 207; Stop 231
tactattcgcgctttaggatttgaa

SEQ ID NO: 199641 - DNA, 25 bp, Artificial
  probe
  misc_feature (1)..(25): SEQ ID NO: 704; WAN024FBN_at; Start 161; Stop 185
ccaaagttcctgaaaagattgtgac

SEQ ID NO: 199642 - DNA, 25 bp, Artificial
  probe
  misc_feature (1)..(25): SEQ ID NO: 704; WAN024FBN_at; Start 886; Stop 910
ccagacctctggtatctaagcggag

SEQ ID NO: 199643 - DNA, 25 bp, Artificial
  probe
  misc_feature (1)..(25): SEQ ID NO: 704; WAN024FBN_at; Start 844; Stop 868
gaaacacctgctgctaaaaatggta

SEQ ID NO: 199644 - DNA, 25 bp, Artificial
  probe
  misc_feature (1)..(25): SEQ ID NO: 704; WAN024FBN_at; Start 80; Stop 104
caagcactagtcagacagagaccag

SEQ ID NO: 199645 - DNA, 25 bp, Artificial
  probe
  misc_feature (1)..(25): SEQ ID NO: 704; WAN024FBN_at; Start 902; Stop 926
taagcggaggcggacttgaatcaac

SEQ ID NO: 199646 - DNA, 25 bp, Artificial
  probe
  misc_feature (1)..(25): SEQ ID NO: 704; WAN024FBN_at; Start 273; Stop 297
tctaaaagacctagtgggaactgtc

SEQ ID NO: 199647 - DNA, 25 bp, Artificial
  probe
  misc_feature (1)..(25): SEQ ID NO: 704; WAN024FBN_at; Start 341; Stop 365
ccgcccttgagcctgatttgattat

SEQ ID NO: 199648 - DNA, 25 bp, Artificial
  probe
  misc_feature (1)..(25): SEQ ID NO: 5071; WAN024FBO_at; Start 29; Stop 53
tgatcggttcttcccttgctaaaga

SEQ ID NO: 199649 - DNA, 25 bp, Artificial
  probe
  misc_feature (1)..(25): SEQ ID NO: 5071; WAN024FBO_at; Start 10; Stop 34
caggtcagcctgcatgatttgatcg

SEQ ID NO: 199650 - DNA, 25 bp, Artificial
  probe
  misc_feature (1)..(25): SEQ ID NO: 5071; WAN024FBO_at; Start 221; Stop 245
aagataaagtccgtatcctgggcca

SEQ ID NO: 199651 - DNA, 25 bp, Artificial
  probe
  misc_feature (1)..(25): SEQ ID NO: 5071; WAN024FBO_at; Start 212; Stop 236
tcgtccagcaagataaagtccgtat

SEQ ID NO: 199652 - DNA, 25 bp, Artificial
  probe
  misc_feature (1)..(25): SEQ ID NO: 5071; WAN024FBO_at; Start 1; Stop 25
ttgactgagcaggtcagcctgcatg

SEQ ID NO: 199653 - DNA, 25 bp, Artificial
  probe
  misc_feature (1)..(25): SEQ ID NO: 5071; WAN024FBO_at; Start 159; Stop 183
gaagaatctgcatcatgctgacgct

SEQ ID NO: 199654 - DNA, 25 bp, Artificial
  probe
  misc_feature (1)..(25): SEQ ID NO: 5071; WAN024FBO_at; Start 201; Stop 225
tgttgagtggttcgtccagcaagat

SEQ ID NO: 199655 - DNA, 25 bp, Artificial
  probe
  misc_feature (1)..(25): SEQ ID NO: 5071; WAN024FBO_at; Start 225; Stop 249
taaagtccgtatcctgggccagtac

SEQ ID NO: 199656 - DNA, 25 bp, Artificial
  probe
  misc_feature (1)..(25): SEQ ID NO: 5071; WAN024FBO_at; Start 45; Stop 69
tgctaaagacctggccgtccttgaa

SEQ ID NO: 199657 - DNA, 25 bp, Artificial
  probe
  misc_feature (1)..(25): SEQ ID NO: 5071; WAN024FBO_at; Start 178; Stop 202
gacgctttgcttgatatcgagattg

SEQ ID NO: 199658 - DNA, 25 bp, Artificial
  probe
  misc_feature (1)..(25): SEQ ID NO: 5071; WAN024FBO_at; Start 167; Stop 191
tgcatcatgctgacgctttgcttga

SEQ ID NO: 199659 - DNA, 25 bp, Artificial
  probe
  misc_feature (1)..(25): SEQ ID NO: 5071; WAN024FBO_at; Start 208; Stop 232
tggttcgtccagcaagataaagtcc

SEQ ID NO: 199660 - DNA, 25 bp, Artificial
  probe
  misc_feature (1)..(25): SEQ ID NO: 5071; WAN024FBO_at; Start 118; Stop 142
gacgatgataatggtcttgccgagt

SEQ ID NO: 199661 - DNA, 25 bp, Artificial
  probe
  misc_feature (1)..(25): SEQ ID NO: 5071; WAN024FBO_at; Start 139; Stop 163
gagttcctccaccagtcgtcgaaga

SEQ ID NO: 199662 - DNA, 25 bp, Artificial
  probe
  misc_feature (1)..(25): SEQ ID NO: 5071; WAN024FBO_at; Start 146; Stop 170
tccaccagtcgtcgaagaatctgca

SEQ ID NO: 199663 - DNA, 25 bp, Artificial
  probe
  misc_feature (1)..(25): SEQ ID NO: 5071; WAN024FBO_at; Start 130; Stop 154
ggtcttgccgagttcctccaccagt

SEQ ID NO: 199664 - DNA, 25 bp, Artificial
  probe
  misc_feature (1)..(25): SEQ ID NO: 5071; WAN024FBO_at; Start 58; Stop 82
gccgtccttgaaggcgacaatttca

SEQ ID NO: 199665 - DNA, 25 bp, Artificial
  probe
  misc_feature (1)..(25): SEQ ID NO: 5071; WAN024FBO_at; Start 154; Stop 178
tcgtcgaagaatctgcatcatgctg

SEQ ID NO: 199666 - DNA, 25 bp, Artificial
  probe
  misc_feature (1)..(25): SEQ ID NO: 5071; WAN024FBO_at; Start 234; Stop 258
tatcctgggccagtaccatagcgat

SEQ ID NO: 199667 - DNA, 25 bp, Artificial
  probe
  misc_feature (1)..(25): SEQ ID NO: 5071; WAN024FBO_at; Start 14; Stop 38
tcagcctgcatgatttgatcggttc

SEQ ID NO: 199668 - DNA, 25 bp, Artificial
  probe
  misc_feature (1)..(25): SEQ ID NO: 5071; WAN024FBO_at; Start 124; Stop 148
gataatggtcttgccgagttcctcc

SEQ ID NO: 199669 - DNA, 25 bp, Artificial
  probe
  misc_feature (1)..(25): SEQ ID NO: 5071; WAN024FBO_at; Start 256; Stop 280
gataaagacgcgctggagttgcccc

SEQ ID NO: 199670 - DNA, 25 bp, Artificial
  probe
  misc_feature (1)..(25): SEQ ID NO: 5071; WAN024FBO_at; Start 110; Stop 134
tcgtggaggacgatgataatggtct

SEQ ID NO: 199671 - DNA, 25 bp, Artificial
  probe
  misc_feature (1)..(25): SEQ ID NO: 5071; WAN024FBO_at; Start 37; Stop 61
tcttcccttgctaaagacctggccg

SEQ ID NO: 199672 - DNA, 25 bp, Artificial
  probe
  misc_feature (1)..(25): SEQ ID NO: 5071; WAN024FBO_at; Start 63; Stop 87
ccttgaaggcgacaatttcatctgc

SEQ ID NO: 199673 - DNA, 25 bp, Artificial
  probe
  misc_feature (1)..(25): SEQ ID NO: 5071; WAN024FBO_at; Start 247; Stop 271
taccatagcgataaagacgcgctgg

SEQ ID NO: 199674 - DNA, 25 bp, Artificial
  probe
  misc_feature (1)..(25): SEQ ID NO: 5071; WAN024FBO_at; Start 52; Stop 76
gacctggccgtccttgaaggcgaca

SEQ ID NO: 199675 - DNA, 25 bp, Artificial
  probe
  misc_feature (1)..(25): SEQ ID NO: 5071; WAN024FBO_at; Start 98; Stop 122
gccatgttgatatcgtggaggacga

SEQ ID NO: 199676 - DNA, 25 bp, Artificial
  probe
  misc_feature (1)..(25): SEQ ID NO: 5071; WAN024FBO_at; Start 241; Stop 265
ggccagtaccatagcgataaagacg

SEQ ID NO: 199677 - DNA, 25 bp, Artificial
  probe
  misc_feature (1)..(25): SEQ ID NO: 5071; WAN024FBO_at; Start 194; Stop 218
tcgagattgttgagtggttcgtcca

SEQ ID NO: 199678 - DNA, 25 bp, Artificial
  probe
  misc_feature (1)..(25): SEQ ID NO: 5071; WAN024FBO_at; Start 49; Stop 73
aaagacctggccgtccttgaaggcg

SEQ ID NO: 199679 - DNA, 25 bp, Artificial
  probe
  misc_feature (1)..(25): SEQ ID NO: 5071; WAN024FBO_at; Start 25; Stop 49
gatttgatcggttcttcccttgcta

SEQ ID NO: 199680 - DNA, 25 bp, Artificial
  probe
  misc_feature (1)..(25): SEQ ID NO: 5071; WAN024FBO_at; Start 175; Stop 199
gctgacgctttgcttgatatcgaga

SEQ ID NO: 199681 - DNA, 25 bp, Artificial
  probe
  misc_feature (1)..(25): SEQ ID NO: 5071; WAN024FBO_at; Start 89; Stop 113
tactgactggccatgttgatatcgt

SEQ ID NO: 199682 - DNA, 25 bp, Artificial
  probe
  misc_feature (1)..(25): SEQ ID NO: 3855; WAN024FBP_at; Start 116; Stop 140
aatcgactctcctctccatcatgag

SEQ ID NO: 199683 - DNA, 25 bp, Artificial
  probe
  misc_feature (1)..(25): SEQ ID NO: 3855; WAN024FBP_at; Start 727; Stop 751
gacaaaaagatctgtatctatagct

SEQ ID NO: 199684 - DNA, 25 bp, Artificial
  probe
  misc_feature (1)..(25): SEQ ID NO: 3855; WAN024FBP_at; Start 694; Stop 718
tatgagattcccatcacgctagctg

SEQ ID NO: 199685 - DNA, 25 bp, Artificial
  probe
  misc_feature (1)..(25): SEQ ID NO: 3855; WAN024FBP_at; Start 68; Stop 92
tcagtcctcaaaaactgacagcctt

SEQ ID NO: 199686 - DNA, 25 bp, Artificial
  probe
  misc_feature (1)..(25): SEQ ID NO: 3855; WAN024FBP_at; Start 83; Stop 107
tgacagcctttattggtccaaatgg

SEQ ID NO: 199687 - DNA, 25 bp, Artificial
  probe
  misc_feature (1)..(25): SEQ ID NO: 3855; WAN024FBP_at; Start 215; Stop 239
tggcccaagaactaaccatcctaaa

SEQ ID NO: 199688 - DNA, 25 bp, Artificial
  probe
  misc_feature (1)..(25): SEQ ID NO: 3855; WAN024FBP_at; Start 430; Stop 454
tttatcgctatggtactggcccagg

SEQ ID NO: 199689 - DNA, 25 bp, Artificial
  probe
  misc_feature (1)..(25): SEQ ID NO: 3855; WAN024FBP_at; Start 261; Stop 285
caaattgactgttgaagaactggtc

SEQ ID NO: 199690 - DNA, 25 bp, Artificial
  probe
  misc_feature (1)..(25): SEQ ID NO: 3855; WAN024FBP_at; Start 500; Stop 524
tcaagcaaagcgtcagcatgatgca

SEQ ID NO: 199691 - DNA, 25 bp, Artificial
  probe
  misc_feature (1)..(25): SEQ ID NO: 3855; WAN024FBP_at; Start 200; Stop 224
ggaattcgcaagaactggcccaaga

SEQ ID NO: 199692 - DNA, 25 bp, Artificial
  probe
  misc_feature (1)..(25): SEQ ID NO: 3855; WAN024FBP_at; Start 299; Stop 323
ttccctacagccgaggtcgacttag

SEQ ID NO: 199693 - DNA, 25 bp, Artificial
  probe
  misc_feature (1)..(25): SEQ ID NO: 3855; WAN024FBP_at; Start 313; Stop 337
ggtcgacttagatcagaagactggg

SEQ ID NO: 199694 - DNA, 25 bp, Artificial
  probe
  misc_feature (1)..(25): SEQ ID NO: 3855; WAN024FBP_at; Start 2; Stop 26
tgaaactggaaaacattgacaaatc

SEQ ID NO: 199695 - DNA, 25 bp, Artificial
  probe
  misc_feature (1)..(25): SEQ ID NO: 3855; WAN024FBP_at; Start 53; Stop 77
gcatttcgcttgaagtcagtcctca

SEQ ID NO: 199696 - DNA, 25 bp, Artificial
  probe
  misc_feature (1)..(25): SEQ ID NO: 3855; WAN024FBP_at; Start 103; Stop 127
aatggtgctggaaaatcgactctcc

SEQ ID NO: 199697 - DNA, 25 bp, Artificial
  probe
  misc_feature (1)..(25): SEQ ID NO: 3855; WAN024FBP_at; Start 371; Stop 395
tgaccaacttaaaagaccgctacat

SEQ ID NO: 199698 - DNA, 25 bp, Artificial
  probe
  misc_feature (1)..(25): SEQ ID NO: 3855; WAN024FBP_at; Start 558; Stop 582
gaccattatcatcgtcctccacgat

SEQ ID NO: 199699 - DNA, 25 bp, Artificial
  probe
  misc_feature (1)..(25): SEQ ID NO: 3855; WAN024FBP_at; Start 460; Stop 484
gactttatcttgctggacgaaccac

SEQ ID NO: 199700 - DNA, 25 bp, Artificial
  probe
  misc_feature (1)..(25): SEQ ID NO: 3855; WAN024FBP_at; Start 490; Stop 514
aatctcgatatcaagcaaagcgtca

SEQ ID NO: 199701 - DNA, 25 bp, Artificial
  probe
  misc_feature (1)..(25): SEQ ID NO: 3855; WAN024FBP_at; Start 416; Stop 440
aactccagcgcgtctttatcgctat

SEQ ID NO: 199702 - DNA, 25 bp, Artificial
  probe
  misc_feature (1)..(25): SEQ ID NO: 3855; WAN024FBP_at; Start 174; Stop 198
tatcaaaggacgtgaaatcgagagc

SEQ ID NO: 199703 - DNA, 25 bp, Artificial
  probe
  misc_feature (1)..(25): SEQ ID NO: 3855; WAN024FBP_at; Start 17; Stop 41
ttgacaaatccattcaaaaacagga

SEQ ID NO: 199704 - DNA, 25 bp, Artificial
  probe
  misc_feature (1)..(25): SEQ ID NO: 3855; WAN024FBP_at; Start 385; Stop 409
gaccgctacatcaatagcctgtcag

SEQ ID NO: 199705 - DNA, 25 bp, Artificial
  probe
  misc_feature (1)..(25): SEQ ID NO: 3855; WAN024FBP_at; Start 657; Stop 681
cgatcaaatcatgcaggctgacctg

SEQ ID NO: 199706 - DNA, 25 bp, Artificial
  probe
  misc_feature (1)..(25): SEQ ID NO: 3855; WAN024FBP_at; Start 162; Stop 186
gggagttctcagtatcaaaggacgt

SEQ ID NO: 199707 - DNA, 25 bp, Artificial
  probe
  misc_feature (1)..(25): SEQ ID NO: 3855; WAN024FBP_at; Start 333; Stop 357
ctgggaaaaaatccgagaaactctg

SEQ ID NO: 199708 - DNA, 25 bp, Artificial
  probe
  misc_feature (1)..(25): SEQ ID NO: 3855; WAN024FBP_at; Start 708; Stop 732
cacgctagctgatatcaatgacaaa

SEQ ID NO: 199709 - DNA, 25 bp, Artificial
  probe
  misc_feature (1)..(25): SEQ ID NO: 3855; WAN024FBP_at; Start 443; Stop 467
tactggcccaggatacggactttat

SEQ ID NO: 199710 - DNA, 25 bp, Artificial
  probe
  misc_feature (1)..(25): SEQ ID NO: 3855; WAN024FBP_at; Start 528; Stop 552
tcttcgacgactggtggaggaactc

SEQ ID NO: 199711 - DNA, 25 bp, Artificial
  probe
  misc_feature (1)..(25): SEQ ID NO: 3855; WAN024FBP_at; Start 243; Stop 267
gaaaatcaattaccaagccaaattg

SEQ ID NO: 199712 - DNA, 25 bp, Artificial
  probe
  misc_feature (1)..(25): SEQ ID NO: 3855; WAN024FBP_at; Start 543; Stop 567
ggaggaactcggcaagaccattatc

SEQ ID NO: 199713 - DNA, 25 bp, Artificial
  probe
  misc_feature (1)..(25): SEQ ID NO: 3855; WAN024FBP_at; Start 187; Stop 211
gaaatcgagagctggaattcgcaag

SEQ ID NO: 199714 - DNA, 25 bp, Artificial
  probe
  misc_feature (1)..(25): SEQ ID NO: 3855; WAN024FBP_at; Start 605; Stop 629
cagatgaaattgtcgccttcaagga

SEQ ID NO: 199715 - DNA, 25 bp, Artificial
  probe
  misc_feature (1)..(25): SEQ ID NO: 3855; WAN024FBP_at; Start 37; Stop 61
caggatattttgcaaggcatttcgc

SEQ ID NO: 199716 - DNA, 25 bp, Artificial
  probe
  misc_feature (1)..(25): SEQ ID NO: 4372; WAN024FBQ_at; Start 48; Stop 72
ccagtttggcggcttcagtcgttcc

SEQ ID NO: 199717 - DNA, 25 bp, Artificial
  probe
  misc_feature (1)..(25): SEQ ID NO: 4372; WAN024FBQ_at; Start 120; Stop 144
gaaggcctgccatactcatactaga

SEQ ID NO: 199718 - DNA, 25 bp, Artificial
  probe
  misc_feature (1)..(25): SEQ ID NO: 4372; WAN024FBQ_at; Start 67; Stop 91
cgttccaactgtactcggtgcagca

SEQ ID NO: 199719 - DNA, 25 bp, Artificial
  probe
  misc_feature (1)..(25): SEQ ID NO: 4372; WAN024FBQ_at; Start 25; Stop 49
gacaaaaaggctcagcaccattccc

SEQ ID NO: 199720 - DNA, 25 bp, Artificial
  probe
  misc_feature (1)..(25): SEQ ID NO: 4372; WAN024FBQ_at; Start 108; Stop 132
tagtctgcatgagaaggcctgccat

SEQ ID NO: 199721 - DNA, 25 bp, Artificial
  probe
  misc_feature (1)..(25): SEQ ID NO: 4372; WAN024FBQ_at; Start 165; Stop 189
tagttcttgggagacgggactcttg

SEQ ID NO: 199722 - DNA, 25 bp, Artificial
  probe
  misc_feature (1)..(25): SEQ ID NO: 4372; WAN024FBQ_at; Start 138; Stop 162
tactagaggcagtcaggagaatact

SEQ ID NO: 199723 - DNA, 25 bp, Artificial
  probe
  misc_feature (1)..(25): SEQ ID NO: 4372; WAN024FBQ_at; Start 43; Stop 67
cattcccagtttggcggcttcagtc

SEQ ID NO: 199724 - DNA, 25 bp, Artificial
  probe
  misc_feature (1)..(25): SEQ ID NO: 4372; WAN024FBQ_at; Start 182; Stop 206
gactcttgaaagaggagccaggtct

SEQ ID NO: 199725 - DNA, 25 bp, Artificial
  probe
  misc_feature (1)..(25): SEQ ID NO: 4372; WAN024FBQ_at; Start 78; Stop 102
tactcggtgcagcaaactgattttg

SEQ ID NO: 199726 - DNA, 25 bp, Artificial
  probe
  misc_feature (1)..(25): SEQ ID NO: 4372; WAN024FBQ_at; Start 105; Stop 129
taatagtctgcatgagaaggcctgc

SEQ ID NO: 199727 - DNA, 25 bp, Artificial
  probe
  misc_feature (1)..(25): SEQ ID NO: 4372; WAN024FBQ_at; Start 37; Stop 61
cagcaccattcccagtttggcggct

SEQ ID NO: 199728 - DNA, 25 bp, Artificial
  probe
  misc_feature (1)..(25): SEQ ID NO: 4372; WAN024FBQ_at; Start 147; Stop 171
cagtcaggagaatactgatagttct

SEQ ID NO: 199729 - DNA, 25 bp, Artificial
  probe
  misc_feature (1)..(25): SEQ ID NO: 4372; WAN024FBQ_at; Start 111; Stop 135
tctgcatgagaaggcctgccatact

SEQ ID NO: 199730 - DNA, 25 bp, Artificial
  probe
  misc_feature (1)..(25): SEQ ID NO: 4372; WAN024FBQ_at; Start 64; Stop 88
agtcgttccaactgtactcggtgca

SEQ ID NO: 199731 - DNA, 25 bp, Artificial
  probe
  misc_feature (1)..(25): SEQ ID NO: 4372; WAN024FBQ_at; Start 198; Stop 222
gccaggtctgctggtcgaaatcaaa

SEQ ID NO: 199732 - DNA, 25 bp, Artificial
  probe
  misc_feature (1)..(25): SEQ ID NO: 4372; WAN024FBQ_at; Start 170; Stop 194
cttgggagacgggactcttgaaaga

SEQ ID NO: 199733 - DNA, 25 bp, Artificial
  probe
  misc_feature (1)..(25): SEQ ID NO: 4372; WAN024FBQ_at; Start 132; Stop 156
tactcatactagaggcagtcaggag

SEQ ID NO: 199734 - DNA, 25 bp, Artificial
  probe
  misc_feature (1)..(25): SEQ ID NO: 4372; WAN024FBQ_at; Start 82; Stop 106
cggtgcagcaaactgattttgggta

SEQ ID NO: 199735 - DNA, 25 bp, Artificial
  probe
  misc_feature (1)..(25): SEQ ID NO: 4372; WAN024FBQ_at; Start 128; Stop 152
gccatactcatactagaggcagtca

SEQ ID NO: 199736 - DNA, 25 bp, Artificial
  probe
  misc_feature (1)..(25): SEQ ID NO: 4372; WAN024FBQ_at; Start 31; Stop 55
aaggctcagcaccattcccagtttg

SEQ ID NO: 199737 - DNA, 25 bp, Artificial
  probe
  misc_feature (1)..(25): SEQ ID NO: 4372; WAN024FBQ_at; Start 16; Stop 40
cgatggaaagacaaaaaggctcagc

SEQ ID NO: 199738 - DNA, 25 bp, Artificial
  probe
  misc_feature (1)..(25): SEQ ID NO: 4372; WAN024FBQ_at; Start 159; Stop 183
tactgatagttcttgggagacggga

SEQ ID NO: 199739 - DNA, 25 bp, Artificial
  probe
  misc_feature (1)..(25): SEQ ID NO: 4372; WAN024FBQ_at; Start 177; Stop 201
gacgggactcttgaaagaggagcca

SEQ ID NO: 199740 - DNA, 25 bp, Artificial
  probe
  misc_feature (1)..(25): SEQ ID NO: 4372; WAN024FBQ_at; Start 9; Stop 33
gactagccgatggaaagacaaaaag

SEQ ID NO: 199741 - DNA, 25 bp, Artificial
  probe
  misc_feature (1)..(25): SEQ ID NO: 4372; WAN024FBQ_at; Start 21; Stop 45
gaaagacaaaaaggctcagcaccat

SEQ ID NO: 199742 - DNA, 25 bp, Artificial
  probe
  misc_feature (1)..(25): SEQ ID NO: 4372; WAN024FBQ_at; Start 2; Stop 26
tgggtcagactagccgatggaaaga

SEQ ID NO: 199743 - DNA, 25 bp, Artificial
  probe
  misc_feature (1)..(25): SEQ ID NO: 4372; WAN024FBQ_at; Start 185; Stop 209
tcttgaaagaggagccaggtctgct

SEQ ID NO: 199744 - DNA, 25 bp, Artificial
  probe
  misc_feature (1)..(25): SEQ ID NO: 4372; WAN024FBQ_at; Start 201; Stop 225
aggtctgctggtcgaaatcaaatag

SEQ ID NO: 199745 - DNA, 25 bp, Artificial
  probe
  misc_feature (1)..(25): SEQ ID NO: 4372; WAN024FBQ_at; Start 6; Stop 30
tcagactagccgatggaaagacaaa

SEQ ID NO: 199746 - DNA, 25 bp, Artificial
  probe
  misc_feature (1)..(25): SEQ ID NO: 4372; WAN024FBQ_at; Start 55; Stop 79
ggcggcttcagtcgttccaactgta

SEQ ID NO: 199747 - DNA, 25 bp, Artificial
  probe
  misc_feature (1)..(25): SEQ ID NO: 4372; WAN024FBQ_at; Start 92; Stop 116
aactgattttgggtaatagtctgca

SEQ ID NO: 199748 - DNA, 25 bp, Artificial
  probe
  misc_feature (1)..(25): SEQ ID NO: 4372; WAN024FBQ_at; Start 141; Stop 165
tagaggcagtcaggagaatactgat

SEQ ID NO: 199749 - DNA, 25 bp, Artificial
  probe
  misc_feature (1)..(25): SEQ ID NO: 4372; WAN024FBQ_at; Start 72; Stop 96
caactgtactcggtgcagcaaactg

SEQ ID NO: 199750 - DNA, 25 bp, Artificial
  probe
  misc_feature (1)..(25): SEQ ID NO: 902; WAN024FBR_at; Start 797; Stop 821
taagtcaaaccaaactcatggtcgc

SEQ ID NO: 199751 - DNA, 25 bp, Artificial
  probe
  misc_feature (1)..(25): SEQ ID NO: 902; WAN024FBR_at; Start 143; Stop 167
aagagtcccgtctcccaagaactat

SEQ ID NO: 199752 - DNA, 25 bp, Artificial
  probe
  misc_feature (1)..(25): SEQ ID NO: 902; WAN024FBR_at; Start 742; Stop 766
ccatttctcggagttatcgttccca

SEQ ID NO: 199753 - DNA, 25 bp, Artificial
  probe
  misc_feature (1)..(25): SEQ ID NO: 902; WAN024FBR_at; Start 288; Stop 312
ggtgctgagcctttttgtctttcca

SEQ ID NO: 199754 - DNA, 25 bp, Artificial
  probe
  misc_feature (1)..(25): SEQ ID NO: 902; WAN024FBR_at; Start 575; Stop 599
tcatcatcctgataaccgtttggaa

SEQ ID NO: 199755 - DNA, 25 bp, Artificial
  probe
  misc_feature (1)..(25): SEQ ID NO: 902; WAN024FBR_at; Start 929; Stop 953
tctttatcctacttctctggagagg

SEQ ID NO: 199756 - DNA, 25 bp, Artificial
  probe
  misc_feature (1)..(25): SEQ ID NO: 902; WAN024FBR_at; Start 107; Stop 131
tatttgatttcgaccagcagacctg

SEQ ID NO: 199757 - DNA, 25 bp, Artificial
  probe
  misc_feature (1)..(25): SEQ ID NO: 902; WAN024FBR_at; Start 123; Stop 147
gcagacctggctcctctttcaagag

SEQ ID NO: 199758 - DNA, 25 bp, Artificial
  probe
  misc_feature (1)..(25): SEQ ID NO: 902; WAN024FBR_at; Start 954; Stop 978
gggacgaaaagatgcagactaacta

SEQ ID NO: 199759 - DNA, 25 bp, Artificial
  probe
  misc_feature (1)..(25): SEQ ID NO: 902; WAN024FBR_at; Start 520; Stop 544
cagggctccttctccatgattcaga

SEQ ID NO: 199760 - DNA, 25 bp, Artificial
  probe
  misc_feature (1)..(25): SEQ ID NO: 902; WAN024FBR_at; Start 424; Stop 448
cctctgattgggatcatctatagcg

SEQ ID NO: 199761 - DNA, 25 bp, Artificial
  probe
  misc_feature (1)..(25): SEQ ID NO: 902; WAN024FBR_at; Start 710; Stop 734
caagcgtcaccatgattaccgtggg

SEQ ID NO: 199762 - DNA, 25 bp, Artificial
  probe
  misc_feature (1)..(25): SEQ ID NO: 902; WAN024FBR_at; Start 687; Stop 711
cctctttctggtggcgctaacgaca

SEQ ID NO: 199763 - DNA, 25 bp, Artificial
  probe
  misc_feature (1)..(25): SEQ ID NO: 902; WAN024FBR_at; Start 171; Stop 195
tattctcctgactgcctctagtatg

SEQ ID NO: 199764 - DNA, 25 bp, Artificial
  probe
  misc_feature (1)..(25): SEQ ID NO: 902; WAN024FBR_at; Start 187; Stop 211
tctagtatgagtatggcaggccttc

SEQ ID NO: 199765 - DNA, 25 bp, Artificial
  probe
  misc_feature (1)..(25): SEQ ID NO: 902; WAN024FBR_at; Start 202; Stop 226
gcaggccttctcatgcagactatta

SEQ ID NO: 199766 - DNA, 25 bp, Artificial
  probe
  misc_feature (1)..(25): SEQ ID NO: 902; WAN024FBR_at; Start 498; Stop 522
tcagagtatgactgcctggacccag

SEQ ID NO: 199767 - DNA, 25 bp, Artificial
  probe
  misc_feature (1)..(25): SEQ ID NO: 902; WAN024FBR_at; Start 876; Stop 900
taggccctatgagttgtctgtcagt

SEQ ID NO: 199768 - DNA, 25 bp, Artificial
  probe
  misc_feature (1)..(25): SEQ ID NO: 902; WAN024FBR_at; Start 829; Stop 853
ggtgccaatctagttctggcttgcg

SEQ ID NO: 199769 - DNA, 25 bp, Artificial
  probe
  misc_feature (1)..(25): SEQ ID NO: 902; WAN024FBR_at; Start 478; Stop 502
gcctatcgtttcaatctggttcaga

SEQ ID NO: 199770 - DNA, 25 bp, Artificial
  probe
  misc_feature (1)..(25): SEQ ID NO: 902; WAN024FBR_at; Start 860; Stop 884
tatcccgagttctgattaggcccta

SEQ ID NO: 199771 - DNA, 25 bp, Artificial
  probe
  misc_feature (1)..(25): SEQ ID NO: 902; WAN024FBR_at; Start 624; Stop 648
gaatctagggaaagaaaccagcgag

SEQ ID NO: 199772 - DNA, 25 bp, Artificial
  probe
  misc_feature (1)..(25): SEQ ID NO: 902; WAN024FBR_at; Start 252; Stop 276
tacagttggaacgactgaagccgcc

SEQ ID NO: 199773 - DNA, 25 bp, Artificial
  probe
  misc_feature (1)..(25): SEQ ID NO: 902; WAN024FBR_at; Start 609; Stop 633
aaccttcaccatcatgaatctaggg

SEQ ID NO: 199774 - DNA, 25 bp, Artificial
  probe
  misc_feature (1)..(25): SEQ ID NO: 902; WAN024FBR_at; Start 65; Stop 89
tctctattagcattgggaccagtga

SEQ ID NO: 199775 - DNA, 25 bp, Artificial
  probe
  misc_feature (1)..(25): SEQ ID NO: 902; WAN024FBR_at; Start 908; Stop 932
taggaatcatcggtagtctcgtctt

SEQ ID NO: 199776 - DNA, 25 bp, Artificial
  probe
  misc_feature (1)..(25): SEQ ID NO: 902; WAN024FBR_at; Start 553; Stop 577
tatgagtggctcttcttaggcctca

SEQ ID NO: 199777 - DNA, 25 bp, Artificial
  probe
  misc_feature (1)..(25): SEQ ID NO: 902; WAN024FBR_at; Start 305; Stop 329
tctttccatcggctagtctgaccca

SEQ ID NO: 199778 - DNA, 25 bp, Artificial
  probe
  misc_feature (1)..(25): SEQ ID NO: 902; WAN024FBR_at; Start 537; Stop 561
gattcagacccatcagtatgagtgg

SEQ ID NO: 199779 - DNA, 25 bp, Artificial
  probe
  misc_feature (1)..(25): SEQ ID NO: 902; WAN024FBR_at; Start 845; Stop 869
tggcttgcgatatcctatcccgagt

SEQ ID NO: 199780 - DNA, 25 bp, Artificial
  probe
  misc_feature (1)..(25): SEQ ID NO: 902; WAN024FBR_at; Start 232; Stop 256
aatcagtttgctgcaccgagtacag

SEQ ID NO: 199781 - DNA, 25 bp, Artificial
  probe
  misc_feature (1)..(25): SEQ ID NO: 902; WAN024FBR_at; Start 756; Stop 780
tatcgttcccaatcttgttcgcaag

SEQ ID NO: 199782 - DNA, 25 bp, Artificial
  probe
  misc_feature (1)..(25): SEQ ID NO: 902; WAN024FBR_at; Start 455; Stop 479
tcggctcagtcacagaagttatcgc

SEQ ID NO: 199783 - DNA, 25 bp, Artificial
  probe
  misc_feature (1)..(25): SEQ ID NO: 902; WAN024FBR_at; Start 812; Stop 836
tcatggtcgcactggttggtgccaa

SEQ ID NO: 199784 - DNA, 25 bp, Artificial
  probe
  misc_feature (1)..(25): SEQ ID NO: 5788; WAN024FBS_at; Start 275; Stop 299
ggagagcagcaactaaatcttcact

SEQ ID NO: 199785 - DNA, 25 bp, Artificial
  probe
  misc_feature (1)..(25): SEQ ID NO: 5788; WAN024FBS_at; Start 16; Stop 40
gaacgctcacgagatagatcttaca

SEQ ID NO: 199786 - DNA, 25 bp, Artificial
  probe
  misc_feature (1)..(25): SEQ ID NO: 5788; WAN024FBS_at; Start 219; Stop 243
gagacgaactgcctgcaattgctca

SEQ ID NO: 199787 - DNA, 25 bp, Artificial
  probe
  misc_feature (1)..(25): SEQ ID NO: 5788; WAN024FBS_at; Start 162; Stop 186
caactcaggtgctggatgtttggga

SEQ ID NO: 199788 - DNA, 25 bp, Artificial
  probe
  misc_feature (1)..(25): SEQ ID NO: 5788; WAN024FBS_at; Start 66; Stop 90
tcaaagcattttaaagagttcctca

SEQ ID NO: 199789 - DNA, 25 bp, Artificial
  probe
  misc_feature (1)..(25): SEQ ID NO: 5788; WAN024FBS_at; Start 203; Stop 227
gattgaccaggcctgagagacgaac

SEQ ID NO: 199790 - DNA, 25 bp, Artificial
  probe
  misc_feature (1)..(25): SEQ ID NO: 5788; WAN024FBS_at; Start 95; Stop 119
taagcgcagaagtcgcagttcctct

SEQ ID NO: 199791 - DNA, 25 bp, Artificial
  probe
  misc_feature (1)..(25): SEQ ID NO: 5788; WAN024FBS_at; Start 118; Stop 142
ctgtacttggcttcttctcttttga

SEQ ID NO: 199792 - DNA, 25 bp, Artificial
  probe
  misc_feature (1)..(25): SEQ ID NO: 5788; WAN024FBS_at; Start 85; Stop 109
tcctcatacataagcgcagaagtcg

SEQ ID NO: 199793 - DNA, 25 bp, Artificial
  probe
  misc_feature (1)..(25): SEQ ID NO: 5788; WAN024FBS_at; Start 79; Stop 103
aagagttcctcatacataagcgcag

SEQ ID NO: 199794 - DNA, 25 bp, Artificial
  probe
  misc_feature (1)..(25): SEQ ID NO: 5788; WAN024FBS_at; Start 214; Stop 238
cctgagagacgaactgcctgcaatt

SEQ ID NO: 199795 - DNA, 25 bp, Artificial
  probe
  misc_feature (1)..(25): SEQ ID NO: 5788; WAN024FBS_at; Start 224; Stop 248
gaactgcctgcaattgctcatttgt

SEQ ID NO: 199796 - DNA, 25 bp, Artificial
  probe
  misc_feature (1)..(25): SEQ ID NO: 5788; WAN024FBS_at; Start 289; Stop 313
aaatcttcactcaaatcatgtcgag

SEQ ID NO: 199797 - DNA, 25 bp, Artificial
  probe
  misc_feature (1)..(25): SEQ ID NO: 5788; WAN024FBS_at; Start 293; Stop 317
cttcactcaaatcatgtcgagcatg

SEQ ID NO: 199798 - DNA, 25 bp, Artificial
  probe
  misc_feature (1)..(25): SEQ ID NO: 5788; WAN024FBS_at; Start 144; Stop 168
aaagcgagccaagttgagcaactca

SEQ ID NO: 199799 - DNA, 25 bp, Artificial
  probe
  misc_feature (1)..(25): SEQ ID NO: 5788; WAN024FBS_at; Start 199; Stop 223
tcacgattgaccaggcctgagagac

SEQ ID NO: 199800 - DNA, 25 bp, Artificial
  probe
  misc_feature (1)..(25): SEQ ID NO: 5788; WAN024FBS_at; Start 233; Stop 257
gcaattgctcatttgtagtaggcag

SEQ ID NO: 199801 - DNA, 25 bp, Artificial
  probe
  misc_feature (1)..(25): SEQ ID NO: 5788; WAN024FBS_at; Start 206; Stop 230
tgaccaggcctgagagacgaactgc

SEQ ID NO: 199802 - DNA, 25 bp, Artificial
  probe
  misc_feature (1)..(25): SEQ ID NO: 5788; WAN024FBS_at; Start 91; Stop 115
tacataagcgcagaagtcgcagttc

SEQ ID NO: 199803 - DNA, 25 bp, Artificial
  probe
  misc_feature (1)..(25): SEQ ID NO: 5788; WAN024FBS_at; Start 103; Stop 127
gaagtcgcagttcctctgtacttgg

SEQ ID NO: 199804 - DNA, 25 bp, Artificial
  probe
  misc_feature (1)..(25): SEQ ID NO: 5788; WAN024FBS_at; Start 52; Stop 76
gatccacaatggaatcaaagcattt

SEQ ID NO: 199805 - DNA, 25 bp, Artificial
  probe
  misc_feature (1)..(25): SEQ ID NO: 5788; WAN024FBS_at; Start 166; Stop 190
tcaggtgctggatgtttgggattta

SEQ ID NO: 199806 - DNA, 25 bp, Artificial
  probe
  misc_feature (1)..(25): SEQ ID NO: 5788; WAN024FBS_at; Start 39; Stop 63
caaaaaatgctttgatccacaatgg

SEQ ID NO: 199807 - DNA, 25 bp, Artificial
  probe
  misc_feature (1)..(25): SEQ ID NO: 5788; WAN024FBS_at; Start 25; Stop 49
cgagatagatcttacaaaaaatgct

SEQ ID NO: 199808 - DNA, 25 bp, Artificial
  probe
  misc_feature (1)..(25): SEQ ID NO: 5788; WAN024FBS_at; Start 2; Stop 26
tgttactactatttgaacgctcacg

SEQ ID NO: 199809 - DNA, 25 bp, Artificial
  probe
  misc_feature (1)..(25): SEQ ID NO: 5788; WAN024FBS_at; Start 44; Stop 68
aatgctttgatccacaatggaatca

SEQ ID NO: 199810 - DNA, 25 bp, Artificial
  probe
  misc_feature (1)..(25): SEQ ID NO: 5788; WAN024FBS_at; Start 268; Stop 292
gtctctaggagagcagcaactaaat

SEQ ID NO: 199811 - DNA, 25 bp, Artificial
  probe
  misc_feature (1)..(25): SEQ ID NO: 5788; WAN024FBS_at; Start 11; Stop 35
tatttgaacgctcacgagatagatc

SEQ ID NO: 199812 - DNA, 25 bp, Artificial
  probe
  misc_feature (1)..(25): SEQ ID NO: 5788; WAN024FBS_at; Start 195; Stop 219
caattcacgattgaccaggcctgag

SEQ ID NO: 199813 - DNA, 25 bp, Artificial
  probe
  misc_feature (1)..(25): SEQ ID NO: 5788; WAN024FBS_at; Start 189; Stop 213
taggagcaattcacgattgaccagg

SEQ ID NO: 199814 - DNA, 25 bp, Artificial
  probe
  misc_feature (1)..(25): SEQ ID NO: 5788; WAN024FBS_at; Start 180; Stop 204
tttgggatttaggagcaattcacga

SEQ ID NO: 199815 - DNA, 25 bp, Artificial
  probe
  misc_feature (1)..(25): SEQ ID NO: 5788; WAN024FBS_at; Start 241; Stop 265
tcatttgtagtaggcagttttttag

SEQ ID NO: 199816 - DNA, 25 bp, Artificial
  probe
  misc_feature (1)..(25): SEQ ID NO: 5788; WAN024FBS_at; Start 153; Stop 177
caagttgagcaactcaggtgctgga

SEQ ID NO: 199817 - DNA, 25 bp, Artificial
  probe
  misc_feature (1)..(25): SEQ ID NO: 5788; WAN024FBS_at; Start 108; Stop 132
cgcagttcctctgtacttggcttct

SEQ ID NO: 199818 - DNA, 25 bp, Artificial
  probe
  misc_feature (1)..(25): SEQ ID NO: 4207; WAN024FBT_at; Start 195; Stop 219
tccagcacctgagttgctcaacttg

SEQ ID NO: 199819 - DNA, 25 bp, Artificial
  probe
  misc_feature (1)..(25): SEQ ID NO: 4207; WAN024FBT_at; Start 24; Stop 48
cctagaaagccttataaaagatctt

SEQ ID NO: 199820 - DNA, 25 bp, Artificial
  probe
  misc_feature (1)..(25): SEQ ID NO: 4207; WAN024FBT_at; Start 38; Stop 62
taaaagatctttacaatcatgctcg

SEQ ID NO: 199821 - DNA, 25 bp, Artificial
  probe
  misc_feature (1)..(25): SEQ ID NO: 4207; WAN024FBT_at; Start 55; Stop 79
catgctcgacatgatttgagtgaag

SEQ ID NO: 199822 - DNA, 25 bp, Artificial
  probe
  misc_feature (1)..(25): SEQ ID NO: 4207; WAN024FBT_at; Start 165; Stop 189
caatcgtgaattgctcctaaatccc

SEQ ID NO: 199823 - DNA, 25 bp, Artificial
  probe
  misc_feature (1)..(25): SEQ ID NO: 4207; WAN024FBT_at; Start 73; Stop 97
agtgaagatttagttgctgctctcc

SEQ ID NO: 199824 - DNA, 25 bp, Artificial
  probe
  misc_feature (1)..(25): SEQ ID NO: 4207; WAN024FBT_at; Start 236; Stop 260
gagaagaagccaagtacagaggaac

SEQ ID NO: 199825 - DNA, 25 bp, Artificial
  probe
  misc_feature (1)..(25): SEQ ID NO: 4207; WAN024FBT_at; Start 244; Stop 268
gccaagtacagaggaactgcgactt

SEQ ID NO: 199826 - DNA, 25 bp, Artificial
  probe
  misc_feature (1)..(25): SEQ ID NO: 4207; WAN024FBT_at; Start 117; Stop 141
gcctactacaaatgagcaattgcag

SEQ ID NO: 199827 - DNA, 25 bp, Artificial
  probe
  misc_feature (1)..(25): SEQ ID NO: 4207; WAN024FBT_at; Start 241; Stop 265
gaagccaagtacagaggaactgcga

SEQ ID NO: 199828 - DNA, 25 bp, Artificial
  probe
  misc_feature (1)..(25): SEQ ID NO: 4207; WAN024FBT_at; Start 129; Stop 153
tgagcaattgcaggcagttcgtctc

SEQ ID NO: 199829 - DNA, 25 bp, Artificial
  probe
  misc_feature (1)..(25): SEQ ID NO: 4207; WAN024FBT_at; Start 182; Stop 206
taaatcccaaacatccagcacctga

SEQ ID NO: 199830 - DNA, 25 bp, Artificial
  probe
  misc_feature (1)..(25): SEQ ID NO: 4207; WAN024FBT_at; Start 248; Stop 272
agtacagaggaactgcgacttctgc

SEQ ID NO: 199831 - DNA, 25 bp, Artificial
  probe
  misc_feature (1)..(25): SEQ ID NO: 4207; WAN024FBT_at; Start 186; Stop 210
tcccaaacatccagcacctgagttg

SEQ ID NO: 199832 - DNA, 25 bp, Artificial
  probe
  misc_feature (1)..(25): SEQ ID NO: 4207; WAN024FBT_at; Start 246; Stop 270
caagtacagaggaactgcgacttct

SEQ ID NO: 199833 - DNA, 25 bp, Artificial
  probe
  misc_feature (1)..(25): SEQ ID NO: 4207; WAN024FBT_at; Start 238; Stop 262
gaagaagccaagtacagaggaactg

SEQ ID NO: 199834 - DNA, 25 bp, Artificial
  probe
  misc_feature (1)..(25): SEQ ID NO: 4207; WAN024FBT_at; Start 204; Stop 228
tgagttgctcaacttggctcgcttt

SEQ ID NO: 199835 - DNA, 25 bp, Artificial
  probe
  misc_feature (1)..(25): SEQ ID NO: 4207; WAN024FBT_at; Start 43; Stop 67
gatctttacaatcatgctcgacatg

SEQ ID NO: 199836 - DNA, 25 bp, Artificial
  probe
  misc_feature (1)..(25): SEQ ID NO: 4207; WAN024FBT_at; Start 111; Stop 135
aaaactgcctactacaaatgagcaa

SEQ ID NO: 199837 - DNA, 25 bp, Artificial
  probe
  misc_feature (1)..(25): SEQ ID NO: 4207; WAN024FBT_at; Start 120; Stop 144
tactacaaatgagcaattgcaggca

SEQ ID NO: 199838 - DNA, 25 bp, Artificial
  probe
  misc_feature (1)..(25): SEQ ID NO: 4207; WAN024FBT_at; Start 79; Stop 103
gatttagttgctgctctcctagaga

SEQ ID NO: 199839 - DNA, 25 bp, Artificial
  probe
  misc_feature (1)..(25): SEQ ID NO: 4207; WAN024FBT_at; Start 172; Stop 196
gaattgctcctaaatcccaaacatc

SEQ ID NO: 199840 - DNA, 25 bp, Artificial
  probe
  misc_feature (1)..(25): SEQ ID NO: 4207; WAN024FBT_at; Start 132; Stop 156
gcaattgcaggcagttcgtctctca

SEQ ID NO: 199841 - DNA, 25 bp, Artificial
  probe
  misc_feature (1)..(25): SEQ ID NO: 4207; WAN024FBT_at; Start 125; Stop 149
caaatgagcaattgcaggcagttcg

SEQ ID NO: 199842 - DNA, 25 bp, Artificial
  probe
  misc_feature (1)..(25): SEQ ID NO: 4207; WAN024FBT_at; Start 158; Stop 182
gcctggtcaatcgtgaattgctcct

SEQ ID NO: 199843 - DNA, 25 bp, Artificial
  probe
  misc_feature (1)..(25): SEQ ID NO: 4207; WAN024FBT_at; Start 81; Stop 105
tttagttgctgctctcctagagact

SEQ ID NO: 199844 - DNA, 25 bp, Artificial
  probe
  misc_feature (1)..(25): SEQ ID NO: 4207; WAN024FBT_at; Start 108; Stop 132
taaaaaactgcctactacaaatgag

SEQ ID NO: 199845 - DNA, 25 bp, Artificial
  probe
  misc_feature (1)..(25): SEQ ID NO: 4207; WAN024FBT_at; Start 161; Stop 185
tggtcaatcgtgaattgctcctaaa

SEQ ID NO: 199846 - DNA, 25 bp, Artificial
  probe
  misc_feature (1)..(25): SEQ ID NO: 4207; WAN024FBT_at; Start 200; Stop 224
cacctgagttgctcaacttggctcg

SEQ ID NO: 199847 - DNA, 25 bp, Artificial
  probe
  misc_feature (1)..(25): SEQ ID NO: 4207; WAN024FBT_at; Start 230; Stop 254
tcaaaagagaagaagccaagtacag

SEQ ID NO: 199848 - DNA, 25 bp, Artificial
  probe
  misc_feature (1)..(25): SEQ ID NO: 4207; WAN024FBT_at; Start 61; Stop 85
cgacatgatttgagtgaagatttag

SEQ ID NO: 199849 - DNA, 25 bp, Artificial
  probe
  misc_feature (1)..(25): SEQ ID NO: 4207; WAN024FBT_at; Start 76; Stop 100
gaagatttagttgctgctctcctag

SEQ ID NO: 199850 - DNA, 25 bp, Artificial
  probe
  misc_feature (1)..(25): SEQ ID NO: 4207; WAN024FBT_at; Start 191; Stop 215
aacatccagcacctgagttgctcaa

SEQ ID NO: 199851 - DNA, 25 bp, Artificial
  probe
  misc_feature (1)..(25): SEQ ID NO: 4207; WAN024FBT_at; Start 168; Stop 192
tcgtgaattgctcctaaatcccaaa

SEQ ID NO: 199852 - DNA, 25 bp, Artificial
  probe
  misc_feature (1)..(25): SEQ ID NO: 5620; WAN024FBU_at; Start 122; Stop 146
tgatgaacatgaacaaagaccagat

SEQ ID NO: 199853 - DNA, 25 bp, Artificial
  probe
  misc_feature (1)..(25): SEQ ID NO: 5620; WAN024FBU_at; Start 143; Stop 167
agattgccatcctcaatggtgcgga

SEQ ID NO: 199854 - DNA, 25 bp, Artificial
  probe
  misc_feature (1)..(25): SEQ ID NO: 5620; WAN024FBU_at; Start 81; Stop 105
tatccgtcgtcacccattgagcttc

SEQ ID NO: 199855 - DNA, 25 bp, Artificial
  probe
  misc_feature (1)..(25): SEQ ID NO: 5620; WAN024FBU_at; Start 103; Stop 127
ttctccaccattcagatattgatga

SEQ ID NO: 199856 - DNA, 25 bp, Artificial
  probe
  misc_feature (1)..(25): SEQ ID NO: 5620; WAN024FBU_at; Start 234; Stop 258
tcccgtcaggaacacctgtcgaatg

SEQ ID NO: 199857 - DNA, 25 bp, Artificial
  probe
  misc_feature (1)..(25): SEQ ID NO: 5620; WAN024FBU_at; Start 6; Stop 30
cattttcaggtgttcgatagtagtc

SEQ ID NO: 199858 - DNA, 25 bp, Artificial
  probe
  misc_feature (1)..(25): SEQ ID NO: 5620; WAN024FBU_at; Start 309; Stop 333
cgtcttgaatggcatggatgtatag

SEQ ID NO: 199859 - DNA, 25 bp, Artificial
  probe
  misc_feature (1)..(25): SEQ ID NO: 5620; WAN024FBU_at; Start 25; Stop 49
gtagtcaatgacatcccaatgctca

SEQ ID NO: 199860 - DNA, 25 bp, Artificial
  probe
  misc_feature (1)..(25): SEQ ID NO: 5620; WAN024FBU_at; Start 1; Stop 25
ttggtcattttcaggtgttcgatag

SEQ ID NO: 199861 - DNA, 25 bp, Artificial
  probe
  misc_feature (1)..(25): SEQ ID NO: 5620; WAN024FBU_at; Start 94; Stop 118
ccattgagcttctccaccattcaga

SEQ ID NO: 199862 - DNA, 25 bp, Artificial
  probe
  misc_feature (1)..(25): SEQ ID NO: 5620; WAN024FBU_at; Start 188; Stop 212
ggatgacgctcaaagaaatctgcaa

SEQ ID NO: 199863 - DNA, 25 bp, Artificial
  probe
  misc_feature (1)..(25): SEQ ID NO: 5620; WAN024FBU_at; Start 54; Stop 78
tacaaccattctcatcctcacggaa

SEQ ID NO: 199864 - DNA, 25 bp, Artificial
  probe
  misc_feature (1)..(25): SEQ ID NO: 5620; WAN024FBU_at; Start 221; Stop 245
gcaaatccttctttcccgtcaggaa

SEQ ID NO: 199865 - DNA, 25 bp, Artificial
  probe
  misc_feature (1)..(25): SEQ ID NO: 5620; WAN024FBU_at; Start 166; Stop 190
gacaatcttaatctgacgctctgga

SEQ ID NO: 199866 - DNA, 25 bp, Artificial
  probe
  misc_feature (1)..(25): SEQ ID NO: 5620; WAN024FBU_at; Start 180; Stop 204
gacgctctggatgacgctcaaagaa

SEQ ID NO: 199867 - DNA, 25 bp, Artificial
  probe
  misc_feature (1)..(25): SEQ ID NO: 5620; WAN024FBU_at; Start 76; Stop 100
gaaagtatccgtcgtcacccattga

SEQ ID NO: 199868 - DNA, 25 bp, Artificial
  probe
  misc_feature (1)..(25): SEQ ID NO: 5620; WAN024FBU_at; Start 270; Stop 294
tatcccctacagactgggcttgagc

SEQ ID NO: 199869 - DNA, 25 bp, Artificial
  probe
  misc_feature (1)..(25): SEQ ID NO: 5620; WAN024FBU_at; Start 214; Stop 238
gaaggctgcaaatccttctttcccg

SEQ ID NO: 199870 - DNA, 25 bp, Artificial
  probe
  misc_feature (1)..(25): SEQ ID NO: 5620; WAN024FBU_at; Start 159; Stop 183
tggtgcggacaatcttaatctgacg

SEQ ID NO: 199871 - DNA, 25 bp, Artificial
  probe
  misc_feature (1)..(25): SEQ ID NO: 5620; WAN024FBU_at; Start 204; Stop 228
aatctgcaaagaaggctgcaaatcc

SEQ ID NO: 199872 - DNA, 25 bp, Artificial
  probe
  misc_feature (1)..(25): SEQ ID NO: 5620; WAN024FBU_at; Start 281; Stop 305
gactgggcttgagcctcagcaactc

SEQ ID NO: 199873 - DNA, 25 bp, Artificial
  probe
  misc_feature (1)..(25): SEQ ID NO: 5620; WAN024FBU_at; Start 149; Stop 173
ccatcctcaatggtgcggacaatct

SEQ ID NO: 199874 - DNA, 25 bp, Artificial
  probe
  misc_feature (1)..(25): SEQ ID NO: 5620; WAN024FBU_at; Start 277; Stop 301
tacagactgggcttgagcctcagca

SEQ ID NO: 199875 - DNA, 25 bp, Artificial
  probe
  misc_feature (1)..(25): SEQ ID NO: 5620; WAN024FBU_at; Start 252; Stop 276
tcgaatgttggatataggtatcccc

SEQ ID NO: 199876 - DNA, 25 bp, Artificial
  probe
  misc_feature (1)..(25): SEQ ID NO: 5620; WAN024FBU_at; Start 44; Stop 68
tgctcaacaatacaaccattctcat

SEQ ID NO: 199877 - DNA, 25 bp, Artificial
  probe
  misc_feature (1)..(25): SEQ ID NO: 5620; WAN024FBU_at; Start 99; Stop 123
gagcttctccaccattcagatattg

SEQ ID NO: 199878 - DNA, 25 bp, Artificial
  probe
  misc_feature (1)..(25): SEQ ID NO: 5620; WAN024FBU_at; Start 131; Stop 155
tgaacaaagaccagattgccatcct

SEQ ID NO: 199879 - DNA, 25 bp, Artificial
  probe
  misc_feature (1)..(25): SEQ ID NO: 5620; WAN024FBU_at; Start 264; Stop 288
tataggtatcccctacagactgggc

SEQ ID NO: 199880 - DNA, 25 bp, Artificial
  probe
  misc_feature (1)..(25): SEQ ID NO: 5620; WAN024FBU_at; Start 198; Stop 222
caaagaaatctgcaaagaaggctgc

SEQ ID NO: 199881 - DNA, 25 bp, Artificial
  probe
  misc_feature (1)..(25): SEQ ID NO: 5620; WAN024FBU_at; Start 65; Stop 89
tcatcctcacggaaagtatccgtcg

SEQ ID NO: 199882 - DNA, 25 bp, Artificial
  probe
  misc_feature (1)..(25): SEQ ID NO: 5620; WAN024FBU_at; Start 12; Stop 36
caggtgttcgatagtagtcaatgac

SEQ ID NO: 199883 - DNA, 25 bp, Artificial
  probe
  misc_feature (1)..(25): SEQ ID NO: 5620; WAN024FBU_at; Start 240; Stop 264
caggaacacctgtcgaatgttggat

SEQ ID NO: 199884 - DNA, 25 bp, Artificial
  probe
  misc_feature (1)..(25): SEQ ID NO: 5620; WAN024FBU_at; Start 34; Stop 58
gacatcccaatgctcaacaatacaa

SEQ ID NO: 199885 - DNA, 25 bp, Artificial
  probe
  misc_feature (1)..(25): SEQ ID NO: 5620; WAN024FBU_at; Start 174; Stop 198
taatctgacgctctggatgacgctc

SEQ ID NO: 199886 - DNA, 25 bp, Artificial
  probe
  misc_feature (1)..(25): SEQ ID NO: 2845; WAN024FBV_at; Start 667; Stop 691
gatatcttccgtttagagaacggga

SEQ ID NO: 199887 - DNA, 25 bp, Artificial
  probe
  misc_feature (1)..(25): SEQ ID NO: 2845; WAN024FBV_at; Start 478; Stop 502
tggagtgattatgtggcagacgatt

SEQ ID NO: 199888 - DNA, 25 bp, Artificial
  probe
  misc_feature (1)..(25): SEQ ID NO: 2845; WAN024FBV_at; Start 166; Stop 190
gagcgtcatccagagcgtcagatta

SEQ ID NO: 199889 - DNA, 25 bp, Artificial
  probe
  misc_feature (1)..(25): SEQ ID NO: 2845; WAN024FBV_at; Start 523; Stop 547
attggacaaggaagtgctgcttata

SEQ ID NO: 199890 - DNA, 25 bp, Artificial
  probe
  misc_feature (1)..(25): SEQ ID NO: 2845; WAN024FBV_at; Start 59; Stop 83
gagttgctgaggctcaagcccagtc

SEQ ID NO: 199891 - DNA, 25 bp, Artificial
  probe
  misc_feature (1)..(25): SEQ ID NO: 2845; WAN024FBV_at; Start 211; Stop 235
gatggcaatctggtctttgttcatg

SEQ ID NO: 199892 - DNA, 25 bp, Artificial
  probe
  misc_feature (1)..(25): SEQ ID NO: 2845; WAN024FBV_at; Start 334; Stop 358
gactactatcgaacacctgaaaatg

SEQ ID NO: 199893 - DNA, 25 bp, Artificial
  probe
  misc_feature (1)..(25): SEQ ID NO: 2845; WAN024FBV_at; Start 2; Stop 26
tgtcacaacaagtgaaaaatgctca

SEQ ID NO: 199894 - DNA, 25 bp, Artificial
  probe
  misc_feature (1)..(25): SEQ ID NO: 2845; WAN024FBV_at; Start 611; Stop 635
actatgtggttagctatggtcagac

SEQ ID NO: 199895 - DNA, 25 bp, Artificial
  probe
  misc_feature (1)..(25): SEQ ID NO: 2845; WAN024FBV_at; Start 133; Stop 157
gaaggatttgcagccttctttgcag

SEQ ID NO: 199896 - DNA, 25 bp, Artificial
  probe
  misc_feature (1)..(25): SEQ ID NO: 2845; WAN024FBV_at; Start 106; Stop 130
cattcgacaggtgttcctgacggga

SEQ ID NO: 199897 - DNA, 25 bp, Artificial
  probe
  misc_feature (1)..(25): SEQ ID NO: 2845; WAN024FBV_at; Start 91; Stop 115
gatacctatatccaacattcgacag

SEQ ID NO: 199898 - DNA, 25 bp, Artificial
  probe
  misc_feature (1)..(25): SEQ ID NO: 2845; WAN024FBV_at; Start 652; Stop 676
gcttatgcccagtacgatatcttcc

SEQ ID NO: 199899 - DNA, 25 bp, Artificial
  probe
  misc_feature (1)..(25): SEQ ID NO: 2845; WAN024FBV_at; Start 15; Stop 39
gaaaaatgctcacaacctatacatc

SEQ ID NO: 199900 - DNA, 25 bp, Artificial
  probe
  misc_feature (1)..(25): SEQ ID NO: 2845; WAN024FBV_at; Start 315; Stop 339
tgagcattgggatgtcattgactac

SEQ ID NO: 199901 - DNA, 25 bp, Artificial
  probe
  misc_feature (1)..(25): SEQ ID NO: 2845; WAN024FBV_at; Start 197; Stop 221
tccgcaccattgaggatggcaatct

SEQ ID NO: 199902 - DNA, 25 bp, Artificial
  probe
  misc_feature (1)..(25): SEQ ID NO: 2845; WAN024FBV_at; Start 427; Stop 451
ctggttcgccgtttcttgacagaaa

SEQ ID NO: 199903 - DNA, 25 bp, Artificial
  probe
  misc_feature (1)..(25): SEQ ID NO: 2845; WAN024FBV_at; Start 625; Stop 649
tatggtcagactcagattgatggcg

SEQ ID NO: 199904 - DNA, 25 bp, Artificial
  probe
  misc_feature (1)..(25): SEQ ID NO: 2845; WAN024FBV_at; Start 492; Stop 516
ggcagacgatttgattcagcataat

SEQ ID NO: 199905 - DNA, 25 bp, Artificial
  probe
  misc_feature (1)..(25): SEQ ID NO: 2845; WAN024FBV_at; Start 639; Stop 663
gattgatggcgttgcttatgcccag

SEQ ID NO: 199906 - DNA, 25 bp, Artificial
  probe
  misc_feature (1)..(25): SEQ ID NO: 2845; WAN024FBV_at; Start 596; Stop 620
tcttaggacaaggaaactatgtggt

SEQ ID NO: 199907 - DNA, 25 bp, Artificial
  probe
  misc_feature (1)..(25): SEQ ID NO: 2845; WAN024FBV_at; Start 154; Stop 178
gcagatttctttgagcgtcatccag

SEQ ID NO: 199908 - DNA, 25 bp, Artificial
  probe
  misc_feature (1)..(25): SEQ ID NO: 2845; WAN024FBV_at; Start 120; Stop 144
tcctgacgggaaagaaggatttgca

SEQ ID NO: 199909 - DNA, 25 bp, Artificial
  probe
  misc_feature (1)..(25): SEQ ID NO: 2845; WAN024FBV_at; Start 441; Stop 465
cttgacagaaattttccaaaatggg

SEQ ID NO: 199910 - DNA, 25 bp, Artificial
  probe
  misc_feature (1)..(25): SEQ ID NO: 2845; WAN024FBV_at; Start 680; Stop 704
tagagaacgggaaaattgtggagca

SEQ ID NO: 199911 - DNA, 25 bp, Artificial
  probe
  misc_feature (1)..(25): SEQ ID NO: 2845; WAN024FBV_at; Start 259; Stop 283
gaagctcaatgggtgacgacggata

SEQ ID NO: 199912 - DNA, 25 bp, Artificial
  probe
  misc_feature (1)..(25): SEQ ID NO: 2845; WAN024FBV_at; Start 181; Stop 205
cgtcagattaagattgtccgcacca

SEQ ID NO: 199913 - DNA, 25 bp, Artificial
  probe
  misc_feature (1)..(25): SEQ ID NO: 2845; WAN024FBV_at; Start 265; Stop 289
caatgggtgacgacggatactttcc

SEQ ID NO: 199914 - DNA, 25 bp, Artificial
  probe
  misc_feature (1)..(25): SEQ ID NO: 2845; WAN024FBV_at; Start 695; Stop 719
ttgtggagcattgggataataagga

SEQ ID NO: 199915 - DNA, 25 bp, Artificial
  probe
  misc_feature (1)..(25): SEQ ID NO: 2845; WAN024FBV_at; Start 241; Stop 265
caatatctgaatggtggagaagctc

SEQ ID NO: 199916 - DNA, 25 bp, Artificial
  probe
  misc_feature (1)..(25): SEQ ID NO: 2845; WAN024FBV_at; Start 538; Stop 562
gctgcttataaaaactatgtggctg

SEQ ID NO: 199917 - DNA, 25 bp, Artificial
  probe
  misc_feature (1)..(25): SEQ ID NO: 2845; WAN024FBV_at; Start 31; Stop 55
ctatacatccatgccattcaagacg

SEQ ID NO: 199918 - DNA, 25 bp, Artificial
  probe
  misc_feature (1)..(25): SEQ ID NO: 2845; WAN024FBV_at; Start 552; Stop 576
ctatgtggctgaatatagtgtcact

SEQ ID NO: 199919 - DNA, 25 bp, Artificial
  probe
  misc_feature (1)..(25): SEQ ID NO: 2845; WAN024FBV_at; Start 579; Stop 603
tgactttgttttccaactcttagga

SEQ ID NO: 199920 - DNA, 25 bp, Artificial
  probe
  misc_feature (1)..(25): SEQ ID NO: 3432; WAN024FBW_at; Start 55; Stop 79
gaataccgtcgttatcagcctgcca

SEQ ID NO: 199921 - DNA, 25 bp, Artificial
  probe
  misc_feature (1)..(25): SEQ ID NO: 3432; WAN024FBW_at; Start 260; Stop 284
caatctggcctacactctcagaaag

SEQ ID NO: 199922 - DNA, 25 bp, Artificial
  probe
  misc_feature (1)..(25): SEQ ID NO: 3432; WAN024FBW_at; Start 132; Stop 156
caaaatatgggtggaatcgaaaacg

SEQ ID NO: 199923 - DNA, 25 bp, Artificial
  probe
  misc_feature (1)..(25): SEQ ID NO: 3432; WAN024FBW_at; Start 447; Stop 471
cggctacactgacccacaagggaag

SEQ ID NO: 199924 - DNA, 25 bp, Artificial
  probe
  misc_feature (1)..(25): SEQ ID NO: 3432; WAN024FBW_at; Start 343; Stop 367
gaagaattcatccagcatacctcag

SEQ ID NO: 199925 - DNA, 25 bp, Artificial
  probe
  misc_feature (1)..(25): SEQ ID NO: 3432; WAN024FBW_at; Start 488; Stop 512
tcctctacagcatgcctatgactgg

SEQ ID NO: 199926 - DNA, 25 bp, Artificial
  probe
  misc_feature (1)..(25): SEQ ID NO: 3432; WAN024FBW_at; Start 2; Stop 26
tggtcttggaatacggcaaaacctc

SEQ ID NO: 199927 - DNA, 25 bp, Artificial
  probe
  misc_feature (1)..(25): SEQ ID NO: 3432; WAN024FBW_at; Start 301; Stop 325
ttaacagaaaggaagcctatgacct

SEQ ID NO: 199928 - DNA, 25 bp, Artificial
  probe
  misc_feature (1)..(25): SEQ ID NO: 3432; WAN024FBW_at; Start 180; Stop 204
tttaaatccaagttcaatccgacca

SEQ ID NO: 199929 - DNA, 25 bp, Artificial
  probe
  misc_feature (1)..(25): SEQ ID NO: 3432; WAN024FBW_at; Start 371; Stop 395
gatcccaacgctcttttatgcagac

SEQ ID NO: 199930 - DNA, 25 bp, Artificial
  probe
  misc_feature (1)..(25): SEQ ID NO: 3432; WAN024FBW_at; Start 13; Stop 37
tacggcaaaacctctgaaaatatct

SEQ ID NO: 199931 - DNA, 25 bp, Artificial
  probe
  misc_feature (1)..(25): SEQ ID NO: 3432; WAN024FBW_at; Start 432; Stop 456
cagtacccagtatgtcggctacact

SEQ ID NO: 199932 - DNA, 25 bp, Artificial
  probe
  misc_feature (1)..(25): SEQ ID NO: 3432; WAN024FBW_at; Start 210; Stop 234
gaattcgctggtgagttcaacctgc

SEQ ID NO: 199933 - DNA, 25 bp, Artificial
  probe
  misc_feature (1)..(25): SEQ ID NO: 3432; WAN024FBW_at; Start 103; Stop 127
aaacatgcttttgatcgcggacaga

SEQ ID NO: 199934 - DNA, 25 bp, Artificial
  probe
  misc_feature (1)..(25): SEQ ID NO: 3432; WAN024FBW_at; Start 40; Stop 64
gctggaatggacgaggaataccgtc

SEQ ID NO: 199935 - DNA, 25 bp, Artificial
  probe
  misc_feature (1)..(25): SEQ ID NO: 3432; WAN024FBW_at; Start 161; Stop 185
caagggcggtctctacagctttaaa

SEQ ID NO: 199936 - DNA, 25 bp, Artificial
  probe
  misc_feature (1)..(25): SEQ ID NO: 3432; WAN024FBW_at; Start 459; Stop 483
cccacaagggaaggtagtggtgtca

SEQ ID NO: 199937 - DNA, 25 bp, Artificial
  probe
  misc_feature (1)..(25): SEQ ID NO: 3432; WAN024FBW_at; Start 76; Stop 100
gccatcatcacttggtacgaaacag

SEQ ID NO: 199938 - DNA, 25 bp, Artificial
  probe
  misc_feature (1)..(25): SEQ ID NO: 3432; WAN024FBW_at; Start 289; Stop 313
tgcgcagaagcattaacagaaagga

SEQ ID NO: 199939 - DNA, 25 bp, Artificial
  probe
  misc_feature (1)..(25): SEQ ID NO: 3432; WAN024FBW_at; Start 501; Stop 525
gcctatgactggtggccttcctaac

SEQ ID NO: 199940 - DNA, 25 bp, Artificial
  probe
  misc_feature (1)..(25): SEQ ID NO: 3432; WAN024FBW_at; Start 195; Stop 219
aatccgaccattgaggaattcgctg

SEQ ID NO: 199941 - DNA, 25 bp, Artificial
  probe
  misc_feature (1)..(25): SEQ ID NO: 3432; WAN024FBW_at; Start 356; Stop 380
agcatacctcagctagatcccaacg

SEQ ID NO: 199942 - DNA, 25 bp, Artificial
  probe
  misc_feature (1)..(25): SEQ ID NO: 3432; WAN024FBW_at; Start 143; Stop 167
tggaatcgaaaacgacctcaagggc

SEQ ID NO: 199943 - DNA, 25 bp, Artificial
  probe
  misc_feature (1)..(25): SEQ ID NO: 3432; WAN024FBW_at; Start 28; Stop 52
gaaaatatctatgctggaatggacg

SEQ ID NO: 199944 - DNA, 25 bp, Artificial
  probe
  misc_feature (1)..(25): SEQ ID NO: 3432; WAN024FBW_at; Start 88; Stop 112
tggtacgaaacagccaaacatgctt

SEQ ID NO: 199945 - DNA, 25 bp, Artificial
  probe
  misc_feature (1)..(25): SEQ ID NO: 3432; WAN024FBW_at; Start 401; Stop 425
aaatggcagagctgctgagcaagcg

SEQ ID NO: 199946 - DNA, 25 bp, Artificial
  probe
  misc_feature (1)..(25): SEQ ID NO: 3432; WAN024FBW_at; Start 333; Stop 357
tctcagccaagaagaattcatccag

SEQ ID NO: 199947 - DNA, 25 bp, Artificial
  probe
  misc_feature (1)..(25): SEQ ID NO: 3432; WAN024FBW_at; Start 117; Stop 141
tcgcggacagattggcaaaatatgg

SEQ ID NO: 199948 - DNA, 25 bp, Artificial
  probe
  misc_feature (1)..(25): SEQ ID NO: 3432; WAN024FBW_at; Start 221; Stop 245
tgagttcaacctgccaactaatcct

SEQ ID NO: 199949 - DNA, 25 bp, Artificial
  probe
  misc_feature (1)..(25): SEQ ID NO: 3432; WAN024FBW_at; Start 473; Stop 497
tagtggtgtcagctgtcctctacag

SEQ ID NO: 199950 - DNA, 25 bp, Artificial
  probe
  misc_feature (1)..(25): SEQ ID NO: 3432; WAN024FBW_at; Start 320; Stop 344
tgacctttaaacttctcagccaaga

SEQ ID NO: 199951 - DNA, 25 bp, Artificial
  probe
  misc_feature (1)..(25): SEQ ID NO: 3432; WAN024FBW_at; Start 417; Stop 441
gagcaagcgtggcttcagtacccag

SEQ ID NO: 199952 - DNA, 25 bp, Artificial
  probe
  misc_feature (1)..(25): SEQ ID NO: 3432; WAN024FBW_at; Start 275; Stop 299
tctcagaaagaaactgcgcagaagc

SEQ ID NO: 199953 - DNA, 25 bp, Artificial
  probe
  misc_feature (1)..(25): SEQ ID NO: 3432; WAN024FBW_at; Start 387; Stop 411
tatgcagaccgtagaaatggcagag

SEQ ID NO: 199954 - DNA, 25 bp, Artificial
  probe
  misc_feature (1)..(25): SEQ ID NO: 6880; WAN024FBX_at; Start 264; Stop 288
cagcccagtgatagtattttgcaaa

SEQ ID NO: 199955 - DNA, 25 bp, Artificial
  probe
  misc_feature (1)..(25): SEQ ID NO: 6880; WAN024FBX_at; Start 228; Stop 252
aatcccagcctcttgcaggttcgga

SEQ ID NO: 199956 - DNA, 25 bp, Artificial
  probe
  misc_feature (1)..(25): SEQ ID NO: 6880; WAN024FBX_at; Start 161; Stop 185
tgataacaggcatggcgagtggaat

SEQ ID NO: 199957 - DNA, 25 bp, Artificial
  probe
  misc_feature (1)..(25): SEQ ID NO: 6880; WAN024FBX_at; Start 141; Stop 165
tgccgtccgaatcccagacatgata

SEQ ID NO: 199958 - DNA, 25 bp, Artificial
  probe
  misc_feature (1)..(25): SEQ ID NO: 6880; WAN024FBX_at; Start 254; Stop 278
caattcccttcagcccagtgatagt

SEQ ID NO: 199959 - DNA, 25 bp, Artificial
  probe
  misc_feature (1)..(25): SEQ ID NO: 6880; WAN024FBX_at; Start 12; Stop 36
tgcagaagaaagtgccccaatcaaa

SEQ ID NO: 199960 - DNA, 25 bp, Artificial
  probe
  misc_feature (1)..(25): SEQ ID NO: 6880; WAN024FBX_at; Start 23; Stop 47
gtgccccaatcaaaatcaaactggc

SEQ ID NO: 199961 - DNA, 25 bp, Artificial
  probe
  misc_feature (1)..(25): SEQ ID NO: 6880; WAN024FBX_at; Start 93; Stop 117
tgcaccaatcaaggccgccaaggtt

SEQ ID NO: 199962 - DNA, 25 bp, Artificial
  probe
  misc_feature (1)..(25): SEQ ID NO: 6880; WAN024FBX_at; Start 99; Stop 123
aatcaaggccgccaaggttgccgta

SEQ ID NO: 199963 - DNA, 25 bp, Artificial
  probe
  misc_feature (1)..(25): SEQ ID NO: 6880; WAN024FBX_at; Start 128; Stop 152
taatcaaaacagctgccgtccgaat

SEQ ID NO: 199964 - DNA, 25 bp, Artificial
  probe
  misc_feature (1)..(25): SEQ ID NO: 6880; WAN024FBX_at; Start 194; Stop 218
tcttgagacgttcccatctggtcat

SEQ ID NO: 199965 - DNA, 25 bp, Artificial
  probe
  misc_feature (1)..(25): SEQ ID NO: 6880; WAN024FBX_at; Start 105; Stop 129
ggccgccaaggttgccgtaccgata

SEQ ID NO: 199966 - DNA, 25 bp, Artificial
  probe
  misc_feature (1)..(25): SEQ ID NO: 6880; WAN024FBX_at; Start 205; Stop 229
tcccatctggtcatcccaaaggcaa

SEQ ID NO: 199967 - DNA, 25 bp, Artificial
  probe
  misc_feature (1)..(25): SEQ ID NO: 6880; WAN024FBX_at; Start 126; Stop 150
gataatcaaaacagctgccgtccga

SEQ ID NO: 199968 - DNA, 25 bp, Artificial
  probe
  misc_feature (1)..(25): SEQ ID NO: 6880; WAN024FBX_at; Start 121; Stop 145
gtaccgataatcaaaacagctgccg

SEQ ID NO: 199969 - DNA, 25 bp, Artificial
  probe
  misc_feature (1)..(25): SEQ ID NO: 6880; WAN024FBX_at; Start 237; Stop 261
ctcttgcaggttcggatcaattccc

SEQ ID NO: 199970 - DNA, 25 bp, Artificial
  probe
  misc_feature (1)..(25): SEQ ID NO: 6880; WAN024FBX_at; Start 171; Stop 195
catggcgagtggaatttcaaatttc

SEQ ID NO: 199971 - DNA, 25 bp, Artificial
  probe
  misc_feature (1)..(25): SEQ ID NO: 6880; WAN024FBX_at; Start 19; Stop 43
gaaagtgccccaatcaaaatcaaac

SEQ ID NO: 199972 - DNA, 25 bp, Artificial
  probe
  misc_feature (1)..(25): SEQ ID NO: 6880; WAN024FBX_at; Start 155; Stop 179
cagacatgataacaggcatggcgag

SEQ ID NO: 199973 - DNA, 25 bp, Artificial
  probe
  misc_feature (1)..(25): SEQ ID NO: 6880; WAN024FBX_at; Start 200; Stop 224
gacgttcccatctggtcatcccaaa

SEQ ID NO: 199974 - DNA, 25 bp, Artificial
  probe
  misc_feature (1)..(25): SEQ ID NO: 6880; WAN024FBX_at; Start 187; Stop 211
tcaaatttcttgagacgttcccatc

SEQ ID NO: 199975 - DNA, 25 bp, Artificial
  probe
  misc_feature (1)..(25): SEQ ID NO: 6880; WAN024FBX_at; Start 38; Stop 62
tcaaactggcattattacggtcaat

SEQ ID NO: 199976 - DNA, 25 bp, Artificial
  probe
  misc_feature (1)..(25): SEQ ID NO: 6880; WAN024FBX_at; Start 280; Stop 304
ttttgcaaaatagggaaaatcgcat

SEQ ID NO: 199977 - DNA, 25 bp, Artificial
  probe
  misc_feature (1)..(25): SEQ ID NO: 6880; WAN024FBX_at; Start 250; Stop 274
ggatcaattcccttcagcccagtga

SEQ ID NO: 199978 - DNA, 25 bp, Artificial
  probe
  misc_feature (1)..(25): SEQ ID NO: 6880; WAN024FBX_at; Start 111; Stop 135
caaggttgccgtaccgataatcaaa

SEQ ID NO: 199979 - DNA, 25 bp, Artificial
  probe
  misc_feature (1)..(25): SEQ ID NO: 6880; WAN024FBX_at; Start 47; Stop 71
cattattacggtcaattcccaaaag

SEQ ID NO: 199980 - DNA, 25 bp, Artificial
  probe
  misc_feature (1)..(25): SEQ ID NO: 6880; WAN024FBX_at; Start 222; Stop 246
aaaggcaatcccagcctcttgcagg

SEQ ID NO: 199981 - DNA, 25 bp, Artificial
  probe
  misc_feature (1)..(25): SEQ ID NO: 6880; WAN024FBX_at; Start 167; Stop 191
caggcatggcgagtggaatttcaaa

SEQ ID NO: 199982 - DNA, 25 bp, Artificial
  probe
  misc_feature (1)..(25): SEQ ID NO: 6880; WAN024FBX_at; Start 242; Stop 266
gcaggttcggatcaattcccttcag

SEQ ID NO: 199983 - DNA, 25 bp, Artificial
  probe
  misc_feature (1)..(25): SEQ ID NO: 6880; WAN024FBX_at; Start 2; Stop 26
tggctagcactgcagaagaaagtgc

SEQ ID NO: 199984 - DNA, 25 bp, Artificial
  probe
  misc_feature (1)..(25): SEQ ID NO: 6880; WAN024FBX_at; Start 149; Stop 173
gaatcccagacatgataacaggcat

SEQ ID NO: 199985 - DNA, 25 bp, Artificial
  probe
  misc_feature (1)..(25): SEQ ID NO: 6880; WAN024FBX_at; Start 233; Stop 257
cagcctcttgcaggttcggatcaat

SEQ ID NO: 199986 - DNA, 25 bp, Artificial
  probe
  misc_feature (1)..(25): SEQ ID NO: 6880; WAN024FBX_at; Start 6; Stop 30
tagcactgcagaagaaagtgcccca

SEQ ID NO: 199987 - DNA, 25 bp, Artificial
  probe
  misc_feature (1)..(25): SEQ ID NO: 6880; WAN024FBX_at; Start 212; Stop 236
tggtcatcccaaaggcaatcccagc

SEQ ID NO: 199988 - DNA, 25 bp, Artificial
  probe
  misc_feature (1)..(25): SEQ ID NO: 4953; WAN024FBY_at; Start 113; Stop 137
gcagtcatgctggtattttcttcaa

SEQ ID NO: 199989 - DNA, 25 bp, Artificial
  probe
  misc_feature (1)..(25): SEQ ID NO: 4953; WAN024FBY_at; Start 97; Stop 121
attcggtttaacagtcgcagtcatg

SEQ ID NO: 199990 - DNA, 25 bp, Artificial
  probe
  misc_feature (1)..(25): SEQ ID NO: 4953; WAN024FBY_at; Start 115; Stop 139
agtcatgctggtattttcttcaatc

SEQ ID NO: 199991 - DNA, 25 bp, Artificial
  probe
  misc_feature (1)..(25): SEQ ID NO: 4953; WAN024FBY_at; Start 99; Stop 123
tcggtttaacagtcgcagtcatgct

SEQ ID NO: 199992 - DNA, 25 bp, Artificial
  probe
  misc_feature (1)..(25): SEQ ID NO: 4953; WAN024FBY_at; Start 102; Stop 126
gtttaacagtcgcagtcatgctggt

SEQ ID NO: 199993 - DNA, 25 bp, Artificial
  probe
  misc_feature (1)..(25): SEQ ID NO: 4953; WAN024FBY_at; Start 231; Stop 255
ctggactataagacagacccagtaa

SEQ ID NO: 199994 - DNA, 25 bp, Artificial
  probe
  misc_feature (1)..(25): SEQ ID NO: 4953; WAN024FBY_at; Start 116; Stop 140
gtcatgctggtattttcttcaatca

SEQ ID NO: 199995 - DNA, 25 bp, Artificial
  probe
  misc_feature (1)..(25): SEQ ID NO: 4953; WAN024FBY_at; Start 230; Stop 254
gctggactataagacagacccagta

SEQ ID NO: 199996 - DNA, 25 bp, Artificial
  probe
  misc_feature (1)..(25): SEQ ID NO: 4953; WAN024FBY_at; Start 118; Stop 142
catgctggtattttcttcaatcagc

SEQ ID NO: 199997 - DNA, 25 bp, Artificial
  probe
  misc_feature (1)..(25): SEQ ID NO: 4953; WAN024FBY_at; Start 120; Stop 144
tgctggtattttcttcaatcagcaa

SEQ ID NO: 199998 - DNA, 25 bp, Artificial
  probe
  misc_feature (1)..(25): SEQ ID NO: 4953; WAN024FBY_at; Start 57; Stop 81
cttttttcagagcttcataaaggaa

SEQ ID NO: 199999 - DNA, 25 bp, Artificial
  probe
  misc_feature (1)..(25): SEQ ID NO: 4953; WAN024FBY_at; Start 96; Stop 120
aattcggtttaacagtcgcagtcat

SEQ ID NO: 200000 - DNA, 25 bp, Artificial
  probe
  misc_feature (1)..(25): SEQ ID NO: 4953; WAN024FBY_at; Start 56; Stop 80
ccttttttcagagcttcataaagga

SEQ ID NO: 200001 - DNA, 25 bp, Artificial
  probe
  misc_feature (1)..(25): SEQ ID NO: 4953; WAN024FBY_at; Start 107; Stop 131
acagtcgcagtcatgctggtatttt

SEQ ID NO: 200002 - DNA, 25 bp, Artificial
  probe
  misc_feature (1)..(25): SEQ ID NO: 4953; WAN024FBY_at; Start 104; Stop 128
ttaacagtcgcagtcatgctggtat

SEQ ID NO: 200003 - DNA, 25 bp, Artificial
  probe
  misc_feature (1)..(25): SEQ ID NO: 4953; WAN024FBY_at; Start 100; Stop 124
cggtttaacagtcgcagtcatgctg

SEQ ID NO: 200004 - DNA, 25 bp, Artificial
  probe
  misc_feature (1)..(25): SEQ ID NO: 4953; WAN024FBY_at; Start 2; Stop 26
tgaagcaaactttcagtcaccgtac

SEQ ID NO: 200005 - DNA, 25 bp, Artificial
  probe
  misc_feature (1)..(25): SEQ ID NO: 4953; WAN024FBY_at; Start 92; Stop 116
ccaaaattcggtttaacagtcgcag

SEQ ID NO: 200006 - DNA, 25 bp, Artificial
  probe
  misc_feature (1)..(25): SEQ ID NO: 4953; WAN024FBY_at; Start 1; Stop 25
ttgaagcaaactttcagtcaccgta

SEQ ID NO: 200007 - DNA, 25 bp, Artificial
  probe
  misc_feature (1)..(25): SEQ ID NO: 4953; WAN024FBY_at; Start 3; Stop 27
gaagcaaactttcagtcaccgtacc

SEQ ID NO: 200008 - DNA, 25 bp, Artificial
  probe
  misc_feature (1)..(25): SEQ ID NO: 4953; WAN024FBY_at; Start 103; Stop 127
tttaacagtcgcagtcatgctggta

SEQ ID NO: 200009 - DNA, 25 bp, Artificial
  probe
  misc_feature (1)..(25): SEQ ID NO: 4953; WAN024FBY_at; Start 105; Stop 129
taacagtcgcagtcatgctggtatt

SEQ ID NO: 200010 - DNA, 25 bp, Artificial
  probe
  misc_feature (1)..(25): SEQ ID NO: 4953; WAN024FBY_at; Start 117; Stop 141
tcatgctggtattttcttcaatcag

SEQ ID NO: 200011 - DNA, 25 bp, Artificial
  probe
  misc_feature (1)..(25): SEQ ID NO: 4953; WAN024FBY_at; Start 110; Stop 134
gtcgcagtcatgctggtattttctt

SEQ ID NO: 200012 - DNA, 25 bp, Artificial
  probe
  misc_feature (1)..(25): SEQ ID NO: 4953; WAN024FBY_at; Start 108; Stop 132
cagtcgcagtcatgctggtattttc

SEQ ID NO: 200013 - DNA, 25 bp, Artificial
  probe
  misc_feature (1)..(25): SEQ ID NO: 4953; WAN024FBY_at; Start 112; Stop 136
cgcagtcatgctggtattttcttca

SEQ ID NO: 200014 - DNA, 25 bp, Artificial
  probe
  misc_feature (1)..(25): SEQ ID NO: 4953; WAN024FBY_at; Start 114; Stop 138
cagtcatgctggtattttcttcaat

SEQ ID NO: 200015 - DNA, 25 bp, Artificial
  probe
  misc_feature (1)..(25): SEQ ID NO: 4953; WAN024FBY_at; Start 93; Stop 117
caaaattcggtttaacagtcgcagt

SEQ ID NO: 200016 - DNA, 25 bp, Artificial
  probe
  misc_feature (1)..(25): SEQ ID NO: 4953; WAN024FBY_at; Start 106; Stop 130
aacagtcgcagtcatgctggtattt

SEQ ID NO: 200017 - DNA, 25 bp, Artificial
  probe
  misc_feature (1)..(25): SEQ ID NO: 4953; WAN024FBY_at; Start 119; Stop 143
atgctggtattttcttcaatcagca

SEQ ID NO: 200018 - DNA, 25 bp, Artificial
  probe
  misc_feature (1)..(25): SEQ ID NO: 4953; WAN024FBY_at; Start 111; Stop 135
tcgcagtcatgctggtattttcttc

SEQ ID NO: 200019 - DNA, 25 bp, Artificial
  probe
  misc_feature (1)..(25): SEQ ID NO: 4953; WAN024FBY_at; Start 95; Stop 119
aaattcggtttaacagtcgcagtca

SEQ ID NO: 200020 - DNA, 25 bp, Artificial
  probe
  misc_feature (1)..(25): SEQ ID NO: 4953; WAN024FBY_at; Start 98; Stop 122
ttcggtttaacagtcgcagtcatgc

SEQ ID NO: 200021 - DNA, 25 bp, Artificial
  probe
  misc_feature (1)..(25): SEQ ID NO: 4953; WAN024FBY_at; Start 109; Stop 133
agtcgcagtcatgctggtattttct

SEQ ID NO: 200022 - DNA, 25 bp, Artificial
  probe
  misc_feature (1)..(25): SEQ ID NO: 1836; WAN024FBZ_at; Start 183; Stop 207
tgggaagcgcatcaaagactatgat

SEQ ID NO: 200023 - DNA, 25 bp, Artificial
  probe
  misc_feature (1)..(25): SEQ ID NO: 1836; WAN024FBZ_at; Start 337; Stop 361
aaaacagaagagcttttggctaagg

SEQ ID NO: 200024 - DNA, 25 bp, Artificial
  probe
  misc_feature (1)..(25): SEQ ID NO: 1836; WAN024FBZ_at; Start 200; Stop 224
actatgatgagcgtgaacttcgtct

SEQ ID NO: 200025 - DNA, 25 bp, Artificial
  probe
  misc_feature (1)..(25): SEQ ID NO: 1836; WAN024FBZ_at; Start 153; Stop 177
ggaaccaactgatggaaatatttat

SEQ ID NO: 200026 - DNA, 25 bp, Artificial
  probe
  misc_feature (1)..(25): SEQ ID NO: 1836; WAN024FBZ_at; Start 418; Stop 442
gaacagcaacgggtcggtattgtcc

SEQ ID NO: 200027 - DNA, 25 bp, Artificial
  probe
  misc_feature (1)..(25): SEQ ID NO: 1836; WAN024FBZ_at; Start 33; Stop 57
cacagaaaaggatgtcttgagagat

SEQ ID NO: 200028 - DNA, 25 bp, Artificial
  probe
  misc_feature (1)..(25): SEQ ID NO: 1836; WAN024FBZ_at; Start 145; Stop 169
cgtcttttggaaccaactgatggaa

SEQ ID NO: 200029 - DNA, 25 bp, Artificial
  probe
  misc_feature (1)..(25): SEQ ID NO: 1836; WAN024FBZ_at; Start 407; Stop 431
tatctggtggagaacagcaacgggt

SEQ ID NO: 200030 - DNA, 25 bp, Artificial
  probe
  misc_feature (1)..(25): SEQ ID NO: 1836; WAN024FBZ_at; Start 168; Stop 192
aaatatttatatggatgggaagcgc

SEQ ID NO: 200031 - DNA, 25 bp, Artificial
  probe
  misc_feature (1)..(25): SEQ ID NO: 1836; WAN024FBZ_at; Start 517; Stop 541
cagttgcaggttctgacaaaagaat

SEQ ID NO: 200032 - DNA, 25 bp, Artificial
  probe
  misc_feature (1)..(25): SEQ ID NO: 1836; WAN024FBZ_at; Start 50; Stop 74
tgagagatgtcaacttacagattga

SEQ ID NO: 200033 - DNA, 25 bp, Artificial
  probe
  misc_feature (1)..(25): SEQ ID NO: 1836; WAN024FBZ_at; Start 43; Stop 67
gatgtcttgagagatgtcaacttac

SEQ ID NO: 200034 - DNA, 25 bp, Artificial
  probe
  misc_feature (1)..(25): SEQ ID NO: 1836; WAN024FBZ_at; Start 232; Stop 256
ggttatgttttacaggctattgctc

SEQ ID NO: 200035 - DNA, 25 bp, Artificial
  probe
  misc_feature (1)..(25): SEQ ID NO: 1836; WAN024FBZ_at; Start 112; Stop 136
tcaggtaagacgaccatgctcaaga

SEQ ID NO: 200036 - DNA, 25 bp, Artificial
  probe
  misc_feature (1)..(25): SEQ ID NO: 1836; WAN024FBZ_at; Start 341; Stop 365
cagaagagcttttggctaaggttgg

SEQ ID NO: 200037 - DNA, 25 bp, Artificial
  probe
  misc_feature (1)..(25): SEQ ID NO: 1836; WAN024FBZ_at; Start 208; Stop 232
gagcgtgaacttcgtctttctactg

SEQ ID NO: 200038 - DNA, 25 bp, Artificial
  probe
  misc_feature (1)..(25): SEQ ID NO: 1836; WAN024FBZ_at; Start 214; Stop 238
gaacttcgtctttctactggttatg

SEQ ID NO: 200039 - DNA, 25 bp, Artificial
  probe
  misc_feature (1)..(25): SEQ ID NO: 1836; WAN024FBZ_at; Start 438; Stop 462
tgtccgagctatgattggtcagccc

SEQ ID NO: 200040 - DNA, 25 bp, Artificial
  probe
  misc_feature (1)..(25): SEQ ID NO: 1836; WAN024FBZ_at; Start 443; Stop 467
gagctatgattggtcagcccaagat

SEQ ID NO: 200041 - DNA, 25 bp, Artificial
  probe
  misc_feature (1)..(25): SEQ ID NO: 1836; WAN024FBZ_at; Start 544; Stop 568
cataaagagtttgggatgacaacga

SEQ ID NO: 200042 - DNA, 25 bp, Artificial
  probe
  misc_feature (1)..(25): SEQ ID NO: 1836; WAN024FBZ_at; Start 424; Stop 448
caacgggtcggtattgtccgagcta

SEQ ID NO: 200043 - DNA, 25 bp, Artificial
  probe
  misc_feature (1)..(25): SEQ ID NO: 1836; WAN024FBZ_at; Start 25; Stop 49
ctgcgctacacagaaaaggatgtct

SEQ ID NO: 200044 - DNA, 25 bp, Artificial
  probe
  misc_feature (1)..(25): SEQ ID NO: 1836; WAN024FBZ_at; Start 116; Stop 140
gtaagacgaccatgctcaagatgat

SEQ ID NO: 200045 - DNA, 25 bp, Artificial
  probe
  misc_feature (1)..(25): SEQ ID NO: 1836; WAN024FBZ_at; Start 226; Stop 250
tctactggttatgttttacaggcta

SEQ ID NO: 200046 - DNA, 25 bp, Artificial
  probe
  misc_feature (1)..(25): SEQ ID NO: 1836; WAN024FBZ_at; Start 280; Stop 304
gaaaatattgctctcattcctgaaa

SEQ ID NO: 200047 - DNA, 25 bp, Artificial
  probe
  misc_feature (1)..(25): SEQ ID NO: 1836; WAN024FBZ_at; Start 135; Stop 159
gatgattaaccgtcttttggaacca

SEQ ID NO: 200048 - DNA, 25 bp, Artificial
  probe
  misc_feature (1)..(25): SEQ ID NO: 1836; WAN024FBZ_at; Start 123; Stop 147
gaccatgctcaagatgattaaccgt

SEQ ID NO: 200049 - DNA, 25 bp, Artificial
  probe
  misc_feature (1)..(25): SEQ ID NO: 1836; WAN024FBZ_at; Start 177; Stop 201
tatggatgggaagcgcatcaaagac

SEQ ID NO: 200050 - DNA, 25 bp, Artificial
  probe
  misc_feature (1)..(25): SEQ ID NO: 1836; WAN024FBZ_at; Start 550; Stop 574
gagtttgggatgacaacgatttttg

SEQ ID NO: 200051 - DNA, 25 bp, Artificial
  probe
  misc_feature (1)..(25): SEQ ID NO: 1836; WAN024FBZ_at; Start 353; Stop 377
tggctaaggttggtttaccagtagc

SEQ ID NO: 200052 - DNA, 25 bp, Artificial
  probe
  misc_feature (1)..(25): SEQ ID NO: 1836; WAN024FBZ_at; Start 20; Stop 44
tagcactgcgctacacagaaaagga

SEQ ID NO: 200053 - DNA, 25 bp, Artificial
  probe
  misc_feature (1)..(25): SEQ ID NO: 1836; WAN024FBZ_at; Start 287; Stop 311
ttgctctcattcctgaaatgaaggg

SEQ ID NO: 200054 - DNA, 25 bp, Artificial
  probe
  misc_feature (1)..(25): SEQ ID NO: 1836; WAN024FBZ_at; Start 7; Stop 31
gaatacaaaaatgtagcactgcgct

SEQ ID NO: 200055 - DNA, 25 bp, Artificial
  probe
  misc_feature (1)..(25): SEQ ID NO: 1836; WAN024FBZ_at; Start 194; Stop 218
tcaaagactatgatgagcgtgaact

SEQ ID NO: 200056 - DNA, 25 bp, Artificial
  probe
  misc_feature (1)..(25): SEQ ID NO: 5831; WAN024FC2_at; Start 1473; Stop 1497
ccaagtcggtgttgaaggcaagtca

SEQ ID NO: 200057 - DNA, 25 bp, Artificial
  probe
  misc_feature (1)..(25): SEQ ID NO: 5831; WAN024FC2_at; Start 1364; Stop 1388
gggctccactcatgaaagaagctct

SEQ ID NO: 200058 - DNA, 25 bp, Artificial
  probe
  misc_feature (1)..(25): SEQ ID NO: 5831; WAN024FC2_at; Start 1262; Stop 1286
gggatattcaaatcacggatgccta

SEQ ID NO: 200059 - DNA, 25 bp, Artificial
  probe
  misc_feature (1)..(25): SEQ ID NO: 5831; WAN024FC2_at; Start 39; Stop 63
tttaattgcaacttttcaggatcgt

SEQ ID NO: 200060 - DNA, 25 bp, Artificial
  probe
  misc_feature (1)..(25): SEQ ID NO: 5831; WAN024FC2_at; Start 540; Stop 564
gggaattgaccgtaataatgccagt

SEQ ID NO: 200061 - DNA, 25 bp, Artificial
  probe
  misc_feature (1)..(25): SEQ ID NO: 5831; WAN024FC2_at; Start 1049; Stop 1073
cctatgctgtagctgttccgaaaaa

SEQ ID NO: 200062 - DNA, 25 bp, Artificial
  probe
  misc_feature (1)..(25): SEQ ID NO: 5831; WAN024FC2_at; Start 1290; Stop 1314
gactgatgcggaattggagcgttat

SEQ ID NO: 200063 - DNA, 25 bp, Artificial
  probe
  misc_feature (1)..(25): SEQ ID NO: 5831; WAN024FC2_at; Start 1306; Stop 1330
gagcgttatgatttacaggtcttgg

SEQ ID NO: 200064 - DNA, 25 bp, Artificial
  probe
  misc_feature (1)..(25): SEQ ID NO: 5831; WAN024FC2_at; Start 216; Stop 240
gaccatcccgtctctggccttgttg

SEQ ID NO: 200065 - DNA, 25 bp, Artificial
  probe
  misc_feature (1)..(25): SEQ ID NO: 5831; WAN024FC2_at; Start 803; Stop 827
ttgaagaaaataccagcatgactgc

SEQ ID NO: 200066 - DNA, 25 bp, Artificial
  probe
  misc_feature (1)..(25): SEQ ID NO: 5831; WAN024FC2_at; Start 1321; Stop 1345
caggtcttggaagatgacaagcaac

SEQ ID NO: 200067 - DNA, 25 bp, Artificial
  probe
  misc_feature (1)..(25): SEQ ID NO: 5831; WAN024FC2_at; Start 818; Stop 842
gcatgactgcgactgttaaaccgaa

SEQ ID NO: 200068 - DNA, 25 bp, Artificial
  probe
  misc_feature (1)..(25): SEQ ID NO: 5831; WAN024FC2_at; Start 284; Stop 308
tgacagctctagtgatttatgcgat

SEQ ID NO: 200069 - DNA, 25 bp, Artificial
  probe
  misc_feature (1)..(25): SEQ ID NO: 5831; WAN024FC2_at; Start 1512; Stop 1536
caaggagtttctccaagaacaaggt

SEQ ID NO: 200070 - DNA, 25 bp, Artificial
  probe
  misc_feature (1)..(25): SEQ ID NO: 5831; WAN024FC2_at; Start 1179; Stop 1203
taagggcttgcaatcaatgtatggt

SEQ ID NO: 200071 - DNA, 25 bp, Artificial
  probe
  misc_feature (1)..(25): SEQ ID NO: 5831; WAN024FC2_at; Start 1457; Stop 1481
tgagccagctcaactaccaagtcgg

SEQ ID NO: 200072 - DNA, 25 bp, Artificial
  probe
  misc_feature (1)..(25): SEQ ID NO: 5831; WAN024FC2_at; Start 1077; Stop 1101
tgctcaagaatatggcttgaagacc

SEQ ID NO: 200073 - DNA, 25 bp, Artificial
  probe
  misc_feature (1)..(25): SEQ ID NO: 5831; WAN024FC2_at; Start 913; Stop 937
ggtacggtgactgaaagtttgcttc

SEQ ID NO: 200074 - DNA, 25 bp, Artificial
  probe
  misc_feature (1)..(25): SEQ ID NO: 5831; WAN024FC2_at; Start 370; Stop 394
gctgggattgcctttgggatgacca

SEQ ID NO: 200075 - DNA, 25 bp, Artificial
  probe
  misc_feature (1)..(25): SEQ ID NO: 5831; WAN024FC2_at; Start 860; Stop 884
tcctttatgaagctctgaaaaaagg

SEQ ID NO: 200076 - DNA, 25 bp, Artificial
  probe
  misc_feature (1)..(25): SEQ ID NO: 5831; WAN024FC2_at; Start 1060; Stop 1084
gctgttccgaaaaagattgctcaag

SEQ ID NO: 200077 - DNA, 25 bp, Artificial
  probe
  misc_feature (1)..(25): SEQ ID NO: 5831; WAN024FC2_at; Start 686; Stop 710
tactgggtctgtcttatagtccagc

SEQ ID NO: 200078 - DNA, 25 bp, Artificial
  probe
  misc_feature (1)..(25): SEQ ID NO: 5831; WAN024FC2_at; Start 1193; Stop 1217
caatgtatggtctcaatctcaatgt

SEQ ID NO: 200079 - DNA, 25 bp, Artificial
  probe
  misc_feature (1)..(25): SEQ ID NO: 5831; WAN024FC2_at; Start 1399; Stop 1423
cacccagagttggaaagagttctta

SEQ ID NO: 200080 - DNA, 25 bp, Artificial
  probe
  misc_feature (1)..(25): SEQ ID NO: 5831; WAN024FC2_at; Start 1486; Stop 1510
gaaggcaagtcagcaaagcaagtag

SEQ ID NO: 200081 - DNA, 25 bp, Artificial
  probe
  misc_feature (1)..(25): SEQ ID NO: 5831; WAN024FC2_at; Start 1275; Stop 1299
cacggatgcctattcgactgatgcg

SEQ ID NO: 200082 - DNA, 25 bp, Artificial
  probe
  misc_feature (1)..(25): SEQ ID NO: 5831; WAN024FC2_at; Start 1386; Stop 1410
tcttctcaagaaacacccagagttg

SEQ ID NO: 200083 - DNA, 25 bp, Artificial
  probe
  misc_feature (1)..(25): SEQ ID NO: 5831; WAN024FC2_at; Start 1501; Stop 1525
aagcaagtagccaaggagtttctcc

SEQ ID NO: 200084 - DNA, 25 bp, Artificial
  probe
  misc_feature (1)..(25): SEQ ID NO: 5831; WAN024FC2_at; Start 1005; Stop 1029
gcaggatcatctagcctatctcaaa

SEQ ID NO: 200085 - DNA, 25 bp, Artificial
  probe
  misc_feature (1)..(25): SEQ ID NO: 5831; WAN024FC2_at; Start 1161; Stop 1185
cgaccgtgaagatggaaataagggc

SEQ ID NO: 200086 - DNA, 25 bp, Artificial
  probe
  misc_feature (1)..(25): SEQ ID NO: 5831; WAN024FC2_at; Start 930; Stop 954
tttgcttcaaccatcacccaaggtg

SEQ ID NO: 200087 - DNA, 25 bp, Artificial
  probe
  misc_feature (1)..(25): SEQ ID NO: 5831; WAN024FC2_at; Start 1415; Stop 1439
gagttcttaatacattggctggtaa

SEQ ID NO: 200088 - DNA, 25 bp, Artificial
  probe
  misc_feature (1)..(25): SEQ ID NO: 5831; WAN024FC2_at; Start 113; Stop 137
tgaccttgttactagctattttgct

SEQ ID NO: 200089 - DNA, 25 bp, Artificial
  probe
  misc_feature (1)..(25): SEQ ID NO: 5831; WAN024FC2_at; Start 129; Stop 153
tattttgcttgcgattcccttggct

SEQ ID NO: 200090 - DNA, 25 bp, Artificial
  probe
  misc_feature (1)..(25): SEQ ID NO: 5711; WAN024FC3_at; Start 160; Stop 184
tccgtaaatcgaagaacaatcgcca

SEQ ID NO: 200091 - DNA, 25 bp, Artificial
  probe
  misc_feature (1)..(25): SEQ ID NO: 5711; WAN024FC3_at; Start 318; Stop 342
gagaatcccctcatcattgactggt

SEQ ID NO: 200092 - DNA, 25 bp, Artificial
  probe
  misc_feature (1)..(25): SEQ ID NO: 5711; WAN024FC3_at; Start 8; Stop 32
atcgctccaggccactctttacttg

SEQ ID NO: 200093 - DNA, 25 bp, Artificial
  probe
  misc_feature (1)..(25): SEQ ID NO: 5711; WAN024FC3_at; Start 74; Stop 98
tgagtgtagaccaaaaacgtggaag

SEQ ID NO: 200094 - DNA, 25 bp, Artificial
  probe
  misc_feature (1)..(25): SEQ ID NO: 5711; WAN024FC3_at; Start 329; Stop 353
catcattgactggttgcggatgcaa

SEQ ID NO: 200095 - DNA, 25 bp, Artificial
  probe
  misc_feature (1)..(25): SEQ ID NO: 5711; WAN024FC3_at; Start 63; Stop 87
caagaaaatcttgagtgtagaccaa

SEQ ID NO: 200096 - DNA, 25 bp, Artificial
  probe
  misc_feature (1)..(25): SEQ ID NO: 5711; WAN024FC3_at; Start 125; Stop 149
tgacaagggacaaaagaggatctag

SEQ ID NO: 200097 - DNA, 25 bp, Artificial
  probe
  misc_feature (1)..(25): SEQ ID NO: 5711; WAN024FC3_at; Start 221; Stop 245
gaaaatgcagactcagaatagactc

SEQ ID NO: 200098 - DNA, 25 bp, Artificial
  probe
  misc_feature (1)..(25): SEQ ID NO: 5711; WAN024FC3_at; Start 390; Stop 414
gcccgttacgagaatcacagctgtt

SEQ ID NO: 200099 - DNA, 25 bp, Artificial
  probe
  misc_feature (1)..(25): SEQ ID NO: 5711; WAN024FC3_at; Start 173; Stop 197
gaacaatcgccatcaggataacagc

SEQ ID NO: 200100 - DNA, 25 bp, Artificial
  probe
  misc_feature (1)..(25): SEQ ID NO: 5711; WAN024FC3_at; Start 201; Stop 225
ccaccctagcgtatcttccagaaaa

SEQ ID NO: 200101 - DNA, 25 bp, Artificial
  probe
  misc_feature (1)..(25): SEQ ID NO: 5711; WAN024FC3_at; Start 356; Stop 380
tcttcgtgacattttccaaaatgac

SEQ ID NO: 200102 - DNA, 25 bp, Artificial
  probe
  misc_feature (1)..(25): SEQ ID NO: 5711; WAN024FC3_at; Start 110; Stop 134
gaataaagaaagaaatgacaaggga

SEQ ID NO: 200103 - DNA, 25 bp, Artificial
  probe
  misc_feature (1)..(25): SEQ ID NO: 5711; WAN024FC3_at; Start 226; Stop 250
tgcagactcagaatagactcattct

SEQ ID NO: 200104 - DNA, 25 bp, Artificial
  probe
  misc_feature (1)..(25): SEQ ID NO: 5711; WAN024FC3_at; Start 135; Stop 159
caaaagaggatctaggatataccag

SEQ ID NO: 200105 - DNA, 25 bp, Artificial
  probe
  misc_feature (1)..(25): SEQ ID NO: 5711; WAN024FC3_at; Start 241; Stop 265
gactcattctttgtctttcccttac

SEQ ID NO: 200106 - DNA, 25 bp, Artificial
  probe
  misc_feature (1)..(25): SEQ ID NO: 5711; WAN024FC3_at; Start 370; Stop 394
tccaaaatgactagaacagagcccg

SEQ ID NO: 200107 - DNA, 25 bp, Artificial
  probe
  misc_feature (1)..(25): SEQ ID NO: 5711; WAN024FC3_at; Start 267; Stop 291
aaccaccagactcgctaacagattg

SEQ ID NO: 200108 - DNA, 25 bp, Artificial
  probe
  misc_feature (1)..(25): SEQ ID NO: 5711; WAN024FC3_at; Start 343; Stop 367
tgcggatgcaaaatcttcgtgacat

SEQ ID NO: 200109 - DNA, 25 bp, Artificial
  probe
  misc_feature (1)..(25): SEQ ID NO: 5711; WAN024FC3_at; Start 15; Stop 39
caggccactctttacttgcttgata

SEQ ID NO: 200110 - DNA, 25 bp, Artificial
  probe
  misc_feature (1)..(25): SEQ ID NO: 5711; WAN024FC3_at; Start 401; Stop 425
gaatcacagctgttaccaaggctcc

SEQ ID NO: 200111 - DNA, 25 bp, Artificial
  probe
  misc_feature (1)..(25): SEQ ID NO: 5711; WAN024FC3_at; Start 71; Stop 95
tcttgagtgtagaccaaaaacgtgg

SEQ ID NO: 200112 - DNA, 25 bp, Artificial
  probe
  misc_feature (1)..(25): SEQ ID NO: 5711; WAN024FC3_at; Start 279; Stop 303
cgctaacagattgatagtaatcgca

SEQ ID NO: 200113 - DNA, 25 bp, Artificial
  probe
  misc_feature (1)..(25): SEQ ID NO: 5711; WAN024FC3_at; Start 188; Stop 212
ggataacagctacccaccctagcgt

SEQ ID NO: 200114 - DNA, 25 bp, Artificial
  probe
  misc_feature (1)..(25): SEQ ID NO: 5711; WAN024FC3_at; Start 49; Stop 73
tctggcacagcatccaagaaaatct

SEQ ID NO: 200115 - DNA, 25 bp, Artificial
  probe
  misc_feature (1)..(25): SEQ ID NO: 5711; WAN024FC3_at; Start 305; Stop 329
taattcctaaccagagaatcccctc

SEQ ID NO: 200116 - DNA, 25 bp, Artificial
  probe
  misc_feature (1)..(25): SEQ ID NO: 5711; WAN024FC3_at; Start 149; Stop 173
ggatataccagtccgtaaatcgaag

SEQ ID NO: 200117 - DNA, 25 bp, Artificial
  probe
  misc_feature (1)..(25): SEQ ID NO: 5711; WAN024FC3_at; Start 212; Stop 236
tatcttccagaaaatgcagactcag

SEQ ID NO: 200118 - DNA, 25 bp, Artificial
  probe
  misc_feature (1)..(25): SEQ ID NO: 5711; WAN024FC3_at; Start 296; Stop 320
taatcgcaataattcctaaccagag

SEQ ID NO: 200119 - DNA, 25 bp, Artificial
  probe
  misc_feature (1)..(25): SEQ ID NO: 5711; WAN024FC3_at; Start 411; Stop 435
tgttaccaaggctcctagcaggcta

SEQ ID NO: 200120 - DNA, 25 bp, Artificial
  probe
  misc_feature (1)..(25): SEQ ID NO: 5711; WAN024FC3_at; Start 42; Stop 66
aagaccttctggcacagcatccaag

SEQ ID NO: 200121 - DNA, 25 bp, Artificial
  probe
  misc_feature (1)..(25): SEQ ID NO: 5711; WAN024FC3_at; Start 377; Stop 401
tgactagaacagagcccgttacgag

SEQ ID NO: 200122 - DNA, 25 bp, Artificial
  probe
  misc_feature (1)..(25): SEQ ID NO: 5711; WAN024FC3_at; Start 32; Stop 56
gcttgatatcaagaccttctggcac

SEQ ID NO: 200123 - DNA, 25 bp, Artificial
  probe
  misc_feature (1)..(25): SEQ ID NO: 5711; WAN024FC3_at; Start 423; Stop 447
tcctagcaggctaaaccgcttatag

SEQ ID NO: 200124 - DNA, 25 bp, Artificial
  probe
  misc_feature (1)..(25): SEQ ID NO: 1665; WAN024FC4_at; Start 198; Stop 222
tcagtacaccttgggctataagcgg

SEQ ID NO: 200125 - DNA, 25 bp, Artificial
  probe
  misc_feature (1)..(25): SEQ ID NO: 1665; WAN024FC4_at; Start 495; Stop 519
tacggactggtatatcctagatcct

SEQ ID NO: 200126 - DNA, 25 bp, Artificial
  probe
  misc_feature (1)..(25): SEQ ID NO: 1665; WAN024FC4_at; Start 109; Stop 133
cttgctgactctgtgcatgacttgg

SEQ ID NO: 200127 - DNA, 25 bp, Artificial
  probe
  misc_feature (1)..(25): SEQ ID NO: 1665; WAN024FC4_at; Start 449; Stop 473
cgctagggtgggtagctgttatcct

SEQ ID NO: 200128 - DNA, 25 bp, Artificial
  probe
  misc_feature (1)..(25): SEQ ID NO: 1665; WAN024FC4_at; Start 833; Stop 857
tagaaactcaccaaacccataagcg

SEQ ID NO: 200129 - DNA, 25 bp, Artificial
  probe
  misc_feature (1)..(25): SEQ ID NO: 1665; WAN024FC4_at; Start 228; Stop 252
cctgctaggagccttggtaacagct

SEQ ID NO: 200130 - DNA, 25 bp, Artificial
  probe
  misc_feature (1)..(25): SEQ ID NO: 1665; WAN024FC4_at; Start 433; Stop 457
cattttctggaagatacgctagggt

SEQ ID NO: 200131 - DNA, 25 bp, Artificial
  probe
  misc_feature (1)..(25): SEQ ID NO: 1665; WAN024FC4_at; Start 463; Stop 487
gctgttatcctgatggcgattgttc

SEQ ID NO: 200132 - DNA, 25 bp, Artificial
  probe
  misc_feature (1)..(25): SEQ ID NO: 1665; WAN024FC4_at; Start 163; Stop 187
tttctagaaacaatctccaatcgtg

SEQ ID NO: 200133 - DNA, 25 bp, Artificial
  probe
  misc_feature (1)..(25): SEQ ID NO: 1665; WAN024FC4_at; Start 178; Stop 202
tccaatcgtgaagaagacaatcagt

SEQ ID NO: 200134 - DNA, 25 bp, Artificial
  probe
  misc_feature (1)..(25): SEQ ID NO: 1665; WAN024FC4_at; Start 366; Stop 390
tatcaatctgttagcgagtctggtg

SEQ ID NO: 200135 - DNA, 25 bp, Artificial
  probe
  misc_feature (1)..(25): SEQ ID NO: 1665; WAN024FC4_at; Start 512; Stop 536
tagatcctcttttgtcccttgtcat

SEQ ID NO: 200136 - DNA, 25 bp, Artificial
  probe
  misc_feature (1)..(25): SEQ ID NO: 1665; WAN024FC4_at; Start 684; Stop 708
tctctggactatggatgctttggaa

SEQ ID NO: 200137 - DNA, 25 bp, Artificial
  probe
  misc_feature (1)..(25): SEQ ID NO: 1665; WAN024FC4_at; Start 145; Stop 169
gcaattggaatatcagcttttctag

SEQ ID NO: 200138 - DNA, 25 bp, Artificial
  probe
  misc_feature (1)..(25): SEQ ID NO: 1665; WAN024FC4_at; Start 848; Stop 872
cccataagcgaaaggtgtgtgactt

SEQ ID NO: 200139 - DNA, 25 bp, Artificial
  probe
  misc_feature (1)..(25): SEQ ID NO: 1665; WAN024FC4_at; Start 480; Stop 504
gattgttcttcgatttacggactgg

SEQ ID NO: 200140 - DNA, 25 bp, Artificial
  probe
  misc_feature (1)..(25): SEQ ID NO: 1665; WAN024FC4_at; Start 872; Stop 896
tggaacggagttatgagcatcaaca

SEQ ID NO: 200141 - DNA, 25 bp, Artificial
  probe
  misc_feature (1)..(25): SEQ ID NO: 1665; WAN024FC4_at; Start 753; Stop 777
ggaaacttgtaaagagtctattcga

SEQ ID NO: 200142 - DNA, 25 bp, Artificial
  probe
  misc_feature (1)..(25): SEQ ID NO: 1665; WAN024FC4_at; Start 393; Stop 417
tggtaagggaaagacaaagaatgag

SEQ ID NO: 200143 - DNA, 25 bp, Artificial
  probe
  misc_feature (1)..(25): SEQ ID NO: 1665; WAN024FC4_at; Start 213; Stop 237
ctataagcggtttagcctgctagga

SEQ ID NO: 200144 - DNA, 25 bp, Artificial
  probe
  misc_feature (1)..(25): SEQ ID NO: 1665; WAN024FC4_at; Start 715; Stop 739
gccattgtccatgtttgtctaaaag

SEQ ID NO: 200145 - DNA, 25 bp, Artificial
  probe
  misc_feature (1)..(25): SEQ ID NO: 1665; WAN024FC4_at; Start 292; Stop 316
aatgtcacgaagattttgcatccgc

SEQ ID NO: 200146 - DNA, 25 bp, Artificial
  probe
  misc_feature (1)..(25): SEQ ID NO: 1665; WAN024FC4_at; Start 242; Stop 266
tggtaacagctgtgattctcgtaac

SEQ ID NO: 200147 - DNA, 25 bp, Artificial
  probe
  misc_feature (1)..(25): SEQ ID NO: 1665; WAN024FC4_at; Start 310; Stop 334
catccgcaaccagtcaatgatgagg

SEQ ID NO: 200148 - DNA, 25 bp, Artificial
  probe
  misc_feature (1)..(25): SEQ ID NO: 1665; WAN024FC4_at; Start 89; Stop 113
tatttggttctagcgctgttcttgc

SEQ ID NO: 200149 - DNA, 25 bp, Artificial
  probe
  misc_feature (1)..(25): SEQ ID NO: 1665; WAN024FC4_at; Start 601; Stop 625
gctgtgccagaaggtcttgatatca

SEQ ID NO: 200150 - DNA, 25 bp, Artificial
  probe
  misc_feature (1)..(25): SEQ ID NO: 1665; WAN024FC4_at; Start 621; Stop 645
tatcaagcaagtaaagagtggcctg

SEQ ID NO: 200151 - DNA, 25 bp, Artificial
  probe
  misc_feature (1)..(25): SEQ ID NO: 1665; WAN024FC4_at; Start 15; Stop 39
ggcaaaatatgctgtttgggtggct

SEQ ID NO: 200152 - DNA, 25 bp, Artificial
  probe
  misc_feature (1)..(25): SEQ ID NO: 1665; WAN024FC4_at; Start 268; Stop 292
ggctctgttctagtcattttggaaa

SEQ ID NO: 200153 - DNA, 25 bp, Artificial
  probe
  misc_feature (1)..(25): SEQ ID NO: 1665; WAN024FC4_at; Start 566; Stop 590
cacgtttttggtctacactcaagat

SEQ ID NO: 200154 - DNA, 25 bp, Artificial
  probe
  misc_feature (1)..(25): SEQ ID NO: 1665; WAN024FC4_at; Start 812; Stop 836
ccattgaaattgatgctgacctaga

SEQ ID NO: 200155 - DNA, 25 bp, Artificial
  probe
  misc_feature (1)..(25): SEQ ID NO: 1665; WAN024FC4_at; Start 585; Stop 609
caagattttcttggatgctgtgcca

SEQ ID NO: 200156 - DNA, 25 bp, Artificial
  probe
  misc_feature (1)..(25): SEQ ID NO: 1665; WAN024FC4_at; Start 61; Stop 85
gccattgttgagtttattgcaggtg

SEQ ID NO: 200157 - DNA, 25 bp, Artificial
  probe
  misc_feature (1)..(25): SEQ ID NO: 1665; WAN024FC4_at; Start 660; Stop 684
tgtggccagccttaatcagcttaat

SEQ ID NO: 200158 - DNA, 25 bp, Artificial
  probe
  misc_feature (1)..(25): SEQ ID NO: 3905; WAN024FC5_at; Start 158; Stop 182
ttcgttcggcgggtgtctctgtaga

SEQ ID NO: 200159 - DNA, 25 bp, Artificial
  probe
  misc_feature (1)..(25): SEQ ID NO: 3905; WAN024FC5_at; Start 90; Stop 114
tcgtactgctactgggattcgtgat

SEQ ID NO: 200160 - DNA, 25 bp, Artificial
  probe
  misc_feature (1)..(25): SEQ ID NO: 3905; WAN024FC5_at; Start 210; Stop 234
ccaaaagggagatgaaacgagagag

SEQ ID NO: 200161 - DNA, 25 bp, Artificial
  probe
  misc_feature (1)..(25): SEQ ID NO: 3905; WAN024FC5_at; Start 17; Stop 41
ccagtgatttgttgggaatttcagc

SEQ ID NO: 200162 - DNA, 25 bp, Artificial
  probe
  misc_feature (1)..(25): SEQ ID NO: 3905; WAN024FC5_at; Start 265; Stop 289
caaaaattagaggagcgcttgtctc

SEQ ID NO: 200163 - DNA, 25 bp, Artificial
  probe
  misc_feature (1)..(25): SEQ ID NO: 3905; WAN024FC5_at; Start 103; Stop 127
gggattcgtgattttcaagatcagg

SEQ ID NO: 200164 - DNA, 25 bp, Artificial
  probe
  misc_feature (1)..(25): SEQ ID NO: 3905; WAN024FC5_at; Start 196; Stop 220
tatatgtcgctctaccaaaagggag

SEQ ID NO: 200165 - DNA, 25 bp, Artificial
  probe
  misc_feature (1)..(25): SEQ ID NO: 3905; WAN024FC5_at; Start 9; Stop 33
taaatctgccagtgatttgttggga

SEQ ID NO: 200166 - DNA, 25 bp, Artificial
  probe
  misc_feature (1)..(25): SEQ ID NO: 3905; WAN024FC5_at; Start 291; Stop 315
gctacagacagctttaaatcgttta

SEQ ID NO: 200167 - DNA, 25 bp, Artificial
  probe
  misc_feature (1)..(25): SEQ ID NO: 3905; WAN024FC5_at; Start 24; Stop 48
tttgttgggaatttcagcggatacg

SEQ ID NO: 200168 - DNA, 25 bp, Artificial
  probe
  misc_feature (1)..(25): SEQ ID NO: 3905; WAN024FC5_at; Start 272; Stop 296
tagaggagcgcttgtctcagctaca

SEQ ID NO: 200169 - DNA, 25 bp, Artificial
  probe
  misc_feature (1)..(25): SEQ ID NO: 3905; WAN024FC5_at; Start 276; Stop 300
ggagcgcttgtctcagctacagaca

SEQ ID NO: 200170 - DNA, 25 bp, Artificial
  probe
  misc_feature (1)..(25): SEQ ID NO: 3905; WAN024FC5_at; Start 137; Stop 161
cgctggaatttattaagtgttttcg

SEQ ID NO: 200171 - DNA, 25 bp, Artificial
  probe
  misc_feature (1)..(25): SEQ ID NO: 3905; WAN024FC5_at; Start 1; Stop 25
gtgaatattaaatctgccagtgatt

SEQ ID NO: 200172 - DNA, 25 bp, Artificial
  probe
  misc_feature (1)..(25): SEQ ID NO: 3905; WAN024FC5_at; Start 123; Stop 147
tcaggatatcgaagcgctggaattt

SEQ ID NO: 200173 - DNA, 25 bp, Artificial
  probe
  misc_feature (1)..(25): SEQ ID NO: 3905; WAN024FC5_at; Start 129; Stop 153
tatcgaagcgctggaatttattaag

SEQ ID NO: 200174 - DNA, 25 bp, Artificial
  probe
  misc_feature (1)..(25): SEQ ID NO: 3905; WAN024FC5_at; Start 206; Stop 230
tctaccaaaagggagatgaaacgag

SEQ ID NO: 200175 - DNA, 25 bp, Artificial
  probe
  misc_feature (1)..(25): SEQ ID NO: 3905; WAN024FC5_at; Start 62; Stop 86
aacgggttggtcttgtgccaccgat

SEQ ID NO: 200176 - DNA, 25 bp, Artificial
  probe
  misc_feature (1)..(25): SEQ ID NO: 3905; WAN024FC5_at; Start 117; Stop 141
tcaagatcaggatatcgaagcgctg

SEQ ID NO: 200177 - DNA, 25 bp, Artificial
  probe
  misc_feature (1)..(25): SEQ ID NO: 3905; WAN024FC5_at; Start 281; Stop 305
gcttgtctcagctacagacagcttt

SEQ ID NO: 200178 - DNA, 25 bp, Artificial
  probe
  misc_feature (1)..(25): SEQ ID NO: 3905; WAN024FC5_at; Start 173; Stop 197
tctctgtagatagtttagttgacta

SEQ ID NO: 200179 - DNA, 25 bp, Artificial
  probe
  misc_feature (1)..(25): SEQ ID NO: 3905; WAN024FC5_at; Start 188; Stop 212
tagttgactatatgtcgctctacca

SEQ ID NO: 200180 - DNA, 25 bp, Artificial
  probe
  misc_feature (1)..(25): SEQ ID NO: 3905; WAN024FC5_at; Start 82; Stop 106
ccgattactcgtactgctactggga

SEQ ID NO: 200181 - DNA, 25 bp, Artificial
  probe
  misc_feature (1)..(25): SEQ ID NO: 3905; WAN024FC5_at; Start 97; Stop 121
gctactgggattcgtgattttcaag

SEQ ID NO: 200182 - DNA, 25 bp, Artificial
  probe
  misc_feature (1)..(25): SEQ ID NO: 3905; WAN024FC5_at; Start 70; Stop 94
ggtcttgtgccaccgattactcgta

SEQ ID NO: 200183 - DNA, 25 bp, Artificial
  probe
  misc_feature (1)..(25): SEQ ID NO: 3905; WAN024FC5_at; Start 32; Stop 56
gaatttcagcggatacgattcggta

SEQ ID NO: 200184 - DNA, 25 bp, Artificial
  probe
  misc_feature (1)..(25): SEQ ID NO: 3905; WAN024FC5_at; Start 163; Stop 187
tcggcgggtgtctctgtagatagtt

SEQ ID NO: 200185 - DNA, 25 bp, Artificial
  probe
  misc_feature (1)..(25): SEQ ID NO: 3905; WAN024FC5_at; Start 231; Stop 255
agaggagaggcttggtattttagaa

SEQ ID NO: 200186 - DNA, 25 bp, Artificial
  probe
  misc_feature (1)..(25): SEQ ID NO: 3905; WAN024FC5_at; Start 200; Stop 224
tgtcgctctaccaaaagggagatga

SEQ ID NO: 200187 - DNA, 25 bp, Artificial
  probe
  misc_feature (1)..(25): SEQ ID NO: 3905; WAN024FC5_at; Start 258; Stop 282
ggaaaagcaaaaattagaggagcgc

SEQ ID NO: 200188 - DNA, 25 bp, Artificial
  probe
  misc_feature (1)..(25): SEQ ID NO: 3905; WAN024FC5_at; Start 243; Stop 267
tggtattttagaagaggaaaagcaa

SEQ ID NO: 200189 - DNA, 25 bp, Artificial
  probe
  misc_feature (1)..(25): SEQ ID NO: 3905; WAN024FC5_at; Start 43; Stop 67
gatacgattcggtattatgaacggg

SEQ ID NO: 200190 - DNA, 25 bp, Artificial
  probe
  misc_feature (1)..(25): SEQ ID NO: 3905; WAN024FC5_at; Start 58; Stop 82
tatgaacgggttggtcttgtgccac

SEQ ID NO: 200191 - DNA, 25 bp, Artificial
  probe
  misc_feature (1)..(25): SEQ ID NO: 3905; WAN024FC5_at; Start 75; Stop 99
tgtgccaccgattactcgtactgct

SEQ ID NO: 200192 - DNA, 25 bp, Artificial
  probe
  misc_feature (1)..(25): SEQ ID NO: 5030; WAN024FC6_at; Start 296; Stop 320
gggacaatcacaaaatcacctggtt

SEQ ID NO: 200193 - DNA, 25 bp, Artificial
  probe
  misc_feature (1)..(25): SEQ ID NO: 5030; WAN024FC6_at; Start 134; Stop 158
tcagaaggttgaccagggattttaa

SEQ ID NO: 200194 - DNA, 25 bp, Artificial
  probe
  misc_feature (1)..(25): SEQ ID NO: 5030; WAN024FC6_at; Start 405; Stop 429
gattacggtacctccataaatctga

SEQ ID NO: 200195 - DNA, 25 bp, Artificial
  probe
  misc_feature (1)..(25): SEQ ID NO: 5030; WAN024FC6_at; Start 225; Stop 249
caatatgattgtcgcaagaaccgtc

SEQ ID NO: 200196 - DNA, 25 bp, Artificial
  probe
  misc_feature (1)..(25): SEQ ID NO: 5030; WAN024FC6_at; Start 156; Stop 180
taaccagcgcccagtttgcatagtg

SEQ ID NO: 200197 - DNA, 25 bp, Artificial
  probe
  misc_feature (1)..(25): SEQ ID NO: 5030; WAN024FC6_at; Start 142; Stop 166
ttgaccagggattttaaccagcgcc

SEQ ID NO: 200198 - DNA, 25 bp, Artificial
  probe
  misc_feature (1)..(25): SEQ ID NO: 5030; WAN024FC6_at; Start 390; Stop 414
cagctttcgtttctggattacggta

SEQ ID NO: 200199 - DNA, 25 bp, Artificial
  probe
  misc_feature (1)..(25): SEQ ID NO: 5030; WAN024FC6_at; Start 88; Stop 112
gacatctgcaagagtcaaaagggac

SEQ ID NO: 200200 - DNA, 25 bp, Artificial
  probe
  misc_feature (1)..(25): SEQ ID NO: 5030; WAN024FC6_at; Start 108; Stop 132
gggacttgagcatcccttctgtata

SEQ ID NO: 200201 - DNA, 25 bp, Artificial
  probe
  misc_feature (1)..(25): SEQ ID NO: 5030; WAN024FC6_at; Start 311; Stop 335
tcacctggtttcaccgtcgtaatgg

SEQ ID NO: 200202 - DNA, 25 bp, Artificial
  probe
  misc_feature (1)..(25): SEQ ID NO: 5030; WAN024FC6_at; Start 174; Stop 198
catagtggaagcgaatatattctgc

SEQ ID NO: 200203 - DNA, 25 bp, Artificial
  probe
  misc_feature (1)..(25): SEQ ID NO: 5030; WAN024FC6_at; Start 187; Stop 211
aatatattctgcctgaaaatcaccc

SEQ ID NO: 200204 - DNA, 25 bp, Artificial
  probe
  misc_feature (1)..(25): SEQ ID NO: 5030; WAN024FC6_at; Start 278; Stop 302
ccacatccatgtgtaaaagggacaa

SEQ ID NO: 200205 - DNA, 25 bp, Artificial
  probe
  misc_feature (1)..(25): SEQ ID NO: 5030; WAN024FC6_at; Start 493; Stop 517
ttcaatgctagcaagtccaacctga

SEQ ID NO: 200206 - DNA, 25 bp, Artificial
  probe
  misc_feature (1)..(25): SEQ ID NO: 5030; WAN024FC6_at; Start 45; Stop 69
tttgaacatttgcaacacgcgctgc

SEQ ID NO: 200207 - DNA, 25 bp, Artificial
  probe
  misc_feature (1)..(25): SEQ ID NO: 5030; WAN024FC6_at; Start 14; Stop 38
ccatcaccgataacaacaaccttgt

SEQ ID NO: 200208 - DNA, 25 bp, Artificial
  probe
  misc_feature (1)..(25): SEQ ID NO: 5030; WAN024FC6_at; Start 421; Stop 445
taaatctgaaccacaaacgcacgca

SEQ ID NO: 200209 - DNA, 25 bp, Artificial
  probe
  misc_feature (1)..(25): SEQ ID NO: 5030; WAN024FC6_at; Start 283; Stop 307
tccatgtgtaaaagggacaatcaca

SEQ ID NO: 200210 - DNA, 25 bp, Artificial
  probe
  misc_feature (1)..(25): SEQ ID NO: 5030; WAN024FC6_at; Start 56; Stop 80
gcaacacgcgctgcatgatagcctg

SEQ ID NO: 200211 - DNA, 25 bp, Artificial
  probe
  misc_feature (1)..(25): SEQ ID NO: 5030; WAN024FC6_at; Start 164; Stop 188
gcccagtttgcatagtggaagcgaa

SEQ ID NO: 200212 - DNA, 25 bp, Artificial
  probe
  misc_feature (1)..(25): SEQ ID NO: 5030; WAN024FC6_at; Start 34; Stop 58
cttgtcccctttttgaacatttgca

SEQ ID NO: 200213 - DNA, 25 bp, Artificial
  probe
  misc_feature (1)..(25): SEQ ID NO: 5030; WAN024FC6_at; Start 465; Stop 489
catcatccgcttctattatttgcgg

SEQ ID NO: 200214 - DNA, 25 bp, Artificial
  probe
  misc_feature (1)..(25): SEQ ID NO: 5030; WAN024FC6_at; Start 331; Stop 355
aatggcttccccagcttcttcaaca

SEQ ID NO: 200215 - DNA, 25 bp, Artificial
  probe
  misc_feature (1)..(25): SEQ ID NO: 5030; WAN024FC6_at; Start 481; Stop 505
tatttgcggacgttcaatgctagca

SEQ ID NO: 200216 - DNA, 25 bp, Artificial
  probe
  misc_feature (1)..(25): SEQ ID NO: 5030; WAN024FC6_at; Start 259; Stop 283
aagacaggcatcacactcaccacat

SEQ ID NO: 200217 - DNA, 25 bp, Artificial
  probe
  misc_feature (1)..(25): SEQ ID NO: 5030; WAN024FC6_at; Start 320; Stop 344
ttcaccgtcgtaatggcttccccag

SEQ ID NO: 200218 - DNA, 25 bp, Artificial
  probe
  misc_feature (1)..(25): SEQ ID NO: 5030; WAN024FC6_at; Start 438; Stop 462
cgcacgcacgaaccacacgaataat

SEQ ID NO: 200219 - DNA, 25 bp, Artificial
  probe
  misc_feature (1)..(25): SEQ ID NO: 5030; WAN024FC6_at; Start 238; Stop 262
gcaagaaccgtcaaatccagcaaga

SEQ ID NO: 200220 - DNA, 25 bp, Artificial
  probe
  misc_feature (1)..(25): SEQ ID NO: 5030; WAN024FC6_at; Start 355; Stop 379
aatcccaatcgcttcgtgtccacta

SEQ ID NO: 200221 - DNA, 25 bp, Artificial
  probe
  misc_feature (1)..(25): SEQ ID NO: 5030; WAN024FC6_at; Start 62; Stop 86
cgcgctgcatgatagcctgtcggca

SEQ ID NO: 200222 - DNA, 25 bp, Artificial
  probe
  misc_feature (1)..(25): SEQ ID NO: 5030; WAN024FC6_at; Start 451; Stop 475
cacacgaataatcacatcatccgct

SEQ ID NO: 200223 - DNA, 25 bp, Artificial
  probe
  misc_feature (1)..(25): SEQ ID NO: 5030; WAN024FC6_at; Start 74; Stop 98
tagcctgtcggcatgacatctgcaa

SEQ ID NO: 200224 - DNA, 25 bp, Artificial
  probe
  misc_feature (1)..(25): SEQ ID NO: 5030; WAN024FC6_at; Start 249; Stop 273
caaatccagcaagacaggcatcaca

SEQ ID NO: 200225 - DNA, 25 bp, Artificial
  probe
  misc_feature (1)..(25): SEQ ID NO: 5030; WAN024FC6_at; Start 99; Stop 123
gagtcaaaagggacttgagcatccc

SEQ ID NO: 200226 - DNA, 25 bp, Artificial
  probe
  misc_feature (1)..(25): SEQ ID NO: 955; WAN024FC7_at; Start 719; Stop 743
cacttgaatgtgttggtacggaggc

SEQ ID NO: 200227 - DNA, 25 bp, Artificial
  probe
  misc_feature (1)..(25): SEQ ID NO: 955; WAN024FC7_at; Start 902; Stop 926
tactaaaagccgtccttgatggtga

SEQ ID NO: 200228 - DNA, 25 bp, Artificial
  probe
  misc_feature (1)..(25): SEQ ID NO: 955; WAN024FC7_at; Start 415; Stop 439
tatacagaagggatgctcaagtccc

SEQ ID NO: 200229 - DNA, 25 bp, Artificial
  probe
  misc_feature (1)..(25): SEQ ID NO: 955; WAN024FC7_at; Start 51; Stop 75
tgaacgtccgcaaataatagaagcg

SEQ ID NO: 200230 - DNA, 25 bp, Artificial
  probe
  misc_feature (1)..(25): SEQ ID NO: 955; WAN024FC7_at; Start 919; Stop 943
gatggtgatatcaatccaggtcgcg

SEQ ID NO: 200231 - DNA, 25 bp, Artificial
  probe
  misc_feature (1)..(25): SEQ ID NO: 955; WAN024FC7_at; Start 227; Stop 251
aaccaggtgattttgtgattgtccc

SEQ ID NO: 200232 - DNA, 25 bp, Artificial
  probe
  misc_feature (1)..(25): SEQ ID NO: 955; WAN024FC7_at; Start 208; Stop 232
gaagccattacgacggtgaaaccag

SEQ ID NO: 200233 - DNA, 25 bp, Artificial
  probe
  misc_feature (1)..(25): SEQ ID NO: 955; WAN024FC7_at; Start 481; Stop 505
gcgcgtgttgcaaatgttcaaaaag

SEQ ID NO: 200234 - DNA, 25 bp, Artificial
  probe
  misc_feature (1)..(25): SEQ ID NO: 955; WAN024FC7_at; Start 615; Stop 639
tcaaaagatggctatggagtcaggt

SEQ ID NO: 200235 - DNA, 25 bp, Artificial
  probe
  misc_feature (1)..(25): SEQ ID NO: 955; WAN024FC7_at; Start 166; Stop 190
aatagtggacacgaagcgattggga

SEQ ID NO: 200236 - DNA, 25 bp, Artificial
  probe
  misc_feature (1)..(25): SEQ ID NO: 955; WAN024FC7_at; Start 271; Stop 295
gagtgtgatgcctgtcttgctggat

SEQ ID NO: 200237 - DNA, 25 bp, Artificial
  probe
  misc_feature (1)..(25): SEQ ID NO: 955; WAN024FC7_at; Start 245; Stop 269
ttgtcccttttacacatggatgtgg

SEQ ID NO: 200238 - DNA, 25 bp, Artificial
  probe
  misc_feature (1)..(25): SEQ ID NO: 955; WAN024FC7_at; Start 444; Stop 468
gactcttgcagatgtcatgccgaca

SEQ ID NO: 200239 - DNA, 25 bp, Artificial
  probe
  misc_feature (1)..(25): SEQ ID NO: 955; WAN024FC7_at; Start 540; Stop 564
tggtcaatgtgctgtcatcgcggct

SEQ ID NO: 200240 - DNA, 25 bp, Artificial
  probe
  misc_feature (1)..(25): SEQ ID NO: 955; WAN024FC7_at; Start 298; Stop 322
gacggttcttgcgacaatcatattg

SEQ ID NO: 200241 - DNA, 25 bp, Artificial
  probe
  misc_feature (1)..(25): SEQ ID NO: 955; WAN024FC7_at; Start 119; Stop 143
cagatttatggaggtaccgtaatcc

SEQ ID NO: 200242 - DNA, 25 bp, Artificial
  probe
  misc_feature (1)..(25): SEQ ID NO: 955; WAN024FC7_at; Start 555; Stop 579
catcgcggctaagatgcgtggagca

SEQ ID NO: 200243 - DNA, 25 bp, Artificial
  probe
  misc_feature (1)..(25): SEQ ID NO: 955; WAN024FC7_at; Start 960; Stop 984
taaactggaagatatcgaccaagcc

SEQ ID NO: 200244 - DNA, 25 bp, Artificial
  probe
  misc_feature (1)..(25): SEQ ID NO: 955; WAN024FC7_at; Start 627; Stop 651
tatggagtcaggtgcgacagctgtt

SEQ ID NO: 200245 - DNA, 25 bp, Artificial
  probe
  misc_feature (1)..(25): SEQ ID NO: 955; WAN024FC7_at; Start 656; Stop 680
cagaacgtggtcaagaaggaattac

SEQ ID NO: 200246 - DNA, 25 bp, Artificial
  probe
  misc_feature (1)..(25): SEQ ID NO: 955; WAN024FC7_at; Start 133; Stop 157
taccgtaatccagaaacgaaagctg

SEQ ID NO: 200247 - DNA, 25 bp, Artificial
  probe
  misc_feature (1)..(25): SEQ ID NO: 955; WAN024FC7_at; Start 18; Stop 42
tacaaaggcaggtcaggttggactt

SEQ ID NO: 200248 - DNA, 25 bp, Artificial
  probe
  misc_feature (1)..(25): SEQ ID NO: 955; WAN024FC7_at; Start 935; Stop 959
caggtcgcgtctttacttcaagtta

SEQ ID NO: 200249 - DNA, 25 bp, Artificial
  probe
  misc_feature (1)..(25): SEQ ID NO: 955; WAN024FC7_at; Start 866; Stop 890
gggcagcttctgctacaacatacga

SEQ ID NO: 200250 - DNA, 25 bp, Artificial
  probe
  misc_feature (1)..(25): SEQ ID NO: 955; WAN024FC7_at; Start 644; Stop 668
cagctgttgttgcagaacgtggtca

SEQ ID NO: 200251 - DNA, 25 bp, Artificial
  probe
  misc_feature (1)..(25): SEQ ID NO: 955; WAN024FC7_at; Start 381; Stop 405
ggcgctggttaaaatccctggtcaa

SEQ ID NO: 200252 - DNA, 25 bp, Artificial
  probe
  misc_feature (1)..(25): SEQ ID NO: 955; WAN024FC7_at; Start 352; Stop 376
gaatatattcgcttccactatgcaa

SEQ ID NO: 200253 - DNA, 25 bp, Artificial
  probe
  misc_feature (1)..(25): SEQ ID NO: 955; WAN024FC7_at; Start 367; Stop 391
cactatgcaaactgggcgctggtta

SEQ ID NO: 200254 - DNA, 25 bp, Artificial
  probe
  misc_feature (1)..(25): SEQ ID NO: 955; WAN024FC7_at; Start 843; Stop 867
gcaaaatatctctgtagcaggtggg

SEQ ID NO: 200255 - DNA, 25 bp, Artificial
  probe
  misc_feature (1)..(25): SEQ ID NO: 955; WAN024FC7_at; Start 581; Stop 605
cacaaattatccttatgagccgtca

SEQ ID NO: 200256 - DNA, 25 bp, Artificial
  probe
  misc_feature (1)..(25): SEQ ID NO: 955; WAN024FC7_at; Start 813; Stop 837
taataatcgtgctcttggttcgaca

SEQ ID NO: 200257 - DNA, 25 bp, Artificial
  probe
  misc_feature (1)..(25): SEQ ID NO: 955; WAN024FC7_at; Start 7; Stop 31
tcagcagtatatacaaaggcaggtc

SEQ ID NO: 200258 - DNA, 25 bp, Artificial
  probe
  misc_feature (1)..(25): SEQ ID NO: 955; WAN024FC7_at; Start 735; Stop 759
tacggaggctgctatagaacaggcg

SEQ ID NO: 200259 - DNA, 25 bp, Artificial
  probe
  misc_feature (1)..(25): SEQ ID NO: 955; WAN024FC7_at; Start 797; Stop 821
taggagtcccacactataataatcg

SEQ ID NO: 200260 - DNA, 25 bp, Artificial
  probe
  misc_feature (1)..(25): SEQ ID NO: 6752; WAN024FC8_at; Start 5; Stop 29
tcagccacgactcctgtcaagagtt

SEQ ID NO: 200261 - DNA, 25 bp, Artificial
  probe
  misc_feature (1)..(25): SEQ ID NO: 6752; WAN024FC8_at; Start 136; Stop 160
gacaccttttggataattggtccag

SEQ ID NO: 200262 - DNA, 25 bp, Artificial
  probe
  misc_feature (1)..(25): SEQ ID NO: 6752; WAN024FC8_at; Start 180; Stop 204
tgaggtcagcgagaggcacttcgat

SEQ ID NO: 200263 - DNA, 25 bp, Artificial
  probe
  misc_feature (1)..(25): SEQ ID NO: 6752; WAN024FC8_at; Start 200; Stop 224
tcgataatgcccttgtcctcaaagt

SEQ ID NO: 200264 - DNA, 25 bp, Artificial
  probe
  misc_feature (1)..(25): SEQ ID NO: 6752; WAN024FC8_at; Start 131; Stop 155
tgaaggacaccttttggataattgg

SEQ ID NO: 200265 - DNA, 25 bp, Artificial
  probe
  misc_feature (1)..(25): SEQ ID NO: 6752; WAN024FC8_at; Start 176; Stop 200
aacttgaggtcagcgagaggcactt

SEQ ID NO: 200266 - DNA, 25 bp, Artificial
  probe
  misc_feature (1)..(25): SEQ ID NO: 6752; WAN024FC8_at; Start 47; Stop 71
gacaagccagcaccatttggaatat

SEQ ID NO: 200267 - DNA, 25 bp, Artificial
  probe
  misc_feature (1)..(25): SEQ ID NO: 6752; WAN024FC8_at; Start 154; Stop 178
ggtccagttgtgctctttttcaaac

SEQ ID NO: 200268 - DNA, 25 bp, Artificial
  probe
  misc_feature (1)..(25): SEQ ID NO: 6752; WAN024FC8_at; Start 31; Stop 55
caaggatgcagaagaagacaagcca

SEQ ID NO: 200269 - DNA, 25 bp, Artificial
  probe
  misc_feature (1)..(25): SEQ ID NO: 6752; WAN024FC8_at; Start 21; Stop 45
tcaagagttccaaggatgcagaaga

SEQ ID NO: 200270 - DNA, 25 bp, Artificial
  probe
  misc_feature (1)..(25): SEQ ID NO: 6752; WAN024FC8_at; Start 93; Stop 117
aacctttgtcaatcacgtgcccagc

SEQ ID NO: 200271 - DNA, 25 bp, Artificial
  probe
  misc_feature (1)..(25): SEQ ID NO: 6752; WAN024FC8_at; Start 97; Stop 121
tttgtcaatcacgtgcccagcttct

SEQ ID NO: 200272 - DNA, 25 bp, Artificial
  probe
  misc_feature (1)..(25): SEQ ID NO: 6752; WAN024FC8_at; Start 44; Stop 68
gaagacaagccagcaccatttggaa

SEQ ID NO: 200273 - DNA, 25 bp, Artificial
  probe
  misc_feature (1)..(25): SEQ ID NO: 6752; WAN024FC8_at; Start 170; Stop 194
ttttcaaacttgaggtcagcgagag

SEQ ID NO: 200274 - DNA, 25 bp, Artificial
  probe
  misc_feature (1)..(25): SEQ ID NO: 6752; WAN024FC8_at; Start 185; Stop 209
tcagcgagaggcacttcgataatgc

SEQ ID NO: 200275 - DNA, 25 bp, Artificial
  probe
  misc_feature (1)..(25): SEQ ID NO: 6752; WAN024FC8_at; Start 167; Stop 191
tctttttcaaacttgaggtcagcga

SEQ ID NO: 200276 - DNA, 25 bp, Artificial
  probe
  misc_feature (1)..(25): SEQ ID NO: 6752; WAN024FC8_at; Start 10; Stop 34
cacgactcctgtcaagagttccaag

SEQ ID NO: 200277 - DNA, 25 bp, Artificial
  probe
  misc_feature (1)..(25): SEQ ID NO: 6752; WAN024FC8_at; Start 204; Stop 228
taatgcccttgtcctcaaagttagc

SEQ ID NO: 200278 - DNA, 25 bp, Artificial
  probe
  misc_feature (1)..(25): SEQ ID NO: 6752; WAN024FC8_at; Start 119; Stop 143
tcttgcaagaaatgaaggacacctt

SEQ ID NO: 200279 - DNA, 25 bp, Artificial
  probe
  misc_feature (1)..(25): SEQ ID NO: 6752; WAN024FC8_at; Start 146; Stop 170
ggataattggtccagttgtgctctt

SEQ ID NO: 200280 - DNA, 25 bp, Artificial
  probe
  misc_feature (1)..(25): SEQ ID NO: 6752; WAN024FC8_at; Start 106; Stop 130
cacgtgcccagcttcttgcaagaaa

SEQ ID NO: 200281 - DNA, 25 bp, Artificial
  probe
  misc_feature (1)..(25): SEQ ID NO: 6752; WAN024FC8_at; Start 64; Stop 88
tggaatatttccataaacataaaaa

SEQ ID NO: 200282 - DNA, 25 bp, Artificial
  probe
  misc_feature (1)..(25): SEQ ID NO: 6752; WAN024FC8_at; Start 124; Stop 148
caagaaatgaaggacaccttttgga

SEQ ID NO: 200283 - DNA, 25 bp, Artificial
  probe
  misc_feature (1)..(25): SEQ ID NO: 6752; WAN024FC8_at; Start 2; Stop 26
tgctcagccacgactcctgtcaaga

SEQ ID NO: 200284 - DNA, 25 bp, Artificial
  probe
  misc_feature (1)..(25): SEQ ID NO: 6752; WAN024FC8_at; Start 52; Stop 76
gccagcaccatttggaatatttcca

SEQ ID NO: 200285 - DNA, 25 bp, Artificial
  probe
  misc_feature (1)..(25): SEQ ID NO: 6752; WAN024FC8_at; Start 111; Stop 135
gcccagcttcttgcaagaaatgaag

SEQ ID NO: 200286 - DNA, 25 bp, Artificial
  probe
  misc_feature (1)..(25): SEQ ID NO: 6752; WAN024FC8_at; Start 174; Stop 198
caaacttgaggtcagcgagaggcac

SEQ ID NO: 200287 - DNA, 25 bp, Artificial
  probe
  misc_feature (1)..(25): SEQ ID NO: 6752; WAN024FC8_at; Start 29; Stop 53
tccaaggatgcagaagaagacaagc

SEQ ID NO: 200288 - DNA, 25 bp, Artificial
  probe
  misc_feature (1)..(25): SEQ ID NO: 6752; WAN024FC8_at; Start 190; Stop 214
gagaggcacttcgataatgcccttg

SEQ ID NO: 200289 - DNA, 25 bp, Artificial
  probe
  misc_feature (1)..(25): SEQ ID NO: 6752; WAN024FC8_at; Start 207; Stop 231
tgcccttgtcctcaaagttagctga

SEQ ID NO: 200290 - DNA, 25 bp, Artificial
  probe
  misc_feature (1)..(25): SEQ ID NO: 6752; WAN024FC8_at; Start 16; Stop 40
tcctgtcaagagttccaaggatgca

SEQ ID NO: 200291 - DNA, 25 bp, Artificial
  probe
  misc_feature (1)..(25): SEQ ID NO: 6752; WAN024FC8_at; Start 89; Stop 113
tcaaaacctttgtcaatcacgtgcc

SEQ ID NO: 200292 - DNA, 25 bp, Artificial
  probe
  misc_feature (1)..(25): SEQ ID NO: 6752; WAN024FC8_at; Start 103; Stop 127
aatcacgtgcccagcttcttgcaag

SEQ ID NO: 200293 - DNA, 25 bp, Artificial
  probe
  misc_feature (1)..(25): SEQ ID NO: 6752; WAN024FC8_at; Start 25; Stop 49
gagttccaaggatgcagaagaagac

SEQ ID NO: 200294 - DNA, 25 bp, Artificial
  probe
  misc_feature (1)..(25): SEQ ID NO: 4966; WAN024FC9_at; Start 225; Stop 249
tgttggtgttcatgataacaacgac

SEQ ID NO: 200295 - DNA, 25 bp, Artificial
  probe
  misc_feature (1)..(25): SEQ ID NO: 4966; WAN024FC9_at; Start 174; Stop 198
cacactcagcacgacgttcattgta

SEQ ID NO: 200296 - DNA, 25 bp, Artificial
  probe
  misc_feature (1)..(25): SEQ ID NO: 4966; WAN024FC9_at; Start 252; Stop 276
tgtccttcaaatcaagtggcaccaa

SEQ ID NO: 200297 - DNA, 25 bp, Artificial
  probe
  misc_feature (1)..(25): SEQ ID NO: 4966; WAN024FC9_at; Start 1; Stop 25
ttgaagggctgcttgagctttaagg

SEQ ID NO: 200298 - DNA, 25 bp, Artificial
  probe
  misc_feature (1)..(25): SEQ ID NO: 4966; WAN024FC9_at; Start 84; Stop 108
tcagatagctatattggtcaacggc

SEQ ID NO: 200299 - DNA, 25 bp, Artificial
  probe
  misc_feature (1)..(25): SEQ ID NO: 4966; WAN024FC9_at; Start 43; Stop 67
cacagcatggcgagcacgtttcaaa

SEQ ID NO: 200300 - DNA, 25 bp, Artificial
  probe
  misc_feature (1)..(25): SEQ ID NO: 4966; WAN024FC9_at; Start 48; Stop 72
catggcgagcacgtttcaaacgatt

SEQ ID NO: 200301 - DNA, 25 bp, Artificial
  probe
  misc_feature (1)..(25): SEQ ID NO: 4966; WAN024FC9_at; Start 32; Stop 56
tggttttcaagcacagcatggcgag

SEQ ID NO: 200302 - DNA, 25 bp, Artificial
  probe
  misc_feature (1)..(25): SEQ ID NO: 4966; WAN024FC9_at; Start 29; Stop 53
cgttggttttcaagcacagcatggc

SEQ ID NO: 200303 - DNA, 25 bp, Artificial
  probe
  misc_feature (1)..(25): SEQ ID NO: 4966; WAN024FC9_at; Start 153; Stop 177
gcaattcttccactgctttttcaca

SEQ ID NO: 200304 - DNA, 25 bp, Artificial
  probe
  misc_feature (1)..(25): SEQ ID NO: 4966; WAN024FC9_at; Start 68; Stop 92
cgattttcatctttaatcagatagc

SEQ ID NO: 200305 - DNA, 25 bp, Artificial
  probe
  misc_feature (1)..(25): SEQ ID NO: 4966; WAN024FC9_at; Start 25; Stop 49
ggtacgttggttttcaagcacagca

SEQ ID NO: 200306 - DNA, 25 bp, Artificial
  probe
  misc_feature (1)..(25): SEQ ID NO: 4966; WAN024FC9_at; Start 36; Stop 60
tttcaagcacagcatggcgagcacg

SEQ ID NO: 200307 - DNA, 25 bp, Artificial
  probe
  misc_feature (1)..(25): SEQ ID NO: 4966; WAN024FC9_at; Start 203; Stop 227
gagtccgccaattcacggcgtttgt

SEQ ID NO: 200308 - DNA, 25 bp, Artificial
  probe
  misc_feature (1)..(25): SEQ ID NO: 4966; WAN024FC9_at; Start 232; Stop 256
gttcatgataacaacgacattgtcc

SEQ ID NO: 200309 - DNA, 25 bp, Artificial
  probe
  misc_feature (1)..(25): SEQ ID NO: 4966; WAN024FC9_at; Start 199; Stop 223
tttagagtccgccaattcacggcgt

SEQ ID NO: 200310 - DNA, 25 bp, Artificial
  probe
  misc_feature (1)..(25): SEQ ID NO: 4966; WAN024FC9_at; Start 10; Stop 34
tgcttgagctttaagggtacgttgg

SEQ ID NO: 200311 - DNA, 25 bp, Artificial
  probe
  misc_feature (1)..(25): SEQ ID NO: 4966; WAN024FC9_at; Start 179; Stop 203
tcagcacgacgttcattgtatttag

SEQ ID NO: 200312 - DNA, 25 bp, Artificial
  probe
  misc_feature (1)..(25): SEQ ID NO: 4966; WAN024FC9_at; Start 93; Stop 117
tatattggtcaacggcccactcgtc

SEQ ID NO: 200313 - DNA, 25 bp, Artificial
  probe
  misc_feature (1)..(25): SEQ ID NO: 4966; WAN024FC9_at; Start 211; Stop 235
caattcacggcgtttgttggtgttc

SEQ ID NO: 200314 - DNA, 25 bp, Artificial
  probe
  misc_feature (1)..(25): SEQ ID NO: 4966; WAN024FC9_at; Start 46; Stop 70
agcatggcgagcacgtttcaaacga

SEQ ID NO: 200315 - DNA, 25 bp, Artificial
  probe
  misc_feature (1)..(25): SEQ ID NO: 4966; WAN024FC9_at; Start 188; Stop 212
cgttcattgtatttagagtccgcca

SEQ ID NO: 200316 - DNA, 25 bp, Artificial
  probe
  misc_feature (1)..(25): SEQ ID NO: 4966; WAN024FC9_at; Start 5; Stop 29
agggctgcttgagctttaagggtac

SEQ ID NO: 200317 - DNA, 25 bp, Artificial
  probe
  misc_feature (1)..(25): SEQ ID NO: 4966; WAN024FC9_at; Start 52; Stop 76
gcgagcacgtttcaaacgattttca

SEQ ID NO: 200318 - DNA, 25 bp, Artificial
  probe
  misc_feature (1)..(25): SEQ ID NO: 4966; WAN024FC9_at; Start 216; Stop 240
cacggcgtttgttggtgttcatgat

SEQ ID NO: 200319 - DNA, 25 bp, Artificial
  probe
  misc_feature (1)..(25): SEQ ID NO: 4966; WAN024FC9_at; Start 195; Stop 219
tgtatttagagtccgccaattcacg

SEQ ID NO: 200320 - DNA, 25 bp, Artificial
  probe
  misc_feature (1)..(25): SEQ ID NO: 4966; WAN024FC9_at; Start 247; Stop 271
gacattgtccttcaaatcaagtggc

SEQ ID NO: 200321 - DNA, 25 bp, Artificial
  probe
  misc_feature (1)..(25): SEQ ID NO: 4966; WAN024FC9_at; Start 243; Stop 267
caacgacattgtccttcaaatcaag

SEQ ID NO: 200322 - DNA, 25 bp, Artificial
  probe
  misc_feature (1)..(25): SEQ ID NO: 4966; WAN024FC9_at; Start 39; Stop 63
caagcacagcatggcgagcacgttt

SEQ ID NO: 200323 - DNA, 25 bp, Artificial
  probe
  misc_feature (1)..(25): SEQ ID NO: 4966; WAN024FC9_at; Start 166; Stop 190
tgctttttcacactcagcacgacgt

SEQ ID NO: 200324 - DNA, 25 bp, Artificial
  probe
  misc_feature (1)..(25): SEQ ID NO: 4966; WAN024FC9_at; Start 87; Stop 111
gatagctatattggtcaacggccca

SEQ ID NO: 200325 - DNA, 25 bp, Artificial
  probe
  misc_feature (1)..(25): SEQ ID NO: 4966; WAN024FC9_at; Start 169; Stop 193
tttttcacactcagcacgacgttca

SEQ ID NO: 200326 - DNA, 25 bp, Artificial
  probe
  misc_feature (1)..(25): SEQ ID NO: 4966; WAN024FC9_at; Start 98; Stop 122
tggtcaacggcccactcgtccaatt

SEQ ID NO: 200327 - DNA, 25 bp, Artificial
  probe
  misc_feature (1)..(25): SEQ ID NO: 4966; WAN024FC9_at; Start 91; Stop 115
gctatattggtcaacggcccactcg

SEQ ID NO: 200328 - DNA, 25 bp, Artificial
  probe
  misc_feature (1)..(25): SEQ ID NO: 2753; WAN024FCA_at; Start 1002; Stop 1026
agttctcggtgctcgtatgacaggg

SEQ ID NO: 200329 - DNA, 25 bp, Artificial
  probe
  misc_feature (1)..(25): SEQ ID NO: 2753; WAN024FCA_at; Start 265; Stop 289
tttgaaaaagagcacaactggacca

SEQ ID NO: 200330 - DNA, 25 bp, Artificial
  probe
  misc_feature (1)..(25): SEQ ID NO: 2753; WAN024FCA_at; Start 985; Stop 1009
gcttgggcacaagaaggagttctcg

SEQ ID NO: 200331 - DNA, 25 bp, Artificial
  probe
  misc_feature (1)..(25): SEQ ID NO: 2753; WAN024FCA_at; Start 676; Stop 700
tctaaatacaatgaacgtcgtgctg

SEQ ID NO: 200332 - DNA, 25 bp, Artificial
  probe
  misc_feature (1)..(25): SEQ ID NO: 2753; WAN024FCA_at; Start 825; Stop 849
tcgccatgctgtgcttgaaaaccaa

SEQ ID NO: 200333 - DNA, 25 bp, Artificial
  probe
  misc_feature (1)..(25): SEQ ID NO: 2753; WAN024FCA_at; Start 1079; Stop 1103
cctttaaggaagctgtaggcaaaca

SEQ ID NO: 200334 - DNA, 25 bp, Artificial
  probe
  misc_feature (1)..(25): SEQ ID NO: 2753; WAN024FCA_at; Start 833; Stop 857
ctgtgcttgaaaaccaacgtaccct

SEQ ID NO: 200335 - DNA, 25 bp, Artificial
  probe
  misc_feature (1)..(25): SEQ ID NO: 2753; WAN024FCA_at; Start 625; Stop 649
gacaatgtcgttgttatcatgaaca

SEQ ID NO: 200336 - DNA, 25 bp, Artificial
  probe
  misc_feature (1)..(25): SEQ ID NO: 2753; WAN024FCA_at; Start 767; Stop 791
agtgggccgttgaccaatatagcta

SEQ ID NO: 200337 - DNA, 25 bp, Artificial
  probe
  misc_feature (1)..(25): SEQ ID NO: 2753; WAN024FCA_at; Start 758; Stop 782
aattggacgagtgggccgttgacca

SEQ ID NO: 200338 - DNA, 25 bp, Artificial
  probe
  misc_feature (1)..(25): SEQ ID NO: 2753; WAN024FCA_at; Start 1038; Stop 1062
tggctgtgccattgccttggttcaa

SEQ ID NO: 200339 - DNA, 25 bp, Artificial
  probe
  misc_feature (1)..(25): SEQ ID NO: 2753; WAN024FCA_at; Start 1065; Stop 1089
agatactgttgaggcctttaaggaa

SEQ ID NO: 200340 - DNA, 25 bp, Artificial
  probe
  misc_feature (1)..(25): SEQ ID NO: 2753; WAN024FCA_at; Start 1138; Stop 1162
tatatcgctgaagttgcaggtggca

SEQ ID NO: 200341 - DNA, 25 bp, Artificial
  probe
  misc_feature (1)..(25): SEQ ID NO: 2753; WAN024FCA_at; Start 191; Stop 215
accaagtcttgcgtttctactcagc

SEQ ID NO: 200342 - DNA, 25 bp, Artificial
  probe
  misc_feature (1)..(25): SEQ ID NO: 2753; WAN024FCA_at; Start 805; Stop 829
gaaaatcgtttgaaacgtgctcgcc

SEQ ID NO: 200343 - DNA, 25 bp, Artificial
  probe
  misc_feature (1)..(25): SEQ ID NO: 2753; WAN024FCA_at; Start 258; Stop 282
cctcaagtttgaaaaagagcacaac

SEQ ID NO: 200344 - DNA, 25 bp, Artificial
  probe
  misc_feature (1)..(25): SEQ ID NO: 2753; WAN024FCA_at; Start 639; Stop 663
tatcatgaacaccaacaaacgccgt

SEQ ID NO: 200345 - DNA, 25 bp, Artificial
  probe
  misc_feature (1)..(25): SEQ ID NO: 2753; WAN024FCA_at; Start 939; Stop 963
tgattatgaagtaactggtttggaa

SEQ ID NO: 200346 - DNA, 25 bp, Artificial
  probe
  misc_feature (1)..(25): SEQ ID NO: 2753; WAN024FCA_at; Start 610; Stop 634
ccacttgatttgaaggacaatgtcg

SEQ ID NO: 200347 - DNA, 25 bp, Artificial
  probe
  misc_feature (1)..(25): SEQ ID NO: 2753; WAN024FCA_at; Start 1092; Stop 1116
tgtaggcaaacactacgaggaagta

SEQ ID NO: 200348 - DNA, 25 bp, Artificial
  probe
  misc_feature (1)..(25): SEQ ID NO: 2753; WAN024FCA_at; Start 689; Stop 713
aacgtcgtgctgagtgtgaaaaagc

SEQ ID NO: 200349 - DNA, 25 bp, Artificial
  probe
  misc_feature (1)..(25): SEQ ID NO: 2753; WAN024FCA_at; Start 994; Stop 1018
caagaaggagttctcggtgctcgta

SEQ ID NO: 200350 - DNA, 25 bp, Artificial
  probe
  misc_feature (1)..(25): SEQ ID NO: 2753; WAN024FCA_at; Start 975; Stop 999
tgttcacacagcttgggcacaagaa

SEQ ID NO: 200351 - DNA, 25 bp, Artificial
  probe
  misc_feature (1)..(25): SEQ ID NO: 2753; WAN024FCA_at; Start 703; Stop 727
tgtgaaaaagcagtggaagaattgc

SEQ ID NO: 200352 - DNA, 25 bp, Artificial
  probe
  misc_feature (1)..(25): SEQ ID NO: 2753; WAN024FCA_at; Start 37; Stop 61
gactttcttgctgtttttggtcaag

SEQ ID NO: 200353 - DNA, 25 bp, Artificial
  probe
  misc_feature (1)..(25): SEQ ID NO: 2753; WAN024FCA_at; Start 813; Stop 837
tttgaaacgtgctcgccatgctgtg

SEQ ID NO: 200354 - DNA, 25 bp, Artificial
  probe
  misc_feature (1)..(25): SEQ ID NO: 2753; WAN024FCA_at; Start 1107; Stop 1131
cgaggaagtagttggatacgctcca

SEQ ID NO: 200355 - DNA, 25 bp, Artificial
  probe
  misc_feature (1)..(25): SEQ ID NO: 2753; WAN024FCA_at; Start 668; Stop 692
tggcggactctaaatacaatgaacg

SEQ ID NO: 200356 - DNA, 25 bp, Artificial
  probe
  misc_feature (1)..(25): SEQ ID NO: 2753; WAN024FCA_at; Start 604; Stop 628
ttggtgccacttgatttgaaggaca

SEQ ID NO: 200357 - DNA, 25 bp, Artificial
  probe
  misc_feature (1)..(25): SEQ ID NO: 2753; WAN024FCA_at; Start 1051; Stop 1075
gccttggttcaaaaagatactgttg

SEQ ID NO: 200358 - DNA, 25 bp, Artificial
  probe
  misc_feature (1)..(25): SEQ ID NO: 2753; WAN024FCA_at; Start 1123; Stop 1147
tacgctccaagcttctatatcgctg

SEQ ID NO: 200359 - DNA, 25 bp, Artificial
  probe
  misc_feature (1)..(25): SEQ ID NO: 2753; WAN024FCA_at; Start 912; Stop 936
gaatgcgtcacacgtttctctggag

SEQ ID NO: 200360 - DNA, 25 bp, Artificial
  probe
  misc_feature (1)..(25): SEQ ID NO: 2753; WAN024FCA_at; Start 1151; Stop 1175
ttgcaggtggcactcgcgtccttga

SEQ ID NO: 200361 - DNA, 25 bp, Artificial
  probe
  misc_feature (1)..(25): SEQ ID NO: 2753; WAN024FCA_at; Start 654; Stop 678
caaacgccgtgaattggcggactct

SEQ ID NO: 200362 - DNA, 25 bp, Artificial
  probe
  misc_feature (1)..(25): SEQ ID NO: 7544; WAN024FCB_at; Start 219; Stop 243
gatagataccatcaggatactctgc

SEQ ID NO: 200363 - DNA, 25 bp, Artificial
  probe
  misc_feature (1)..(25): SEQ ID NO: 7544; WAN024FCB_at; Start 34; Stop 58
atgttgggatttgagttggtctgcc

SEQ ID NO: 200364 - DNA, 25 bp, Artificial
  probe
  misc_feature (1)..(25): SEQ ID NO: 7544; WAN024FCB_at; Start 15; Stop 39
tctttatccgttagtctggatgttg

SEQ ID NO: 200365 - DNA, 25 bp, Artificial
  probe
  misc_feature (1)..(25): SEQ ID NO: 7544; WAN024FCB_at; Start 185; Stop 209
tccttcttgatatgttggacatcct

SEQ ID NO: 200366 - DNA, 25 bp, Artificial
  probe
  misc_feature (1)..(25): SEQ ID NO: 7544; WAN024FCB_at; Start 191; Stop 215
ttgatatgttggacatccttgtggg

SEQ ID NO: 200367 - DNA, 25 bp, Artificial
  probe
  misc_feature (1)..(25): SEQ ID NO: 7544; WAN024FCB_at; Start 163; Stop 187
gacctcaatcaagccgatattttcc

SEQ ID NO: 200368 - DNA, 25 bp, Artificial
  probe
  misc_feature (1)..(25): SEQ ID NO: 7544; WAN024FCB_at; Start 130; Stop 154
tttcagacgtggtggcaagattgcc

SEQ ID NO: 200369 - DNA, 25 bp, Artificial
  probe
  misc_feature (1)..(25): SEQ ID NO: 7544; WAN024FCB_at; Start 62; Stop 86
tcctgatgataatcggcaactgtaa

SEQ ID NO: 200370 - DNA, 25 bp, Artificial
  probe
  misc_feature (1)..(25): SEQ ID NO: 7544; WAN024FCB_at; Start 97; Stop 121
tacaagatagctagcgacttgctcc

SEQ ID NO: 200371 - DNA, 25 bp, Artificial
  probe
  misc_feature (1)..(25): SEQ ID NO: 7544; WAN024FCB_at; Start 89; Stop 113
gcttctcctacaagatagctagcga

SEQ ID NO: 200372 - DNA, 25 bp, Artificial
  probe
  misc_feature (1)..(25): SEQ ID NO: 7544; WAN024FCB_at; Start 222; Stop 246
agataccatcaggatactctgctga

SEQ ID NO: 200373 - DNA, 25 bp, Artificial
  probe
  misc_feature (1)..(25): SEQ ID NO: 7544; WAN024FCB_at; Start 43; Stop 67
tttgagttggtctgcccactcctga

SEQ ID NO: 200374 - DNA, 25 bp, Artificial
  probe
  misc_feature (1)..(25): SEQ ID NO: 7544; WAN024FCB_at; Start 71; Stop 95
taatcggcaactgtaacagcttctc

SEQ ID NO: 200375 - DNA, 25 bp, Artificial
  probe
  misc_feature (1)..(25): SEQ ID NO: 7544; WAN024FCB_at; Start 172; Stop 196
caagccgatattttccttcttgata

SEQ ID NO: 200376 - DNA, 25 bp, Artificial
  probe
  misc_feature (1)..(25): SEQ ID NO: 7544; WAN024FCB_at; Start 66; Stop 90
gatgataatcggcaactgtaacagc

SEQ ID NO: 200377 - DNA, 25 bp, Artificial
  probe
  misc_feature (1)..(25): SEQ ID NO: 7544; WAN024FCB_at; Start 69; Stop 93
gataatcggcaactgtaacagcttc

SEQ ID NO: 200378 - DNA, 25 bp, Artificial
  probe
  misc_feature (1)..(25): SEQ ID NO: 7544; WAN024FCB_at; Start 100; Stop 124
aagatagctagcgacttgctccact

SEQ ID NO: 200379 - DNA, 25 bp, Artificial
  probe
  misc_feature (1)..(25): SEQ ID NO: 7544; WAN024FCB_at; Start 112; Stop 136
gacttgctccacttcttctttcaga

SEQ ID NO: 200380 - DNA, 25 bp, Artificial
  probe
  misc_feature (1)..(25): SEQ ID NO: 7544; WAN024FCB_at; Start 82; Stop 106
tgtaacagcttctcctacaagatag

SEQ ID NO: 200381 - DNA, 25 bp, Artificial
  probe
  misc_feature (1)..(25): SEQ ID NO: 7544; WAN024FCB_at; Start 143; Stop 167
ggcaagattgccaagcccatgacct

SEQ ID NO: 200382 - DNA, 25 bp, Artificial
  probe
  misc_feature (1)..(25): SEQ ID NO: 7544; WAN024FCB_at; Start 214; Stop 238
gggatgatagataccatcaggatac

SEQ ID NO: 200383 - DNA, 25 bp, Artificial
  probe
  misc_feature (1)..(25): SEQ ID NO: 7544; WAN024FCB_at; Start 22; Stop 46
ccgttagtctggatgttgggatttg

SEQ ID NO: 200384 - DNA, 25 bp, Artificial
  probe
  misc_feature (1)..(25): SEQ ID NO: 7544; WAN024FCB_at; Start 137; Stop 161
cgtggtggcaagattgccaagccca

SEQ ID NO: 200385 - DNA, 25 bp, Artificial
  probe
  misc_feature (1)..(25): SEQ ID NO: 7544; WAN024FCB_at; Start 76; Stop 100
ggcaactgtaacagcttctcctaca

SEQ ID NO: 200386 - DNA, 25 bp, Artificial
  probe
  misc_feature (1)..(25): SEQ ID NO: 7544; WAN024FCB_at; Start 59; Stop 83
cactcctgatgataatcggcaactg

SEQ ID NO: 200387 - DNA, 25 bp, Artificial
  probe
  misc_feature (1)..(25): SEQ ID NO: 7544; WAN024FCB_at; Start 125; Stop 149
tcttctttcagacgtggtggcaaga

SEQ ID NO: 200388 - DNA, 25 bp, Artificial
  probe
  misc_feature (1)..(25): SEQ ID NO: 7544; WAN024FCB_at; Start 104; Stop 128
tagctagcgacttgctccacttctt

SEQ ID NO: 200389 - DNA, 25 bp, Artificial
  probe
  misc_feature (1)..(25): SEQ ID NO: 7544; WAN024FCB_at; Start 94; Stop 118
tcctacaagatagctagcgacttgc

SEQ ID NO: 200390 - DNA, 25 bp, Artificial
  probe
  misc_feature (1)..(25): SEQ ID NO: 7544; WAN024FCB_at; Start 39; Stop 63
gggatttgagttggtctgcccactc

SEQ ID NO: 200391 - DNA, 25 bp, Artificial
  probe
  misc_feature (1)..(25): SEQ ID NO: 7544; WAN024FCB_at; Start 157; Stop 181
gcccatgacctcaatcaagccgata

SEQ ID NO: 200392 - DNA, 25 bp, Artificial
  probe
  misc_feature (1)..(25): SEQ ID NO: 7544; WAN024FCB_at; Start 48; Stop 72
gttggtctgcccactcctgatgata

SEQ ID NO: 200393 - DNA, 25 bp, Artificial
  probe
  misc_feature (1)..(25): SEQ ID NO: 7544; WAN024FCB_at; Start 150; Stop 174
ttgccaagcccatgacctcaatcaa

SEQ ID NO: 200394 - DNA, 25 bp, Artificial
  probe
  misc_feature (1)..(25): SEQ ID NO: 7544; WAN024FCB_at; Start 53; Stop 77
tctgcccactcctgatgataatcgg

SEQ ID NO: 200395 - DNA, 25 bp, Artificial
  probe
  misc_feature (1)..(25): SEQ ID NO: 7544; WAN024FCB_at; Start 122; Stop 146
acttcttctttcagacgtggtggca

SEQ ID NO: 200396 - DNA, 25 bp, Artificial
  probe
  misc_feature (1)..(25): SEQ ID NO: 7073; WAN024FCC_at; Start 86; Stop 110
tcaaaccatcacaacaatagcgcgt

SEQ ID NO: 200397 - DNA, 25 bp, Artificial
  probe
  misc_feature (1)..(25): SEQ ID NO: 7073; WAN024FCC_at; Start 34; Stop 58
catattcagagtctaatgtgcagac

SEQ ID NO: 200398 - DNA, 25 bp, Artificial
  probe
  misc_feature (1)..(25): SEQ ID NO: 7073; WAN024FCC_at; Start 108; Stop 132
cgtaagcgttattgacagtttgagt

SEQ ID NO: 200399 - DNA, 25 bp, Artificial
  probe
  misc_feature (1)..(25): SEQ ID NO: 7073; WAN024FCC_at; Start 77; Stop 101
gacaccggatcaaaccatcacaaca

SEQ ID NO: 200400 - DNA, 25 bp, Artificial
  probe
  misc_feature (1)..(25): SEQ ID NO: 7073; WAN024FCC_at; Start 1; Stop 25
cgctagccgattagaatttccaagt

SEQ ID NO: 200401 - DNA, 25 bp, Artificial
  probe
  misc_feature (1)..(25): SEQ ID NO: 7073; WAN024FCC_at; Start 103; Stop 127
tagcgcgtaagcgttattgacagtt

SEQ ID NO: 200402 - DNA, 25 bp, Artificial
  probe
  misc_feature (1)..(25): SEQ ID NO: 7073; WAN024FCC_at; Start 65; Stop 89
aaattcagacgggacaccggatcaa

SEQ ID NO: 200403 - DNA, 25 bp, Artificial
  probe
  misc_feature (1)..(25): SEQ ID NO: 7073; WAN024FCC_at; Start 72; Stop 96
gacgggacaccggatcaaaccatca

SEQ ID NO: 200404 - DNA, 25 bp, Artificial
  probe
  misc_feature (1)..(25): SEQ ID NO: 7073; WAN024FCC_at; Start 111; Stop 135
aagcgttattgacagtttgagttgg

SEQ ID NO: 200405 - DNA, 25 bp, Artificial
  probe
  misc_feature (1)..(25): SEQ ID NO: 7073; WAN024FCC_at; Start 40; Stop 64
cagagtctaatgtgcagactttggc

SEQ ID NO: 200406 - DNA, 25 bp, Artificial
  probe
  misc_feature (1)..(25): SEQ ID NO: 7073; WAN024FCC_at; Start 92; Stop 116
catcacaacaatagcgcgtaagcgt

SEQ ID NO: 200407 - DNA, 25 bp, Artificial
  probe
  misc_feature (1)..(25): SEQ ID NO: 7073; WAN024FCC_at; Start 68; Stop 92
ttcagacgggacaccggatcaaacc

SEQ ID NO: 200408 - DNA, 25 bp, Artificial
  probe
  misc_feature (1)..(25): SEQ ID NO: 7073; WAN024FCC_at; Start 101; Stop 125
aatagcgcgtaagcgttattgacag

SEQ ID NO: 200409 - DNA, 25 bp, Artificial
  probe
  misc_feature (1)..(25): SEQ ID NO: 7073; WAN024FCC_at; Start 54; Stop 78
cagactttggcaaattcagacggga

SEQ ID NO: 200410 - DNA, 25 bp, Artificial
  probe
  misc_feature (1)..(25): SEQ ID NO: 7073; WAN024FCC_at; Start 47; Stop 71
taatgtgcagactttggcaaattca

SEQ ID NO: 200411 - DNA, 25 bp, Artificial
  probe
  misc_feature (1)..(25): SEQ ID NO: 7073; WAN024FCC_at; Start 9; Stop 33
gattagaatttccaagtaacgcgcc

SEQ ID NO: 200412 - DNA, 25 bp, Artificial
  probe
  misc_feature (1)..(25): SEQ ID NO: 7073; WAN024FCC_at; Start 12; Stop 36
tagaatttccaagtaacgcgcccat

SEQ ID NO: 200413 - DNA, 25 bp, Artificial
  probe
  misc_feature (1)..(25): SEQ ID NO: 7073; WAN024FCC_at; Start 59; Stop 83
tttggcaaattcagacgggacaccg

SEQ ID NO: 200414 - DNA, 25 bp, Artificial
  probe
  misc_feature (1)..(25): SEQ ID NO: 7073; WAN024FCC_at; Start 61; Stop 85
tggcaaattcagacgggacaccgga

SEQ ID NO: 200415 - DNA, 25 bp, Artificial
  probe
  misc_feature (1)..(25): SEQ ID NO: 7073; WAN024FCC_at; Start 89; Stop 113
aaccatcacaacaatagcgcgtaag

SEQ ID NO: 200416 - DNA, 25 bp, Artificial
  probe
  misc_feature (1)..(25): SEQ ID NO: 7073; WAN024FCC_at; Start 52; Stop 76
tgcagactttggcaaattcagacgg

SEQ ID NO: 200417 - DNA, 25 bp, Artificial
  probe
  misc_feature (1)..(25): SEQ ID NO: 7073; WAN024FCC_at; Start 31; Stop 55
gcccatattcagagtctaatgtgca

SEQ ID NO: 200418 - DNA, 25 bp, Artificial
  probe
  misc_feature (1)..(25): SEQ ID NO: 7073; WAN024FCC_at; Start 14; Stop 38
gaatttccaagtaacgcgcccatat

SEQ ID NO: 200419 - DNA, 25 bp, Artificial
  probe
  misc_feature (1)..(25): SEQ ID NO: 7073; WAN024FCC_at; Start 28; Stop 52
cgcgcccatattcagagtctaatgt

SEQ ID NO: 200420 - DNA, 25 bp, Artificial
  probe
  misc_feature (1)..(25): SEQ ID NO: 7073; WAN024FCC_at; Start 106; Stop 130
cgcgtaagcgttattgacagtttga

SEQ ID NO: 200421 - DNA, 25 bp, Artificial
  probe
  misc_feature (1)..(25): SEQ ID NO: 7073; WAN024FCC_at; Start 97; Stop 121
caacaatagcgcgtaagcgttattg

SEQ ID NO: 200422 - DNA, 25 bp, Artificial
  probe
  misc_feature (1)..(25): SEQ ID NO: 7073; WAN024FCC_at; Start 83; Stop 107
ggatcaaaccatcacaacaatagcg

SEQ ID NO: 200423 - DNA, 25 bp, Artificial
  probe
  misc_feature (1)..(25): SEQ ID NO: 7073; WAN024FCC_at; Start 25; Stop 49
taacgcgcccatattcagagtctaa

SEQ ID NO: 200424 - DNA, 25 bp, Artificial
  probe
  misc_feature (1)..(25): SEQ ID NO: 7073; WAN024FCC_at; Start 22; Stop 46
aagtaacgcgcccatattcagagtc

SEQ ID NO: 200425 - DNA, 25 bp, Artificial
  probe
  misc_feature (1)..(25): SEQ ID NO: 7073; WAN024FCC_at; Start 56; Stop 80
gactttggcaaattcagacgggaca

SEQ ID NO: 200426 - DNA, 25 bp, Artificial
  probe
  misc_feature (1)..(25): SEQ ID NO: 7073; WAN024FCC_at; Start 42; Stop 66
gagtctaatgtgcagactttggcaa

SEQ ID NO: 200427 - DNA, 25 bp, Artificial
  probe
  misc_feature (1)..(25): SEQ ID NO: 7073; WAN024FCC_at; Start 57; Stop 81
actttggcaaattcagacgggacac

SEQ ID NO: 200428 - DNA, 25 bp, Artificial
  probe
  misc_feature (1)..(25): SEQ ID NO: 7073; WAN024FCC_at; Start 75; Stop 99
gggacaccggatcaaaccatcacaa

SEQ ID NO: 200429 - DNA, 25 bp, Artificial
  probe
  misc_feature (1)..(25): SEQ ID NO: 7073; WAN024FCC_at; Start 11; Stop 35
ttagaatttccaagtaacgcgccca

SEQ ID NO: 200430 - DNA, 25 bp, Artificial
  probe
  misc_feature (1)..(25): SEQ ID NO: 5022; WAN024FCD_at; Start 62; Stop 86
ttttcaggcttagagagattgatgg

SEQ ID NO: 200431 - DNA, 25 bp, Artificial
  probe
  misc_feature (1)..(25): SEQ ID NO: 5022; WAN024FCD_at; Start 135; Stop 159
tagcaatggccttgagtttgatgta

SEQ ID NO: 200432 - DNA, 25 bp, Artificial
  probe
  misc_feature (1)..(25): SEQ ID NO: 5022; WAN024FCD_at; Start 289; Stop 313
gatttcacgcgcagtctgactatcc

SEQ ID NO: 200433 - DNA, 25 bp, Artificial
  probe
  misc_feature (1)..(25): SEQ ID NO: 5022; WAN024FCD_at; Start 69; Stop 93
gcttagagagattgatggtaatttc

SEQ ID NO: 200434 - DNA, 25 bp, Artificial
  probe
  misc_feature (1)..(25): SEQ ID NO: 5022; WAN024FCD_at; Start 284; Stop 308
ccaaggatttcacgcgcagtctgac

SEQ ID NO: 200435 - DNA, 25 bp, Artificial
  probe
  misc_feature (1)..(25): SEQ ID NO: 5022; WAN024FCD_at; Start 16; Stop 40
attactagcttgcaccaacttggct

SEQ ID NO: 200436 - DNA, 25 bp, Artificial
  probe
  misc_feature (1)..(25): SEQ ID NO: 5022; WAN024FCD_at; Start 65; Stop 89
tcaggcttagagagattgatggtaa

SEQ ID NO: 200437 - DNA, 25 bp, Artificial
  probe
  misc_feature (1)..(25): SEQ ID NO: 5022; WAN024FCD_at; Start 153; Stop 177
tgatgtagtcatttttctgactgag

SEQ ID NO: 200438 - DNA, 25 bp, Artificial
  probe
  misc_feature (1)..(25): SEQ ID NO: 5022; WAN024FCD_at; Start 283; Stop 307
accaaggatttcacgcgcagtctga

SEQ ID NO: 200439 - DNA, 25 bp, Artificial
  probe
  misc_feature (1)..(25): SEQ ID NO: 5022; WAN024FCD_at; Start 3; Stop 27
gacactgaggataattactagcttg

SEQ ID NO: 200440 - DNA, 25 bp, Artificial
  probe
  misc_feature (1)..(25): SEQ ID NO: 5022; WAN024FCD_at; Start 156; Stop 180
tgtagtcatttttctgactgagttg

SEQ ID NO: 200441 - DNA, 25 bp, Artificial
  probe
  misc_feature (1)..(25): SEQ ID NO: 5022; WAN024FCD_at; Start 109; Stop 133
agatggaacacgataagcgatattt

SEQ ID NO: 200442 - DNA, 25 bp, Artificial
  probe
  misc_feature (1)..(25): SEQ ID NO: 5022; WAN024FCD_at; Start 299; Stop 323
gcagtctgactatcctcaatcgtct

SEQ ID NO: 200443 - DNA, 25 bp, Artificial
  probe
  misc_feature (1)..(25): SEQ ID NO: 5022; WAN024FCD_at; Start 291; Stop 315
tttcacgcgcagtctgactatcctc

SEQ ID NO: 200444 - DNA, 25 bp, Artificial
  probe
  misc_feature (1)..(25): SEQ ID NO: 5022; WAN024FCD_at; Start 7; Stop 31
ctgaggataattactagcttgcacc

SEQ ID NO: 200445 - DNA, 25 bp, Artificial
  probe
  misc_feature (1)..(25): SEQ ID NO: 5022; WAN024FCD_at; Start 8; Stop 32
tgaggataattactagcttgcacca

SEQ ID NO: 200446 - DNA, 25 bp, Artificial
  probe
  misc_feature (1)..(25): SEQ ID NO: 5022; WAN024FCD_at; Start 5; Stop 29
cactgaggataattactagcttgca

SEQ ID NO: 200447 - DNA, 25 bp, Artificial
  probe
  misc_feature (1)..(25): SEQ ID NO: 5022; WAN024FCD_at; Start 293; Stop 317
tcacgcgcagtctgactatcctcaa

SEQ ID NO: 200448 - DNA, 25 bp, Artificial
  probe
  misc_feature (1)..(25): SEQ ID NO: 5022; WAN024FCD_at; Start 78; Stop 102
gattgatggtaatttcaagttctcc

SEQ ID NO: 200449 - DNA, 25 bp, Artificial
  probe
  misc_feature (1)..(25): SEQ ID NO: 5022; WAN024FCD_at; Start 148; Stop 172
gagtttgatgtagtcatttttctga

SEQ ID NO: 200450 - DNA, 25 bp, Artificial
  probe
  misc_feature (1)..(25): SEQ ID NO: 5022; WAN024FCD_at; Start 302; Stop 326
gtctgactatcctcaatcgtctcta

SEQ ID NO: 200451 - DNA, 25 bp, Artificial
  probe
  misc_feature (1)..(25): SEQ ID NO: 5022; WAN024FCD_at; Start 14; Stop 38
taattactagcttgcaccaacttgg

SEQ ID NO: 200452 - DNA, 25 bp, Artificial
  probe
  misc_feature (1)..(25): SEQ ID NO: 5022; WAN024FCD_at; Start 107; Stop 131
tcagatggaacacgataagcgatat

SEQ ID NO: 200453 - DNA, 25 bp, Artificial
  probe
  misc_feature (1)..(25): SEQ ID NO: 5022; WAN024FCD_at; Start 11; Stop 35
ggataattactagcttgcaccaact

SEQ ID NO: 200454 - DNA, 25 bp, Artificial
  probe
  misc_feature (1)..(25): SEQ ID NO: 5022; WAN024FCD_at; Start 303; Stop 327
tctgactatcctcaatcgtctctaa

SEQ ID NO: 200455 - DNA, 25 bp, Artificial
  probe
  misc_feature (1)..(25): SEQ ID NO: 5022; WAN024FCD_at; Start 1; Stop 25
ttgacactgaggataattactagct

SEQ ID NO: 200456 - DNA, 25 bp, Artificial
  probe
  misc_feature (1)..(25): SEQ ID NO: 5022; WAN024FCD_at; Start 15; Stop 39
aattactagcttgcaccaacttggc

SEQ ID NO: 200457 - DNA, 25 bp, Artificial
  probe
  misc_feature (1)..(25): SEQ ID NO: 5022; WAN024FCD_at; Start 139; Stop 163
aatggccttgagtttgatgtagtca

SEQ ID NO: 200458 - DNA, 25 bp, Artificial
  probe
  misc_feature (1)..(25): SEQ ID NO: 5022; WAN024FCD_at; Start 138; Stop 162
caatggccttgagtttgatgtagtc

SEQ ID NO: 200459 - DNA, 25 bp, Artificial
  probe
  misc_feature (1)..(25): SEQ ID NO: 5022; WAN024FCD_at; Start 9; Stop 33
gaggataattactagcttgcaccaa

SEQ ID NO: 200460 - DNA, 25 bp, Artificial
  probe
  misc_feature (1)..(25): SEQ ID NO: 5022; WAN024FCD_at; Start 297; Stop 321
gcgcagtctgactatcctcaatcgt

SEQ ID NO: 200461 - DNA, 25 bp, Artificial
  probe
  misc_feature (1)..(25): SEQ ID NO: 5022; WAN024FCD_at; Start 288; Stop 312
ggatttcacgcgcagtctgactatc

SEQ ID NO: 200462 - DNA, 25 bp, Artificial
  probe
  misc_feature (1)..(25): SEQ ID NO: 5022; WAN024FCD_at; Start 142; Stop 166
ggccttgagtttgatgtagtcattt

SEQ ID NO: 200463 - DNA, 25 bp, Artificial
  probe
  misc_feature (1)..(25): SEQ ID NO: 5022; WAN024FCD_at; Start 66; Stop 90
caggcttagagagattgatggtaat

SEQ ID NO: 200464 - DNA, 25 bp, Artificial
  probe
  misc_feature (1)..(25): SEQ ID NO: 4042; WAN024FCE_at; Start 189; Stop 213
gattgaggatagtcagactgcgcgt

SEQ ID NO: 200465 - DNA, 25 bp, Artificial
  probe
  misc_feature (1)..(25): SEQ ID NO: 4042; WAN024FCE_at; Start 653; Stop 677
tagatggccagcatcgtcccatggc

SEQ ID NO: 200466 - DNA, 25 bp, Artificial
  probe
  misc_feature (1)..(25): SEQ ID NO: 4042; WAN024FCE_at; Start 805; Stop 829
ggccgtcacgtatttcctatggaat

SEQ ID NO: 200467 - DNA, 25 bp, Artificial
  probe
  misc_feature (1)..(25): SEQ ID NO: 4042; WAN024FCE_at; Start 681; Stop 705
tagtcgtcagagttttgaacgtctg

SEQ ID NO: 200468 - DNA, 25 bp, Artificial
  probe
  misc_feature (1)..(25): SEQ ID NO: 4042; WAN024FCE_at; Start 669; Stop 693
tcccatggccattagtcgtcagagt

SEQ ID NO: 200469 - DNA, 25 bp, Artificial
  probe
  misc_feature (1)..(25): SEQ ID NO: 4042; WAN024FCE_at; Start 1315; Stop 1339
caacatccagacctaacggataaag

SEQ ID NO: 200470 - DNA, 25 bp, Artificial
  probe
  misc_feature (1)..(25): SEQ ID NO: 4042; WAN024FCE_at; Start 406; Stop 430
ggagaacttgaaattaccatcaatc

SEQ ID NO: 200471 - DNA, 25 bp, Artificial
  probe
  misc_feature (1)..(25): SEQ ID NO: 4042; WAN024FCE_at; Start 863; Stop 887
gttttgagcaggtcaaggctggaat

SEQ ID NO: 200472 - DNA, 25 bp, Artificial
  probe
  misc_feature (1)..(25): SEQ ID NO: 4042; WAN024FCE_at; Start 103; Stop 127
gaaggtgttttggaagttgagacca

SEQ ID NO: 200473 - DNA, 25 bp, Artificial
  probe
  misc_feature (1)..(25): SEQ ID NO: 4042; WAN024FCE_at; Start 47; Stop 71
catttgaggaaatggatcgaatcta

SEQ ID NO: 200474 - DNA, 25 bp, Artificial
  probe
  misc_feature (1)..(25): SEQ ID NO: 4042; WAN024FCE_at; Start 848; Stop 872
ccttccgatttgctggttttgagca

SEQ ID NO: 200475 - DNA, 25 bp, Artificial
  probe
  misc_feature (1)..(25): SEQ ID NO: 4042; WAN024FCE_at; Start 1356; Stop 1380
cgtcaaggactctgtgggtgctatc

SEQ ID NO: 200476 - DNA, 25 bp, Artificial
  probe
  misc_feature (1)..(25): SEQ ID NO: 4042; WAN024FCE_at; Start 733; Stop 757
tattttgctggatctaatgccgacc

SEQ ID NO: 200477 - DNA, 25 bp, Artificial
  probe
  misc_feature (1)..(25): SEQ ID NO: 4042; WAN024FCE_at; Start 695; Stop 719
ttgaacgtctgttggctatcgtaga

SEQ ID NO: 200478 - DNA, 25 bp, Artificial
  probe
  misc_feature (1)..(25): SEQ ID NO: 4042; WAN024FCE_at; Start 615; Stop 639
ttcgccctatgcttactttaatgag

SEQ ID NO: 200479 - DNA, 25 bp, Artificial
  probe
  misc_feature (1)..(25): SEQ ID NO: 4042; WAN024FCE_at; Start 1445; Stop 1469
tgcgctttgtggaacaggtcggaat

SEQ ID NO: 200480 - DNA, 25 bp, Artificial
  probe
  misc_feature (1)..(25): SEQ ID NO: 4042; WAN024FCE_at; Start 135; Stop 159
taaattgattgacctcaaggaccag

SEQ ID NO: 200481 - DNA, 25 bp, Artificial
  probe
  misc_feature (1)..(25): SEQ ID NO: 4042; WAN024FCE_at; Start 822; Stop 846
tatggaattggctcccttgcaaaag

SEQ ID NO: 200482 - DNA, 25 bp, Artificial
  probe
  misc_feature (1)..(25): SEQ ID NO: 4042; WAN024FCE_at; Start 1454; Stop 1478
tggaacaggtcggaattttactaga

SEQ ID NO: 200483 - DNA, 25 bp, Artificial
  probe
  misc_feature (1)..(25): SEQ ID NO: 4042; WAN024FCE_at; Start 422; Stop 446
ccatcaatctctctaagcctgaaaa

SEQ ID NO: 200484 - DNA, 25 bp, Artificial
  probe
  misc_feature (1)..(25): SEQ ID NO: 4042; WAN024FCE_at; Start 1339; Stop 1363
gaaaaagcccttgcaatcgtcaagg

SEQ ID NO: 200485 - DNA, 25 bp, Artificial
  probe
  misc_feature (1)..(25): SEQ ID NO: 4042; WAN024FCE_at; Start 573; Stop 597
tatccgttttgaaatggttggtcag

SEQ ID NO: 200486 - DNA, 25 bp, Artificial
  probe
  misc_feature (1)..(25): SEQ ID NO: 4042; WAN024FCE_at; Start 746; Stop 770
ctaatgccgacctgccgattgtggg

SEQ ID NO: 200487 - DNA, 25 bp, Artificial
  probe
  misc_feature (1)..(25): SEQ ID NO: 4042; WAN024FCE_at; Start 469; Stop 493
gccaagttggtgcaagctagtaatt

SEQ ID NO: 200488 - DNA, 25 bp, Artificial
  probe
  misc_feature (1)..(25): SEQ ID NO: 4042; WAN024FCE_at; Start 118; Stop 142
gttgagaccaatctggataaattga

SEQ ID NO: 200489 - DNA, 25 bp, Artificial
  probe
  misc_feature (1)..(25): SEQ ID NO: 4042; WAN024FCE_at; Start 201; Stop 225
tcagactgcgcgtgaaatccttggt

SEQ ID NO: 200490 - DNA, 25 bp, Artificial
  probe
  misc_feature (1)..(25): SEQ ID NO: 4042; WAN024FCE_at; Start 1391; Stop 1415
tacttgaggatgcaggagtctacaa

SEQ ID NO: 200491 - DNA, 25 bp, Artificial
  probe
  misc_feature (1)..(25): SEQ ID NO: 4042; WAN024FCE_at; Start 792; Stop 816
tcattatcagggaggccgtcacgta

SEQ ID NO: 200492 - DNA, 25 bp, Artificial
  probe
  misc_feature (1)..(25): SEQ ID NO: 4042; WAN024FCE_at; Start 481; Stop 505
caagctagtaattatcctcagtgtc

SEQ ID NO: 200493 - DNA, 25 bp, Artificial
  probe
  misc_feature (1)..(25): SEQ ID NO: 4042; WAN024FCE_at; Start 640; Stop 664
cattgtatctttttagatggccagc

SEQ ID NO: 200494 - DNA, 25 bp, Artificial
  probe
  misc_feature (1)..(25): SEQ ID NO: 4042; WAN024FCE_at; Start 918; Stop 942
gacttcggattccaaagaggatttg

SEQ ID NO: 200495 - DNA, 25 bp, Artificial
  probe
  misc_feature (1)..(25): SEQ ID NO: 4042; WAN024FCE_at; Start 376; Stop 400
aatatcgcttatcgtgttccatctg

SEQ ID NO: 200496 - DNA, 25 bp, Artificial
  probe
  misc_feature (1)..(25): SEQ ID NO: 4042; WAN024FCE_at; Start 349; Stop 373
tacatcaaactcaaggccattgcta

SEQ ID NO: 200497 - DNA, 25 bp, Artificial
  probe
  misc_feature (1)..(25): SEQ ID NO: 4042; WAN024FCE_at; Start 1406; Stop 1430
gagtctacaagcagacagaacaagg

SEQ ID NO: 200498 - DNA, 25 bp, Artificial
  probe
  misc_feature (1)..(25): SEQ ID NO: 5523; WAN024FCF_at; Start 99; Stop 123
ggacacattctcctttaatggtcaa

SEQ ID NO: 200499 - DNA, 25 bp, Artificial
  probe
  misc_feature (1)..(25): SEQ ID NO: 5523; WAN024FCF_at; Start 161; Stop 185
gaggattggagtgtcaccccatcaa

SEQ ID NO: 200500 - DNA, 25 bp, Artificial
  probe
  misc_feature (1)..(25): SEQ ID NO: 5523; WAN024FCF_at; Start 127; Stop 151
atcgtcgagttttcctgccttaagg

SEQ ID NO: 200501 - DNA, 25 bp, Artificial
  probe
  misc_feature (1)..(25): SEQ ID NO: 5523; WAN024FCF_at; Start 192; Stop 216
gcgagataaccaccaaaccactgat

SEQ ID NO: 200502 - DNA, 25 bp, Artificial
  probe
  misc_feature (1)..(25): SEQ ID NO: 5523; WAN024FCF_at; Start 43; Stop 67
tctgccctcttgattggtgatatcc

SEQ ID NO: 200503 - DNA, 25 bp, Artificial
  probe
  misc_feature (1)..(25): SEQ ID NO: 5523; WAN024FCF_at; Start 114; Stop 138
taatggtcaatacatcgtcgagttt

SEQ ID NO: 200504 - DNA, 25 bp, Artificial
  probe
  misc_feature (1)..(25): SEQ ID NO: 5523; WAN024FCF_at; Start 1; Stop 25
ttggcctgtgacaaacatggtaaag

SEQ ID NO: 200505 - DNA, 25 bp, Artificial
  probe
  misc_feature (1)..(25): SEQ ID NO: 5523; WAN024FCF_at; Start 117; Stop 141
tggtcaatacatcgtcgagttttcc

SEQ ID NO: 200506 - DNA, 25 bp, Artificial
  probe
  misc_feature (1)..(25): SEQ ID NO: 5523; WAN024FCF_at; Start 194; Stop 218
gagataaccaccaaaccactgattt

SEQ ID NO: 200507 - DNA, 25 bp, Artificial
  probe
  misc_feature (1)..(25): SEQ ID NO: 5523; WAN024FCF_at; Start 106; Stop 130
ttctcctttaatggtcaatacatcg

SEQ ID NO: 200508 - DNA, 25 bp, Artificial
  probe
  misc_feature (1)..(25): SEQ ID NO: 5523; WAN024FCF_at; Start 37; Stop 61
gacatttctgccctcttgattggtg

SEQ ID NO: 200509 - DNA, 25 bp, Artificial
  probe
  misc_feature (1)..(25): SEQ ID NO: 5523; WAN024FCF_at; Start 176; Stop 200
accccatcaagtcccagcgagataa

SEQ ID NO: 200510 - DNA, 25 bp, Artificial
  probe
  misc_feature (1)..(25): SEQ ID NO: 5523; WAN024FCF_at; Start 203; Stop 227
accaaaccactgatttggtcacata

SEQ ID NO: 200511 - DNA, 25 bp, Artificial
  probe
  misc_feature (1)..(25): SEQ ID NO: 5523; WAN024FCF_at; Start 168; Stop 192
ggagtgtcaccccatcaagtcccag

SEQ ID NO: 200512 - DNA, 25 bp, Artificial
  probe
  misc_feature (1)..(25): SEQ ID NO: 5523; WAN024FCF_at; Start 179; Stop 203
ccatcaagtcccagcgagataacca

SEQ ID NO: 200513 - DNA, 25 bp, Artificial
  probe
  misc_feature (1)..(25): SEQ ID NO: 5523; WAN024FCF_at; Start 184; Stop 208
aagtcccagcgagataaccaccaaa

SEQ ID NO: 200514 - DNA, 25 bp, Artificial
  probe
  misc_feature (1)..(25): SEQ ID NO: 5523; WAN024FCF_at; Start 156; Stop 180
tgatagaggattggagtgtcacccc

SEQ ID NO: 200515 - DNA, 25 bp, Artificial
  probe
  misc_feature (1)..(25): SEQ ID NO: 5523; WAN024FCF_at; Start 144; Stop 168
ccttaaggtagttgatagaggattg

SEQ ID NO: 200516 - DNA, 25 bp, Artificial
  probe
  misc_feature (1)..(25): SEQ ID NO: 5523; WAN024FCF_at; Start 46; Stop 70
gccctcttgattggtgatatccaca

SEQ ID NO: 200517 - DNA, 25 bp, Artificial
  probe
  misc_feature (1)..(25): SEQ ID NO: 5523; WAN024FCF_at; Start 139; Stop 163
tcctgccttaaggtagttgatagag

SEQ ID NO: 200518 - DNA, 25 bp, Artificial
  probe
  misc_feature (1)..(25): SEQ ID NO: 5523; WAN024FCF_at; Start 124; Stop 148
tacatcgtcgagttttcctgcctta

SEQ ID NO: 200519 - DNA, 25 bp, Artificial
  probe
  misc_feature (1)..(25): SEQ ID NO: 5523; WAN024FCF_at; Start 90; Stop 114
gaccttgatggacacattctccttt

SEQ ID NO: 200520 - DNA, 25 bp, Artificial
  probe
  misc_feature (1)..(25): SEQ ID NO: 5523; WAN024FCF_at; Start 110; Stop 134
cctttaatggtcaatacatcgtcga

SEQ ID NO: 200521 - DNA, 25 bp, Artificial
  probe
  misc_feature (1)..(25): SEQ ID NO: 5523; WAN024FCF_at; Start 159; Stop 183
tagaggattggagtgtcaccccatc

SEQ ID NO: 200522 - DNA, 25 bp, Artificial
  probe
  misc_feature (1)..(25): SEQ ID NO: 5523; WAN024FCF_at; Start 87; Stop 111
tacgaccttgatggacacattctcc

SEQ ID NO: 200523 - DNA, 25 bp, Artificial
  probe
  misc_feature (1)..(25): SEQ ID NO: 5523; WAN024FCF_at; Start 50; Stop 74
tcttgattggtgatatccacatcca

SEQ ID NO: 200524 - DNA, 25 bp, Artificial
  probe
  misc_feature (1)..(25): SEQ ID NO: 5523; WAN024FCF_at; Start 83; Stop 107
gttgtacgaccttgatggacacatt

SEQ ID NO: 200525 - DNA, 25 bp, Artificial
  probe
  misc_feature (1)..(25): SEQ ID NO: 5523; WAN024FCF_at; Start 121; Stop 145
caatacatcgtcgagttttcctgcc

SEQ ID NO: 200526 - DNA, 25 bp, Artificial
  probe
  misc_feature (1)..(25): SEQ ID NO: 5523; WAN024FCF_at; Start 6; Stop 30
ctgtgacaaacatggtaaaggttgc

SEQ ID NO: 200527 - DNA, 25 bp, Artificial
  probe
  misc_feature (1)..(25): SEQ ID NO: 5523; WAN024FCF_at; Start 164; Stop 188
gattggagtgtcaccccatcaagtc

SEQ ID NO: 200528 - DNA, 25 bp, Artificial
  probe
  misc_feature (1)..(25): SEQ ID NO: 5523; WAN024FCF_at; Start 95; Stop 119
tgatggacacattctcctttaatgg

SEQ ID NO: 200529 - DNA, 25 bp, Artificial
  probe
  misc_feature (1)..(25): SEQ ID NO: 5523; WAN024FCF_at; Start 196; Stop 220
gataaccaccaaaccactgatttgg

SEQ ID NO: 200530 - DNA, 25 bp, Artificial
  probe
  misc_feature (1)..(25): SEQ ID NO: 5523; WAN024FCF_at; Start 39; Stop 63
catttctgccctcttgattggtgat

SEQ ID NO: 200531 - DNA, 25 bp, Artificial
  probe
  misc_feature (1)..(25): SEQ ID NO: 5523; WAN024FCF_at; Start 85; Stop 109
tgtacgaccttgatggacacattct

SEQ ID NO: 200532 - DNA, 25 bp, Artificial
  probe
  misc_feature (1)..(25): SEQ ID NO: 4908; WAN024FCG_at; Start 64; Stop 88
tacgaaattgaaaaaatgagagatg

SEQ ID NO: 200533 - DNA, 25 bp, Artificial
  probe
  misc_feature (1)..(25): SEQ ID NO: 4908; WAN024FCG_at; Start 194; Stop 218
tggttatctcgctgggacttgatgg

SEQ ID NO: 200534 - DNA, 25 bp, Artificial
  probe
  misc_feature (1)..(25): SEQ ID NO: 4908; WAN024FCG_at; Start 281; Stop 305
ttaaaggagaatgtgtccatcaagg

SEQ ID NO: 200535 - DNA, 25 bp, Artificial
  probe
  misc_feature (1)..(25): SEQ ID NO: 4908; WAN024FCG_at; Start 274; Stop 298
ttgaccattaaaggagaatgtgtcc

SEQ ID NO: 200536 - DNA, 25 bp, Artificial
  probe
  misc_feature (1)..(25): SEQ ID NO: 4908; WAN024FCG_at; Start 155; Stop 179
gctatctattcacgctatgtgacca

SEQ ID NO: 200537 - DNA, 25 bp, Artificial
  probe
  misc_feature (1)..(25): SEQ ID NO: 4908; WAN024FCG_at; Start 168; Stop 192
gctatgtgaccaaatcagtggtttg

SEQ ID NO: 200538 - DNA, 25 bp, Artificial
  probe
  misc_feature (1)..(25): SEQ ID NO: 4908; WAN024FCG_at; Start 218; Stop 242
gggtgacactccaatcctctatcaa

SEQ ID NO: 200539 - DNA, 25 bp, Artificial
  probe
  misc_feature (1)..(25): SEQ ID NO: 4908; WAN024FCG_at; Start 145; Stop 169
gcccatggtggctatctattcacgc

SEQ ID NO: 200540 - DNA, 25 bp, Artificial
  probe
  misc_feature (1)..(25): SEQ ID NO: 4908; WAN024FCG_at; Start 139; Stop 163
ggcaatgcccatggtggctatctat

SEQ ID NO: 200541 - DNA, 25 bp, Artificial
  probe
  misc_feature (1)..(25): SEQ ID NO: 4908; WAN024FCG_at; Start 151; Stop 175
ggtggctatctattcacgctatgtg

SEQ ID NO: 200542 - DNA, 25 bp, Artificial
  probe
  misc_feature (1)..(25): SEQ ID NO: 4908; WAN024FCG_at; Start 133; Stop 157
tactatggcaatgcccatggtggct

SEQ ID NO: 200543 - DNA, 25 bp, Artificial
  probe
  misc_feature (1)..(25): SEQ ID NO: 4908; WAN024FCG_at; Start 367; Stop 391
gcaacctttaccatgtttgtcacag

SEQ ID NO: 200544 - DNA, 25 bp, Artificial
  probe
  misc_feature (1)..(25): SEQ ID NO: 4908; WAN024FCG_at; Start 34; Stop 58
cattttgacgctatatctgcctttg

SEQ ID NO: 200545 - DNA, 25 bp, Artificial
  probe
  misc_feature (1)..(25): SEQ ID NO: 4908; WAN024FCG_at; Start 7; Stop 31
tatcaggaggaaacgatgaaagact

SEQ ID NO: 200546 - DNA, 25 bp, Artificial
  probe
  misc_feature (1)..(25): SEQ ID NO: 4908; WAN024FCG_at; Start 246; Stop 270
ccttaaggcaggaaaactcgacgat

SEQ ID NO: 200547 - DNA, 25 bp, Artificial
  probe
  misc_feature (1)..(25): SEQ ID NO: 4908; WAN024FCG_at; Start 73; Stop 97
gaaaaaatgagagatggtcacgttg

SEQ ID NO: 200548 - DNA, 25 bp, Artificial
  probe
  misc_feature (1)..(25): SEQ ID NO: 4908; WAN024FCG_at; Start 98; Stop 122
tggtgacgaccaaagtagtgaactc

SEQ ID NO: 200549 - DNA, 25 bp, Artificial
  probe
  misc_feature (1)..(25): SEQ ID NO: 4908; WAN024FCG_at; Start 188; Stop 212
gtttggtggttatctcgctgggact

SEQ ID NO: 200550 - DNA, 25 bp, Artificial
  probe
  misc_feature (1)..(25): SEQ ID NO: 4908; WAN024FCG_at; Start 49; Stop 73
tctgcctttgaaaattacgaaattg

SEQ ID NO: 200551 - DNA, 25 bp, Artificial
  probe
  misc_feature (1)..(25): SEQ ID NO: 4908; WAN024FCG_at; Start 124; Stop 148
tcgctcaactactatggcaatgccc

SEQ ID NO: 200552 - DNA, 25 bp, Artificial
  probe
  misc_feature (1)..(25): SEQ ID NO: 4908; WAN024FCG_at; Start 91; Stop 115
cacgttgtggtgacgaccaaagtag

SEQ ID NO: 200553 - DNA, 25 bp, Artificial
  probe
  misc_feature (1)..(25): SEQ ID NO: 4908; WAN024FCG_at; Start 265; Stop 289
gacgatgtattgaccattaaaggag

SEQ ID NO: 200554 - DNA, 25 bp, Artificial
  probe
  misc_feature (1)..(25): SEQ ID NO: 4908; WAN024FCG_at; Start 85; Stop 109
gatggtcacgttgtggtgacgacca

SEQ ID NO: 200555 - DNA, 25 bp, Artificial
  probe
  misc_feature (1)..(25): SEQ ID NO: 4908; WAN024FCG_at; Start 278; Stop 302
ccattaaaggagaatgtgtccatca

SEQ ID NO: 200556 - DNA, 25 bp, Artificial
  probe
  misc_feature (1)..(25): SEQ ID NO: 4908; WAN024FCG_at; Start 164; Stop 188
tcacgctatgtgaccaaatcagtgg

SEQ ID NO: 200557 - DNA, 25 bp, Artificial
  probe
  misc_feature (1)..(25): SEQ ID NO: 4908; WAN024FCG_at; Start 371; Stop 395
cctttaccatgtttgtcacaggcca

SEQ ID NO: 200558 - DNA, 25 bp, Artificial
  probe
  misc_feature (1)..(25): SEQ ID NO: 4908; WAN024FCG_at; Start 234; Stop 258
ctctatcaactaccttaaggcagga

SEQ ID NO: 200559 - DNA, 25 bp, Artificial
  probe
  misc_feature (1)..(25): SEQ ID NO: 4908; WAN024FCG_at; Start 257; Stop 281
gaaaactcgacgatgtattgaccat

SEQ ID NO: 200560 - DNA, 25 bp, Artificial
  probe
  misc_feature (1)..(25): SEQ ID NO: 4908; WAN024FCG_at; Start 249; Stop 273
taaggcaggaaaactcgacgatgta

SEQ ID NO: 200561 - DNA, 25 bp, Artificial
  probe
  misc_feature (1)..(25): SEQ ID NO: 4908; WAN024FCG_at; Start 24; Stop 48
gaaagactttcattttgacgctata

SEQ ID NO: 200562 - DNA, 25 bp, Artificial
  probe
  misc_feature (1)..(25): SEQ ID NO: 4908; WAN024FCG_at; Start 40; Stop 64
gacgctatatctgcctttgaaaatt

SEQ ID NO: 200563 - DNA, 25 bp, Artificial
  probe
  misc_feature (1)..(25): SEQ ID NO: 4908; WAN024FCG_at; Start 10; Stop 34
caggaggaaacgatgaaagactttc

SEQ ID NO: 200564 - DNA, 25 bp, Artificial
  probe
  misc_feature (1)..(25): SEQ ID NO: 4908; WAN024FCG_at; Start 181; Stop 205
atcagtggtttggtggttatctcgc

SEQ ID NO: 200565 - DNA, 25 bp, Artificial
  probe
  misc_feature (1)..(25): SEQ ID NO: 4908; WAN024FCG_at; Start 323; Stop 347
tggatgtggatatcaccaatcaaga

SEQ ID NO: 200566 - DNA, 25 bp, Artificial
  probe
  misc_feature (1)..(25): SEQ ID NO: 5822; WAN024FCH_at; Start 217; Stop 241
cctttagaaggtacttgtgataaat

SEQ ID NO: 200567 - DNA, 25 bp, Artificial
  probe
  misc_feature (1)..(25): SEQ ID NO: 5822; WAN024FCH_at; Start 91; Stop 115
tttagaatttctattgtccaacctc

SEQ ID NO: 200568 - DNA, 25 bp, Artificial
  probe
  misc_feature (1)..(25): SEQ ID NO: 5822; WAN024FCH_at; Start 47; Stop 71
tatcttcaagggtaaattctgaacc

SEQ ID NO: 200569 - DNA, 25 bp, Artificial
  probe
  misc_feature (1)..(25): SEQ ID NO: 5822; WAN024FCH_at; Start 167; Stop 191
taactttttctggatctctaacttg

SEQ ID NO: 200570 - DNA, 25 bp, Artificial
  probe
  misc_feature (1)..(25): SEQ ID NO: 5822; WAN024FCH_at; Start 267; Stop 291
tcgtctagcagttggtgcaagtggt

SEQ ID NO: 200571 - DNA, 25 bp, Artificial
  probe
  misc_feature (1)..(25): SEQ ID NO: 5822; WAN024FCH_at; Start 275; Stop 299
cagttggtgcaagtggttttctttg

SEQ ID NO: 200572 - DNA, 25 bp, Artificial
  probe
  misc_feature (1)..(25): SEQ ID NO: 5822; WAN024FCH_at; Start 223; Stop 247
gaaggtacttgtgataaatcaatgt

SEQ ID NO: 200573 - DNA, 25 bp, Artificial
  probe
  misc_feature (1)..(25): SEQ ID NO: 5822; WAN024FCH_at; Start 114; Stop 138
tcttgatgacagagagctcttcctt

SEQ ID NO: 200574 - DNA, 25 bp, Artificial
  probe
  misc_feature (1)..(25): SEQ ID NO: 5822; WAN024FCH_at; Start 185; Stop 209
taacttgtccatcttgcacaagaaa

SEQ ID NO: 200575 - DNA, 25 bp, Artificial
  probe
  misc_feature (1)..(25): SEQ ID NO: 5822; WAN024FCH_at; Start 57; Stop 81
ggtaaattctgaaccctctatctta

SEQ ID NO: 200576 - DNA, 25 bp, Artificial
  probe
  misc_feature (1)..(25): SEQ ID NO: 5822; WAN024FCH_at; Start 123; Stop 147
cagagagctcttccttaaaaataaa

SEQ ID NO: 200577 - DNA, 25 bp, Artificial
  probe
  misc_feature (1)..(25): SEQ ID NO: 5822; WAN024FCH_at; Start 254; Stop 278
caatccaacctgctcgtctagcagt

SEQ ID NO: 200578 - DNA, 25 bp, Artificial
  probe
  misc_feature (1)..(25): SEQ ID NO: 5822; WAN024FCH_at; Start 264; Stop 288
tgctcgtctagcagttggtgcaagt

SEQ ID NO: 200579 - DNA, 25 bp, Artificial
  probe
  misc_feature (1)..(25): SEQ ID NO: 5822; WAN024FCH_at; Start 212; Stop 236
tccttcctttagaaggtacttgtga

SEQ ID NO: 200580 - DNA, 25 bp, Artificial
  probe
  misc_feature (1)..(25): SEQ ID NO: 5822; WAN024FCH_at; Start 38; Stop 62
aacgatacatatcttcaagggtaaa

SEQ ID NO: 200581 - DNA, 25 bp, Artificial
  probe
  misc_feature (1)..(25): SEQ ID NO: 5822; WAN024FCH_at; Start 105; Stop 129
tgtccaacctcttgatgacagagag

SEQ ID NO: 200582 - DNA, 25 bp, Artificial
  probe
  misc_feature (1)..(25): SEQ ID NO: 5822; WAN024FCH_at; Start 235; Stop 259
gataaatcaatgttacaaccaatcc

SEQ ID NO: 200583 - DNA, 25 bp, Artificial
  probe
  misc_feature (1)..(25): SEQ ID NO: 5822; WAN024FCH_at; Start 34; Stop 58
tcaaaacgatacatatcttcaaggg

SEQ ID NO: 200584 - DNA, 25 bp, Artificial
  probe
  misc_feature (1)..(25): SEQ ID NO: 5822; WAN024FCH_at; Start 102; Stop 126
tattgtccaacctcttgatgacaga

SEQ ID NO: 200585 - DNA, 25 bp, Artificial
  probe
  misc_feature (1)..(25): SEQ ID NO: 5822; WAN024FCH_at; Start 26; Stop 50
ggtcactttcaaaacgatacatatc

SEQ ID NO: 200586 - DNA, 25 bp, Artificial
  probe
  misc_feature (1)..(25): SEQ ID NO: 5822; WAN024FCH_at; Start 259; Stop 283
caacctgctcgtctagcagttggtg

SEQ ID NO: 200587 - DNA, 25 bp, Artificial
  probe
  misc_feature (1)..(25): SEQ ID NO: 5822; WAN024FCH_at; Start 22; Stop 46
tttaggtcactttcaaaacgataca

SEQ ID NO: 200588 - DNA, 25 bp, Artificial
  probe
  misc_feature (1)..(25): SEQ ID NO: 5822; WAN024FCH_at; Start 109; Stop 133
caacctcttgatgacagagagctct

SEQ ID NO: 200589 - DNA, 25 bp, Artificial
  probe
  misc_feature (1)..(25): SEQ ID NO: 5822; WAN024FCH_at; Start 67; Stop 91
gaaccctctatcttatctatacaat

SEQ ID NO: 200590 - DNA, 25 bp, Artificial
  probe
  misc_feature (1)..(25): SEQ ID NO: 5822; WAN024FCH_at; Start 160; Stop 184
tcttttgtaactttttctggatctc

SEQ ID NO: 200591 - DNA, 25 bp, Artificial
  probe
  misc_feature (1)..(25): SEQ ID NO: 5822; WAN024FCH_at; Start 271; Stop 295
ctagcagttggtgcaagtggttttc

SEQ ID NO: 200592 - DNA, 25 bp, Artificial
  probe
  misc_feature (1)..(25): SEQ ID NO: 5822; WAN024FCH_at; Start 118; Stop 142
gatgacagagagctcttccttaaaa

SEQ ID NO: 200593 - DNA, 25 bp, Artificial
  probe
  misc_feature (1)..(25): SEQ ID NO: 5822; WAN024FCH_at; Start 53; Stop 77
caagggtaaattctgaaccctctat

SEQ ID NO: 200594 - DNA, 25 bp, Artificial
  probe
  misc_feature (1)..(25): SEQ ID NO: 5822; WAN024FCH_at; Start 245; Stop 269
tgttacaaccaatccaacctgctcg

SEQ ID NO: 200595 - DNA, 25 bp, Artificial
  probe
  misc_feature (1)..(25): SEQ ID NO: 5822; WAN024FCH_at; Start 178; Stop 202
ggatctctaacttgtccatcttgca

SEQ ID NO: 200596 - DNA, 25 bp, Artificial
  probe
  misc_feature (1)..(25): SEQ ID NO: 5822; WAN024FCH_at; Start 194; Stop 218
catcttgcacaagaaatatccttcc

SEQ ID NO: 200597 - DNA, 25 bp, Artificial
  probe
  misc_feature (1)..(25): SEQ ID NO: 5822; WAN024FCH_at; Start 43; Stop 67
tacatatcttcaagggtaaattctg

SEQ ID NO: 200598 - DNA, 25 bp, Artificial
  probe
  misc_feature (1)..(25): SEQ ID NO: 5822; WAN024FCH_at; Start 95; Stop 119
gaatttctattgtccaacctcttga

SEQ ID NO: 200599 - DNA, 25 bp, Artificial
  probe
  misc_feature (1)..(25): SEQ ID NO: 5822; WAN024FCH_at; Start 200; Stop 224
gcacaagaaatatccttcctttaga

SEQ ID NO: 200600 - DNA, 25 bp, Artificial
  probe
  misc_feature (1)..(25): SEQ ID NO: 2236; WAN024FCI_at; Start 369; Stop 393
tattcaaagaaaaccacttgcacca

SEQ ID NO: 200601 - DNA, 25 bp, Artificial
  probe
  misc_feature (1)..(25): SEQ ID NO: 2236; WAN024FCI_at; Start 452; Stop 476
aaggaaggatatttcttgtgcaaga

SEQ ID NO: 200602 - DNA, 25 bp, Artificial
  probe
  misc_feature (1)..(25): SEQ ID NO: 2236; WAN024FCI_at; Start 354; Stop 378
tacaccgaaatcgattattcaaaga

SEQ ID NO: 200603 - DNA, 25 bp, Artificial
  probe
  misc_feature (1)..(25): SEQ ID NO: 2236; WAN024FCI_at; Start 487; Stop 511
agagatccagaaaaagttacaaaag

SEQ ID NO: 200604 - DNA, 25 bp, Artificial
  probe
  misc_feature (1)..(25): SEQ ID NO: 2236; WAN024FCI_at; Start 133; Stop 157
tttgaaaataatcggcctgtagcag

SEQ ID NO: 200605 - DNA, 25 bp, Artificial
  probe
  misc_feature (1)..(25): SEQ ID NO: 2236; WAN024FCI_at; Start 622; Stop 646
gatatgtatcgttttgaaagtgacc

SEQ ID NO: 200606 - DNA, 25 bp, Artificial
  probe
  misc_feature (1)..(25): SEQ ID NO: 2236; WAN024FCI_at; Start 177; Stop 201
tagtgaggagtttgaactaaagagc

SEQ ID NO: 200607 - DNA, 25 bp, Artificial
  probe
  misc_feature (1)..(25): SEQ ID NO: 2236; WAN024FCI_at; Start 434; Stop 458
tatcacaagtaccttctaaaggaag

SEQ ID NO: 200608 - DNA, 25 bp, Artificial
  probe
  misc_feature (1)..(25): SEQ ID NO: 2236; WAN024FCI_at; Start 81; Stop 105
ggtttatcgtcagtcttattgccct

SEQ ID NO: 200609 - DNA, 25 bp, Artificial
  probe
  misc_feature (1)..(25): SEQ ID NO: 2236; WAN024FCI_at; Start 553; Stop 577
tcaagaggttggacaatagaaattc

SEQ ID NO: 200610 - DNA, 25 bp, Artificial
  probe
  misc_feature (1)..(25): SEQ ID NO: 2236; WAN024FCI_at; Start 52; Stop 76
caaaaggcacgtatcttaacggagg

SEQ ID NO: 200611 - DNA, 25 bp, Artificial
  probe
  misc_feature (1)..(25): SEQ ID NO: 2236; WAN024FCI_at; Start 324; Stop 348
taactttcttgtccttccgaagcaa

SEQ ID NO: 200612 - DNA, 25 bp, Artificial
  probe
  misc_feature (1)..(25): SEQ ID NO: 2236; WAN024FCI_at; Start 605; Stop 629
cagaatttacccttgaagatatgta

SEQ ID NO: 200613 - DNA, 25 bp, Artificial
  probe
  misc_feature (1)..(25): SEQ ID NO: 2236; WAN024FCI_at; Start 145; Stop 169
cggcctgtagcagatttttactgta

SEQ ID NO: 200614 - DNA, 25 bp, Artificial
  probe
  misc_feature (1)..(25): SEQ ID NO: 2236; WAN024FCI_at; Start 542; Stop 566
gctctctgtcatcaagaggttggac

SEQ ID NO: 200615 - DNA, 25 bp, Artificial
  probe
  misc_feature (1)..(25): SEQ ID NO: 2236; WAN024FCI_at; Start 245; Stop 269
caacgatgatgaagcgtgtgcaggc

SEQ ID NO: 200616 - DNA, 25 bp, Artificial
  probe
  misc_feature (1)..(25): SEQ ID NO: 2236; WAN024FCI_at; Start 208; Stop 232
ggaaatttttcatcaacaatcaatg

SEQ ID NO: 200617 - DNA, 25 bp, Artificial
  probe
  misc_feature (1)..(25): SEQ ID NO: 2236; WAN024FCI_at; Start 339; Stop 363
tccgaagcaatttgttacaccgaaa

SEQ ID NO: 200618 - DNA, 25 bp, Artificial
  probe
  misc_feature (1)..(25): SEQ ID NO: 2236; WAN024FCI_at; Start 100; Stop 124
tgccctaattgtgggaacaatccct

SEQ ID NO: 200619 - DNA, 25 bp, Artificial
  probe
  misc_feature (1)..(25): SEQ ID NO: 2236; WAN024FCI_at; Start 37; Stop 61
tataaaagtaatagccaaaaggcac

SEQ ID NO: 200620 - DNA, 25 bp, Artificial
  probe
  misc_feature (1)..(25): SEQ ID NO: 2236; WAN024FCI_at; Start 113; Stop 137
ggaacaatcccttaaatcattttga

SEQ ID NO: 200621 - DNA, 25 bp, Artificial
  probe
  misc_feature (1)..(25): SEQ ID NO: 2236; WAN024FCI_at; Start 527; Stop 551
tatttttaaggaagagctctctgtc

SEQ ID NO: 200622 - DNA, 25 bp, Artificial
  probe
  misc_feature (1)..(25): SEQ ID NO: 2236; WAN024FCI_at; Start 403; Stop 427
cgagcaggttggattggttgtaaca

SEQ ID NO: 200623 - DNA, 25 bp, Artificial
  probe
  misc_feature (1)..(25): SEQ ID NO: 2236; WAN024FCI_at; Start 163; Stop 187
tactgtaatcattgtagtgaggagt

SEQ ID NO: 200624 - DNA, 25 bp, Artificial
  probe
  misc_feature (1)..(25): SEQ ID NO: 2236; WAN024FCI_at; Start 591; Stop 615
taagatagagggttcagaatttacc

SEQ ID NO: 200625 - DNA, 25 bp, Artificial
  probe
  misc_feature (1)..(25): SEQ ID NO: 2236; WAN024FCI_at; Start 68; Stop 92
taacggaggattgggtttatcgtca

SEQ ID NO: 200626 - DNA, 25 bp, Artificial
  probe
  misc_feature (1)..(25): SEQ ID NO: 2236; WAN024FCI_at; Start 418; Stop 442
ggttgtaacattgatttatcacaag

SEQ ID NO: 200627 - DNA, 25 bp, Artificial
  probe
  misc_feature (1)..(25): SEQ ID NO: 2236; WAN024FCI_at; Start 258; Stop 282
gcgtgtgcaggcagataataatcct

SEQ ID NO: 200628 - DNA, 25 bp, Artificial
  probe
  misc_feature (1)..(25): SEQ ID NO: 2236; WAN024FCI_at; Start 224; Stop 248
caatcaatgatggtgcttatgcaac

SEQ ID NO: 200629 - DNA, 25 bp, Artificial
  probe
  misc_feature (1)..(25): SEQ ID NO: 2236; WAN024FCI_at; Start 692; Stop 716
ggcaacagcttcaaatattaagaga

SEQ ID NO: 200630 - DNA, 25 bp, Artificial
  probe
  misc_feature (1)..(25): SEQ ID NO: 2236; WAN024FCI_at; Start 677; Stop 701
tcaaagaaaagattaggcaacagct

SEQ ID NO: 200631 - DNA, 25 bp, Artificial
  probe
  misc_feature (1)..(25): SEQ ID NO: 2236; WAN024FCI_at; Start 232; Stop 256
gatggtgcttatgcaacgatgatga

SEQ ID NO: 200632 - DNA, 25 bp, Artificial
  probe
  misc_feature (1)..(25): SEQ ID NO: 2236; WAN024FCI_at; Start 470; Stop 494
tgcaagatggacaagttagagatcc

SEQ ID NO: 200633 - DNA, 25 bp, Artificial
  probe
  misc_feature (1)..(25): SEQ ID NO: 2236; WAN024FCI_at; Start 384; Stop 408
acttgcaccaactgctagacgagca

SEQ ID NO: 200634 - DNA, 25 bp, Artificial
  probe
  misc_feature (1)..(25): SEQ ID NO: 2251; WAN024FCJ_at; Start 202; Stop 226
catatttccaatagcgacagggatc

SEQ ID NO: 200635 - DNA, 25 bp, Artificial
  probe
  misc_feature (1)..(25): SEQ ID NO: 2251; WAN024FCJ_at; Start 78; Stop 102
gaccaatcaaaatagagatagactt

SEQ ID NO: 200636 - DNA, 25 bp, Artificial
  probe
  misc_feature (1)..(25): SEQ ID NO: 2251; WAN024FCJ_at; Start 1; Stop 25
atggacaagtggagctaccgcaaca

SEQ ID NO: 200637 - DNA, 25 bp, Artificial
  probe
  misc_feature (1)..(25): SEQ ID NO: 2251; WAN024FCJ_at; Start 48; Stop 72
tagtagcagcaatggcagttccaac

SEQ ID NO: 200638 - DNA, 25 bp, Artificial
  probe
  misc_feature (1)..(25): SEQ ID NO: 2251; WAN024FCJ_at; Start 10; Stop 34
tggagctaccgcaacaggagagaag

SEQ ID NO: 200639 - DNA, 25 bp, Artificial
  probe
  misc_feature (1)..(25): SEQ ID NO: 2251; WAN024FCJ_at; Start 53; Stop 77
gcagcaatggcagttccaacaacca

SEQ ID NO: 200640 - DNA, 25 bp, Artificial
  probe
  misc_feature (1)..(25): SEQ ID NO: 2251; WAN024FCJ_at; Start 162; Stop 186
gcaagagactttgaccagttggctc

SEQ ID NO: 200641 - DNA, 25 bp, Artificial
  probe
  misc_feature (1)..(25): SEQ ID NO: 2251; WAN024FCJ_at; Start 179; Stop 203
gttggctctggaacgttatttccca

SEQ ID NO: 200642 - DNA, 25 bp, Artificial
  probe
  misc_feature (1)..(25): SEQ ID NO: 2251; WAN024FCJ_at; Start 57; Stop 81
caatggcagttccaacaaccagacc

SEQ ID NO: 200643 - DNA, 25 bp, Artificial
  probe
  misc_feature (1)..(25): SEQ ID NO: 2251; WAN024FCJ_at; Start 199; Stop 223
tcccatatttccaatagcgacaggg

SEQ ID NO: 200644 - DNA, 25 bp, Artificial
  probe
  misc_feature (1)..(25): SEQ ID NO: 2251; WAN024FCJ_at; Start 174; Stop 198
gaccagttggctctggaacgttatt

SEQ ID NO: 200645 - DNA, 25 bp, Artificial
  probe
  misc_feature (1)..(25): SEQ ID NO: 2251; WAN024FCJ_at; Start 208; Stop 232
tccaatagcgacagggatcaaggtt

SEQ ID NO: 200646 - DNA, 25 bp, Artificial
  probe
  misc_feature (1)..(25): SEQ ID NO: 2251; WAN024FCJ_at; Start 92; Stop 116
gagatagacttgataaatcctttgg

SEQ ID NO: 200647 - DNA, 25 bp, Artificial
  probe
  misc_feature (1)..(25): SEQ ID NO: 2251; WAN024FCJ_at; Start 123; Stop 147
tgttgatcaagaggataatcagaac

SEQ ID NO: 200648 - DNA, 25 bp, Artificial
  probe
  misc_feature (1)..(25): SEQ ID NO: 2251; WAN024FCJ_at; Start 16; Stop 40
taccgcaacaggagagaagtccacc

SEQ ID NO: 200649 - DNA, 25 bp, Artificial
  probe
  misc_feature (1)..(25): SEQ ID NO: 2251; WAN024FCJ_at; Start 110; Stop 134
cctttggtaaagatgttgatcaaga

SEQ ID NO: 200650 - DNA, 25 bp, Artificial
  probe
  misc_feature (1)..(25): SEQ ID NO: 2251; WAN024FCJ_at; Start 127; Stop 151
gatcaagaggataatcagaacagta

SEQ ID NO: 200651 - DNA, 25 bp, Artificial
  probe
  misc_feature (1)..(25): SEQ ID NO: 2251; WAN024FCJ_at; Start 98; Stop 122
gacttgataaatcctttggtaaaga

SEQ ID NO: 200652 - DNA, 25 bp, Artificial
  probe
  misc_feature (1)..(25): SEQ ID NO: 2251; WAN024FCJ_at; Start 136; Stop 160
gataatcagaacagtaatagctgca

SEQ ID NO: 200653 - DNA, 25 bp, Artificial
  probe
  misc_feature (1)..(25): SEQ ID NO: 2251; WAN024FCJ_at; Start 153; Stop 177
tagctgcaagcaagagactttgacc

SEQ ID NO: 200654 - DNA, 25 bp, Artificial
  probe
  misc_feature (1)..(25): SEQ ID NO: 2251; WAN024FCJ_at; Start 166; Stop 190
gagactttgaccagttggctctgga

SEQ ID NO: 200655 - DNA, 25 bp, Artificial
  probe
  misc_feature (1)..(25): SEQ ID NO: 2251; WAN024FCJ_at; Start 68; Stop 92
ccaacaaccagaccaatcaaaatag

SEQ ID NO: 200656 - DNA, 25 bp, Artificial
  probe
  misc_feature (1)..(25): SEQ ID NO: 2251; WAN024FCJ_at; Start 31; Stop 55
gaagtccaccaagcccatagtagca

SEQ ID NO: 200657 - DNA, 25 bp, Artificial
  probe
  misc_feature (1)..(25): SEQ ID NO: 2251; WAN024FCJ_at; Start 182; Stop 206
ggctctggaacgttatttcccatat

SEQ ID NO: 200658 - DNA, 25 bp, Artificial
  probe
  misc_feature (1)..(25): SEQ ID NO: 2251; WAN024FCJ_at; Start 28; Stop 52
agagaagtccaccaagcccatagta

SEQ ID NO: 200659 - DNA, 25 bp, Artificial
  probe
  misc_feature (1)..(25): SEQ ID NO: 2251; WAN024FCJ_at; Start 157; Stop 181
tgcaagcaagagactttgaccagtt

SEQ ID NO: 200660 - DNA, 25 bp, Artificial
  probe
  misc_feature (1)..(25): SEQ ID NO: 2251; WAN024FCJ_at; Start 46; Stop 70
catagtagcagcaatggcagttcca

SEQ ID NO: 200661 - DNA, 25 bp, Artificial
  probe
  misc_feature (1)..(25): SEQ ID NO: 2251; WAN024FCJ_at; Start 20; Stop 44
gcaacaggagagaagtccaccaagc

SEQ ID NO: 200662 - DNA, 25 bp, Artificial
  probe
  misc_feature (1)..(25): SEQ ID NO: 2251; WAN024FCJ_at; Start 37; Stop 61
caccaagcccatagtagcagcaatg

SEQ ID NO: 200663 - DNA, 25 bp, Artificial
  probe
  misc_feature (1)..(25): SEQ ID NO: 2251; WAN024FCJ_at; Start 40; Stop 64
caagcccatagtagcagcaatggca

SEQ ID NO: 200664 - DNA, 25 bp, Artificial
  probe
  misc_feature (1)..(25): SEQ ID NO: 2251; WAN024FCJ_at; Start 5; Stop 29
acaagtggagctaccgcaacaggag

SEQ ID NO: 200665 - DNA, 25 bp, Artificial
  probe
  misc_feature (1)..(25): SEQ ID NO: 2251; WAN024FCJ_at; Start 169; Stop 193
actttgaccagttggctctggaacg

SEQ ID NO: 200666 - DNA, 25 bp, Artificial
  probe
  misc_feature (1)..(25): SEQ ID NO: 2251; WAN024FCJ_at; Start 147; Stop 171
cagtaatagctgcaagcaagagact

SEQ ID NO: 200667 - DNA, 25 bp, Artificial
  probe
  misc_feature (1)..(25): SEQ ID NO: 2251; WAN024FCJ_at; Start 142; Stop 166
cagaacagtaatagctgcaagcaag

SEQ ID NO: 200668 - DNA, 25 bp, Artificial
  probe
  misc_feature (1)..(25): SEQ ID NO: 1910; WAN024FCK_at; Start 466; Stop 490
ggtcaaagtctcttgcttgcagcta

SEQ ID NO: 200669 - DNA, 25 bp, Artificial
  probe
  misc_feature (1)..(25): SEQ ID NO: 1910; WAN024FCK_at; Start 699; Stop 723
gatgtgtatcatcgcaacggtgtct

SEQ ID NO: 200670 - DNA, 25 bp, Artificial
  probe
  misc_feature (1)..(25): SEQ ID NO: 1910; WAN024FCK_at; Start 713; Stop 737
caacggtgtctatggttgagtcaac

SEQ ID NO: 200671 - DNA, 25 bp, Artificial
  probe
  misc_feature (1)..(25): SEQ ID NO: 1910; WAN024FCK_at; Start 827; Stop 851
tacttctcggaggaatctttaacac

SEQ ID NO: 200672 - DNA, 25 bp, Artificial
  probe
  misc_feature (1)..(25): SEQ ID NO: 1910; WAN024FCK_at; Start 1185; Stop 1209
gttcttctcaaacggaatcgtcgta

SEQ ID NO: 200673 - DNA, 25 bp, Artificial
  probe
  misc_feature (1)..(25): SEQ ID NO: 1910; WAN024FCK_at; Start 891; Stop 915
taaattgtcaggcatcaaaaaacgc

SEQ ID NO: 200674 - DNA, 25 bp, Artificial
  probe
  misc_feature (1)..(25): SEQ ID NO: 1910; WAN024FCK_at; Start 269; Stop 293
ggcaaagccatggtagtggcgctat

SEQ ID NO: 200675 - DNA, 25 bp, Artificial
  probe
  misc_feature (1)..(25): SEQ ID NO: 1910; WAN024FCK_at; Start 443; Stop 467
gaaataacgttccagagccaactgg

SEQ ID NO: 200676 - DNA, 25 bp, Artificial
  probe
  misc_feature (1)..(25): SEQ ID NO: 1910; WAN024FCK_at; Start 1113; Stop 1137
tgtttcaatcgctgcaggtgtcggt

SEQ ID NO: 200677 - DNA, 25 bp, Artificial
  probe
  misc_feature (1)..(25): SEQ ID NO: 1910; WAN024FCK_at; Start 573; Stop 597
tggaactgccattgctgctactatg

SEQ ID NO: 200678 - DNA, 25 bp, Artificial
  probe
  misc_feature (1)..(25): SEQ ID NO: 1910; WAN024FCK_at; Start 41; Stop 65
gcttgcagcacttactagccatgta

SEQ ID NO: 200679 - DNA, 25 bp, Artificial
  probe
  misc_feature (1)..(25): SEQ ID NO: 1910; WAN024FCK_at; Start 663; Stop 687
tgggatgccaacctttgaaatctca

SEQ ID NO: 200680 - DNA, 25 bp, Artificial
  probe
  misc_feature (1)..(25): SEQ ID NO: 1910; WAN024FCK_at; Start 254; Stop 278
ccttgattatgattgggcaaagcca

SEQ ID NO: 200681 - DNA, 25 bp, Artificial
  probe
  misc_feature (1)..(25): SEQ ID NO: 1910; WAN024FCK_at; Start 420; Stop 444
ccctgtcgctattggaaatatggga

SEQ ID NO: 200682 - DNA, 25 bp, Artificial
  probe
  misc_feature (1)..(25): SEQ ID NO: 1910; WAN024FCK_at; Start 207; Stop 231
gattggactcccagtcgttcttgga

SEQ ID NO: 200683 - DNA, 25 bp, Artificial
  probe
  misc_feature (1)..(25): SEQ ID NO: 1910; WAN024FCK_at; Start 908; Stop 932
aaaaacgcctgccaatctactacgc

SEQ ID NO: 200684 - DNA, 25 bp, Artificial
  probe
  misc_feature (1)..(25): SEQ ID NO: 1910; WAN024FCK_at; Start 70; Stop 94
ggatctatcctggttcccatcatga

SEQ ID NO: 200685 - DNA, 25 bp, Artificial
  probe
  misc_feature (1)..(25): SEQ ID NO: 1910; WAN024FCK_at; Start 619; Stop 643
gttgcggtagctccacttgtccatg

SEQ ID NO: 200686 - DNA, 25 bp, Artificial
  probe
  misc_feature (1)..(25): SEQ ID NO: 1910; WAN024FCK_at; Start 118; Stop 142
gctgagcagttgacctacctgattt

SEQ ID NO: 200687 - DNA, 25 bp, Artificial
  probe
  misc_feature (1)..(25): SEQ ID NO: 1910; WAN024FCK_at; Start 295; Stop 319
tttggtgcccttatcgcatctggga

SEQ ID NO: 200688 - DNA, 25 bp, Artificial
  probe
  misc_feature (1)..(25): SEQ ID NO: 1910; WAN024FCK_at; Start 405; Stop 429
tggtttaaccttgatccctgtcgct

SEQ ID NO: 200689 - DNA, 25 bp, Artificial
  probe
  misc_feature (1)..(25): SEQ ID NO: 1910; WAN024FCK_at; Start 368; Stop 392
tcccatctatcgtaacaggatctgt

SEQ ID NO: 200690 - DNA, 25 bp, Artificial
  probe
  misc_feature (1)..(25): SEQ ID NO: 1910; WAN024FCK_at; Start 1147; Stop 1171
agtaatctctttgtcagcatgccga

SEQ ID NO: 200691 - DNA, 25 bp, Artificial
  probe
  misc_feature (1)..(25): SEQ ID NO: 1910; WAN024FCK_at; Start 945; Stop 969
ggttctccttggactgcttcctaag

SEQ ID NO: 200692 - DNA, 25 bp, Artificial
  probe
  misc_feature (1)..(25): SEQ ID NO: 1910; WAN024FCK_at; Start 87; Stop 111
catcatgattgcgacagcccttggc

SEQ ID NO: 200693 - DNA, 25 bp, Artificial
  probe
  misc_feature (1)..(25): SEQ ID NO: 1910; WAN024FCK_at; Start 10; Stop 34
caagaaaaacactcgcaagcagccg

SEQ ID NO: 200694 - DNA, 25 bp, Artificial
  probe
  misc_feature (1)..(25): SEQ ID NO: 1910; WAN024FCK_at; Start 1127; Stop 1151
caggtgtcggtctcaacaacagtaa

SEQ ID NO: 200695 - DNA, 25 bp, Artificial
  probe
  misc_feature (1)..(25): SEQ ID NO: 1910; WAN024FCK_at; Start 241; Stop 265
cagtcggtcgctcccttgattatga

SEQ ID NO: 200696 - DNA, 25 bp, Artificial
  probe
  misc_feature (1)..(25): SEQ ID NO: 1910; WAN024FCK_at; Start 923; Stop 947
tctactacgcagctggtttcctggt

SEQ ID NO: 200697 - DNA, 25 bp, Artificial
  probe
  misc_feature (1)..(25): SEQ ID NO: 1910; WAN024FCK_at; Start 225; Stop 249
tcttggagttgcattccagtcggtc

SEQ ID NO: 200698 - DNA, 25 bp, Artificial
  probe
  misc_feature (1)..(25): SEQ ID NO: 1910; WAN024FCK_at; Start 1090; Stop 1114
gaacacaacttccttatcgcagctg

SEQ ID NO: 200699 - DNA, 25 bp, Artificial
  probe
  misc_feature (1)..(25): SEQ ID NO: 1910; WAN024FCK_at; Start 318; Stop 342
gatttacgtggttcttgtttcaggc

SEQ ID NO: 200700 - DNA, 25 bp, Artificial
  probe
  misc_feature (1)..(25): SEQ ID NO: 1910; WAN024FCK_at; Start 102; Stop 126
agcccttggctattcagctgagcag

SEQ ID NO: 200701 - DNA, 25 bp, Artificial
  probe
  misc_feature (1)..(25): SEQ ID NO: 1910; WAN024FCK_at; Start 591; Stop 615
tactatgggcttggtggacttctct

SEQ ID NO: 200702 - DNA, 25 bp, Artificial
  probe
  misc_feature (1)..(25): SEQ ID NO: 7205; WAN024FCL_at; Start 218; Stop 242
acgaaggcatcttaactgctaaagg

SEQ ID NO: 200703 - DNA, 25 bp, Artificial
  probe
  misc_feature (1)..(25): SEQ ID NO: 7205; WAN024FCL_at; Start 219; Stop 243
cgaaggcatcttaactgctaaaggc

SEQ ID NO: 200704 - DNA, 25 bp, Artificial
  probe
  misc_feature (1)..(25): SEQ ID NO: 7205; WAN024FCL_at; Start 301; Stop 325
gagaaatccttccaagatggtcgtg

SEQ ID NO: 200705 - DNA, 25 bp, Artificial
  probe
  misc_feature (1)..(25): SEQ ID NO: 7205; WAN024FCL_at; Start 220; Stop 244
gaaggcatcttaactgctaaaggct

SEQ ID NO: 200706 - DNA, 25 bp, Artificial
  probe
  misc_feature (1)..(25): SEQ ID NO: 7205; WAN024FCL_at; Start 222; Stop 246
aggcatcttaactgctaaaggcttg

SEQ ID NO: 200707 - DNA, 25 bp, Artificial
  probe
  misc_feature (1)..(25): SEQ ID NO: 7205; WAN024FCL_at; Start 303; Stop 327
gaaatccttccaagatggtcgtgat

SEQ ID NO: 200708 - DNA, 25 bp, Artificial
  probe
  misc_feature (1)..(25): SEQ ID NO: 7205; WAN024FCL_at; Start 302; Stop 326
agaaatccttccaagatggtcgtga

SEQ ID NO: 200709 - DNA, 25 bp, Artificial
  probe
  misc_feature (1)..(25): SEQ ID NO: 7205; WAN024FCL_at; Start 216; Stop 240
gaacgaaggcatcttaactgctaaa

SEQ ID NO: 200710 - DNA, 25 bp, Artificial
  probe
  misc_feature (1)..(25): SEQ ID NO: 7205; WAN024FCL_at; Start 299; Stop 323
ttgagaaatccttccaagatggtcg

SEQ ID NO: 200711 - DNA, 25 bp, Artificial
  probe
  misc_feature (1)..(25): SEQ ID NO: 7205; WAN024FCL_at; Start 300; Stop 324
tgagaaatccttccaagatggtcgt

SEQ ID NO: 200712 - DNA, 25 bp, Artificial
  probe
  misc_feature (1)..(25): SEQ ID NO: 7205; WAN024FCL_at; Start 221; Stop 245
aaggcatcttaactgctaaaggctt

SEQ ID NO: 200713 - DNA, 25 bp, Artificial
  probe
  misc_feature (1)..(25): SEQ ID NO: 7205; WAN024FCL_at; Start 297; Stop 321
gattgagaaatccttccaagatggt

SEQ ID NO: 200714 - DNA, 25 bp, Artificial
  probe
  misc_feature (1)..(25): SEQ ID NO: 7205; WAN024FCL_at; Start 213; Stop 237
catgaacgaaggcatcttaactgct

SEQ ID NO: 200715 - DNA, 25 bp, Artificial
  probe
  misc_feature (1)..(25): SEQ ID NO: 7205; WAN024FCL_at; Start 217; Stop 241
aacgaaggcatcttaactgctaaag

SEQ ID NO: 200716 - DNA, 25 bp, Artificial
  probe
  misc_feature (1)..(25): SEQ ID NO: 7205; WAN024FCL_at; Start 298; Stop 322
attgagaaatccttccaagatggtc

SEQ ID NO: 200717 - DNA, 25 bp, Artificial
  probe
  misc_feature (1)..(25): SEQ ID NO: 7205; WAN024FCL_at; Start 223; Stop 247
ggcatcttaactgctaaaggcttga

SEQ ID NO: 200718 - DNA, 25 bp, Artificial
  probe
  misc_feature (1)..(25): SEQ ID NO: 7205; WAN024FCL_at; Start 215; Stop 239
tgaacgaaggcatcttaactgctaa

SEQ ID NO: 200719 - DNA, 25 bp, Artificial
  probe
  misc_feature (1)..(25): SEQ ID NO: 7205; WAN024FCL_at; Start 214; Stop 238
atgaacgaaggcatcttaactgcta

SEQ ID NO: 200720 - DNA, 25 bp, Artificial
  probe
  misc_feature (1)..(25): SEQ ID NO: 2022; WAN024FCM_at; Start 87; Stop 111
aatacccgacgcttcaatggttacg

SEQ ID NO: 200721 - DNA, 25 bp, Artificial
  probe
  misc_feature (1)..(25): SEQ ID NO: 2022; WAN024FCM_at; Start 106; Stop 130
gttacgaccttggtaatgccagtag

SEQ ID NO: 200722 - DNA, 25 bp, Artificial
  probe
  misc_feature (1)..(25): SEQ ID NO: 2022; WAN024FCM_at; Start 161; Stop 185
tctctcgcatcaagctaaagtcaac

SEQ ID NO: 200723 - DNA, 25 bp, Artificial
  probe
  misc_feature (1)..(25): SEQ ID NO: 2022; WAN024FCM_at; Start 28; Stop 52
gcttttttggcgaaaatcatgggaa

SEQ ID NO: 200724 - DNA, 25 bp, Artificial
  probe
  misc_feature (1)..(25): SEQ ID NO: 2022; WAN024FCM_at; Start 94; Stop 118
gacgcttcaatggttacgaccttgg

SEQ ID NO: 200725 - DNA, 25 bp, Artificial
  probe
  misc_feature (1)..(25): SEQ ID NO: 2022; WAN024FCM_at; Start 45; Stop 69
catgggaacgtttaaggcttcagct

SEQ ID NO: 200726 - DNA, 25 bp, Artificial
  probe
  misc_feature (1)..(25): SEQ ID NO: 2022; WAN024FCM_at; Start 48; Stop 72
gggaacgtttaaggcttcagctgta

SEQ ID NO: 200727 - DNA, 25 bp, Artificial
  probe
  misc_feature (1)..(25): SEQ ID NO: 2022; WAN024FCM_at; Start 8; Stop 32
cgttcatggtgatgttcttagcttt

SEQ ID NO: 200728 - DNA, 25 bp, Artificial
  probe
  misc_feature (1)..(25): SEQ ID NO: 2022; WAN024FCM_at; Start 201; Stop 225
ggaatctaccttgaggatgttatca

SEQ ID NO: 200729 - DNA, 25 bp, Artificial
  probe
  misc_feature (1)..(25): SEQ ID NO: 2022; WAN024FCM_at; Start 57; Stop 81
taaggcttcagctgtaaaaacggct

SEQ ID NO: 200730 - DNA, 25 bp, Artificial
  probe
  misc_feature (1)..(25): SEQ ID NO: 2022; WAN024FCM_at; Start 228; Stop 252
caagatatgcccatccttgaggatg

SEQ ID NO: 200731 - DNA, 25 bp, Artificial
  probe
  misc_feature (1)..(25): SEQ ID NO: 2022; WAN024FCM_at; Start 239; Stop 263
catccttgaggatgcgctcttctaa

SEQ ID NO: 200732 - DNA, 25 bp, Artificial
  probe
  misc_feature (1)..(25): SEQ ID NO: 2022; WAN024FCM_at; Start 262; Stop 286
aataatttcataagacctcctaaag

SEQ ID NO: 200733 - DNA, 25 bp, Artificial
  probe
  misc_feature (1)..(25): SEQ ID NO: 2022; WAN024FCM_at; Start 246; Stop 270
gaggatgcgctcttctaataatttc

SEQ ID NO: 200734 - DNA, 25 bp, Artificial
  probe
  misc_feature (1)..(25): SEQ ID NO: 2022; WAN024FCM_at; Start 1; Stop 25
atgccttcgttcatggtgatgttct

SEQ ID NO: 200735 - DNA, 25 bp, Artificial
  probe
  misc_feature (1)..(25): SEQ ID NO: 2022; WAN024FCM_at; Start 4; Stop 28
ccttcgttcatggtgatgttcttag

SEQ ID NO: 200736 - DNA, 25 bp, Artificial
  probe
  misc_feature (1)..(25): SEQ ID NO: 2022; WAN024FCM_at; Start 165; Stop 189
tcgcatcaagctaaagtcaacttgg

SEQ ID NO: 200737 - DNA, 25 bp, Artificial
  probe
  misc_feature (1)..(25): SEQ ID NO: 2022; WAN024FCM_at; Start 96; Stop 120
cgcttcaatggttacgaccttggta

SEQ ID NO: 200738 - DNA, 25 bp, Artificial
  probe
  misc_feature (1)..(25): SEQ ID NO: 2022; WAN024FCM_at; Start 145; Stop 169
gcaaaaaccttaccaatctctcgca

SEQ ID NO: 200739 - DNA, 25 bp, Artificial
  probe
  misc_feature (1)..(25): SEQ ID NO: 2022; WAN024FCM_at; Start 168; Stop 192
catcaagctaaagtcaacttggtgg

SEQ ID NO: 200740 - DNA, 25 bp, Artificial
  probe
  misc_feature (1)..(25): SEQ ID NO: 2022; WAN024FCM_at; Start 83; Stop 107
gggcaatacccgacgcttcaatggt

SEQ ID NO: 200741 - DNA, 25 bp, Artificial
  probe
  misc_feature (1)..(25): SEQ ID NO: 2022; WAN024FCM_at; Start 89; Stop 113
tacccgacgcttcaatggttacgac

SEQ ID NO: 200742 - DNA, 25 bp, Artificial
  probe
  misc_feature (1)..(25): SEQ ID NO: 2022; WAN024FCM_at; Start 195; Stop 219
taaaaaggaatctaccttgaggatg

SEQ ID NO: 200743 - DNA, 25 bp, Artificial
  probe
  misc_feature (1)..(25): SEQ ID NO: 2022; WAN024FCM_at; Start 50; Stop 74
gaacgtttaaggcttcagctgtaaa

SEQ ID NO: 200744 - DNA, 25 bp, Artificial
  probe
  misc_feature (1)..(25): SEQ ID NO: 2022; WAN024FCM_at; Start 101; Stop 125
caatggttacgaccttggtaatgcc

SEQ ID NO: 200745 - DNA, 25 bp, Artificial
  probe
  misc_feature (1)..(25): SEQ ID NO: 2022; WAN024FCM_at; Start 42; Stop 66
aatcatgggaacgtttaaggcttca

SEQ ID NO: 200746 - DNA, 25 bp, Artificial
  probe
  misc_feature (1)..(25): SEQ ID NO: 2022; WAN024FCM_at; Start 249; Stop 273
gatgcgctcttctaataatttcata

SEQ ID NO: 200747 - DNA, 25 bp, Artificial
  probe
  misc_feature (1)..(25): SEQ ID NO: 2022; WAN024FCM_at; Start 18; Stop 42
gatgttcttagcttttttggcgaaa

SEQ ID NO: 200748 - DNA, 25 bp, Artificial
  probe
  misc_feature (1)..(25): SEQ ID NO: 2022; WAN024FCM_at; Start 171; Stop 195
caagctaaagtcaacttggtgggtt

SEQ ID NO: 200749 - DNA, 25 bp, Artificial
  probe
  misc_feature (1)..(25): SEQ ID NO: 2022; WAN024FCM_at; Start 158; Stop 182
caatctctcgcatcaagctaaagtc

SEQ ID NO: 200750 - DNA, 25 bp, Artificial
  probe
  misc_feature (1)..(25): SEQ ID NO: 2022; WAN024FCM_at; Start 35; Stop 59
tggcgaaaatcatgggaacgtttaa

SEQ ID NO: 200751 - DNA, 25 bp, Artificial
  probe
  misc_feature (1)..(25): SEQ ID NO: 2022; WAN024FCM_at; Start 231; Stop 255
gatatgcccatccttgaggatgcgc

SEQ ID NO: 200752 - DNA, 25 bp, Artificial
  probe
  misc_feature (1)..(25): SEQ ID NO: 2022; WAN024FCM_at; Start 60; Stop 84
ggcttcagctgtaaaaacggctggg

SEQ ID NO: 200753 - DNA, 25 bp, Artificial
  probe
  misc_feature (1)..(25): SEQ ID NO: 2022; WAN024FCM_at; Start 154; Stop 178
ttaccaatctctcgcatcaagctaa

SEQ ID NO: 200754 - DNA, 25 bp, Artificial
  probe
  misc_feature (1)..(25): SEQ ID NO: 3334; WAN024FCN_at; Start 658; Stop 682
catggcgatgttcctgaacgctaca

SEQ ID NO: 200755 - DNA, 25 bp, Artificial
  probe
  misc_feature (1)..(25): SEQ ID NO: 3334; WAN024FCN_at; Start 814; Stop 838
gaccatacaccgattgtcttggaaa

SEQ ID NO: 200756 - DNA, 25 bp, Artificial
  probe
  misc_feature (1)..(25): SEQ ID NO: 3334; WAN024FCN_at; Start 506; Stop 530
tccttgcgaccggtgactacaacgt

SEQ ID NO: 200757 - DNA, 25 bp, Artificial
  probe
  misc_feature (1)..(25): SEQ ID NO: 3334; WAN024FCN_at; Start 255; Stop 279
ccgtaaaggctatgctggaaccatg

SEQ ID NO: 200758 - DNA, 25 bp, Artificial
  probe
  misc_feature (1)..(25): SEQ ID NO: 3334; WAN024FCN_at; Start 429; Stop 453
caaacgcttggaagaacgccaagtc

SEQ ID NO: 200759 - DNA, 25 bp, Artificial
  probe
  misc_feature (1)..(25): SEQ ID NO: 3334; WAN024FCN_at; Start 168; Stop 192
caaaggacctacaaagaaacacgtg

SEQ ID NO: 200760 - DNA, 25 bp, Artificial
  probe
  misc_feature (1)..(25): SEQ ID NO: 3334; WAN024FCN_at; Start 201; Stop 225
agaagaactcttcccaggctacgaa

SEQ ID NO: 200761 - DNA, 25 bp, Artificial
  probe
  misc_feature (1)..(25): SEQ ID NO: 3334; WAN024FCN_at; Start 708; Stop 732
ttctaaaatcaacaatacaggctgg

SEQ ID NO: 200762 - DNA, 25 bp, Artificial
  probe
  misc_feature (1)..(25): SEQ ID NO: 3334; WAN024FCN_at; Start 113; Stop 137
ccttggtcgctgaaaatgctgatat

SEQ ID NO: 200763 - DNA, 25 bp, Artificial
  probe
  misc_feature (1)..(25): SEQ ID NO: 3334; WAN024FCN_at; Start 490; Stop 514
gacaaagaaaaaccagtccttgcga

SEQ ID NO: 200764 - DNA, 25 bp, Artificial
  probe
  misc_feature (1)..(25): SEQ ID NO: 3334; WAN024FCN_at; Start 752; Stop 776
caagtaaccgtatcgctgacaaggt

SEQ ID NO: 200765 - DNA, 25 bp, Artificial
  probe
  misc_feature (1)..(25): SEQ ID NO: 3334; WAN024FCN_at; Start 588; Stop 612
tactgacgaggaacgtgctggattt

SEQ ID NO: 200766 - DNA, 25 bp, Artificial
  probe
  misc_feature (1)..(25): SEQ ID NO: 3334; WAN024FCN_at; Start 793; Stop 817
attgactcaggtgctcgccaagacc

SEQ ID NO: 200767 - DNA, 25 bp, Artificial
  probe
  misc_feature (1)..(25): SEQ ID NO: 3334; WAN024FCN_at; Start 673; Stop 697
gaacgctacacttggtgggcacaac

SEQ ID NO: 200768 - DNA, 25 bp, Artificial
  probe
  misc_feature (1)..(25): SEQ ID NO: 3334; WAN024FCN_at; Start 766; Stop 790
gctgacaaggtcactaaatctgata

SEQ ID NO: 200769 - DNA, 25 bp, Artificial
  probe
  misc_feature (1)..(25): SEQ ID NO: 3334; WAN024FCN_at; Start 69; Stop 93
tagtgactcagctcgtgccaaattg

SEQ ID NO: 200770 - DNA, 25 bp, Artificial
  probe
  misc_feature (1)..(25): SEQ ID NO: 3334; WAN024FCN_at; Start 40; Stop 64
aatattgattccctaaacgctgccc

SEQ ID NO: 200771 - DNA, 25 bp, Artificial
  probe
  misc_feature (1)..(25): SEQ ID NO: 3334; WAN024FCN_at; Start 151; Stop 175
gaaaccaagctttctgccaaaggac

SEQ ID NO: 200772 - DNA, 25 bp, Artificial
  probe
  misc_feature (1)..(25): SEQ ID NO: 3334; WAN024FCN_at; Start 416; Stop 440
ctggtgacggtctcaaacgcttgga

SEQ ID NO: 200773 - DNA, 25 bp, Artificial
  probe
  misc_feature (1)..(25): SEQ ID NO: 3334; WAN024FCN_at; Start 323; Stop 347
aaatcggtgccccttctaccatgga

SEQ ID NO: 200774 - DNA, 25 bp, Artificial
  probe
  misc_feature (1)..(25): SEQ ID NO: 3334; WAN024FCN_at; Start 240; Stop 264
ttcccaagagcctgcccgtaaaggc

SEQ ID NO: 200775 - DNA, 25 bp, Artificial
  probe
  misc_feature (1)..(25): SEQ ID NO: 3334; WAN024FCN_at; Start 572; Stop 596
gccgttcacctggatttactgacga

SEQ ID NO: 200776 - DNA, 25 bp, Artificial
  probe
  misc_feature (1)..(25): SEQ ID NO: 3334; WAN024FCN_at; Start 523; Stop 547
tacaacgtagcccacaatgaaatcg

SEQ ID NO: 200777 - DNA, 25 bp, Artificial
  probe
  misc_feature (1)..(25): SEQ ID NO: 3334; WAN024FCN_at; Start 555; Stop 579
aaatcctgctagcaaccgccgttca

SEQ ID NO: 200778 - DNA, 25 bp, Artificial
  probe
  misc_feature (1)..(25): SEQ ID NO: 3334; WAN024FCN_at; Start 401; Stop 425
tttacactccaaacgctggtgacgg

SEQ ID NO: 200779 - DNA, 25 bp, Artificial
  probe
  misc_feature (1)..(25): SEQ ID NO: 3334; WAN024FCN_at; Start 688; Stop 712
tgggcacaacgcagcaaaacttcta

SEQ ID NO: 200780 - DNA, 25 bp, Artificial
  probe
  misc_feature (1)..(25): SEQ ID NO: 3334; WAN024FCN_at; Start 540; Stop 564
tgaaatcgaccttgcaaatcctgct

SEQ ID NO: 200781 - DNA, 25 bp, Artificial
  probe
  misc_feature (1)..(25): SEQ ID NO: 3334; WAN024FCN_at; Start 737; Stop 761
tcgactactggctcacaagtaaccg

SEQ ID NO: 200782 - DNA, 25 bp, Artificial
  probe
  misc_feature (1)..(25): SEQ ID NO: 3334; WAN024FCN_at; Start 378; Stop 402
tgatgcatttttcgtaacccaagtt

SEQ ID NO: 200783 - DNA, 25 bp, Artificial
  probe
  misc_feature (1)..(25): SEQ ID NO: 3334; WAN024FCN_at; Start 100; Stop 124
gaagtcctacaaaccttggtcgctg

SEQ ID NO: 200784 - DNA, 25 bp, Artificial
  probe
  misc_feature (1)..(25): SEQ ID NO: 3334; WAN024FCN_at; Start 53; Stop 77
taaacgctgccctaactagtgactc

SEQ ID NO: 200785 - DNA, 25 bp, Artificial
  probe
  misc_feature (1)..(25): SEQ ID NO: 3334; WAN024FCN_at; Start 85; Stop 109
gccaaattgtcccaagaagtcctac

SEQ ID NO: 200786 - DNA, 25 bp, Artificial
  probe
  misc_feature (1)..(25): SEQ ID NO: 3334; WAN024FCN_at; Start 468; Stop 492
tgctgagtatttggctgaactagac

SEQ ID NO: 200787 - DNA, 25 bp, Artificial
  probe
  misc_feature (1)..(25): SEQ ID NO: 3334; WAN024FCN_at; Start 723; Stop 747
tacaggctggagaatcgactactgg

SEQ ID NO: 200788 - DNA, 25 bp, Artificial
  probe
  misc_feature (1)..(25): SEQ ID NO: 983; WAN024FCO_at; Start 167; Stop 191
tggccttatttagctctgcttttgg

SEQ ID NO: 200789 - DNA, 25 bp, Artificial
  probe
  misc_feature (1)..(25): SEQ ID NO: 983; WAN024FCO_at; Start 75; Stop 99
tgttctattagctgtgacagttttt

SEQ ID NO: 200790 - DNA, 25 bp, Artificial
  probe
  misc_feature (1)..(25): SEQ ID NO: 983; WAN024FCO_at; Start 24; Stop 48
tgtactcagccaaatcggtcagcaa

SEQ ID NO: 200791 - DNA, 25 bp, Artificial
  probe
  misc_feature (1)..(25): SEQ ID NO: 983; WAN024FCO_at; Start 46; Stop 70
caaaatggtatcatggttggctttg

SEQ ID NO: 200792 - DNA, 25 bp, Artificial
  probe
  misc_feature (1)..(25): SEQ ID NO: 983; WAN024FCO_at; Start 19; Stop 43
gactatgtactcagccaaatcggtc

SEQ ID NO: 200793 - DNA, 25 bp, Artificial
  probe
  misc_feature (1)..(25): SEQ ID NO: 983; WAN024FCO_at; Start 137; Stop 161
aatttcgtgagttggtcatgatttc

SEQ ID NO: 200794 - DNA, 25 bp, Artificial
  probe
  misc_feature (1)..(25): SEQ ID NO: 983; WAN024FCO_at; Start 26; Stop 50
tactcagccaaatcggtcagcaaaa

SEQ ID NO: 200795 - DNA, 25 bp, Artificial
  probe
  misc_feature (1)..(25): SEQ ID NO: 983; WAN024FCO_at; Start 49; Stop 73
aatggtatcatggttggctttggga

SEQ ID NO: 200796 - DNA, 25 bp, Artificial
  probe
  misc_feature (1)..(25): SEQ ID NO: 983; WAN024FCO_at; Start 22; Stop 46
tatgtactcagccaaatcggtcagc

SEQ ID NO: 200797 - DNA, 25 bp, Artificial
  probe
  misc_feature (1)..(25): SEQ ID NO: 983; WAN024FCO_at; Start 42; Stop 66
tcagcaaaatggtatcatggttggc

SEQ ID NO: 200798 - DNA, 25 bp, Artificial
  probe
  misc_feature (1)..(25): SEQ ID NO: 983; WAN024FCO_at; Start 40; Stop 64
ggtcagcaaaatggtatcatggttg

SEQ ID NO: 200799 - DNA, 25 bp, Artificial
  probe
  misc_feature (1)..(25): SEQ ID NO: 983; WAN024FCO_at; Start 165; Stop 189
tctggccttatttagctctgctttt

SEQ ID NO: 200800 - DNA, 25 bp, Artificial
  probe
  misc_feature (1)..(25): SEQ ID NO: 983; WAN024FCO_at; Start 57; Stop 81
catggttggctttgggattgttcta

SEQ ID NO: 200801 - DNA, 25 bp, Artificial
  probe
  misc_feature (1)..(25): SEQ ID NO: 983; WAN024FCO_at; Start 30; Stop 54
cagccaaatcggtcagcaaaatggt

SEQ ID NO: 200802 - DNA, 25 bp, Artificial
  probe
  misc_feature (1)..(25): SEQ ID NO: 983; WAN024FCO_at; Start 38; Stop 62
tcggtcagcaaaatggtatcatggt

SEQ ID NO: 200803 - DNA, 25 bp, Artificial
  probe
  misc_feature (1)..(25): SEQ ID NO: 983; WAN024FCO_at; Start 60; Stop 84
ggttggctttgggattgttctatta

SEQ ID NO: 200804 - DNA, 25 bp, Artificial
  probe
  misc_feature (1)..(25): SEQ ID NO: 983; WAN024FCO_at; Start 13; Stop 37
tcttatgactatgtactcagccaaa

SEQ ID NO: 200805 - DNA, 25 bp, Artificial
  probe
  misc_feature (1)..(25): SEQ ID NO: 983; WAN024FCO_at; Start 70; Stop 94
gggattgttctattagctgtgacag

SEQ ID NO: 200806 - DNA, 25 bp, Artificial
  probe
  misc_feature (1)..(25): SEQ ID NO: 983; WAN024FCO_at; Start 34; Stop 58
caaatcggtcagcaaaatggtatca

SEQ ID NO: 200807 - DNA, 25 bp, Artificial
  probe
  misc_feature (1)..(25): SEQ ID NO: 983; WAN024FCO_at; Start 18; Stop 42
tgactatgtactcagccaaatcggt

SEQ ID NO: 200808 - DNA, 25 bp, Artificial
  probe
  misc_feature (1)..(25): SEQ ID NO: 983; WAN024FCO_at; Start 32; Stop 56
gccaaatcggtcagcaaaatggtat

SEQ ID NO: 200809 - DNA, 25 bp, Artificial
  probe
  misc_feature (1)..(25): SEQ ID NO: 983; WAN024FCO_at; Start 25; Stop 49
gtactcagccaaatcggtcagcaaa

SEQ ID NO: 200810 - DNA, 25 bp, Artificial
  probe
  misc_feature (1)..(25): SEQ ID NO: 983; WAN024FCO_at; Start 29; Stop 53
tcagccaaatcggtcagcaaaatgg

SEQ ID NO: 200811 - DNA, 25 bp, Artificial
  probe
  misc_feature (1)..(25): SEQ ID NO: 983; WAN024FCO_at; Start 172; Stop 196
ttatttagctctgcttttggtcagc

SEQ ID NO: 200812 - DNA, 25 bp, Artificial
  probe
  misc_feature (1)..(25): SEQ ID NO: 983; WAN024FCO_at; Start 16; Stop 40
tatgactatgtactcagccaaatcg

SEQ ID NO: 200813 - DNA, 25 bp, Artificial
  probe
  misc_feature (1)..(25): SEQ ID NO: 983; WAN024FCO_at; Start 72; Stop 96
gattgttctattagctgtgacagtt

SEQ ID NO: 200814 - DNA, 25 bp, Artificial
  probe
  misc_feature (1)..(25): SEQ ID NO: 983; WAN024FCO_at; Start 90; Stop 114
gacagttttttttgctttcaaggca

SEQ ID NO: 200815 - DNA, 25 bp, Artificial
  probe
  misc_feature (1)..(25): SEQ ID NO: 983; WAN024FCO_at; Start 66; Stop 90
ctttgggattgttctattagctgtg

SEQ ID NO: 200816 - DNA, 25 bp, Artificial
  probe
  misc_feature (1)..(25): SEQ ID NO: 983; WAN024FCO_at; Start 2; Stop 26
tgaaattctactcttatgactatgt

SEQ ID NO: 200817 - DNA, 25 bp, Artificial
  probe
  misc_feature (1)..(25): SEQ ID NO: 983; WAN024FCO_at; Start 139; Stop 163
tttcgtgagttggtcatgatttcag

SEQ ID NO: 200818 - DNA, 25 bp, Artificial
  probe
  misc_feature (1)..(25): SEQ ID NO: 983; WAN024FCO_at; Start 36; Stop 60
aatcggtcagcaaaatggtatcatg

SEQ ID NO: 200819 - DNA, 25 bp, Artificial
  probe
  misc_feature (1)..(25): SEQ ID NO: 983; WAN024FCO_at; Start 10; Stop 34
tactcttatgactatgtactcagcc

SEQ ID NO: 200820 - DNA, 25 bp, Artificial
  probe
  misc_feature (1)..(25): SEQ ID NO: 983; WAN024FCO_at; Start 20; Stop 44
actatgtactcagccaaatcggtca

SEQ ID NO: 200821 - DNA, 25 bp, Artificial
  probe
  misc_feature (1)..(25): SEQ ID NO: 983; WAN024FCO_at; Start 43; Stop 67
cagcaaaatggtatcatggttggct

SEQ ID NO: 200822 - DNA, 25 bp, Artificial
  probe
  misc_feature (1)..(25): SEQ ID NO: 3404; WAN024FCP_at; Start 70; Stop 94
catttcatcgaggttgtttccaaag

SEQ ID NO: 200823 - DNA, 25 bp, Artificial
  probe
  misc_feature (1)..(25): SEQ ID NO: 3404; WAN024FCP_at; Start 148; Stop 172
ggcgcacttatcaaggtgggagatc

SEQ ID NO: 200824 - DNA, 25 bp, Artificial
  probe
  misc_feature (1)..(25): SEQ ID NO: 3404; WAN024FCP_at; Start 129; Stop 153
tacttccacaaacacagatggcgca

SEQ ID NO: 200825 - DNA, 25 bp, Artificial
  probe
  misc_feature (1)..(25): SEQ ID NO: 3404; WAN024FCP_at; Start 43; Stop 67
tctaacaataaatttcaaacttcac

SEQ ID NO: 200826 - DNA, 25 bp, Artificial
  probe
  misc_feature (1)..(25): SEQ ID NO: 3404; WAN024FCP_at; Start 207; Stop 231
caagtacctgttagagaaagtcgaa

SEQ ID NO: 200827 - DNA, 25 bp, Artificial
  probe
  misc_feature (1)..(25): SEQ ID NO: 3404; WAN024FCP_at; Start 203; Stop 227
cagacaagtacctgttagagaaagt

SEQ ID NO: 200828 - DNA, 25 bp, Artificial
  probe
  misc_feature (1)..(25): SEQ ID NO: 3404; WAN024FCP_at; Start 36; Stop 60
tcaagtttctaacaataaatttcaa

SEQ ID NO: 200829 - DNA, 25 bp, Artificial
  probe
  misc_feature (1)..(25): SEQ ID NO: 3404; WAN024FCP_at; Start 222; Stop 246
gaaagtcgaattgtataagacagac

SEQ ID NO: 200830 - DNA, 25 bp, Artificial
  probe
  misc_feature (1)..(25): SEQ ID NO: 3404; WAN024FCP_at; Start 213; Stop 237
cctgttagagaaagtcgaattgtat

SEQ ID NO: 200831 - DNA, 25 bp, Artificial
  probe
  misc_feature (1)..(25): SEQ ID NO: 3404; WAN024FCP_at; Start 246; Stop 270
cgcaattgaactggtggatgtgaac

SEQ ID NO: 200832 - DNA, 25 bp, Artificial
  probe
  misc_feature (1)..(25): SEQ ID NO: 3404; WAN024FCP_at; Start 67; Stop 91
cttcatttcatcgaggttgtttcca

SEQ ID NO: 200833 - DNA, 25 bp, Artificial
  probe
  misc_feature (1)..(25): SEQ ID NO: 3404; WAN024FCP_at; Start 193; Stop 217
ggaagtgagccagacaagtacctgt

SEQ ID NO: 200834 - DNA, 25 bp, Artificial
  probe
  misc_feature (1)..(25): SEQ ID NO: 3404; WAN024FCP_at; Start 135; Stop 159
cacaaacacagatggcgcacttatc

SEQ ID NO: 200835 - DNA, 25 bp, Artificial
  probe
  misc_feature (1)..(25): SEQ ID NO: 3404; WAN024FCP_at; Start 132; Stop 156
ttccacaaacacagatggcgcactt

SEQ ID NO: 200836 - DNA, 25 bp, Artificial
  probe
  misc_feature (1)..(25): SEQ ID NO: 3404; WAN024FCP_at; Start 237; Stop 261
taagacagacgcaattgaactggtg

SEQ ID NO: 200837 - DNA, 25 bp, Artificial
  probe
  misc_feature (1)..(25): SEQ ID NO: 3404; WAN024FCP_at; Start 158; Stop 182
tcaaggtgggagatcgctattatcg

SEQ ID NO: 200838 - DNA, 25 bp, Artificial
  probe
  misc_feature (1)..(25): SEQ ID NO: 3404; WAN024FCP_at; Start 108; Stop 132
caagtcagaagtctatgttaatact

SEQ ID NO: 200839 - DNA, 25 bp, Artificial
  probe
  misc_feature (1)..(25): SEQ ID NO: 3404; WAN024FCP_at; Start 75; Stop 99
catcgaggttgtttccaaagatttg

SEQ ID NO: 200840 - DNA, 25 bp, Artificial
  probe
  misc_feature (1)..(25): SEQ ID NO: 3404; WAN024FCP_at; Start 143; Stop 167
cagatggcgcacttatcaaggtggg

SEQ ID NO: 200841 - DNA, 25 bp, Artificial
  probe
  misc_feature (1)..(25): SEQ ID NO: 3404; WAN024FCP_at; Start 198; Stop 222
tgagccagacaagtacctgttagag

SEQ ID NO: 200842 - DNA, 25 bp, Artificial
  probe
  misc_feature (1)..(25): SEQ ID NO: 3404; WAN024FCP_at; Start 150; Stop 174
cgcacttatcaaggtgggagatcgc

SEQ ID NO: 200843 - DNA, 25 bp, Artificial
  probe
  misc_feature (1)..(25): SEQ ID NO: 3404; WAN024FCP_at; Start 249; Stop 273
aattgaactggtggatgtgaacaaa

SEQ ID NO: 200844 - DNA, 25 bp, Artificial
  probe
  misc_feature (1)..(25): SEQ ID NO: 3404; WAN024FCP_at; Start 226; Stop 250
gtcgaattgtataagacagacgcaa

SEQ ID NO: 200845 - DNA, 25 bp, Artificial
  probe
  misc_feature (1)..(25): SEQ ID NO: 3404; WAN024FCP_at; Start 163; Stop 187
gtgggagatcgctattatcgtgccc

SEQ ID NO: 200846 - DNA, 25 bp, Artificial
  probe
  misc_feature (1)..(25): SEQ ID NO: 3404; WAN024FCP_at; Start 58; Stop 82
caaacttcacttcatttcatcgagg

SEQ ID NO: 200847 - DNA, 25 bp, Artificial
  probe
  misc_feature (1)..(25): SEQ ID NO: 3404; WAN024FCP_at; Start 113; Stop 137
cagaagtctatgttaatacttccac

SEQ ID NO: 200848 - DNA, 25 bp, Artificial
  probe
  misc_feature (1)..(25): SEQ ID NO: 3404; WAN024FCP_at; Start 167; Stop 191
gagatcgctattatcgtgccctaaa

SEQ ID NO: 200849 - DNA, 25 bp, Artificial
  probe
  misc_feature (1)..(25): SEQ ID NO: 3404; WAN024FCP_at; Start 211; Stop 235
tacctgttagagaaagtcgaattgt

SEQ ID NO: 200850 - DNA, 25 bp, Artificial
  probe
  misc_feature (1)..(25): SEQ ID NO: 3404; WAN024FCP_at; Start 126; Stop 150
taatacttccacaaacacagatggc

SEQ ID NO: 200851 - DNA, 25 bp, Artificial
  probe
  misc_feature (1)..(25): SEQ ID NO: 3404; WAN024FCP_at; Start 240; Stop 264
gacagacgcaattgaactggtggat

SEQ ID NO: 200852 - DNA, 25 bp, Artificial
  probe
  misc_feature (1)..(25): SEQ ID NO: 3404; WAN024FCP_at; Start 233; Stop 257
tgtataagacagacgcaattgaact

SEQ ID NO: 200853 - DNA, 25 bp, Artificial
  probe
  misc_feature (1)..(25): SEQ ID NO: 3404; WAN024FCP_at; Start 141; Stop 165
cacagatggcgcacttatcaaggtg

SEQ ID NO: 200854 - DNA, 25 bp, Artificial
  probe
  misc_feature (1)..(25): SEQ ID NO: 3404; WAN024FCP_at; Start 152; Stop 176
cacttatcaaggtgggagatcgcta

SEQ ID NO: 200855 - DNA, 25 bp, Artificial
  probe
  misc_feature (1)..(25): SEQ ID NO: 3404; WAN024FCP_at; Start 61; Stop 85
acttcacttcatttcatcgaggttg

SEQ ID NO: 200856 - DNA, 25 bp, Artificial
  probe
  misc_feature (1)..(25): SEQ ID NO: 7070; WAN024FCQ_at; Start 31; Stop 55
cagtcacgacgttgtaaaacgacgg

SEQ ID NO: 200857 - DNA, 25 bp, Artificial
  probe
  misc_feature (1)..(25): SEQ ID NO: 7070; WAN024FCQ_at; Start 40; Stop 64
cgttgtaaaacgacggccagtgaat

SEQ ID NO: 200858 - DNA, 25 bp, Artificial
  probe
  misc_feature (1)..(25): SEQ ID NO: 7070; WAN024FCQ_at; Start 45; Stop 69
taaaacgacggccagtgaattcgag

SEQ ID NO: 200859 - DNA, 25 bp, Artificial
  probe
  misc_feature (1)..(25): SEQ ID NO: 7070; WAN024FCQ_at; Start 55; Stop 79
gccagtgaattcgagctcggtaccc

SEQ ID NO: 200860 - DNA, 25 bp, Artificial
  probe
  misc_feature (1)..(25): SEQ ID NO: 7070; WAN024FCQ_at; Start 53; Stop 77
cggccagtgaattcgagctcggtac

SEQ ID NO: 200861 - DNA, 25 bp, Artificial
  probe
  misc_feature (1)..(25): SEQ ID NO: 7070; WAN024FCQ_at; Start 68; Stop 92
agctcggtaccctgagaaaaaacat

SEQ ID NO: 200862 - DNA, 25 bp, Artificial
  probe
  misc_feature (1)..(25): SEQ ID NO: 7070; WAN024FCQ_at; Start 67; Stop 91
gagctcggtaccctgagaaaaaaca

SEQ ID NO: 200863 - DNA, 25 bp, Artificial
  probe
  misc_feature (1)..(25): SEQ ID NO: 7070; WAN024FCQ_at; Start 50; Stop 74
cgacggccagtgaattcgagctcgg

SEQ ID NO: 200864 - DNA, 25 bp, Artificial
  probe
  misc_feature (1)..(25): SEQ ID NO: 7070; WAN024FCQ_at; Start 44; Stop 68
gtaaaacgacggccagtgaattcga

SEQ ID NO: 200865 - DNA, 25 bp, Artificial
  probe
  misc_feature (1)..(25): SEQ ID NO: 7070; WAN024FCQ_at; Start 38; Stop 62
gacgttgtaaaacgacggccagtga

SEQ ID NO: 200866 - DNA, 25 bp, Artificial
  probe
  misc_feature (1)..(25): SEQ ID NO: 7070; WAN024FCQ_at; Start 52; Stop 76
acggccagtgaattcgagctcggta

SEQ ID NO: 200867 - DNA, 25 bp, Artificial
  probe
  misc_feature (1)..(25): SEQ ID NO: 7070; WAN024FCQ_at; Start 47; Stop 71
aaacgacggccagtgaattcgagct

SEQ ID NO: 200868 - DNA, 25 bp, Artificial
  probe
  misc_feature (1)..(25): SEQ ID NO: 7070; WAN024FCQ_at; Start 37; Stop 61
cgacgttgtaaaacgacggccagtg

SEQ ID NO: 200869 - DNA, 25 bp, Artificial
  probe
  misc_feature (1)..(25): SEQ ID NO: 7070; WAN024FCQ_at; Start 48; Stop 72
aacgacggccagtgaattcgagctc

SEQ ID NO: 200870 - DNA, 25 bp, Artificial
  probe
  misc_feature (1)..(25): SEQ ID NO: 7070; WAN024FCQ_at; Start 35; Stop 59
cacgacgttgtaaaacgacggccag

SEQ ID NO: 200871 - DNA, 25 bp, Artificial
  probe
  misc_feature (1)..(25): SEQ ID NO: 7070; WAN024FCQ_at; Start 51; Stop 75
gacggccagtgaattcgagctcggt

SEQ ID NO: 200872 - DNA, 25 bp, Artificial
  probe
  misc_feature (1)..(25): SEQ ID NO: 7070; WAN024FCQ_at; Start 28; Stop 52
tcccagtcacgacgttgtaaaacga

SEQ ID NO: 200873 - DNA, 25 bp, Artificial
  probe
  misc_feature (1)..(25): SEQ ID NO: 7070; WAN024FCQ_at; Start 49; Stop 73
acgacggccagtgaattcgagctcg

SEQ ID NO: 200874 - DNA, 25 bp, Artificial
  probe
  misc_feature (1)..(25): SEQ ID NO: 7070; WAN024FCQ_at; Start 54; Stop 78
ggccagtgaattcgagctcggtacc

SEQ ID NO: 200875 - DNA, 25 bp, Artificial
  probe
  misc_feature (1)..(25): SEQ ID NO: 7070; WAN024FCQ_at; Start 30; Stop 54
ccagtcacgacgttgtaaaacgacg

SEQ ID NO: 200876 - DNA, 25 bp, Artificial
  probe
  misc_feature (1)..(25): SEQ ID NO: 7070; WAN024FCQ_at; Start 43; Stop 67
tgtaaaacgacggccagtgaattcg

SEQ ID NO: 200877 - DNA, 25 bp, Artificial
  probe
  misc_feature (1)..(25): SEQ ID NO: 7070; WAN024FCQ_at; Start 69; Stop 93
gctcggtaccctgagaaaaaacatc

SEQ ID NO: 200878 - DNA, 25 bp, Artificial
  probe
  misc_feature (1)..(25): SEQ ID NO: 7070; WAN024FCQ_at; Start 17; Stop 41
cgccagggttttcccagtcacgacg

SEQ ID NO: 200879 - DNA, 25 bp, Artificial
  probe
  misc_feature (1)..(25): SEQ ID NO: 7070; WAN024FCQ_at; Start 42; Stop 66
ttgtaaaacgacggccagtgaattc

SEQ ID NO: 200880 - DNA, 25 bp, Artificial
  probe
  misc_feature (1)..(25): SEQ ID NO: 7070; WAN024FCQ_at; Start 20; Stop 44
cagggttttcccagtcacgacgttg

SEQ ID NO: 200881 - DNA, 25 bp, Artificial
  probe
  misc_feature (1)..(25): SEQ ID NO: 7070; WAN024FCQ_at; Start 34; Stop 58
tcacgacgttgtaaaacgacggcca

SEQ ID NO: 200882 - DNA, 25 bp, Artificial
  probe
  misc_feature (1)..(25): SEQ ID NO: 7070; WAN024FCQ_at; Start 46; Stop 70
aaaacgacggccagtgaattcgagc

SEQ ID NO: 200883 - DNA, 25 bp, Artificial
  probe
  misc_feature (1)..(25): SEQ ID NO: 3997; WAN024FCR_at; Start 2; Stop 26
tgataggttcctcccagagtcaaga

SEQ ID NO: 200884 - DNA, 25 bp, Artificial
  probe
  misc_feature (1)..(25): SEQ ID NO: 3997; WAN024FCR_at; Start 132; Stop 156
ggccctgtctcatcttcgccagaga

SEQ ID NO: 200885 - DNA, 25 bp, Artificial
  probe
  misc_feature (1)..(25): SEQ ID NO: 3997; WAN024FCR_at; Start 172; Stop 196
ttctgtttcagagtcaatattggct

SEQ ID NO: 200886 - DNA, 25 bp, Artificial
  probe
  misc_feature (1)..(25): SEQ ID NO: 3997; WAN024FCR_at; Start 420; Stop 444
ttccatgatagaggaagggttcctg

SEQ ID NO: 200887 - DNA, 25 bp, Artificial
  probe
  misc_feature (1)..(25): SEQ ID NO: 3997; WAN024FCR_at; Start 388; Stop 412
ttcttggtacatggcgatattggac

SEQ ID NO: 200888 - DNA, 25 bp, Artificial
  probe
  misc_feature (1)..(25): SEQ ID NO: 3997; WAN024FCR_at; Start 114; Stop 138
cgatagcaatagttgttcggccctg

SEQ ID NO: 200889 - DNA, 25 bp, Artificial
  probe
  misc_feature (1)..(25): SEQ ID NO: 3997; WAN024FCR_at; Start 306; Stop 330
agtcgtacccctgaggaagttcttg

SEQ ID NO: 200890 - DNA, 25 bp, Artificial
  probe
  misc_feature (1)..(25): SEQ ID NO: 3997; WAN024FCR_at; Start 457; Stop 481
gatgttttttctcagctcttcttga

SEQ ID NO: 200891 - DNA, 25 bp, Artificial
  probe
  misc_feature (1)..(25): SEQ ID NO: 3997; WAN024FCR_at; Start 471; Stop 495
gctcttcttgactgaaatccctgat

SEQ ID NO: 200892 - DNA, 25 bp, Artificial
  probe
  misc_feature (1)..(25): SEQ ID NO: 3997; WAN024FCR_at; Start 448; Stop 472
gaccaaaccgatgttttttctcagc

SEQ ID NO: 200893 - DNA, 25 bp, Artificial
  probe
  misc_feature (1)..(25): SEQ ID NO: 3997; WAN024FCR_at; Start 410; Stop 434
gacttaatagttccatgatagagga

SEQ ID NO: 200894 - DNA, 25 bp, Artificial
  probe
  misc_feature (1)..(25): SEQ ID NO: 3997; WAN024FCR_at; Start 7; Stop 31
ggttcctcccagagtcaagagttcc

SEQ ID NO: 200895 - DNA, 25 bp, Artificial
  probe
  misc_feature (1)..(25): SEQ ID NO: 3997; WAN024FCR_at; Start 495; Stop 519
tatccacatcatccaagagaactct

SEQ ID NO: 200896 - DNA, 25 bp, Artificial
  probe
  misc_feature (1)..(25): SEQ ID NO: 3997; WAN024FCR_at; Start 395; Stop 419
tacatggcgatattggacttaatag

SEQ ID NO: 200897 - DNA, 25 bp, Artificial
  probe
  misc_feature (1)..(25): SEQ ID NO: 3997; WAN024FCR_at; Start 35; Stop 59
tgggttccactctcgataatgcgtc

SEQ ID NO: 200898 - DNA, 25 bp, Artificial
  probe
  misc_feature (1)..(25): SEQ ID NO: 3997; WAN024FCR_at; Start 21; Stop 45
tcaagagttcctcatgggttccact

SEQ ID NO: 200899 - DNA, 25 bp, Artificial
  probe
  misc_feature (1)..(25): SEQ ID NO: 3997; WAN024FCR_at; Start 352; Stop 376
aaaggctgccgcagcctgaacctgc

SEQ ID NO: 200900 - DNA, 25 bp, Artificial
  probe
  misc_feature (1)..(25): SEQ ID NO: 3997; WAN024FCR_at; Start 225; Stop 249
gctggctggcgactgttctagcaaa

SEQ ID NO: 200901 - DNA, 25 bp, Artificial
  probe
  misc_feature (1)..(25): SEQ ID NO: 3997; WAN024FCR_at; Start 313; Stop 337
cccctgaggaagttcttgaataaag

SEQ ID NO: 200902 - DNA, 25 bp, Artificial
  probe
  misc_feature (1)..(25): SEQ ID NO: 3997; WAN024FCR_at; Start 194; Stop 218
gctgtcgcttcatccaaaatcagga

SEQ ID NO: 200903 - DNA, 25 bp, Artificial
  probe
  misc_feature (1)..(25): SEQ ID NO: 3997; WAN024FCR_at; Start 49; Stop 73
gataatgcgtcccttatccaagaca

SEQ ID NO: 200904 - DNA, 25 bp, Artificial
  probe
  misc_feature (1)..(25): SEQ ID NO: 3997; WAN024FCR_at; Start 480; Stop 504
gactgaaatccctgatatccacatc

SEQ ID NO: 200905 - DNA, 25 bp, Artificial
  probe
  misc_feature (1)..(25): SEQ ID NO: 3997; WAN024FCR_at; Start 338; Stop 362
gaatctgcatccacaaaggctgccg

SEQ ID NO: 200906 - DNA, 25 bp, Artificial
  probe
  misc_feature (1)..(25): SEQ ID NO: 3997; WAN024FCR_at; Start 326; Stop 350
tcttgaataaaggaatctgcatcca

SEQ ID NO: 200907 - DNA, 25 bp, Artificial
  probe
  misc_feature (1)..(25): SEQ ID NO: 3997; WAN024FCR_at; Start 210; Stop 234
aaatcaggattttaggctggctggc

SEQ ID NO: 200908 - DNA, 25 bp, Artificial
  probe
  misc_feature (1)..(25): SEQ ID NO: 3997; WAN024FCR_at; Start 90; Stop 114
cttgaatagtagaaaggcggtgagc

SEQ ID NO: 200909 - DNA, 25 bp, Artificial
  probe
  misc_feature (1)..(25): SEQ ID NO: 3997; WAN024FCR_at; Start 180; Stop 204
cagagtcaatattggctgtcgcttc

SEQ ID NO: 200910 - DNA, 25 bp, Artificial
  probe
  misc_feature (1)..(25): SEQ ID NO: 3997; WAN024FCR_at; Start 119; Stop 143
gcaatagttgttcggccctgtctca

SEQ ID NO: 200911 - DNA, 25 bp, Artificial
  probe
  misc_feature (1)..(25): SEQ ID NO: 3997; WAN024FCR_at; Start 266; Stop 290
tgcccagtagagaagctcgaaccac

SEQ ID NO: 200912 - DNA, 25 bp, Artificial
  probe
  misc_feature (1)..(25): SEQ ID NO: 3997; WAN024FCR_at; Start 63; Stop 87
tatccaagacatagatgcagttggc

SEQ ID NO: 200913 - DNA, 25 bp, Artificial
  probe
  misc_feature (1)..(25): SEQ ID NO: 3997; WAN024FCR_at; Start 240; Stop 264
ttctagcaaaggcaagaagctggcg

SEQ ID NO: 200914 - DNA, 25 bp, Artificial
  probe
  misc_feature (1)..(25): SEQ ID NO: 3997; WAN024FCR_at; Start 99; Stop 123
tagaaaggcggtgagcgatagcaat

SEQ ID NO: 200915 - DNA, 25 bp, Artificial
  probe
  misc_feature (1)..(25): SEQ ID NO: 3997; WAN024FCR_at; Start 144; Stop 168
tcttcgccagagaagcttgaaccaa

SEQ ID NO: 200916 - DNA, 25 bp, Artificial
  probe
  misc_feature (1)..(25): SEQ ID NO: 3997; WAN024FCR_at; Start 278; Stop 302
aagctcgaaccacgctcggaaacag

SEQ ID NO: 200917 - DNA, 25 bp, Artificial
  probe
  misc_feature (1)..(25): SEQ ID NO: 1944; WAN024FCS_at; Start 1085; Stop 1109
tctctgttaataagggtgaaaccat

SEQ ID NO: 200918 - DNA, 25 bp, Artificial
  probe
  misc_feature (1)..(25): SEQ ID NO: 1944; WAN024FCS_at; Start 649; Stop 673
tttaatcaagagaagcgcctgcagg

SEQ ID NO: 200919 - DNA, 25 bp, Artificial
  probe
  misc_feature (1)..(25): SEQ ID NO: 1944; WAN024FCS_at; Start 1689; Stop 1713
tctgggaggaacctatcacaagatg

SEQ ID NO: 200920 - DNA, 25 bp, Artificial
  probe
  misc_feature (1)..(25): SEQ ID NO: 1944; WAN024FCS_at; Start 1552; Stop 1576
tctctggcgaagatgagacagggcc

SEQ ID NO: 200921 - DNA, 25 bp, Artificial
  probe
  misc_feature (1)..(25): SEQ ID NO: 1944; WAN024FCS_at; Start 334; Stop 358
tactttgacaagacgccagcaggtt

SEQ ID NO: 200922 - DNA, 25 bp, Artificial
  probe
  misc_feature (1)..(25): SEQ ID NO: 1944; WAN024FCS_at; Start 666; Stop 690
cctgcaggcagaatttgatgaaatc

SEQ ID NO: 200923 - DNA, 25 bp, Artificial
  probe
  misc_feature (1)..(25): SEQ ID NO: 1944; WAN024FCS_at; Start 1118; Stop 1142
taggtcatacaggttcagggaaatc

SEQ ID NO: 200924 - DNA, 25 bp, Artificial
  probe
  misc_feature (1)..(25): SEQ ID NO: 1944; WAN024FCS_at; Start 1459; Stop 1483
tttgctagaacagtcgccagccagc

SEQ ID NO: 200925 - DNA, 25 bp, Artificial
  probe
  misc_feature (1)..(25): SEQ ID NO: 1944; WAN024FCS_at; Start 715; Stop 739
aaccgttctgtagccttggatgccc

SEQ ID NO: 200926 - DNA, 25 bp, Artificial
  probe
  misc_feature (1)..(25): SEQ ID NO: 1944; WAN024FCS_at; Start 223; Stop 247
caaactgtagttcagtatgtcggca

SEQ ID NO: 200927 - DNA, 25 bp, Artificial
  probe
  misc_feature (1)..(25): SEQ ID NO: 1944; WAN024FCS_at; Start 1102; Stop 1126
gaaaccattgcctttgtaggtcata

SEQ ID NO: 200928 - DNA, 25 bp, Artificial
  probe
  misc_feature (1)..(25): SEQ ID NO: 1944; WAN024FCS_at; Start 142; Stop 166
cactttatcgaccagtatctcagca

SEQ ID NO: 200929 - DNA, 25 bp, Artificial
  probe
  misc_feature (1)..(25): SEQ ID NO: 1944; WAN024FCS_at; Start 244; Stop 268
ggcaatcttctctttgcgcgcgtgt

SEQ ID NO: 200930 - DNA, 25 bp, Artificial
  probe
  misc_feature (1)..(25): SEQ ID NO: 1944; WAN024FCS_at; Start 348; Stop 372
gccagcaggttctatcgtttctcgt

SEQ ID NO: 200931 - DNA, 25 bp, Artificial
  probe
  misc_feature (1)..(25): SEQ ID NO: 1944; WAN024FCS_at; Start 98; Stop 122
tagcgacgacggtcattaaaagtgt

SEQ ID NO: 200932 - DNA, 25 bp, Artificial
  probe
  misc_feature (1)..(25): SEQ ID NO: 1944; WAN024FCS_at; Start 286; Stop 310
gatattcgtcgggatgcctttgcca

SEQ ID NO: 200933 - DNA, 25 bp, Artificial
  probe
  misc_feature (1)..(25): SEQ ID NO: 1944; WAN024FCS_at; Start 259; Stop 283
gcgcgcgtgtcttacagtattgtta

SEQ ID NO: 200934 - DNA, 25 bp, Artificial
  probe
  misc_feature (1)..(25): SEQ ID NO: 1944; WAN024FCS_at; Start 887; Stop 911
tgattgaggtgacgcaaaacttttc

SEQ ID NO: 200935 - DNA, 25 bp, Artificial
  probe
  misc_feature (1)..(25): SEQ ID NO: 1944; WAN024FCS_at; Start 1491; Stop 1515
cctgattttggatgaagcgacagcc

SEQ ID NO: 200936 - DNA, 25 bp, Artificial
  probe
  misc_feature (1)..(25): SEQ ID NO: 1944; WAN024FCS_at; Start 733; Stop 757
gatgccctctttttgagacctgcca

SEQ ID NO: 200937 - DNA, 25 bp, Artificial
  probe
  misc_feature (1)..(25): SEQ ID NO: 1944; WAN024FCS_at; Start 205; Stop 229
tatggtctctacatcctacaaactg

SEQ ID NO: 200938 - DNA, 25 bp, Artificial
  probe
  misc_feature (1)..(25): SEQ ID NO: 1944; WAN024FCS_at; Start 1566; Stop 1590
gagacagggccgaacaactattgct

SEQ ID NO: 200939 - DNA, 25 bp, Artificial
  probe
  misc_feature (1)..(25): SEQ ID NO: 1944; WAN024FCS_at; Start 371; Stop 395
gtttgaccaacgataccgagacgat

SEQ ID NO: 200940 - DNA, 25 bp, Artificial
  probe
  misc_feature (1)..(25): SEQ ID NO: 1944; WAN024FCS_at; Start 308; Stop 332
ccaatatggagaaactgggcatgtc

SEQ ID NO: 200941 - DNA, 25 bp, Artificial
  probe
  misc_feature (1)..(25): SEQ ID NO: 1944; WAN024FCS_at; Start 1214; Stop 1238
tcagggatttcagtcaagaagagct

SEQ ID NO: 200942 - DNA, 25 bp, Artificial
  probe
  misc_feature (1)..(25): SEQ ID NO: 1944; WAN024FCS_at; Start 1658; Stop 1682
tcgagagtggaacccatgaggaact

SEQ ID NO: 200943 - DNA, 25 bp, Artificial
  probe
  misc_feature (1)..(25): SEQ ID NO: 1944; WAN024FCS_at; Start 1629; Stop 1653
catctatgtcttggataagggacgc

SEQ ID NO: 200944 - DNA, 25 bp, Artificial
  probe
  misc_feature (1)..(25): SEQ ID NO: 1944; WAN024FCS_at; Start 1444; Stop 1468
cgccagcttcttgcctttgctagaa

SEQ ID NO: 200945 - DNA, 25 bp, Artificial
  probe
  misc_feature (1)..(25): SEQ ID NO: 1944; WAN024FCS_at; Start 1504; Stop 1528
gaagcgacagccaatattgactctg

SEQ ID NO: 200946 - DNA, 25 bp, Artificial
  probe
  misc_feature (1)..(25): SEQ ID NO: 1944; WAN024FCS_at; Start 81; Stop 105
ggcactcagttttctcctagcgacg

SEQ ID NO: 200947 - DNA, 25 bp, Artificial
  probe
  misc_feature (1)..(25): SEQ ID NO: 1944; WAN024FCS_at; Start 1705; Stop 1729
cacaagatgtatagtttgcaggcag

SEQ ID NO: 200948 - DNA, 25 bp, Artificial
  probe
  misc_feature (1)..(25): SEQ ID NO: 1944; WAN024FCS_at; Start 1474; Stop 1498
gccagccagcctaaaatcctgattt

SEQ ID NO: 200949 - DNA, 25 bp, Artificial
  probe
  misc_feature (1)..(25): SEQ ID NO: 1944; WAN024FCS_at; Start 573; Stop 597
gaaaaccagaagtctcttgtcagat

SEQ ID NO: 200950 - DNA, 25 bp, Artificial
  probe
  misc_feature (1)..(25): SEQ ID NO: 1944; WAN024FCS_at; Start 1174; Stop 1198
gaattccagtcagggagagttctct

SEQ ID NO: 200951 - DNA, 25 bp, Artificial
  probe
  misc_feature (1)..(25): SEQ ID NO: 5781; WAN024FCT_at; Start 780; Stop 804
cggtgctttgaatgaagaaggaact

SEQ ID NO: 200952 - DNA, 25 bp, Artificial
  probe
  misc_feature (1)..(25): SEQ ID NO: 5781; WAN024FCT_at; Start 85; Stop 109
gggacttgctcggtactattggcaa

SEQ ID NO: 200953 - DNA, 25 bp, Artificial
  probe
  misc_feature (1)..(25): SEQ ID NO: 5781; WAN024FCT_at; Start 122; Stop 146
gaagccaaggtattttatcggatga

SEQ ID NO: 200954 - DNA, 25 bp, Artificial
  probe
  misc_feature (1)..(25): SEQ ID NO: 5781; WAN024FCT_at; Start 2082; Stop 2106
ggaactattcttaacagtgacagga

SEQ ID NO: 200955 - DNA, 25 bp, Artificial
  probe
  misc_feature (1)..(25): SEQ ID NO: 5781; WAN024FCT_at; Start 981; Stop 1005
caaaacgatgaaggatgggcaaatc

SEQ ID NO: 200956 - DNA, 25 bp, Artificial
  probe
  misc_feature (1)..(25): SEQ ID NO: 5781; WAN024FCT_at; Start 106; Stop 130
gcaatttcaattttgggaagccaag

SEQ ID NO: 200957 - DNA, 25 bp, Artificial
  probe
  misc_feature (1)..(25): SEQ ID NO: 5781; WAN024FCT_at; Start 1868; Stop 1892
taattgatagtaaccagaagaacgg

SEQ ID NO: 200958 - DNA, 25 bp, Artificial
  probe
  misc_feature (1)..(25): SEQ ID NO: 5781; WAN024FCT_at; Start 887; Stop 911
cattcaaggatagttatcaagggca

SEQ ID NO: 200959 - DNA, 25 bp, Artificial
  probe
  misc_feature (1)..(25): SEQ ID NO: 5781; WAN024FCT_at; Start 1425; Stop 1449
tattgccgatcctaaaacaaaagcg

SEQ ID NO: 200960 - DNA, 25 bp, Artificial
  probe
  misc_feature (1)..(25): SEQ ID NO: 5781; WAN024FCT_at; Start 1054; Stop 1078
ccttatgccttgaatgatgatggga

SEQ ID NO: 200961 - DNA, 25 bp, Artificial
  probe
  misc_feature (1)..(25): SEQ ID NO: 5781; WAN024FCT_at; Start 1975; Stop 1999
tataaaatagttggagatggcagag

SEQ ID NO: 200962 - DNA, 25 bp, Artificial
  probe
  misc_feature (1)..(25): SEQ ID NO: 5781; WAN024FCT_at; Start 1881; Stop 1905
ccagaagaacggagagtttaactca

SEQ ID NO: 200963 - DNA, 25 bp, Artificial
  probe
  misc_feature (1)..(25): SEQ ID NO: 5781; WAN024FCT_at; Start 238; Stop 262
cgttctgctgaaatgattgcctcta

SEQ ID NO: 200964 - DNA, 25 bp, Artificial
  probe
  misc_feature (1)..(25): SEQ ID NO: 5781; WAN024FCT_at; Start 150; Stop 174
tgttactagttcttcaccgatggct

SEQ ID NO: 200965 - DNA, 25 bp, Artificial
  probe
  misc_feature (1)..(25): SEQ ID NO: 5781; WAN024FCT_at; Start 951; Stop 975
taattctcgttttcttgggcaagcc

SEQ ID NO: 200966 - DNA, 25 bp, Artificial
  probe
  misc_feature (1)..(25): SEQ ID NO: 5781; WAN024FCT_at; Start 700; Stop 724
ttatttacggatgatggtgcgcaag

SEQ ID NO: 200967 - DNA, 25 bp, Artificial
  probe
  misc_feature (1)..(25): SEQ ID NO: 5781; WAN024FCT_at; Start 966; Stop 990
tgggcaagccttacccaaaacgatg

SEQ ID NO: 200968 - DNA, 25 bp, Artificial
  probe
  misc_feature (1)..(25): SEQ ID NO: 5781; WAN024FCT_at; Start 1448; Stop 1472
cgatacgagttgcaaaagatagtgc

SEQ ID NO: 200969 - DNA, 25 bp, Artificial
  probe
  misc_feature (1)..(25): SEQ ID NO: 5781; WAN024FCT_at; Start 996; Stop 1020
tgggcaaatcataagtaaggagagc

SEQ ID NO: 200970 - DNA, 25 bp, Artificial
  probe
  misc_feature (1)..(25): SEQ ID NO: 5781; WAN024FCT_at; Start 1011; Stop 1035
taaggagagcattcagattgaacca

SEQ ID NO: 200971 - DNA, 25 bp, Artificial
  probe
  misc_feature (1)..(25): SEQ ID NO: 5781; WAN024FCT_at; Start 521; Stop 545
caatagatgctgcagctcaagggct

SEQ ID NO: 200972 - DNA, 25 bp, Artificial
  probe
  misc_feature (1)..(25): SEQ ID NO: 5781; WAN024FCT_at; Start 309; Stop 333
cagctctaatggtactattcgttcc

SEQ ID NO: 200973 - DNA, 25 bp, Artificial
  probe
  misc_feature (1)..(25): SEQ ID NO: 5781; WAN024FCT_at; Start 1388; Stop 1412
taaataaacaggtggttatcgccga

SEQ ID NO: 200974 - DNA, 25 bp, Artificial
  probe
  misc_feature (1)..(25): SEQ ID NO: 5781; WAN024FCT_at; Start 496; Stop 520
gatgatcgacaagcaattcaagatg

SEQ ID NO: 200975 - DNA, 25 bp, Artificial
  probe
  misc_feature (1)..(25): SEQ ID NO: 5781; WAN024FCT_at; Start 836; Stop 860
caggtgcatttgctattgggaattc

SEQ ID NO: 200976 - DNA, 25 bp, Artificial
  probe
  misc_feature (1)..(25): SEQ ID NO: 5781; WAN024FCT_at; Start 1138; Stop 1162
gaattagtaacagcaattggcacac

SEQ ID NO: 200977 - DNA, 25 bp, Artificial
  probe
  misc_feature (1)..(25): SEQ ID NO: 5781; WAN024FCT_at; Start 164; Stop 188
caccgatggctacaaaagagtcttc

SEQ ID NO: 200978 - DNA, 25 bp, Artificial
  probe
  misc_feature (1)..(25): SEQ ID NO: 5781; WAN024FCT_at; Start 1237; Stop 1261
gcaggtgtacgttttacaggattca

SEQ ID NO: 200979 - DNA, 25 bp, Artificial
  probe
  misc_feature (1)..(25): SEQ ID NO: 5781; WAN024FCT_at; Start 904; Stop 928
caagggcatgctattcaaattgcag

SEQ ID NO: 200980 - DNA, 25 bp, Artificial
  probe
  misc_feature (1)..(25): SEQ ID NO: 5781; WAN024FCT_at; Start 1172; Stop 1196
cattgtcgacacagaacccctctaa

SEQ ID NO: 200981 - DNA, 25 bp, Artificial
  probe
  misc_feature (1)..(25): SEQ ID NO: 5781; WAN024FCT_at; Start 1726; Stop 1750
aaagaacctgttatacgtgatagcg

SEQ ID NO: 200982 - DNA, 25 bp, Artificial
  probe
  misc_feature (1)..(25): SEQ ID NO: 5781; WAN024FCT_at; Start 1155; Stop 1179
tggcacacactatcaaacattgtcg

SEQ ID NO: 200983 - DNA, 25 bp, Artificial
  probe
  misc_feature (1)..(25): SEQ ID NO: 5781; WAN024FCT_at; Start 762; Stop 786
tggtacgattgatatgaacggtgct

SEQ ID NO: 200984 - DNA, 25 bp, Artificial
  probe
  misc_feature (1)..(25): SEQ ID NO: 5781; WAN024FCT_at; Start 1917; Stop 1941
tagacaaatgaatgacaagatcgac

SEQ ID NO: 200985 - DNA, 25 bp, Artificial
  probe
  misc_feature (1)..(25): SEQ ID NO: 2874; WAN024FCU_at; Start 173; Stop 197
acttctcatatttatcaagcacaga

SEQ ID NO: 200986 - DNA, 25 bp, Artificial
  probe
  misc_feature (1)..(25): SEQ ID NO: 2874; WAN024FCU_at; Start 185; Stop 209
tatcaagcacagatacccaaatggt

SEQ ID NO: 200987 - DNA, 25 bp, Artificial
  probe
  misc_feature (1)..(25): SEQ ID NO: 2874; WAN024FCU_at; Start 183; Stop 207
tttatcaagcacagatacccaaatg

SEQ ID NO: 200988 - DNA, 25 bp, Artificial
  probe
  misc_feature (1)..(25): SEQ ID NO: 2874; WAN024FCU_at; Start 145; Stop 169
cgttcttcatttgataaatattcaa

SEQ ID NO: 200989 - DNA, 25 bp, Artificial
  probe
  misc_feature (1)..(25): SEQ ID NO: 2874; WAN024FCU_at; Start 238; Stop 262
tcattttctaaatataaccttaaca

SEQ ID NO: 200990 - DNA, 25 bp, Artificial
  probe
  misc_feature (1)..(25): SEQ ID NO: 2874; WAN024FCU_at; Start 200; Stop 224
cccaaatggtctctaaattatttga

SEQ ID NO: 200991 - DNA, 25 bp, Artificial
  probe
  misc_feature (1)..(25): SEQ ID NO: 2874; WAN024FCU_at; Start 181; Stop 205
tatttatcaagcacagatacccaaa

SEQ ID NO: 200992 - DNA, 25 bp, Artificial
  probe
  misc_feature (1)..(25): SEQ ID NO: 2874; WAN024FCU_at; Start 101; Stop 125
gaactgactcatttatgattaaatc

SEQ ID NO: 200993 - DNA, 25 bp, Artificial
  probe
  misc_feature (1)..(25): SEQ ID NO: 2874; WAN024FCU_at; Start 99; Stop 123
tagaactgactcatttatgattaaa

SEQ ID NO: 200994 - DNA, 25 bp, Artificial
  probe
  misc_feature (1)..(25): SEQ ID NO: 2874; WAN024FCU_at; Start 5; Stop 29
cagttgatatttttattacactaat

SEQ ID NO: 200995 - DNA, 25 bp, Artificial
  probe
  misc_feature (1)..(25): SEQ ID NO: 2874; WAN024FCU_at; Start 187; Stop 211
tcaagcacagatacccaaatggtct

SEQ ID NO: 200996 - DNA, 25 bp, Artificial
  probe
  misc_feature (1)..(25): SEQ ID NO: 2874; WAN024FCU_at; Start 178; Stop 202
tcatatttatcaagcacagataccc

SEQ ID NO: 200997 - DNA, 25 bp, Artificial
  probe
  misc_feature (1)..(25): SEQ ID NO: 2874; WAN024FCU_at; Start 59; Stop 83
gttgtaaacaaattaactcatatcc

SEQ ID NO: 200998 - DNA, 25 bp, Artificial
  probe
  misc_feature (1)..(25): SEQ ID NO: 2874; WAN024FCU_at; Start 192; Stop 216
cacagatacccaaatggtctctaaa

SEQ ID NO: 200999 - DNA, 25 bp, Artificial
  probe
  misc_feature (1)..(25): SEQ ID NO: 2874; WAN024FCU_at; Start 194; Stop 218
cagatacccaaatggtctctaaatt

SEQ ID NO: 201000 - DNA, 25 bp, Artificial
  probe
  misc_feature (1)..(25): SEQ ID NO: 2874; WAN024FCU_at; Start 23; Stop 47
cactaataattcttcttaagtcata

SEQ ID NO: 201001 - DNA, 25 bp, Artificial
  probe
  misc_feature (1)..(25): SEQ ID NO: 2874; WAN024FCU_at; Start 184; Stop 208
ttatcaagcacagatacccaaatgg

SEQ ID NO: 201002 - DNA, 25 bp, Artificial
  probe
  misc_feature (1)..(25): SEQ ID NO: 2874; WAN024FCU_at; Start 190; Stop 214
agcacagatacccaaatggtctcta

SEQ ID NO: 201003 - DNA, 25 bp, Artificial
  probe
  misc_feature (1)..(25): SEQ ID NO: 2874; WAN024FCU_at; Start 171; Stop 195
taacttctcatatttatcaagcaca

SEQ ID NO: 201004 - DNA, 25 bp, Artificial
  probe
  misc_feature (1)..(25): SEQ ID NO: 2874; WAN024FCU_at; Start 156; Stop 180
tgataaatattcaaataacttctca

SEQ ID NO: 201005 - DNA, 25 bp, Artificial
  probe
  misc_feature (1)..(25): SEQ ID NO: 2874; WAN024FCU_at; Start 179; Stop 203
catatttatcaagcacagataccca

SEQ ID NO: 201006 - DNA, 25 bp, Artificial
  probe
  misc_feature (1)..(25): SEQ ID NO: 2874; WAN024FCU_at; Start 196; Stop 220
gatacccaaatggtctctaaattat

SEQ ID NO: 201007 - DNA, 25 bp, Artificial
  probe
  misc_feature (1)..(25): SEQ ID NO: 2874; WAN024FCU_at; Start 69; Stop 93
aattaactcatatccttttttatca

SEQ ID NO: 201008 - DNA, 25 bp, Artificial
  probe
  misc_feature (1)..(25): SEQ ID NO: 2874; WAN024FCU_at; Start 186; Stop 210
atcaagcacagatacccaaatggtc

SEQ ID NO: 201009 - DNA, 25 bp, Artificial
  probe
  misc_feature (1)..(25): SEQ ID NO: 2874; WAN024FCU_at; Start 202; Stop 226
caaatggtctctaaattatttgata

SEQ ID NO: 201010 - DNA, 25 bp, Artificial
  probe
  misc_feature (1)..(25): SEQ ID NO: 2874; WAN024FCU_at; Start 176; Stop 200
tctcatatttatcaagcacagatac

SEQ ID NO: 201011 - DNA, 25 bp, Artificial
  probe
  misc_feature (1)..(25): SEQ ID NO: 2874; WAN024FCU_at; Start 188; Stop 212
caagcacagatacccaaatggtctc

SEQ ID NO: 201012 - DNA, 25 bp, Artificial
  probe
  misc_feature (1)..(25): SEQ ID NO: 2874; WAN024FCU_at; Start 106; Stop 130
gactcatttatgattaaatcttctt

SEQ ID NO: 201013 - DNA, 25 bp, Artificial
  probe
  misc_feature (1)..(25): SEQ ID NO: 2874; WAN024FCU_at; Start 55; Stop 79
ggatgttgtaaacaaattaactcat

SEQ ID NO: 201014 - DNA, 25 bp, Artificial
  probe
  misc_feature (1)..(25): SEQ ID NO: 2874; WAN024FCU_at; Start 21; Stop 45
tacactaataattcttcttaagtca

SEQ ID NO: 201015 - DNA, 25 bp, Artificial
  probe
  misc_feature (1)..(25): SEQ ID NO: 2874; WAN024FCU_at; Start 2; Stop 26
tgtcagttgatatttttattacact

SEQ ID NO: 201016 - DNA, 25 bp, Artificial
  probe
  misc_feature (1)..(25): SEQ ID NO: 2874; WAN024FCU_at; Start 61; Stop 85
tgtaaacaaattaactcatatcctt

SEQ ID NO: 201017 - DNA, 25 bp, Artificial
  probe
  misc_feature (1)..(25): SEQ ID NO: 2874; WAN024FCU_at; Start 29; Stop 53
taattcttcttaagtcatatgaaac

SEQ ID NO: 201018 - DNA, 25 bp, Artificial
  probe
  misc_feature (1)..(25): SEQ ID NO: 2874; WAN024FCU_at; Start 191; Stop 215
gcacagatacccaaatggtctctaa

SEQ ID NO: 201019 - DNA, 25 bp, Artificial
  probe
  misc_feature (1)..(25): SEQ ID NO: 2993; WAN024FCV_at; Start 220; Stop 244
gacttaagaagaattattagtgtaa

SEQ ID NO: 201020 - DNA, 25 bp, Artificial
  probe
  misc_feature (1)..(25): SEQ ID NO: 2993; WAN024FCV_at; Start 400; Stop 424
tcttgttatagagaggaacaatctg

SEQ ID NO: 201021 - DNA, 25 bp, Artificial
  probe
  misc_feature (1)..(25): SEQ ID NO: 2993; WAN024FCV_at; Start 67; Stop 91
tctgtgcttgataaatatgagaagt

SEQ ID NO: 201022 - DNA, 25 bp, Artificial
  probe
  misc_feature (1)..(25): SEQ ID NO: 2993; WAN024FCV_at; Start 501; Stop 525
gaattacatatttgaagatgatggg

SEQ ID NO: 201023 - DNA, 25 bp, Artificial
  probe
  misc_feature (1)..(25): SEQ ID NO: 2993; WAN024FCV_at; Start 353; Stop 377
taaaaatacttcatgaagttatcgg

SEQ ID NO: 201024 - DNA, 25 bp, Artificial
  probe
  misc_feature (1)..(25): SEQ ID NO: 2993; WAN024FCV_at; Start 374; Stop 398
tcggactgcatatgaatagggctat

SEQ ID NO: 201025 - DNA, 25 bp, Artificial
  probe
  misc_feature (1)..(25): SEQ ID NO: 2993; WAN024FCV_at; Start 49; Stop 73
ttagagaccatttgggtatctgtgc

SEQ ID NO: 201026 - DNA, 25 bp, Artificial
  probe
  misc_feature (1)..(25): SEQ ID NO: 2993; WAN024FCV_at; Start 616; Stop 640
tatagaaaatatgggaacataaatt

SEQ ID NO: 201027 - DNA, 25 bp, Artificial
  probe
  misc_feature (1)..(25): SEQ ID NO: 2993; WAN024FCV_at; Start 424; Stop 448
ggatgtttagatatggttgttatac

SEQ ID NO: 201028 - DNA, 25 bp, Artificial
  probe
  misc_feature (1)..(25): SEQ ID NO: 2993; WAN024FCV_at; Start 406; Stop 430
tatagagaggaacaatctggatgtt

SEQ ID NO: 201029 - DNA, 25 bp, Artificial
  probe
  misc_feature (1)..(25): SEQ ID NO: 2993; WAN024FCV_at; Start 211; Stop 235
gtttcatatgacttaagaagaatta

SEQ ID NO: 201030 - DNA, 25 bp, Artificial
  probe
  misc_feature (1)..(25): SEQ ID NO: 2993; WAN024FCV_at; Start 570; Stop 594
tgataaaattgctcatactacgcaa

SEQ ID NO: 201031 - DNA, 25 bp, Artificial
  probe
  misc_feature (1)..(25): SEQ ID NO: 2993; WAN024FCV_at; Start 371; Stop 395
ttatcggactgcatatgaatagggc

SEQ ID NO: 201032 - DNA, 25 bp, Artificial
  probe
  misc_feature (1)..(25): SEQ ID NO: 2993; WAN024FCV_at; Start 547; Stop 571
gctttagatattattcatcaccttg

SEQ ID NO: 201033 - DNA, 25 bp, Artificial
  probe
  misc_feature (1)..(25): SEQ ID NO: 2993; WAN024FCV_at; Start 392; Stop 416
gggctatatcttgttatagagagga

SEQ ID NO: 201034 - DNA, 25 bp, Artificial
  probe
  misc_feature (1)..(25): SEQ ID NO: 2993; WAN024FCV_at; Start 609; Stop 633
gataatgtatagaaaatatgggaac

SEQ ID NO: 201035 - DNA, 25 bp, Artificial
  probe
  misc_feature (1)..(25): SEQ ID NO: 2993; WAN024FCV_at; Start 454; Stop 478
cagaatgagatagaagagcttagta

SEQ ID NO: 201036 - DNA, 25 bp, Artificial
  probe
  misc_feature (1)..(25): SEQ ID NO: 2993; WAN024FCV_at; Start 52; Stop 76
gagaccatttgggtatctgtgcttg

SEQ ID NO: 201037 - DNA, 25 bp, Artificial
  probe
  misc_feature (1)..(25): SEQ ID NO: 2993; WAN024FCV_at; Start 2; Stop 26
tgttaaggttatatttagaaaatga

SEQ ID NO: 201038 - DNA, 25 bp, Artificial
  probe
  misc_feature (1)..(25): SEQ ID NO: 2993; WAN024FCV_at; Start 561; Stop 585
tcatcaccttgataaaattgctcat

SEQ ID NO: 201039 - DNA, 25 bp, Artificial
  probe
  misc_feature (1)..(25): SEQ ID NO: 2993; WAN024FCV_at; Start 377; Stop 401
gactgcatatgaatagggctatatc

SEQ ID NO: 201040 - DNA, 25 bp, Artificial
  probe
  misc_feature (1)..(25): SEQ ID NO: 2993; WAN024FCV_at; Start 251; Stop 275
tatcaactgacattgaacgtattgg

SEQ ID NO: 201041 - DNA, 25 bp, Artificial
  probe
  misc_feature (1)..(25): SEQ ID NO: 2993; WAN024FCV_at; Start 181; Stop 205
ggatatgagttaatttgtttacaac

SEQ ID NO: 201042 - DNA, 25 bp, Artificial
  probe
  misc_feature (1)..(25): SEQ ID NO: 2993; WAN024FCV_at; Start 143; Stop 167
taatcataaatgagtcagttctaaa

SEQ ID NO: 201043 - DNA, 25 bp, Artificial
  probe
  misc_feature (1)..(25): SEQ ID NO: 2993; WAN024FCV_at; Start 237; Stop 261
tagtgtaataaaaatatcaactgac

SEQ ID NO: 201044 - DNA, 25 bp, Artificial
  probe
  misc_feature (1)..(25): SEQ ID NO: 2993; WAN024FCV_at; Start 40; Stop 64
tcaaataatttagagaccatttggg

SEQ ID NO: 201045 - DNA, 25 bp, Artificial
  probe
  misc_feature (1)..(25): SEQ ID NO: 2993; WAN024FCV_at; Start 438; Stop 462
ggttgttatacaaaaacagaatgag

SEQ ID NO: 201046 - DNA, 25 bp, Artificial
  probe
  misc_feature (1)..(25): SEQ ID NO: 2993; WAN024FCV_at; Start 136; Stop 160
gaagatttaatcataaatgagtcag

SEQ ID NO: 201047 - DNA, 25 bp, Artificial
  probe
  misc_feature (1)..(25): SEQ ID NO: 2993; WAN024FCV_at; Start 96; Stop 120
tgaatatttatcaaatgaagaacga

SEQ ID NO: 201048 - DNA, 25 bp, Artificial
  probe
  misc_feature (1)..(25): SEQ ID NO: 2993; WAN024FCV_at; Start 359; Stop 383
tacttcatgaagttatcggactgca

SEQ ID NO: 201049 - DNA, 25 bp, Artificial
  probe
  misc_feature (1)..(25): SEQ ID NO: 2993; WAN024FCV_at; Start 363; Stop 387
tcatgaagttatcggactgcatatg

SEQ ID NO: 201050 - DNA, 25 bp, Artificial
  probe
  misc_feature (1)..(25): SEQ ID NO: 2993; WAN024FCV_at; Start 415; Stop 439
gaacaatctggatgtttagatatgg

SEQ ID NO: 201051 - DNA, 25 bp, Artificial
  probe
  misc_feature (1)..(25): SEQ ID NO: 2993; WAN024FCV_at; Start 56; Stop 80
ccatttgggtatctgtgcttgataa

SEQ ID NO: 201052 - DNA, 25 bp, Artificial
  probe
  misc_feature (1)..(25): SEQ ID NO: 2993; WAN024FCV_at; Start 448; Stop 472
caaaaacagaatgagatagaagagc

SEQ ID NO: 201053 - DNA, 25 bp, Artificial
  probe
  misc_feature (1)..(25): SEQ ID NO: 7423; WAN024FCW_at; Start 70; Stop 94
gtctatatgagtgctgtattttgga

SEQ ID NO: 201054 - DNA, 25 bp, Artificial
  probe
  misc_feature (1)..(25): SEQ ID NO: 7423; WAN024FCW_at; Start 46; Stop 70
ccaatggctataattgatgatactg

SEQ ID NO: 201055 - DNA, 25 bp, Artificial
  probe
  misc_feature (1)..(25): SEQ ID NO: 7423; WAN024FCW_at; Start 71; Stop 95
tctatatgagtgctgtattttggaa

SEQ ID NO: 201056 - DNA, 25 bp, Artificial
  probe
  misc_feature (1)..(25): SEQ ID NO: 7423; WAN024FCW_at; Start 49; Stop 73
atggctataattgatgatactgtct

SEQ ID NO: 201057 - DNA, 25 bp, Artificial
  probe
  misc_feature (1)..(25): SEQ ID NO: 7423; WAN024FCW_at; Start 51; Stop 75
ggctataattgatgatactgtctat

SEQ ID NO: 201058 - DNA, 25 bp, Artificial
  probe
  misc_feature (1)..(25): SEQ ID NO: 7423; WAN024FCW_at; Start 79; Stop 103
agtgctgtattttggaaaaattact

SEQ ID NO: 201059 - DNA, 25 bp, Artificial
  probe
  misc_feature (1)..(25): SEQ ID NO: 7423; WAN024FCW_at; Start 57; Stop 81
aattgatgatactgtctatatgagt

SEQ ID NO: 201060 - DNA, 25 bp, Artificial
  probe
  misc_feature (1)..(25): SEQ ID NO: 7423; WAN024FCW_at; Start 69; Stop 93
tgtctatatgagtgctgtattttgg

SEQ ID NO: 201061 - DNA, 25 bp, Artificial
  probe
  misc_feature (1)..(25): SEQ ID NO: 7423; WAN024FCW_at; Start 77; Stop 101
tgagtgctgtattttggaaaaatta

SEQ ID NO: 201062 - DNA, 25 bp, Artificial
  probe
  misc_feature (1)..(25): SEQ ID NO: 7423; WAN024FCW_at; Start 65; Stop 89
atactgtctatatgagtgctgtatt

SEQ ID NO: 201063 - DNA, 25 bp, Artificial
  probe
  misc_feature (1)..(25): SEQ ID NO: 7423; WAN024FCW_at; Start 59; Stop 83
ttgatgatactgtctatatgagtgc

SEQ ID NO: 201064 - DNA, 25 bp, Artificial
  probe
  misc_feature (1)..(25): SEQ ID NO: 7423; WAN024FCW_at; Start 67; Stop 91
actgtctatatgagtgctgtatttt

SEQ ID NO: 201065 - DNA, 25 bp, Artificial
  probe
  misc_feature (1)..(25): SEQ ID NO: 7423; WAN024FCW_at; Start 66; Stop 90
tactgtctatatgagtgctgtattt

SEQ ID NO: 201066 - DNA, 25 bp, Artificial
  probe
  misc_feature (1)..(25): SEQ ID NO: 7423; WAN024FCW_at; Start 64; Stop 88
gatactgtctatatgagtgctgtat

SEQ ID NO: 201067 - DNA, 25 bp, Artificial
  probe
  misc_feature (1)..(25): SEQ ID NO: 7423; WAN024FCW_at; Start 45; Stop 69
cccaatggctataattgatgatact

SEQ ID NO: 201068 - DNA, 25 bp, Artificial
  probe
  misc_feature (1)..(25): SEQ ID NO: 7423; WAN024FCW_at; Start 78; Stop 102
gagtgctgtattttggaaaaattac

SEQ ID NO: 201069 - DNA, 25 bp, Artificial
  probe
  misc_feature (1)..(25): SEQ ID NO: 7423; WAN024FCW_at; Start 61; Stop 85
gatgatactgtctatatgagtgctg

SEQ ID NO: 201070 - DNA, 25 bp, Artificial
  probe
  misc_feature (1)..(25): SEQ ID NO: 7423; WAN024FCW_at; Start 62; Stop 86
atgatactgtctatatgagtgctgt

SEQ ID NO: 201071 - DNA, 25 bp, Artificial
  probe
  misc_feature (1)..(25): SEQ ID NO: 7423; WAN024FCW_at; Start 50; Stop 74
tggctataattgatgatactgtcta

SEQ ID NO: 201072 - DNA, 25 bp, Artificial
  probe
  misc_feature (1)..(25): SEQ ID NO: 7423; WAN024FCW_at; Start 63; Stop 87
tgatactgtctatatgagtgctgta

SEQ ID NO: 201073 - DNA, 25 bp, Artificial
  probe
  misc_feature (1)..(25): SEQ ID NO: 7423; WAN024FCW_at; Start 56; Stop 80
taattgatgatactgtctatatgag

SEQ ID NO: 201074 - DNA, 25 bp, Artificial
  probe
  misc_feature (1)..(25): SEQ ID NO: 7423; WAN024FCW_at; Start 52; Stop 76
gctataattgatgatactgtctata

SEQ ID NO: 201075 - DNA, 25 bp, Artificial
  probe
  misc_feature (1)..(25): SEQ ID NO: 7423; WAN024FCW_at; Start 72; Stop 96
ctatatgagtgctgtattttggaaa

SEQ ID NO: 201076 - DNA, 25 bp, Artificial
  probe
  misc_feature (1)..(25): SEQ ID NO: 7423; WAN024FCW_at; Start 74; Stop 98
atatgagtgctgtattttggaaaaa

SEQ ID NO: 201077 - DNA, 25 bp, Artificial
  probe
  misc_feature (1)..(25): SEQ ID NO: 7423; WAN024FCW_at; Start 58; Stop 82
attgatgatactgtctatatgagtg

SEQ ID NO: 201078 - DNA, 25 bp, Artificial
  probe
  misc_feature (1)..(25): SEQ ID NO: 7423; WAN024FCW_at; Start 48; Stop 72
aatggctataattgatgatactgtc

SEQ ID NO: 201079 - DNA, 25 bp, Artificial
  probe
  misc_feature (1)..(25): SEQ ID NO: 7423; WAN024FCW_at; Start 60; Stop 84
tgatgatactgtctatatgagtgct

SEQ ID NO: 201080 - DNA, 25 bp, Artificial
  probe
  misc_feature (1)..(25): SEQ ID NO: 7423; WAN024FCW_at; Start 68; Stop 92
ctgtctatatgagtgctgtattttg

SEQ ID NO: 201081 - DNA, 25 bp, Artificial
  probe
  misc_feature (1)..(25): SEQ ID NO: 7423; WAN024FCW_at; Start 53; Stop 77
ctataattgatgatactgtctatat

SEQ ID NO: 201082 - DNA, 25 bp, Artificial
  probe
  misc_feature (1)..(25): SEQ ID NO: 7423; WAN024FCW_at; Start 81; Stop 105
tgctgtattttggaaaaattactta

SEQ ID NO: 201083 - DNA, 25 bp, Artificial
  probe
  misc_feature (1)..(25): SEQ ID NO: 7423; WAN024FCW_at; Start 73; Stop 97
tatatgagtgctgtattttggaaaa

SEQ ID NO: 201084 - DNA, 25 bp, Artificial
  probe
  misc_feature (1)..(25): SEQ ID NO: 7423; WAN024FCW_at; Start 54; Stop 78
tataattgatgatactgtctatatg

SEQ ID NO: 201085 - DNA, 25 bp, Artificial
  probe
  misc_feature (1)..(25): SEQ ID NO: 7423; WAN024FCW_at; Start 75; Stop 99
tatgagtgctgtattttggaaaaat

SEQ ID NO: 201086 - DNA, 25 bp, Artificial
  probe
  misc_feature (1)..(25): SEQ ID NO: 7423; WAN024FCW_at; Start 47; Stop 71
caatggctataattgatgatactgt

SEQ ID NO: 201087 - DNA, 25 bp, Artificial
  probe
  misc_feature (1)..(25): SEQ ID NO: 2491; WAN024FCX_at; Start 154; Stop 178
cacttgtcctgcttcgtgttgaact

SEQ ID NO: 201088 - DNA, 25 bp, Artificial
  probe
  misc_feature (1)..(25): SEQ ID NO: 2491; WAN024FCX_at; Start 10; Stop 34
aatataaccagctccgcctgttacc

SEQ ID NO: 201089 - DNA, 25 bp, Artificial
  probe
  misc_feature (1)..(25): SEQ ID NO: 2491; WAN024FCX_at; Start 186; Stop 210
taacctcttctttattaatgcgagg

SEQ ID NO: 201090 - DNA, 25 bp, Artificial
  probe
  misc_feature (1)..(25): SEQ ID NO: 2491; WAN024FCX_at; Start 195; Stop 219
ctttattaatgcgaggatatttttc

SEQ ID NO: 201091 - DNA, 25 bp, Artificial
  probe
  misc_feature (1)..(25): SEQ ID NO: 2491; WAN024FCX_at; Start 109; Stop 133
cggtgtattcttataaactcctgca

SEQ ID NO: 201092 - DNA, 25 bp, Artificial
  probe
  misc_feature (1)..(25): SEQ ID NO: 2491; WAN024FCX_at; Start 160; Stop 184
tcctgcttcgtgttgaactacgcta

SEQ ID NO: 201093 - DNA, 25 bp, Artificial
  probe
  misc_feature (1)..(25): SEQ ID NO: 2491; WAN024FCX_at; Start 131; Stop 155
gcatcttccagaactctcgcaaaca

SEQ ID NO: 201094 - DNA, 25 bp, Artificial
  probe
  misc_feature (1)..(25): SEQ ID NO: 2491; WAN024FCX_at; Start 112; Stop 136
tgtattcttataaactcctgcatct

SEQ ID NO: 201095 - DNA, 25 bp, Artificial
  probe
  misc_feature (1)..(25): SEQ ID NO: 2491; WAN024FCX_at; Start 205; Stop 229
gcgaggatatttttctttcaattgg

SEQ ID NO: 201096 - DNA, 25 bp, Artificial
  probe
  misc_feature (1)..(25): SEQ ID NO: 2491; WAN024FCX_at; Start 90; Stop 114
taaacgcttcatgcccagacggtgt

SEQ ID NO: 201097 - DNA, 25 bp, Artificial
  probe
  misc_feature (1)..(25): SEQ ID NO: 2491; WAN024FCX_at; Start 95; Stop 119
gcttcatgcccagacggtgtattct

SEQ ID NO: 201098 - DNA, 25 bp, Artificial
  probe
  misc_feature (1)..(25): SEQ ID NO: 2491; WAN024FCX_at; Start 171; Stop 195
gttgaactacgctattaacctcttc

SEQ ID NO: 201099 - DNA, 25 bp, Artificial
  probe
  misc_feature (1)..(25): SEQ ID NO: 2491; WAN024FCX_at; Start 99; Stop 123
catgcccagacggtgtattcttata

SEQ ID NO: 201100 - DNA, 25 bp, Artificial
  probe
  misc_feature (1)..(25): SEQ ID NO: 2491; WAN024FCX_at; Start 87; Stop 111
tcataaacgcttcatgcccagacgg

SEQ ID NO: 201101 - DNA, 25 bp, Artificial
  probe
  misc_feature (1)..(25): SEQ ID NO: 2491; WAN024FCX_at; Start 21; Stop 45
ctccgcctgttaccaatattgccat

SEQ ID NO: 201102 - DNA, 25 bp, Artificial
  probe
  misc_feature (1)..(25): SEQ ID NO: 2491; WAN024FCX_at; Start 2; Stop 26
tggctaccaatataaccagctccgc

SEQ ID NO: 201103 - DNA, 25 bp, Artificial
  probe
  misc_feature (1)..(25): SEQ ID NO: 2491; WAN024FCX_at; Start 158; Stop 182
tgtcctgcttcgtgttgaactacgc

SEQ ID NO: 201104 - DNA, 25 bp, Artificial
  probe
  misc_feature (1)..(25): SEQ ID NO: 2491; WAN024FCX_at; Start 218; Stop 242
tctttcaattggtcggcccattcta

SEQ ID NO: 201105 - DNA, 25 bp, Artificial
  probe
  misc_feature (1)..(25): SEQ ID NO: 2491; WAN024FCX_at; Start 136; Stop 160
ttccagaactctcgcaaacacttgt

SEQ ID NO: 201106 - DNA, 25 bp, Artificial
  probe
  misc_feature (1)..(25): SEQ ID NO: 2491; WAN024FCX_at; Start 6; Stop 30
taccaatataaccagctccgcctgt

SEQ ID NO: 201107 - DNA, 25 bp, Artificial
  probe
  misc_feature (1)..(25): SEQ ID NO: 2491; WAN024FCX_at; Start 18; Stop 42
cagctccgcctgttaccaatattgc

SEQ ID NO: 201108 - DNA, 25 bp, Artificial
  probe
  misc_feature (1)..(25): SEQ ID NO: 2491; WAN024FCX_at; Start 102; Stop 126
gcccagacggtgtattcttataaac

SEQ ID NO: 201109 - DNA, 25 bp, Artificial
  probe
  misc_feature (1)..(25): SEQ ID NO: 2491; WAN024FCX_at; Start 164; Stop 188
gcttcgtgttgaactacgctattaa

SEQ ID NO: 201110 - DNA, 25 bp, Artificial
  probe
  misc_feature (1)..(25): SEQ ID NO: 2491; WAN024FCX_at; Start 120; Stop 144
tataaactcctgcatcttccagaac

SEQ ID NO: 201111 - DNA, 25 bp, Artificial
  probe
  misc_feature (1)..(25): SEQ ID NO: 2491; WAN024FCX_at; Start 151; Stop 175
aaacacttgtcctgcttcgtgttga

SEQ ID NO: 201112 - DNA, 25 bp, Artificial
  probe
  misc_feature (1)..(25): SEQ ID NO: 2491; WAN024FCX_at; Start 66; Stop 90
ttccaaccgacttaacaaatctcat

SEQ ID NO: 201113 - DNA, 25 bp, Artificial
  probe
  misc_feature (1)..(25): SEQ ID NO: 2491; WAN024FCX_at; Start 147; Stop 171
tcgcaaacacttgtcctgcttcgtg

SEQ ID NO: 201114 - DNA, 25 bp, Artificial
  probe
  misc_feature (1)..(25): SEQ ID NO: 2491; WAN024FCX_at; Start 93; Stop 117
acgcttcatgcccagacggtgtatt

SEQ ID NO: 201115 - DNA, 25 bp, Artificial
  probe
  misc_feature (1)..(25): SEQ ID NO: 2491; WAN024FCX_at; Start 73; Stop 97
cgacttaacaaatctcataaacgct

SEQ ID NO: 201116 - DNA, 25 bp, Artificial
  probe
  misc_feature (1)..(25): SEQ ID NO: 2491; WAN024FCX_at; Start 168; Stop 192
cgtgttgaactacgctattaacctc

SEQ ID NO: 201117 - DNA, 25 bp, Artificial
  probe
  misc_feature (1)..(25): SEQ ID NO: 2491; WAN024FCX_at; Start 105; Stop 129
cagacggtgtattcttataaactcc

SEQ ID NO: 201118 - DNA, 25 bp, Artificial
  probe
  misc_feature (1)..(25): SEQ ID NO: 2491; WAN024FCX_at; Start 78; Stop 102
taacaaatctcataaacgcttcatg

SEQ ID NO: 201119 - DNA, 25 bp, Artificial
  probe
  misc_feature (1)..(25): SEQ ID NO: 2491; WAN024FCX_at; Start 141; Stop 165
gaactctcgcaaacacttgtcctgc

SEQ ID NO: 201120 - DNA, 25 bp, Artificial
  probe
  misc_feature (1)..(25): SEQ ID NO: 2491; WAN024FCX_at; Start 122; Stop 146
taaactcctgcatcttccagaactc

SEQ ID NO: 201121 - DNA, 25 bp, Artificial
  probe
  misc_feature (1)..(25): SEQ ID NO: 2406; WAN024FCY_at; Start 926; Stop 950
taaattggaggacaacaaaatcgat

SEQ ID NO: 201122 - DNA, 25 bp, Artificial
  probe
  misc_feature (1)..(25): SEQ ID NO: 2406; WAN024FCY_at; Start 122; Stop 146
tagaccgtattgaagcaattacagg

SEQ ID NO: 201123 - DNA, 25 bp, Artificial
  probe
  misc_feature (1)..(25): SEQ ID NO: 2406; WAN024FCY_at; Start 20; Stop 44
gcggagctggttatattggtagcca

SEQ ID NO: 201124 - DNA, 25 bp, Artificial
  probe
  misc_feature (1)..(25): SEQ ID NO: 2406; WAN024FCY_at; Start 368; Stop 392
caagtgcgactgtatatggaattaa

SEQ ID NO: 201125 - DNA, 25 bp, Artificial
  probe
  misc_feature (1)..(25): SEQ ID NO: 2406; WAN024FCY_at; Start 303; Stop 327
tatgagtacattggcacttgttgaa

SEQ ID NO: 201126 - DNA, 25 bp, Artificial
  probe
  misc_feature (1)..(25): SEQ ID NO: 2406; WAN024FCY_at; Start 257; Stop 281
tcggagaatccgtgcaaaagcctgt

SEQ ID NO: 201127 - DNA, 25 bp, Artificial
  probe
  misc_feature (1)..(25): SEQ ID NO: 2406; WAN024FCY_at; Start 37; Stop 61
ggtagccataccgtagtagaattac

SEQ ID NO: 201128 - DNA, 25 bp, Artificial
  probe
  misc_feature (1)..(25): SEQ ID NO: 2406; WAN024FCY_at; Start 352; Stop 376
aagattgtcttttcttcaagtgcga

SEQ ID NO: 201129 - DNA, 25 bp, Artificial
  probe
  misc_feature (1)..(25): SEQ ID NO: 2406; WAN024FCY_at; Start 514; Stop 538
gcgttgcttcgttatttcaatccaa

SEQ ID NO: 201130 - DNA, 25 bp, Artificial
  probe
  misc_feature (1)..(25): SEQ ID NO: 2406; WAN024FCY_at; Start 136; Stop 160
gcaattacaggaatacgtcccgtgt

SEQ ID NO: 201131 - DNA, 25 bp, Artificial
  probe
  misc_feature (1)..(25): SEQ ID NO: 2406; WAN024FCY_at; Start 385; Stop 409
ggaattaacaatcagtcacctctaa

SEQ ID NO: 201132 - DNA, 25 bp, Artificial
  probe
  misc_feature (1)..(25): SEQ ID NO: 2406; WAN024FCY_at; Start 788; Stop 812
gagaaggcactagtgtattacaact

SEQ ID NO: 201133 - DNA, 25 bp, Artificial
  probe
  misc_feature (1)..(25): SEQ ID NO: 2406; WAN024FCY_at; Start 448; Stop 472
tatacgaaagtgatgcttgagcaaa

SEQ ID NO: 201134 - DNA, 25 bp, Artificial
  probe
  misc_feature (1)..(25): SEQ ID NO: 2406; WAN024FCY_at; Start 772; Stop 796
tataacctaggctcgggagaaggca

SEQ ID NO: 201135 - DNA, 25 bp, Artificial
  probe
  misc_feature (1)..(25): SEQ ID NO: 2406; WAN024FCY_at; Start 439; Stop 463
ccttatgggtatacgaaagtgatgc

SEQ ID NO: 201136 - DNA, 25 bp, Artificial
  probe
  misc_feature (1)..(25): SEQ ID NO: 2406; WAN024FCY_at; Start 94; Stop 118
aacctttcgaactctagcatcttgg

SEQ ID NO: 201137 - DNA, 25 bp, Artificial
  probe
  misc_feature (1)..(25): SEQ ID NO: 2406; WAN024FCY_at; Start 715; Stop 739
gcaataggacatataaaagctttag

SEQ ID NO: 201138 - DNA, 25 bp, Artificial
  probe
  misc_feature (1)..(25): SEQ ID NO: 2406; WAN024FCY_at; Start 764; Stop 788
tttatatctataacctaggctcggg

SEQ ID NO: 201139 - DNA, 25 bp, Artificial
  probe
  misc_feature (1)..(25): SEQ ID NO: 2406; WAN024FCY_at; Start 821; Stop 845
catttgaaagtgttaataagatccc

SEQ ID NO: 201140 - DNA, 25 bp, Artificial
  probe
  misc_feature (1)..(25): SEQ ID NO: 2406; WAN024FCY_at; Start 208; Stop 232
gaacaagaatcgattgatgctgcaa

SEQ ID NO: 201141 - DNA, 25 bp, Artificial
  probe
  misc_feature (1)..(25): SEQ ID NO: 2406; WAN024FCY_at; Start 271; Stop 295
caaaagcctgtgatgtactacaaaa

SEQ ID NO: 201142 - DNA, 25 bp, Artificial
  probe
  misc_feature (1)..(25): SEQ ID NO: 2406; WAN024FCY_at; Start 700; Stop 724
catgtagtagatttagcaataggac

SEQ ID NO: 201143 - DNA, 25 bp, Artificial
  probe
  misc_feature (1)..(25): SEQ ID NO: 2406; WAN024FCY_at; Start 874; Stop 898
tcaggagacgttgcaacttgttatg

SEQ ID NO: 201144 - DNA, 25 bp, Artificial
  probe
  misc_feature (1)..(25): SEQ ID NO: 2406; WAN024FCY_at; Start 886; Stop 910
gcaacttgttatgcaaatgcagaca

SEQ ID NO: 201145 - DNA, 25 bp, Artificial
  probe
  misc_feature (1)..(25): SEQ ID NO: 2406; WAN024FCY_at; Start 904; Stop 928
gcagacaaagcatataaggaattaa

SEQ ID NO: 201146 - DNA, 25 bp, Artificial
  probe
  misc_feature (1)..(25): SEQ ID NO: 2406; WAN024FCY_at; Start 499; Stop 523
tcagaatggagtattgcgttgcttc

SEQ ID NO: 201147 - DNA, 25 bp, Artificial
  probe
  misc_feature (1)..(25): SEQ ID NO: 2406; WAN024FCY_at; Start 151; Stop 175
cgtcccgtgttttacgaattagatg

SEQ ID NO: 201148 - DNA, 25 bp, Artificial
  probe
  misc_feature (1)..(25): SEQ ID NO: 2406; WAN024FCY_at; Start 478; Stop 502
aaagatgttcatgtggcagattcag

SEQ ID NO: 201149 - DNA, 25 bp, Artificial
  probe
  misc_feature (1)..(25): SEQ ID NO: 2406; WAN024FCY_at; Start 650; Stop 674
tcggaaatgattatgatacgcttga

SEQ ID NO: 201150 - DNA, 25 bp, Artificial
  probe
  misc_feature (1)..(25): SEQ ID NO: 2406; WAN024FCY_at; Start 4; Stop 28
gcaatattggtaacaggcggagctg

SEQ ID NO: 201151 - DNA, 25 bp, Artificial
  probe
  misc_feature (1)..(25): SEQ ID NO: 2406; WAN024FCY_at; Start 530; Stop 554
tcaatccaattggtgctcatgagtc

SEQ ID NO: 201152 - DNA, 25 bp, Artificial
  probe
  misc_feature (1)..(25): SEQ ID NO: 2406; WAN024FCY_at; Start 110; Stop 134
gcatcttggtgctagaccgtattga

SEQ ID NO: 201153 - DNA, 25 bp, Artificial
  probe
  misc_feature (1)..(25): SEQ ID NO: 2406; WAN024FCY_at; Start 425; Stop 449
caagtgcgacaaatccttatgggta

SEQ ID NO: 201154 - DNA, 25 bp, Artificial
  probe
  misc_feature (1)..(25): SEQ ID NO: 2406; WAN024FCY_at; Start 543; Stop 567
tgctcatgagtctggtttgattggg

SEQ ID NO: 201155 - DNA, 25 bp, Artificial
  probe
  misc_feature (1)..(25): SEQ ID NO: 700; WAN024FCZ_at; Start 1021; Stop 1045
gaagatgtcccacaccatacggtga

SEQ ID NO: 201156 - DNA, 25 bp, Artificial
  probe
  misc_feature (1)..(25): SEQ ID NO: 700; WAN024FCZ_at; Start 402; Stop 426
taaatacggagagctagagattacg

SEQ ID NO: 201157 - DNA, 25 bp, Artificial
  probe
  misc_feature (1)..(25): SEQ ID NO: 700; WAN024FCZ_at; Start 770; Stop 794
caggaggctccattcttagtcataa

SEQ ID NO: 201158 - DNA, 25 bp, Artificial
  probe
  misc_feature (1)..(25): SEQ ID NO: 700; WAN024FCZ_at; Start 1339; Stop 1363
gaagaggttaatagcgtagttcaac

SEQ ID NO: 201159 - DNA, 25 bp, Artificial
  probe
  misc_feature (1)..(25): SEQ ID NO: 700; WAN024FCZ_at; Start 1423; Stop 1447
ccgtctgggcatgaagcgtttatga

SEQ ID NO: 201160 - DNA, 25 bp, Artificial
  probe
  misc_feature (1)..(25): SEQ ID NO: 700; WAN024FCZ_at; Start 1408; Stop 1432
gtttataagaatacaccgtctgggc

SEQ ID NO: 201161 - DNA, 25 bp, Artificial
  probe
  misc_feature (1)..(25): SEQ ID NO: 700; WAN024FCZ_at; Start 678; Stop 702
ggctattacctctaaaacatttgaa

SEQ ID NO: 201162 - DNA, 25 bp, Artificial
  probe
  misc_feature (1)..(25): SEQ ID NO: 700; WAN024FCZ_at; Start 822; Stop 846
cccaatggaaaaagcaaaatttgag

SEQ ID NO: 201163 - DNA, 25 bp, Artificial
  probe
  misc_feature (1)..(25): SEQ ID NO: 700; WAN024FCZ_at; Start 1129; Stop 1153
ggtgttttccatcctcatcaagatg

SEQ ID NO: 201164 - DNA, 25 bp, Artificial
  probe
  misc_feature (1)..(25): SEQ ID NO: 700; WAN024FCZ_at; Start 754; Stop 778
tctgatcttcctatctcaggaggct

SEQ ID NO: 201165 - DNA, 25 bp, Artificial
  probe
  misc_feature (1)..(25): SEQ ID NO: 700; WAN024FCZ_at; Start 1007; Stop 1031
tcattgctatgactgaagatgtccc

SEQ ID NO: 201166 - DNA, 25 bp, Artificial
  probe
  misc_feature (1)..(25): SEQ ID NO: 700; WAN024FCZ_at; Start 1194; Stop 1218
gatgggacttgcgatattaccacct

SEQ ID NO: 201167 - DNA, 25 bp, Artificial
  probe
  misc_feature (1)..(25): SEQ ID NO: 700; WAN024FCZ_at; Start 660; Stop 684
tagtcaacatgtaccaatggctatt

SEQ ID NO: 201168 - DNA, 25 bp, Artificial
  probe
  misc_feature (1)..(25): SEQ ID NO: 700; WAN024FCZ_at; Start 84; Stop 108
tagagtactagcgttaataggtgag

SEQ ID NO: 201169 - DNA, 25 bp, Artificial
  probe
  misc_feature (1)..(25): SEQ ID NO: 700; WAN024FCZ_at; Start 878; Stop 902
ttaatgctggtattgtaaaatggcc

SEQ ID NO: 201170 - DNA, 25 bp, Artificial
  probe
  misc_feature (1)..(25): SEQ ID NO: 700; WAN024FCZ_at; Start 295; Stop 319
gatatatcacctcaagaagcagttg

SEQ ID NO: 201171 - DNA, 25 bp, Artificial
  probe
  misc_feature (1)..(25): SEQ ID NO: 700; WAN024FCZ_at; Start 711; Stop 735
ggagattgttgatattttgccagga

SEQ ID NO: 201172 - DNA, 25 bp, Artificial
  probe
  misc_feature (1)..(25): SEQ ID NO: 700; WAN024FCZ_at; Start 1282; Stop 1306
gattatcatttagaatgggccgacc

SEQ ID NO: 201173 - DNA, 25 bp, Artificial
  probe
  misc_feature (1)..(25): SEQ ID NO: 700; WAN024FCZ_at; Start 796; Stop 820
cactaccagggagggaaacatattt

SEQ ID NO: 201174 - DNA, 25 bp, Artificial
  probe
  misc_feature (1)..(25): SEQ ID NO: 700; WAN024FCZ_at; Start 1208; Stop 1232
tattaccacctcgtttgaaaccaga

SEQ ID NO: 201175 - DNA, 25 bp, Artificial
  probe
  misc_feature (1)..(25): SEQ ID NO: 700; WAN024FCZ_at; Start 542; Stop 566
gaataaattatccagcacgttcgaa

SEQ ID NO: 201176 - DNA, 25 bp, Artificial
  probe
  misc_feature (1)..(25): SEQ ID NO: 700; WAN024FCZ_at; Start 451; Stop 475
gatccaaaaacaattgctgctgaaa

SEQ ID NO: 201177 - DNA, 25 bp, Artificial
  probe
  misc_feature (1)..(25): SEQ ID NO: 700; WAN024FCZ_at; Start 1048; Stop 1072
cctattgctcgtaaagtggacggga

SEQ ID NO: 201178 - DNA, 25 bp, Artificial
  probe
  misc_feature (1)..(25): SEQ ID NO: 700; WAN024FCZ_at; Start 127; Stop 151
tccgatgaaaatgacctgaaacaaa

SEQ ID NO: 201179 - DNA, 25 bp, Artificial
  probe
  misc_feature (1)..(25): SEQ ID NO: 700; WAN024FCZ_at; Start 894; Stop 918
aaaatggccaatgtcagtaattagg

SEQ ID NO: 201180 - DNA, 25 bp, Artificial
  probe
  misc_feature (1)..(25): SEQ ID NO: 700; WAN024FCZ_at; Start 1294; Stop 1318
gaatgggccgaccaattgaaagaaa

SEQ ID NO: 201181 - DNA, 25 bp, Artificial
  probe
  misc_feature (1)..(25): SEQ ID NO: 700; WAN024FCZ_at; Start 1034; Stop 1058
accatacggtgactcctattgctcg

SEQ ID NO: 201182 - DNA, 25 bp, Artificial
  probe
  misc_feature (1)..(25): SEQ ID NO: 700; WAN024FCZ_at; Start 1355; Stop 1379
tagttcaacacgaagcaggacaagt

SEQ ID NO: 201183 - DNA, 25 bp, Artificial
  probe
  misc_feature (1)..(25): SEQ ID NO: 700; WAN024FCZ_at; Start 786; Stop 810
tagtcataaccactaccagggaggg

SEQ ID NO: 201184 - DNA, 25 bp, Artificial
  probe
  misc_feature (1)..(25): SEQ ID NO: 700; WAN024FCZ_at; Start 1178; Stop 1202
tcgggttaatcgaagtgatgggact

SEQ ID NO: 201185 - DNA, 25 bp, Artificial
  probe
  misc_feature (1)..(25): SEQ ID NO: 700; WAN024FCZ_at; Start 388; Stop 412
tttcgagcatcaactaaatacggag

SEQ ID NO: 201186 - DNA, 25 bp, Artificial
  probe
  misc_feature (1)..(25): SEQ ID NO: 700; WAN024FCZ_at; Start 157; Stop 181
gattacttagtggaaatcgccttaa

SEQ ID NO: 201187 - DNA, 25 bp, Artificial
  probe
  misc_feature (1)..(25): SEQ ID NO: 700; WAN024FCZ_at; Start 207; Stop 231
cgaggaaaaggaatgtttaggagca

SEQ ID NO: 201188 - DNA, 25 bp, Artificial
  probe
  misc_feature (1)..(25): SEQ ID NO: 700; WAN024FCZ_at; Start 1374; Stop 1398
acaagtgtttgcgagagttctggaa

SEQ ID NO: 201189 - DNA, 25 bp, Artificial
  probe
  misc_feature (1)..(25): SEQ ID NO: 2017; WAN024FD2_at; Start 107; Stop 131
tagtggctgtcatgattatttcctt

SEQ ID NO: 201190 - DNA, 25 bp, Artificial
  probe
  misc_feature (1)..(25): SEQ ID NO: 2017; WAN024FD2_at; Start 85; Stop 109
tcaatatttgataacccaagactag

SEQ ID NO: 201191 - DNA, 25 bp, Artificial
  probe
  misc_feature (1)..(25): SEQ ID NO: 2017; WAN024FD2_at; Start 99; Stop 123
cccaagactagtggctgtcatgatt

SEQ ID NO: 201192 - DNA, 25 bp, Artificial
  probe
  misc_feature (1)..(25): SEQ ID NO: 2017; WAN024FD2_at; Start 94; Stop 118
gataacccaagactagtggctgtca

SEQ ID NO: 201193 - DNA, 25 bp, Artificial
  probe
  misc_feature (1)..(25): SEQ ID NO: 2017; WAN024FD2_at; Start 47; Stop 71
taccaatgactactgataaaacaat

SEQ ID NO: 201194 - DNA, 25 bp, Artificial
  probe
  misc_feature (1)..(25): SEQ ID NO: 2017; WAN024FD2_at; Start 117; Stop 141
catgattatttccttactttacgcc

SEQ ID NO: 201195 - DNA, 25 bp, Artificial
  probe
  misc_feature (1)..(25): SEQ ID NO: 2017; WAN024FD2_at; Start 93; Stop 117
tgataacccaagactagtggctgtc

SEQ ID NO: 201196 - DNA, 25 bp, Artificial
  probe
  misc_feature (1)..(25): SEQ ID NO: 2017; WAN024FD2_at; Start 51; Stop 75
aatgactactgataaaacaatcctg

SEQ ID NO: 201197 - DNA, 25 bp, Artificial
  probe
  misc_feature (1)..(25): SEQ ID NO: 2017; WAN024FD2_at; Start 33; Stop 57
taaaccaattatactaccaatgact

SEQ ID NO: 201198 - DNA, 25 bp, Artificial
  probe
  misc_feature (1)..(25): SEQ ID NO: 2017; WAN024FD2_at; Start 109; Stop 133
gtggctgtcatgattatttccttac

SEQ ID NO: 201199 - DNA, 25 bp, Artificial
  probe
  misc_feature (1)..(25): SEQ ID NO: 2017; WAN024FD2_at; Start 105; Stop 129
actagtggctgtcatgattatttcc

SEQ ID NO: 201200 - DNA, 25 bp, Artificial
  probe
  misc_feature (1)..(25): SEQ ID NO: 2017; WAN024FD2_at; Start 2; Stop 26
tgcctgcaggctgggatttgctccc

SEQ ID NO: 201201 - DNA, 25 bp, Artificial
  probe
  misc_feature (1)..(25): SEQ ID NO: 2017; WAN024FD2_at; Start 8; Stop 32
caggctgggatttgctccctctctc

SEQ ID NO: 201202 - DNA, 25 bp, Artificial
  probe
  misc_feature (1)..(25): SEQ ID NO: 2017; WAN024FD2_at; Start 16; Stop 40
gatttgctccctctctctaaaccaa

SEQ ID NO: 201203 - DNA, 25 bp, Artificial
  probe
  misc_feature (1)..(25): SEQ ID NO: 2017; WAN024FD2_at; Start 14; Stop 38
gggatttgctccctctctctaaacc

SEQ ID NO: 201204 - DNA, 25 bp, Artificial
  probe
  misc_feature (1)..(25): SEQ ID NO: 2017; WAN024FD2_at; Start 21; Stop 45
gctccctctctctaaaccaattata

SEQ ID NO: 201205 - DNA, 25 bp, Artificial
  probe
  misc_feature (1)..(25): SEQ ID NO: 2017; WAN024FD2_at; Start 91; Stop 115
tttgataacccaagactagtggctg

SEQ ID NO: 201206 - DNA, 25 bp, Artificial
  probe
  misc_feature (1)..(25): SEQ ID NO: 2017; WAN024FD2_at; Start 11; Stop 35
gctgggatttgctccctctctctaa

SEQ ID NO: 201207 - DNA, 25 bp, Artificial
  probe
  misc_feature (1)..(25): SEQ ID NO: 2017; WAN024FD2_at; Start 64; Stop 88
aaaacaatcctgacaactatttcaa

SEQ ID NO: 201208 - DNA, 25 bp, Artificial
  probe
  misc_feature (1)..(25): SEQ ID NO: 2017; WAN024FD2_at; Start 71; Stop 95
tcctgacaactatttcaatatttga

SEQ ID NO: 201209 - DNA, 25 bp, Artificial
  probe
  misc_feature (1)..(25): SEQ ID NO: 2017; WAN024FD2_at; Start 44; Stop 68
tactaccaatgactactgataaaac

SEQ ID NO: 201210 - DNA, 25 bp, Artificial
  probe
  misc_feature (1)..(25): SEQ ID NO: 2017; WAN024FD2_at; Start 101; Stop 125
caagactagtggctgtcatgattat

SEQ ID NO: 201211 - DNA, 25 bp, Artificial
  probe
  misc_feature (1)..(25): SEQ ID NO: 2017; WAN024FD2_at; Start 54; Stop 78
gactactgataaaacaatcctgaca

SEQ ID NO: 201212 - DNA, 25 bp, Artificial
  probe
  misc_feature (1)..(25): SEQ ID NO: 2017; WAN024FD2_at; Start 60; Stop 84
tgataaaacaatcctgacaactatt

SEQ ID NO: 201213 - DNA, 25 bp, Artificial
  probe
  misc_feature (1)..(25): SEQ ID NO: 2017; WAN024FD2_at; Start 96; Stop 120
taacccaagactagtggctgtcatg

SEQ ID NO: 201214 - DNA, 25 bp, Artificial
  probe
  misc_feature (1)..(25): SEQ ID NO: 2017; WAN024FD2_at; Start 6; Stop 30
tgcaggctgggatttgctccctctc

SEQ ID NO: 201215 - DNA, 25 bp, Artificial
  probe
  misc_feature (1)..(25): SEQ ID NO: 2017; WAN024FD2_at; Start 27; Stop 51
tctctctaaaccaattatactacca

SEQ ID NO: 201216 - DNA, 25 bp, Artificial
  probe
  misc_feature (1)..(25): SEQ ID NO: 2017; WAN024FD2_at; Start 57; Stop 81
tactgataaaacaatcctgacaact

SEQ ID NO: 201217 - DNA, 25 bp, Artificial
  probe
  misc_feature (1)..(25): SEQ ID NO: 2017; WAN024FD2_at; Start 111; Stop 135
ggctgtcatgattatttccttactt

SEQ ID NO: 201218 - DNA, 25 bp, Artificial
  probe
  misc_feature (1)..(25): SEQ ID NO: 2017; WAN024FD2_at; Start 38; Stop 62
caattatactaccaatgactactga

SEQ ID NO: 201219 - DNA, 25 bp, Artificial
  probe
  misc_feature (1)..(25): SEQ ID NO: 2017; WAN024FD2_at; Start 89; Stop 113
tatttgataacccaagactagtggc

SEQ ID NO: 201220 - DNA, 25 bp, Artificial
  probe
  misc_feature (1)..(25): SEQ ID NO: 2017; WAN024FD2_at; Start 97; Stop 121
aacccaagactagtggctgtcatga

SEQ ID NO: 201221 - DNA, 25 bp, Artificial
  probe
  misc_feature (1)..(25): SEQ ID NO: 2017; WAN024FD2_at; Start 83; Stop 107
tttcaatatttgataacccaagact

SEQ ID NO: 201222 - DNA, 25 bp, Artificial
  probe
  misc_feature (1)..(25): SEQ ID NO: 2017; WAN024FD2_at; Start 1; Stop 25
atgcctgcaggctgggatttgctcc

SEQ ID NO: 201223 - DNA, 25 bp, Artificial
  probe
  misc_feature (1)..(25): SEQ ID NO: 1373; WAN024FD3_at; Start 244; Stop 268
tttctaggcgctggaacgattctta

SEQ ID NO: 201224 - DNA, 25 bp, Artificial
  probe
  misc_feature (1)..(25): SEQ ID NO: 1373; WAN024FD3_at; Start 276; Stop 300
taaaaagaaaattacaggtctgaca

SEQ ID NO: 201225 - DNA, 25 bp, Artificial
  probe
  misc_feature (1)..(25): SEQ ID NO: 1373; WAN024FD3_at; Start 5; Stop 29
cagccactagtcttgggttatcaaa

SEQ ID NO: 201226 - DNA, 25 bp, Artificial
  probe
  misc_feature (1)..(25): SEQ ID NO: 1373; WAN024FD3_at; Start 59; Stop 83
cagtagtcattggtagtataattgg

SEQ ID NO: 201227 - DNA, 25 bp, Artificial
  probe
  misc_feature (1)..(25): SEQ ID NO: 1373; WAN024FD3_at; Start 303; Stop 327
tgcagcaggcatttgggcttcggca

SEQ ID NO: 201228 - DNA, 25 bp, Artificial
  probe
  misc_feature (1)..(25): SEQ ID NO: 1373; WAN024FD3_at; Start 622; Stop 646
ctggaattatcaggtagatttgaac

SEQ ID NO: 201229 - DNA, 25 bp, Artificial
  probe
  misc_feature (1)..(25): SEQ ID NO: 1373; WAN024FD3_at; Start 108; Stop 132
gcctgcaggcatccgaacttatagt

SEQ ID NO: 201230 - DNA, 25 bp, Artificial
  probe
  misc_feature (1)..(25): SEQ ID NO: 1373; WAN024FD3_at; Start 638; Stop 662
gatttgaacatcttcgactgatgga

SEQ ID NO: 201231 - DNA, 25 bp, Artificial
  probe
  misc_feature (1)..(25): SEQ ID NO: 1373; WAN024FD3_at; Start 565; Stop 589
tctgacagaattgaatactttgatg

SEQ ID NO: 201232 - DNA, 25 bp, Artificial
  probe
  misc_feature (1)..(25): SEQ ID NO: 1373; WAN024FD3_at; Start 288; Stop 312
tacaggtctgacaactgcagcaggc

SEQ ID NO: 201233 - DNA, 25 bp, Artificial
  probe
  misc_feature (1)..(25): SEQ ID NO: 1373; WAN024FD3_at; Start 159; Stop 183
tatgatgacgaatgaatacgtatct

SEQ ID NO: 201234 - DNA, 25 bp, Artificial
  probe
  misc_feature (1)..(25): SEQ ID NO: 1373; WAN024FD3_at; Start 253; Stop 277
gctggaacgattcttattacagata

SEQ ID NO: 201235 - DNA, 25 bp, Artificial
  probe
  misc_feature (1)..(25): SEQ ID NO: 1373; WAN024FD3_at; Start 493; Stop 517
cgtgtattggtttattgtgcagaaa

SEQ ID NO: 201236 - DNA, 25 bp, Artificial
  probe
  misc_feature (1)..(25): SEQ ID NO: 1373; WAN024FD3_at; Start 202; Stop 226
gatcctacacgattaggagctcaag

SEQ ID NO: 201237 - DNA, 25 bp, Artificial
  probe
  misc_feature (1)..(25): SEQ ID NO: 1373; WAN024FD3_at; Start 678; Stop 702
tgtaggtgttatttatgtcgaagaa

SEQ ID NO: 201238 - DNA, 25 bp, Artificial
  probe
  misc_feature (1)..(25): SEQ ID NO: 1373; WAN024FD3_at; Start 320; Stop 344
cttcggcaggaattggattagctat

SEQ ID NO: 201239 - DNA, 25 bp, Artificial
  probe
  misc_feature (1)..(25): SEQ ID NO: 1373; WAN024FD3_at; Start 547; Stop 571
gcgtttggagatgttaattctgaca

SEQ ID NO: 201240 - DNA, 25 bp, Artificial
  probe
  misc_feature (1)..(25): SEQ ID NO: 1373; WAN024FD3_at; Start 145; Stop 169
gctgcatgtttgattatgatgacga

SEQ ID NO: 201241 - DNA, 25 bp, Artificial
  probe
  misc_feature (1)..(25): SEQ ID NO: 1373; WAN024FD3_at; Start 217; Stop 241
ggagctcaagttatatcaggtgtgg

SEQ ID NO: 201242 - DNA, 25 bp, Artificial
  probe
  misc_feature (1)..(25): SEQ ID NO: 1373; WAN024FD3_at; Start 533; Stop 557
ccgattcaagaacagcgtttggaga

SEQ ID NO: 201243 - DNA, 25 bp, Artificial
  probe
  misc_feature (1)..(25): SEQ ID NO: 1373; WAN024FD3_at; Start 510; Stop 534
tgcagaaaatggtatcagaatgacc

SEQ ID NO: 201244 - DNA, 25 bp, Artificial
  probe
  misc_feature (1)..(25): SEQ ID NO: 1373; WAN024FD3_at; Start 602; Stop 626
aaatagcgtcatttattactctgga

SEQ ID NO: 201245 - DNA, 25 bp, Artificial
  probe
  misc_feature (1)..(25): SEQ ID NO: 1373; WAN024FD3_at; Start 525; Stop 549
cagaatgaccgattcaagaacagcg

SEQ ID NO: 201246 - DNA, 25 bp, Artificial
  probe
  misc_feature (1)..(25): SEQ ID NO: 1373; WAN024FD3_at; Start 427; Stop 451
tatctgcaaaatcgttctaaaatga

SEQ ID NO: 201247 - DNA, 25 bp, Artificial
  probe
  misc_feature (1)..(25): SEQ ID NO: 1373; WAN024FD3_at; Start 175; Stop 199
tacgtatcttataaatttgggacag

SEQ ID NO: 201248 - DNA, 25 bp, Artificial
  probe
  misc_feature (1)..(25): SEQ ID NO: 1373; WAN024FD3_at; Start 358; Stop 382
tatgagggagctcttttagtagcca

SEQ ID NO: 201249 - DNA, 25 bp, Artificial
  probe
  misc_feature (1)..(25): SEQ ID NO: 1373; WAN024FD3_at; Start 370; Stop 394
cttttagtagccatttctgtttggg

SEQ ID NO: 201250 - DNA, 25 bp, Artificial
  probe
  misc_feature (1)..(25): SEQ ID NO: 1373; WAN024FD3_at; Start 42; Stop 66
tgtcaggattgttttatcagtagtc

SEQ ID NO: 201251 - DNA, 25 bp, Artificial
  probe
  misc_feature (1)..(25): SEQ ID NO: 1373; WAN024FD3_at; Start 129; Stop 153
tagtattgtttgtctagctgcatgt

SEQ ID NO: 201252 - DNA, 25 bp, Artificial
  probe
  misc_feature (1)..(25): SEQ ID NO: 1373; WAN024FD3_at; Start 90; Stop 114
gagagggagcaaatcccagcctgca

SEQ ID NO: 201253 - DNA, 25 bp, Artificial
  probe
  misc_feature (1)..(25): SEQ ID NO: 1373; WAN024FD3_at; Start 649; Stop 673
cttcgactgatggaagaaattgcta

SEQ ID NO: 201254 - DNA, 25 bp, Artificial
  probe
  misc_feature (1)..(25): SEQ ID NO: 1373; WAN024FD3_at; Start 75; Stop 99
tataattggtttagagagagggagc

SEQ ID NO: 201255 - DNA, 25 bp, Artificial
  probe
  misc_feature (1)..(25): SEQ ID NO: 1373; WAN024FD3_at; Start 188; Stop 212
aatttgggacaggagatcctacacg

SEQ ID NO: 201256 - DNA, 25 bp, Artificial
  probe
  misc_feature (1)..(25): SEQ ID NO: 1373; WAN024FD3_at; Start 230; Stop 254
tatcaggtgtgggttttctaggcgc

SEQ ID NO: 201257 - DNA, 25 bp, Artificial
  probe
  misc_feature (1)..(25): SEQ ID NO: 2048; WAN024FD4_at; Start 1081; Stop 1105
tattctattattgctgcgacaacag

SEQ ID NO: 201258 - DNA, 25 bp, Artificial
  probe
  misc_feature (1)..(25): SEQ ID NO: 2048; WAN024FD4_at; Start 1248; Stop 1272
gccacaatttcttgtcttgaatcag

SEQ ID NO: 201259 - DNA, 25 bp, Artificial
  probe
  misc_feature (1)..(25): SEQ ID NO: 2048; WAN024FD4_at; Start 895; Stop 919
cacattgtagcatatggattgttca

SEQ ID NO: 201260 - DNA, 25 bp, Artificial
  probe
  misc_feature (1)..(25): SEQ ID NO: 2048; WAN024FD4_at; Start 513; Stop 537
ctatcacactattgaggctgctcga

SEQ ID NO: 201261 - DNA, 25 bp, Artificial
  probe
  misc_feature (1)..(25): SEQ ID NO: 2048; WAN024FD4_at; Start 1093; Stop 1117
gctgcgacaacagcaacaattctcg

SEQ ID NO: 201262 - DNA, 25 bp, Artificial
  probe
  misc_feature (1)..(25): SEQ ID NO: 2048; WAN024FD4_at; Start 1369; Stop 1393
gatgatgagatggaagatgcagcaa

SEQ ID NO: 201263 - DNA, 25 bp, Artificial
  probe
  misc_feature (1)..(25): SEQ ID NO: 2048; WAN024FD4_at; Start 1124; Stop 1148
tatttgctcgtgttgtcagaaaaca

SEQ ID NO: 201264 - DNA, 25 bp, Artificial
  probe
  misc_feature (1)..(25): SEQ ID NO: 2048; WAN024FD4_at; Start 414; Stop 438
taactggtttattgggtatggtgca

SEQ ID NO: 201265 - DNA, 25 bp, Artificial
  probe
  misc_feature (1)..(25): SEQ ID NO: 2048; WAN024FD4_at; Start 1564; Stop 1588
tctgcaggtgatgaaacagcaacat

SEQ ID NO: 201266 - DNA, 25 bp, Artificial
  probe
  misc_feature (1)..(25): SEQ ID NO: 2048; WAN024FD4_at; Start 159; Stop 183
tcagagggcacttcagagtattatg

SEQ ID NO: 201267 - DNA, 25 bp, Artificial
  probe
  misc_feature (1)..(25): SEQ ID NO: 2048; WAN024FD4_at; Start 1048; Stop 1072
gcggcattctctccattcttggtca

SEQ ID NO: 201268 - DNA, 25 bp, Artificial
  probe
  misc_feature (1)..(25): SEQ ID NO: 2048; WAN024FD4_at; Start 911; Stop 935
gattgttcacagttttcatgcttcc

SEQ ID NO: 201269 - DNA, 25 bp, Artificial
  probe
  misc_feature (1)..(25): SEQ ID NO: 2048; WAN024FD4_at; Start 497; Stop 521
caattcgaagcgttgactatcacac

SEQ ID NO: 201270 - DNA, 25 bp, Artificial
  probe
  misc_feature (1)..(25): SEQ ID NO: 2048; WAN024FD4_at; Start 826; Stop 850
tctatctctaagactaaagcgcctc

SEQ ID NO: 201271 - DNA, 25 bp, Artificial
  probe
  misc_feature (1)..(25): SEQ ID NO: 2048; WAN024FD4_at; Start 314; Stop 338
tttatggaggagtggttttagcgac

SEQ ID NO: 201272 - DNA, 25 bp, Artificial
  probe
  misc_feature (1)..(25): SEQ ID NO: 2048; WAN024FD4_at; Start 144; Stop 168
tcgtgttctaaaatctcagagggca

SEQ ID NO: 201273 - DNA, 25 bp, Artificial
  probe
  misc_feature (1)..(25): SEQ ID NO: 2048; WAN024FD4_at; Start 1109; Stop 1133
caattctcgcagttgtatttgctcg

SEQ ID NO: 201274 - DNA, 25 bp, Artificial
  probe
  misc_feature (1)..(25): SEQ ID NO: 2048; WAN024FD4_at; Start 1582; Stop 1606
gcaacatctaatgcacaagctctgg

SEQ ID NO: 201275 - DNA, 25 bp, Artificial
  probe
  misc_feature (1)..(25): SEQ ID NO: 2048; WAN024FD4_at; Start 1451; Stop 1475
taccggttgttctctctgttattgc

SEQ ID NO: 201276 - DNA, 25 bp, Artificial
  probe
  misc_feature (1)..(25): SEQ ID NO: 2048; WAN024FD4_at; Start 1388; Stop 1412
cagcaagaagtatgggtgcttcacc

SEQ ID NO: 201277 - DNA, 25 bp, Artificial
  probe
  misc_feature (1)..(25): SEQ ID NO: 2048; WAN024FD4_at; Start 119; Stop 143
gagaattttcccttgatgctgtaca

SEQ ID NO: 201278 - DNA, 25 bp, Artificial
  probe
  misc_feature (1)..(25): SEQ ID NO: 2048; WAN024FD4_at; Start 1549; Stop 1573
ggtattacgattcgatctgcaggtg

SEQ ID NO: 201279 - DNA, 25 bp, Artificial
  probe
  misc_feature (1)..(25): SEQ ID NO: 2048; WAN024FD4_at; Start 698; Stop 722
tgattattacatttgcagggatggg

SEQ ID NO: 201280 - DNA, 25 bp, Artificial
  probe
  misc_feature (1)..(25): SEQ ID NO: 2048; WAN024FD4_at; Start 1034; Stop 1058
tctttagtaatagtgcggcattctc

SEQ ID NO: 201281 - DNA, 25 bp, Artificial
  probe
  misc_feature (1)..(25): SEQ ID NO: 2048; WAN024FD4_at; Start 531; Stop 555
tgctcgaaatatgggagcaaaacca

SEQ ID NO: 201282 - DNA, 25 bp, Artificial
  probe
  misc_feature (1)..(25): SEQ ID NO: 2048; WAN024FD4_at; Start 880; Stop 904
tggaatatcattgctcacattgtag

SEQ ID NO: 201283 - DNA, 25 bp, Artificial
  probe
  misc_feature (1)..(25): SEQ ID NO: 2048; WAN024FD4_at; Start 643; Stop 667
gcagtagcagcacccatgattgttg

SEQ ID NO: 201284 - DNA, 25 bp, Artificial
  probe
  misc_feature (1)..(25): SEQ ID NO: 2048; WAN024FD4_at; Start 1649; Stop 1673
tattatacttcacacaaagaccggg

SEQ ID NO: 201285 - DNA, 25 bp, Artificial
  probe
  misc_feature (1)..(25): SEQ ID NO: 2048; WAN024FD4_at; Start 459; Stop 483
ttcaggaactgctaatcatacattg

SEQ ID NO: 201286 - DNA, 25 bp, Artificial
  probe
  misc_feature (1)..(25): SEQ ID NO: 2048; WAN024FD4_at; Start 965; Stop 989
cagatccagttgcaattcaaacagg

SEQ ID NO: 201287 - DNA, 25 bp, Artificial
  probe
  misc_feature (1)..(25): SEQ ID NO: 2048; WAN024FD4_at; Start 76; Stop 100
tatccaaactttgatctagtagtga

SEQ ID NO: 201288 - DNA, 25 bp, Artificial
  probe
  misc_feature (1)..(25): SEQ ID NO: 2048; WAN024FD4_at; Start 1177; Stop 1201
tatggtgctctacttccttggttac

SEQ ID NO: 201289 - DNA, 25 bp, Artificial
  probe
  misc_feature (1)..(25): SEQ ID NO: 2048; WAN024FD4_at; Start 627; Stop 651
tcttagtggtttatctgcagtagca

SEQ ID NO: 201290 - DNA, 25 bp, Artificial
  probe
  misc_feature (1)..(25): SEQ ID NO: 2048; WAN024FD4_at; Start 859; Stop 883
caaaaaattgcgtctaagccttgga

SEQ ID NO: 201291 - DNA, 25 bp, Artificial
  probe
  misc_feature (1)..(25): SEQ ID NO: 1485; WAN024FD5_at; Start 238; Stop 262
tggcgttccaatgctctctggatgg

SEQ ID NO: 201292 - DNA, 25 bp, Artificial
  probe
  misc_feature (1)..(25): SEQ ID NO: 1485; WAN024FD5_at; Start 2; Stop 26
tgacttgggcaatggctgtgcgttc

SEQ ID NO: 201293 - DNA, 25 bp, Artificial
  probe
  misc_feature (1)..(25): SEQ ID NO: 1485; WAN024FD5_at; Start 261; Stop 285
ggtactggaagccataaatcggtag

SEQ ID NO: 201294 - DNA, 25 bp, Artificial
  probe
  misc_feature (1)..(25): SEQ ID NO: 1485; WAN024FD5_at; Start 9; Stop 33
ggcaatggctgtgcgttcttcaggt

SEQ ID NO: 201295 - DNA, 25 bp, Artificial
  probe
  misc_feature (1)..(25): SEQ ID NO: 1485; WAN024FD5_at; Start 196; Stop 220
tacaacctcctcgataaaattccga

SEQ ID NO: 201296 - DNA, 25 bp, Artificial
  probe
  misc_feature (1)..(25): SEQ ID NO: 1485; WAN024FD5_at; Start 168; Stop 192
aatctctttcatcctagtttcctca

SEQ ID NO: 201297 - DNA, 25 bp, Artificial
  probe
  misc_feature (1)..(25): SEQ ID NO: 1485; WAN024FD5_at; Start 254; Stop 278
tctggatggtactggaagccataaa

SEQ ID NO: 201298 - DNA, 25 bp, Artificial
  probe
  misc_feature (1)..(25): SEQ ID NO: 1485; WAN024FD5_at; Start 62; Stop 86
ggagagaagcaatctgcgcttcagt

SEQ ID NO: 201299 - DNA, 25 bp, Artificial
  probe
  misc_feature (1)..(25): SEQ ID NO: 1485; WAN024FD5_at; Start 39; Stop 63
ccccttcatcttaagagctaagagg

SEQ ID NO: 201300 - DNA, 25 bp, Artificial
  probe
  misc_feature (1)..(25): SEQ ID NO: 1485; WAN024FD5_at; Start 102; Stop 126
gatacgctcaatgacatccgtcatt

SEQ ID NO: 201301 - DNA, 25 bp, Artificial
  probe
  misc_feature (1)..(25): SEQ ID NO: 1485; WAN024FD5_at; Start 201; Stop 225
cctcctcgataaaattccgaataga

SEQ ID NO: 201302 - DNA, 25 bp, Artificial
  probe
  misc_feature (1)..(25): SEQ ID NO: 1485; WAN024FD5_at; Start 48; Stop 72
cttaagagctaagaggagagaagca

SEQ ID NO: 201303 - DNA, 25 bp, Artificial
  probe
  misc_feature (1)..(25): SEQ ID NO: 1485; WAN024FD5_at; Start 224; Stop 248
gaagacaagccgtctggcgttccaa

SEQ ID NO: 201304 - DNA, 25 bp, Artificial
  probe
  misc_feature (1)..(25): SEQ ID NO: 1485; WAN024FD5_at; Start 250; Stop 274
gctctctggatggtactggaagcca

SEQ ID NO: 201305 - DNA, 25 bp, Artificial
  probe
  misc_feature (1)..(25): SEQ ID NO: 1485; WAN024FD5_at; Start 72; Stop 96
aatctgcgcttcagttacacgccca

SEQ ID NO: 201306 - DNA, 25 bp, Artificial
  probe
  misc_feature (1)..(25): SEQ ID NO: 1485; WAN024FD5_at; Start 246; Stop 270
caatgctctctggatggtactggaa

SEQ ID NO: 201307 - DNA, 25 bp, Artificial
  probe
  misc_feature (1)..(25): SEQ ID NO: 1485; WAN024FD5_at; Start 87; Stop 111
tacacgcccagttacgatacgctca

SEQ ID NO: 201308 - DNA, 25 bp, Artificial
  probe
  misc_feature (1)..(25): SEQ ID NO: 1485; WAN024FD5_at; Start 76; Stop 100
tgcgcttcagttacacgcccagtta

SEQ ID NO: 201309 - DNA, 25 bp, Artificial
  probe
  misc_feature (1)..(25): SEQ ID NO: 1485; WAN024FD5_at; Start 125; Stop 149
tttccacacctgataaattttcaaa

SEQ ID NO: 201310 - DNA, 25 bp, Artificial
  probe
  misc_feature (1)..(25): SEQ ID NO: 1485; WAN024FD5_at; Start 68; Stop 92
aagcaatctgcgcttcagttacacg

SEQ ID NO: 201311 - DNA, 25 bp, Artificial
  probe
  misc_feature (1)..(25): SEQ ID NO: 1485; WAN024FD5_at; Start 216; Stop 240
tccgaatagaagacaagccgtctgg

SEQ ID NO: 201312 - DNA, 25 bp, Artificial
  probe
  misc_feature (1)..(25): SEQ ID NO: 1485; WAN024FD5_at; Start 219; Stop 243
gaatagaagacaagccgtctggcgt

SEQ ID NO: 201313 - DNA, 25 bp, Artificial
  probe
  misc_feature (1)..(25): SEQ ID NO: 1485; WAN024FD5_at; Start 234; Stop 258
cgtctggcgttccaatgctctctgg

SEQ ID NO: 201314 - DNA, 25 bp, Artificial
  probe
  misc_feature (1)..(25): SEQ ID NO: 1485; WAN024FD5_at; Start 97; Stop 121
gttacgatacgctcaatgacatccg

SEQ ID NO: 201315 - DNA, 25 bp, Artificial
  probe
  misc_feature (1)..(25): SEQ ID NO: 1485; WAN024FD5_at; Start 213; Stop 237
aattccgaatagaagacaagccgtc

SEQ ID NO: 201316 - DNA, 25 bp, Artificial
  probe
  misc_feature (1)..(25): SEQ ID NO: 1485; WAN024FD5_at; Start 79; Stop 103
gcttcagttacacgcccagttacga

SEQ ID NO: 201317 - DNA, 25 bp, Artificial
  probe
  misc_feature (1)..(25): SEQ ID NO: 1485; WAN024FD5_at; Start 17; Stop 41
ctgtgcgttcttcaggtgtttcccc

SEQ ID NO: 201318 - DNA, 25 bp, Artificial
  probe
  misc_feature (1)..(25): SEQ ID NO: 1485; WAN024FD5_at; Start 56; Stop 80
ctaagaggagagaagcaatctgcgc

SEQ ID NO: 201319 - DNA, 25 bp, Artificial
  probe
  misc_feature (1)..(25): SEQ ID NO: 1485; WAN024FD5_at; Start 227; Stop 251
gacaagccgtctggcgttccaatgc

SEQ ID NO: 201320 - DNA, 25 bp, Artificial
  probe
  misc_feature (1)..(25): SEQ ID NO: 1485; WAN024FD5_at; Start 177; Stop 201
catcctagtttcctcactttacaac

SEQ ID NO: 201321 - DNA, 25 bp, Artificial
  probe
  misc_feature (1)..(25): SEQ ID NO: 1485; WAN024FD5_at; Start 83; Stop 107
cagttacacgcccagttacgatacg

SEQ ID NO: 201322 - DNA, 25 bp, Artificial
  probe
  misc_feature (1)..(25): SEQ ID NO: 1485; WAN024FD5_at; Start 154; Stop 178
gctagtttttcaataatctctttca

SEQ ID NO: 201323 - DNA, 25 bp, Artificial
  probe
  misc_feature (1)..(25): SEQ ID NO: 1485; WAN024FD5_at; Start 91; Stop 115
cgcccagttacgatacgctcaatga

SEQ ID NO: 201324 - DNA, 25 bp, Artificial
  probe
  misc_feature (1)..(25): SEQ ID NO: 1485; WAN024FD5_at; Start 117; Stop 141
atccgtcatttccacacctgataaa

SEQ ID NO: 201325 - DNA, 25 bp, Artificial
  probe
  misc_feature (1)..(25): SEQ ID NO: 5193; WAN024FD6_at; Start 211; Stop 235
tacagcttggaatcatcatttctca

SEQ ID NO: 201326 - DNA, 25 bp, Artificial
  probe
  misc_feature (1)..(25): SEQ ID NO: 5193; WAN024FD6_at; Start 30; Stop 54
ttttggagccaaacctagcttacca

SEQ ID NO: 201327 - DNA, 25 bp, Artificial
  probe
  misc_feature (1)..(25): SEQ ID NO: 5193; WAN024FD6_at; Start 196; Stop 220
ttttcagcttcttcatacagcttgg

SEQ ID NO: 201328 - DNA, 25 bp, Artificial
  probe
  misc_feature (1)..(25): SEQ ID NO: 5193; WAN024FD6_at; Start 166; Stop 190
ggaccaggagaaaagaccagaccat

SEQ ID NO: 201329 - DNA, 25 bp, Artificial
  probe
  misc_feature (1)..(25): SEQ ID NO: 5193; WAN024FD6_at; Start 270; Stop 294
ggccaagttataggtaaaagaatca

SEQ ID NO: 201330 - DNA, 25 bp, Artificial
  probe
  misc_feature (1)..(25): SEQ ID NO: 5193; WAN024FD6_at; Start 172; Stop 196
ggagaaaagaccagaccatctgctt

SEQ ID NO: 201331 - DNA, 25 bp, Artificial
  probe
  misc_feature (1)..(25): SEQ ID NO: 5193; WAN024FD6_at; Start 20; Stop 44
catgcatgacttttggagccaaacc

SEQ ID NO: 201332 - DNA, 25 bp, Artificial
  probe
  misc_feature (1)..(25): SEQ ID NO: 5193; WAN024FD6_at; Start 153; Stop 177
aactggccaaccaggaccaggagaa

SEQ ID NO: 201333 - DNA, 25 bp, Artificial
  probe
  misc_feature (1)..(25): SEQ ID NO: 5193; WAN024FD6_at; Start 202; Stop 226
gcttcttcatacagcttggaatcat

SEQ ID NO: 201334 - DNA, 25 bp, Artificial
  probe
  misc_feature (1)..(25): SEQ ID NO: 5193; WAN024FD6_at; Start 236; Stop 260
gaacctgaacttctgcaaaattccc

SEQ ID NO: 201335 - DNA, 25 bp, Artificial
  probe
  misc_feature (1)..(25): SEQ ID NO: 5193; WAN024FD6_at; Start 282; Stop 306
ggtaaaagaatcatagttgtcaatc

SEQ ID NO: 201336 - DNA, 25 bp, Artificial
  probe
  misc_feature (1)..(25): SEQ ID NO: 5193; WAN024FD6_at; Start 160; Stop 184
caaccaggaccaggagaaaagacca

SEQ ID NO: 201337 - DNA, 25 bp, Artificial
  probe
  misc_feature (1)..(25): SEQ ID NO: 5193; WAN024FD6_at; Start 53; Stop 77
caccaaagacttctgcaatggcttg

SEQ ID NO: 201338 - DNA, 25 bp, Artificial
  probe
  misc_feature (1)..(25): SEQ ID NO: 5193; WAN024FD6_at; Start 45; Stop 69
tagcttaccaccaaagacttctgca

SEQ ID NO: 201339 - DNA, 25 bp, Artificial
  probe
  misc_feature (1)..(25): SEQ ID NO: 5193; WAN024FD6_at; Start 64; Stop 88
tctgcaatggcttggtggcccaaac

SEQ ID NO: 201340 - DNA, 25 bp, Artificial
  probe
  misc_feature (1)..(25): SEQ ID NO: 5193; WAN024FD6_at; Start 37; Stop 61
gccaaacctagcttaccaccaaaga

SEQ ID NO: 201341 - DNA, 25 bp, Artificial
  probe
  misc_feature (1)..(25): SEQ ID NO: 5193; WAN024FD6_at; Start 96; Stop 120
aagaatcggcttcttgcctgcaaaa

SEQ ID NO: 201342 - DNA, 25 bp, Artificial
  probe
  misc_feature (1)..(25): SEQ ID NO: 5193; WAN024FD6_at; Start 13; Stop 37
tgtttcccatgcatgacttttggag

SEQ ID NO: 201343 - DNA, 25 bp, Artificial
  probe
  misc_feature (1)..(25): SEQ ID NO: 5193; WAN024FD6_at; Start 180; Stop 204
gaccagaccatctgctttttcagct

SEQ ID NO: 201344 - DNA, 25 bp, Artificial
  probe
  misc_feature (1)..(25): SEQ ID NO: 5193; WAN024FD6_at; Start 144; Stop 168
tccagcatcaactggccaaccagga

SEQ ID NO: 201345 - DNA, 25 bp, Artificial
  probe
  misc_feature (1)..(25): SEQ ID NO: 5193; WAN024FD6_at; Start 242; Stop 266
gaacttctgcaaaattcccaatgta

SEQ ID NO: 201346 - DNA, 25 bp, Artificial
  probe
  misc_feature (1)..(25): SEQ ID NO: 5193; WAN024FD6_at; Start 67; Stop 91
gcaatggcttggtggcccaaacaaa

SEQ ID NO: 201347 - DNA, 25 bp, Artificial
  probe
  misc_feature (1)..(25): SEQ ID NO: 5193; WAN024FD6_at; Start 263; Stop 287
tgtattgggccaagttataggtaaa

SEQ ID NO: 201348 - DNA, 25 bp, Artificial
  probe
  misc_feature (1)..(25): SEQ ID NO: 5193; WAN024FD6_at; Start 3; Stop 27
gatattgctctgtttcccatgcatg

SEQ ID NO: 201349 - DNA, 25 bp, Artificial
  probe
  misc_feature (1)..(25): SEQ ID NO: 5193; WAN024FD6_at; Start 250; Stop 274
gcaaaattcccaatgtattgggcca

SEQ ID NO: 201350 - DNA, 25 bp, Artificial
  probe
  misc_feature (1)..(25): SEQ ID NO: 5193; WAN024FD6_at; Start 84; Stop 108
caaacaaatcccaagaatcggcttc

SEQ ID NO: 201351 - DNA, 25 bp, Artificial
  probe
  misc_feature (1)..(25): SEQ ID NO: 5193; WAN024FD6_at; Start 219; Stop 243
ggaatcatcatttctcagaacctga

SEQ ID NO: 201352 - DNA, 25 bp, Artificial
  probe
  misc_feature (1)..(25): SEQ ID NO: 5193; WAN024FD6_at; Start 227; Stop 251
catttctcagaacctgaacttctgc

SEQ ID NO: 201353 - DNA, 25 bp, Artificial
  probe
  misc_feature (1)..(25): SEQ ID NO: 5193; WAN024FD6_at; Start 138; Stop 162
catctttccagcatcaactggccaa

SEQ ID NO: 201354 - DNA, 25 bp, Artificial
  probe
  misc_feature (1)..(25): SEQ ID NO: 5193; WAN024FD6_at; Start 103; Stop 127
ggcttcttgcctgcaaaatcacgaa

SEQ ID NO: 201355 - DNA, 25 bp, Artificial
  probe
  misc_feature (1)..(25): SEQ ID NO: 5193; WAN024FD6_at; Start 59; Stop 83
agacttctgcaatggcttggtggcc

SEQ ID NO: 201356 - DNA, 25 bp, Artificial
  probe
  misc_feature (1)..(25): SEQ ID NO: 5193; WAN024FD6_at; Start 125; Stop 149
gaatcatgtcttccatctttccagc

SEQ ID NO: 201357 - DNA, 25 bp, Artificial
  probe
  misc_feature (1)..(25): SEQ ID NO: 5193; WAN024FD6_at; Start 76; Stop 100
tggtggcccaaacaaatcccaagaa

SEQ ID NO: 201358 - DNA, 25 bp, Artificial
  probe
  misc_feature (1)..(25): SEQ ID NO: 5193; WAN024FD6_at; Start 111; Stop 135
gcctgcaaaatcacgaatcatgtct

SEQ ID NO: 201359 - DNA, 25 bp, Artificial
  probe
  misc_feature (1)..(25): SEQ ID NO: 1873; WAN024FD7_at; Start 468; Stop 492
aaacctaccgatttatggcttccag

SEQ ID NO: 201360 - DNA, 25 bp, Artificial
  probe
  misc_feature (1)..(25): SEQ ID NO: 1873; WAN024FD7_at; Start 262; Stop 286
ggtggtaagctaggtttggctccaa

SEQ ID NO: 201361 - DNA, 25 bp, Artificial
  probe
  misc_feature (1)..(25): SEQ ID NO: 1873; WAN024FD7_at; Start 322; Stop 346
gaagcgccatctgttttgtatcaag

SEQ ID NO: 201362 - DNA, 25 bp, Artificial
  probe
  misc_feature (1)..(25): SEQ ID NO: 1873; WAN024FD7_at; Start 295; Stop 319
catgggaaacagagcaatatcaact

SEQ ID NO: 201363 - DNA, 25 bp, Artificial
  probe
  misc_feature (1)..(25): SEQ ID NO: 1873; WAN024FD7_at; Start 238; Stop 262
caccaagccattgcagaagtctttg

SEQ ID NO: 201364 - DNA, 25 bp, Artificial
  probe
  misc_feature (1)..(25): SEQ ID NO: 1873; WAN024FD7_at; Start 37; Stop 61
tataacttggcccaatacattggga

SEQ ID NO: 201365 - DNA, 25 bp, Artificial
  probe
  misc_feature (1)..(25): SEQ ID NO: 1873; WAN024FD7_at; Start 24; Stop 48
tgattcttttacctataacttggcc

SEQ ID NO: 201366 - DNA, 25 bp, Artificial
  probe
  misc_feature (1)..(25): SEQ ID NO: 1873; WAN024FD7_at; Start 332; Stop 356
ctgttttgtatcaaggtattgagga

SEQ ID NO: 201367 - DNA, 25 bp, Artificial
  probe
  misc_feature (1)..(25): SEQ ID NO: 1873; WAN024FD7_at; Start 251; Stop 275
cagaagtctttggtggtaagctagg

SEQ ID NO: 201368 - DNA, 25 bp, Artificial
  probe
  misc_feature (1)..(25): SEQ ID NO: 1873; WAN024FD7_at; Start 507; Stop 531
cattggaacgccagacggcttgtct

SEQ ID NO: 201369 - DNA, 25 bp, Artificial
  probe
  misc_feature (1)..(25): SEQ ID NO: 1873; WAN024FD7_at; Start 168; Stop 192
tgctggaaagatggaagacatgatt

SEQ ID NO: 201370 - DNA, 25 bp, Artificial
  probe
  misc_feature (1)..(25): SEQ ID NO: 1873; WAN024FD7_at; Start 151; Stop 175
cctggttggccagttgatgctggaa

SEQ ID NO: 201371 - DNA, 25 bp, Artificial
  probe
  misc_feature (1)..(25): SEQ ID NO: 1873; WAN024FD7_at; Start 520; Stop 544
gacggcttgtcttctattcggaatt

SEQ ID NO: 201372 - DNA, 25 bp, Artificial
  probe
  misc_feature (1)..(25): SEQ ID NO: 1873; WAN024FD7_at; Start 389; Stop 413
tgattgaggaaatgccagaagactt

SEQ ID NO: 201373 - DNA, 25 bp, Artificial
  probe
  misc_feature (1)..(25): SEQ ID NO: 1873; WAN024FD7_at; Start 402; Stop 426
gccagaagactttgaagtgacagct

SEQ ID NO: 201374 - DNA, 25 bp, Artificial
  probe
  misc_feature (1)..(25): SEQ ID NO: 1873; WAN024FD7_at; Start 284; Stop 308
caaaagtcatgcatgggaaacagag

SEQ ID NO: 201375 - DNA, 25 bp, Artificial
  probe
  misc_feature (1)..(25): SEQ ID NO: 1873; WAN024FD7_at; Start 496; Stop 520
catccagagagcattggaacgccag

SEQ ID NO: 201376 - DNA, 25 bp, Artificial
  probe
  misc_feature (1)..(25): SEQ ID NO: 1873; WAN024FD7_at; Start 76; Stop 100
caggttctgagaaatgatgattcca

SEQ ID NO: 201377 - DNA, 25 bp, Artificial
  probe
  misc_feature (1)..(25): SEQ ID NO: 1873; WAN024FD7_at; Start 127; Stop 151
gatggtctggtcttttctcctggtc

SEQ ID NO: 201378 - DNA, 25 bp, Artificial
  probe
  misc_feature (1)..(25): SEQ ID NO: 1873; WAN024FD7_at; Start 410; Stop 434
actttgaagtgacagctcgttcgac

SEQ ID NO: 201379 - DNA, 25 bp, Artificial
  probe
  misc_feature (1)..(25): SEQ ID NO: 1873; WAN024FD7_at; Start 112; Stop 136
gaagctgaaaaagcagatggtctgg

SEQ ID NO: 201380 - DNA, 25 bp, Artificial
  probe
  misc_feature (1)..(25): SEQ ID NO: 1873; WAN024FD7_at; Start 49; Stop 73
caatacattgggaattttgcagaag

SEQ ID NO: 201381 - DNA, 25 bp, Artificial
  probe
  misc_feature (1)..(25): SEQ ID NO: 1873; WAN024FD7_at; Start 275; Stop 299
gtttggctccaaaagtcatgcatgg

SEQ ID NO: 201382 - DNA, 25 bp, Artificial
  probe
  misc_feature (1)..(25): SEQ ID NO: 1873; WAN024FD7_at; Start 420; Stop 444
gacagctcgttcgactgatgaccaa

SEQ ID NO: 201383 - DNA, 25 bp, Artificial
  probe
  misc_feature (1)..(25): SEQ ID NO: 1873; WAN024FD7_at; Start 86; Stop 110
gaaatgatgattccaagctgtatga

SEQ ID NO: 201384 - DNA, 25 bp, Artificial
  probe
  misc_feature (1)..(25): SEQ ID NO: 1873; WAN024FD7_at; Start 379; Stop 403
cacagtattttgattgaggaaatgc

SEQ ID NO: 201385 - DNA, 25 bp, Artificial
  probe
  misc_feature (1)..(25): SEQ ID NO: 1873; WAN024FD7_at; Start 97; Stop 121
tccaagctgtatgaagaagctgaaa

SEQ ID NO: 201386 - DNA, 25 bp, Artificial
  probe
  misc_feature (1)..(25): SEQ ID NO: 1873; WAN024FD7_at; Start 363; Stop 387
tgcggtcatgcgttatcacagtatt

SEQ ID NO: 201387 - DNA, 25 bp, Artificial
  probe
  misc_feature (1)..(25): SEQ ID NO: 1873; WAN024FD7_at; Start 308; Stop 332
gcaatatcaactttgaagcgccatc

SEQ ID NO: 201388 - DNA, 25 bp, Artificial
  probe
  misc_feature (1)..(25): SEQ ID NO: 1873; WAN024FD7_at; Start 137; Stop 161
tcttttctcctggtcctggttggcc

SEQ ID NO: 201389 - DNA, 25 bp, Artificial
  probe
  misc_feature (1)..(25): SEQ ID NO: 1873; WAN024FD7_at; Start 431; Stop 455
cgactgatgaccaagccatcatggg

SEQ ID NO: 201390 - DNA, 25 bp, Artificial
  probe
  misc_feature (1)..(25): SEQ ID NO: 1873; WAN024FD7_at; Start 12; Stop 36
gattgacaactatgattcttttacc

SEQ ID NO: 201391 - DNA, 25 bp, Artificial
  probe
  misc_feature (1)..(25): SEQ ID NO: 1873; WAN024FD7_at; Start 60; Stop 84
gaattttgcagaagttcaggttctg

SEQ ID NO: 201392 - DNA, 25 bp, Artificial
  probe
  misc_feature (1)..(25): SEQ ID NO: 1873; WAN024FD7_at; Start 483; Stop 507
tggcttccagtaccatccagagagc

SEQ ID NO: 201393 - DNA, 25 bp, Artificial
  probe
  misc_feature (1)..(25): SEQ ID NO: 885; WAN024FD8_at; Start 100; Stop 124
gcgcagattgcttctctcctcttag

SEQ ID NO: 201394 - DNA, 25 bp, Artificial
  probe
  misc_feature (1)..(25): SEQ ID NO: 885; WAN024FD8_at; Start 683; Stop 707
tgaacggaacaaccaagattgcact

SEQ ID NO: 201395 - DNA, 25 bp, Artificial
  probe
  misc_feature (1)..(25): SEQ ID NO: 885; WAN024FD8_at; Start 370; Stop 394
gaagccttgggaatcaatcttgacc

SEQ ID NO: 201396 - DNA, 25 bp, Artificial
  probe
  misc_feature (1)..(25): SEQ ID NO: 885; WAN024FD8_at; Start 618; Stop 642
gaaaaatatgggtcgcaaacgtgcc

SEQ ID NO: 201397 - DNA, 25 bp, Artificial
  probe
  misc_feature (1)..(25): SEQ ID NO: 885; WAN024FD8_at; Start 80; Stop 104
taactgggcgtgtaactgaagcgca

SEQ ID NO: 201398 - DNA, 25 bp, Artificial
  probe
  misc_feature (1)..(25): SEQ ID NO: 885; WAN024FD8_at; Start 43; Stop 67
tcaggtgtggaaatgacggatgtca

SEQ ID NO: 201399 - DNA, 25 bp, Artificial
  probe
  misc_feature (1)..(25): SEQ ID NO: 885; WAN024FD8_at; Start 728; Stop 752
gcttgtcaagctttactccagagga

SEQ ID NO: 201400 - DNA, 25 bp, Artificial
  probe
  misc_feature (1)..(25): SEQ ID NO: 885; WAN024FD8_at; Start 943; Stop 967
caagtgattgctagaggcaaggccc

SEQ ID NO: 201401 - DNA, 25 bp, Artificial
  probe
  misc_feature (1)..(25): SEQ ID NO: 885; WAN024FD8_at; Start 528; Stop 552
gactggtccactgattcatccaatg

SEQ ID NO: 201402 - DNA, 25 bp, Artificial
  probe
  misc_feature (1)..(25): SEQ ID NO: 885; WAN024FD8_at; Start 633; Stop 657
caaacgtgccatcgtggttgctgga

SEQ ID NO: 201403 - DNA, 25 bp, Artificial
  probe
  misc_feature (1)..(25): SEQ ID NO: 885; WAN024FD8_at; Start 589; Stop 613
gaactcctagaaagtacagctcagg

SEQ ID NO: 201404 - DNA, 25 bp, Artificial
  probe
  misc_feature (1)..(25): SEQ ID NO: 885; WAN024FD8_at; Start 451; Stop 475
gctaaaaatatgcacccagctatga

SEQ ID NO: 201405 - DNA, 25 bp, Artificial
  probe
  misc_feature (1)..(25): SEQ ID NO: 885; WAN024FD8_at; Start 828; Stop 852
cgttctgaaaaacgaagcaagtcca

SEQ ID NO: 201406 - DNA, 25 bp, Artificial
  probe
  misc_feature (1)..(25): SEQ ID NO: 885; WAN024FD8_at; Start 844; Stop 868
gcaagtccattcttggaaacgacag

SEQ ID NO: 201407 - DNA, 25 bp, Artificial
  probe
  misc_feature (1)..(25): SEQ ID NO: 885; WAN024FD8_at; Start 672; Stop 696
tgaagctggcttgaacggaacaacc

SEQ ID NO: 201408 - DNA, 25 bp, Artificial
  probe
  misc_feature (1)..(25): SEQ ID NO: 885; WAN024FD8_at; Start 786; Stop 810
tcgtggtgggaatgctcaggaaaat

SEQ ID NO: 201409 - DNA, 25 bp, Artificial
  probe
  misc_feature (1)..(25): SEQ ID NO: 885; WAN024FD8_at; Start 177; Stop 201
catgagaggacatgcccagcatatt

SEQ ID NO: 201410 - DNA, 25 bp, Artificial
  probe
  misc_feature (1)..(25): SEQ ID NO: 885; WAN024FD8_at; Start 340; Stop 364
tcttctaaatctggttccgcagatg

SEQ ID NO: 201411 - DNA, 25 bp, Artificial
  probe
  misc_feature (1)..(25): SEQ ID NO: 885; WAN024FD8_at; Start 401; Stop 425
cagctgaactaggtaaggtctttga

SEQ ID NO: 201412 - DNA, 25 bp, Artificial
  probe
  misc_feature (1)..(25): SEQ ID NO: 885; WAN024FD8_at; Start 389; Stop 413
ttgacctcaaaccagctgaactagg

SEQ ID NO: 201413 - DNA, 25 bp, Artificial
  probe
  misc_feature (1)..(25): SEQ ID NO: 885; WAN024FD8_at; Start 487; Stop 511
ccagctcgtttggaattgggaattc

SEQ ID NO: 201414 - DNA, 25 bp, Artificial
  probe
  misc_feature (1)..(25): SEQ ID NO: 885; WAN024FD8_at; Start 265; Stop 289
aatatttccacaactgcagcctttg

SEQ ID NO: 201415 - DNA, 25 bp, Artificial
  probe
  misc_feature (1)..(25): SEQ ID NO: 885; WAN024FD8_at; Start 295; Stop 319
gctggtggcggtattcacatggcca

SEQ ID NO: 201416 - DNA, 25 bp, Artificial
  probe
  misc_feature (1)..(25): SEQ ID NO: 885; WAN024FD8_at; Start 65; Stop 89
tcattgagcgtatcgtaactgggcg

SEQ ID NO: 201417 - DNA, 25 bp, Artificial
  probe
  misc_feature (1)..(25): SEQ ID NO: 885; WAN024FD8_at; Start 574; Stop 598
ggaattagtcgtccagaactcctag

SEQ ID NO: 201418 - DNA, 25 bp, Artificial
  probe
  misc_feature (1)..(25): SEQ ID NO: 885; WAN024FD8_at; Start 699; Stop 723
gattgcacttcttgaaaatggcgaa

SEQ ID NO: 201419 - DNA, 25 bp, Artificial
  probe
  misc_feature (1)..(25): SEQ ID NO: 885; WAN024FD8_at; Start 471; Stop 495
tatgaaatacatcatgccagctcgt

SEQ ID NO: 201420 - DNA, 25 bp, Artificial
  probe
  misc_feature (1)..(25): SEQ ID NO: 885; WAN024FD8_at; Start 958; Stop 982
ggcaaggcccttgaaaaactcagac

SEQ ID NO: 201421 - DNA, 25 bp, Artificial
  probe
  misc_feature (1)..(25): SEQ ID NO: 885; WAN024FD8_at; Start 714; Stop 738
aaatggcgaaatcagcttgtcaagc

SEQ ID NO: 201422 - DNA, 25 bp, Artificial
  probe
  misc_feature (1)..(25): SEQ ID NO: 885; WAN024FD8_at; Start 859; Stop 883
gaaacgacagtcttgaatgctggtc

SEQ ID NO: 201423 - DNA, 25 bp, Artificial
  probe
  misc_feature (1)..(25): SEQ ID NO: 885; WAN024FD8_at; Start 512; Stop 536
caacgattatgaacttgactggtcc

SEQ ID NO: 201424 - DNA, 25 bp, Artificial
  probe
  misc_feature (1)..(25): SEQ ID NO: 885; WAN024FD8_at; Start 978; Stop 1002
cagactgttacaggagtaccaaaaa

SEQ ID NO: 201425 - DNA, 25 bp, Artificial
  probe
  misc_feature (1)..(25): SEQ ID NO: 885; WAN024FD8_at; Start 355; Stop 379
tccgcagatgtcctcgaagccttgg

SEQ ID NO: 201426 - DNA, 25 bp, Artificial
  probe
  misc_feature (1)..(25): SEQ ID NO: 885; WAN024FD8_at; Start 559; Stop 583
gaaacacagcttcttggaattagtc

SEQ ID NO: 201427 - DNA, 25 bp, Artificial
  probe
  misc_feature (1)..(25): SEQ ID NO: 2895; WAN024FD9_at; Start 175; Stop 199
cttgttacgtcatcgctgttaacga

SEQ ID NO: 201428 - DNA, 25 bp, Artificial
  probe
  misc_feature (1)..(25): SEQ ID NO: 2895; WAN024FD9_at; Start 74; Stop 98
ctctgatttctgaatataaagctgg

SEQ ID NO: 201429 - DNA, 25 bp, Artificial
  probe
  misc_feature (1)..(25): SEQ ID NO: 2895; WAN024FD9_at; Start 52; Stop 76
gcaacttctgaagatacgatttctc

SEQ ID NO: 201430 - DNA, 25 bp, Artificial
  probe
  misc_feature (1)..(25): SEQ ID NO: 2895; WAN024FD9_at; Start 78; Stop 102
gatttctgaatataaagctggaaca

SEQ ID NO: 201431 - DNA, 25 bp, Artificial
  probe
  misc_feature (1)..(25): SEQ ID NO: 2895; WAN024FD9_at; Start 207; Stop 231
tttaagatttgagaagaaaccacca

SEQ ID NO: 201432 - DNA, 25 bp, Artificial
  probe
  misc_feature (1)..(25): SEQ ID NO: 2895; WAN024FD9_at; Start 125; Stop 149
cgtttaagtcaactgcaacttgtgt

SEQ ID NO: 201433 - DNA, 25 bp, Artificial
  probe
  misc_feature (1)..(25): SEQ ID NO: 2895; WAN024FD9_at; Start 139; Stop 163
gcaacttgtgttttaccaacttcta

SEQ ID NO: 201434 - DNA, 25 bp, Artificial
  probe
  misc_feature (1)..(25): SEQ ID NO: 2895; WAN024FD9_at; Start 94; Stop 118
gctggaacatttttttggtactcaa

SEQ ID NO: 201435 - DNA, 25 bp, Artificial
  probe
  misc_feature (1)..(25): SEQ ID NO: 2895; WAN024FD9_at; Start 249; Stop 273
tgaaacgttttctagtgaaagacca

SEQ ID NO: 201436 - DNA, 25 bp, Artificial
  probe
  misc_feature (1)..(25): SEQ ID NO: 2895; WAN024FD9_at; Start 55; Stop 79
acttctgaagatacgatttctctga

SEQ ID NO: 201437 - DNA, 25 bp, Artificial
  probe
  misc_feature (1)..(25): SEQ ID NO: 2895; WAN024FD9_at; Start 111; Stop 135
gtactcaacaataacgtttaagtca

SEQ ID NO: 201438 - DNA, 25 bp, Artificial
  probe
  misc_feature (1)..(25): SEQ ID NO: 2895; WAN024FD9_at; Start 182; Stop 206
cgtcatcgctgttaacgattttttc

SEQ ID NO: 201439 - DNA, 25 bp, Artificial
  probe
  misc_feature (1)..(25): SEQ ID NO: 2895; WAN024FD9_at; Start 168; Stop 192
aacaccacttgttacgtcatcgctg

SEQ ID NO: 201440 - DNA, 25 bp, Artificial
  probe
  misc_feature (1)..(25): SEQ ID NO: 2895; WAN024FD9_at; Start 261; Stop 285
tagtgaaagaccaatgattttttgg

SEQ ID NO: 201441 - DNA, 25 bp, Artificial
  probe
  misc_feature (1)..(25): SEQ ID NO: 2895; WAN024FD9_at; Start 155; Stop 179
caacttctacgttaacaccacttgt

SEQ ID NO: 201442 - DNA, 25 bp, Artificial
  probe
  misc_feature (1)..(25): SEQ ID NO: 2895; WAN024FD9_at; Start 231; Stop 255
atcgattcccaaaagacctgaaacg

SEQ ID NO: 201443 - DNA, 25 bp, Artificial
  probe
  misc_feature (1)..(25): SEQ ID NO: 2895; WAN024FD9_at; Start 272; Stop 296
caatgattttttggataactttatc

SEQ ID NO: 201444 - DNA, 25 bp, Artificial
  probe
  misc_feature (1)..(25): SEQ ID NO: 2895; WAN024FD9_at; Start 172; Stop 196
ccacttgttacgtcatcgctgttaa

SEQ ID NO: 201445 - DNA, 25 bp, Artificial
  probe
  misc_feature (1)..(25): SEQ ID NO: 2895; WAN024FD9_at; Start 29; Stop 53
caatttccaagtcagtcattttagc

SEQ ID NO: 201446 - DNA, 25 bp, Artificial
  probe
  misc_feature (1)..(25): SEQ ID NO: 2895; WAN024FD9_at; Start 254; Stop 278
cgttttctagtgaaagaccaatgat

SEQ ID NO: 201447 - DNA, 25 bp, Artificial
  probe
  misc_feature (1)..(25): SEQ ID NO: 2895; WAN024FD9_at; Start 119; Stop 143
caataacgtttaagtcaactgcaac

SEQ ID NO: 201448 - DNA, 25 bp, Artificial
  probe
  misc_feature (1)..(25): SEQ ID NO: 2895; WAN024FD9_at; Start 6; Stop 30
gacaacgtttacgttgatttcaaca

SEQ ID NO: 201449 - DNA, 25 bp, Artificial
  probe
  misc_feature (1)..(25): SEQ ID NO: 2895; WAN024FD9_at; Start 214; Stop 238
tttgagaagaaaccaccatcgattc

SEQ ID NO: 201450 - DNA, 25 bp, Artificial
  probe
  misc_feature (1)..(25): SEQ ID NO: 2895; WAN024FD9_at; Start 217; Stop 241
gagaagaaaccaccatcgattccca

SEQ ID NO: 201451 - DNA, 25 bp, Artificial
  probe
  misc_feature (1)..(25): SEQ ID NO: 2895; WAN024FD9_at; Start 32; Stop 56
tttccaagtcagtcattttagcaac

SEQ ID NO: 201452 - DNA, 25 bp, Artificial
  probe
  misc_feature (1)..(25): SEQ ID NO: 2895; WAN024FD9_at; Start 2; Stop 26
tgtcgacaacgtttacgttgatttc

SEQ ID NO: 201453 - DNA, 25 bp, Artificial
  probe
  misc_feature (1)..(25): SEQ ID NO: 2895; WAN024FD9_at; Start 134; Stop 158
caactgcaacttgtgttttaccaac

SEQ ID NO: 201454 - DNA, 25 bp, Artificial
  probe
  misc_feature (1)..(25): SEQ ID NO: 2895; WAN024FD9_at; Start 41; Stop 65
cagtcattttagcaacttctgaaga

SEQ ID NO: 201455 - DNA, 25 bp, Artificial
  probe
  misc_feature (1)..(25): SEQ ID NO: 2895; WAN024FD9_at; Start 21; Stop 45
gatttcaacaatttccaagtcagtc

SEQ ID NO: 201456 - DNA, 25 bp, Artificial
  probe
  misc_feature (1)..(25): SEQ ID NO: 2895; WAN024FD9_at; Start 222; Stop 246
gaaaccaccatcgattcccaaaaga

SEQ ID NO: 201457 - DNA, 25 bp, Artificial
  probe
  misc_feature (1)..(25): SEQ ID NO: 2895; WAN024FD9_at; Start 61; Stop 85
gaagatacgatttctctgatttctg

SEQ ID NO: 201458 - DNA, 25 bp, Artificial
  probe
  misc_feature (1)..(25): SEQ ID NO: 2895; WAN024FD9_at; Start 82; Stop 106
tctgaatataaagctggaacatttt

SEQ ID NO: 201459 - DNA, 25 bp, Artificial
  probe
  misc_feature (1)..(25): SEQ ID NO: 2895; WAN024FD9_at; Start 228; Stop 252
accatcgattcccaaaagacctgaa

SEQ ID NO: 201460 - DNA, 25 bp, Artificial
  probe
  misc_feature (1)..(25): SEQ ID NO: 2895; WAN024FD9_at; Start 212; Stop 236
gatttgagaagaaaccaccatcgat

SEQ ID NO: 201461 - DNA, 25 bp, Artificial
  probe
  misc_feature (1)..(25): SEQ ID NO: 2821; WAN024FDA_at; Start 439; Stop 463
tctgacgttgctgaatcaacaggag

SEQ ID NO: 201462 - DNA, 25 bp, Artificial
  probe
  misc_feature (1)..(25): SEQ ID NO: 2821; WAN024FDA_at; Start 209; Stop 233
caagtggtgttaacgtagaagttgg

SEQ ID NO: 201463 - DNA, 25 bp, Artificial
  probe
  misc_feature (1)..(25): SEQ ID NO: 2821; WAN024FDA_at; Start 525; Stop 549
tcaagaaaaagttagcgaaggtgta

SEQ ID NO: 201464 - DNA, 25 bp, Artificial
  probe
  misc_feature (1)..(25): SEQ ID NO: 2821; WAN024FDA_at; Start 149; Stop 173
gaatcgatggtggtttcttctcaaa

SEQ ID NO: 201465 - DNA, 25 bp, Artificial
  probe
  misc_feature (1)..(25): SEQ ID NO: 2821; WAN024FDA_at; Start 366; Stop 390
caacgtaaacgttgtcgacatcaaa

SEQ ID NO: 201466 - DNA, 25 bp, Artificial
  probe
  misc_feature (1)..(25): SEQ ID NO: 2821; WAN024FDA_at; Start 540; Stop 564
cgaaggtgtagaagctgttaaaggt

SEQ ID NO: 201467 - DNA, 25 bp, Artificial
  probe
  misc_feature (1)..(25): SEQ ID NO: 2821; WAN024FDA_at; Start 132; Stop 156
cgtttcaggtcttttgggaatcgat

SEQ ID NO: 201468 - DNA, 25 bp, Artificial
  probe
  misc_feature (1)..(25): SEQ ID NO: 2821; WAN024FDA_at; Start 224; Stop 248
tagaagttggtaaaacacaagttgc

SEQ ID NO: 201469 - DNA, 25 bp, Artificial
  probe
  misc_feature (1)..(25): SEQ ID NO: 2821; WAN024FDA_at; Start 554; Stop 578
ctgttaaaggtgcagcaaatggtgt

SEQ ID NO: 201470 - DNA, 25 bp, Artificial
  probe
  misc_feature (1)..(25): SEQ ID NO: 2821; WAN024FDA_at; Start 239; Stop 263
cacaagttgcagttgacttaaacgt

SEQ ID NO: 201471 - DNA, 25 bp, Artificial
  probe
  misc_feature (1)..(25): SEQ ID NO: 2821; WAN024FDA_at; Start 451; Stop 475
gaatcaacaggagaattcacttcag

SEQ ID NO: 201472 - DNA, 25 bp, Artificial
  probe
  misc_feature (1)..(25): SEQ ID NO: 2821; WAN024FDA_at; Start 381; Stop 405
cgacatcaaaactaaagaacagcat

SEQ ID NO: 201473 - DNA, 25 bp, Artificial
  probe
  misc_feature (1)..(25): SEQ ID NO: 2821; WAN024FDA_at; Start 24; Stop 48
cactaacgtagaaaagaaagatgct

SEQ ID NO: 201474 - DNA, 25 bp, Artificial
  probe
  misc_feature (1)..(25): SEQ ID NO: 2821; WAN024FDA_at; Start 505; Stop 529
ggatctggtttctcaactgttcaag

SEQ ID NO: 201475 - DNA, 25 bp, Artificial
  probe
  misc_feature (1)..(25): SEQ ID NO: 2821; WAN024FDA_at; Start 39; Stop 63
gaaagatgctactgttgtagctcac

SEQ ID NO: 201476 - DNA, 25 bp, Artificial
  probe
  misc_feature (1)..(25): SEQ ID NO: 2821; WAN024FDA_at; Start 331; Stop 355
gttgctaaaatgactgacttggaaa

SEQ ID NO: 201477 - DNA, 25 bp, Artificial
  probe
  misc_feature (1)..(25): SEQ ID NO: 2821; WAN024FDA_at; Start 91; Stop 115
gataaagttatccaaaaaatcattg

SEQ ID NO: 201478 - DNA, 25 bp, Artificial
  probe
  misc_feature (1)..(25): SEQ ID NO: 2821; WAN024FDA_at; Start 478; Stop 502
caattcgaaaaagctaaatctggtc

SEQ ID NO: 201479 - DNA, 25 bp, Artificial
  probe
  misc_feature (1)..(25): SEQ ID NO: 2821; WAN024FDA_at; Start 296; Stop 320
tatattcagaaatcagagaaatcgt

SEQ ID NO: 201480 - DNA, 25 bp, Artificial
  probe
  misc_feature (1)..(25): SEQ ID NO: 2821; WAN024FDA_at; Start 311; Stop 335
gagaaatcgtatcttcagaagttgc

SEQ ID NO: 201481 - DNA, 25 bp, Artificial
  probe
  misc_feature (1)..(25): SEQ ID NO: 2821; WAN024FDA_at; Start 426; Stop 450
tcaagatcgcgtatctgacgttgct

SEQ ID NO: 201482 - DNA, 25 bp, Artificial
  probe
  misc_feature (1)..(25): SEQ ID NO: 2821; WAN024FDA_at; Start 281; Stop 305
aaaatgttccagctttatattcaga

SEQ ID NO: 201483 - DNA, 25 bp, Artificial
  probe
  misc_feature (1)..(25): SEQ ID NO: 2821; WAN024FDA_at; Start 578; Stop 602
tagtatctcacgaaaacactcgtgt

SEQ ID NO: 201484 - DNA, 25 bp, Artificial
  probe
  misc_feature (1)..(25): SEQ ID NO: 2821; WAN024FDA_at; Start 195; Stop 219
cagcgatgacgtaacaagtggtgtt

SEQ ID NO: 201485 - DNA, 25 bp, Artificial
  probe
  misc_feature (1)..(25): SEQ ID NO: 2821; WAN024FDA_at; Start 51; Stop 75
tgttgtagctcacgaaatcaaaggg

SEQ ID NO: 201486 - DNA, 25 bp, Artificial
  probe
  misc_feature (1)..(25): SEQ ID NO: 2821; WAN024FDA_at; Start 252; Stop 276
tgacttaaacgttattgttgagtac

SEQ ID NO: 201487 - DNA, 25 bp, Artificial
  probe
  misc_feature (1)..(25): SEQ ID NO: 2821; WAN024FDA_at; Start 467; Stop 491
tcacttcagaacaattcgaaaaagc

SEQ ID NO: 201488 - DNA, 25 bp, Artificial
  probe
  misc_feature (1)..(25): SEQ ID NO: 2821; WAN024FDA_at; Start 110; Stop 134
tcattggtctttcactagaaaacgt

SEQ ID NO: 201489 - DNA, 25 bp, Artificial
  probe
  misc_feature (1)..(25): SEQ ID NO: 2821; WAN024FDA_at; Start 490; Stop 514
gctaaatctggtcttggatctggtt

SEQ ID NO: 201490 - DNA, 25 bp, Artificial
  probe
  misc_feature (1)..(25): SEQ ID NO: 2821; WAN024FDA_at; Start 397; Stop 421
gaacagcatgaagcagactcagtaa

SEQ ID NO: 201491 - DNA, 25 bp, Artificial
  probe
  misc_feature (1)..(25): SEQ ID NO: 2821; WAN024FDA_at; Start 181; Stop 205
gaaaaaatcgttaacagcgatgacg

SEQ ID NO: 201492 - DNA, 25 bp, Artificial
  probe
  misc_feature (1)..(25): SEQ ID NO: 2821; WAN024FDA_at; Start 412; Stop 436
gactcagtaagccttcaagatcgcg

SEQ ID NO: 201493 - DNA, 25 bp, Artificial
  probe
  misc_feature (1)..(25): SEQ ID NO: 2821; WAN024FDA_at; Start 565; Stop 589
gcagcaaatggtgtagtatctcacg

SEQ ID NO: 201494 - DNA, 25 bp, Artificial
  probe
  misc_feature (1)..(25): SEQ ID NO: 2821; WAN024FDA_at; Start 346; Stop 370
gacttggaaattgttgaaatcaacg

SEQ ID NO: 201495 - DNA, 25 bp, Artificial
  probe
  misc_feature (1)..(25): SEQ ID NO: 5767; WAN024FDB_at; Start 952; Stop 976
gatcagatttcagtcaagtatcaga

SEQ ID NO: 201496 - DNA, 25 bp, Artificial
  probe
  misc_feature (1)..(25): SEQ ID NO: 5767; WAN024FDB_at; Start 232; Stop 256
cattcttctactaatggtatacgca

SEQ ID NO: 201497 - DNA, 25 bp, Artificial
  probe
  misc_feature (1)..(25): SEQ ID NO: 5767; WAN024FDB_at; Start 876; Stop 900
tgaaagtctctttatgaaatgcgta

SEQ ID NO: 201498 - DNA, 25 bp, Artificial
  probe
  misc_feature (1)..(25): SEQ ID NO: 5767; WAN024FDB_at; Start 1236; Stop 1260
gattaatttgctacaaaatcagcct

SEQ ID NO: 201499 - DNA, 25 bp, Artificial
  probe
  misc_feature (1)..(25): SEQ ID NO: 5767; WAN024FDB_at; Start 580; Stop 604
gagccactatctcaattgttagaat

SEQ ID NO: 201500 - DNA, 25 bp, Artificial
  probe
  misc_feature (1)..(25): SEQ ID NO: 5767; WAN024FDB_at; Start 811; Stop 835
tctttagatgaagaagttgtttgcc

SEQ ID NO: 201501 - DNA, 25 bp, Artificial
  probe
  misc_feature (1)..(25): SEQ ID NO: 5767; WAN024FDB_at; Start 253; Stop 277
cgcattattaataccgatgatagtg

SEQ ID NO: 201502 - DNA, 25 bp, Artificial
  probe
  misc_feature (1)..(25): SEQ ID NO: 5767; WAN024FDB_at; Start 646; Stop 670
catagaatgctaaagttgctcctag

SEQ ID NO: 201503 - DNA, 25 bp, Artificial
  probe
  misc_feature (1)..(25): SEQ ID NO: 5767; WAN024FDB_at; Start 565; Stop 589
gaaaatttttcatcagagccactat

SEQ ID NO: 201504 - DNA, 25 bp, Artificial
  probe
  misc_feature (1)..(25): SEQ ID NO: 5767; WAN024FDB_at; Start 174; Stop 198
acgtgcagtcaaagatgatctatcc

SEQ ID NO: 201505 - DNA, 25 bp, Artificial
  probe
  misc_feature (1)..(25): SEQ ID NO: 5767; WAN024FDB_at; Start 202; Stop 226
gttaaatctgcttttcctgacttga

SEQ ID NO: 201506 - DNA, 25 bp, Artificial
  probe
  misc_feature (1)..(25): SEQ ID NO: 5767; WAN024FDB_at; Start 919; Stop 943
gaaaaatcttaccatctattgagtg

SEQ ID NO: 201507 - DNA, 25 bp, Artificial
  probe
  misc_feature (1)..(25): SEQ ID NO: 5767; WAN024FDB_at; Start 1291; Stop 1315
gatcagtatcatgcaaaattcgttg

SEQ ID NO: 201508 - DNA, 25 bp, Artificial
  probe
  misc_feature (1)..(25): SEQ ID NO: 5767; WAN024FDB_at; Start 1071; Stop 1095
tcaaaaagggaatacaatcaggaac

SEQ ID NO: 201509 - DNA, 25 bp, Artificial
  probe
  misc_feature (1)..(25): SEQ ID NO: 5767; WAN024FDB_at; Start 1438; Stop 1462
cctcctattgaaaataagagactca

SEQ ID NO: 201510 - DNA, 25 bp, Artificial
  probe
  misc_feature (1)..(25): SEQ ID NO: 5767; WAN024FDB_at; Start 189; Stop 213
tgatctatcccatgttaaatctgct

SEQ ID NO: 201511 - DNA, 25 bp, Artificial
  probe
  misc_feature (1)..(25): SEQ ID NO: 5767; WAN024FDB_at; Start 662; Stop 686
tgctcctagttacgaacctatatag

SEQ ID NO: 201512 - DNA, 25 bp, Artificial
  probe
  misc_feature (1)..(25): SEQ ID NO: 5767; WAN024FDB_at; Start 1210; Stop 1234
ttcatcactcataccaaacatttgg

SEQ ID NO: 201513 - DNA, 25 bp, Artificial
  probe
  misc_feature (1)..(25): SEQ ID NO: 5767; WAN024FDB_at; Start 761; Stop 785
cagaaggaatagaaggtgttgctca

SEQ ID NO: 201514 - DNA, 25 bp, Artificial
  probe
  misc_feature (1)..(25): SEQ ID NO: 5767; WAN024FDB_at; Start 1304; Stop 1328
caaaattcgttgcagagacactttc

SEQ ID NO: 201515 - DNA, 25 bp, Artificial
  probe
  misc_feature (1)..(25): SEQ ID NO: 5767; WAN024FDB_at; Start 1469; Stop 1493
caaataatataaacacggtctcact

SEQ ID NO: 201516 - DNA, 25 bp, Artificial
  probe
  misc_feature (1)..(25): SEQ ID NO: 5767; WAN024FDB_at; Start 1144; Stop 1168
tctcactatttagagactcttgagg

SEQ ID NO: 201517 - DNA, 25 bp, Artificial
  probe
  misc_feature (1)..(25): SEQ ID NO: 5767; WAN024FDB_at; Start 1023; Stop 1047
cgcacatctgtatcgtcaagagttg

SEQ ID NO: 201518 - DNA, 25 bp, Artificial
  probe
  misc_feature (1)..(25): SEQ ID NO: 5767; WAN024FDB_at; Start 780; Stop 804
tgctcagagttttgaatcagaatac

SEQ ID NO: 201519 - DNA, 25 bp, Artificial
  probe
  misc_feature (1)..(25): SEQ ID NO: 5767; WAN024FDB_at; Start 390; Stop 414
tatcagttcatcttcgctctatcgt

SEQ ID NO: 201520 - DNA, 25 bp, Artificial
  probe
  misc_feature (1)..(25): SEQ ID NO: 5767; WAN024FDB_at; Start 467; Stop 491
gtctgacccctgttcaaatcattgg

SEQ ID NO: 201521 - DNA, 25 bp, Artificial
  probe
  misc_feature (1)..(25): SEQ ID NO: 5767; WAN024FDB_at; Start 116; Stop 140
ttgaacataaacgttggtttcatcg

SEQ ID NO: 201522 - DNA, 25 bp, Artificial
  probe
  misc_feature (1)..(25): SEQ ID NO: 5767; WAN024FDB_at; Start 7; Stop 31
tataattgcaagaggtttaatccga

SEQ ID NO: 201523 - DNA, 25 bp, Artificial
  probe
  misc_feature (1)..(25): SEQ ID NO: 5767; WAN024FDB_at; Start 632; Stop 656
tgaatttgtcaacgcatagaatgct

SEQ ID NO: 201524 - DNA, 25 bp, Artificial
  probe
  misc_feature (1)..(25): SEQ ID NO: 5767; WAN024FDB_at; Start 1158; Stop 1182
gactcttgaggtttgttctagttca

SEQ ID NO: 201525 - DNA, 25 bp, Artificial
  probe
  misc_feature (1)..(25): SEQ ID NO: 5767; WAN024FDB_at; Start 131; Stop 155
ggtttcatcgttctgaactagcaga

SEQ ID NO: 201526 - DNA, 25 bp, Artificial
  probe
  misc_feature (1)..(25): SEQ ID NO: 5767; WAN024FDB_at; Start 158; Stop 182
tattaaattgtacagaacgtgcagt

SEQ ID NO: 201527 - DNA, 25 bp, Artificial
  probe
  misc_feature (1)..(25): SEQ ID NO: 5767; WAN024FDB_at; Start 744; Stop 768
ggattttttaatgcaggcagaagga

SEQ ID NO: 201528 - DNA, 25 bp, Artificial
  probe
  misc_feature (1)..(25): SEQ ID NO: 5767; WAN024FDB_at; Start 348; Stop 372
taatgaaggttgtcaagctgagagt

SEQ ID NO: 201529 - DNA, 25 bp, Artificial
  probe
  misc_feature (1)..(25): SEQ ID NO: 4904; WAN024FDC_at; Start 907; Stop 931
gaatctgttgcaatgatactgaaaa

SEQ ID NO: 201530 - DNA, 25 bp, Artificial
  probe
  misc_feature (1)..(25): SEQ ID NO: 4904; WAN024FDC_at; Start 581; Stop 605
tgtatgagaatgagactatactcag

SEQ ID NO: 201531 - DNA, 25 bp, Artificial
  probe
  misc_feature (1)..(25): SEQ ID NO: 4904; WAN024FDC_at; Start 852; Stop 876
cgatcaatcttatctagtgtctaca

SEQ ID NO: 201532 - DNA, 25 bp, Artificial
  probe
  misc_feature (1)..(25): SEQ ID NO: 4904; WAN024FDC_at; Start 440; Stop 464
taccgtttgtaagtatagatagaca

SEQ ID NO: 201533 - DNA, 25 bp, Artificial
  probe
  misc_feature (1)..(25): SEQ ID NO: 4904; WAN024FDC_at; Start 611; Stop 635
aaggattcagagaaaaagctaagga

SEQ ID NO: 201534 - DNA, 25 bp, Artificial
  probe
  misc_feature (1)..(25): SEQ ID NO: 4904; WAN024FDC_at; Start 925; Stop 949
ctgaaaatgattaagcgagaagaga

SEQ ID NO: 201535 - DNA, 25 bp, Artificial
  probe
  misc_feature (1)..(25): SEQ ID NO: 4904; WAN024FDC_at; Start 186; Stop 210
tgctcgaggtatgaaaaagaataga

SEQ ID NO: 201536 - DNA, 25 bp, Artificial
  probe
  misc_feature (1)..(25): SEQ ID NO: 4904; WAN024FDC_at; Start 834; Stop 858
tggtttaaaaacttctgtcgatcaa

SEQ ID NO: 201537 - DNA, 25 bp, Artificial
  probe
  misc_feature (1)..(25): SEQ ID NO: 4904; WAN024FDC_at; Start 517; Stop 541
actgcagcagaggaactggttagaa

SEQ ID NO: 201538 - DNA, 25 bp, Artificial
  probe
  misc_feature (1)..(25): SEQ ID NO: 4904; WAN024FDC_at; Start 878; Stop 902
tagttcaagatattggtatgatggc

SEQ ID NO: 201539 - DNA, 25 bp, Artificial
  probe
  misc_feature (1)..(25): SEQ ID NO: 4904; WAN024FDC_at; Start 743; Stop 767
caataaatgatatgatggctctgag

SEQ ID NO: 201540 - DNA, 25 bp, Artificial
  probe
  misc_feature (1)..(25): SEQ ID NO: 4904; WAN024FDC_at; Start 228; Stop 252
gattattccgagcatatggcatcca

SEQ ID NO: 201541 - DNA, 25 bp, Artificial
  probe
  misc_feature (1)..(25): SEQ ID NO: 4904; WAN024FDC_at; Start 365; Stop 389
tgttgaaacaaaataaagtggatgg

SEQ ID NO: 201542 - DNA, 25 bp, Artificial
  probe
  misc_feature (1)..(25): SEQ ID NO: 4904; WAN024FDC_at; Start 169; Stop 193
tatatccctgataattatgctcgag

SEQ ID NO: 201543 - DNA, 25 bp, Artificial
  probe
  misc_feature (1)..(25): SEQ ID NO: 4904; WAN024FDC_at; Start 145; Stop 169
caaagggctataaaaacattggact

SEQ ID NO: 201544 - DNA, 25 bp, Artificial
  probe
  misc_feature (1)..(25): SEQ ID NO: 4904; WAN024FDC_at; Start 550; Stop 574
aagcaccttgcttttattggttcaa

SEQ ID NO: 201545 - DNA, 25 bp, Artificial
  probe
  misc_feature (1)..(25): SEQ ID NO: 4904; WAN024FDC_at; Start 324; Stop 348
cgctgatagcgattcacaaaatgaa

SEQ ID NO: 201546 - DNA, 25 bp, Artificial
  probe
  misc_feature (1)..(25): SEQ ID NO: 4904; WAN024FDC_at; Start 940; Stop 964
cgagaagagattctagaaaaacgaa

SEQ ID NO: 201547 - DNA, 25 bp, Artificial
  probe
  misc_feature (1)..(25): SEQ ID NO: 4904; WAN024FDC_at; Start 214; Stop 238
gaaactatcgctttgattattccga

SEQ ID NO: 201548 - DNA, 25 bp, Artificial
  probe
  misc_feature (1)..(25): SEQ ID NO: 4904; WAN024FDC_at; Start 673; Stop 697
cctttaataaatcctgaagatcaga

SEQ ID NO: 201549 - DNA, 25 bp, Artificial
  probe
  misc_feature (1)..(25): SEQ ID NO: 4904; WAN024FDC_at; Start 793; Stop 817
gggaaaatagcacctgatgattacc

SEQ ID NO: 201550 - DNA, 25 bp, Artificial
  probe
  misc_feature (1)..(25): SEQ ID NO: 4904; WAN024FDC_at; Start 596; Stop 620
ctatactcagaagtaaaggattcag

SEQ ID NO: 201551 - DNA, 25 bp, Artificial
  probe
  misc_feature (1)..(25): SEQ ID NO: 4904; WAN024FDC_at; Start 489; Stop 513
tacttcagcaaattacaaaggagga

SEQ ID NO: 201552 - DNA, 25 bp, Artificial
  probe
  misc_feature (1)..(25): SEQ ID NO: 4904; WAN024FDC_at; Start 628; Stop 652
gctaaggaattaggagtagatgtct

SEQ ID NO: 201553 - DNA, 25 bp, Artificial
  probe
  misc_feature (1)..(25): SEQ ID NO: 4904; WAN024FDC_at; Start 532; Stop 556
ctggttagaagggataataagcacc

SEQ ID NO: 201554 - DNA, 25 bp, Artificial
  probe
  misc_feature (1)..(25): SEQ ID NO: 4904; WAN024FDC_at; Start 711; Stop 735
gcaatctcataaagaaattgatggt

SEQ ID NO: 201555 - DNA, 25 bp, Artificial
  probe
  misc_feature (1)..(25): SEQ ID NO: 4904; WAN024FDC_at; Start 964; Stop 988
atcgtaattcccacatatttttggg

SEQ ID NO: 201556 - DNA, 25 bp, Artificial
  probe
  misc_feature (1)..(25): SEQ ID NO: 4904; WAN024FDC_at; Start 805; Stop 829
cctgatgattaccagataattgggt

SEQ ID NO: 201557 - DNA, 25 bp, Artificial
  probe
  misc_feature (1)..(25): SEQ ID NO: 4904; WAN024FDC_at; Start 502; Stop 526
tacaaaggaggacaaactgcagcag

SEQ ID NO: 201558 - DNA, 25 bp, Artificial
  probe
  misc_feature (1)..(25): SEQ ID NO: 4904; WAN024FDC_at; Start 770; Stop 794
ttattagtgttatgaaagaactggg

SEQ ID NO: 201559 - DNA, 25 bp, Artificial
  probe
  misc_feature (1)..(25): SEQ ID NO: 4904; WAN024FDC_at; Start 311; Stop 335
tatttatttgtaacgctgatagcga

SEQ ID NO: 201560 - DNA, 25 bp, Artificial
  probe
  misc_feature (1)..(25): SEQ ID NO: 4904; WAN024FDC_at; Start 473; Stop 497
aaaatgtatgctatgttacttcagc

SEQ ID NO: 201561 - DNA, 25 bp, Artificial
  probe
  misc_feature (1)..(25): SEQ ID NO: 4904; WAN024FDC_at; Start 259; Stop 283
tcggagtttgcctatcatgttgaga

SEQ ID NO: 201562 - DNA, 25 bp, Artificial
  probe
  misc_feature (1)..(25): SEQ ID NO: 4904; WAN024FDC_at; Start 892; Stop 916
ggtatgatggcaaaagaatctgttg

SEQ ID NO: 201563 - DNA, 25 bp, Artificial
  probe
  misc_feature (1)..(25): SEQ ID NO: 2636; WAN024FDD_at; Start 420; Stop 444
tccctttgttagtattgaccgcaca

SEQ ID NO: 201564 - DNA, 25 bp, Artificial
  probe
  misc_feature (1)..(25): SEQ ID NO: 2636; WAN024FDD_at; Start 204; Stop 228
tgcaatcattgtaccaagtatctgg

SEQ ID NO: 201565 - DNA, 25 bp, Artificial
  probe
  misc_feature (1)..(25): SEQ ID NO: 2636; WAN024FDD_at; Start 364; Stop 388
gatggagtggttgccattacctata

SEQ ID NO: 201566 - DNA, 25 bp, Artificial
  probe
  misc_feature (1)..(25): SEQ ID NO: 2636; WAN024FDD_at; Start 533; Stop 557
agcatttagcctttgtgggcggaca

SEQ ID NO: 201567 - DNA, 25 bp, Artificial
  probe
  misc_feature (1)..(25): SEQ ID NO: 2636; WAN024FDD_at; Start 354; Stop 378
taataaagttgatggagtggttgcc

SEQ ID NO: 201568 - DNA, 25 bp, Artificial
  probe
  misc_feature (1)..(25): SEQ ID NO: 2636; WAN024FDD_at; Start 725; Stop 749
caatcaacgattttacagctttgga

SEQ ID NO: 201569 - DNA, 25 bp, Artificial
  probe
  misc_feature (1)..(25): SEQ ID NO: 2636; WAN024FDD_at; Start 854; Stop 878
caactattgaacaaccattggaaga

SEQ ID NO: 201570 - DNA, 25 bp, Artificial
  probe
  misc_feature (1)..(25): SEQ ID NO: 2636; WAN024FDD_at; Start 392; Stop 416
caattgaacattacttgacgtcagg

SEQ ID NO: 201571 - DNA, 25 bp, Artificial
  probe
  misc_feature (1)..(25): SEQ ID NO: 2636; WAN024FDD_at; Start 567; Stop 591
cattaatgaaaccaaacgtcgtaga

SEQ ID NO: 201572 - DNA, 25 bp, Artificial
  probe
  misc_feature (1)..(25): SEQ ID NO: 2636; WAN024FDD_at; Start 189; Stop 213
tcgaacagaaacgattgcaatcatt

SEQ ID NO: 201573 - DNA, 25 bp, Artificial
  probe
  misc_feature (1)..(25): SEQ ID NO: 2636; WAN024FDD_at; Start 823; Stop 847
aaaatggctggagatagagattatc

SEQ ID NO: 201574 - DNA, 25 bp, Artificial
  probe
  misc_feature (1)..(25): SEQ ID NO: 2636; WAN024FDD_at; Start 519; Stop 543
tagtaaaggatgtcagcatttagcc

SEQ ID NO: 201575 - DNA, 25 bp, Artificial
  probe
  misc_feature (1)..(25): SEQ ID NO: 2636; WAN024FDD_at; Start 595; Stop 619
tcatttgaaaagtatgtccaagagc

SEQ ID NO: 201576 - DNA, 25 bp, Artificial
  probe
  misc_feature (1)..(25): SEQ ID NO: 2636; WAN024FDD_at; Start 710; Stop 734
tagatggaatttttacaatcaacga

SEQ ID NO: 201577 - DNA, 25 bp, Artificial
  probe
  misc_feature (1)..(25): SEQ ID NO: 2636; WAN024FDD_at; Start 889; Stop 913
gaagcggttcgtattttgtttgata

SEQ ID NO: 201578 - DNA, 25 bp, Artificial
  probe
  misc_feature (1)..(25): SEQ ID NO: 2636; WAN024FDD_at; Start 809; Stop 833
gatacgatggaattaaaatggctgg

SEQ ID NO: 201579 - DNA, 25 bp, Artificial
  probe
  misc_feature (1)..(25): SEQ ID NO: 2636; WAN024FDD_at; Start 403; Stop 427
tacttgacgtcaggaattccctttg

SEQ ID NO: 201580 - DNA, 25 bp, Artificial
  probe
  misc_feature (1)..(25): SEQ ID NO: 2636; WAN024FDD_at; Start 242; Stop 266
cagaatttgctatgcatgtggaaaa

SEQ ID NO: 201581 - DNA, 25 bp, Artificial
  probe
  misc_feature (1)..(25): SEQ ID NO: 2636; WAN024FDD_at; Start 839; Stop 863
gagattatctactttcaactattga

SEQ ID NO: 201582 - DNA, 25 bp, Artificial
  probe
  misc_feature (1)..(25): SEQ ID NO: 2636; WAN024FDD_at; Start 660; Stop 684
tactgactattatggaaagctagag

SEQ ID NO: 201583 - DNA, 25 bp, Artificial
  probe
  misc_feature (1)..(25): SEQ ID NO: 2636; WAN024FDD_at; Start 643; Stop 667
gatttggatgagacagttactgact

SEQ ID NO: 201584 - DNA, 25 bp, Artificial
  probe
  misc_feature (1)..(25): SEQ ID NO: 2636; WAN024FDD_at; Start 123; Stop 147
agtggaacaagcgattaaaactttg

SEQ ID NO: 201585 - DNA, 25 bp, Artificial
  probe
  misc_feature (1)..(25): SEQ ID NO: 2636; WAN024FDD_at; Start 937; Stop 961
ttgcagacaatcctaccagtaaaat

SEQ ID NO: 201586 - DNA, 25 bp, Artificial
  probe
  misc_feature (1)..(25): SEQ ID NO: 2636; WAN024FDD_at; Start 739; Stop 763
acagctttggatgtgattgaaatac

SEQ ID NO: 201587 - DNA, 25 bp, Artificial
  probe
  misc_feature (1)..(25): SEQ ID NO: 2636; WAN024FDD_at; Start 313; Stop 337
ggtacaaatagagagcaagactatc

SEQ ID NO: 201588 - DNA, 25 bp, Artificial
  probe
  misc_feature (1)..(25): SEQ ID NO: 2636; WAN024FDD_at; Start 607; Stop 631
tatgtccaagagcataaaatacctc

SEQ ID NO: 201589 - DNA, 25 bp, Artificial
  probe
  misc_feature (1)..(25): SEQ ID NO: 2636; WAN024FDD_at; Start 778; Stop 802
aaacgtattcctcatgatgtccaaa

SEQ ID NO: 201590 - DNA, 25 bp, Artificial
  probe
  misc_feature (1)..(25): SEQ ID NO: 2636; WAN024FDD_at; Start 546; Stop 570
tgtgggcggacataatacaaccatt

SEQ ID NO: 201591 - DNA, 25 bp, Artificial
  probe
  misc_feature (1)..(25): SEQ ID NO: 2636; WAN024FDD_at; Start 220; Stop 244
agtatctggcatcccttcttttcag

SEQ ID NO: 201592 - DNA, 25 bp, Artificial
  probe
  misc_feature (1)..(25): SEQ ID NO: 2636; WAN024FDD_at; Start 487; Stop 511
gcaggtggaagagaagcagctaaac

SEQ ID NO: 201593 - DNA, 25 bp, Artificial
  probe
  misc_feature (1)..(25): SEQ ID NO: 2636; WAN024FDD_at; Start 922; Stop 946
ggaaagactgttaatttgcagacaa

SEQ ID NO: 201594 - DNA, 25 bp, Artificial
  probe
  misc_feature (1)..(25): SEQ ID NO: 2636; WAN024FDD_at; Start 328; Stop 352
caagactatctggagatgttgcgtc

SEQ ID NO: 201595 - DNA, 25 bp, Artificial
  probe
  misc_feature (1)..(25): SEQ ID NO: 2636; WAN024FDD_at; Start 675; Stop 699
aaagctagagagtttcttggaagaa

SEQ ID NO: 201596 - DNA, 25 bp, Artificial
  probe
  misc_feature (1)..(25): SEQ ID NO: 2636; WAN024FDD_at; Start 877; Stop 901
gaaatggcaaaagaagcggttcgta

SEQ ID NO: 201597 - DNA, 25 bp, Artificial
  probe
  misc_feature (1)..(25): SEQ ID NO: 2341; WAN024FDE_at; Start 604; Stop 628
gctgctgaattagatggattctcaa

SEQ ID NO: 201598 - DNA, 25 bp, Artificial
  probe
  misc_feature (1)..(25): SEQ ID NO: 2341; WAN024FDE_at; Start 166; Stop 190
ttgacaccagatgaaagaaaatttg

SEQ ID NO: 201599 - DNA, 25 bp, Artificial
  probe
  misc_feature (1)..(25): SEQ ID NO: 2341; WAN024FDE_at; Start 486; Stop 510
gactagtcctaaacaagctatgtat

SEQ ID NO: 201600 - DNA, 25 bp, Artificial
  probe
  misc_feature (1)..(25): SEQ ID NO: 2341; WAN024FDE_at; Start 790; Stop 814
tatcaacaaggttttactgatcgtc

SEQ ID NO: 201601 - DNA, 25 bp, Artificial
  probe
  misc_feature (1)..(25): SEQ ID NO: 2341; WAN024FDE_at; Start 412; Stop 436
tatcttttaaatccaaatagtggct

SEQ ID NO: 201602 - DNA, 25 bp, Artificial
  probe
  misc_feature (1)..(25): SEQ ID NO: 2341; WAN024FDE_at; Start 131; Stop 155
tggtcatttattacgcttttacaga

SEQ ID NO: 201603 - DNA, 25 bp, Artificial
  probe
  misc_feature (1)..(25): SEQ ID NO: 2341; WAN024FDE_at; Start 20; Stop 44
ctgttgtggatacaaaaagacgtga

SEQ ID NO: 201604 - DNA, 25 bp, Artificial
  probe
  misc_feature (1)..(25): SEQ ID NO: 2341; WAN024FDE_at; Start 866; Stop 890
tgattagcttagtacaacgtcgcgt

SEQ ID NO: 201605 - DNA, 25 bp, Artificial
  probe
  misc_feature (1)..(25): SEQ ID NO: 2341; WAN024FDE_at; Start 454; Stop 478
aataaggtaggtattgcttctcaac

SEQ ID NO: 201606 - DNA, 25 bp, Artificial
  probe
  misc_feature (1)..(25): SEQ ID NO: 2341; WAN024FDE_at; Start 652; Stop 676
acgatgcccctactaaaaccaacag

SEQ ID NO: 201607 - DNA, 25 bp, Artificial
  probe
  misc_feature (1)..(25): SEQ ID NO: 2341; WAN024FDE_at; Start 572; Stop 596
gaatgcagaatattccacaagatgt

SEQ ID NO: 201608 - DNA, 25 bp, Artificial
  probe
  misc_feature (1)..(25): SEQ ID NO: 2341; WAN024FDE_at; Start 637; Stop 661
cagtttcgttatatcacgatgcccc

SEQ ID NO: 201609 - DNA, 25 bp, Artificial
  probe
  misc_feature (1)..(25): SEQ ID NO: 2341; WAN024FDE_at; Start 849; Stop 873
tacaacgttaattggtatgattagc

SEQ ID NO: 201610 - DNA, 25 bp, Artificial
  probe
  misc_feature (1)..(25): SEQ ID NO: 2341; WAN024FDE_at; Start 730; Stop 754
ccaatggttatgacgcaaggtgggc

SEQ ID NO: 201611 - DNA, 25 bp, Artificial
  probe
  misc_feature (1)..(25): SEQ ID NO: 2341; WAN024FDE_at; Start 587; Stop 611
cacaagatgtctatgaagctgctga

SEQ ID NO: 201612 - DNA, 25 bp, Artificial
  probe
  misc_feature (1)..(25): SEQ ID NO: 2341; WAN024FDE_at; Start 80; Stop 104
tagctccagctttaattttattagg

SEQ ID NO: 201613 - DNA, 25 bp, Artificial
  probe
  misc_feature (1)..(25): SEQ ID NO: 2341; WAN024FDE_at; Start 4; Stop 28
gatatgagtaaagaaactgttgtgg

SEQ ID NO: 201614 - DNA, 25 bp, Artificial
  probe
  misc_feature (1)..(25): SEQ ID NO: 2341; WAN024FDE_at; Start 820; Stop 844
ggatattctagctcaatcgctttag

SEQ ID NO: 201615 - DNA, 25 bp, Artificial
  probe
  misc_feature (1)..(25): SEQ ID NO: 2341; WAN024FDE_at; Start 315; Stop 339
gattgtcaataaaaagcgaaaagga

SEQ ID NO: 201616 - DNA, 25 bp, Artificial
  probe
  misc_feature (1)..(25): SEQ ID NO: 2341; WAN024FDE_at; Start 207; Stop 231
tattcgattaacaaaagatccgatt

SEQ ID NO: 201617 - DNA, 25 bp, Artificial
  probe
  misc_feature (1)..(25): SEQ ID NO: 2341; WAN024FDE_at; Start 620; Stop 644
gattctcaaaatgggctcagtttcg

SEQ ID NO: 201618 - DNA, 25 bp, Artificial
  probe
  misc_feature (1)..(25): SEQ ID NO: 2341; WAN024FDE_at; Start 709; Stop 733
gcttttaagctgattgtacaaccaa

SEQ ID NO: 201619 - DNA, 25 bp, Artificial
  probe
  misc_feature (1)..(25): SEQ ID NO: 2341; WAN024FDE_at; Start 363; Stop 387
ttttgctccagttgtcatgtccttg

SEQ ID NO: 201620 - DNA, 25 bp, Artificial
  probe
  misc_feature (1)..(25): SEQ ID NO: 2341; WAN024FDE_at; Start 885; Stop 909
tcgcgttctgaaggaggatgactaa

SEQ ID NO: 201621 - DNA, 25 bp, Artificial
  probe
  misc_feature (1)..(25): SEQ ID NO: 2341; WAN024FDE_at; Start 671; Stop 695
caacagccctgtttgtattgttaac

SEQ ID NO: 201622 - DNA, 25 bp, Artificial
  probe
  misc_feature (1)..(25): SEQ ID NO: 2341; WAN024FDE_at; Start 535; Stop 559
cagggtgcaggttatcagatgcttt

SEQ ID NO: 201623 - DNA, 25 bp, Artificial
  probe
  misc_feature (1)..(25): SEQ ID NO: 2341; WAN024FDE_at; Start 276; Stop 300
tattccagttcaattgggagcggcc

SEQ ID NO: 201624 - DNA, 25 bp, Artificial
  probe
  misc_feature (1)..(25): SEQ ID NO: 2341; WAN024FDE_at; Start 807; Stop 831
tgatcgtcttgtaggatattctagc

SEQ ID NO: 201625 - DNA, 25 bp, Artificial
  probe
  misc_feature (1)..(25): SEQ ID NO: 2341; WAN024FDE_at; Start 223; Stop 247
gatccgattttcttaaagagcttct

SEQ ID NO: 201626 - DNA, 25 bp, Artificial
  probe
  misc_feature (1)..(25): SEQ ID NO: 2341; WAN024FDE_at; Start 293; Stop 317
gagcggccttaggaatggctttgat

SEQ ID NO: 201627 - DNA, 25 bp, Artificial
  probe
  misc_feature (1)..(25): SEQ ID NO: 2341; WAN024FDE_at; Start 520; Stop 544
tttgtttctgcttggcagggtgcag

SEQ ID NO: 201628 - DNA, 25 bp, Artificial
  probe
  misc_feature (1)..(25): SEQ ID NO: 2341; WAN024FDE_at; Start 65; Stop 89
taggttatagttttttagctccagc

SEQ ID NO: 201629 - DNA, 25 bp, Artificial
  probe
  misc_feature (1)..(25): SEQ ID NO: 2341; WAN024FDE_at; Start 759; Stop 783
aaactcaacaattactatggtgtac

SEQ ID NO: 201630 - DNA, 25 bp, Artificial
  probe
  misc_feature (1)..(25): SEQ ID NO: 2341; WAN024FDE_at; Start 745; Stop 769
caaggtgggccattaaactcaacaa

SEQ ID NO: 201631 - DNA, 25 bp, Artificial
  probe
  misc_feature (1)..(25): SEQ ID NO: 1765; WAN024FDF_at; Start 205; Stop 229
tggttagacagaggttccaactcga

SEQ ID NO: 201632 - DNA, 25 bp, Artificial
  probe
  misc_feature (1)..(25): SEQ ID NO: 1765; WAN024FDF_at; Start 71; Stop 95
agttaaaggcagagcgaaggtctcc

SEQ ID NO: 201633 - DNA, 25 bp, Artificial
  probe
  misc_feature (1)..(25): SEQ ID NO: 1765; WAN024FDF_at; Start 122; Stop 146
gcgcatcctcatctagttctattgg

SEQ ID NO: 201634 - DNA, 25 bp, Artificial
  probe
  misc_feature (1)..(25): SEQ ID NO: 1765; WAN024FDF_at; Start 5; Stop 29
tgtctaaggtgatgtggcgaatgcc

SEQ ID NO: 201635 - DNA, 25 bp, Artificial
  probe
  misc_feature (1)..(25): SEQ ID NO: 1765; WAN024FDF_at; Start 7; Stop 31
tctaaggtgatgtggcgaatgccct

SEQ ID NO: 201636 - DNA, 25 bp, Artificial
  probe
  misc_feature (1)..(25): SEQ ID NO: 1765; WAN024FDF_at; Start 200; Stop 224
cgtcttggttagacagaggttccaa

SEQ ID NO: 201637 - DNA, 25 bp, Artificial
  probe
  misc_feature (1)..(25): SEQ ID NO: 1765; WAN024FDF_at; Start 64; Stop 88
tccagtgagttaaaggcagagcgaa

SEQ ID NO: 201638 - DNA, 25 bp, Artificial
  probe
  misc_feature (1)..(25): SEQ ID NO: 1765; WAN024FDF_at; Start 160; Stop 184
cgttcagggttacttagagctatct

SEQ ID NO: 201639 - DNA, 25 bp, Artificial
  probe
  misc_feature (1)..(25): SEQ ID NO: 1765; WAN024FDF_at; Start 182; Stop 206
tctgcagggcctctttgacgtcttg

SEQ ID NO: 201640 - DNA, 25 bp, Artificial
  probe
  misc_feature (1)..(25): SEQ ID NO: 1765; WAN024FDF_at; Start 142; Stop 166
attggaaaatcaaaaccacgttcag

SEQ ID NO: 201641 - DNA, 25 bp, Artificial
  probe
  misc_feature (1)..(25): SEQ ID NO: 1765; WAN024FDF_at; Start 12; Stop 36
ggtgatgtggcgaatgccctcgtca

SEQ ID NO: 201642 - DNA, 25 bp, Artificial
  probe
  misc_feature (1)..(25): SEQ ID NO: 1765; WAN024FDF_at; Start 114; Stop 138
gaaatccagcgcatcctcatctagt

SEQ ID NO: 201643 - DNA, 25 bp, Artificial
  probe
  misc_feature (1)..(25): SEQ ID NO: 1765; WAN024FDF_at; Start 128; Stop 152
cctcatctagttctattggaaaatc

SEQ ID NO: 201644 - DNA, 25 bp, Artificial
  probe
  misc_feature (1)..(25): SEQ ID NO: 1765; WAN024FDF_at; Start 176; Stop 200
gagctatctgcagggcctctttgac

SEQ ID NO: 201645 - DNA, 25 bp, Artificial
  probe
  misc_feature (1)..(25): SEQ ID NO: 1765; WAN024FDF_at; Start 106; Stop 130
gttgcgatgaaatccagcgcatcct

SEQ ID NO: 201646 - DNA, 25 bp, Artificial
  probe
  misc_feature (1)..(25): SEQ ID NO: 1765; WAN024FDF_at; Start 209; Stop 233
tagacagaggttccaactcgaaaat

SEQ ID NO: 201647 - DNA, 25 bp, Artificial
  probe
  misc_feature (1)..(25): SEQ ID NO: 1765; WAN024FDF_at; Start 35; Stop 59
cattctcaggggtagagagaacagc

SEQ ID NO: 201648 - DNA, 25 bp, Artificial
  probe
  misc_feature (1)..(25): SEQ ID NO: 1765; WAN024FDF_at; Start 186; Stop 210
cagggcctctttgacgtcttggtta

SEQ ID NO: 201649 - DNA, 25 bp, Artificial
  probe
  misc_feature (1)..(25): SEQ ID NO: 1765; WAN024FDF_at; Start 80; Stop 104
cagagcgaaggtctccgtttgtaga

SEQ ID NO: 201650 - DNA, 25 bp, Artificial
  probe
  misc_feature (1)..(25): SEQ ID NO: 1765; WAN024FDF_at; Start 99; Stop 123
tgtagaggttgcgatgaaatccagc

SEQ ID NO: 201651 - DNA, 25 bp, Artificial
  probe
  misc_feature (1)..(25): SEQ ID NO: 1765; WAN024FDF_at; Start 87; Stop 111
aaggtctccgtttgtagaggttgcg

SEQ ID NO: 201652 - DNA, 25 bp, Artificial
  probe
  misc_feature (1)..(25): SEQ ID NO: 1765; WAN024FDF_at; Start 170; Stop 194
tacttagagctatctgcagggcctc

SEQ ID NO: 201653 - DNA, 25 bp, Artificial
  probe
  misc_feature (1)..(25): SEQ ID NO: 1765; WAN024FDF_at; Start 167; Stop 191
ggttacttagagctatctgcagggc

SEQ ID NO: 201654 - DNA, 25 bp, Artificial
  probe
  misc_feature (1)..(25): SEQ ID NO: 1765; WAN024FDF_at; Start 101; Stop 125
tagaggttgcgatgaaatccagcgc

SEQ ID NO: 201655 - DNA, 25 bp, Artificial
  probe
  misc_feature (1)..(25): SEQ ID NO: 1765; WAN024FDF_at; Start 21; Stop 45
gcgaatgccctcgtcattctcaggg

SEQ ID NO: 201656 - DNA, 25 bp, Artificial
  probe
  misc_feature (1)..(25): SEQ ID NO: 1765; WAN024FDF_at; Start 164; Stop 188
cagggttacttagagctatctgcag

SEQ ID NO: 201657 - DNA, 25 bp, Artificial
  probe
  misc_feature (1)..(25): SEQ ID NO: 1765; WAN024FDF_at; Start 190; Stop 214
gcctctttgacgtcttggttagaca

SEQ ID NO: 201658 - DNA, 25 bp, Artificial
  probe
  misc_feature (1)..(25): SEQ ID NO: 1765; WAN024FDF_at; Start 74; Stop 98
taaaggcagagcgaaggtctccgtt

SEQ ID NO: 201659 - DNA, 25 bp, Artificial
  probe
  misc_feature (1)..(25): SEQ ID NO: 1765; WAN024FDF_at; Start 61; Stop 85
aagtccagtgagttaaaggcagagc

SEQ ID NO: 201660 - DNA, 25 bp, Artificial
  probe
  misc_feature (1)..(25): SEQ ID NO: 1765; WAN024FDF_at; Start 157; Stop 181
ccacgttcagggttacttagagcta

SEQ ID NO: 201661 - DNA, 25 bp, Artificial
  probe
  misc_feature (1)..(25): SEQ ID NO: 1765; WAN024FDF_at; Start 92; Stop 116
ctccgtttgtagaggttgcgatgaa

SEQ ID NO: 201662 - DNA, 25 bp, Artificial
  probe
  misc_feature (1)..(25): SEQ ID NO: 1765; WAN024FDF_at; Start 213; Stop 237
cagaggttccaactcgaaaatttga

SEQ ID NO: 201663 - DNA, 25 bp, Artificial
  probe
  misc_feature (1)..(25): SEQ ID NO: 1765; WAN024FDF_at; Start 194; Stop 218
ctttgacgtcttggttagacagagg

SEQ ID NO: 201664 - DNA, 25 bp, Artificial
  probe
  misc_feature (1)..(25): SEQ ID NO: 1765; WAN024FDF_at; Start 15; Stop 39
gatgtggcgaatgccctcgtcattc

SEQ ID NO: 201665 - DNA, 25 bp, Artificial
  probe
  misc_feature (1)..(25): SEQ ID NO: 1690; WAN024FDG_at; Start 96; Stop 120
gagccaaagcccgttcatatttacc

SEQ ID NO: 201666 - DNA, 25 bp, Artificial
  probe
  misc_feature (1)..(25): SEQ ID NO: 1690; WAN024FDG_at; Start 215; Stop 239
tagtcttgggcattccccagttcct

SEQ ID NO: 201667 - DNA, 25 bp, Artificial
  probe
  misc_feature (1)..(25): SEQ ID NO: 1690; WAN024FDG_at; Start 207; Stop 231
gatagagatagtcttgggcattccc

SEQ ID NO: 201668 - DNA, 25 bp, Artificial
  probe
  misc_feature (1)..(25): SEQ ID NO: 1690; WAN024FDG_at; Start 269; Stop 293
tgtcgcggaataggcaagtgccctg

SEQ ID NO: 201669 - DNA, 25 bp, Artificial
  probe
  misc_feature (1)..(25): SEQ ID NO: 1690; WAN024FDG_at; Start 210; Stop 234
agagatagtcttgggcattccccag

SEQ ID NO: 201670 - DNA, 25 bp, Artificial
  probe
  misc_feature (1)..(25): SEQ ID NO: 1690; WAN024FDG_at; Start 144; Stop 168
gatgattacgaattttttctggcag

SEQ ID NO: 201671 - DNA, 25 bp, Artificial
  probe
  misc_feature (1)..(25): SEQ ID NO: 1690; WAN024FDG_at; Start 26; Stop 50
caagaggaaagtgcaattttttgaa

SEQ ID NO: 201672 - DNA, 25 bp, Artificial
  probe
  misc_feature (1)..(25): SEQ ID NO: 1690; WAN024FDG_at; Start 161; Stop 185
tctggcagatagtcttgcttgaccc

SEQ ID NO: 201673 - DNA, 25 bp, Artificial
  probe
  misc_feature (1)..(25): SEQ ID NO: 1690; WAN024FDG_at; Start 249; Stop 273
tgtagtgcccatcacgcaggtgtcg

SEQ ID NO: 201674 - DNA, 25 bp, Artificial
  probe
  misc_feature (1)..(25): SEQ ID NO: 1690; WAN024FDG_at; Start 165; Stop 189
gcagatagtcttgcttgacccaatt

SEQ ID NO: 201675 - DNA, 25 bp, Artificial
  probe
  misc_feature (1)..(25): SEQ ID NO: 1690; WAN024FDG_at; Start 91; Stop 115
tctttgagccaaagcccgttcatat

SEQ ID NO: 201676 - DNA, 25 bp, Artificial
  probe
  misc_feature (1)..(25): SEQ ID NO: 1690; WAN024FDG_at; Start 64; Stop 88
ttttcgcaaacggtcgatagcttcc

SEQ ID NO: 201677 - DNA, 25 bp, Artificial
  probe
  misc_feature (1)..(25): SEQ ID NO: 1690; WAN024FDG_at; Start 38; Stop 62
gcaattttttgaaaaggatttcaga

SEQ ID NO: 201678 - DNA, 25 bp, Artificial
  probe
  misc_feature (1)..(25): SEQ ID NO: 1690; WAN024FDG_at; Start 59; Stop 83
cagatttttcgcaaacggtcgatag

SEQ ID NO: 201679 - DNA, 25 bp, Artificial
  probe
  misc_feature (1)..(25): SEQ ID NO: 1690; WAN024FDG_at; Start 183; Stop 207
cccaatttccaggatagttgtgtgg

SEQ ID NO: 201680 - DNA, 25 bp, Artificial
  probe
  misc_feature (1)..(25): SEQ ID NO: 1690; WAN024FDG_at; Start 170; Stop 194
tagtcttgcttgacccaatttccag

SEQ ID NO: 201681 - DNA, 25 bp, Artificial
  probe
  misc_feature (1)..(25): SEQ ID NO: 1690; WAN024FDG_at; Start 79; Stop 103
gatagcttcctttctttgagccaaa

SEQ ID NO: 201682 - DNA, 25 bp, Artificial
  probe
  misc_feature (1)..(25): SEQ ID NO: 1690; WAN024FDG_at; Start 128; Stop 152
tctgcttggaaatagtgatgattac

SEQ ID NO: 201683 - DNA, 25 bp, Artificial
  probe
  misc_feature (1)..(25): SEQ ID NO: 1690; WAN024FDG_at; Start 19; Stop 43
aaaaaatcaagaggaaagtgcaatt

SEQ ID NO: 201684 - DNA, 25 bp, Artificial
  probe
  misc_feature (1)..(25): SEQ ID NO: 1690; WAN024FDG_at; Start 107; Stop 131
cgttcatatttaccagtatcttctg

SEQ ID NO: 201685 - DNA, 25 bp, Artificial
  probe
  misc_feature (1)..(25): SEQ ID NO: 1690; WAN024FDG_at; Start 233; Stop 257
agttccttgcttccactgtagtgcc

SEQ ID NO: 201686 - DNA, 25 bp, Artificial
  probe
  misc_feature (1)..(25): SEQ ID NO: 1690; WAN024FDG_at; Start 52; Stop 76
aggatttcagatttttcgcaaacgg

SEQ ID NO: 201687 - DNA, 25 bp, Artificial
  probe
  misc_feature (1)..(25): SEQ ID NO: 1690; WAN024FDG_at; Start 246; Stop 270
cactgtagtgcccatcacgcaggtg

SEQ ID NO: 201688 - DNA, 25 bp, Artificial
  probe
  misc_feature (1)..(25): SEQ ID NO: 1690; WAN024FDG_at; Start 259; Stop 283
atcacgcaggtgtcgcggaataggc

SEQ ID NO: 201689 - DNA, 25 bp, Artificial
  probe
  misc_feature (1)..(25): SEQ ID NO: 1690; WAN024FDG_at; Start 240; Stop 264
tgcttccactgtagtgcccatcacg

SEQ ID NO: 201690 - DNA, 25 bp, Artificial
  probe
  misc_feature (1)..(25): SEQ ID NO: 1690; WAN024FDG_at; Start 67; Stop 91
tcgcaaacggtcgatagcttccttt

SEQ ID NO: 201691 - DNA, 25 bp, Artificial
  probe
  misc_feature (1)..(25): SEQ ID NO: 1690; WAN024FDG_at; Start 123; Stop 147
tatcttctgcttggaaatagtgatg

SEQ ID NO: 201692 - DNA, 25 bp, Artificial
  probe
  misc_feature (1)..(25): SEQ ID NO: 1690; WAN024FDG_at; Start 221; Stop 245
tgggcattccccagttccttgcttc

SEQ ID NO: 201693 - DNA, 25 bp, Artificial
  probe
  misc_feature (1)..(25): SEQ ID NO: 1690; WAN024FDG_at; Start 70; Stop 94
caaacggtcgatagcttcctttctt

SEQ ID NO: 201694 - DNA, 25 bp, Artificial
  probe
  misc_feature (1)..(25): SEQ ID NO: 1690; WAN024FDG_at; Start 254; Stop 278
tgcccatcacgcaggtgtcgcggaa

SEQ ID NO: 201695 - DNA, 25 bp, Artificial
  probe
  misc_feature (1)..(25): SEQ ID NO: 1690; WAN024FDG_at; Start 176; Stop 200
tgcttgacccaatttccaggatagt

SEQ ID NO: 201696 - DNA, 25 bp, Artificial
  probe
  misc_feature (1)..(25): SEQ ID NO: 1690; WAN024FDG_at; Start 191; Stop 215
ccaggatagttgtgtggatagagat

SEQ ID NO: 201697 - DNA, 25 bp, Artificial
  probe
  misc_feature (1)..(25): SEQ ID NO: 1690; WAN024FDG_at; Start 117; Stop 141
taccagtatcttctgcttggaaata

SEQ ID NO: 201698 - DNA, 25 bp, Artificial
  probe
  misc_feature (1)..(25): SEQ ID NO: 1690; WAN024FDG_at; Start 150; Stop 174
tacgaattttttctggcagatagtc

SEQ ID NO: 201699 - DNA, 25 bp, Artificial
  probe
  misc_feature (1)..(25): SEQ ID NO: 1985; WAN024FDH_at; Start 518; Stop 542
caatagaactagatgaggatgcgct

SEQ ID NO: 201700 - DNA, 25 bp, Artificial
  probe
  misc_feature (1)..(25): SEQ ID NO: 1985; WAN024FDH_at; Start 66; Stop 90
tctggtcggacctggaaaaatcatc

SEQ ID NO: 201701 - DNA, 25 bp, Artificial
  probe
  misc_feature (1)..(25): SEQ ID NO: 1985; WAN024FDH_at; Start 718; Stop 742
tatgatgttctatctgccctgcaaa

SEQ ID NO: 201702 - DNA, 25 bp, Artificial
  probe
  misc_feature (1)..(25): SEQ ID NO: 1985; WAN024FDH_at; Start 613; Stop 637
tctacccctgagaatgacgagggca

SEQ ID NO: 201703 - DNA, 25 bp, Artificial
  probe
  misc_feature (1)..(25): SEQ ID NO: 1985; WAN024FDH_at; Start 991; Stop 1015
tcagcctatgtagctatggataagg

SEQ ID NO: 201704 - DNA, 25 bp, Artificial
  probe
  misc_feature (1)..(25): SEQ ID NO: 1985; WAN024FDH_at; Start 755; Stop 779
gctcagatgtggatgccagtctcca

SEQ ID NO: 201705 - DNA, 25 bp, Artificial
  probe
  misc_feature (1)..(25): SEQ ID NO: 1985; WAN024FDH_at; Start 259; Stop 283
gctaaattttctggtggtctcgtcc

SEQ ID NO: 201706 - DNA, 25 bp, Artificial
  probe
  misc_feature (1)..(25): SEQ ID NO: 1985; WAN024FDH_at; Start 436; Stop 460
gagttggaacctctgtctaaccaag

SEQ ID NO: 201707 - DNA, 25 bp, Artificial
  probe
  misc_feature (1)..(25): SEQ ID NO: 1985; WAN024FDH_at; Start 806; Stop 830
gggatctgcctagtctcgctcgtcg

SEQ ID NO: 201708 - DNA, 25 bp, Artificial
  probe
  misc_feature (1)..(25): SEQ ID NO: 1985; WAN024FDH_at; Start 176; Stop 200
tcgctggaacgaccaagtatgcctt

SEQ ID NO: 201709 - DNA, 25 bp, Artificial
  probe
  misc_feature (1)..(25): SEQ ID NO: 1985; WAN024FDH_at; Start 837; Stop 861
tgttatcgcctatgaagatatcggc

SEQ ID NO: 201710 - DNA, 25 bp, Artificial
  probe
  misc_feature (1)..(25): SEQ ID NO: 1985; WAN024FDH_at; Start 870; Stop 894
tcctgaggcccagattcataccgtg

SEQ ID NO: 201711 - DNA, 25 bp, Artificial
  probe
  misc_feature (1)..(25): SEQ ID NO: 1985; WAN024FDH_at; Start 886; Stop 910
cataccgtgactgctctggatgctg

SEQ ID NO: 201712 - DNA, 25 bp, Artificial
  probe
  misc_feature (1)..(25): SEQ ID NO: 1985; WAN024FDH_at; Start 452; Stop 476
ctaaccaagacgtcaaagaggccct

SEQ ID NO: 201713 - DNA, 25 bp, Artificial
  probe
  misc_feature (1)..(25): SEQ ID NO: 1985; WAN024FDH_at; Start 855; Stop 879
tatcggcttagccaatcctgaggcc

SEQ ID NO: 201714 - DNA, 25 bp, Artificial
  probe
  misc_feature (1)..(25): SEQ ID NO: 1985; WAN024FDH_at; Start 469; Stop 493
gaggccctgcagatagctctaagta

SEQ ID NO: 201715 - DNA, 25 bp, Artificial
  probe
  misc_feature (1)..(25): SEQ ID NO: 1985; WAN024FDH_at; Start 690; Stop 714
cactatggacaaggatggagacggt

SEQ ID NO: 201716 - DNA, 25 bp, Artificial
  probe
  misc_feature (1)..(25): SEQ ID NO: 1985; WAN024FDH_at; Start 26; Stop 50
tgcgccctaaaaccatcgaccaggt

SEQ ID NO: 201717 - DNA, 25 bp, Artificial
  probe
  misc_feature (1)..(25): SEQ ID NO: 1985; WAN024FDH_at; Start 675; Stop 699
tcagagaagctacatcactatggac

SEQ ID NO: 201718 - DNA, 25 bp, Artificial
  probe
  misc_feature (1)..(25): SEQ ID NO: 1985; WAN024FDH_at; Start 1206; Stop 1230
tactggtaaatatgaacgggctttg

SEQ ID NO: 201719 - DNA, 25 bp, Artificial
  probe
  misc_feature (1)..(25): SEQ ID NO: 1985; WAN024FDH_at; Start 482; Stop 506
tagctctaagtaaccctgaacgtgg

SEQ ID NO: 201720 - DNA, 25 bp, Artificial
  probe
  misc_feature (1)..(25): SEQ ID NO: 1985; WAN024FDH_at; Start 51; Stop 75
catcggtcaggagcatctggtcgga

SEQ ID NO: 201721 - DNA, 25 bp, Artificial
  probe
  misc_feature (1)..(25): SEQ ID NO: 1985; WAN024FDH_at; Start 160; Stop 184
agtattgcctctgccatcgctggaa

SEQ ID NO: 201722 - DNA, 25 bp, Artificial
  probe
  misc_feature (1)..(25): SEQ ID NO: 1985; WAN024FDH_at; Start 360; Stop 384
catcatgattggagcaacgactgaa

SEQ ID NO: 201723 - DNA, 25 bp, Artificial
  probe
  misc_feature (1)..(25): SEQ ID NO: 1985; WAN024FDH_at; Start 337; Stop 361
cctctcttggaaagtggactggtca

SEQ ID NO: 201724 - DNA, 25 bp, Artificial
  probe
  misc_feature (1)..(25): SEQ ID NO: 1985; WAN024FDH_at; Start 561; Stop 585
tacaaacggagaccttcgctctgcc

SEQ ID NO: 201725 - DNA, 25 bp, Artificial
  probe
  misc_feature (1)..(25): SEQ ID NO: 1985; WAN024FDH_at; Start 301; Stop 325
catcgactagataagaccaagcaag

SEQ ID NO: 201726 - DNA, 25 bp, Artificial
  probe
  misc_feature (1)..(25): SEQ ID NO: 1985; WAN024FDH_at; Start 1073; Stop 1097
ggcactacagtggaagcaaggaact

SEQ ID NO: 201727 - DNA, 25 bp, Artificial
  probe
  misc_feature (1)..(25): SEQ ID NO: 1985; WAN024FDH_at; Start 634; Stop 658
ggcattcgccacatcaccttagaca

SEQ ID NO: 201728 - DNA, 25 bp, Artificial
  probe
  misc_feature (1)..(25): SEQ ID NO: 1985; WAN024FDH_at; Start 1023; Stop 1047
tgacctcaaaacatcagggcacttg

SEQ ID NO: 201729 - DNA, 25 bp, Artificial
  probe
  misc_feature (1)..(25): SEQ ID NO: 1985; WAN024FDH_at; Start 228; Stop 252
taaaaagcgactgcaagaaatctcg

SEQ ID NO: 201730 - DNA, 25 bp, Artificial
  probe
  misc_feature (1)..(25): SEQ ID NO: 1985; WAN024FDH_at; Start 84; Stop 108
aatcatccgccgcatggtggaagcc

SEQ ID NO: 201731 - DNA, 25 bp, Artificial
  probe
  misc_feature (1)..(25): SEQ ID NO: 1985; WAN024FDH_at; Start 1037; Stop 1061
cagggcacttgcctattccgcgaca

SEQ ID NO: 201732 - DNA, 25 bp, Artificial
  probe
  misc_feature (1)..(25): SEQ ID NO: 1985; WAN024FDH_at; Start 1008; Stop 1032
ggataaggcacttgctgacctcaaa

SEQ ID NO: 201733 - DNA, 25 bp, Artificial
  probe
  misc_feature (1)..(25): SEQ ID NO: 7492; WAN024FDI_at; Start 143; Stop 167
acttccacttctttaggctcaacta

SEQ ID NO: 201734 - DNA, 25 bp, Artificial
  probe
  misc_feature (1)..(25): SEQ ID NO: 7492; WAN024FDI_at; Start 15; Stop 39
tccaatgacgaatttgttttgtaaa

SEQ ID NO: 201735 - DNA, 25 bp, Artificial
  probe
  misc_feature (1)..(25): SEQ ID NO: 7492; WAN024FDI_at; Start 155; Stop 179
ttaggctcaactatcctattttgag

SEQ ID NO: 201736 - DNA, 25 bp, Artificial
  probe
  misc_feature (1)..(25): SEQ ID NO: 7492; WAN024FDI_at; Start 1; Stop 25
ttgatcactaagaatccaatgacga

SEQ ID NO: 201737 - DNA, 25 bp, Artificial
  probe
  misc_feature (1)..(25): SEQ ID NO: 7492; WAN024FDI_at; Start 45; Stop 69
aaatttcctgacttggtccatcatt

SEQ ID NO: 201738 - DNA, 25 bp, Artificial
  probe
  misc_feature (1)..(25): SEQ ID NO: 7492; WAN024FDI_at; Start 104; Stop 128
catacaatgacattcagcaatatta

SEQ ID NO: 201739 - DNA, 25 bp, Artificial
  probe
  misc_feature (1)..(25): SEQ ID NO: 7492; WAN024FDI_at; Start 54; Stop 78
gacttggtccatcatttccattgct

SEQ ID NO: 201740 - DNA, 25 bp, Artificial
  probe
  misc_feature (1)..(25): SEQ ID NO: 7492; WAN024FDI_at; Start 189; Stop 213
aaatcaaatctctcatgctgatacc

SEQ ID NO: 201741 - DNA, 25 bp, Artificial
  probe
  misc_feature (1)..(25): SEQ ID NO: 7492; WAN024FDI_at; Start 192; Stop 216
tcaaatctctcatgctgatacctct

SEQ ID NO: 201742 - DNA, 25 bp, Artificial
  probe
  misc_feature (1)..(25): SEQ ID NO: 7492; WAN024FDI_at; Start 97; Stop 121
tatagttcatacaatgacattcagc

SEQ ID NO: 201743 - DNA, 25 bp, Artificial
  probe
  misc_feature (1)..(25): SEQ ID NO: 7492; WAN024FDI_at; Start 65; Stop 89
tcatttccattgcttatcacctctc

SEQ ID NO: 201744 - DNA, 25 bp, Artificial
  probe
  misc_feature (1)..(25): SEQ ID NO: 7492; WAN024FDI_at; Start 40; Stop 64
aatcaaaatttcctgacttggtcca

SEQ ID NO: 201745 - DNA, 25 bp, Artificial
  probe
  misc_feature (1)..(25): SEQ ID NO: 7492; WAN024FDI_at; Start 118; Stop 142
cagcaatattatttctcaagtcagc

SEQ ID NO: 201746 - DNA, 25 bp, Artificial
  probe
  misc_feature (1)..(25): SEQ ID NO: 7492; WAN024FDI_at; Start 135; Stop 159
aagtcagcacttccacttctttagg

SEQ ID NO: 201747 - DNA, 25 bp, Artificial
  probe
  misc_feature (1)..(25): SEQ ID NO: 7492; WAN024FDI_at; Start 3; Stop 27
gatcactaagaatccaatgacgaat

SEQ ID NO: 201748 - DNA, 25 bp, Artificial
  probe
  misc_feature (1)..(25): SEQ ID NO: 7492; WAN024FDI_at; Start 43; Stop 67
caaaatttcctgacttggtccatca

SEQ ID NO: 201749 - DNA, 25 bp, Artificial
  probe
  misc_feature (1)..(25): SEQ ID NO: 7492; WAN024FDI_at; Start 186; Stop 210
ggaaaatcaaatctctcatgctgat

SEQ ID NO: 201750 - DNA, 25 bp, Artificial
  probe
  misc_feature (1)..(25): SEQ ID NO: 7492; WAN024FDI_at; Start 120; Stop 144
gcaatattatttctcaagtcagcac

SEQ ID NO: 201751 - DNA, 25 bp, Artificial
  probe
  misc_feature (1)..(25): SEQ ID NO: 7492; WAN024FDI_at; Start 59; Stop 83
ggtccatcatttccattgcttatca

SEQ ID NO: 201752 - DNA, 25 bp, Artificial
  probe
  misc_feature (1)..(25): SEQ ID NO: 7492; WAN024FDI_at; Start 20; Stop 44
tgacgaatttgttttgtaaaaatca

SEQ ID NO: 201753 - DNA, 25 bp, Artificial
  probe
  misc_feature (1)..(25): SEQ ID NO: 7492; WAN024FDI_at; Start 99; Stop 123
tagttcatacaatgacattcagcaa

SEQ ID NO: 201754 - DNA, 25 bp, Artificial
  probe
  misc_feature (1)..(25): SEQ ID NO: 7492; WAN024FDI_at; Start 137; Stop 161
gtcagcacttccacttctttaggct

SEQ ID NO: 201755 - DNA, 25 bp, Artificial
  probe
  misc_feature (1)..(25): SEQ ID NO: 7492; WAN024FDI_at; Start 12; Stop 36
gaatccaatgacgaatttgttttgt

SEQ ID NO: 201756 - DNA, 25 bp, Artificial
  probe
  misc_feature (1)..(25): SEQ ID NO: 7492; WAN024FDI_at; Start 163; Stop 187
aactatcctattttgagctttaagg

SEQ ID NO: 201757 - DNA, 25 bp, Artificial
  probe
  misc_feature (1)..(25): SEQ ID NO: 7492; WAN024FDI_at; Start 6; Stop 30
cactaagaatccaatgacgaatttg

SEQ ID NO: 201758 - DNA, 25 bp, Artificial
  probe
  misc_feature (1)..(25): SEQ ID NO: 7492; WAN024FDI_at; Start 81; Stop 105
tcacctctcttttcattatagttca

SEQ ID NO: 201759 - DNA, 25 bp, Artificial
  probe
  misc_feature (1)..(25): SEQ ID NO: 7492; WAN024FDI_at; Start 166; Stop 190
tatcctattttgagctttaaggaaa

SEQ ID NO: 201760 - DNA, 25 bp, Artificial
  probe
  misc_feature (1)..(25): SEQ ID NO: 7492; WAN024FDI_at; Start 148; Stop 172
cacttctttaggctcaactatccta

SEQ ID NO: 201761 - DNA, 25 bp, Artificial
  probe
  misc_feature (1)..(25): SEQ ID NO: 7492; WAN024FDI_at; Start 171; Stop 195
tattttgagctttaaggaaaatcaa

SEQ ID NO: 201762 - DNA, 25 bp, Artificial
  probe
  misc_feature (1)..(25): SEQ ID NO: 7492; WAN024FDI_at; Start 124; Stop 148
tattatttctcaagtcagcacttcc

SEQ ID NO: 201763 - DNA, 25 bp, Artificial
  probe
  misc_feature (1)..(25): SEQ ID NO: 7492; WAN024FDI_at; Start 50; Stop 74
tcctgacttggtccatcatttccat

SEQ ID NO: 201764 - DNA, 25 bp, Artificial
  probe
  misc_feature (1)..(25): SEQ ID NO: 7492; WAN024FDI_at; Start 71; Stop 95
ccattgcttatcacctctcttttca

SEQ ID NO: 201765 - DNA, 25 bp, Artificial
  probe
  misc_feature (1)..(25): SEQ ID NO: 7492; WAN024FDI_at; Start 127; Stop 151
tatttctcaagtcagcacttccact

SEQ ID NO: 201766 - DNA, 25 bp, Artificial
  probe
  misc_feature (1)..(25): SEQ ID NO: 7492; WAN024FDI_at; Start 140; Stop 164
agcacttccacttctttaggctcaa

SEQ ID NO: 201767 - DNA, 25 bp, Artificial
  probe
  misc_feature (1)..(25): SEQ ID NO: 6591; WAN024FDJ_at; Start 63; Stop 87
gcctaaagaagtggaagtgctgact

SEQ ID NO: 201768 - DNA, 25 bp, Artificial
  probe
  misc_feature (1)..(25): SEQ ID NO: 6591; WAN024FDJ_at; Start 60; Stop 84
tgagcctaaagaagtggaagtgctg

SEQ ID NO: 201769 - DNA, 25 bp, Artificial
  probe
  misc_feature (1)..(25): SEQ ID NO: 6591; WAN024FDJ_at; Start 17; Stop 41
gcatgagagatttgattttccttaa

SEQ ID NO: 201770 - DNA, 25 bp, Artificial
  probe
  misc_feature (1)..(25): SEQ ID NO: 6591; WAN024FDJ_at; Start 56; Stop 80
tagttgagcctaaagaagtggaagt

SEQ ID NO: 201771 - DNA, 25 bp, Artificial
  probe
  misc_feature (1)..(25): SEQ ID NO: 6591; WAN024FDJ_at; Start 20; Stop 44
tgagagatttgattttccttaaagc

SEQ ID NO: 201772 - DNA, 25 bp, Artificial
  probe
  misc_feature (1)..(25): SEQ ID NO: 6591; WAN024FDJ_at; Start 35; Stop 59
tccttaaagctcaaaataggatagt

SEQ ID NO: 201773 - DNA, 25 bp, Artificial
  probe
  misc_feature (1)..(25): SEQ ID NO: 6591; WAN024FDJ_at; Start 15; Stop 39
cagcatgagagatttgattttcctt

SEQ ID NO: 201774 - DNA, 25 bp, Artificial
  probe
  misc_feature (1)..(25): SEQ ID NO: 6591; WAN024FDJ_at; Start 4; Stop 28
aggagaggtatcagcatgagagatt

SEQ ID NO: 201775 - DNA, 25 bp, Artificial
  probe
  misc_feature (1)..(25): SEQ ID NO: 6591; WAN024FDJ_at; Start 49; Stop 73
aataggatagttgagcctaaagaag

SEQ ID NO: 201776 - DNA, 25 bp, Artificial
  probe
  misc_feature (1)..(25): SEQ ID NO: 6591; WAN024FDJ_at; Start 5; Stop 29
ggagaggtatcagcatgagagattt

SEQ ID NO: 201777 - DNA, 25 bp, Artificial
  probe
  misc_feature (1)..(25): SEQ ID NO: 6591; WAN024FDJ_at; Start 37; Stop 61
cttaaagctcaaaataggatagttg

SEQ ID NO: 201778 - DNA, 25 bp, Artificial
  probe
  misc_feature (1)..(25): SEQ ID NO: 6591; WAN024FDJ_at; Start 7; Stop 31
agaggtatcagcatgagagatttga

SEQ ID NO: 201779 - DNA, 25 bp, Artificial
  probe
  misc_feature (1)..(25): SEQ ID NO: 6591; WAN024FDJ_at; Start 21; Stop 45
gagagatttgattttccttaaagct

SEQ ID NO: 201780 - DNA, 25 bp, Artificial
  probe
  misc_feature (1)..(25): SEQ ID NO: 6591; WAN024FDJ_at; Start 18; Stop 42
catgagagatttgattttccttaaa

SEQ ID NO: 201781 - DNA, 25 bp, Artificial
  probe
  misc_feature (1)..(25): SEQ ID NO: 6591; WAN024FDJ_at; Start 54; Stop 78
gatagttgagcctaaagaagtggaa

SEQ ID NO: 201782 - DNA, 25 bp, Artificial
  probe
  misc_feature (1)..(25): SEQ ID NO: 6591; WAN024FDJ_at; Start 39; Stop 63
taaagctcaaaataggatagttgag

SEQ ID NO: 201783 - DNA, 25 bp, Artificial
  probe
  misc_feature (1)..(25): SEQ ID NO: 6591; WAN024FDJ_at; Start 61; Stop 85
gagcctaaagaagtggaagtgctga

SEQ ID NO: 201784 - DNA, 25 bp, Artificial
  probe
  misc_feature (1)..(25): SEQ ID NO: 6591; WAN024FDJ_at; Start 62; Stop 86
agcctaaagaagtggaagtgctgac

SEQ ID NO: 201785 - DNA, 25 bp, Artificial
  probe
  misc_feature (1)..(25): SEQ ID NO: 6591; WAN024FDJ_at; Start 36; Stop 60
ccttaaagctcaaaataggatagtt

SEQ ID NO: 201786 - DNA, 25 bp, Artificial
  probe
  misc_feature (1)..(25): SEQ ID NO: 6591; WAN024FDJ_at; Start 41; Stop 65
aagctcaaaataggatagttgagcc

SEQ ID NO: 201787 - DNA, 25 bp, Artificial
  probe
  misc_feature (1)..(25): SEQ ID NO: 6591; WAN024FDJ_at; Start 45; Stop 69
tcaaaataggatagttgagcctaaa

SEQ ID NO: 201788 - DNA, 25 bp, Artificial
  probe
  misc_feature (1)..(25): SEQ ID NO: 6591; WAN024FDJ_at; Start 10; Stop 34
ggtatcagcatgagagatttgattt

SEQ ID NO: 201789 - DNA, 25 bp, Artificial
  probe
  misc_feature (1)..(25): SEQ ID NO: 6591; WAN024FDJ_at; Start 51; Stop 75
taggatagttgagcctaaagaagtg

SEQ ID NO: 201790 - DNA, 25 bp, Artificial
  probe
  misc_feature (1)..(25): SEQ ID NO: 6591; WAN024FDJ_at; Start 59; Stop 83
ttgagcctaaagaagtggaagtgct

SEQ ID NO: 201791 - DNA, 25 bp, Artificial
  probe
  misc_feature (1)..(25): SEQ ID NO: 6591; WAN024FDJ_at; Start 23; Stop 47
gagatttgattttccttaaagctca

SEQ ID NO: 201792 - DNA, 25 bp, Artificial
  probe
  misc_feature (1)..(25): SEQ ID NO: 6591; WAN024FDJ_at; Start 12; Stop 36
tatcagcatgagagatttgattttc

SEQ ID NO: 201793 - DNA, 25 bp, Artificial
  probe
  misc_feature (1)..(25): SEQ ID NO: 6591; WAN024FDJ_at; Start 43; Stop 67
gctcaaaataggatagttgagccta

SEQ ID NO: 201794 - DNA, 25 bp, Artificial
  probe
  misc_feature (1)..(25): SEQ ID NO: 6591; WAN024FDJ_at; Start 25; Stop 49
gatttgattttccttaaagctcaaa

SEQ ID NO: 201795 - DNA, 25 bp, Artificial
  probe
  misc_feature (1)..(25): SEQ ID NO: 6591; WAN024FDJ_at; Start 29; Stop 53
tgattttccttaaagctcaaaatag

SEQ ID NO: 201796 - DNA, 25 bp, Artificial
  probe
  misc_feature (1)..(25): SEQ ID NO: 6591; WAN024FDJ_at; Start 58; Stop 82
gttgagcctaaagaagtggaagtgc

SEQ ID NO: 201797 - DNA, 25 bp, Artificial
  probe
  misc_feature (1)..(25): SEQ ID NO: 6591; WAN024FDJ_at; Start 14; Stop 38
tcagcatgagagatttgattttcct

SEQ ID NO: 201798 - DNA, 25 bp, Artificial
  probe
  misc_feature (1)..(25): SEQ ID NO: 6591; WAN024FDJ_at; Start 8; Stop 32
gaggtatcagcatgagagatttgat

SEQ ID NO: 201799 - DNA, 25 bp, Artificial
  probe
  misc_feature (1)..(25): SEQ ID NO: 6591; WAN024FDJ_at; Start 46; Stop 70
caaaataggatagttgagcctaaag

SEQ ID NO: 201800 - DNA, 25 bp, Artificial
  probe
  misc_feature (1)..(25): SEQ ID NO: 6591; WAN024FDJ_at; Start 55; Stop 79
atagttgagcctaaagaagtggaag

SEQ ID NO: 201801 - DNA, 25 bp, Artificial
  probe
  misc_feature (1)..(25): SEQ ID NO: 7477; WAN024FDK_at; Start 13; Stop 37
aactctcaagtcttcgaaatcagga

SEQ ID NO: 201802 - DNA, 25 bp, Artificial
  probe
  misc_feature (1)..(25): SEQ ID NO: 7477; WAN024FDK_at; Start 42; Stop 66
caacagttattacaaggatgcgatt

SEQ ID NO: 201803 - DNA, 25 bp, Artificial
  probe
  misc_feature (1)..(25): SEQ ID NO: 7477; WAN024FDK_at; Start 63; Stop 87
gatttactacttcaaaaacatcaat

SEQ ID NO: 201804 - DNA, 25 bp, Artificial
  probe
  misc_feature (1)..(25): SEQ ID NO: 7477; WAN024FDK_at; Start 67; Stop 91
tactacttcaaaaacatcaattatt

SEQ ID NO: 201805 - DNA, 25 bp, Artificial
  probe
  misc_feature (1)..(25): SEQ ID NO: 7477; WAN024FDK_at; Start 57; Stop 81
ggatgcgatttactacttcaaaaac

SEQ ID NO: 201806 - DNA, 25 bp, Artificial
  probe
  misc_feature (1)..(25): SEQ ID NO: 7477; WAN024FDK_at; Start 33; Stop 57
caggattttcaacagttattacaag

SEQ ID NO: 201807 - DNA, 25 bp, Artificial
  probe
  misc_feature (1)..(25): SEQ ID NO: 7477; WAN024FDK_at; Start 16; Stop 40
tctcaagtcttcgaaatcaggattt

SEQ ID NO: 201808 - DNA, 25 bp, Artificial
  probe
  misc_feature (1)..(25): SEQ ID NO: 7477; WAN024FDK_at; Start 47; Stop 71
gttattacaaggatgcgatttacta

SEQ ID NO: 201809 - DNA, 25 bp, Artificial
  probe
  misc_feature (1)..(25): SEQ ID NO: 7477; WAN024FDK_at; Start 8; Stop 32
tgattaactctcaagtcttcgaaat

SEQ ID NO: 201810 - DNA, 25 bp, Artificial
  probe
  misc_feature (1)..(25): SEQ ID NO: 7477; WAN024FDK_at; Start 12; Stop 36
taactctcaagtcttcgaaatcagg

SEQ ID NO: 201811 - DNA, 25 bp, Artificial
  probe
  misc_feature (1)..(25): SEQ ID NO: 7477; WAN024FDK_at; Start 53; Stop 77
acaaggatgcgatttactacttcaa

SEQ ID NO: 201812 - DNA, 25 bp, Artificial
  probe
  misc_feature (1)..(25): SEQ ID NO: 7477; WAN024FDK_at; Start 19; Stop 43
caagtcttcgaaatcaggattttca

SEQ ID NO: 201813 - DNA, 25 bp, Artificial
  probe
  misc_feature (1)..(25): SEQ ID NO: 7477; WAN024FDK_at; Start 35; Stop 59
ggattttcaacagttattacaagga

SEQ ID NO: 201814 - DNA, 25 bp, Artificial
  probe
  misc_feature (1)..(25): SEQ ID NO: 7477; WAN024FDK_at; Start 6; Stop 30
tatgattaactctcaagtcttcgaa

SEQ ID NO: 201815 - DNA, 25 bp, Artificial
  probe
  misc_feature (1)..(25): SEQ ID NO: 7477; WAN024FDK_at; Start 56; Stop 80
aggatgcgatttactacttcaaaaa

SEQ ID NO: 201816 - DNA, 25 bp, Artificial
  probe
  misc_feature (1)..(25): SEQ ID NO: 7477; WAN024FDK_at; Start 58; Stop 82
gatgcgatttactacttcaaaaaca

SEQ ID NO: 201817 - DNA, 25 bp, Artificial
  probe
  misc_feature (1)..(25): SEQ ID NO: 7477; WAN024FDK_at; Start 27; Stop 51
cgaaatcaggattttcaacagttat

SEQ ID NO: 201818 - DNA, 25 bp, Artificial
  probe
  misc_feature (1)..(25): SEQ ID NO: 7477; WAN024FDK_at; Start 23; Stop 47
tcttcgaaatcaggattttcaacag

SEQ ID NO: 201819 - DNA, 25 bp, Artificial
  probe
  misc_feature (1)..(25): SEQ ID NO: 7477; WAN024FDK_at; Start 2; Stop 26
tgagtatgattaactctcaagtctt

SEQ ID NO: 201820 - DNA, 25 bp, Artificial
  probe
  misc_feature (1)..(25): SEQ ID NO: 7477; WAN024FDK_at; Start 39; Stop 63
tttcaacagttattacaaggatgcg

SEQ ID NO: 201821 - DNA, 25 bp, Artificial
  probe
  misc_feature (1)..(25): SEQ ID NO: 7477; WAN024FDK_at; Start 70; Stop 94
tacttcaaaaacatcaattattcta

SEQ ID NO: 201822 - DNA, 25 bp, Artificial
  probe
  misc_feature (1)..(25): SEQ ID NO: 7477; WAN024FDK_at; Start 18; Stop 42
tcaagtcttcgaaatcaggattttc

SEQ ID NO: 201823 - DNA, 25 bp, Artificial
  probe
  misc_feature (1)..(25): SEQ ID NO: 7477; WAN024FDK_at; Start 54; Stop 78
caaggatgcgatttactacttcaaa

SEQ ID NO: 201824 - DNA, 25 bp, Artificial
  probe
  misc_feature (1)..(25): SEQ ID NO: 7477; WAN024FDK_at; Start 41; Stop 65
tcaacagttattacaaggatgcgat

SEQ ID NO: 201825 - DNA, 25 bp, Artificial
  probe
  misc_feature (1)..(25): SEQ ID NO: 7477; WAN024FDK_at; Start 5; Stop 29
gtatgattaactctcaagtcttcga

SEQ ID NO: 201826 - DNA, 25 bp, Artificial
  probe
  misc_feature (1)..(25): SEQ ID NO: 7477; WAN024FDK_at; Start 4; Stop 28
agtatgattaactctcaagtcttcg

SEQ ID NO: 201827 - DNA, 25 bp, Artificial
  probe
  misc_feature (1)..(25): SEQ ID NO: 7477; WAN024FDK_at; Start 52; Stop 76
tacaaggatgcgatttactacttca

SEQ ID NO: 201828 - DNA, 25 bp, Artificial
  probe
  misc_feature (1)..(25): SEQ ID NO: 7477; WAN024FDK_at; Start 49; Stop 73
tattacaaggatgcgatttactact

SEQ ID NO: 201829 - DNA, 25 bp, Artificial
  probe
  misc_feature (1)..(25): SEQ ID NO: 7477; WAN024FDK_at; Start 45; Stop 69
cagttattacaaggatgcgatttac

SEQ ID NO: 201830 - DNA, 25 bp, Artificial
  probe
  misc_feature (1)..(25): SEQ ID NO: 7477; WAN024FDK_at; Start 51; Stop 75
ttacaaggatgcgatttactacttc

SEQ ID NO: 201831 - DNA, 25 bp, Artificial
  probe
  misc_feature (1)..(25): SEQ ID NO: 7477; WAN024FDK_at; Start 30; Stop 54
aatcaggattttcaacagttattac

SEQ ID NO: 201832 - DNA, 25 bp, Artificial
  probe
  misc_feature (1)..(25): SEQ ID NO: 7477; WAN024FDK_at; Start 61; Stop 85
gcgatttactacttcaaaaacatca

SEQ ID NO: 201833 - DNA, 25 bp, Artificial
  probe
  misc_feature (1)..(25): SEQ ID NO: 7477; WAN024FDK_at; Start 15; Stop 39
ctctcaagtcttcgaaatcaggatt

SEQ ID NO: 201834 - DNA, 25 bp, Artificial
  probe
  misc_feature (1)..(25): SEQ ID NO: 7477; WAN024FDK_at; Start 40; Stop 64
ttcaacagttattacaaggatgcga

SEQ ID NO: 201835 - DNA, 25 bp, Artificial
  probe
  misc_feature (1)..(25): SEQ ID NO: 718; WAN024FDL_at; Start 143; Stop 167
ccaaaagagattttagatttgtacg

SEQ ID NO: 201836 - DNA, 25 bp, Artificial
  probe
  misc_feature (1)..(25): SEQ ID NO: 718; WAN024FDL_at; Start 57; Stop 81
tgatttttacaaaacaaattcgtca

SEQ ID NO: 201837 - DNA, 25 bp, Artificial
  probe
  misc_feature (1)..(25): SEQ ID NO: 718; WAN024FDL_at; Start 24; Stop 48
tggaaatgatggaactaccaagtca

SEQ ID NO: 201838 - DNA, 25 bp, Artificial
  probe
  misc_feature (1)..(25): SEQ ID NO: 718; WAN024FDL_at; Start 126; Stop 150
tcttccgggaagatactccaaaaga

SEQ ID NO: 201839 - DNA, 25 bp, Artificial
  probe
  misc_feature (1)..(25): SEQ ID NO: 718; WAN024FDL_at; Start 4; Stop 28
aaaagagaggtgataagcaatggaa

SEQ ID NO: 201840 - DNA, 25 bp, Artificial
  probe
  misc_feature (1)..(25): SEQ ID NO: 718; WAN024FDL_at; Start 181; Stop 205
taaacttgattttgcttaccaagaa

SEQ ID NO: 201841 - DNA, 25 bp, Artificial
  probe
  misc_feature (1)..(25): SEQ ID NO: 718; WAN024FDL_at; Start 183; Stop 207
aacttgattttgcttaccaagaagt

SEQ ID NO: 201842 - DNA, 25 bp, Artificial
  probe
  misc_feature (1)..(25): SEQ ID NO: 718; WAN024FDL_at; Start 71; Stop 95
caaattcgtcattggattcttagtg

SEQ ID NO: 201843 - DNA, 25 bp, Artificial
  probe
  misc_feature (1)..(25): SEQ ID NO: 718; WAN024FDL_at; Start 77; Stop 101
cgtcattggattcttagtgatcaag

SEQ ID NO: 201844 - DNA, 25 bp, Artificial
  probe
  misc_feature (1)..(25): SEQ ID NO: 718; WAN024FDL_at; Start 166; Stop 190
cgaaaacattaaatctaaacttgat

SEQ ID NO: 201845 - DNA, 25 bp, Artificial
  probe
  misc_feature (1)..(25): SEQ ID NO: 718; WAN024FDL_at; Start 139; Stop 163
tactccaaaagagattttagatttg

SEQ ID NO: 201846 - DNA, 25 bp, Artificial
  probe
  misc_feature (1)..(25): SEQ ID NO: 718; WAN024FDL_at; Start 17; Stop 41
taagcaatggaaatgatggaactac

SEQ ID NO: 201847 - DNA, 25 bp, Artificial
  probe
  misc_feature (1)..(25): SEQ ID NO: 718; WAN024FDL_at; Start 38; Stop 62
ctaccaagtcaggaaattttgattt

SEQ ID NO: 201848 - DNA, 25 bp, Artificial
  probe
  misc_feature (1)..(25): SEQ ID NO: 718; WAN024FDL_at; Start 19; Stop 43
agcaatggaaatgatggaactacca

SEQ ID NO: 201849 - DNA, 25 bp, Artificial
  probe
  misc_feature (1)..(25): SEQ ID NO: 718; WAN024FDL_at; Start 30; Stop 54
tgatggaactaccaagtcaggaaat

SEQ ID NO: 201850 - DNA, 25 bp, Artificial
  probe
  misc_feature (1)..(25): SEQ ID NO: 718; WAN024FDL_at; Start 88; Stop 112
tcttagtgatcaagttatttcaggg

SEQ ID NO: 201851 - DNA, 25 bp, Artificial
  probe
  misc_feature (1)..(25): SEQ ID NO: 718; WAN024FDL_at; Start 134; Stop 158
gaagatactccaaaagagattttag

SEQ ID NO: 201852 - DNA, 25 bp, Artificial
  probe
  misc_feature (1)..(25): SEQ ID NO: 718; WAN024FDL_at; Start 31; Stop 55
gatggaactaccaagtcaggaaatt

SEQ ID NO: 201853 - DNA, 25 bp, Artificial
  probe
  misc_feature (1)..(25): SEQ ID NO: 718; WAN024FDL_at; Start 14; Stop 38
tgataagcaatggaaatgatggaac

SEQ ID NO: 201854 - DNA, 25 bp, Artificial
  probe
  misc_feature (1)..(25): SEQ ID NO: 718; WAN024FDL_at; Start 2; Stop 26
tgaaaagagaggtgataagcaatgg

SEQ ID NO: 201855 - DNA, 25 bp, Artificial
  probe
  misc_feature (1)..(25): SEQ ID NO: 718; WAN024FDL_at; Start 27; Stop 51
aaatgatggaactaccaagtcagga

SEQ ID NO: 201856 - DNA, 25 bp, Artificial
  probe
  misc_feature (1)..(25): SEQ ID NO: 718; WAN024FDL_at; Start 66; Stop 90
caaaacaaattcgtcattggattct

SEQ ID NO: 201857 - DNA, 25 bp, Artificial
  probe
  misc_feature (1)..(25): SEQ ID NO: 718; WAN024FDL_at; Start 95; Stop 119
gatcaagttatttcagggaaaagaa

SEQ ID NO: 201858 - DNA, 25 bp, Artificial
  probe
  misc_feature (1)..(25): SEQ ID NO: 718; WAN024FDL_at; Start 179; Stop 203
tctaaacttgattttgcttaccaag

SEQ ID NO: 201859 - DNA, 25 bp, Artificial
  probe
  misc_feature (1)..(25): SEQ ID NO: 718; WAN024FDL_at; Start 8; Stop 32
gagaggtgataagcaatggaaatga

SEQ ID NO: 201860 - DNA, 25 bp, Artificial
  probe
  misc_feature (1)..(25): SEQ ID NO: 718; WAN024FDL_at; Start 158; Stop 182
gatttgtacgaaaacattaaatcta

SEQ ID NO: 201861 - DNA, 25 bp, Artificial
  probe
  misc_feature (1)..(25): SEQ ID NO: 718; WAN024FDL_at; Start 149; Stop 173
gagattttagatttgtacgaaaaca

SEQ ID NO: 201862 - DNA, 25 bp, Artificial
  probe
  misc_feature (1)..(25): SEQ ID NO: 718; WAN024FDL_at; Start 130; Stop 154
ccgggaagatactccaaaagagatt

SEQ ID NO: 201863 - DNA, 25 bp, Artificial
  probe
  misc_feature (1)..(25): SEQ ID NO: 718; WAN024FDL_at; Start 128; Stop 152
ttccgggaagatactccaaaagaga

SEQ ID NO: 201864 - DNA, 25 bp, Artificial
  probe
  misc_feature (1)..(25): SEQ ID NO: 718; WAN024FDL_at; Start 21; Stop 45
caatggaaatgatggaactaccaag

SEQ ID NO: 201865 - DNA, 25 bp, Artificial
  probe
  misc_feature (1)..(25): SEQ ID NO: 718; WAN024FDL_at; Start 35; Stop 59
gaactaccaagtcaggaaattttga

SEQ ID NO: 201866 - DNA, 25 bp, Artificial
  probe
  misc_feature (1)..(25): SEQ ID NO: 718; WAN024FDL_at; Start 62; Stop 86
tttacaaaacaaattcgtcattgga

SEQ ID NO: 201867 - DNA, 25 bp, Artificial
  probe
  misc_feature (1)..(25): SEQ ID NO: 718; WAN024FDL_at; Start 91; Stop 115
tagtgatcaagttatttcagggaaa

SEQ ID NO: 201868 - DNA, 25 bp, Artificial
  probe
  misc_feature (1)..(25): SEQ ID NO: 718; WAN024FDL_at; Start 80; Stop 104
cattggattcttagtgatcaagtta

SEQ ID NO: 201869 - DNA, 25 bp, Artificial
  probe
  misc_feature (1)..(25): SEQ ID NO: 687; WAN024FDM_at; Start 65; Stop 89
atcctgatttcgaagacttgagagt

SEQ ID NO: 201870 - DNA, 25 bp, Artificial
  probe
  misc_feature (1)..(25): SEQ ID NO: 687; WAN024FDM_at; Start 49; Stop 73
gtaataactgttgaaaatcctgatt

SEQ ID NO: 201871 - DNA, 25 bp, Artificial
  probe
  misc_feature (1)..(25): SEQ ID NO: 687; WAN024FDM_at; Start 50; Stop 74
taataactgttgaaaatcctgattt

SEQ ID NO: 201872 - DNA, 25 bp, Artificial
  probe
  misc_feature (1)..(25): SEQ ID NO: 687; WAN024FDM_at; Start 47; Stop 71
ttgtaataactgttgaaaatcctga

SEQ ID NO: 201873 - DNA, 25 bp, Artificial
  probe
  misc_feature (1)..(25): SEQ ID NO: 687; WAN024FDM_at; Start 62; Stop 86
aaaatcctgatttcgaagacttgag

SEQ ID NO: 201874 - DNA, 25 bp, Artificial
  probe
  misc_feature (1)..(25): SEQ ID NO: 687; WAN024FDM_at; Start 18; Stop 42
tgatgtttttgaagtagtaaatcgc

SEQ ID NO: 201875 - DNA, 25 bp, Artificial
  probe
  misc_feature (1)..(25): SEQ ID NO: 687; WAN024FDM_at; Start 48; Stop 72
tgtaataactgttgaaaatcctgat

SEQ ID NO: 201876 - DNA, 25 bp, Artificial
  probe
  misc_feature (1)..(25): SEQ ID NO: 687; WAN024FDM_at; Start 76; Stop 100
gaagacttgagagttaatcatactc

SEQ ID NO: 201877 - DNA, 25 bp, Artificial
  probe
  misc_feature (1)..(25): SEQ ID NO: 687; WAN024FDM_at; Start 64; Stop 88
aatcctgatttcgaagacttgagag

SEQ ID NO: 201878 - DNA, 25 bp, Artificial
  probe
  misc_feature (1)..(25): SEQ ID NO: 687; WAN024FDM_at; Start 58; Stop 82
gttgaaaatcctgatttcgaagact

SEQ ID NO: 201879 - DNA, 25 bp, Artificial
  probe
  misc_feature (1)..(25): SEQ ID NO: 687; WAN024FDM_at; Start 44; Stop 68
tccttgtaataactgttgaaaatcc

SEQ ID NO: 201880 - DNA, 25 bp, Artificial
  probe
  misc_feature (1)..(25): SEQ ID NO: 687; WAN024FDM_at; Start 11; Stop 35
gaataattgatgtttttgaagtagt

SEQ ID NO: 201881 - DNA, 25 bp, Artificial
  probe
  misc_feature (1)..(25): SEQ ID NO: 687; WAN024FDM_at; Start 70; Stop 94
gatttcgaagacttgagagttaatc

SEQ ID NO: 201882 - DNA, 25 bp, Artificial
  probe
  misc_feature (1)..(25): SEQ ID NO: 687; WAN024FDM_at; Start 63; Stop 87
aaatcctgatttcgaagacttgaga

SEQ ID NO: 201883 - DNA, 25 bp, Artificial
  probe
  misc_feature (1)..(25): SEQ ID NO: 687; WAN024FDM_at; Start 74; Stop 98
tcgaagacttgagagttaatcatac

SEQ ID NO: 201884 - DNA, 25 bp, Artificial
  probe
  misc_feature (1)..(25): SEQ ID NO: 687; WAN024FDM_at; Start 61; Stop 85
gaaaatcctgatttcgaagacttga

SEQ ID NO: 201885 - DNA, 25 bp, Artificial
  probe
  misc_feature (1)..(25): SEQ ID NO: 687; WAN024FDM_at; Start 54; Stop 78
aactgttgaaaatcctgatttcgaa

SEQ ID NO: 201886 - DNA, 25 bp, Artificial
  probe
  misc_feature (1)..(25): SEQ ID NO: 687; WAN024FDM_at; Start 67; Stop 91
cctgatttcgaagacttgagagtta

SEQ ID NO: 201887 - DNA, 25 bp, Artificial
  probe
  misc_feature (1)..(25): SEQ ID NO: 687; WAN024FDM_at; Start 68; Stop 92
ctgatttcgaagacttgagagttaa

SEQ ID NO: 201888 - DNA, 25 bp, Artificial
  probe
  misc_feature (1)..(25): SEQ ID NO: 687; WAN024FDM_at; Start 66; Stop 90
tcctgatttcgaagacttgagagtt

SEQ ID NO: 201889 - DNA, 25 bp, Artificial
  probe
  misc_feature (1)..(25): SEQ ID NO: 687; WAN024FDM_at; Start 53; Stop 77
taactgttgaaaatcctgatttcga

SEQ ID NO: 201890 - DNA, 25 bp, Artificial
  probe
  misc_feature (1)..(25): SEQ ID NO: 687; WAN024FDM_at; Start 71; Stop 95
atttcgaagacttgagagttaatca

SEQ ID NO: 201891 - DNA, 25 bp, Artificial
  probe
  misc_feature (1)..(25): SEQ ID NO: 687; WAN024FDM_at; Start 45; Stop 69
ccttgtaataactgttgaaaatcct

SEQ ID NO: 201892 - DNA, 25 bp, Artificial
  probe
  misc_feature (1)..(25): SEQ ID NO: 687; WAN024FDM_at; Start 55; Stop 79
actgttgaaaatcctgatttcgaag

SEQ ID NO: 201893 - DNA, 25 bp, Artificial
  probe
  misc_feature (1)..(25): SEQ ID NO: 687; WAN024FDM_at; Start 52; Stop 76
ataactgttgaaaatcctgatttcg

SEQ ID NO: 201894 - DNA, 25 bp, Artificial
  probe
  misc_feature (1)..(25): SEQ ID NO: 687; WAN024FDM_at; Start 75; Stop 99
cgaagacttgagagttaatcatact

SEQ ID NO: 201895 - DNA, 25 bp, Artificial
  probe
  misc_feature (1)..(25): SEQ ID NO: 687; WAN024FDM_at; Start 57; Stop 81
tgttgaaaatcctgatttcgaagac

SEQ ID NO: 201896 - DNA, 25 bp, Artificial
  probe
  misc_feature (1)..(25): SEQ ID NO: 687; WAN024FDM_at; Start 69; Stop 93
tgatttcgaagacttgagagttaat

SEQ ID NO: 201897 - DNA, 25 bp, Artificial
  probe
  misc_feature (1)..(25): SEQ ID NO: 687; WAN024FDM_at; Start 60; Stop 84
tgaaaatcctgatttcgaagacttg

SEQ ID NO: 201898 - DNA, 25 bp, Artificial
  probe
  misc_feature (1)..(25): SEQ ID NO: 687; WAN024FDM_at; Start 78; Stop 102
agacttgagagttaatcatactcaa

SEQ ID NO: 201899 - DNA, 25 bp, Artificial
  probe
  misc_feature (1)..(25): SEQ ID NO: 687; WAN024FDM_at; Start 72; Stop 96
tttcgaagacttgagagttaatcat

SEQ ID NO: 201900 - DNA, 25 bp, Artificial
  probe
  misc_feature (1)..(25): SEQ ID NO: 687; WAN024FDM_at; Start 46; Stop 70
cttgtaataactgttgaaaatcctg

SEQ ID NO: 201901 - DNA, 25 bp, Artificial
  probe
  misc_feature (1)..(25): SEQ ID NO: 687; WAN024FDM_at; Start 77; Stop 101
aagacttgagagttaatcatactca

SEQ ID NO: 201902 - DNA, 25 bp, Artificial
  probe
  misc_feature (1)..(25): SEQ ID NO: 687; WAN024FDM_at; Start 56; Stop 80
ctgttgaaaatcctgatttcgaaga

SEQ ID NO: 201903 - DNA, 25 bp, Artificial
  probe
  misc_feature (1)..(25): SEQ ID NO: 3331; WAN024FDN_at; Start 268; Stop 292
tcggtctttatggttggtcagctaa

SEQ ID NO: 201904 - DNA, 25 bp, Artificial
  probe
  misc_feature (1)..(25): SEQ ID NO: 3331; WAN024FDN_at; Start 208; Stop 232
gatgaagactgtctgctttggagca

SEQ ID NO: 201905 - DNA, 25 bp, Artificial
  probe
  misc_feature (1)..(25): SEQ ID NO: 3331; WAN024FDN_at; Start 192; Stop 216
actgggaattcatttagatgaagac

SEQ ID NO: 201906 - DNA, 25 bp, Artificial
  probe
  misc_feature (1)..(25): SEQ ID NO: 3331; WAN024FDN_at; Start 225; Stop 249
ttggagcaagatttatcctagcgta

SEQ ID NO: 201907 - DNA, 25 bp, Artificial
  probe
  misc_feature (1)..(25): SEQ ID NO: 3331; WAN024FDN_at; Start 265; Stop 289
aaatcggtctttatggttggtcagc

SEQ ID NO: 201908 - DNA, 25 bp, Artificial
  probe
  misc_feature (1)..(25): SEQ ID NO: 3331; WAN024FDN_at; Start 146; Stop 170
gggacgaaagcccttttgaatgcgc

SEQ ID NO: 201909 - DNA, 25 bp, Artificial
  probe
  misc_feature (1)..(25): SEQ ID NO: 3331; WAN024FDN_at; Start 16; Stop 40
gaaatttctgatttcacaggttgca

SEQ ID NO: 201910 - DNA, 25 bp, Artificial
  probe
  misc_feature (1)..(25): SEQ ID NO: 3331; WAN024FDN_at; Start 168; Stop 192
cgctcggcgtgaagtttatgaggaa

SEQ ID NO: 201911 - DNA, 25 bp, Artificial
  probe
  misc_feature (1)..(25): SEQ ID NO: 3331; WAN024FDN_at; Start 18; Stop 42
aatttctgatttcacaggttgcaag

SEQ ID NO: 201912 - DNA, 25 bp, Artificial
  probe
  misc_feature (1)..(25): SEQ ID NO: 3331; WAN024FDN_at; Start 282; Stop 306
tggtcagctaagacaagaacaattt

SEQ ID NO: 201913 - DNA, 25 bp, Artificial
  probe
  misc_feature (1)..(25): SEQ ID NO: 3331; WAN024FDN_at; Start 187; Stop 211
gaggaactgggaattcatttagatg

SEQ ID NO: 201914 - DNA, 25 bp, Artificial
  probe
  misc_feature (1)..(25): SEQ ID NO: 3331; WAN024FDN_at; Start 312; Stop 336
tatcatcttcggagatgaaggacag

SEQ ID NO: 201915 - DNA, 25 bp, Artificial
  probe
  misc_feature (1)..(25): SEQ ID NO: 3331; WAN024FDN_at; Start 228; Stop 252
gagcaagatttatcctagcgtaatt

SEQ ID NO: 201916 - DNA, 25 bp, Artificial
  probe
  misc_feature (1)..(25): SEQ ID NO: 3331; WAN024FDN_at; Start 304; Stop 328
tttgacaatatcatcttcggagatg

SEQ ID NO: 201917 - DNA, 25 bp, Artificial
  probe
  misc_feature (1)..(25): SEQ ID NO: 3331; WAN024FDN_at; Start 256; Stop 280
aaaggcaagaaatcggtctttatgg

SEQ ID NO: 201918 - DNA, 25 bp, Artificial
  probe
  misc_feature (1)..(25): SEQ ID NO: 3331; WAN024FDN_at; Start 30; Stop 54
cacaggttgcaagattgctttgttt

SEQ ID NO: 201919 - DNA, 25 bp, Artificial
  probe
  misc_feature (1)..(25): SEQ ID NO: 3331; WAN024FDN_at; Start 164; Stop 188
aatgcgctcggcgtgaagtttatga

SEQ ID NO: 201920 - DNA, 25 bp, Artificial
  probe
  misc_feature (1)..(25): SEQ ID NO: 3331; WAN024FDN_at; Start 150; Stop 174
cgaaagcccttttgaatgcgctcgg

SEQ ID NO: 201921 - DNA, 25 bp, Artificial
  probe
  misc_feature (1)..(25): SEQ ID NO: 3331; WAN024FDN_at; Start 25; Stop 49
gatttcacaggttgcaagattgctt

SEQ ID NO: 201922 - DNA, 25 bp, Artificial
  probe
  misc_feature (1)..(25): SEQ ID NO: 3331; WAN024FDN_at; Start 160; Stop 184
tttgaatgcgctcggcgtgaagttt

SEQ ID NO: 201923 - DNA, 25 bp, Artificial
  probe
  misc_feature (1)..(25): SEQ ID NO: 3331; WAN024FDN_at; Start 211; Stop 235
gaagactgtctgctttggagcaaga

SEQ ID NO: 201924 - DNA, 25 bp, Artificial
  probe
  misc_feature (1)..(25): SEQ ID NO: 3331; WAN024FDN_at; Start 23; Stop 47
ctgatttcacaggttgcaagattgc

SEQ ID NO: 201925 - DNA, 25 bp, Artificial
  probe
  misc_feature (1)..(25): SEQ ID NO: 3331; WAN024FDN_at; Start 123; Stop 147
actgccaggtggtggccgtgaaggg

SEQ ID NO: 201926 - DNA, 25 bp, Artificial
  probe
  misc_feature (1)..(25): SEQ ID NO: 3331; WAN024FDN_at; Start 238; Stop 262
tatcctagcgtaatttttaaaggca

SEQ ID NO: 201927 - DNA, 25 bp, Artificial
  probe
  misc_feature (1)..(25): SEQ ID NO: 3331; WAN024FDN_at; Start 158; Stop 182
cttttgaatgcgctcggcgtgaagt

SEQ ID NO: 201928 - DNA, 25 bp, Artificial
  probe
  misc_feature (1)..(25): SEQ ID NO: 3331; WAN024FDN_at; Start 214; Stop 238
gactgtctgctttggagcaagattt

SEQ ID NO: 201929 - DNA, 25 bp, Artificial
  probe
  misc_feature (1)..(25): SEQ ID NO: 3331; WAN024FDN_at; Start 278; Stop 302
tggttggtcagctaagacaagaaca

SEQ ID NO: 201930 - DNA, 25 bp, Artificial
  probe
  misc_feature (1)..(25): SEQ ID NO: 3331; WAN024FDN_at; Start 171; Stop 195
tcggcgtgaagtttatgaggaactg

SEQ ID NO: 201931 - DNA, 25 bp, Artificial
  probe
  misc_feature (1)..(25): SEQ ID NO: 3331; WAN024FDN_at; Start 181; Stop 205
gtttatgaggaactgggaattcatt

SEQ ID NO: 201932 - DNA, 25 bp, Artificial
  probe
  misc_feature (1)..(25): SEQ ID NO: 3331; WAN024FDN_at; Start 155; Stop 179
gcccttttgaatgcgctcggcgtga

SEQ ID NO: 201933 - DNA, 25 bp, Artificial
  probe
  misc_feature (1)..(25): SEQ ID NO: 3331; WAN024FDN_at; Start 200; Stop 224
ttcatttagatgaagactgtctgct

SEQ ID NO: 201934 - DNA, 25 bp, Artificial
  probe
  misc_feature (1)..(25): SEQ ID NO: 3331; WAN024FDN_at; Start 301; Stop 325
caatttgacaatatcatcttcggag

SEQ ID NO: 201935 - DNA, 25 bp, Artificial
  probe
  misc_feature (1)..(25): SEQ ID NO: 3331; WAN024FDN_at; Start 152; Stop 176
aaagcccttttgaatgcgctcggcg

SEQ ID NO: 201936 - DNA, 25 bp, Artificial
  probe
  misc_feature (1)..(25): SEQ ID NO: 3331; WAN024FDN_at; Start 273; Stop 297
ctttatggttggtcagctaagacaa

SEQ ID NO: 201937 - DNA, 25 bp, Artificial
  probe
  misc_feature (1)..(25): SEQ ID NO: 3332; WAN024FDO_at; Start 188; Stop 212
aagaactgggcattcatctgactga

SEQ ID NO: 201938 - DNA, 25 bp, Artificial
  probe
  misc_feature (1)..(25): SEQ ID NO: 3332; WAN024FDO_at; Start 280; Stop 304
gttggtcagttgacacagaaccagt

SEQ ID NO: 201939 - DNA, 25 bp, Artificial
  probe
  misc_feature (1)..(25): SEQ ID NO: 3332; WAN024FDO_at; Start 248; Stop 272
tgctttttgcagacaaacagtccgt

SEQ ID NO: 201940 - DNA, 25 bp, Artificial
  probe
  misc_feature (1)..(25): SEQ ID NO: 3332; WAN024FDO_at; Start 253; Stop 277
tttgcagacaaacagtccgtttttc

SEQ ID NO: 201941 - DNA, 25 bp, Artificial
  probe
  misc_feature (1)..(25): SEQ ID NO: 3332; WAN024FDO_at; Start 246; Stop 270
tatgctttttgcagacaaacagtcc

SEQ ID NO: 201942 - DNA, 25 bp, Artificial
  probe
  misc_feature (1)..(25): SEQ ID NO: 3332; WAN024FDO_at; Start 264; Stop 288
acagtccgtttttctagttggtcag

SEQ ID NO: 201943 - DNA, 25 bp, Artificial
  probe
  misc_feature (1)..(25): SEQ ID NO: 3332; WAN024FDO_at; Start 250; Stop 274
ctttttgcagacaaacagtccgttt

SEQ ID NO: 201944 - DNA, 25 bp, Artificial
  probe
  misc_feature (1)..(25): SEQ ID NO: 3332; WAN024FDO_at; Start 195; Stop 219
gggcattcatctgactgaagattgt

SEQ ID NO: 201945 - DNA, 25 bp, Artificial
  probe
  misc_feature (1)..(25): SEQ ID NO: 3332; WAN024FDO_at; Start 166; Stop 190
tgtgtagcgcgtgaagtttatgaag

SEQ ID NO: 201946 - DNA, 25 bp, Artificial
  probe
  misc_feature (1)..(25): SEQ ID NO: 3332; WAN024FDO_at; Start 256; Stop 280
gcagacaaacagtccgtttttctag

SEQ ID NO: 201947 - DNA, 25 bp, Artificial
  probe
  misc_feature (1)..(25): SEQ ID NO: 3332; WAN024FDO_at; Start 285; Stop 309
tcagttgacacagaaccagtttgac

SEQ ID NO: 201948 - DNA, 25 bp, Artificial
  probe
  misc_feature (1)..(25): SEQ ID NO: 3332; WAN024FDO_at; Start 283; Stop 307
ggtcagttgacacagaaccagtttg

SEQ ID NO: 201949 - DNA, 25 bp, Artificial
  probe
  misc_feature (1)..(25): SEQ ID NO: 3332; WAN024FDO_at; Start 187; Stop 211
gaagaactgggcattcatctgactg

SEQ ID NO: 201950 - DNA, 25 bp, Artificial
  probe
  misc_feature (1)..(25): SEQ ID NO: 3332; WAN024FDO_at; Start 286; Stop 310
cagttgacacagaaccagtttgaca

SEQ ID NO: 201951 - DNA, 25 bp, Artificial
  probe
  misc_feature (1)..(25): SEQ ID NO: 3332; WAN024FDO_at; Start 240; Stop 264
cccaagtatgctttttgcagacaaa

SEQ ID NO: 201952 - DNA, 25 bp, Artificial
  probe
  misc_feature (1)..(25): SEQ ID NO: 3332; WAN024FDO_at; Start 192; Stop 216
actgggcattcatctgactgaagat

SEQ ID NO: 201953 - DNA, 25 bp, Artificial
  probe
  misc_feature (1)..(25): SEQ ID NO: 3332; WAN024FDO_at; Start 172; Stop 196
gcgcgtgaagtttatgaagaactgg

SEQ ID NO: 201954 - DNA, 25 bp, Artificial
  probe
  misc_feature (1)..(25): SEQ ID NO: 3332; WAN024FDO_at; Start 27; Stop 51
tttcccaggctgtaagattgctttg

SEQ ID NO: 201955 - DNA, 25 bp, Artificial
  probe
  misc_feature (1)..(25): SEQ ID NO: 3332; WAN024FDO_at; Start 290; Stop 314
tgacacagaaccagtttgacagtat

SEQ ID NO: 201956 - DNA, 25 bp, Artificial
  probe
  misc_feature (1)..(25): SEQ ID NO: 3332; WAN024FDO_at; Start 265; Stop 289
cagtccgtttttctagttggtcagt

SEQ ID NO: 201957 - DNA, 25 bp, Artificial
  probe
  misc_feature (1)..(25): SEQ ID NO: 3332; WAN024FDO_at; Start 270; Stop 294
cgtttttctagttggtcagttgaca

SEQ ID NO: 201958 - DNA, 25 bp, Artificial
  probe
  misc_feature (1)..(25): SEQ ID NO: 3332; WAN024FDO_at; Start 238; Stop 262
tacccaagtatgctttttgcagaca

SEQ ID NO: 201959 - DNA, 25 bp, Artificial
  probe
  misc_feature (1)..(25): SEQ ID NO: 3332; WAN024FDO_at; Start 226; Stop 250
tggagtaaggtttacccaagtatgc

SEQ ID NO: 201960 - DNA, 25 bp, Artificial
  probe
  misc_feature (1)..(25): SEQ ID NO: 3332; WAN024FDO_at; Start 190; Stop 214
gaactgggcattcatctgactgaag

SEQ ID NO: 201961 - DNA, 25 bp, Artificial
  probe
  misc_feature (1)..(25): SEQ ID NO: 3332; WAN024FDO_at; Start 170; Stop 194
tagcgcgtgaagtttatgaagaact

SEQ ID NO: 201962 - DNA, 25 bp, Artificial
  probe
  misc_feature (1)..(25): SEQ ID NO: 3332; WAN024FDO_at; Start 278; Stop 302
tagttggtcagttgacacagaacca

SEQ ID NO: 201963 - DNA, 25 bp, Artificial
  probe
  misc_feature (1)..(25): SEQ ID NO: 3332; WAN024FDO_at; Start 242; Stop 266
caagtatgctttttgcagacaaaca

SEQ ID NO: 201964 - DNA, 25 bp, Artificial
  probe
  misc_feature (1)..(25): SEQ ID NO: 3332; WAN024FDO_at; Start 234; Stop 258
ggtttacccaagtatgctttttgca

SEQ ID NO: 201965 - DNA, 25 bp, Artificial
  probe
  misc_feature (1)..(25): SEQ ID NO: 3332; WAN024FDO_at; Start 30; Stop 54
cccaggctgtaagattgctttgttt

SEQ ID NO: 201966 - DNA, 25 bp, Artificial
  probe
  misc_feature (1)..(25): SEQ ID NO: 3332; WAN024FDO_at; Start 168; Stop 192
tgtagcgcgtgaagtttatgaagaa

SEQ ID NO: 201967 - DNA, 25 bp, Artificial
  probe
  misc_feature (1)..(25): SEQ ID NO: 3332; WAN024FDO_at; Start 288; Stop 312
gttgacacagaaccagtttgacagt

SEQ ID NO: 201968 - DNA, 25 bp, Artificial
  probe
  misc_feature (1)..(25): SEQ ID NO: 3332; WAN024FDO_at; Start 164; Stop 188
agtgtgtagcgcgtgaagtttatga

SEQ ID NO: 201969 - DNA, 25 bp, Artificial
  probe
  misc_feature (1)..(25): SEQ ID NO: 3332; WAN024FDO_at; Start 181; Stop 205
gtttatgaagaactgggcattcatc

SEQ ID NO: 201970 - DNA, 25 bp, Artificial
  probe
  misc_feature (1)..(25): SEQ ID NO: 3332; WAN024FDO_at; Start 276; Stop 300
tctagttggtcagttgacacagaac

SEQ ID NO: 201971 - DNA, 25 bp, Artificial
  probe
  misc_feature (1)..(25): SEQ ID NO: 1146; WAN024FDP_at; Start 22; Stop 46
actctagtccttttgatttggaatg

SEQ ID NO: 201972 - DNA, 25 bp, Artificial
  probe
  misc_feature (1)..(25): SEQ ID NO: 1146; WAN024FDP_at; Start 226; Stop 250
gggatggtgaccacactagtagcct

SEQ ID NO: 201973 - DNA, 25 bp, Artificial
  probe
  misc_feature (1)..(25): SEQ ID NO: 1146; WAN024FDP_at; Start 221; Stop 245
ttcttgggatggtgaccacactagt

SEQ ID NO: 201974 - DNA, 25 bp, Artificial
  probe
  misc_feature (1)..(25): SEQ ID NO: 1146; WAN024FDP_at; Start 178; Stop 202
tttcaccacaagactcgaaaatggt

SEQ ID NO: 201975 - DNA, 25 bp, Artificial
  probe
  misc_feature (1)..(25): SEQ ID NO: 1146; WAN024FDP_at; Start 36; Stop 60
gatttggaatgtcatcattttcttg

SEQ ID NO: 201976 - DNA, 25 bp, Artificial
  probe
  misc_feature (1)..(25): SEQ ID NO: 1146; WAN024FDP_at; Start 181; Stop 205
caccacaagactcgaaaatggtact

SEQ ID NO: 201977 - DNA, 25 bp, Artificial
  probe
  misc_feature (1)..(25): SEQ ID NO: 1146; WAN024FDP_at; Start 44; Stop 68
atgtcatcattttcttgatttatgg

SEQ ID NO: 201978 - DNA, 25 bp, Artificial
  probe
  misc_feature (1)..(25): SEQ ID NO: 1146; WAN024FDP_at; Start 232; Stop 256
gtgaccacactagtagccttatatt

SEQ ID NO: 201979 - DNA, 25 bp, Artificial
  probe
  misc_feature (1)..(25): SEQ ID NO: 1146; WAN024FDP_at; Start 231; Stop 255
ggtgaccacactagtagccttatat

SEQ ID NO: 201980 - DNA, 25 bp, Artificial
  probe
  misc_feature (1)..(25): SEQ ID NO: 1146; WAN024FDP_at; Start 225; Stop 249
tgggatggtgaccacactagtagcc

SEQ ID NO: 201981 - DNA, 25 bp, Artificial
  probe
  misc_feature (1)..(25): SEQ ID NO: 1146; WAN024FDP_at; Start 222; Stop 246
tcttgggatggtgaccacactagta

SEQ ID NO: 201982 - DNA, 25 bp, Artificial
  probe
  misc_feature (1)..(25): SEQ ID NO: 1146; WAN024FDP_at; Start 224; Stop 248
ttgggatggtgaccacactagtagc

SEQ ID NO: 201983 - DNA, 25 bp, Artificial
  probe
  misc_feature (1)..(25): SEQ ID NO: 1146; WAN024FDP_at; Start 30; Stop 54
ccttttgatttggaatgtcatcatt

SEQ ID NO: 201984 - DNA, 25 bp, Artificial
  probe
  misc_feature (1)..(25): SEQ ID NO: 1146; WAN024FDP_at; Start 183; Stop 207
ccacaagactcgaaaatggtacttt

SEQ ID NO: 201985 - DNA, 25 bp, Artificial
  probe
  misc_feature (1)..(25): SEQ ID NO: 1146; WAN024FDP_at; Start 41; Stop 65
ggaatgtcatcattttcttgattta

SEQ ID NO: 201986 - DNA, 25 bp, Artificial
  probe
  misc_feature (1)..(25): SEQ ID NO: 1146; WAN024FDP_at; Start 25; Stop 49
ctagtccttttgatttggaatgtca

SEQ ID NO: 201987 - DNA, 25 bp, Artificial
  probe
  misc_feature (1)..(25): SEQ ID NO: 1146; WAN024FDP_at; Start 28; Stop 52
gtccttttgatttggaatgtcatca

SEQ ID NO: 201988 - DNA, 25 bp, Artificial
  probe
  misc_feature (1)..(25): SEQ ID NO: 1146; WAN024FDP_at; Start 227; Stop 251
ggatggtgaccacactagtagcctt

SEQ ID NO: 201989 - DNA, 25 bp, Artificial
  probe
  misc_feature (1)..(25): SEQ ID NO: 1146; WAN024FDP_at; Start 228; Stop 252
gatggtgaccacactagtagcctta

SEQ ID NO: 201990 - DNA, 25 bp, Artificial
  probe
  misc_feature (1)..(25): SEQ ID NO: 1146; WAN024FDP_at; Start 219; Stop 243
gtttcttgggatggtgaccacacta

SEQ ID NO: 201991 - DNA, 25 bp, Artificial
  probe
  misc_feature (1)..(25): SEQ ID NO: 1146; WAN024FDP_at; Start 180; Stop 204
tcaccacaagactcgaaaatggtac

SEQ ID NO: 201992 - DNA, 25 bp, Artificial
  probe
  misc_feature (1)..(25): SEQ ID NO: 1146; WAN024FDP_at; Start 18; Stop 42
aattactctagtccttttgatttgg

SEQ ID NO: 201993 - DNA, 25 bp, Artificial
  probe
  misc_feature (1)..(25): SEQ ID NO: 1146; WAN024FDP_at; Start 218; Stop 242
ggtttcttgggatggtgaccacact

SEQ ID NO: 201994 - DNA, 25 bp, Artificial
  probe
  misc_feature (1)..(25): SEQ ID NO: 1146; WAN024FDP_at; Start 184; Stop 208
cacaagactcgaaaatggtacttta

SEQ ID NO: 201995 - DNA, 25 bp, Artificial
  probe
  misc_feature (1)..(25): SEQ ID NO: 1146; WAN024FDP_at; Start 242; Stop 266
tagtagccttatattttatttggag

SEQ ID NO: 201996 - DNA, 25 bp, Artificial
  probe
  misc_feature (1)..(25): SEQ ID NO: 1146; WAN024FDP_at; Start 230; Stop 254
tggtgaccacactagtagccttata

SEQ ID NO: 201997 - DNA, 25 bp, Artificial
  probe
  misc_feature (1)..(25): SEQ ID NO: 1146; WAN024FDP_at; Start 220; Stop 244
tttcttgggatggtgaccacactag

SEQ ID NO: 201998 - DNA, 25 bp, Artificial
  probe
  misc_feature (1)..(25): SEQ ID NO: 1146; WAN024FDP_at; Start 214; Stop 238
gtttggtttcttgggatggtgacca

SEQ ID NO: 201999 - DNA, 25 bp, Artificial
  probe
  misc_feature (1)..(25): SEQ ID NO: 1146; WAN024FDP_at; Start 245; Stop 269
tagccttatattttatttggaggta

SEQ ID NO: 202000 - DNA, 25 bp, Artificial
  probe
  misc_feature (1)..(25): SEQ ID NO: 1146; WAN024FDP_at; Start 223; Stop 247
cttgggatggtgaccacactagtag

SEQ ID NO: 202001 - DNA, 25 bp, Artificial
  probe
  misc_feature (1)..(25): SEQ ID NO: 1146; WAN024FDP_at; Start 216; Stop 240
ttggtttcttgggatggtgaccaca

SEQ ID NO: 202002 - DNA, 25 bp, Artificial
  probe
  misc_feature (1)..(25): SEQ ID NO: 1146; WAN024FDP_at; Start 217; Stop 241
tggtttcttgggatggtgaccacac

SEQ ID NO: 202003 - DNA, 25 bp, Artificial
  probe
  misc_feature (1)..(25): SEQ ID NO: 1146; WAN024FDP_at; Start 237; Stop 261
cacactagtagccttatattttatt

SEQ ID NO: 202004 - DNA, 25 bp, Artificial
  probe
  misc_feature (1)..(25): SEQ ID NO: 1146; WAN024FDP_at; Start 234; Stop 258
gaccacactagtagccttatatttt

SEQ ID NO: 202005 - DNA, 25 bp, Artificial
  probe
  misc_feature (1)..(25): SEQ ID NO: 5655; WAN024FDQ_at; Start 269; Stop 293
agtcaggcaggtttcatcttagtag

SEQ ID NO: 202006 - DNA, 25 bp, Artificial
  probe
  misc_feature (1)..(25): SEQ ID NO: 5655; WAN024FDQ_at; Start 437; Stop 461
caagaagctggtattttgcagggac

SEQ ID NO: 202007 - DNA, 25 bp, Artificial
  probe
  misc_feature (1)..(25): SEQ ID NO: 5655; WAN024FDQ_at; Start 813; Stop 837
tcatatcgccttgttggaaggagat

SEQ ID NO: 202008 - DNA, 25 bp, Artificial
  probe
  misc_feature (1)..(25): SEQ ID NO: 5655; WAN024FDQ_at; Start 196; Stop 220
catgctttttgtggctacttgacag

SEQ ID NO: 202009 - DNA, 25 bp, Artificial
  probe
  misc_feature (1)..(25): SEQ ID NO: 5655; WAN024FDQ_at; Start 138; Stop 162
tggttatgccttcgctcttctaagc

SEQ ID NO: 202010 - DNA, 25 bp, Artificial
  probe
  misc_feature (1)..(25): SEQ ID NO: 5655; WAN024FDQ_at; Start 393; Stop 417
tcatctcggcttgatattattggcg

SEQ ID NO: 202011 - DNA, 25 bp, Artificial
  probe
  misc_feature (1)..(25): SEQ ID NO: 5655; WAN024FDQ_at; Start 496; Stop 520
aacattttgccagtcgacatcaccg

SEQ ID NO: 202012 - DNA, 25 bp, Artificial
  probe
  misc_feature (1)..(25): SEQ ID NO: 5655; WAN024FDQ_at; Start 375; Stop 399
ttcaggaggcttgatggttcatctc

SEQ ID NO: 202013 - DNA, 25 bp, Artificial
  probe
  misc_feature (1)..(25): SEQ ID NO: 5655; WAN024FDQ_at; Start 255; Stop 279
tattttgaccaaaaagtcaggcagg

SEQ ID NO: 202014 - DNA, 25 bp, Artificial
  probe
  misc_feature (1)..(25): SEQ ID NO: 5655; WAN024FDQ_at; Start 177; Stop 201
tattcttcatgagctgggtcatgct

SEQ ID NO: 202015 - DNA, 25 bp, Artificial
  probe
  misc_feature (1)..(25): SEQ ID NO: 5655; WAN024FDQ_at; Start 688; Stop 712
ttaggtatgcaaggtgaagtttcca

SEQ ID NO: 202016 - DNA, 25 bp, Artificial
  probe
  misc_feature (1)..(25): SEQ ID NO: 5655; WAN024FDQ_at; Start 299; Stop 323
ccattctgaaaaatgttggtgctca

SEQ ID NO: 202017 - DNA, 25 bp, Artificial
  probe
  misc_feature (1)..(25): SEQ ID NO: 5655; WAN024FDQ_at; Start 873; Stop 897
ggtcaaatcgtttctgtctctcaaa

SEQ ID NO: 202018 - DNA, 25 bp, Artificial
  probe
  misc_feature (1)..(25): SEQ ID NO: 5655; WAN024FDQ_at; Start 513; Stop 537
catcaccgatggagcaaaaatttgg

SEQ ID NO: 202019 - DNA, 25 bp, Artificial
  probe
  misc_feature (1)..(25): SEQ ID NO: 5655; WAN024FDQ_at; Start 533; Stop 557
tttgggaattactacaacaccctga

SEQ ID NO: 202020 - DNA, 25 bp, Artificial
  probe
  misc_feature (1)..(25): SEQ ID NO: 5655; WAN024FDQ_at; Start 283; Stop 307
catcttagtagaacagccattctga

SEQ ID NO: 202021 - DNA, 25 bp, Artificial
  probe
  misc_feature (1)..(25): SEQ ID NO: 5655; WAN024FDQ_at; Start 966; Stop 990
taaggctctcaagattgctagacag

SEQ ID NO: 202022 - DNA, 25 bp, Artificial
  probe
  misc_feature (1)..(25): SEQ ID NO: 5655; WAN024FDQ_at; Start 228; Stop 252
gctggtggcttttggattaggacat

SEQ ID NO: 202023 - DNA, 25 bp, Artificial
  probe
  misc_feature (1)..(25): SEQ ID NO: 5655; WAN024FDQ_at; Start 774; Stop 798
tactccgatgatgcagacagttgcc

SEQ ID NO: 202024 - DNA, 25 bp, Artificial
  probe
  misc_feature (1)..(25): SEQ ID NO: 5655; WAN024FDQ_at; Start 86; Stop 110
gaacaatcgcatttgcagagttggg

SEQ ID NO: 202025 - DNA, 25 bp, Artificial
  probe
  misc_feature (1)..(25): SEQ ID NO: 5655; WAN024FDQ_at; Start 899; Stop 923
tgtccaatcttcaagtgatacaagc

SEQ ID NO: 202026 - DNA, 25 bp, Artificial
  probe
  misc_feature (1)..(25): SEQ ID NO: 5655; WAN024FDQ_at; Start 789; Stop 813
gacagttgcccaactatccctgctt

SEQ ID NO: 202027 - DNA, 25 bp, Artificial
  probe
  misc_feature (1)..(25): SEQ ID NO: 5655; WAN024FDQ_at; Start 360; Stop 384
aatcatcctgatgctttcaggaggc

SEQ ID NO: 202028 - DNA, 25 bp, Artificial
  probe
  misc_feature (1)..(25): SEQ ID NO: 5655; WAN024FDQ_at; Start 571; Stop 595
gcctacctggtattgagacattctg

SEQ ID NO: 202029 - DNA, 25 bp, Artificial
  probe
  misc_feature (1)..(25): SEQ ID NO: 5655; WAN024FDQ_at; Start 951; Stop 975
tgtagatcgaactcgtaaggctctc

SEQ ID NO: 202030 - DNA, 25 bp, Artificial
  probe
  misc_feature (1)..(25): SEQ ID NO: 5655; WAN024FDQ_at; Start 651; Stop 675
tcctgaggatgcacgagggagtttt

SEQ ID NO: 202031 - DNA, 25 bp, Artificial
  probe
  misc_feature (1)..(25): SEQ ID NO: 5655; WAN024FDQ_at; Start 830; Stop 854
aaggagattttgagcaagcggagca

SEQ ID NO: 202032 - DNA, 25 bp, Artificial
  probe
  misc_feature (1)..(25): SEQ ID NO: 5655; WAN024FDQ_at; Start 723; Stop 747
gaaggaagaagtagctaaacagcag

SEQ ID NO: 202033 - DNA, 25 bp, Artificial
  probe
  misc_feature (1)..(25): SEQ ID NO: 5655; WAN024FDQ_at; Start 634; Stop 658
gactttgttcaagcagttcctgagg

SEQ ID NO: 202034 - DNA, 25 bp, Artificial
  probe
  misc_feature (1)..(25): SEQ ID NO: 5655; WAN024FDQ_at; Start 555; Stop 579
tgaaaataccaaatacgcctacctg

SEQ ID NO: 202035 - DNA, 25 bp, Artificial
  probe
  misc_feature (1)..(25): SEQ ID NO: 5655; WAN024FDQ_at; Start 211; Stop 235
tacttgacaggctatcggctggtgg

SEQ ID NO: 202036 - DNA, 25 bp, Artificial
  probe
  misc_feature (1)..(25): SEQ ID NO: 5655; WAN024FDQ_at; Start 71; Stop 95
tagcttttgcttgtggaacaatcgc

SEQ ID NO: 202037 - DNA, 25 bp, Artificial
  probe
  misc_feature (1)..(25): SEQ ID NO: 5655; WAN024FDQ_at; Start 742; Stop 766
cagcagtttcaagcattacttgaga

SEQ ID NO: 202038 - DNA, 25 bp, Artificial
  probe
  misc_feature (1)..(25): SEQ ID NO: 5655; WAN024FDQ_at; Start 345; Stop 369
tgaaagcgatcaaagaatcatcctg

SEQ ID NO: 202039 - DNA, 25 bp, Artificial
  probe
  misc_feature (1)..(25): SEQ ID NO: 4331; WAN024FDR_at; Start 342; Stop 366
ctgggctgacaactggaagaagtat

SEQ ID NO: 202040 - DNA, 25 bp, Artificial
  probe
  misc_feature (1)..(25): SEQ ID NO: 4331; WAN024FDR_at; Start 426; Stop 450
ggcaacagcaggagaaaagattatc

SEQ ID NO: 202041 - DNA, 25 bp, Artificial
  probe
  misc_feature (1)..(25): SEQ ID NO: 4331; WAN024FDR_at; Start 597; Stop 621
cctaggtgccaaggagattttcgcc

SEQ ID NO: 202042 - DNA, 25 bp, Artificial
  probe
  misc_feature (1)..(25): SEQ ID NO: 4331; WAN024FDR_at; Start 938; Stop 962
ttaagaaaaccaaggatatctctgg

SEQ ID NO: 202043 - DNA, 25 bp, Artificial
  probe
  misc_feature (1)..(25): SEQ ID NO: 4331; WAN024FDR_at; Start 728; Stop 752
aaattgaggcagatgtgattgtggc

SEQ ID NO: 202044 - DNA, 25 bp, Artificial
  probe
  misc_feature (1)..(25): SEQ ID NO: 4331; WAN024FDR_at; Start 894; Stop 918
cctcgaaactcacatggttcaaggg

SEQ ID NO: 202045 - DNA, 25 bp, Artificial
  probe
  misc_feature (1)..(25): SEQ ID NO: 4331; WAN024FDR_at; Start 762; Stop 786
ggcggatatcctcattcatctaata

SEQ ID NO: 202046 - DNA, 25 bp, Artificial
  probe
  misc_feature (1)..(25): SEQ ID NO: 4331; WAN024FDR_at; Start 540; Stop 564
cgaaacagtgctagatgtagggact

SEQ ID NO: 202047 - DNA, 25 bp, Artificial
  probe
  misc_feature (1)..(25): SEQ ID NO: 4331; WAN024FDR_at; Start 741; Stop 765
tgtgattgtggctaatatcttggcg

SEQ ID NO: 202048 - DNA, 25 bp, Artificial
  probe
  misc_feature (1)..(25): SEQ ID NO: 4331; WAN024FDR_at; Start 657; Stop 681
ggaaaatattgagctcaacactggt

SEQ ID NO: 202049 - DNA, 25 bp, Artificial
  probe
  misc_feature (1)..(25): SEQ ID NO: 4331; WAN024FDR_at; Start 948; Stop 972
caaggatatctctggtgtgattgga

SEQ ID NO: 202050 - DNA, 25 bp, Artificial
  probe
  misc_feature (1)..(25): SEQ ID NO: 4331; WAN024FDR_at; Start 858; Stop 882
catggtgcgccagtcggctgagtca

SEQ ID NO: 202051 - DNA, 25 bp, Artificial
  probe
  misc_feature (1)..(25): SEQ ID NO: 4331; WAN024FDR_at; Start 414; Stop 438
gacggactatgaggcaacagcagga

SEQ ID NO: 202052 - DNA, 25 bp, Artificial
  probe
  misc_feature (1)..(25): SEQ ID NO: 4331; WAN024FDR_at; Start 572; Stop 596
gggttctttctattgcaagctcact

SEQ ID NO: 202053 - DNA, 25 bp, Artificial
  probe
  misc_feature (1)..(25): SEQ ID NO: 4331; WAN024FDR_at; Start 603; Stop 627
tgccaaggagattttcgcctatgac

SEQ ID NO: 202054 - DNA, 25 bp, Artificial
  probe
  misc_feature (1)..(25): SEQ ID NO: 4331; WAN024FDR_at; Start 18; Stop 42
tatcttaatgatggaaacatggcaa

SEQ ID NO: 202055 - DNA, 25 bp, Artificial
  probe
  misc_feature (1)..(25): SEQ ID NO: 4331; WAN024FDR_at; Start 7; Stop 31
tacgggcttggtatcttaatgatgg

SEQ ID NO: 202056 - DNA, 25 bp, Artificial
  probe
  misc_feature (1)..(25): SEQ ID NO: 4331; WAN024FDR_at; Start 803; Stop 827
tggtcaaggatgaaggctacctcat

SEQ ID NO: 202057 - DNA, 25 bp, Artificial
  probe
  misc_feature (1)..(25): SEQ ID NO: 4331; WAN024FDR_at; Start 357; Stop 381
gaagaagtattatgaaccggcacgc

SEQ ID NO: 202058 - DNA, 25 bp, Artificial
  probe
  misc_feature (1)..(25): SEQ ID NO: 4331; WAN024FDR_at; Start 582; Stop 606
tattgcaagctcactcctaggtgcc

SEQ ID NO: 202059 - DNA, 25 bp, Artificial
  probe
  misc_feature (1)..(25): SEQ ID NO: 4331; WAN024FDR_at; Start 439; Stop 463
gaaaagattatcaagctggatcctg

SEQ ID NO: 202060 - DNA, 25 bp, Artificial
  probe
  misc_feature (1)..(25): SEQ ID NO: 4331; WAN024FDR_at; Start 670; Stop 694
ctcaacactggtatggaaaatatcc

SEQ ID NO: 202061 - DNA, 25 bp, Artificial
  probe
  misc_feature (1)..(25): SEQ ID NO: 4331; WAN024FDR_at; Start 456; Stop 480
ggatcctggtatggcctttgggaca

SEQ ID NO: 202062 - DNA, 25 bp, Artificial
  probe
  misc_feature (1)..(25): SEQ ID NO: 4331; WAN024FDR_at; Start 391; Stop 415
gacctgaccatcgtaccgtcatgga

SEQ ID NO: 202063 - DNA, 25 bp, Artificial
  probe
  misc_feature (1)..(25): SEQ ID NO: 4331; WAN024FDR_at; Start 406; Stop 430
ccgtcatggacggactatgaggcaa

SEQ ID NO: 202064 - DNA, 25 bp, Artificial
  probe
  misc_feature (1)..(25): SEQ ID NO: 4331; WAN024FDR_at; Start 777; Stop 801
tcatctaatagacgatgcctatcgt

SEQ ID NO: 202065 - DNA, 25 bp, Artificial
  probe
  misc_feature (1)..(25): SEQ ID NO: 4331; WAN024FDR_at; Start 482; Stop 506
ggacccacccaacaaccaagatgag

SEQ ID NO: 202066 - DNA, 25 bp, Artificial
  probe
  misc_feature (1)..(25): SEQ ID NO: 4331; WAN024FDR_at; Start 685; Stop 709
gaaaatatccatgtagcagcaggag

SEQ ID NO: 202067 - DNA, 25 bp, Artificial
  probe
  misc_feature (1)..(25): SEQ ID NO: 4331; WAN024FDR_at; Start 848; Stop 872
acaagtgggacatggtgcgccagtc

SEQ ID NO: 202068 - DNA, 25 bp, Artificial
  probe
  misc_feature (1)..(25): SEQ ID NO: 4331; WAN024FDR_at; Start 447; Stop 471
tatcaagctggatcctggtatggcc

SEQ ID NO: 202069 - DNA, 25 bp, Artificial
  probe
  misc_feature (1)..(25): SEQ ID NO: 4331; WAN024FDR_at; Start 788; Stop 812
acgatgcctatcgtttggtcaagga

SEQ ID NO: 202070 - DNA, 25 bp, Artificial
  probe
  misc_feature (1)..(25): SEQ ID NO: 4331; WAN024FDR_at; Start 465; Stop 489
tatggcctttgggacagggacccac

SEQ ID NO: 202071 - DNA, 25 bp, Artificial
  probe
  misc_feature (1)..(25): SEQ ID NO: 4331; WAN024FDR_at; Start 366; Stop 390
ttatgaaccggcacgcatcacccat

SEQ ID NO: 202072 - DNA, 25 bp, Artificial
  probe
  misc_feature (1)..(25): SEQ ID NO: 4331; WAN024FDR_at; Start 877; Stop 901
gagtcagctggatttttcctcgaaa

SEQ ID NO: 202073 - DNA, 25 bp, Artificial
  probe
  misc_feature (1)..(25): SEQ ID NO: 3454; WAN024FDS_at; Start 405; Stop 429
ctgggcagacaactggaagaaatac

SEQ ID NO: 202074 - DNA, 25 bp, Artificial
  probe
  misc_feature (1)..(25): SEQ ID NO: 3454; WAN024FDS_at; Start 249; Stop 273
ggagcagcaagaagaaatcgtagtg

SEQ ID NO: 202075 - DNA, 25 bp, Artificial
  probe
  misc_feature (1)..(25): SEQ ID NO: 3454; WAN024FDS_at; Start 13; Stop 37
gataaacttctcttagacacaagcg

SEQ ID NO: 202076 - DNA, 25 bp, Artificial
  probe
  misc_feature (1)..(25): SEQ ID NO: 3454; WAN024FDS_at; Start 28; Stop 52
gacacaagcgtcttcagagaatttc

SEQ ID NO: 202077 - DNA, 25 bp, Artificial
  probe
  misc_feature (1)..(25): SEQ ID NO: 3454; WAN024FDS_at; Start 283; Stop 307
taccctgacacggtggatgtgacag

SEQ ID NO: 202078 - DNA, 25 bp, Artificial
  probe
  misc_feature (1)..(25): SEQ ID NO: 3454; WAN024FDS_at; Start 81; Stop 105
ggtattaataatggaaacatggcaa

SEQ ID NO: 202079 - DNA, 25 bp, Artificial
  probe
  misc_feature (1)..(25): SEQ ID NO: 3454; WAN024FDS_at; Start 37; Stop 61
gtcttcagagaatttcctattttgg

SEQ ID NO: 202080 - DNA, 25 bp, Artificial
  probe
  misc_feature (1)..(25): SEQ ID NO: 3454; WAN024FDS_at; Start 466; Stop 490
gttccctcttggacagactatgagg

SEQ ID NO: 202081 - DNA, 25 bp, Artificial
  probe
  misc_feature (1)..(25): SEQ ID NO: 3454; WAN024FDS_at; Start 280; Stop 304
tactaccctgacacggtggatgtga

SEQ ID NO: 202082 - DNA, 25 bp, Artificial
  probe
  misc_feature (1)..(25): SEQ ID NO: 3454; WAN024FDS_at; Start 30; Stop 54
cacaagcgtcttcagagaatttcct

SEQ ID NO: 202083 - DNA, 25 bp, Artificial
  probe
  misc_feature (1)..(25): SEQ ID NO: 3454; WAN024FDS_at; Start 242; Stop 266
cagaggtggagcagcaagaagaaat

SEQ ID NO: 202084 - DNA, 25 bp, Artificial
  probe
  misc_feature (1)..(25): SEQ ID NO: 3454; WAN024FDS_at; Start 474; Stop 498
ttggacagactatgaggcgactgcg

SEQ ID NO: 202085 - DNA, 25 bp, Artificial
  probe
  misc_feature (1)..(25): SEQ ID NO: 3454; WAN024FDS_at; Start 153; Stop 177
tctcttgattgagctgggagcgcaa

SEQ ID NO: 202086 - DNA, 25 bp, Artificial
  probe
  misc_feature (1)..(25): SEQ ID NO: 3454; WAN024FDS_at; Start 296; Stop 320
tggatgtgacagtggttgaggcgga

SEQ ID NO: 202087 - DNA, 25 bp, Artificial
  probe
  misc_feature (1)..(25): SEQ ID NO: 3454; WAN024FDS_at; Start 72; Stop 96
tacgggcttggtattaataatggaa

SEQ ID NO: 202088 - DNA, 25 bp, Artificial
  probe
  misc_feature (1)..(25): SEQ ID NO: 3454; WAN024FDS_at; Start 234; Stop 258
gattttcccagaggtggagcagcaa

SEQ ID NO: 202089 - DNA, 25 bp, Artificial
  probe
  misc_feature (1)..(25): SEQ ID NO: 3454; WAN024FDS_at; Start 232; Stop 256
gagattttcccagaggtggagcagc

SEQ ID NO: 202090 - DNA, 25 bp, Artificial
  probe
  misc_feature (1)..(25): SEQ ID NO: 3454; WAN024FDS_at; Start 238; Stop 262
ttcccagaggtggagcagcaagaag

SEQ ID NO: 202091 - DNA, 25 bp, Artificial
  probe
  misc_feature (1)..(25): SEQ ID NO: 3454; WAN024FDS_at; Start 42; Stop 66
cagagaatttcctattttggttttg

SEQ ID NO: 202092 - DNA, 25 bp, Artificial
  probe
  misc_feature (1)..(25): SEQ ID NO: 3454; WAN024FDS_at; Start 285; Stop 309
ccctgacacggtggatgtgacagtg

SEQ ID NO: 202093 - DNA, 25 bp, Artificial
  probe
  misc_feature (1)..(25): SEQ ID NO: 3454; WAN024FDS_at; Start 439; Stop 463
gctcgtatcactcatgatttgacca

SEQ ID NO: 202094 - DNA, 25 bp, Artificial
  probe
  misc_feature (1)..(25): SEQ ID NO: 3454; WAN024FDS_at; Start 236; Stop 260
ttttcccagaggtggagcagcaaga

SEQ ID NO: 202095 - DNA, 25 bp, Artificial
  probe
  misc_feature (1)..(25): SEQ ID NO: 3454; WAN024FDS_at; Start 32; Stop 56
caagcgtcttcagagaatttcctat

SEQ ID NO: 202096 - DNA, 25 bp, Artificial
  probe
  misc_feature (1)..(25): SEQ ID NO: 3454; WAN024FDS_at; Start 408; Stop 432
ggcagacaactggaagaaatactat

SEQ ID NO: 202097 - DNA, 25 bp, Artificial
  probe
  misc_feature (1)..(25): SEQ ID NO: 3454; WAN024FDS_at; Start 23; Stop 47
tcttagacacaagcgtcttcagaga

SEQ ID NO: 202098 - DNA, 25 bp, Artificial
  probe
  misc_feature (1)..(25): SEQ ID NO: 3454; WAN024FDS_at; Start 240; Stop 264
cccagaggtggagcagcaagaagaa

SEQ ID NO: 202099 - DNA, 25 bp, Artificial
  probe
  misc_feature (1)..(25): SEQ ID NO: 3454; WAN024FDS_at; Start 410; Stop 434
cagacaactggaagaaatactatga

SEQ ID NO: 202100 - DNA, 25 bp, Artificial
  probe
  misc_feature (1)..(25): SEQ ID NO: 3454; WAN024FDS_at; Start 20; Stop 44
ttctcttagacacaagcgtcttcag

SEQ ID NO: 202101 - DNA, 25 bp, Artificial
  probe
  misc_feature (1)..(25): SEQ ID NO: 3454; WAN024FDS_at; Start 1; Stop 25
ctgtgccaaaaagataaacttctct

SEQ ID NO: 202102 - DNA, 25 bp, Artificial
  probe
  misc_feature (1)..(25): SEQ ID NO: 3454; WAN024FDS_at; Start 468; Stop 492
tccctcttggacagactatgaggcg

SEQ ID NO: 202103 - DNA, 25 bp, Artificial
  probe
  misc_feature (1)..(25): SEQ ID NO: 3454; WAN024FDS_at; Start 151; Stop 175
aatctcttgattgagctgggagcgc

SEQ ID NO: 202104 - DNA, 25 bp, Artificial
  probe
  misc_feature (1)..(25): SEQ ID NO: 3454; WAN024FDS_at; Start 472; Stop 496
tcttggacagactatgaggcgactg

SEQ ID NO: 202105 - DNA, 25 bp, Artificial
  probe
  misc_feature (1)..(25): SEQ ID NO: 3454; WAN024FDS_at; Start 246; Stop 270
ggtggagcagcaagaagaaatcgta

SEQ ID NO: 202106 - DNA, 25 bp, Artificial
  probe
  misc_feature (1)..(25): SEQ ID NO: 3454; WAN024FDS_at; Start 15; Stop 39
taaacttctcttagacacaagcgtc

SEQ ID NO: 202107 - DNA, 25 bp, Artificial
  probe
  misc_feature (1)..(25): SEQ ID NO: 7614; WAN024FDT_at; Start 569; Stop 593
gactcgagaaaggagccaaattgct

SEQ ID NO: 202108 - DNA, 25 bp, Artificial
  probe
  misc_feature (1)..(25): SEQ ID NO: 7614; WAN024FDT_at; Start 294; Stop 318
gacggaactaggtgccagccagatt

SEQ ID NO: 202109 - DNA, 25 bp, Artificial
  probe
  misc_feature (1)..(25): SEQ ID NO: 7614; WAN024FDT_at; Start 164; Stop 188
tgctggatgtggaagctcgtcagtt

SEQ ID NO: 202110 - DNA, 25 bp, Artificial
  probe
  misc_feature (1)..(25): SEQ ID NO: 7614; WAN024FDT_at; Start 120; Stop 144
ggttactttggtctttgatgatgga

SEQ ID NO: 202111 - DNA, 25 bp, Artificial
  probe
  misc_feature (1)..(25): SEQ ID NO: 7614; WAN024FDT_at; Start 286; Stop 310
caaaaggtgacggaactaggtgcca

SEQ ID NO: 202112 - DNA, 25 bp, Artificial
  probe
  misc_feature (1)..(25): SEQ ID NO: 7614; WAN024FDT_at; Start 210; Stop 234
tgacaatgtggaactgcccgttcaa

SEQ ID NO: 202113 - DNA, 25 bp, Artificial
  probe
  misc_feature (1)..(25): SEQ ID NO: 7614; WAN024FDT_at; Start 682; Stop 706
cgcattctaagagcagaaacagcac

SEQ ID NO: 202114 - DNA, 25 bp, Artificial
  probe
  misc_feature (1)..(25): SEQ ID NO: 7614; WAN024FDT_at; Start 240; Stop 264
catttcatctggttttcccaaggga

SEQ ID NO: 202115 - DNA, 25 bp, Artificial
  probe
  misc_feature (1)..(25): SEQ ID NO: 7614; WAN024FDT_at; Start 35; Stop 59
ggagtgcagtctctcctgtcaccat

SEQ ID NO: 202116 - DNA, 25 bp, Artificial
  probe
  misc_feature (1)..(25): SEQ ID NO: 7614; WAN024FDT_at; Start 599; Stop 623
tctttggtccagaaggtggtctgtc

SEQ ID NO: 202117 - DNA, 25 bp, Artificial
  probe
  misc_feature (1)..(25): SEQ ID NO: 7614; WAN024FDT_at; Start 418; Stop 442
caaagtaagcgtaatgttgttccaa

SEQ ID NO: 202118 - DNA, 25 bp, Artificial
  probe
  misc_feature (1)..(25): SEQ ID NO: 7614; WAN024FDT_at; Start 435; Stop 459
tgttccaagtatccatcttttcgag

SEQ ID NO: 202119 - DNA, 25 bp, Artificial
  probe
  misc_feature (1)..(25): SEQ ID NO: 7614; WAN024FDT_at; Start 650; Stop 674
ctaagggagctgttttggcaggact

SEQ ID NO: 202120 - DNA, 25 bp, Artificial
  probe
  misc_feature (1)..(25): SEQ ID NO: 7614; WAN024FDT_at; Start 457; Stop 481
gagaataaagcagactttctagccc

SEQ ID NO: 202121 - DNA, 25 bp, Artificial
  probe
  misc_feature (1)..(25): SEQ ID NO: 7614; WAN024FDT_at; Start 175; Stop 199
gaagctcgtcagtttgaattggtag

SEQ ID NO: 202122 - DNA, 25 bp, Artificial
  probe
  misc_feature (1)..(25): SEQ ID NO: 7614; WAN024FDT_at; Start 496; Stop 520
gaccgcatcttagtagcctatgaag

SEQ ID NO: 202123 - DNA, 25 bp, Artificial
  probe
  misc_feature (1)..(25): SEQ ID NO: 7614; WAN024FDT_at; Start 51; Stop 75
tgtcaccatcgaggacagggaaacc

SEQ ID NO: 202124 - DNA, 25 bp, Artificial
  probe
  misc_feature (1)..(25): SEQ ID NO: 7614; WAN024FDT_at; Start 668; Stop 692
caggacttggccctcgcattctaag

SEQ ID NO: 202125 - DNA, 25 bp, Artificial
  probe
  misc_feature (1)..(25): SEQ ID NO: 7614; WAN024FDT_at; Start 402; Stop 426
tcttggagcagcagagcaaagtaag

SEQ ID NO: 202126 - DNA, 25 bp, Artificial
  probe
  misc_feature (1)..(25): SEQ ID NO: 7614; WAN024FDT_at; Start 332; Stop 356
ccgattggtccgttgctaagtggga

SEQ ID NO: 202127 - DNA, 25 bp, Artificial
  probe
  misc_feature (1)..(25): SEQ ID NO: 7614; WAN024FDT_at; Start 138; Stop 162
tgatggaattaagcgcttggcgcgt

SEQ ID NO: 202128 - DNA, 25 bp, Artificial
  probe
  misc_feature (1)..(25): SEQ ID NO: 7614; WAN024FDT_at; Start 635; Stop 659
ttgaaaattttgaagctaagggagc

SEQ ID NO: 202129 - DNA, 25 bp, Artificial
  probe
  misc_feature (1)..(25): SEQ ID NO: 7614; WAN024FDT_at; Start 273; Stop 297
ggagtttatcactcaaaaggtgacg

SEQ ID NO: 202130 - DNA, 25 bp, Artificial
  probe
  misc_feature (1)..(25): SEQ ID NO: 7614; WAN024FDT_at; Start 7; Stop 31
gctaggatgcaacagtattttgtca

SEQ ID NO: 202131 - DNA, 25 bp, Artificial
  probe
  misc_feature (1)..(25): SEQ ID NO: 7614; WAN024FDT_at; Start 509; Stop 533
tagcctatgaagaggcggccaaaga

SEQ ID NO: 202132 - DNA, 25 bp, Artificial
  probe
  misc_feature (1)..(25): SEQ ID NO: 7614; WAN024FDT_at; Start 64; Stop 88
gacagggaaaccagcaagcatatgt

SEQ ID NO: 202133 - DNA, 25 bp, Artificial
  probe
  misc_feature (1)..(25): SEQ ID NO: 7614; WAN024FDT_at; Start 190; Stop 214
gaattggtagaagaactagatgaca

SEQ ID NO: 202134 - DNA, 25 bp, Artificial
  probe
  misc_feature (1)..(25): SEQ ID NO: 7614; WAN024FDT_at; Start 315; Stop 339
gatttgggccttccctgccgattgg

SEQ ID NO: 202135 - DNA, 25 bp, Artificial
  probe
  misc_feature (1)..(25): SEQ ID NO: 7614; WAN024FDT_at; Start 616; Stop 640
ggtctgtcacctgcggaaattgaaa

SEQ ID NO: 202136 - DNA, 25 bp, Artificial
  probe
  misc_feature (1)..(25): SEQ ID NO: 7614; WAN024FDT_at; Start 535; Stop 559
ggagaagccgctgctcttataaaag

SEQ ID NO: 202137 - DNA, 25 bp, Artificial
  probe
  misc_feature (1)..(25): SEQ ID NO: 7614; WAN024FDT_at; Start 469; Stop 493
gactttctagcccaacttgaccagt

SEQ ID NO: 202138 - DNA, 25 bp, Artificial
  probe
  misc_feature (1)..(25): SEQ ID NO: 7614; WAN024FDT_at; Start 483; Stop 507
acttgaccagtttgaccgcatctta

SEQ ID NO: 202139 - DNA, 25 bp, Artificial
  probe
  misc_feature (1)..(25): SEQ ID NO: 7614; WAN024FDT_at; Start 552; Stop 576
tataaaagcagttactggactcgag

SEQ ID NO: 202140 - DNA, 25 bp, Artificial
  probe
  misc_feature (1)..(25): SEQ ID NO: 7614; WAN024FDT_at; Start 224; Stop 248
tgcccgttcaagtgaccatttcatc

SEQ ID NO: 202141 - DNA, 25 bp, Artificial
  probe
  misc_feature (1)..(25): SEQ ID NO: 5471; WAN024FDU_at; Start 105; Stop 129
gaaagaagaggatgaggttacctta

SEQ ID NO: 202142 - DNA, 25 bp, Artificial
  probe
  misc_feature (1)..(25): SEQ ID NO: 5471; WAN024FDU_at; Start 419; Stop 443
aaagcaagcgtaatattgtaccaag

SEQ ID NO: 202143 - DNA, 25 bp, Artificial
  probe
  misc_feature (1)..(25): SEQ ID NO: 5471; WAN024FDU_at; Start 274; Stop 298
gagttcatcgctcaaaaagtaaccg

SEQ ID NO: 202144 - DNA, 25 bp, Artificial
  probe
  misc_feature (1)..(25): SEQ ID NO: 5471; WAN024FDU_at; Start 255; Stop 279
tcccaagggagacaagctggagttc

SEQ ID NO: 202145 - DNA, 25 bp, Artificial
  probe
  misc_feature (1)..(25): SEQ ID NO: 5471; WAN024FDU_at; Start 682; Stop 706
cgtattttgcgagcagaaacagcac

SEQ ID NO: 202146 - DNA, 25 bp, Artificial
  probe
  misc_feature (1)..(25): SEQ ID NO: 5471; WAN024FDU_at; Start 242; Stop 266
tcgcatctggatttcccaagggaga

SEQ ID NO: 202147 - DNA, 25 bp, Artificial
  probe
  misc_feature (1)..(25): SEQ ID NO: 5471; WAN024FDU_at; Start 566; Stop 590
ctggtcttgaaacaggagccaaact

SEQ ID NO: 202148 - DNA, 25 bp, Artificial
  probe
  misc_feature (1)..(25): SEQ ID NO: 5471; WAN024FDU_at; Start 669; Stop 693
aggcctaggtcctcgtattttgcga

SEQ ID NO: 202149 - DNA, 25 bp, Artificial
  probe
  misc_feature (1)..(25): SEQ ID NO: 5471; WAN024FDU_at; Start 496; Stop 520
gactctatcatagtagcctatgaag

SEQ ID NO: 202150 - DNA, 25 bp, Artificial
  probe
  misc_feature (1)..(25): SEQ ID NO: 5471; WAN024FDU_at; Start 144; Stop 168
catcaagcgcttggcgcgcgtgctg

SEQ ID NO: 202151 - DNA, 25 bp, Artificial
  probe
  misc_feature (1)..(25): SEQ ID NO: 5471; WAN024FDU_at; Start 519; Stop 543
agaatcagctaaagaaggagaagcc

SEQ ID NO: 202152 - DNA, 25 bp, Artificial
  probe
  misc_feature (1)..(25): SEQ ID NO: 5471; WAN024FDU_at; Start 157; Stop 181
gcgcgcgtgctggatatggaaaatc

SEQ ID NO: 202153 - DNA, 25 bp, Artificial
  probe
  misc_feature (1)..(25): SEQ ID NO: 5471; WAN024FDU_at; Start 138; Stop 162
tgatggcatcaagcgcttggcgcgc

SEQ ID NO: 202154 - DNA, 25 bp, Artificial
  probe
  misc_feature (1)..(25): SEQ ID NO: 5471; WAN024FDU_at; Start 332; Stop 356
cagactggtcagttgccaagtggga

SEQ ID NO: 202155 - DNA, 25 bp, Artificial
  probe
  misc_feature (1)..(25): SEQ ID NO: 5471; WAN024FDU_at; Start 190; Stop 214
gagttggtccaagaattaaatgaca

SEQ ID NO: 202156 - DNA, 25 bp, Artificial
  probe
  misc_feature (1)..(25): SEQ ID NO: 5471; WAN024FDU_at; Start 280; Stop 304
atcgctcaaaaagtaaccgaactgg

SEQ ID NO: 202157 - DNA, 25 bp, Artificial
  probe
  misc_feature (1)..(25): SEQ ID NO: 5471; WAN024FDU_at; Start 628; Stop 652
gcagaaatcgaaagttttgaagcta

SEQ ID NO: 202158 - DNA, 25 bp, Artificial
  probe
  misc_feature (1)..(25): SEQ ID NO: 5471; WAN024FDU_at; Start 460; Stop 484
aaaaaagcagattttctagctcagc

SEQ ID NO: 202159 - DNA, 25 bp, Artificial
  probe
  misc_feature (1)..(25): SEQ ID NO: 5471; WAN024FDU_at; Start 307; Stop 331
gctagccaaatctgggcctttcctg

SEQ ID NO: 202160 - DNA, 25 bp, Artificial
  probe
  misc_feature (1)..(25): SEQ ID NO: 5471; WAN024FDU_at; Start 265; Stop 289
gacaagctggagttcatcgctcaaa

SEQ ID NO: 202161 - DNA, 25 bp, Artificial
  probe
  misc_feature (1)..(25): SEQ ID NO: 5471; WAN024FDU_at; Start 233; Stop 257
aagtgaccatcgcatctggatttcc

SEQ ID NO: 202162 - DNA, 25 bp, Artificial
  probe
  misc_feature (1)..(25): SEQ ID NO: 5471; WAN024FDU_at; Start 31; Stop 55
aaaggcagtgctatctctcctgtca

SEQ ID NO: 202163 - DNA, 25 bp, Artificial
  probe
  misc_feature (1)..(25): SEQ ID NO: 5471; WAN024FDU_at; Start 409; Stop 433
gcagccgagcaaagcaagcgtaata

SEQ ID NO: 202164 - DNA, 25 bp, Artificial
  probe
  misc_feature (1)..(25): SEQ ID NO: 5471; WAN024FDU_at; Start 616; Stop 640
ggtctctcacctgcagaaatcgaaa

SEQ ID NO: 202165 - DNA, 25 bp, Artificial
  probe
  misc_feature (1)..(25): SEQ ID NO: 5471; WAN024FDU_at; Start 574; Stop 598
gaaacaggagccaaactgctcttta

SEQ ID NO: 202166 - DNA, 25 bp, Artificial
  probe
  misc_feature (1)..(25): SEQ ID NO: 5471; WAN024FDU_at; Start 164; Stop 188
tgctggatatggaaaatcgtcagtt

SEQ ID NO: 202167 - DNA, 25 bp, Artificial
  probe
  misc_feature (1)..(25): SEQ ID NO: 5471; WAN024FDU_at; Start 320; Stop 344
gggcctttcctgcagactggtcagt

SEQ ID NO: 202168 - DNA, 25 bp, Artificial
  probe
  misc_feature (1)..(25): SEQ ID NO: 5471; WAN024FDU_at; Start 123; Stop 147
taccttagtctttgatgatggcatc

SEQ ID NO: 202169 - DNA, 25 bp, Artificial
  probe
  misc_feature (1)..(25): SEQ ID NO: 5471; WAN024FDU_at; Start 467; Stop 491
cagattttctagctcagctggacca

SEQ ID NO: 202170 - DNA, 25 bp, Artificial
  probe
  misc_feature (1)..(25): SEQ ID NO: 5471; WAN024FDU_at; Start 399; Stop 423
tgcccttggagcagccgagcaaagc

SEQ ID NO: 202171 - DNA, 25 bp, Artificial
  probe
  misc_feature (1)..(25): SEQ ID NO: 5471; WAN024FDU_at; Start 481; Stop 505
cagctggaccagtttgactctatca

SEQ ID NO: 202172 - DNA, 25 bp, Artificial
  probe
  misc_feature (1)..(25): SEQ ID NO: 5471; WAN024FDU_at; Start 199; Stop 223
caagaattaaatgacaatgtggaac

SEQ ID NO: 202173 - DNA, 25 bp, Artificial
  probe
  misc_feature (1)..(25): SEQ ID NO: 5471; WAN024FDU_at; Start 511; Stop 535
gcctatgaagaatcagctaaagaag

SEQ ID NO: 202174 - DNA, 25 bp, Artificial
  probe
  misc_feature (1)..(25): SEQ ID NO: 5471; WAN024FDU_at; Start 178; Stop 202
aatcgtcagtttgagttggtccaag

SEQ ID NO: 202175 - DNA, 25 bp, Artificial
  probe
  misc_feature (1)..(25): SEQ ID NO: 5036; WAN024FDV_at; Start 57; Stop 81
tccagctcatgagtacataagggtg

SEQ ID NO: 202176 - DNA, 25 bp, Artificial
  probe
  misc_feature (1)..(25): SEQ ID NO: 5036; WAN024FDV_at; Start 90; Stop 114
atgggtccgccgcataaccaccgga

SEQ ID NO: 202177 - DNA, 25 bp, Artificial
  probe
  misc_feature (1)..(25): SEQ ID NO: 5036; WAN024FDV_at; Start 128; Stop 152
ttagcagcaaagtccacccagcgct

SEQ ID NO: 202178 - DNA, 25 bp, Artificial
  probe
  misc_feature (1)..(25): SEQ ID NO: 5036; WAN024FDV_at; Start 155; Stop 179
tcttggtaacgagcaacttcctgac

SEQ ID NO: 202179 - DNA, 25 bp, Artificial
  probe
  misc_feature (1)..(25): SEQ ID NO: 5036; WAN024FDV_at; Start 123; Stop 147
cactgttagcagcaaagtccaccca

SEQ ID NO: 202180 - DNA, 25 bp, Artificial
  probe
  misc_feature (1)..(25): SEQ ID NO: 5036; WAN024FDV_at; Start 191; Stop 215
cccaaaggttctaccgacttcatga

SEQ ID NO: 202181 - DNA, 25 bp, Artificial
  probe
  misc_feature (1)..(25): SEQ ID NO: 5036; WAN024FDV_at; Start 70; Stop 94
tacataagggtgtacgcgatatggg

SEQ ID NO: 202182 - DNA, 25 bp, Artificial
  probe
  misc_feature (1)..(25): SEQ ID NO: 5036; WAN024FDV_at; Start 8; Stop 32
gaatgcccgatttcatgaatcaagg

SEQ ID NO: 202183 - DNA, 25 bp, Artificial
  probe
  misc_feature (1)..(25): SEQ ID NO: 5036; WAN024FDV_at; Start 347; Stop 371
ggtgcaaagtccttcatgatgaggt

SEQ ID NO: 202184 - DNA, 25 bp, Artificial
  probe
  misc_feature (1)..(25): SEQ ID NO: 5036; WAN024FDV_at; Start 176; Stop 200
tgacaatattcttgccccaaaggtt

SEQ ID NO: 202185 - DNA, 25 bp, Artificial
  probe
  misc_feature (1)..(25): SEQ ID NO: 5036; WAN024FDV_at; Start 24; Stop 48
gaatcaaggtatagacatcgctcaa

SEQ ID NO: 202186 - DNA, 25 bp, Artificial
  probe
  misc_feature (1)..(25): SEQ ID NO: 5036; WAN024FDV_at; Start 224; Stop 248
taggcatcgtcaatagtcacttcag

SEQ ID NO: 202187 - DNA, 25 bp, Artificial
  probe
  misc_feature (1)..(25): SEQ ID NO: 5036; WAN024FDV_at; Start 381; Stop 405
ggtcaaacatgacacggtccacttc

SEQ ID NO: 202188 - DNA, 25 bp, Artificial
  probe
  misc_feature (1)..(25): SEQ ID NO: 5036; WAN024FDV_at; Start 361; Stop 385
catgatgaggtcaatctggcggtca

SEQ ID NO: 202189 - DNA, 25 bp, Artificial
  probe
  misc_feature (1)..(25): SEQ ID NO: 5036; WAN024FDV_at; Start 265; Stop 289
caagtccaatttccagtctgcaaag

SEQ ID NO: 202190 - DNA, 25 bp, Artificial
  probe
  misc_feature (1)..(25): SEQ ID NO: 5036; WAN024FDV_at; Start 143; Stop 167
acccagcgctcttcttggtaacgag

SEQ ID NO: 202191 - DNA, 25 bp, Artificial
  probe
  misc_feature (1)..(25): SEQ ID NO: 5036; WAN024FDV_at; Start 80; Stop 104
tgtacgcgatatgggtccgccgcat

SEQ ID NO: 202192 - DNA, 25 bp, Artificial
  probe
  misc_feature (1)..(25): SEQ ID NO: 5036; WAN024FDV_at; Start 393; Stop 417
cacggtccacttcttgttcagctag

SEQ ID NO: 202193 - DNA, 25 bp, Artificial
  probe
  misc_feature (1)..(25): SEQ ID NO: 5036; WAN024FDV_at; Start 321; Stop 345
catgcttgaggtatctctgagcgac

SEQ ID NO: 202194 - DNA, 25 bp, Artificial
  probe
  misc_feature (1)..(25): SEQ ID NO: 5036; WAN024FDV_at; Start 217; Stop 241
caaatcataggcatcgtcaatagtc

SEQ ID NO: 202195 - DNA, 25 bp, Artificial
  probe
  misc_feature (1)..(25): SEQ ID NO: 5036; WAN024FDV_at; Start 161; Stop 185
taacgagcaacttcctgacaatatt

SEQ ID NO: 202196 - DNA, 25 bp, Artificial
  probe
  misc_feature (1)..(25): SEQ ID NO: 5036; WAN024FDV_at; Start 33; Stop 57
tatagacatcgctcaaacggcctgt

SEQ ID NO: 202197 - DNA, 25 bp, Artificial
  probe
  misc_feature (1)..(25): SEQ ID NO: 5036; WAN024FDV_at; Start 334; Stop 358
tctctgagcgactggtgcaaagtcc

SEQ ID NO: 202198 - DNA, 25 bp, Artificial
  probe
  misc_feature (1)..(25): SEQ ID NO: 5036; WAN024FDV_at; Start 237; Stop 261
tagtcacttcaggattcagggcgct

SEQ ID NO: 202199 - DNA, 25 bp, Artificial
  probe
  misc_feature (1)..(25): SEQ ID NO: 5036; WAN024FDV_at; Start 284; Stop 308
gcaaaggtcatcttttcaagaccat

SEQ ID NO: 202200 - DNA, 25 bp, Artificial
  probe
  misc_feature (1)..(25): SEQ ID NO: 5036; WAN024FDV_at; Start 372; Stop 396
caatctggcggtcaaacatgacacg

SEQ ID NO: 202201 - DNA, 25 bp, Artificial
  probe
  misc_feature (1)..(25): SEQ ID NO: 5036; WAN024FDV_at; Start 306; Stop 330
catttaccttggcaacatgcttgag

SEQ ID NO: 202202 - DNA, 25 bp, Artificial
  probe
  misc_feature (1)..(25): SEQ ID NO: 5036; WAN024FDV_at; Start 104; Stop 128
taaccaccggaatccttgccactgt

SEQ ID NO: 202203 - DNA, 25 bp, Artificial
  probe
  misc_feature (1)..(25): SEQ ID NO: 5036; WAN024FDV_at; Start 300; Stop 324
caagaccatttaccttggcaacatg

SEQ ID NO: 202204 - DNA, 25 bp, Artificial
  probe
  misc_feature (1)..(25): SEQ ID NO: 5036; WAN024FDV_at; Start 46; Stop 70
caaacggcctgtccagctcatgagt

SEQ ID NO: 202205 - DNA, 25 bp, Artificial
  probe
  misc_feature (1)..(25): SEQ ID NO: 5036; WAN024FDV_at; Start 112; Stop 136
ggaatccttgccactgttagcagca

SEQ ID NO: 202206 - DNA, 25 bp, Artificial
  probe
  misc_feature (1)..(25): SEQ ID NO: 5036; WAN024FDV_at; Start 252; Stop 276
tcagggcgctgtccaagtccaattt

SEQ ID NO: 202207 - DNA, 25 bp, Artificial
  probe
  misc_feature (1)..(25): SEQ ID NO: 5036; WAN024FDV_at; Start 205; Stop 229
cgacttcatgaccaaatcataggca

SEQ ID NO: 202208 - DNA, 25 bp, Artificial
  probe
  misc_feature (1)..(25): SEQ ID NO: 5036; WAN024FDV_at; Start 274; Stop 298
tttccagtctgcaaaggtcatcttt

SEQ ID NO: 202209 - DNA, 25 bp, Artificial
  probe
  misc_feature (1)..(25): SEQ ID NO: 3967; WAN024FDW_at; Start 199; Stop 223
tgtcaagcgatgagccagagcgaag

SEQ ID NO: 202210 - DNA, 25 bp, Artificial
  probe
  misc_feature (1)..(25): SEQ ID NO: 3967; WAN024FDW_at; Start 98; Stop 122
ttgcttgctccaaaggtctcccctt

SEQ ID NO: 202211 - DNA, 25 bp, Artificial
  probe
  misc_feature (1)..(25): SEQ ID NO: 3967; WAN024FDW_at; Start 22; Stop 46
cagagttgcatcatcgtcaatttca

SEQ ID NO: 202212 - DNA, 25 bp, Artificial
  probe
  misc_feature (1)..(25): SEQ ID NO: 3967; WAN024FDW_at; Start 191; Stop 215
taggtgtctgtcaagcgatgagcca

SEQ ID NO: 202213 - DNA, 25 bp, Artificial
  probe
  misc_feature (1)..(25): SEQ ID NO: 3967; WAN024FDW_at; Start 141; Stop 165
ccttacgctggaaggcggcttccaa

SEQ ID NO: 202214 - DNA, 25 bp, Artificial
  probe
  misc_feature (1)..(25): SEQ ID NO: 3967; WAN024FDW_at; Start 156; Stop 180
cggcttccaagaggtgggtgataaa

SEQ ID NO: 202215 - DNA, 25 bp, Artificial
  probe
  misc_feature (1)..(25): SEQ ID NO: 3967; WAN024FDW_at; Start 93; Stop 117
tgagcttgcttgctccaaaggtctc

SEQ ID NO: 202216 - DNA, 25 bp, Artificial
  probe
  misc_feature (1)..(25): SEQ ID NO: 3967; WAN024FDW_at; Start 50; Stop 74
gcatctccccagaaatccgtcaaaa

SEQ ID NO: 202217 - DNA, 25 bp, Artificial
  probe
  misc_feature (1)..(25): SEQ ID NO: 3967; WAN024FDW_at; Start 2; Stop 26
tgagcttggcgcatccaagtcagag

SEQ ID NO: 202218 - DNA, 25 bp, Artificial
  probe
  misc_feature (1)..(25): SEQ ID NO: 3967; WAN024FDW_at; Start 127; Stop 151
aatcaatgtatacaccttacgctgg

SEQ ID NO: 202219 - DNA, 25 bp, Artificial
  probe
  misc_feature (1)..(25): SEQ ID NO: 3967; WAN024FDW_at; Start 213; Stop 237
ccagagcgaagcgtttttgacgtgg

SEQ ID NO: 202220 - DNA, 25 bp, Artificial
  probe
  misc_feature (1)..(25): SEQ ID NO: 3967; WAN024FDW_at; Start 183; Stop 207
tatggaagtaggtgtctgtcaagcg

SEQ ID NO: 202221 - DNA, 25 bp, Artificial
  probe
  misc_feature (1)..(25): SEQ ID NO: 3967; WAN024FDW_at; Start 249; Stop 273
ggttctccaagtaatcactgagtag

SEQ ID NO: 202222 - DNA, 25 bp, Artificial
  probe
  misc_feature (1)..(25): SEQ ID NO: 3967; WAN024FDW_at; Start 81; Stop 105
tcataatgctgttgagcttgcttgc

SEQ ID NO: 202223 - DNA, 25 bp, Artificial
  probe
  misc_feature (1)..(25): SEQ ID NO: 3967; WAN024FDW_at; Start 133; Stop 157
tgtatacaccttacgctggaaggcg

SEQ ID NO: 202224 - DNA, 25 bp, Artificial
  probe
  misc_feature (1)..(25): SEQ ID NO: 3967; WAN024FDW_at; Start 37; Stop 61
gtcaatttcaatagcatctccccag

SEQ ID NO: 202225 - DNA, 25 bp, Artificial
  probe
  misc_feature (1)..(25): SEQ ID NO: 3967; WAN024FDW_at; Start 44; Stop 68
tcaatagcatctccccagaaatccg

SEQ ID NO: 202226 - DNA, 25 bp, Artificial
  probe
  misc_feature (1)..(25): SEQ ID NO: 3967; WAN024FDW_at; Start 87; Stop 111
tgctgttgagcttgcttgctccaaa

SEQ ID NO: 202227 - DNA, 25 bp, Artificial
  probe
  misc_feature (1)..(25): SEQ ID NO: 3967; WAN024FDW_at; Start 112; Stop 136
ggtctccccttcttcaatcaatgta

SEQ ID NO: 202228 - DNA, 25 bp, Artificial
  probe
  misc_feature (1)..(25): SEQ ID NO: 3967; WAN024FDW_at; Start 218; Stop 242
gcgaagcgtttttgacgtgggtcat

SEQ ID NO: 202229 - DNA, 25 bp, Artificial
  probe
  misc_feature (1)..(25): SEQ ID NO: 3967; WAN024FDW_at; Start 17; Stop 41
caagtcagagttgcatcatcgtcaa

SEQ ID NO: 202230 - DNA, 25 bp, Artificial
  probe
  misc_feature (1)..(25): SEQ ID NO: 3967; WAN024FDW_at; Start 205; Stop 229
gcgatgagccagagcgaagcgtttt

SEQ ID NO: 202231 - DNA, 25 bp, Artificial
  probe
  misc_feature (1)..(25): SEQ ID NO: 3967; WAN024FDW_at; Start 137; Stop 161
tacaccttacgctggaaggcggctt

SEQ ID NO: 202232 - DNA, 25 bp, Artificial
  probe
  misc_feature (1)..(25): SEQ ID NO: 3967; WAN024FDW_at; Start 245; Stop 269
gactggttctccaagtaatcactga

SEQ ID NO: 202233 - DNA, 25 bp, Artificial
  probe
  misc_feature (1)..(25): SEQ ID NO: 3967; WAN024FDW_at; Start 174; Stop 198
tgataaagttatggaagtaggtgtc

SEQ ID NO: 202234 - DNA, 25 bp, Artificial
  probe
  misc_feature (1)..(25): SEQ ID NO: 3967; WAN024FDW_at; Start 209; Stop 233
tgagccagagcgaagcgtttttgac

SEQ ID NO: 202235 - DNA, 25 bp, Artificial
  probe
  misc_feature (1)..(25): SEQ ID NO: 3967; WAN024FDW_at; Start 187; Stop 211
gaagtaggtgtctgtcaagcgatga

SEQ ID NO: 202236 - DNA, 25 bp, Artificial
  probe
  misc_feature (1)..(25): SEQ ID NO: 3967; WAN024FDW_at; Start 235; Stop 259
tgggtcattagactggttctccaag

SEQ ID NO: 202237 - DNA, 25 bp, Artificial
  probe
  misc_feature (1)..(25): SEQ ID NO: 3967; WAN024FDW_at; Start 72; Stop 96
aaacttccttcataatgctgttgag

SEQ ID NO: 202238 - DNA, 25 bp, Artificial
  probe
  misc_feature (1)..(25): SEQ ID NO: 3967; WAN024FDW_at; Start 161; Stop 185
tccaagaggtgggtgataaagttat

SEQ ID NO: 202239 - DNA, 25 bp, Artificial
  probe
  misc_feature (1)..(25): SEQ ID NO: 3967; WAN024FDW_at; Start 7; Stop 31
ttggcgcatccaagtcagagttgca

SEQ ID NO: 202240 - DNA, 25 bp, Artificial
  probe
  misc_feature (1)..(25): SEQ ID NO: 3967; WAN024FDW_at; Start 13; Stop 37
catccaagtcagagttgcatcatcg

SEQ ID NO: 202241 - DNA, 25 bp, Artificial
  probe
  misc_feature (1)..(25): SEQ ID NO: 3967; WAN024FDW_at; Start 195; Stop 219
tgtctgtcaagcgatgagccagagc

SEQ ID NO: 202242 - DNA, 25 bp, Artificial
  probe
  misc_feature (1)..(25): SEQ ID NO: 3967; WAN024FDW_at; Start 231; Stop 255
gacgtgggtcattagactggttctc

SEQ ID NO: 202243 - DNA, 25 bp, Artificial
  probe
  misc_feature (1)..(25): SEQ ID NO: 2958; WAN024FDX_at; Start 286; Stop 310
gcgagctttctcgattgcacgcaag

SEQ ID NO: 202244 - DNA, 25 bp, Artificial
  probe
  misc_feature (1)..(25): SEQ ID NO: 2958; WAN024FDX_at; Start 111; Stop 135
gggcaatattggcaaattcgtcatt

SEQ ID NO: 202245 - DNA, 25 bp, Artificial
  probe
  misc_feature (1)..(25): SEQ ID NO: 2958; WAN024FDX_at; Start 76; Stop 100
tacgctggcatctgtttcaaattcc

SEQ ID NO: 202246 - DNA, 25 bp, Artificial
  probe
  misc_feature (1)..(25): SEQ ID NO: 2958; WAN024FDX_at; Start 89; Stop 113
gtttcaaattccatcccagcttggg

SEQ ID NO: 202247 - DNA, 25 bp, Artificial
  probe
  misc_feature (1)..(25): SEQ ID NO: 2958; WAN024FDX_at; Start 242; Stop 266
tgaagattgcccttgtaatcacggc

SEQ ID NO: 202248 - DNA, 25 bp, Artificial
  probe
  misc_feature (1)..(25): SEQ ID NO: 2958; WAN024FDX_at; Start 298; Stop 322
gattgcacgcaagaaatcctcacgg

SEQ ID NO: 202249 - DNA, 25 bp, Artificial
  probe
  misc_feature (1)..(25): SEQ ID NO: 2958; WAN024FDX_at; Start 65; Stop 89
aaggtcaaggctacgctggcatctg

SEQ ID NO: 202250 - DNA, 25 bp, Artificial
  probe
  misc_feature (1)..(25): SEQ ID NO: 2958; WAN024FDX_at; Start 150; Stop 174
tctgaggcataaaaccatagttgcc

SEQ ID NO: 202251 - DNA, 25 bp, Artificial
  probe
  misc_feature (1)..(25): SEQ ID NO: 2958; WAN024FDX_at; Start 35; Stop 59
tcatctgctgccaccaaggcatcgt

SEQ ID NO: 202252 - DNA, 25 bp, Artificial
  probe
  misc_feature (1)..(25): SEQ ID NO: 2958; WAN024FDX_at; Start 181; Stop 205
gctcatctgaatgtagatctgttcc

SEQ ID NO: 202253 - DNA, 25 bp, Artificial
  probe
  misc_feature (1)..(25): SEQ ID NO: 2958; WAN024FDX_at; Start 165; Stop 189
catagttgccaatatggctcatctg

SEQ ID NO: 202254 - DNA, 25 bp, Artificial
  probe
  misc_feature (1)..(25): SEQ ID NO: 2958; WAN024FDX_at; Start 172; Stop 196
gccaatatggctcatctgaatgtag

SEQ ID NO: 202255 - DNA, 25 bp, Artificial
  probe
  misc_feature (1)..(25): SEQ ID NO: 2958; WAN024FDX_at; Start 140; Stop 164
tagtccgtcgtctgaggcataaaac

SEQ ID NO: 202256 - DNA, 25 bp, Artificial
  probe
  misc_feature (1)..(25): SEQ ID NO: 2958; WAN024FDX_at; Start 222; Stop 246
tctcgaaatcctcaaaagtgtgaag

SEQ ID NO: 202257 - DNA, 25 bp, Artificial
  probe
  misc_feature (1)..(25): SEQ ID NO: 2958; WAN024FDX_at; Start 103; Stop 127
cccagcttgggcaatattggcaaat

SEQ ID NO: 202258 - DNA, 25 bp, Artificial
  probe
  misc_feature (1)..(25): SEQ ID NO: 2958; WAN024FDX_at; Start 194; Stop 218
tagatctgttccaattccgcaaagg

SEQ ID NO: 202259 - DNA, 25 bp, Artificial
  probe
  misc_feature (1)..(25): SEQ ID NO: 2958; WAN024FDX_at; Start 251; Stop 275
cccttgtaatcacggctaaactggt

SEQ ID NO: 202260 - DNA, 25 bp, Artificial
  probe
  misc_feature (1)..(25): SEQ ID NO: 2958; WAN024FDX_at; Start 2; Stop 26
tgtggcaatttacccaaacggtcca

SEQ ID NO: 202261 - DNA, 25 bp, Artificial
  probe
  misc_feature (1)..(25): SEQ ID NO: 2958; WAN024FDX_at; Start 145; Stop 169
cgtcgtctgaggcataaaaccatag

SEQ ID NO: 202262 - DNA, 25 bp, Artificial
  probe
  misc_feature (1)..(25): SEQ ID NO: 2958; WAN024FDX_at; Start 70; Stop 94
caaggctacgctggcatctgtttca

SEQ ID NO: 202263 - DNA, 25 bp, Artificial
  probe
  misc_feature (1)..(25): SEQ ID NO: 2958; WAN024FDX_at; Start 273; Stop 297
ggttgatgtcttcgcgagctttctc

SEQ ID NO: 202264 - DNA, 25 bp, Artificial
  probe
  misc_feature (1)..(25): SEQ ID NO: 2958; WAN024FDX_at; Start 60; Stop 84
caaagaaggtcaaggctacgctggc

SEQ ID NO: 202265 - DNA, 25 bp, Artificial
  probe
  misc_feature (1)..(25): SEQ ID NO: 2958; WAN024FDX_at; Start 125; Stop 149
aattcgtcattgctatagtccgtcg

SEQ ID NO: 202266 - DNA, 25 bp, Artificial
  probe
  misc_feature (1)..(25): SEQ ID NO: 2958; WAN024FDX_at; Start 21; Stop 45
ggtccaagacttcctcatctgctgc

SEQ ID NO: 202267 - DNA, 25 bp, Artificial
  probe
  misc_feature (1)..(25): SEQ ID NO: 2958; WAN024FDX_at; Start 308; Stop 332
aagaaatcctcacggtcttggtata

SEQ ID NO: 202268 - DNA, 25 bp, Artificial
  probe
  misc_feature (1)..(25): SEQ ID NO: 2958; WAN024FDX_at; Start 230; Stop 254
tcctcaaaagtgtgaagattgccct

SEQ ID NO: 202269 - DNA, 25 bp, Artificial
  probe
  misc_feature (1)..(25): SEQ ID NO: 2958; WAN024FDX_at; Start 268; Stop 292
aaactggttgatgtcttcgcgagct

SEQ ID NO: 202270 - DNA, 25 bp, Artificial
  probe
  misc_feature (1)..(25): SEQ ID NO: 2958; WAN024FDX_at; Start 54; Stop 78
catcgtcaaagaaggtcaaggctac

SEQ ID NO: 202271 - DNA, 25 bp, Artificial
  probe
  misc_feature (1)..(25): SEQ ID NO: 2958; WAN024FDX_at; Start 212; Stop 236
gcaaaggccttctcgaaatcctcaa

SEQ ID NO: 202272 - DNA, 25 bp, Artificial
  probe
  misc_feature (1)..(25): SEQ ID NO: 2958; WAN024FDX_at; Start 257; Stop 281
taatcacggctaaactggttgatgt

SEQ ID NO: 202273 - DNA, 25 bp, Artificial
  probe
  misc_feature (1)..(25): SEQ ID NO: 2958; WAN024FDX_at; Start 132; Stop 156
cattgctatagtccgtcgtctgagg

SEQ ID NO: 202274 - DNA, 25 bp, Artificial
  probe
  misc_feature (1)..(25): SEQ ID NO: 2958; WAN024FDX_at; Start 17; Stop 41
aaacggtccaagacttcctcatctg

SEQ ID NO: 202275 - DNA, 25 bp, Artificial
  probe
  misc_feature (1)..(25): SEQ ID NO: 2958; WAN024FDX_at; Start 202; Stop 226
ttccaattccgcaaaggccttctcg

SEQ ID NO: 202276 - DNA, 25 bp, Artificial
  probe
  misc_feature (1)..(25): SEQ ID NO: 2958; WAN024FDX_at; Start 48; Stop 72
ccaaggcatcgtcaaagaaggtcaa

SEQ ID NO: 202277 - DNA, 25 bp, Artificial
  probe
  misc_feature (1)..(25): SEQ ID NO: 2174; WAN024FDY_at; Start 67; Stop 91
gaccgtgaggatttcttgcgtgcaa

SEQ ID NO: 202278 - DNA, 25 bp, Artificial
  probe
  misc_feature (1)..(25): SEQ ID NO: 2174; WAN024FDY_at; Start 660; Stop 684
taagcaccaaaatacggctgcagca

SEQ ID NO: 202279 - DNA, 25 bp, Artificial
  probe
  misc_feature (1)..(25): SEQ ID NO: 2174; WAN024FDY_at; Start 962; Stop 986
tcatgaagtcggtagaacctttggg

SEQ ID NO: 202280 - DNA, 25 bp, Artificial
  probe
  misc_feature (1)..(25): SEQ ID NO: 2174; WAN024FDY_at; Start 898; Stop 922
tggaaattggacttggacagcgccc

SEQ ID NO: 202281 - DNA, 25 bp, Artificial
  probe
  misc_feature (1)..(25): SEQ ID NO: 2174; WAN024FDY_at; Start 313; Stop 337
gtagccttgaccttctttgacgatg

SEQ ID NO: 202282 - DNA, 25 bp, Artificial
  probe
  misc_feature (1)..(25): SEQ ID NO: 2174; WAN024FDY_at; Start 644; Stop 668
tctcagagggacttcgtaagcacca

SEQ ID NO: 202283 - DNA, 25 bp, Artificial
  probe
  misc_feature (1)..(25): SEQ ID NO: 2174; WAN024FDY_at; Start 685; Stop 709
gcctatctggctcaggtcaagtctg

SEQ ID NO: 202284 - DNA, 25 bp, Artificial
  probe
  misc_feature (1)..(25): SEQ ID NO: 2174; WAN024FDY_at; Start 772; Stop 796
gaagtggaccgtgtcatgtttgacc

SEQ ID NO: 202285 - DNA, 25 bp, Artificial
  probe
  misc_feature (1)..(25): SEQ ID NO: 2174; WAN024FDY_at; Start 928; Stop 952
cctgaagtgactattgacgatgcct

SEQ ID NO: 202286 - DNA, 25 bp, Artificial
  probe
  misc_feature (1)..(25): SEQ ID NO: 2174; WAN024FDY_at; Start 80; Stop 104
tcttgcgtgcaatcgagaaagctcg

SEQ ID NO: 202287 - DNA, 25 bp, Artificial
  probe
  misc_feature (1)..(25): SEQ ID NO: 2174; WAN024FDY_at; Start 1071; Stop 1095
ttatgcggcggacccatatcgcgta

SEQ ID NO: 202288 - DNA, 25 bp, Artificial
  probe
  misc_feature (1)..(25): SEQ ID NO: 2174; WAN024FDY_at; Start 1307; Stop 1331
aaaaacgcttcgctctggctcatcg

SEQ ID NO: 202289 - DNA, 25 bp, Artificial
  probe
  misc_feature (1)..(25): SEQ ID NO: 2174; WAN024FDY_at; Start 1121; Stop 1145
caggccgtttgagcgatgtctatac

SEQ ID NO: 202290 - DNA, 25 bp, Artificial
  probe
  misc_feature (1)..(25): SEQ ID NO: 2174; WAN024FDY_at; Start 262; Stop 286
gaatttgccaatattgcccaagctg

SEQ ID NO: 202291 - DNA, 25 bp, Artificial
  probe
  misc_feature (1)..(25): SEQ ID NO: 2174; WAN024FDY_at; Start 173; Stop 197
cctttgcggaattggaacagatcta

SEQ ID NO: 202292 - DNA, 25 bp, Artificial
  probe
  misc_feature (1)..(25): SEQ ID NO: 2174; WAN024FDY_at; Start 1027; Stop 1051
cgctgggtggactttgctgctaaca

SEQ ID NO: 202293 - DNA, 25 bp, Artificial
  probe
  misc_feature (1)..(25): SEQ ID NO: 2174; WAN024FDY_at; Start 1322; Stop 1346
tggctcatcgcttgacagacaccta

SEQ ID NO: 202294 - DNA, 25 bp, Artificial
  probe
  misc_feature (1)..(25): SEQ ID NO: 2174; WAN024FDY_at; Start 278; Stop 302
cccaagctgggatggaatttgaaac

SEQ ID NO: 202295 - DNA, 25 bp, Artificial
  probe
  misc_feature (1)..(25): SEQ ID NO: 2174; WAN024FDY_at; Start 1618; Stop 1642
gaaactggagctgaagactggctca

SEQ ID NO: 202296 - DNA, 25 bp, Artificial
  probe
  misc_feature (1)..(25): SEQ ID NO: 2174; WAN024FDY_at; Start 788; Stop 812
tgtttgaccgccagattgacctcat

SEQ ID NO: 202297 - DNA, 25 bp, Artificial
  probe
  misc_feature (1)..(25): SEQ ID NO: 2174; WAN024FDY_at; Start 150; Stop 174
cacttttgaggatttcgagaaggcc

SEQ ID NO: 202298 - DNA, 25 bp, Artificial
  probe
  misc_feature (1)..(25): SEQ ID NO: 2174; WAN024FDY_at; Start 538; Stop 562
gactttgaagcccatggcaagacct

SEQ ID NO: 202299 - DNA, 25 bp, Artificial
  probe
  misc_feature (1)..(25): SEQ ID NO: 2174; WAN024FDY_at; Start 13; Stop 37
caccgttcagaatttccagagaagg

SEQ ID NO: 202300 - DNA, 25 bp, Artificial
  probe
  misc_feature (1)..(25): SEQ ID NO: 2174; WAN024FDY_at; Start 238; Stop 262
cagacgacggactatagcaatgacg

SEQ ID NO: 202301 - DNA, 25 bp, Artificial
  probe
  misc_feature (1)..(25): SEQ ID NO: 2174; WAN024FDY_at; Start 498; Stop 522
catttatactaagatgcgagctggg

SEQ ID NO: 202302 - DNA, 25 bp, Artificial
  probe
  misc_feature (1)..(25): SEQ ID NO: 2174; WAN024FDY_at; Start 295; Stop 319
tttgaaacagatgccagcgtagcct

SEQ ID NO: 202303 - DNA, 25 bp, Artificial
  probe
  misc_feature (1)..(25): SEQ ID NO: 2174; WAN024FDY_at; Start 813; Stop 837
catgaaggactttgcaccagtcgct

SEQ ID NO: 202304 - DNA, 25 bp, Artificial
  probe
  misc_feature (1)..(25): SEQ ID NO: 2174; WAN024FDY_at; Start 627; Stop 651
gaaatccttccgttccttctcagag

SEQ ID NO: 202305 - DNA, 25 bp, Artificial
  probe
  misc_feature (1)..(25): SEQ ID NO: 2174; WAN024FDY_at; Start 1102; Stop 1126
tatgtactcatgagctggacaggcc

SEQ ID NO: 202306 - DNA, 25 bp, Artificial
  probe
  misc_feature (1)..(25): SEQ ID NO: 2174; WAN024FDY_at; Start 838; Stop 862
cagagatacctcaagcatgttgcca

SEQ ID NO: 202307 - DNA, 25 bp, Artificial
  probe
  misc_feature (1)..(25): SEQ ID NO: 2174; WAN024FDY_at; Start 724; Stop 748
gatatgaagggatacgactctgtct

SEQ ID NO: 202308 - DNA, 25 bp, Artificial
  probe
  misc_feature (1)..(25): SEQ ID NO: 2174; WAN024FDY_at; Start 1044; Stop 1068
tgctaacagtggcaaggattccggt

SEQ ID NO: 202309 - DNA, 25 bp, Artificial
  probe
  misc_feature (1)..(25): SEQ ID NO: 2174; WAN024FDY_at; Start 1521; Stop 1545
gatgcgccaagctcactactatatg

SEQ ID NO: 202310 - DNA, 25 bp, Artificial
  probe
  misc_feature (1)..(25): SEQ ID NO: 2174; WAN024FDY_at; Start 1660; Stop 1684
ggtagcaagacaccacttgagtcag

SEQ ID NO: 202311 - DNA, 25 bp, Artificial
  probe
  misc_feature (1)..(25): SEQ ID NO: 4044; WAN024FDZ_at; Start 116; Stop 140
tcccaaatgatcaaacaaccactgg

SEQ ID NO: 202312 - DNA, 25 bp, Artificial
  probe
  misc_feature (1)..(25): SEQ ID NO: 4044; WAN024FDZ_at; Start 182; Stop 206
tcttagtaaatcttgatacatggtc

SEQ ID NO: 202313 - DNA, 25 bp, Artificial
  probe
  misc_feature (1)..(25): SEQ ID NO: 4044; WAN024FDZ_at; Start 83; Stop 107
taaaaggacattacgaatttctgga

SEQ ID NO: 202314 - DNA, 25 bp, Artificial
  probe
  misc_feature (1)..(25): SEQ ID NO: 4044; WAN024FDZ_at; Start 199; Stop 223
acatggtcaatacctctacatttct

SEQ ID NO: 202315 - DNA, 25 bp, Artificial
  probe
  misc_feature (1)..(25): SEQ ID NO: 4044; WAN024FDZ_at; Start 108; Stop 132
gaaggatttcccaaatgatcaaaca

SEQ ID NO: 202316 - DNA, 25 bp, Artificial
  probe
  misc_feature (1)..(25): SEQ ID NO: 4044; WAN024FDZ_at; Start 105; Stop 129
ggagaaggatttcccaaatgatcaa

SEQ ID NO: 202317 - DNA, 25 bp, Artificial
  probe
  misc_feature (1)..(25): SEQ ID NO: 4044; WAN024FDZ_at; Start 89; Stop 113
gacattacgaatttctggagaagga

SEQ ID NO: 202318 - DNA, 25 bp, Artificial
  probe
  misc_feature (1)..(25): SEQ ID NO: 4044; WAN024FDZ_at; Start 6; Stop 30
aaagcgtgaacccaaccatactgac

SEQ ID NO: 202319 - DNA, 25 bp, Artificial
  probe
  misc_feature (1)..(25): SEQ ID NO: 4044; WAN024FDZ_at; Start 9; Stop 33
gcgtgaacccaaccatactgacttg

SEQ ID NO: 202320 - DNA, 25 bp, Artificial
  probe
  misc_feature (1)..(25): SEQ ID NO: 4044; WAN024FDZ_at; Start 11; Stop 35
gtgaacccaaccatactgacttgag

SEQ ID NO: 202321 - DNA, 25 bp, Artificial
  probe
  misc_feature (1)..(25): SEQ ID NO: 4044; WAN024FDZ_at; Start 59; Stop 83
tgaaagatagtgcaagccttgattt

SEQ ID NO: 202322 - DNA, 25 bp, Artificial
  probe
  misc_feature (1)..(25): SEQ ID NO: 4044; WAN024FDZ_at; Start 97; Stop 121
gaatttctggagaaggatttcccaa

SEQ ID NO: 202323 - DNA, 25 bp, Artificial
  probe
  misc_feature (1)..(25): SEQ ID NO: 4044; WAN024FDZ_at; Start 138; Stop 162
tggatttcttcctggttataatttg

SEQ ID NO: 202324 - DNA, 25 bp, Artificial
  probe
  misc_feature (1)..(25): SEQ ID NO: 4044; WAN024FDZ_at; Start 3; Stop 27
gcaaaagcgtgaacccaaccatact

SEQ ID NO: 202325 - DNA, 25 bp, Artificial
  probe
  misc_feature (1)..(25): SEQ ID NO: 4044; WAN024FDZ_at; Start 66; Stop 90
tagtgcaagccttgatttaaaagga

SEQ ID NO: 202326 - DNA, 25 bp, Artificial
  probe
  misc_feature (1)..(25): SEQ ID NO: 4044; WAN024FDZ_at; Start 53; Stop 77
ttcttttgaaagatagtgcaagcct

SEQ ID NO: 202327 - DNA, 25 bp, Artificial
  probe
  misc_feature (1)..(25): SEQ ID NO: 4044; WAN024FDZ_at; Start 121; Stop 145
aatgatcaaacaaccactggatttc

SEQ ID NO: 202328 - DNA, 25 bp, Artificial
  probe
  misc_feature (1)..(25): SEQ ID NO: 4044; WAN024FDZ_at; Start 196; Stop 220
gatacatggtcaatacctctacatt

SEQ ID NO: 202329 - DNA, 25 bp, Artificial
  probe
  misc_feature (1)..(25): SEQ ID NO: 4044; WAN024FDZ_at; Start 69; Stop 93
tgcaagccttgatttaaaaggacat

SEQ ID NO: 202330 - DNA, 25 bp, Artificial
  probe
  misc_feature (1)..(25): SEQ ID NO: 4044; WAN024FDZ_at; Start 119; Stop 143
caaatgatcaaacaaccactggatt

SEQ ID NO: 202331 - DNA, 25 bp, Artificial
  probe
  misc_feature (1)..(25): SEQ ID NO: 4044; WAN024FDZ_at; Start 153; Stop 177
ttataatttggtttttcttctgcta

SEQ ID NO: 202332 - DNA, 25 bp, Artificial
  probe
  misc_feature (1)..(25): SEQ ID NO: 4044; WAN024FDZ_at; Start 134; Stop 158
ccactggatttcttcctggttataa

SEQ ID NO: 202333 - DNA, 25 bp, Artificial
  probe
  misc_feature (1)..(25): SEQ ID NO: 4044; WAN024FDZ_at; Start 128; Stop 152
aaacaaccactggatttcttcctgg

SEQ ID NO: 202334 - DNA, 25 bp, Artificial
  probe
  misc_feature (1)..(25): SEQ ID NO: 4044; WAN024FDZ_at; Start 1; Stop 25
gtgcaaaagcgtgaacccaaccata

SEQ ID NO: 202335 - DNA, 25 bp, Artificial
  probe
  misc_feature (1)..(25): SEQ ID NO: 4044; WAN024FDZ_at; Start 13; Stop 37
gaacccaaccatactgacttgagaa

SEQ ID NO: 202336 - DNA, 25 bp, Artificial
  probe
  misc_feature (1)..(25): SEQ ID NO: 4044; WAN024FDZ_at; Start 74; Stop 98
gccttgatttaaaaggacattacga

SEQ ID NO: 202337 - DNA, 25 bp, Artificial
  probe
  misc_feature (1)..(25): SEQ ID NO: 4044; WAN024FDZ_at; Start 15; Stop 39
acccaaccatactgacttgagaaac

SEQ ID NO: 202338 - DNA, 25 bp, Artificial
  probe
  misc_feature (1)..(25): SEQ ID NO: 4044; WAN024FDZ_at; Start 188; Stop 212
taaatcttgatacatggtcaatacc

SEQ ID NO: 202339 - DNA, 25 bp, Artificial
  probe
  misc_feature (1)..(25): SEQ ID NO: 4044; WAN024FDZ_at; Start 94; Stop 118
tacgaatttctggagaaggatttcc

SEQ ID NO: 202340 - DNA, 25 bp, Artificial
  probe
  misc_feature (1)..(25): SEQ ID NO: 4044; WAN024FDZ_at; Start 102; Stop 126
tctggagaaggatttcccaaatgat

SEQ ID NO: 202341 - DNA, 25 bp, Artificial
  probe
  misc_feature (1)..(25): SEQ ID NO: 4044; WAN024FDZ_at; Start 192; Stop 216
tcttgatacatggtcaatacctcta

SEQ ID NO: 202342 - DNA, 25 bp, Artificial
  probe
  misc_feature (1)..(25): SEQ ID NO: 4044; WAN024FDZ_at; Start 85; Stop 109
aaaggacattacgaatttctggaga

SEQ ID NO: 202343 - DNA, 25 bp, Artificial
  probe
  misc_feature (1)..(25): SEQ ID NO: 4044; WAN024FDZ_at; Start 111; Stop 135
ggatttcccaaatgatcaaacaacc

SEQ ID NO: 202344 - DNA, 25 bp, Artificial
  probe
  misc_feature (1)..(25): SEQ ID NO: 4044; WAN024FDZ_at; Start 56; Stop 80
ttttgaaagatagtgcaagccttga

SEQ ID NO: 202345 - DNA, 25 bp, Artificial
  probe
  misc_feature (1)..(25): SEQ ID NO: 5041; WAN024FE2_at; Start 142; Stop 166
aaggagattcaggaagagctattta

SEQ ID NO: 202346 - DNA, 25 bp, Artificial
  probe
  misc_feature (1)..(25): SEQ ID NO: 5041; WAN024FE2_at; Start 134; Stop 158
gctttgctaaggagattcaggaaga

SEQ ID NO: 202347 - DNA, 25 bp, Artificial
  probe
  misc_feature (1)..(25): SEQ ID NO: 5041; WAN024FE2_at; Start 146; Stop 170
agattcaggaagagctatttacaca

SEQ ID NO: 202348 - DNA, 25 bp, Artificial
  probe
  misc_feature (1)..(25): SEQ ID NO: 5041; WAN024FE2_at; Start 140; Stop 164
ctaaggagattcaggaagagctatt

SEQ ID NO: 202349 - DNA, 25 bp, Artificial
  probe
  misc_feature (1)..(25): SEQ ID NO: 5041; WAN024FE2_at; Start 213; Stop 237
agggttagataaagagattgataag

SEQ ID NO: 202350 - DNA, 25 bp, Artificial
  probe
  misc_feature (1)..(25): SEQ ID NO: 5041; WAN024FE2_at; Start 136; Stop 160
tttgctaaggagattcaggaagagc

SEQ ID NO: 202351 - DNA, 25 bp, Artificial
  probe
  misc_feature (1)..(25): SEQ ID NO: 5041; WAN024FE2_at; Start 147; Stop 171
gattcaggaagagctatttacacag

SEQ ID NO: 202352 - DNA, 25 bp, Artificial
  probe
  misc_feature (1)..(25): SEQ ID NO: 5041; WAN024FE2_at; Start 144; Stop 168
ggagattcaggaagagctatttaca

SEQ ID NO: 202353 - DNA, 25 bp, Artificial
  probe
  misc_feature (1)..(25): SEQ ID NO: 5041; WAN024FE2_at; Start 128; Stop 152
ttacaagctttgctaaggagattca

SEQ ID NO: 202354 - DNA, 25 bp, Artificial
  probe
  misc_feature (1)..(25): SEQ ID NO: 5041; WAN024FE2_at; Start 124; Stop 148
gtttttacaagctttgctaaggaga

SEQ ID NO: 202355 - DNA, 25 bp, Artificial
  probe
  misc_feature (1)..(25): SEQ ID NO: 5041; WAN024FE2_at; Start 137; Stop 161
ttgctaaggagattcaggaagagct

SEQ ID NO: 202356 - DNA, 25 bp, Artificial
  probe
  misc_feature (1)..(25): SEQ ID NO: 5041; WAN024FE2_at; Start 145; Stop 169
gagattcaggaagagctatttacac

SEQ ID NO: 202357 - DNA, 25 bp, Artificial
  probe
  misc_feature (1)..(25): SEQ ID NO: 5041; WAN024FE2_at; Start 130; Stop 154
acaagctttgctaaggagattcagg

SEQ ID NO: 202358 - DNA, 25 bp, Artificial
  probe
  misc_feature (1)..(25): SEQ ID NO: 5041; WAN024FE2_at; Start 126; Stop 150
ttttacaagctttgctaaggagatt

SEQ ID NO: 202359 - DNA, 25 bp, Artificial
  probe
  misc_feature (1)..(25): SEQ ID NO: 5041; WAN024FE2_at; Start 135; Stop 159
ctttgctaaggagattcaggaagag

SEQ ID NO: 202360 - DNA, 25 bp, Artificial
  probe
  misc_feature (1)..(25): SEQ ID NO: 5041; WAN024FE2_at; Start 138; Stop 162
tgctaaggagattcaggaagagcta

SEQ ID NO: 202361 - DNA, 25 bp, Artificial
  probe
  misc_feature (1)..(25): SEQ ID NO: 5041; WAN024FE2_at; Start 148; Stop 172
attcaggaagagctatttacacagg

SEQ ID NO: 202362 - DNA, 25 bp, Artificial
  probe
  misc_feature (1)..(25): SEQ ID NO: 5041; WAN024FE2_at; Start 122; Stop 146
ttgtttttacaagctttgctaagga

SEQ ID NO: 202363 - DNA, 25 bp, Artificial
  probe
  misc_feature (1)..(25): SEQ ID NO: 5041; WAN024FE2_at; Start 133; Stop 157
agctttgctaaggagattcaggaag

SEQ ID NO: 202364 - DNA, 25 bp, Artificial
  probe
  misc_feature (1)..(25): SEQ ID NO: 5041; WAN024FE2_at; Start 149; Stop 173
ttcaggaagagctatttacacagga

SEQ ID NO: 202365 - DNA, 25 bp, Artificial
  probe
  misc_feature (1)..(25): SEQ ID NO: 5041; WAN024FE2_at; Start 123; Stop 147
tgtttttacaagctttgctaaggag

SEQ ID NO: 202366 - DNA, 25 bp, Artificial
  probe
  misc_feature (1)..(25): SEQ ID NO: 5041; WAN024FE2_at; Start 143; Stop 167
aggagattcaggaagagctatttac

SEQ ID NO: 202367 - DNA, 25 bp, Artificial
  probe
  misc_feature (1)..(25): SEQ ID NO: 5041; WAN024FE2_at; Start 131; Stop 155
caagctttgctaaggagattcagga

SEQ ID NO: 202368 - DNA, 25 bp, Artificial
  probe
  misc_feature (1)..(25): SEQ ID NO: 5041; WAN024FE2_at; Start 121; Stop 145
cttgtttttacaagctttgctaagg

SEQ ID NO: 202369 - DNA, 25 bp, Artificial
  probe
  misc_feature (1)..(25): SEQ ID NO: 5041; WAN024FE2_at; Start 125; Stop 149
tttttacaagctttgctaaggagat

SEQ ID NO: 202370 - DNA, 25 bp, Artificial
  probe
  misc_feature (1)..(25): SEQ ID NO: 5041; WAN024FE2_at; Start 141; Stop 165
taaggagattcaggaagagctattt

SEQ ID NO: 202371 - DNA, 25 bp, Artificial
  probe
  misc_feature (1)..(25): SEQ ID NO: 5041; WAN024FE2_at; Start 132; Stop 156
aagctttgctaaggagattcaggaa

SEQ ID NO: 202372 - DNA, 25 bp, Artificial
  probe
  misc_feature (1)..(25): SEQ ID NO: 5041; WAN024FE2_at; Start 127; Stop 151
tttacaagctttgctaaggagattc

SEQ ID NO: 202373 - DNA, 25 bp, Artificial
  probe
  misc_feature (1)..(25): SEQ ID NO: 5041; WAN024FE2_at; Start 139; Stop 163
gctaaggagattcaggaagagctat

SEQ ID NO: 202374 - DNA, 25 bp, Artificial
  probe
  misc_feature (1)..(25): SEQ ID NO: 5041; WAN024FE2_at; Start 129; Stop 153
tacaagctttgctaaggagattcag

SEQ ID NO: 202375 - DNA, 25 bp, Artificial
  probe
  misc_feature (1)..(25): SEQ ID NO: 5040; WAN024FE3_at; Start 237; Stop 261
ttgtcatccagactttcctaaaaac

SEQ ID NO: 202376 - DNA, 25 bp, Artificial
  probe
  misc_feature (1)..(25): SEQ ID NO: 5040; WAN024FE3_at; Start 242; Stop 266
atccagactttcctaaaaacagagt

SEQ ID NO: 202377 - DNA, 25 bp, Artificial
  probe
  misc_feature (1)..(25): SEQ ID NO: 5040; WAN024FE3_at; Start 57; Stop 81
ccaggaagaaatccagtggttgttt

SEQ ID NO: 202378 - DNA, 25 bp, Artificial
  probe
  misc_feature (1)..(25): SEQ ID NO: 5040; WAN024FE3_at; Start 102; Stop 126
tccagaaattcgtaatgtcctttta

SEQ ID NO: 202379 - DNA, 25 bp, Artificial
  probe
  misc_feature (1)..(25): SEQ ID NO: 5040; WAN024FE3_at; Start 241; Stop 265
catccagactttcctaaaaacagag

SEQ ID NO: 202380 - DNA, 25 bp, Artificial
  probe
  misc_feature (1)..(25): SEQ ID NO: 5040; WAN024FE3_at; Start 59; Stop 83
aggaagaaatccagtggttgtttga

SEQ ID NO: 202381 - DNA, 25 bp, Artificial
  probe
  misc_feature (1)..(25): SEQ ID NO: 5040; WAN024FE3_at; Start 60; Stop 84
ggaagaaatccagtggttgtttgat

SEQ ID NO: 202382 - DNA, 25 bp, Artificial
  probe
  misc_feature (1)..(25): SEQ ID NO: 5040; WAN024FE3_at; Start 100; Stop 124
tctccagaaattcgtaatgtccttt

SEQ ID NO: 202383 - DNA, 25 bp, Artificial
  probe
  misc_feature (1)..(25): SEQ ID NO: 5040; WAN024FE3_at; Start 240; Stop 264
tcatccagactttcctaaaaacaga

SEQ ID NO: 202384 - DNA, 25 bp, Artificial
  probe
  misc_feature (1)..(25): SEQ ID NO: 5040; WAN024FE3_at; Start 238; Stop 262
tgtcatccagactttcctaaaaaca

SEQ ID NO: 202385 - DNA, 25 bp, Artificial
  probe
  misc_feature (1)..(25): SEQ ID NO: 5040; WAN024FE3_at; Start 62; Stop 86
aagaaatccagtggttgtttgatca

SEQ ID NO: 202386 - DNA, 25 bp, Artificial
  probe
  misc_feature (1)..(25): SEQ ID NO: 5040; WAN024FE3_at; Start 61; Stop 85
gaagaaatccagtggttgtttgatc

SEQ ID NO: 202387 - DNA, 25 bp, Artificial
  probe
  misc_feature (1)..(25): SEQ ID NO: 5040; WAN024FE3_at; Start 56; Stop 80
accaggaagaaatccagtggttgtt

SEQ ID NO: 202388 - DNA, 25 bp, Artificial
  probe
  misc_feature (1)..(25): SEQ ID NO: 5040; WAN024FE3_at; Start 236; Stop 260
tttgtcatccagactttcctaaaaa

SEQ ID NO: 202389 - DNA, 25 bp, Artificial
  probe
  misc_feature (1)..(25): SEQ ID NO: 5040; WAN024FE3_at; Start 109; Stop 133
attcgtaatgtccttttaaatcaag

SEQ ID NO: 202390 - DNA, 25 bp, Artificial
  probe
  misc_feature (1)..(25): SEQ ID NO: 5040; WAN024FE3_at; Start 55; Stop 79
aaccaggaagaaatccagtggttgt

SEQ ID NO: 202391 - DNA, 25 bp, Artificial
  probe
  misc_feature (1)..(25): SEQ ID NO: 5040; WAN024FE3_at; Start 239; Stop 263
gtcatccagactttcctaaaaacag

SEQ ID NO: 202392 - DNA, 25 bp, Artificial
  probe
  misc_feature (1)..(25): SEQ ID NO: 5040; WAN024FE3_at; Start 63; Stop 87
agaaatccagtggttgtttgatcat

SEQ ID NO: 202393 - DNA, 25 bp, Artificial
  probe
  misc_feature (1)..(25): SEQ ID NO: 5040; WAN024FE3_at; Start 99; Stop 123
ttctccagaaattcgtaatgtcctt

SEQ ID NO: 202394 - DNA, 25 bp, Artificial
  probe
  misc_feature (1)..(25): SEQ ID NO: 5040; WAN024FE3_at; Start 235; Stop 259
gtttgtcatccagactttcctaaaa

SEQ ID NO: 202395 - DNA, 25 bp, Artificial
  probe
  misc_feature (1)..(25): SEQ ID NO: 5040; WAN024FE3_at; Start 101; Stop 125
ctccagaaattcgtaatgtcctttt

SEQ ID NO: 202396 - DNA, 25 bp, Artificial
  probe
  misc_feature (1)..(25): SEQ ID NO: 5040; WAN024FE3_at; Start 58; Stop 82
caggaagaaatccagtggttgtttg

SEQ ID NO: 202397 - DNA, 25 bp, Artificial
  probe
  misc_feature (1)..(25): SEQ ID NO: 1820; WAN024FE4_at; Start 21; Stop 45
tgtgtttggattttcatcaacgtcc

SEQ ID NO: 202398 - DNA, 25 bp, Artificial
  probe
  misc_feature (1)..(25): SEQ ID NO: 1820; WAN024FE4_at; Start 116; Stop 140
gacatggaccacaccaagttgccca

SEQ ID NO: 202399 - DNA, 25 bp, Artificial
  probe
  misc_feature (1)..(25): SEQ ID NO: 1820; WAN024FE4_at; Start 63; Stop 87
gacatcttctgaaagttcttcagac

SEQ ID NO: 202400 - DNA, 25 bp, Artificial
  probe
  misc_feature (1)..(25): SEQ ID NO: 1820; WAN024FE4_at; Start 160; Stop 184
ccgtcttttgtttcttgttcgaatg

SEQ ID NO: 202401 - DNA, 25 bp, Artificial
  probe
  misc_feature (1)..(25): SEQ ID NO: 1820; WAN024FE4_at; Start 121; Stop 145
ggaccacaccaagttgcccagaagt

SEQ ID NO: 202402 - DNA, 25 bp, Artificial
  probe
  misc_feature (1)..(25): SEQ ID NO: 1820; WAN024FE4_at; Start 109; Stop 133
tgcatacgacatggaccacaccaag

SEQ ID NO: 202403 - DNA, 25 bp, Artificial
  probe
  misc_feature (1)..(25): SEQ ID NO: 1820; WAN024FE4_at; Start 83; Stop 107
cagacaatttgtccaagattggacc

SEQ ID NO: 202404 - DNA, 25 bp, Artificial
  probe
  misc_feature (1)..(25): SEQ ID NO: 1820; WAN024FE4_at; Start 104; Stop 128
gaccttgcatacgacatggaccaca

SEQ ID NO: 202405 - DNA, 25 bp, Artificial
  probe
  misc_feature (1)..(25): SEQ ID NO: 1820; WAN024FE4_at; Start 127; Stop 151
caccaagttgcccagaagtctacta

SEQ ID NO: 202406 - DNA, 25 bp, Artificial
  probe
  misc_feature (1)..(25): SEQ ID NO: 1820; WAN024FE4_at; Start 133; Stop 157
gttgcccagaagtctactaagacca

SEQ ID NO: 202407 - DNA, 25 bp, Artificial
  probe
  misc_feature (1)..(25): SEQ ID NO: 1820; WAN024FE4_at; Start 95; Stop 119
ccaagattggaccttgcatacgaca

SEQ ID NO: 202408 - DNA, 25 bp, Artificial
  probe
  misc_feature (1)..(25): SEQ ID NO: 1820; WAN024FE4_at; Start 14; Stop 38
cacgagctgtgtttggattttcatc

SEQ ID NO: 202409 - DNA, 25 bp, Artificial
  probe
  misc_feature (1)..(25): SEQ ID NO: 1820; WAN024FE4_at; Start 99; Stop 123
gattggaccttgcatacgacatgga

SEQ ID NO: 202410 - DNA, 25 bp, Artificial
  probe
  misc_feature (1)..(25): SEQ ID NO: 1820; WAN024FE4_at; Start 92; Stop 116
tgtccaagattggaccttgcatacg

SEQ ID NO: 202411 - DNA, 25 bp, Artificial
  probe
  misc_feature (1)..(25): SEQ ID NO: 1820; WAN024FE4_at; Start 178; Stop 202
tcgaatgttgcatctgtaattgctt

SEQ ID NO: 202412 - DNA, 25 bp, Artificial
  probe
  misc_feature (1)..(25): SEQ ID NO: 1820; WAN024FE4_at; Start 73; Stop 97
gaaagttcttcagacaatttgtcca

SEQ ID NO: 202413 - DNA, 25 bp, Artificial
  probe
  misc_feature (1)..(25): SEQ ID NO: 1820; WAN024FE4_at; Start 8; Stop 32
caaaagcacgagctgtgtttggatt

SEQ ID NO: 202414 - DNA, 25 bp, Artificial
  probe
  misc_feature (1)..(25): SEQ ID NO: 1820; WAN024FE4_at; Start 37; Stop 61
tcaacgtccattttaacgattttca

SEQ ID NO: 202415 - DNA, 25 bp, Artificial
  probe
  misc_feature (1)..(25): SEQ ID NO: 1820; WAN024FE4_at; Start 1; Stop 25
atgattccaaaagcacgagctgtgt

SEQ ID NO: 202416 - DNA, 25 bp, Artificial
  probe
  misc_feature (1)..(25): SEQ ID NO: 1820; WAN024FE4_at; Start 60; Stop 84
caagacatcttctgaaagttcttca

SEQ ID NO: 202417 - DNA, 25 bp, Artificial
  probe
  misc_feature (1)..(25): SEQ ID NO: 1820; WAN024FE4_at; Start 118; Stop 142
catggaccacaccaagttgcccaga

SEQ ID NO: 202418 - DNA, 25 bp, Artificial
  probe
  misc_feature (1)..(25): SEQ ID NO: 1820; WAN024FE4_at; Start 187; Stop 211
gcatctgtaattgcttttgccattg

SEQ ID NO: 202419 - DNA, 25 bp, Artificial
  probe
  misc_feature (1)..(25): SEQ ID NO: 1820; WAN024FE4_at; Start 3; Stop 27
gattccaaaagcacgagctgtgttt

SEQ ID NO: 202420 - DNA, 25 bp, Artificial
  probe
  misc_feature (1)..(25): SEQ ID NO: 1820; WAN024FE4_at; Start 135; Stop 159
tgcccagaagtctactaagaccaaa

SEQ ID NO: 202421 - DNA, 25 bp, Artificial
  probe
  misc_feature (1)..(25): SEQ ID NO: 1820; WAN024FE4_at; Start 113; Stop 137
tacgacatggaccacaccaagttgc

SEQ ID NO: 202422 - DNA, 25 bp, Artificial
  probe
  misc_feature (1)..(25): SEQ ID NO: 1820; WAN024FE4_at; Start 50; Stop 74
taacgattttcaagacatcttctga

SEQ ID NO: 202423 - DNA, 25 bp, Artificial
  probe
  misc_feature (1)..(25): SEQ ID NO: 1820; WAN024FE4_at; Start 184; Stop 208
gttgcatctgtaattgcttttgcca

SEQ ID NO: 202424 - DNA, 25 bp, Artificial
  probe
  misc_feature (1)..(25): SEQ ID NO: 1820; WAN024FE4_at; Start 139; Stop 163
cagaagtctactaagaccaaaccgt

SEQ ID NO: 202425 - DNA, 25 bp, Artificial
  probe
  misc_feature (1)..(25): SEQ ID NO: 1820; WAN024FE4_at; Start 16; Stop 40
cgagctgtgtttggattttcatcaa

SEQ ID NO: 202426 - DNA, 25 bp, Artificial
  probe
  misc_feature (1)..(25): SEQ ID NO: 1820; WAN024FE4_at; Start 198; Stop 222
tgcttttgccattgtatttctcctt

SEQ ID NO: 202427 - DNA, 25 bp, Artificial
  probe
  misc_feature (1)..(25): SEQ ID NO: 1820; WAN024FE4_at; Start 172; Stop 196
tcttgttcgaatgttgcatctgtaa

SEQ ID NO: 202428 - DNA, 25 bp, Artificial
  probe
  misc_feature (1)..(25): SEQ ID NO: 1820; WAN024FE4_at; Start 101; Stop 125
ttggaccttgcatacgacatggacc

SEQ ID NO: 202429 - DNA, 25 bp, Artificial
  probe
  misc_feature (1)..(25): SEQ ID NO: 1820; WAN024FE4_at; Start 130; Stop 154
caagttgcccagaagtctactaaga

SEQ ID NO: 202430 - DNA, 25 bp, Artificial
  probe
  misc_feature (1)..(25): SEQ ID NO: 1820; WAN024FE4_at; Start 28; Stop 52
ggattttcatcaacgtccattttaa

SEQ ID NO: 202431 - DNA, 25 bp, Artificial
  probe
  misc_feature (1)..(25): SEQ ID NO: 2379; WAN024FE5_at; Start 88; Stop 112
ccatgtcgtatgcaaggtccaatct

SEQ ID NO: 202432 - DNA, 25 bp, Artificial
  probe
  misc_feature (1)..(25): SEQ ID NO: 2379; WAN024FE5_at; Start 103; Stop 127
ggtccaatcttggacaaattgtctg

SEQ ID NO: 202433 - DNA, 25 bp, Artificial
  probe
  misc_feature (1)..(25): SEQ ID NO: 2379; WAN024FE5_at; Start 10; Stop 34
gcaattacagatgcaacattcgaac

SEQ ID NO: 202434 - DNA, 25 bp, Artificial
  probe
  misc_feature (1)..(25): SEQ ID NO: 2379; WAN024FE5_at; Start 175; Stop 199
gaaaatccaaacacagctcgtgctt

SEQ ID NO: 202435 - DNA, 25 bp, Artificial
  probe
  misc_feature (1)..(25): SEQ ID NO: 2379; WAN024FE5_at; Start 226; Stop 250
ctcttcaaaaaagacggccaagttg

SEQ ID NO: 202436 - DNA, 25 bp, Artificial
  probe
  misc_feature (1)..(25): SEQ ID NO: 2379; WAN024FE5_at; Start 253; Stop 277
aaacaagttgcaggtgttcacacag

SEQ ID NO: 202437 - DNA, 25 bp, Artificial
  probe
  misc_feature (1)..(25): SEQ ID NO: 2379; WAN024FE5_at; Start 279; Stop 303
agaacaaatcaaggccatcattgct

SEQ ID NO: 202438 - DNA, 25 bp, Artificial
  probe
  misc_feature (1)..(25): SEQ ID NO: 2379; WAN024FE5_at; Start 184; Stop 208
aacacagctcgtgcttttggaatca

SEQ ID NO: 202439 - DNA, 25 bp, Artificial
  probe
  misc_feature (1)..(25): SEQ ID NO: 2379; WAN024FE5_at; Start 59; Stop 83
tagtagacttctgggcaacttggtg

SEQ ID NO: 202440 - DNA, 25 bp, Artificial
  probe
  misc_feature (1)..(25): SEQ ID NO: 2379; WAN024FE5_at; Start 93; Stop 117
tcgtatgcaaggtccaatcttggac

SEQ ID NO: 202441 - DNA, 25 bp, Artificial
  probe
  misc_feature (1)..(25): SEQ ID NO: 2379; WAN024FE5_at; Start 85; Stop 109
ggtccatgtcgtatgcaaggtccaa

SEQ ID NO: 202442 - DNA, 25 bp, Artificial
  probe
  misc_feature (1)..(25): SEQ ID NO: 2379; WAN024FE5_at; Start 242; Stop 266
gccaagttgtcaaacaagttgcagg

SEQ ID NO: 202443 - DNA, 25 bp, Artificial
  probe
  misc_feature (1)..(25): SEQ ID NO: 2379; WAN024FE5_at; Start 223; Stop 247
cttctcttcaaaaaagacggccaag

SEQ ID NO: 202444 - DNA, 25 bp, Artificial
  probe
  misc_feature (1)..(25): SEQ ID NO: 2379; WAN024FE5_at; Start 2; Stop 26
tggcaaaagcaattacagatgcaac

SEQ ID NO: 202445 - DNA, 25 bp, Artificial
  probe
  misc_feature (1)..(25): SEQ ID NO: 2379; WAN024FE5_at; Start 209; Stop 233
tgtctattccaactcttctcttcaa

SEQ ID NO: 202446 - DNA, 25 bp, Artificial
  probe
  misc_feature (1)..(25): SEQ ID NO: 2379; WAN024FE5_at; Start 22; Stop 46
gcaacattcgaacaagaaacaaaag

SEQ ID NO: 202447 - DNA, 25 bp, Artificial
  probe
  misc_feature (1)..(25): SEQ ID NO: 2379; WAN024FE5_at; Start 53; Stop 77
tggtcttagtagacttctgggcaac

SEQ ID NO: 202448 - DNA, 25 bp, Artificial
  probe
  misc_feature (1)..(25): SEQ ID NO: 2379; WAN024FE5_at; Start 251; Stop 275
tcaaacaagttgcaggtgttcacac

SEQ ID NO: 202449 - DNA, 25 bp, Artificial
  probe
  misc_feature (1)..(25): SEQ ID NO: 2379; WAN024FE5_at; Start 65; Stop 89
acttctgggcaacttggtgtggtcc

SEQ ID NO: 202450 - DNA, 25 bp, Artificial
  probe
  misc_feature (1)..(25): SEQ ID NO: 2379; WAN024FE5_at; Start 202; Stop 226
ggaatcatgtctattccaactcttc

SEQ ID NO: 202451 - DNA, 25 bp, Artificial
  probe
  misc_feature (1)..(25): SEQ ID NO: 2379; WAN024FE5_at; Start 296; Stop 320
tcattgctgaattgagctaactaat

SEQ ID NO: 202452 - DNA, 25 bp, Artificial
  probe
  misc_feature (1)..(25): SEQ ID NO: 2379; WAN024FE5_at; Start 172; Stop 196
gatgaaaatccaaacacagctcgtg

SEQ ID NO: 202453 - DNA, 25 bp, Artificial
  probe
  misc_feature (1)..(25): SEQ ID NO: 2379; WAN024FE5_at; Start 149; Stop 173
tgaaaatcgttaaaatggacgttga

SEQ ID NO: 202454 - DNA, 25 bp, Artificial
  probe
  misc_feature (1)..(25): SEQ ID NO: 2379; WAN024FE5_at; Start 190; Stop 214
gctcgtgcttttggaatcatgtcta

SEQ ID NO: 202455 - DNA, 25 bp, Artificial
  probe
  misc_feature (1)..(25): SEQ ID NO: 2379; WAN024FE5_at; Start 73; Stop 97
gcaacttggtgtggtccatgtcgta

SEQ ID NO: 202456 - DNA, 25 bp, Artificial
  probe
  misc_feature (1)..(25): SEQ ID NO: 2379; WAN024FE5_at; Start 79; Stop 103
tggtgtggtccatgtcgtatgcaag

SEQ ID NO: 202457 - DNA, 25 bp, Artificial
  probe
  misc_feature (1)..(25): SEQ ID NO: 2379; WAN024FE5_at; Start 17; Stop 41
cagatgcaacattcgaacaagaaac

SEQ ID NO: 202458 - DNA, 25 bp, Artificial
  probe
  misc_feature (1)..(25): SEQ ID NO: 2379; WAN024FE5_at; Start 288; Stop 312
caaggccatcattgctgaattgagc

SEQ ID NO: 202459 - DNA, 25 bp, Artificial
  probe
  misc_feature (1)..(25): SEQ ID NO: 2379; WAN024FE5_at; Start 114; Stop 138
ggacaaattgtctgaagaactttca

SEQ ID NO: 202460 - DNA, 25 bp, Artificial
  probe
  misc_feature (1)..(25): SEQ ID NO: 2379; WAN024FE5_at; Start 127; Stop 151
gaagaactttcagaagatgtcttga

SEQ ID NO: 202461 - DNA, 25 bp, Artificial
  probe
  misc_feature (1)..(25): SEQ ID NO: 2379; WAN024FE5_at; Start 292; Stop 316
gccatcattgctgaattgagctaac

SEQ ID NO: 202462 - DNA, 25 bp, Artificial
  probe
  misc_feature (1)..(25): SEQ ID NO: 2379; WAN024FE5_at; Start 137; Stop 161
cagaagatgtcttgaaaatcgttaa

SEQ ID NO: 202463 - DNA, 25 bp, Artificial
  probe
  misc_feature (1)..(25): SEQ ID NO: 2379; WAN024FE5_at; Start 159; Stop 183
taaaatggacgttgatgaaaatcca

SEQ ID NO: 202464 - DNA, 25 bp, Artificial
  probe
  misc_feature (1)..(25): SEQ ID NO: 2379; WAN024FE5_at; Start 235; Stop 259
aaagacggccaagttgtcaaacaag

SEQ ID NO: 202465 - DNA, 25 bp, Artificial
  probe
  misc_feature (1)..(25): SEQ ID NO: 1480; WAN024FE6_at; Start 23; Stop 47
tattttgtgctgaagttaggaccac

SEQ ID NO: 202466 - DNA, 25 bp, Artificial
  probe
  misc_feature (1)..(25): SEQ ID NO: 1480; WAN024FE6_at; Start 227; Stop 251
cattgaccactaaagcatcactgtc

SEQ ID NO: 202467 - DNA, 25 bp, Artificial
  probe
  misc_feature (1)..(25): SEQ ID NO: 1480; WAN024FE6_at; Start 254; Stop 278
ccacctcgtgcaagagcttgaggaa

SEQ ID NO: 202468 - DNA, 25 bp, Artificial
  probe
  misc_feature (1)..(25): SEQ ID NO: 1480; WAN024FE6_at; Start 42; Stop 66
gaccacatcgactggacgaagacct

SEQ ID NO: 202469 - DNA, 25 bp, Artificial
  probe
  misc_feature (1)..(25): SEQ ID NO: 1480; WAN024FE6_at; Start 192; Stop 216
gatgacagatccattaaaatcaaag

SEQ ID NO: 202470 - DNA, 25 bp, Artificial
  probe
  misc_feature (1)..(25): SEQ ID NO: 1480; WAN024FE6_at; Start 158; Stop 182
catcattgcccgagacgaaacgtgg

SEQ ID NO: 202471 - DNA, 25 bp, Artificial
  probe
  misc_feature (1)..(25): SEQ ID NO: 1480; WAN024FE6_at; Start 101; Stop 125
tcttaccagacttaactgacttagg

SEQ ID NO: 202472 - DNA, 25 bp, Artificial
  probe
  misc_feature (1)..(25): SEQ ID NO: 1480; WAN024FE6_at; Start 147; Stop 171
taccaagaggacatcattgcccgag

SEQ ID NO: 202473 - DNA, 25 bp, Artificial
  probe
  misc_feature (1)..(25): SEQ ID NO: 1480; WAN024FE6_at; Start 161; Stop 185
cattgcccgagacgaaacgtggtaa

SEQ ID NO: 202474 - DNA, 25 bp, Artificial
  probe
  misc_feature (1)..(25): SEQ ID NO: 1480; WAN024FE6_at; Start 187; Stop 211
cctgggatgacagatccattaaaat

SEQ ID NO: 202475 - DNA, 25 bp, Artificial
  probe
  misc_feature (1)..(25): SEQ ID NO: 1480; WAN024FE6_at; Start 248; Stop 272
tgtctcccacctcgtgcaagagctt

SEQ ID NO: 202476 - DNA, 25 bp, Artificial
  probe
  misc_feature (1)..(25): SEQ ID NO: 1480; WAN024FE6_at; Start 115; Stop 139
actgacttaggaaggatatcttttt

SEQ ID NO: 202477 - DNA, 25 bp, Artificial
  probe
  misc_feature (1)..(25): SEQ ID NO: 1480; WAN024FE6_at; Start 137; Stop 161
ttttatttcctaccaagaggacatc

SEQ ID NO: 202478 - DNA, 25 bp, Artificial
  probe
  misc_feature (1)..(25): SEQ ID NO: 1480; WAN024FE6_at; Start 106; Stop 130
ccagacttaactgacttaggaagga

SEQ ID NO: 202479 - DNA, 25 bp, Artificial
  probe
  misc_feature (1)..(25): SEQ ID NO: 1480; WAN024FE6_at; Start 73; Stop 97
tgggcacgtttcatgagccactggc

SEQ ID NO: 202480 - DNA, 25 bp, Artificial
  probe
  misc_feature (1)..(25): SEQ ID NO: 1480; WAN024FE6_at; Start 34; Stop 58
gaagttaggaccacatcgactggac

SEQ ID NO: 202481 - DNA, 25 bp, Artificial
  probe
  misc_feature (1)..(25): SEQ ID NO: 1480; WAN024FE6_at; Start 76; Stop 100
gcacgtttcatgagccactggctaa

SEQ ID NO: 202482 - DNA, 25 bp, Artificial
  probe
  misc_feature (1)..(25): SEQ ID NO: 1480; WAN024FE6_at; Start 47; Stop 71
catcgactggacgaagaccttcttc

SEQ ID NO: 202483 - DNA, 25 bp, Artificial
  probe
  misc_feature (1)..(25): SEQ ID NO: 1480; WAN024FE6_at; Start 67; Stop 91
tcttcatgggcacgtttcatgagcc

SEQ ID NO: 202484 - DNA, 25 bp, Artificial
  probe
  misc_feature (1)..(25): SEQ ID NO: 1480; WAN024FE6_at; Start 86; Stop 110
tgagccactggctaatcttaccaga

SEQ ID NO: 202485 - DNA, 25 bp, Artificial
  probe
  misc_feature (1)..(25): SEQ ID NO: 1480; WAN024FE6_at; Start 54; Stop 78
tggacgaagaccttcttcatgggca

SEQ ID NO: 202486 - DNA, 25 bp, Artificial
  probe
  misc_feature (1)..(25): SEQ ID NO: 1480; WAN024FE6_at; Start 152; Stop 176
agaggacatcattgcccgagacgaa

SEQ ID NO: 202487 - DNA, 25 bp, Artificial
  probe
  misc_feature (1)..(25): SEQ ID NO: 1480; WAN024FE6_at; Start 178; Stop 202
cgtggtaaacctgggatgacagatc

SEQ ID NO: 202488 - DNA, 25 bp, Artificial
  probe
  misc_feature (1)..(25): SEQ ID NO: 1480; WAN024FE6_at; Start 230; Stop 254
tgaccactaaagcatcactgtctcc

SEQ ID NO: 202489 - DNA, 25 bp, Artificial
  probe
  misc_feature (1)..(25): SEQ ID NO: 1480; WAN024FE6_at; Start 288; Stop 312
cgtcaactggacatctgtgatttca

SEQ ID NO: 202490 - DNA, 25 bp, Artificial
  probe
  misc_feature (1)..(25): SEQ ID NO: 1480; WAN024FE6_at; Start 111; Stop 135
cttaactgacttaggaaggatatct

SEQ ID NO: 202491 - DNA, 25 bp, Artificial
  probe
  misc_feature (1)..(25): SEQ ID NO: 1480; WAN024FE6_at; Start 61; Stop 85
agaccttcttcatgggcacgtttca

SEQ ID NO: 202492 - DNA, 25 bp, Artificial
  probe
  misc_feature (1)..(25): SEQ ID NO: 1480; WAN024FE6_at; Start 294; Stop 318
ctggacatctgtgatttcattgtag

SEQ ID NO: 202493 - DNA, 25 bp, Artificial
  probe
  misc_feature (1)..(25): SEQ ID NO: 1480; WAN024FE6_at; Start 94; Stop 118
tggctaatcttaccagacttaactg

SEQ ID NO: 202494 - DNA, 25 bp, Artificial
  probe
  misc_feature (1)..(25): SEQ ID NO: 1480; WAN024FE6_at; Start 181; Stop 205
ggtaaacctgggatgacagatccat

SEQ ID NO: 202495 - DNA, 25 bp, Artificial
  probe
  misc_feature (1)..(25): SEQ ID NO: 1480; WAN024FE6_at; Start 174; Stop 198
gaaacgtggtaaacctgggatgaca

SEQ ID NO: 202496 - DNA, 25 bp, Artificial
  probe
  misc_feature (1)..(25): SEQ ID NO: 1480; WAN024FE6_at; Start 30; Stop 54
tgctgaagttaggaccacatcgact

SEQ ID NO: 202497 - DNA, 25 bp, Artificial
  probe
  misc_feature (1)..(25): SEQ ID NO: 1480; WAN024FE6_at; Start 39; Stop 63
taggaccacatcgactggacgaaga

SEQ ID NO: 202498 - DNA, 25 bp, Artificial
  probe
  misc_feature (1)..(25): SEQ ID NO: 1480; WAN024FE6_at; Start 262; Stop 286
tgcaagagcttgaggaaatcatcgt

SEQ ID NO: 202499 - DNA, 25 bp, Artificial
  probe
  misc_feature (1)..(25): SEQ ID NO: 2203; WAN024FE7_at; Start 150; Stop 174
tgaaatcacagatgtccagttgacg

SEQ ID NO: 202500 - DNA, 25 bp, Artificial
  probe
  misc_feature (1)..(25): SEQ ID NO: 2203; WAN024FE7_at; Start 260; Stop 284
gatctgtcatcccaggtttaccacg

SEQ ID NO: 202501 - DNA, 25 bp, Artificial
  probe
  misc_feature (1)..(25): SEQ ID NO: 2203; WAN024FE7_at; Start 391; Stop 415
gaagaaggtcttcgtccagtcgatg

SEQ ID NO: 202502 - DNA, 25 bp, Artificial
  probe
  misc_feature (1)..(25): SEQ ID NO: 2203; WAN024FE7_at; Start 483; Stop 507
taagggccgcgatgtctatgtggtc

SEQ ID NO: 202503 - DNA, 25 bp, Artificial
  probe
  misc_feature (1)..(25): SEQ ID NO: 2203; WAN024FE7_at; Start 949; Stop 973
gaagatttcccaaggctagtccagc

SEQ ID NO: 202504 - DNA, 25 bp, Artificial
  probe
  misc_feature (1)..(25): SEQ ID NO: 2203; WAN024FE7_at; Start 363; Stop 387
tagccagtggctcatgaaacgtgcc

SEQ ID NO: 202505 - DNA, 25 bp, Artificial
  probe
  misc_feature (1)..(25): SEQ ID NO: 2203; WAN024FE7_at; Start 12; Stop 36
tctctgtattggttgtggagcaacc

SEQ ID NO: 202506 - DNA, 25 bp, Artificial
  probe
  misc_feature (1)..(25): SEQ ID NO: 2203; WAN024FE7_at; Start 713; Stop 737
tcaagtatgtcagtcctaaaaagga

SEQ ID NO: 202507 - DNA, 25 bp, Artificial
  probe
  misc_feature (1)..(25): SEQ ID NO: 2203; WAN024FE7_at; Start 278; Stop 302
taccacgtttcgtctcgggcaatga

SEQ ID NO: 202508 - DNA, 25 bp, Artificial
  probe
  misc_feature (1)..(25): SEQ ID NO: 2203; WAN024FE7_at; Start 506; Stop 530
tcggtgtgaccaacgttggaaaatc

SEQ ID NO: 202509 - DNA, 25 bp, Artificial
  probe
  misc_feature (1)..(25): SEQ ID NO: 2203; WAN024FE7_at; Start 106; Stop 130
ggcgaagtctattgccaacgctgtt

SEQ ID NO: 202510 - DNA, 25 bp, Artificial
  probe
  misc_feature (1)..(25): SEQ ID NO: 2203; WAN024FE7_at; Start 873; Stop 897
caagcttgaaggagctagtgctttc

SEQ ID NO: 202511 - DNA, 25 bp, Artificial
  probe
  misc_feature (1)..(25): SEQ ID NO: 2203; WAN024FE7_at; Start 544; Stop 568
gctattatccaagaaatcacgggtg

SEQ ID NO: 202512 - DNA, 25 bp, Artificial
  probe
  misc_feature (1)..(25): SEQ ID NO: 2203; WAN024FE7_at; Start 920; Stop 944
ttctgacaccaccaaatagcaagga

SEQ ID NO: 202513 - DNA, 25 bp, Artificial
  probe
  misc_feature (1)..(25): SEQ ID NO: 2203; WAN024FE7_at; Start 797; Stop 821
gacgctttgactttatagcaggaga

SEQ ID NO: 202514 - DNA, 25 bp, Artificial
  probe
  misc_feature (1)..(25): SEQ ID NO: 2203; WAN024FE7_at; Start 698; Stop 722
tgacggccaaaaacctcaagtatgt

SEQ ID NO: 202515 - DNA, 25 bp, Artificial
  probe
  misc_feature (1)..(25): SEQ ID NO: 2203; WAN024FE7_at; Start 735; Stop 759
ggaaatcaagcctaagacctatcag

SEQ ID NO: 202516 - DNA, 25 bp, Artificial
  probe
  misc_feature (1)..(25): SEQ ID NO: 2203; WAN024FE7_at; Start 852; Stop 876
tgaactcaaactccatcgtagcaag

SEQ ID NO: 202517 - DNA, 25 bp, Artificial
  probe
  misc_feature (1)..(25): SEQ ID NO: 2203; WAN024FE7_at; Start 759; Stop 783
gcttaatcctgagcaaaccctattt

SEQ ID NO: 202518 - DNA, 25 bp, Artificial
  probe
  misc_feature (1)..(25): SEQ ID NO: 2203; WAN024FE7_at; Start 27; Stop 51
tggagcaaccattcagacgacagat

SEQ ID NO: 202519 - DNA, 25 bp, Artificial
  probe
  misc_feature (1)..(25): SEQ ID NO: 2203; WAN024FE7_at; Start 616; Stop 640
aaaatagagattccgcttgacgacg

SEQ ID NO: 202520 - DNA, 25 bp, Artificial
  probe
  misc_feature (1)..(25): SEQ ID NO: 2203; WAN024FE7_at; Start 558; Stop 582
aatcacgggtgatcagaatgtcatc

SEQ ID NO: 202521 - DNA, 25 bp, Artificial
  probe
  misc_feature (1)..(25): SEQ ID NO: 2203; WAN024FE7_at; Start 983; Stop 1007
ccattaaagataagacagacctagt

SEQ ID NO: 202522 - DNA, 25 bp, Artificial
  probe
  misc_feature (1)..(25): SEQ ID NO: 2203; WAN024FE7_at; Start 85; Stop 109
cttgaaaaaggtttggagactggcg

SEQ ID NO: 202523 - DNA, 25 bp, Artificial
  probe
  misc_feature (1)..(25): SEQ ID NO: 2203; WAN024FE7_at; Start 680; Stop 704
accagatggctcactacttgacggc

SEQ ID NO: 202524 - DNA, 25 bp, Artificial
  probe
  misc_feature (1)..(25): SEQ ID NO: 2203; WAN024FE7_at; Start 343; Stop 367
tcagttaagtctggtaagattagcc

SEQ ID NO: 202525 - DNA, 25 bp, Artificial
  probe
  misc_feature (1)..(25): SEQ ID NO: 2203; WAN024FE7_at; Start 1080; Stop 1104
cgtcgtcacacgaaaagcaattatt

SEQ ID NO: 202526 - DNA, 25 bp, Artificial
  probe
  misc_feature (1)..(25): SEQ ID NO: 2203; WAN024FE7_at; Start 407; Stop 431
cagtcgatgtggtcctaacttcagc

SEQ ID NO: 202527 - DNA, 25 bp, Artificial
  probe
  misc_feature (1)..(25): SEQ ID NO: 2203; WAN024FE7_at; Start 812; Stop 836
tagcaggagaaaagcaaggatttac

SEQ ID NO: 202528 - DNA, 25 bp, Artificial
  probe
  misc_feature (1)..(25): SEQ ID NO: 2203; WAN024FE7_at; Start 903; Stop 927
taagcacctgggaactcttctgaca

SEQ ID NO: 202529 - DNA, 25 bp, Artificial
  probe
  misc_feature (1)..(25): SEQ ID NO: 2203; WAN024FE7_at; Start 468; Stop 492
gattgaacactaccgtaagggccgc

SEQ ID NO: 202530 - DNA, 25 bp, Artificial
  probe
  misc_feature (1)..(25): SEQ ID NO: 2203; WAN024FE7_at; Start 131; Stop 155
tccgtctccgccactacaatgaaat

SEQ ID NO: 202531 - DNA, 25 bp, Artificial
  probe
  misc_feature (1)..(25): SEQ ID NO: 2203; WAN024FE7_at; Start 188; Stop 212
tcaagctcttgcacgaggtgggaga

SEQ ID NO: 202532 - DNA, 25 bp, Artificial
  probe
  misc_feature (1)..(25): SEQ ID NO: 2203; WAN024FE7_at; Start 892; Stop 916
gctttctacgataagcacctgggaa

SEQ ID NO: 202533 - DNA, 25 bp, Artificial
  probe
  misc_feature (1)..(25): SEQ ID NO: 2454; WAN024FE8_at; Start 68; Stop 92
tgcgccacaaaaaaccaacgggtgc

SEQ ID NO: 202534 - DNA, 25 bp, Artificial
  probe
  misc_feature (1)..(25): SEQ ID NO: 2454; WAN024FE8_at; Start 301; Stop 325
ccaaagcatggcaaaatcttccgca

SEQ ID NO: 202535 - DNA, 25 bp, Artificial
  probe
  misc_feature (1)..(25): SEQ ID NO: 2454; WAN024FE8_at; Start 457; Stop 481
ctgcatatagcagatagagtccgaa

SEQ ID NO: 202536 - DNA, 25 bp, Artificial
  probe
  misc_feature (1)..(25): SEQ ID NO: 2454; WAN024FE8_at; Start 101; Stop 125
gttggctccttatcctcaaagtctg

SEQ ID NO: 202537 - DNA, 25 bp, Artificial
  probe
  misc_feature (1)..(25): SEQ ID NO: 2454; WAN024FE8_at; Start 158; Stop 182
tccagcaagatatcataggtcaaga

SEQ ID NO: 202538 - DNA, 25 bp, Artificial
  probe
  misc_feature (1)..(25): SEQ ID NO: 2454; WAN024FE8_at; Start 84; Stop 108
aacgggtgctagtttctgttggctc

SEQ ID NO: 202539 - DNA, 25 bp, Artificial
  probe
  misc_feature (1)..(25): SEQ ID NO: 2454; WAN024FE8_at; Start 442; Stop 466
tacttccacctcatcctgcatatag

SEQ ID NO: 202540 - DNA, 25 bp, Artificial
  probe
  misc_feature (1)..(25): SEQ ID NO: 2454; WAN024FE8_at; Start 291; Stop 315
catatgtatcccaaagcatggcaaa

SEQ ID NO: 202541 - DNA, 25 bp, Artificial
  probe
  misc_feature (1)..(25): SEQ ID NO: 2454; WAN024FE8_at; Start 469; Stop 493
gatagagtccgaataacacgtgaca

SEQ ID NO: 202542 - DNA, 25 bp, Artificial
  probe
  misc_feature (1)..(25): SEQ ID NO: 2454; WAN024FE8_at; Start 144; Stop 168
taaatccagcctgttccagcaagat

SEQ ID NO: 202543 - DNA, 25 bp, Artificial
  probe
  misc_feature (1)..(25): SEQ ID NO: 2454; WAN024FE8_at; Start 132; Stop 156
gtttgaaggacttaaatccagcctg

SEQ ID NO: 202544 - DNA, 25 bp, Artificial
  probe
  misc_feature (1)..(25): SEQ ID NO: 2454; WAN024FE8_at; Start 250; Stop 274
gaaagtcagctcatgcacgatggag

SEQ ID NO: 202545 - DNA, 25 bp, Artificial
  probe
  misc_feature (1)..(25): SEQ ID NO: 2454; WAN024FE8_at; Start 54; Stop 78
taatctcctacttctgcgccacaaa

SEQ ID NO: 202546 - DNA, 25 bp, Artificial
  probe
  misc_feature (1)..(25): SEQ ID NO: 2454; WAN024FE8_at; Start 409; Stop 433
cagcgcattgtacacgtccttaaag

SEQ ID NO: 202547 - DNA, 25 bp, Artificial
  probe
  misc_feature (1)..(25): SEQ ID NO: 2454; WAN024FE8_at; Start 372; Stop 396
tcgagtgcacgtcaaagatgaaaac

SEQ ID NO: 202548 - DNA, 25 bp, Artificial
  probe
  misc_feature (1)..(25): SEQ ID NO: 2454; WAN024FE8_at; Start 345; Stop 369
cagggaatacttcatctgtctggta

SEQ ID NO: 202549 - DNA, 25 bp, Artificial
  probe
  misc_feature (1)..(25): SEQ ID NO: 2454; WAN024FE8_at; Start 357; Stop 381
catctgtctggtaggtcgagtgcac

SEQ ID NO: 202550 - DNA, 25 bp, Artificial
  probe
  misc_feature (1)..(25): SEQ ID NO: 2454; WAN024FE8_at; Start 173; Stop 197
taggtcaagatctcataggtcctct

SEQ ID NO: 202551 - DNA, 25 bp, Artificial
  probe
  misc_feature (1)..(25): SEQ ID NO: 2454; WAN024FE8_at; Start 279; Stop 303
gaacttcgtcctcatatgtatccca

SEQ ID NO: 202552 - DNA, 25 bp, Artificial
  probe
  misc_feature (1)..(25): SEQ ID NO: 2454; WAN024FE8_at; Start 2; Stop 26
tggccattatgaaaaggattgaact

SEQ ID NO: 202553 - DNA, 25 bp, Artificial
  probe
  misc_feature (1)..(25): SEQ ID NO: 2454; WAN024FE8_at; Start 15; Stop 39
aaggattgaactccgcgataatacc

SEQ ID NO: 202554 - DNA, 25 bp, Artificial
  probe
  misc_feature (1)..(25): SEQ ID NO: 2454; WAN024FE8_at; Start 190; Stop 214
ggtcctctcctcatgtacttcatcg

SEQ ID NO: 202555 - DNA, 25 bp, Artificial
  probe
  misc_feature (1)..(25): SEQ ID NO: 2454; WAN024FE8_at; Start 209; Stop 233
tcatcgtggcgactaaaggaaccgt

SEQ ID NO: 202556 - DNA, 25 bp, Artificial
  probe
  misc_feature (1)..(25): SEQ ID NO: 2454; WAN024FE8_at; Start 492; Stop 516
caaaatcgtatttccctgccttgga

SEQ ID NO: 202557 - DNA, 25 bp, Artificial
  probe
  misc_feature (1)..(25): SEQ ID NO: 2454; WAN024FE8_at; Start 509; Stop 533
gccttggacaaattcagcatattac

SEQ ID NO: 202558 - DNA, 25 bp, Artificial
  probe
  misc_feature (1)..(25): SEQ ID NO: 2454; WAN024FE8_at; Start 45; Stop 69
tggtcatgctaatctcctacttctg

SEQ ID NO: 202559 - DNA, 25 bp, Artificial
  probe
  misc_feature (1)..(25): SEQ ID NO: 2454; WAN024FE8_at; Start 391; Stop 415
gaaaactccctcttcattcagcgca

SEQ ID NO: 202560 - DNA, 25 bp, Artificial
  probe
  misc_feature (1)..(25): SEQ ID NO: 2454; WAN024FE8_at; Start 330; Stop 354
catggtaggaatagccagggaatac

SEQ ID NO: 202561 - DNA, 25 bp, Artificial
  probe
  misc_feature (1)..(25): SEQ ID NO: 2454; WAN024FE8_at; Start 314; Stop 338
aaatcttccgcattttcatggtagg

SEQ ID NO: 202562 - DNA, 25 bp, Artificial
  probe
  misc_feature (1)..(25): SEQ ID NO: 2454; WAN024FE8_at; Start 236; Stop 260
gcctccttgataaagaaagtcagct

SEQ ID NO: 202563 - DNA, 25 bp, Artificial
  probe
  misc_feature (1)..(25): SEQ ID NO: 2454; WAN024FE8_at; Start 265; Stop 289
cacgatggagtgaggaacttcgtcc

SEQ ID NO: 202564 - DNA, 25 bp, Artificial
  probe
  misc_feature (1)..(25): SEQ ID NO: 2454; WAN024FE8_at; Start 117; Stop 141
caaagtctgcatagagtttgaagga

SEQ ID NO: 202565 - DNA, 25 bp, Artificial
  probe
  misc_feature (1)..(25): SEQ ID NO: 2454; WAN024FE8_at; Start 540; Stop 564
taaaagcaatcttttgcttggctga

SEQ ID NO: 202566 - DNA, 25 bp, Artificial
  probe
  misc_feature (1)..(25): SEQ ID NO: 2454; WAN024FE8_at; Start 226; Stop 250
ggaaccgtcagcctccttgataaag

SEQ ID NO: 202567 - DNA, 25 bp, Artificial
  probe
  misc_feature (1)..(25): SEQ ID NO: 1805; WAN024FE9_at; Start 427; Stop 451
gtgcactcgacctaccagacagatg

SEQ ID NO: 202568 - DNA, 25 bp, Artificial
  probe
  misc_feature (1)..(25): SEQ ID NO: 1805; WAN024FE9_at; Start 595; Stop 619
gatgaagtacatgaggagaggacct

SEQ ID NO: 202569 - DNA, 25 bp, Artificial
  probe
  misc_feature (1)..(25): SEQ ID NO: 1805; WAN024FE9_at; Start 234; Stop 258
gagagcaacttcagccaagcaaaag

SEQ ID NO: 202570 - DNA, 25 bp, Artificial
  probe
  misc_feature (1)..(25): SEQ ID NO: 1805; WAN024FE9_at; Start 700; Stop 724
gagccaacagaaactagcacccgtt

SEQ ID NO: 202571 - DNA, 25 bp, Artificial
  probe
  misc_feature (1)..(25): SEQ ID NO: 1805; WAN024FE9_at; Start 683; Stop 707
cagactttgaggataaggagccaac

SEQ ID NO: 202572 - DNA, 25 bp, Artificial
  probe
  misc_feature (1)..(25): SEQ ID NO: 1805; WAN024FE9_at; Start 374; Stop 398
tctttaaggacgtgtacaatgcgct

SEQ ID NO: 202573 - DNA, 25 bp, Artificial
  probe
  misc_feature (1)..(25): SEQ ID NO: 1805; WAN024FE9_at; Start 339; Stop 363
ctgctatatgcaggatgaggtggaa

SEQ ID NO: 202574 - DNA, 25 bp, Artificial
  probe
  misc_feature (1)..(25): SEQ ID NO: 1805; WAN024FE9_at; Start 134; Stop 158
tggcttgtgggacaggaattcaatc

SEQ ID NO: 202575 - DNA, 25 bp, Artificial
  probe
  misc_feature (1)..(25): SEQ ID NO: 1805; WAN024FE9_at; Start 298; Stop 322
gcagggaaatacgattttgtcacgt

SEQ ID NO: 202576 - DNA, 25 bp, Artificial
  probe
  misc_feature (1)..(25): SEQ ID NO: 1805; WAN024FE9_at; Start 37; Stop 61
tatgatgcggtcatggacgatagtt

SEQ ID NO: 202577 - DNA, 25 bp, Artificial
  probe
  misc_feature (1)..(25): SEQ ID NO: 1805; WAN024FE9_at; Start 558; Stop 582
ctttatcaaggaggctgacggttcc

SEQ ID NO: 202578 - DNA, 25 bp, Artificial
  probe
  misc_feature (1)..(25): SEQ ID NO: 1805; WAN024FE9_at; Start 439; Stop 463
taccagacagatgaagtattccctg

SEQ ID NO: 202579 - DNA, 25 bp, Artificial
  probe
  misc_feature (1)..(25): SEQ ID NO: 1805; WAN024FE9_at; Start 451; Stop 475
gaagtattccctggctattcctacc

SEQ ID NO: 202580 - DNA, 25 bp, Artificial
  probe
  misc_feature (1)..(25): SEQ ID NO: 1805; WAN024FE9_at; Start 547; Stop 571
gagctgactttctttatcaaggagg

SEQ ID NO: 202581 - DNA, 25 bp, Artificial
  probe
  misc_feature (1)..(25): SEQ ID NO: 1805; WAN024FE9_at; Start 6; Stop 30
tatggcgacttatgaaacctttgcg

SEQ ID NO: 202582 - DNA, 25 bp, Artificial
  probe
  misc_feature (1)..(25): SEQ ID NO: 1805; WAN024FE9_at; Start 532; Stop 556
cactccatcgtgcatgagctgactt

SEQ ID NO: 202583 - DNA, 25 bp, Artificial
  probe
  misc_feature (1)..(25): SEQ ID NO: 1805; WAN024FE9_at; Start 143; Stop 167
ggacaggaattcaatcagtgcgctt

SEQ ID NO: 202584 - DNA, 25 bp, Artificial
  probe
  misc_feature (1)..(25): SEQ ID NO: 1805; WAN024FE9_at; Start 309; Stop 333
cgattttgtcacgtgttattcggac

SEQ ID NO: 202585 - DNA, 25 bp, Artificial
  probe
  misc_feature (1)..(25): SEQ ID NO: 1805; WAN024FE9_at; Start 672; Stop 696
caaactctatgcagactttgaggat

SEQ ID NO: 202586 - DNA, 25 bp, Artificial
  probe
  misc_feature (1)..(25): SEQ ID NO: 1805; WAN024FE9_at; Start 23; Stop 47
cctttgcggcggtctatgatgcggt

SEQ ID NO: 202587 - DNA, 25 bp, Artificial
  probe
  misc_feature (1)..(25): SEQ ID NO: 1805; WAN024FE9_at; Start 172; Stop 196
caggctggttttgatgtgactggac

SEQ ID NO: 202588 - DNA, 25 bp, Artificial
  probe
  misc_feature (1)..(25): SEQ ID NO: 1805; WAN024FE9_at; Start 466; Stop 490
tattcctaccatgaaaatgcggaag

SEQ ID NO: 202589 - DNA, 25 bp, Artificial
  probe
  misc_feature (1)..(25): SEQ ID NO: 1805; WAN024FE9_at; Start 325; Stop 349
tattcggactctatctgctatatgc

SEQ ID NO: 202590 - DNA, 25 bp, Artificial
  probe
  misc_feature (1)..(25): SEQ ID NO: 1805; WAN024FE9_at; Start 614; Stop 638
ggacctatgagatcttgacctatga

SEQ ID NO: 202591 - DNA, 25 bp, Artificial
  probe
  misc_feature (1)..(25): SEQ ID NO: 1805; WAN024FE9_at; Start 188; Stop 212
tgactggacttgacttgagtgcgga

SEQ ID NO: 202592 - DNA, 25 bp, Artificial
  probe
  misc_feature (1)..(25): SEQ ID NO: 1805; WAN024FE9_at; Start 52; Stop 76
gacgatagtttatacgacaaatgga

SEQ ID NO: 202593 - DNA, 25 bp, Artificial
  probe
  misc_feature (1)..(25): SEQ ID NO: 1805; WAN024FE9_at; Start 414; Stop 438
tttcatctttgacgtgcactcgacc

SEQ ID NO: 202594 - DNA, 25 bp, Artificial
  probe
  misc_feature (1)..(25): SEQ ID NO: 1805; WAN024FE9_at; Start 388; Stop 412
tacaatgcgctgaatgaagagggag

SEQ ID NO: 202595 - DNA, 25 bp, Artificial
  probe
  misc_feature (1)..(25): SEQ ID NO: 1805; WAN024FE9_at; Start 717; Stop 741
cacccgttggttttttgtggcgcag

SEQ ID NO: 202596 - DNA, 25 bp, Artificial
  probe
  misc_feature (1)..(25): SEQ ID NO: 1805; WAN024FE9_at; Start 89; Stop 113
tgcgtcatttgcctaagaccaagga

SEQ ID NO: 202597 - DNA, 25 bp, Artificial
  probe
  misc_feature (1)..(25): SEQ ID NO: 1805; WAN024FE9_at; Start 203; Stop 227
tgagtgcggatatgttgaagattgc

SEQ ID NO: 202598 - DNA, 25 bp, Artificial
  probe
  misc_feature (1)..(25): SEQ ID NO: 1805; WAN024FE9_at; Start 403; Stop 427
gaagagggagttttcatctttgacg

SEQ ID NO: 202599 - DNA, 25 bp, Artificial
  probe
  misc_feature (1)..(25): SEQ ID NO: 1805; WAN024FE9_at; Start 498; Stop 522
catgctttgggatacatatgaggac

SEQ ID NO: 202600 - DNA, 25 bp, Artificial
  probe
  misc_feature (1)..(25): SEQ ID NO: 1805; WAN024FE9_at; Start 218; Stop 242
tgaagattgcggagaagagagcaac

SEQ ID NO: 202601 - DNA, 25 bp, Artificial
  probe
  misc_feature (1)..(25): SEQ ID NO: 1402; WAN024FEA_at; Start 819; Stop 843
caaacgttacaccaaggcgcgtgtc

SEQ ID NO: 202602 - DNA, 25 bp, Artificial
  probe
  misc_feature (1)..(25): SEQ ID NO: 1402; WAN024FEA_at; Start 194; Stop 218
tgccctttttagtcagtgttcaggc

SEQ ID NO: 202603 - DNA, 25 bp, Artificial
  probe
  misc_feature (1)..(25): SEQ ID NO: 1402; WAN024FEA_at; Start 530; Stop 554
gggcaggttaccattctgtgaataa

SEQ ID NO: 202604 - DNA, 25 bp, Artificial
  probe
  misc_feature (1)..(25): SEQ ID NO: 1402; WAN024FEA_at; Start 40; Stop 64
cataatggccataaatacctgctgg

SEQ ID NO: 202605 - DNA, 25 bp, Artificial
  probe
  misc_feature (1)..(25): SEQ ID NO: 1402; WAN024FEA_at; Start 670; Stop 694
gaagactattttcccttgctccgct

SEQ ID NO: 202606 - DNA, 25 bp, Artificial
  probe
  misc_feature (1)..(25): SEQ ID NO: 1402; WAN024FEA_at; Start 176; Stop 200
cagacttggtagtggaattgccctt

SEQ ID NO: 202607 - DNA, 25 bp, Artificial
  probe
  misc_feature (1)..(25): SEQ ID NO: 1402; WAN024FEA_at; Start 779; Stop 803
cagcccagtctgtggaagaattggt

SEQ ID NO: 202608 - DNA, 25 bp, Artificial
  probe
  misc_feature (1)..(25): SEQ ID NO: 1402; WAN024FEA_at; Start 365; Stop 389
aaaatctgcctgattccctttccta

SEQ ID NO: 202609 - DNA, 25 bp, Artificial
  probe
  misc_feature (1)..(25): SEQ ID NO: 1402; WAN024FEA_at; Start 61; Stop 85
ctggatcaggcagagggactgaaaa

SEQ ID NO: 202610 - DNA, 25 bp, Artificial
  probe
  misc_feature (1)..(25): SEQ ID NO: 1402; WAN024FEA_at; Start 684; Stop 708
cttgctccgctatcaaatcttgtca

SEQ ID NO: 202611 - DNA, 25 bp, Artificial
  probe
  misc_feature (1)..(25): SEQ ID NO: 1402; WAN024FEA_at; Start 631; Stop 655
tctgttgccctatttgagcaggcca

SEQ ID NO: 202612 - DNA, 25 bp, Artificial
  probe
  misc_feature (1)..(25): SEQ ID NO: 1402; WAN024FEA_at; Start 51; Stop 75
taaatacctgctggatcaggcagag

SEQ ID NO: 202613 - DNA, 25 bp, Artificial
  probe
  misc_feature (1)..(25): SEQ ID NO: 1402; WAN024FEA_at; Start 643; Stop 667
tttgagcaggccagtaaggtgatct

SEQ ID NO: 202614 - DNA, 25 bp, Artificial
  probe
  misc_feature (1)..(25): SEQ ID NO: 1402; WAN024FEA_at; Start 595; Stop 619
cagaaggaccaagatttcttagaac

SEQ ID NO: 202615 - DNA, 25 bp, Artificial
  probe
  misc_feature (1)..(25): SEQ ID NO: 1402; WAN024FEA_at; Start 728; Stop 752
tctatcaggtcaatcaagaaatggc

SEQ ID NO: 202616 - DNA, 25 bp, Artificial
  probe
  misc_feature (1)..(25): SEQ ID NO: 1402; WAN024FEA_at; Start 245; Stop 269
tggatatcttggatcgcttgggcat

SEQ ID NO: 202617 - DNA, 25 bp, Artificial
  probe
  misc_feature (1)..(25): SEQ ID NO: 1402; WAN024FEA_at; Start 167; Stop 191
aaaatggcgcagacttggtagtgga

SEQ ID NO: 202618 - DNA, 25 bp, Artificial
  probe
  misc_feature (1)..(25): SEQ ID NO: 1402; WAN024FEA_at; Start 454; Stop 478
aatcatgttcttgctctggcctatg

SEQ ID NO: 202619 - DNA, 25 bp, Artificial
  probe
  misc_feature (1)..(25): SEQ ID NO: 1402; WAN024FEA_at; Start 88; Stop 112
gttgccatgtcagggaatttcatgc

SEQ ID NO: 202620 - DNA, 25 bp, Artificial
  probe
  misc_feature (1)..(25): SEQ ID NO: 1402; WAN024FEA_at; Start 153; Stop 177
ccagatggcgctggaaaatggcgca

SEQ ID NO: 202621 - DNA, 25 bp, Artificial
  probe
  misc_feature (1)..(25): SEQ ID NO: 1402; WAN024FEA_at; Start 554; Stop 578
aagatgtggactttgcctcggcgac

SEQ ID NO: 202622 - DNA, 25 bp, Artificial
  probe
  misc_feature (1)..(25): SEQ ID NO: 1402; WAN024FEA_at; Start 505; Stop 529
aagctgcatccgattcagcgtcagg

SEQ ID NO: 202623 - DNA, 25 bp, Artificial
  probe
  misc_feature (1)..(25): SEQ ID NO: 1402; WAN024FEA_at; Start 654; Stop 678
cagtaaggtgatctgggaagactat

SEQ ID NO: 202624 - DNA, 25 bp, Artificial
  probe
  misc_feature (1)..(25): SEQ ID NO: 1402; WAN024FEA_at; Start 540; Stop 564
ccattctgtgaataaagatgtggac

SEQ ID NO: 202625 - DNA, 25 bp, Artificial
  probe
  misc_feature (1)..(25): SEQ ID NO: 1402; WAN024FEA_at; Start 615; Stop 639
agaacgttttatgccttctgttgcc

SEQ ID NO: 202626 - DNA, 25 bp, Artificial
  probe
  misc_feature (1)..(25): SEQ ID NO: 1402; WAN024FEA_at; Start 578; Stop 602
cagccctccgtcaacatcagaagga

SEQ ID NO: 202627 - DNA, 25 bp, Artificial
  probe
  misc_feature (1)..(25): SEQ ID NO: 1402; WAN024FEA_at; Start 751; Stop 775
gctgtgcgcattaaagaagctatta

SEQ ID NO: 202628 - DNA, 25 bp, Artificial
  probe
  misc_feature (1)..(25): SEQ ID NO: 1402; WAN024FEA_at; Start 101; Stop 125
ggaatttcatgcagcgtggagagcc

SEQ ID NO: 202629 - DNA, 25 bp, Artificial
  probe
  misc_feature (1)..(25): SEQ ID NO: 1402; WAN024FEA_at; Start 426; Stop 450
tggtcttgatttttcaggtaatacc

SEQ ID NO: 202630 - DNA, 25 bp, Artificial
  probe
  misc_feature (1)..(25): SEQ ID NO: 1402; WAN024FEA_at; Start 766; Stop 790
gaagctattaaaacagcccagtctg

SEQ ID NO: 202631 - DNA, 25 bp, Artificial
  probe
  misc_feature (1)..(25): SEQ ID NO: 1402; WAN024FEA_at; Start 791; Stop 815
tggaagaattggtcgagttagtgac

SEQ ID NO: 202632 - DNA, 25 bp, Artificial
  probe
  misc_feature (1)..(25): SEQ ID NO: 1402; WAN024FEA_at; Start 736; Stop 760
gtcaatcaagaaatggctgtgcgca

SEQ ID NO: 202633 - DNA, 25 bp, Artificial
  probe
  misc_feature (1)..(25): SEQ ID NO: 1402; WAN024FEA_at; Start 25; Stop 49
gagttcaatccttttcataatggcc

SEQ ID NO: 202634 - DNA, 25 bp, Artificial
  probe
  misc_feature (1)..(25): SEQ ID NO: 1402; WAN024FEA_at; Start 692; Stop 716
gctatcaaatcttgtcaaatcccga

SEQ ID NO: 202635 - DNA, 25 bp, Artificial
  probe
  misc_feature (1)..(25): SEQ ID NO: 7371; WAN024FEB-3_at; Start 359; Stop 383
gaccaaggtttgatgggtagcgcta

SEQ ID NO: 202636 - DNA, 25 bp, Artificial
  probe
  misc_feature (1)..(25): SEQ ID NO: 7371; WAN024FEB-3_at; Start 344; Stop 368
tacggtattgccattgaccaaggtt

SEQ ID NO: 202637 - DNA, 25 bp, Artificial
  probe
  misc_feature (1)..(25): SEQ ID NO: 7371; WAN024FEB-3_at; Start 403; Stop 427
gacaaaattctctaatggaaatcct

SEQ ID NO: 202638 - DNA, 25 bp, Artificial
  probe
  misc_feature (1)..(25): SEQ ID NO: 7371; WAN024FEB-3_at; Start 212; Stop 236
aatgttttgatggacaataaaacgg

SEQ ID NO: 202639 - DNA, 25 bp, Artificial
  probe
  misc_feature (1)..(25): SEQ ID NO: 7371; WAN024FEB-3_at; Start 101; Stop 125
ggctataaaatcactacaacgatca

SEQ ID NO: 202640 - DNA, 25 bp, Artificial
  probe
  misc_feature (1)..(25): SEQ ID NO: 7371; WAN024FEB-3_at; Start 324; Stop 348
caaccaagcctttgttggcctacgg

SEQ ID NO: 202641 - DNA, 25 bp, Artificial
  probe
  misc_feature (1)..(25): SEQ ID NO: 7371; WAN024FEB-3_at; Start 470; Stop 494
ggagaagccttgaactattcatgga

SEQ ID NO: 202642 - DNA, 25 bp, Artificial
  probe
  misc_feature (1)..(25): SEQ ID NO: 7371; WAN024FEB-3_at; Start 182; Stop 206
gatgatgcgactggtcagcctgaag

SEQ ID NO: 202643 - DNA, 25 bp, Artificial
  probe
  misc_feature (1)..(25): SEQ ID NO: 7371; WAN024FEB-3_at; Start 285; Stop 309
acaatcatgccttcgacactaagcg

SEQ ID NO: 202644 - DNA, 25 bp, Artificial
  probe
  misc_feature (1)..(25): SEQ ID NO: 7371; WAN024FEB-3_at; Start 14; Stop 38
caggacaatgtttttagtcaagagt

SEQ ID NO: 202645 - DNA, 25 bp, Artificial
  probe
  misc_feature (1)..(25): SEQ ID NO: 7371; WAN024FEB-3_at; Start 434; Stop 458
tatgtgaacagtccaggtacaggca

SEQ ID NO: 202646 - DNA, 25 bp, Artificial
  probe
  misc_feature (1)..(25): SEQ ID NO: 7371; WAN024FEB-3_at; Start 253; Stop 277
tgttggtggtcgtaattaccagact

SEQ ID NO: 202647 - DNA, 25 bp, Artificial
  probe
  misc_feature (1)..(25): SEQ ID NO: 7371; WAN024FEB-3_at; Start 149; Stop 173
caaaatgcagttgctaactacggtc

SEQ ID NO: 202648 - DNA, 25 bp, Artificial
  probe
  misc_feature (1)..(25): SEQ ID NO: 7371; WAN024FEB-3_at; Start 269; Stop 293
taccagactaaccaaaacaatcatg

SEQ ID NO: 202649 - DNA, 25 bp, Artificial
  probe
  misc_feature (1)..(25): SEQ ID NO: 7371; WAN024FEB-3_at; Start 173; Stop 197
catttggtagatgatgcgactggtc

SEQ ID NO: 202650 - DNA, 25 bp, Artificial
  probe
  misc_feature (1)..(25): SEQ ID NO: 7371; WAN024FEB-3_at; Start 463; Stop 487
gaccttgggagaagccttgaactat

SEQ ID NO: 202651 - DNA, 25 bp, Artificial
  probe
  misc_feature (1)..(25): SEQ ID NO: 7371; WAN024FEB-3_at; Start 43; Stop 67
aaacgagtcgattcaaaaggcctat

SEQ ID NO: 202652 - DNA, 25 bp, Artificial
  probe
  misc_feature (1)..(25): SEQ ID NO: 7371; WAN024FEB-3_at; Start 94; Stop 118
taacggtggctataaaatcactaca

SEQ ID NO: 202653 - DNA, 25 bp, Artificial
  probe
  misc_feature (1)..(25): SEQ ID NO: 7371; WAN024FEB-3_at; Start 419; Stop 443
ggaaatcctatcatgtatgtgaaca

SEQ ID NO: 202654 - DNA, 25 bp, Artificial
  probe
  misc_feature (1)..(25): SEQ ID NO: 7371; WAN024FEB-3_at; Start 2; Stop 26
tacttagttcgacaggacaatgttt

SEQ ID NO: 202655 - DNA, 25 bp, Artificial
  probe
  misc_feature (1)..(25): SEQ ID NO: 7371; WAN024FEB-3_at; Start 63; Stop 87
cctatcatgagcgagcggagcagga

SEQ ID NO: 202656 - DNA, 25 bp, Artificial
  probe
  misc_feature (1)..(25): SEQ ID NO: 7371; WAN024FEB-3_at; Start 197; Stop 221
cagcctgaagtagggaatgttttga

SEQ ID NO: 202657 - DNA, 25 bp, Artificial
  probe
  misc_feature (1)..(25): SEQ ID NO: 7371; WAN024FEB-3_at; Start 156; Stop 180
cagttgctaactacggtcatttggt

SEQ ID NO: 202658 - DNA, 25 bp, Artificial
  probe
  misc_feature (1)..(25): SEQ ID NO: 7371; WAN024FEB-3_at; Start 135; Stop 159
tccataacgccatgcaaaatgcagt

SEQ ID NO: 202659 - DNA, 25 bp, Artificial
  probe
  misc_feature (1)..(25): SEQ ID NO: 7371; WAN024FEB-3_at; Start 73; Stop 97
gcgagcggagcaggaactaagtaac

SEQ ID NO: 202660 - DNA, 25 bp, Artificial
  probe
  misc_feature (1)..(25): SEQ ID NO: 7371; WAN024FEB-3_at; Start 372; Stop 396
tgggtagcgctagtatcttgtcaaa

SEQ ID NO: 202661 - DNA, 25 bp, Artificial
  probe
  misc_feature (1)..(25): SEQ ID NO: 7371; WAN024FEB-3_at; Start 289; Stop 313
tcatgccttcgacactaagcgctcg

SEQ ID NO: 202662 - DNA, 25 bp, Artificial
  probe
  misc_feature (1)..(25): SEQ ID NO: 7371; WAN024FEB-3_at; Start 380; Stop 404
gctagtatcttgtcaaattatccga

SEQ ID NO: 202663 - DNA, 25 bp, Artificial
  probe
  misc_feature (1)..(25): SEQ ID NO: 7371; WAN024FEB-3_at; Start 479; Stop 503
ttgaactattcatggaatatcccag

SEQ ID NO: 202664 - DNA, 25 bp, Artificial
  probe
  misc_feature (1)..(25): SEQ ID NO: 7371; WAN024FEB-3_at; Start 55; Stop 79
tcaaaaggcctatcatgagcgagcg

SEQ ID NO: 202665 - DNA, 25 bp, Artificial
  probe
  misc_feature (1)..(25): SEQ ID NO: 7371; WAN024FEB-3_at; Start 440; Stop 464
aacagtccaggtacaggcatgatga

SEQ ID NO: 202666 - DNA, 25 bp, Artificial
  probe
  misc_feature (1)..(25): SEQ ID NO: 7371; WAN024FEB-3_at; Start 83; Stop 107
caggaactaagtaacggtggctata

SEQ ID NO: 202667 - DNA, 25 bp, Artificial
  probe
  misc_feature (1)..(25): SEQ ID NO: 7371; WAN024FEB-3_at; Start 315; Stop 339
cagcctctacaaccaagcctttgtt

SEQ ID NO: 202668 - DNA, 25 bp, Artificial
  probe
  misc_feature (1)..(25): SEQ ID NO: 7371; WAN024FEB-3_at; Start 447; Stop 471
caggtacaggcatgatgaccttggg

SEQ ID NO: 202669 - DNA, 25 bp, Artificial
  probe
  misc_feature (1)..(25): SEQ ID NO: 6259; WAN024FEB-5_at; Start 45; Stop 69
ggaatttttccagcgagtaaaatca

SEQ ID NO: 202670 - DNA, 25 bp, Artificial
  probe
  misc_feature (1)..(25): SEQ ID NO: 6259; WAN024FEB-5_at; Start 420; Stop 444
caaaaaggctatcgttgcaactgag

SEQ ID NO: 202671 - DNA, 25 bp, Artificial
  probe
  misc_feature (1)..(25): SEQ ID NO: 6259; WAN024FEB-5_at; Start 347; Stop 371
ggagtgtcattgcttctatcgagag

SEQ ID NO: 202672 - DNA, 25 bp, Artificial
  probe
  misc_feature (1)..(25): SEQ ID NO: 6259; WAN024FEB-5_at; Start 492; Stop 516
tcgggcgactttgggaacctttgca

SEQ ID NO: 202673 - DNA, 25 bp, Artificial
  probe
  misc_feature (1)..(25): SEQ ID NO: 6259; WAN024FEB-5_at; Start 124; Stop 148
acaggtgggagaattctgtctattc

SEQ ID NO: 202674 - DNA, 25 bp, Artificial
  probe
  misc_feature (1)..(25): SEQ ID NO: 6259; WAN024FEB-5_at; Start 409; Stop 433
tcggacaatctcaaaaaggctatcg

SEQ ID NO: 202675 - DNA, 25 bp, Artificial
  probe
  misc_feature (1)..(25): SEQ ID NO: 6259; WAN024FEB-5_at; Start 289; Stop 313
gagttggtcaagcaggttaaaaata

SEQ ID NO: 202676 - DNA, 25 bp, Artificial
  probe
  misc_feature (1)..(25): SEQ ID NO: 6259; WAN024FEB-5_at; Start 180; Stop 204
tttgaatactctctttattctaggc

SEQ ID NO: 202677 - DNA, 25 bp, Artificial
  probe
  misc_feature (1)..(25): SEQ ID NO: 6259; WAN024FEB-5_at; Start 195; Stop 219
tattctaggctttatcggtgggctt

SEQ ID NO: 202678 - DNA, 25 bp, Artificial
  probe
  misc_feature (1)..(25): SEQ ID NO: 6259; WAN024FEB-5_at; Start 470; Stop 494
gggttgtgccaaaagctgtgattcg

SEQ ID NO: 202679 - DNA, 25 bp, Artificial
  probe
  misc_feature (1)..(25): SEQ ID NO: 6259; WAN024FEB-5_at; Start 276; Stop 300
tccccaatcggaggagttggtcaag

SEQ ID NO: 202680 - DNA, 25 bp, Artificial
  probe
  misc_feature (1)..(25): SEQ ID NO: 6259; WAN024FEB-5_at; Start 88; Stop 112
tcagagaaagtctcagaagagaaga

SEQ ID NO: 202681 - DNA, 25 bp, Artificial
  probe
  misc_feature (1)..(25): SEQ ID NO: 6259; WAN024FEB-5_at; Start 367; Stop 391
gagagtgatttactgagaacttcga

SEQ ID NO: 202682 - DNA, 25 bp, Artificial
  probe
  misc_feature (1)..(25): SEQ ID NO: 6259; WAN024FEB-5_at; Start 225; Stop 249
tgctggtctagctcttggttatgga

SEQ ID NO: 202683 - DNA, 25 bp, Artificial
  probe
  misc_feature (1)..(25): SEQ ID NO: 6259; WAN024FEB-5_at; Start 394; Stop 418
tcatctgaggaaatatcggacaatc

SEQ ID NO: 202684 - DNA, 25 bp, Artificial
  probe
  misc_feature (1)..(25): SEQ ID NO: 6259; WAN024FEB-5_at; Start 326; Stop 350
cagaaattgtttatgcagatgggag

SEQ ID NO: 202685 - DNA, 25 bp, Artificial
  probe
  misc_feature (1)..(25): SEQ ID NO: 6259; WAN024FEB-5_at; Start 264; Stop 288
caaggctaaggttccccaatcggag

SEQ ID NO: 202686 - DNA, 25 bp, Artificial
  probe
  misc_feature (1)..(25): SEQ ID NO: 6259; WAN024FEB-5_at; Start 139; Stop 163
ctgtctattctagggagcattttag

SEQ ID NO: 202687 - DNA, 25 bp, Artificial
  probe
  misc_feature (1)..(25): SEQ ID NO: 6259; WAN024FEB-5_at; Start 168; Stop 192
tattaagggaattttgaatactctc

SEQ ID NO: 202688 - DNA, 25 bp, Artificial
  probe
  misc_feature (1)..(25): SEQ ID NO: 6259; WAN024FEB-5_at; Start 381; Stop 405
gagaacttcgatctcatctgaggaa

SEQ ID NO: 202689 - DNA, 25 bp, Artificial
  probe
  misc_feature (1)..(25): SEQ ID NO: 6259; WAN024FEB-5_at; Start 78; Stop 102
tcataaaaaatcagagaaagtctca

SEQ ID NO: 202690 - DNA, 25 bp, Artificial
  probe
  misc_feature (1)..(25): SEQ ID NO: 6259; WAN024FEB-5_at; Start 504; Stop 528
gggaacctttgcacgtttgggctca

SEQ ID NO: 202691 - DNA, 25 bp, Artificial
  probe
  misc_feature (1)..(25): SEQ ID NO: 6259; WAN024FEB-5_at; Start 153; Stop 177
gagcattttagttgctattaaggga

SEQ ID NO: 202692 - DNA, 25 bp, Artificial
  probe
  misc_feature (1)..(25): SEQ ID NO: 6259; WAN024FEB-5_at; Start 478; Stop 502
ccaaaagctgtgattcgggcgactt

SEQ ID NO: 202693 - DNA, 25 bp, Artificial
  probe
  misc_feature (1)..(25): SEQ ID NO: 6259; WAN024FEB-5_at; Start 231; Stop 255
tctagctcttggttatggagttgct

SEQ ID NO: 202694 - DNA, 25 bp, Artificial
  probe
  misc_feature (1)..(25): SEQ ID NO: 6259; WAN024FEB-5_at; Start 257; Stop 281
tgtttgacaaggctaaggttcccca

SEQ ID NO: 202695 - DNA, 25 bp, Artificial
  probe
  misc_feature (1)..(25): SEQ ID NO: 6259; WAN024FEB-5_at; Start 98; Stop 122
tctcagaagagaagaagtcggatgg

SEQ ID NO: 202696 - DNA, 25 bp, Artificial
  probe
  misc_feature (1)..(25): SEQ ID NO: 6259; WAN024FEB-5_at; Start 509; Stop 533
cctttgcacgtttgggctcatctac

SEQ ID NO: 202697 - DNA, 25 bp, Artificial
  probe
  misc_feature (1)..(25): SEQ ID NO: 6259; WAN024FEB-5_at; Start 434; Stop 458
ttgcaactgaggacgaacatttttt

SEQ ID NO: 202698 - DNA, 25 bp, Artificial
  probe
  misc_feature (1)..(25): SEQ ID NO: 6259; WAN024FEB-5_at; Start 55; Stop 79
cagcgagtaaaatcaaaaataaatc

SEQ ID NO: 202699 - DNA, 25 bp, Artificial
  probe
  misc_feature (1)..(25): SEQ ID NO: 6259; WAN024FEB-5_at; Start 213; Stop 237
tgggctttttggtgctggtctagct

SEQ ID NO: 202700 - DNA, 25 bp, Artificial
  probe
  misc_feature (1)..(25): SEQ ID NO: 6259; WAN024FEB-5_at; Start 244; Stop 268
tatggagttgctttgtttgacaagg

SEQ ID NO: 202701 - DNA, 25 bp, Artificial
  probe
  misc_feature (1)..(25): SEQ ID NO: 6259; WAN024FEB-5_at; Start 358; Stop 382
gcttctatcgagagtgatttactga

SEQ ID NO: 202702 - DNA, 25 bp, Artificial
  probe
  misc_feature (1)..(25): SEQ ID NO: 6259; WAN024FEB-5_at; Start 340; Stop 364
gcagatgggagtgtcattgcttcta

SEQ ID NO: 202703 - DNA, 25 bp, Artificial
  probe
  misc_feature (1)..(25): SEQ ID NO: 7065; WAN024FEB-M_at; Start 423; Stop 447
tacaaggattataatctcaaacaag

SEQ ID NO: 202704 - DNA, 25 bp, Artificial
  probe
  misc_feature (1)..(25): SEQ ID NO: 7065; WAN024FEB-M_at; Start 395; Stop 419
tgctctgactcaggaagaatacgat

SEQ ID NO: 202705 - DNA, 25 bp, Artificial
  probe
  misc_feature (1)..(25): SEQ ID NO: 7065; WAN024FEB-M_at; Start 463; Stop 487
gaactgtcaatgttgtttcgaggga

SEQ ID NO: 202706 - DNA, 25 bp, Artificial
  probe
  misc_feature (1)..(25): SEQ ID NO: 7065; WAN024FEB-M_at; Start 481; Stop 505
cgagggattatctttactttacagc

SEQ ID NO: 202707 - DNA, 25 bp, Artificial
  probe
  misc_feature (1)..(25): SEQ ID NO: 7065; WAN024FEB-M_at; Start 322; Stop 346
taaagagtgatgaagacttagagct

SEQ ID NO: 202708 - DNA, 25 bp, Artificial
  probe
  misc_feature (1)..(25): SEQ ID NO: 7065; WAN024FEB-M_at; Start 242; Stop 266
gagtattcctcaagcagccttccta

SEQ ID NO: 202709 - DNA, 25 bp, Artificial
  probe
  misc_feature (1)..(25): SEQ ID NO: 7065; WAN024FEB-M_at; Start 355; Stop 379
agcgggccaaggatgttctctacaa

SEQ ID NO: 202710 - DNA, 25 bp, Artificial
  probe
  misc_feature (1)..(25): SEQ ID NO: 7065; WAN024FEB-M_at; Start 447; Stop 471
gatttcttgccatcaggaactgtca

SEQ ID NO: 202711 - DNA, 25 bp, Artificial
  probe
  misc_feature (1)..(25): SEQ ID NO: 7065; WAN024FEB-M_at; Start 496; Stop 520
actttacagctatggctgaagcgac

SEQ ID NO: 202712 - DNA, 25 bp, Artificial
  probe
  misc_feature (1)..(25): SEQ ID NO: 7065; WAN024FEB-M_at; Start 49; Stop 73
gagatgctccgactttggctcgtaa

SEQ ID NO: 202713 - DNA, 25 bp, Artificial
  probe
  misc_feature (1)..(25): SEQ ID NO: 7065; WAN024FEB-M_at; Start 267; Stop 291
gcaggtttgccccagagtccgatta

SEQ ID NO: 202714 - DNA, 25 bp, Artificial
  probe
  misc_feature (1)..(25): SEQ ID NO: 7065; WAN024FEB-M_at; Start 98; Stop 122
tgccttggaacgcagcatgagtaag

SEQ ID NO: 202715 - DNA, 25 bp, Artificial
  probe
  misc_feature (1)..(25): SEQ ID NO: 7065; WAN024FEB-M_at; Start 126; Stop 150
gaaatcttgactacttatctcaatg

SEQ ID NO: 202716 - DNA, 25 bp, Artificial
  probe
  misc_feature (1)..(25): SEQ ID NO: 7065; WAN024FEB-M_at; Start 213; Stop 237
ggaattttcggtattgatgccaaca

SEQ ID NO: 202717 - DNA, 25 bp, Artificial
  probe
  misc_feature (1)..(25): SEQ ID NO: 7065; WAN024FEB-M_at; Start 283; Stop 307
gtccgattacttattccccttatga

SEQ ID NO: 202718 - DNA, 25 bp, Artificial
  probe
  misc_feature (1)..(25): SEQ ID NO: 7065; WAN024FEB-M_at; Start 36; Stop 60
caacaagtggttggagatgctccga

SEQ ID NO: 202719 - DNA, 25 bp, Artificial
  probe
  misc_feature (1)..(25): SEQ ID NO: 7065; WAN024FEB-M_at; Start 382; Stop 406
tgtaccgtacgggtgctctgactca

SEQ ID NO: 202720 - DNA, 25 bp, Artificial
  probe
  misc_feature (1)..(25): SEQ ID NO: 7065; WAN024FEB-M_at; Start 144; Stop 168
ctcaatgttgctccctttggtcgaa

SEQ ID NO: 202721 - DNA, 25 bp, Artificial
  probe
  misc_feature (1)..(25): SEQ ID NO: 7065; WAN024FEB-M_at; Start 228; Stop 252
gatgccaacaagttgagtattcctc

SEQ ID NO: 202722 - DNA, 25 bp, Artificial
  probe
  misc_feature (1)..(25): SEQ ID NO: 7065; WAN024FEB-M_at; Start 182; Stop 206
gaatattgcaggtgcccagcaagct

SEQ ID NO: 202723 - DNA, 25 bp, Artificial
  probe
  misc_feature (1)..(25): SEQ ID NO: 7065; WAN024FEB-M_at; Start 407; Stop 431
ggaagaatacgatcagtacaaggat

SEQ ID NO: 202724 - DNA, 25 bp, Artificial
  probe
  misc_feature (1)..(25): SEQ ID NO: 7065; WAN024FEB-M_at; Start 370; Stop 394
ttctctacaacatgtaccgtacggg

SEQ ID NO: 202725 - DNA, 25 bp, Artificial
  probe
  misc_feature (1)..(25): SEQ ID NO: 7065; WAN024FEB-M_at; Start 86; Stop 110
tgttgatgcccttgccttggaacgc

SEQ ID NO: 202726 - DNA, 25 bp, Artificial
  probe
  misc_feature (1)..(25): SEQ ID NO: 7065; WAN024FEB-M_at; Start 439; Stop 463
tcaaacaagatttcttgccatcagg

SEQ ID NO: 202727 - DNA, 25 bp, Artificial
  probe
  misc_feature (1)..(25): SEQ ID NO: 7065; WAN024FEB-M_at; Start 59; Stop 83
gactttggctcgtaaggctacagaa

SEQ ID NO: 202728 - DNA, 25 bp, Artificial
  probe
  misc_feature (1)..(25): SEQ ID NO: 7065; WAN024FEB-M_at; Start 198; Stop 222
cagcaagctgctgaaggaattttcg

SEQ ID NO: 202729 - DNA, 25 bp, Artificial
  probe
  misc_feature (1)..(25): SEQ ID NO: 7065; WAN024FEB-M_at; Start 21; Stop 45
caacagttaatcaaacaacaagtgg

SEQ ID NO: 202730 - DNA, 25 bp, Artificial
  probe
  misc_feature (1)..(25): SEQ ID NO: 7065; WAN024FEB-M_at; Start 5; Stop 29
gggctctaccttgacccaacagtta

SEQ ID NO: 202731 - DNA, 25 bp, Artificial
  probe
  misc_feature (1)..(25): SEQ ID NO: 7065; WAN024FEB-M_at; Start 340; Stop 364
tagagcttggtttgaagcgggccaa

SEQ ID NO: 202732 - DNA, 25 bp, Artificial
  probe
  misc_feature (1)..(25): SEQ ID NO: 7065; WAN024FEB-M_at; Start 158; Stop 182
ctttggtcgaaatcataaaggacag

SEQ ID NO: 202733 - DNA, 25 bp, Artificial
  probe
  misc_feature (1)..(25): SEQ ID NO: 7065; WAN024FEB-M_at; Start 261; Stop 285
ttcctagcaggtttgccccagagtc

SEQ ID NO: 202734 - DNA, 25 bp, Artificial
  probe
  misc_feature (1)..(25): SEQ ID NO: 7065; WAN024FEB-M_at; Start 508; Stop 532
tggctgaagcgacagatcgcatgta

SEQ ID NO: 202735 - DNA, 25 bp, Artificial
  probe
  misc_feature (1)..(25): SEQ ID NO: 7065; WAN024FEB-M_at; Start 112; Stop 136
gcatgagtaaggatgaaatcttgac

SEQ ID NO: 202736 - DNA, 25 bp, Artificial
  probe
  misc_feature (1)..(25): SEQ ID NO: 7065; WAN024FEB-M_at; Start 77; Stop 101
tacagaaattgttgatgcccttgcc

SEQ ID NO: 202737 - DNA, 25 bp, Artificial
  probe
  misc_feature (1)..(25): SEQ ID NO: 5692; WAN024FEC_at; Start 152; Stop 176
tggtacttgaacctttcttgccagg

SEQ ID NO: 202738 - DNA, 25 bp, Artificial
  probe
  misc_feature (1)..(25): SEQ ID NO: 5692; WAN024FEC_at; Start 125; Stop 149
ctgacttatctaaggttttagattt

SEQ ID NO: 202739 - DNA, 25 bp, Artificial
  probe
  misc_feature (1)..(25): SEQ ID NO: 5692; WAN024FEC_at; Start 166; Stop 190
ttcttgccaggtctagctgattttt

SEQ ID NO: 202740 - DNA, 25 bp, Artificial
  probe
  misc_feature (1)..(25): SEQ ID NO: 5692; WAN024FEC_at; Start 94; Stop 118
tttatactcagtaaaatagctggga

SEQ ID NO: 202741 - DNA, 25 bp, Artificial
  probe
  misc_feature (1)..(25): SEQ ID NO: 5692; WAN024FEC_at; Start 156; Stop 180
acttgaacctttcttgccaggtcta

SEQ ID NO: 202742 - DNA, 25 bp, Artificial
  probe
  misc_feature (1)..(25): SEQ ID NO: 5692; WAN024FEC_at; Start 154; Stop 178
gtacttgaacctttcttgccaggtc

SEQ ID NO: 202743 - DNA, 25 bp, Artificial
  probe
  misc_feature (1)..(25): SEQ ID NO: 5692; WAN024FEC_at; Start 161; Stop 185
aacctttcttgccaggtctagctga

SEQ ID NO: 202744 - DNA, 25 bp, Artificial
  probe
  misc_feature (1)..(25): SEQ ID NO: 5692; WAN024FEC_at; Start 157; Stop 181
cttgaacctttcttgccaggtctag

SEQ ID NO: 202745 - DNA, 25 bp, Artificial
  probe
  misc_feature (1)..(25): SEQ ID NO: 5692; WAN024FEC_at; Start 162; Stop 186
acctttcttgccaggtctagctgat

SEQ ID NO: 202746 - DNA, 25 bp, Artificial
  probe
  misc_feature (1)..(25): SEQ ID NO: 5692; WAN024FEC_at; Start 155; Stop 179
tacttgaacctttcttgccaggtct

SEQ ID NO: 202747 - DNA, 25 bp, Artificial
  probe
  misc_feature (1)..(25): SEQ ID NO: 5692; WAN024FEC_at; Start 164; Stop 188
ctttcttgccaggtctagctgattt

SEQ ID NO: 202748 - DNA, 25 bp, Artificial
  probe
  misc_feature (1)..(25): SEQ ID NO: 5692; WAN024FEC_at; Start 98; Stop 122
tactcagtaaaatagctgggaaaat

SEQ ID NO: 202749 - DNA, 25 bp, Artificial
  probe
  misc_feature (1)..(25): SEQ ID NO: 5692; WAN024FEC_at; Start 53; Stop 77
ctcctagaaaaccgagtacaaagag

SEQ ID NO: 202750 - DNA, 25 bp, Artificial
  probe
  misc_feature (1)..(25): SEQ ID NO: 5692; WAN024FEC_at; Start 163; Stop 187
cctttcttgccaggtctagctgatt

SEQ ID NO: 202751 - DNA, 25 bp, Artificial
  probe
  misc_feature (1)..(25): SEQ ID NO: 5692; WAN024FEC_at; Start 48; Stop 72
cattcctcctagaaaaccgagtaca

SEQ ID NO: 202752 - DNA, 25 bp, Artificial
  probe
  misc_feature (1)..(25): SEQ ID NO: 5692; WAN024FEC_at; Start 158; Stop 182
ttgaacctttcttgccaggtctagc

SEQ ID NO: 202753 - DNA, 25 bp, Artificial
  probe
  misc_feature (1)..(25): SEQ ID NO: 5692; WAN024FEC_at; Start 151; Stop 175
ttggtacttgaacctttcttgccag

SEQ ID NO: 202754 - DNA, 25 bp, Artificial
  probe
  misc_feature (1)..(25): SEQ ID NO: 5692; WAN024FEC_at; Start 44; Stop 68
ccaacattcctcctagaaaaccgag

SEQ ID NO: 202755 - DNA, 25 bp, Artificial
  probe
  misc_feature (1)..(25): SEQ ID NO: 5692; WAN024FEC_at; Start 206; Stop 230
gctggaaaaattccagcatttttcg

SEQ ID NO: 202756 - DNA, 25 bp, Artificial
  probe
  misc_feature (1)..(25): SEQ ID NO: 5692; WAN024FEC_at; Start 96; Stop 120
tatactcagtaaaatagctgggaaa

SEQ ID NO: 202757 - DNA, 25 bp, Artificial
  probe
  misc_feature (1)..(25): SEQ ID NO: 5692; WAN024FEC_at; Start 159; Stop 183
tgaacctttcttgccaggtctagct

SEQ ID NO: 202758 - DNA, 25 bp, Artificial
  probe
  misc_feature (1)..(25): SEQ ID NO: 5692; WAN024FEC_at; Start 83; Stop 107
taaataaggcttttatactcagtaa

SEQ ID NO: 202759 - DNA, 25 bp, Artificial
  probe
  misc_feature (1)..(25): SEQ ID NO: 5692; WAN024FEC_at; Start 80; Stop 104
agttaaataaggcttttatactcag

SEQ ID NO: 202760 - DNA, 25 bp, Artificial
  probe
  misc_feature (1)..(25): SEQ ID NO: 5692; WAN024FEC_at; Start 199; Stop 223
tgtttttgctggaaaaattccagca

SEQ ID NO: 202761 - DNA, 25 bp, Artificial
  probe
  misc_feature (1)..(25): SEQ ID NO: 5692; WAN024FEC_at; Start 45; Stop 69
caacattcctcctagaaaaccgagt

SEQ ID NO: 202762 - DNA, 25 bp, Artificial
  probe
  misc_feature (1)..(25): SEQ ID NO: 5692; WAN024FEC_at; Start 39; Stop 63
agctcccaacattcctcctagaaaa

SEQ ID NO: 202763 - DNA, 25 bp, Artificial
  probe
  misc_feature (1)..(25): SEQ ID NO: 5692; WAN024FEC_at; Start 150; Stop 174
tttggtacttgaacctttcttgcca

SEQ ID NO: 202764 - DNA, 25 bp, Artificial
  probe
  misc_feature (1)..(25): SEQ ID NO: 5692; WAN024FEC_at; Start 218; Stop 242
ccagcatttttcgttttaattcatt

SEQ ID NO: 202765 - DNA, 25 bp, Artificial
  probe
  misc_feature (1)..(25): SEQ ID NO: 5692; WAN024FEC_at; Start 171; Stop 195
gccaggtctagctgattttttattt

SEQ ID NO: 202766 - DNA, 25 bp, Artificial
  probe
  misc_feature (1)..(25): SEQ ID NO: 5692; WAN024FEC_at; Start 168; Stop 192
cttgccaggtctagctgatttttta

SEQ ID NO: 202767 - DNA, 25 bp, Artificial
  probe
  misc_feature (1)..(25): SEQ ID NO: 5692; WAN024FEC_at; Start 216; Stop 240
ttccagcatttttcgttttaattca

SEQ ID NO: 202768 - DNA, 25 bp, Artificial
  probe
  misc_feature (1)..(25): SEQ ID NO: 5692; WAN024FEC_at; Start 172; Stop 196
ccaggtctagctgattttttatttt

SEQ ID NO: 202769 - DNA, 25 bp, Artificial
  probe
  misc_feature (1)..(25): SEQ ID NO: 5692; WAN024FEC_at; Start 27; Stop 51
caaagcaatcccagctcccaacatt

SEQ ID NO: 202770 - DNA, 25 bp, Artificial
  probe
  misc_feature (1)..(25): SEQ ID NO: 5692; WAN024FEC_at; Start 99; Stop 123
actcagtaaaatagctgggaaaatg

SEQ ID NO: 202771 - DNA, 25 bp, Artificial
  probe
  misc_feature (1)..(25): SEQ ID NO: 2468; WAN024FED_at; Start 274; Stop 298
tcactctctatggaagcaatcaccg

SEQ ID NO: 202772 - DNA, 25 bp, Artificial
  probe
  misc_feature (1)..(25): SEQ ID NO: 2468; WAN024FED_at; Start 10; Stop 34
tccaaggcaagagcatccacaatct

SEQ ID NO: 202773 - DNA, 25 bp, Artificial
  probe
  misc_feature (1)..(25): SEQ ID NO: 2468; WAN024FED_at; Start 32; Stop 56
tctctgccgccttacgagccaaggt

SEQ ID NO: 202774 - DNA, 25 bp, Artificial
  probe
  misc_feature (1)..(25): SEQ ID NO: 2468; WAN024FED_at; Start 7; Stop 31
cgttccaaggcaagagcatccacaa

SEQ ID NO: 202775 - DNA, 25 bp, Artificial
  probe
  misc_feature (1)..(25): SEQ ID NO: 2468; WAN024FED_at; Start 165; Stop 189
cttgggtactacacccttatgttct

SEQ ID NO: 202776 - DNA, 25 bp, Artificial
  probe
  misc_feature (1)..(25): SEQ ID NO: 2468; WAN024FED_at; Start 230; Stop 254
gattttccgaaatttgctcagatga

SEQ ID NO: 202777 - DNA, 25 bp, Artificial
  probe
  misc_feature (1)..(25): SEQ ID NO: 2468; WAN024FED_at; Start 179; Stop 203
ccttatgttctttaaagtgttcatc

SEQ ID NO: 202778 - DNA, 25 bp, Artificial
  probe
  misc_feature (1)..(25): SEQ ID NO: 2468; WAN024FED_at; Start 288; Stop 312
agcaatcaccgtcccgtccgaatag

SEQ ID NO: 202779 - DNA, 25 bp, Artificial
  probe
  misc_feature (1)..(25): SEQ ID NO: 2468; WAN024FED_at; Start 192; Stop 216
aaagtgttcatcttctgtcgcaatg

SEQ ID NO: 202780 - DNA, 25 bp, Artificial
  probe
  misc_feature (1)..(25): SEQ ID NO: 2468; WAN024FED_at; Start 252; Stop 276
tgagatagaagtgcgcaacaaatca

SEQ ID NO: 202781 - DNA, 25 bp, Artificial
  probe
  misc_feature (1)..(25): SEQ ID NO: 2468; WAN024FED_at; Start 267; Stop 291
caacaaatcactctctatggaagca

SEQ ID NO: 202782 - DNA, 25 bp, Artificial
  probe
  misc_feature (1)..(25): SEQ ID NO: 2468; WAN024FED_at; Start 161; Stop 185
ccgccttgggtactacacccttatg

SEQ ID NO: 202783 - DNA, 25 bp, Artificial
  probe
  misc_feature (1)..(25): SEQ ID NO: 2468; WAN024FED_at; Start 248; Stop 272
cagatgagatagaagtgcgcaacaa

SEQ ID NO: 202784 - DNA, 25 bp, Artificial
  probe
  misc_feature (1)..(25): SEQ ID NO: 2468; WAN024FED_at; Start 72; Stop 96
cacctgctgtttaattagttgctgg

SEQ ID NO: 202785 - DNA, 25 bp, Artificial
  probe
  misc_feature (1)..(25): SEQ ID NO: 2468; WAN024FED_at; Start 77; Stop 101
gctgtttaattagttgctgggtcaa

SEQ ID NO: 202786 - DNA, 25 bp, Artificial
  probe
  misc_feature (1)..(25): SEQ ID NO: 2468; WAN024FED_at; Start 16; Stop 40
gcaagagcatccacaatctctgccg

SEQ ID NO: 202787 - DNA, 25 bp, Artificial
  probe
  misc_feature (1)..(25): SEQ ID NO: 2468; WAN024FED_at; Start 207; Stop 231
tgtcgcaatgatagccttcttcaga

SEQ ID NO: 202788 - DNA, 25 bp, Artificial
  probe
  misc_feature (1)..(25): SEQ ID NO: 2468; WAN024FED_at; Start 245; Stop 269
gctcagatgagatagaagtgcgcaa

SEQ ID NO: 202789 - DNA, 25 bp, Artificial
  probe
  misc_feature (1)..(25): SEQ ID NO: 2468; WAN024FED_at; Start 235; Stop 259
tccgaaatttgctcagatgagatag

SEQ ID NO: 202790 - DNA, 25 bp, Artificial
  probe
  misc_feature (1)..(25): SEQ ID NO: 2468; WAN024FED_at; Start 270; Stop 294
caaatcactctctatggaagcaatc

SEQ ID NO: 202791 - DNA, 25 bp, Artificial
  probe
  misc_feature (1)..(25): SEQ ID NO: 2468; WAN024FED_at; Start 257; Stop 281
tagaagtgcgcaacaaatcactctc

SEQ ID NO: 202792 - DNA, 25 bp, Artificial
  probe
  misc_feature (1)..(25): SEQ ID NO: 2468; WAN024FED_at; Start 155; Stop 179
gaatcaccgccttgggtactacacc

SEQ ID NO: 202793 - DNA, 25 bp, Artificial
  probe
  misc_feature (1)..(25): SEQ ID NO: 2468; WAN024FED_at; Start 280; Stop 304
tctatggaagcaatcaccgtcccgt

SEQ ID NO: 202794 - DNA, 25 bp, Artificial
  probe
  misc_feature (1)..(25): SEQ ID NO: 2468; WAN024FED_at; Start 263; Stop 287
tgcgcaacaaatcactctctatgga

SEQ ID NO: 202795 - DNA, 25 bp, Artificial
  probe
  misc_feature (1)..(25): SEQ ID NO: 2468; WAN024FED_at; Start 216; Stop 240
gatagccttcttcagattttccgaa

SEQ ID NO: 202796 - DNA, 25 bp, Artificial
  probe
  misc_feature (1)..(25): SEQ ID NO: 2468; WAN024FED_at; Start 132; Stop 156
tacaaatttccccaaggtcgcacga

SEQ ID NO: 202797 - DNA, 25 bp, Artificial
  probe
  misc_feature (1)..(25): SEQ ID NO: 2468; WAN024FED_at; Start 136; Stop 160
aatttccccaaggtcgcacgaatca

SEQ ID NO: 202798 - DNA, 25 bp, Artificial
  probe
  misc_feature (1)..(25): SEQ ID NO: 2468; WAN024FED_at; Start 145; Stop 169
aaggtcgcacgaatcaccgccttgg

SEQ ID NO: 202799 - DNA, 25 bp, Artificial
  probe
  misc_feature (1)..(25): SEQ ID NO: 2468; WAN024FED_at; Start 87; Stop 111
tagttgctgggtcaaggttgaaccc

SEQ ID NO: 202800 - DNA, 25 bp, Artificial
  probe
  misc_feature (1)..(25): SEQ ID NO: 2468; WAN024FED_at; Start 2; Stop 26
tggcgcgttccaaggcaagagcatc

SEQ ID NO: 202801 - DNA, 25 bp, Artificial
  probe
  misc_feature (1)..(25): SEQ ID NO: 2468; WAN024FED_at; Start 202; Stop 226
tcttctgtcgcaatgatagccttct

SEQ ID NO: 202802 - DNA, 25 bp, Artificial
  probe
  misc_feature (1)..(25): SEQ ID NO: 2468; WAN024FED_at; Start 148; Stop 172
gtcgcacgaatcaccgccttgggta

SEQ ID NO: 202803 - DNA, 25 bp, Artificial
  probe
  misc_feature (1)..(25): SEQ ID NO: 2468; WAN024FED_at; Start 66; Stop 90
cccaaccacctgctgtttaattagt

SEQ ID NO: 202804 - DNA, 25 bp, Artificial
  probe
  misc_feature (1)..(25): SEQ ID NO: 2468; WAN024FED_at; Start 40; Stop 64
gccttacgagccaaggtcggcgcat

SEQ ID NO: 202805 - DNA, 25 bp, Artificial
  probe
  misc_feature (1)..(25): SEQ ID NO: 3244; WAN024FEE-3_at; Start 604; Stop 628
gtcacaggttcgactgttaccagct

SEQ ID NO: 202806 - DNA, 25 bp, Artificial
  probe
  misc_feature (1)..(25): SEQ ID NO: 3244; WAN024FEE-3_at; Start 38; Stop 62
gtattgaagtcacagttgcccagca

SEQ ID NO: 202807 - DNA, 25 bp, Artificial
  probe
  misc_feature (1)..(25): SEQ ID NO: 3244; WAN024FEE-3_at; Start 742; Stop 766
tccagctccagcagttcaagtagta

SEQ ID NO: 202808 - DNA, 25 bp, Artificial
  probe
  misc_feature (1)..(25): SEQ ID NO: 3244; WAN024FEE-3_at; Start 410; Stop 434
cattgtcacgtagagcaggttattc

SEQ ID NO: 202809 - DNA, 25 bp, Artificial
  probe
  misc_feature (1)..(25): SEQ ID NO: 3244; WAN024FEE-3_at; Start 340; Stop 364
aatatgtggctcatgctttcgacac

SEQ ID NO: 202810 - DNA, 25 bp, Artificial
  probe
  misc_feature (1)..(25): SEQ ID NO: 3244; WAN024FEE-3_at; Start 25; Stop 49
ccaatgggtggtggtattgaagtca

SEQ ID NO: 202811 - DNA, 25 bp, Artificial
  probe
  misc_feature (1)..(25): SEQ ID NO: 3244; WAN024FEE-3_at; Start 284; Stop 308
ctactctggctaatgcagattggat

SEQ ID NO: 202812 - DNA, 25 bp, Artificial
  probe
  misc_feature (1)..(25): SEQ ID NO: 3244; WAN024FEE-3_at; Start 94; Stop 118
ggagtttatcatcagaagcatgtga

SEQ ID NO: 202813 - DNA, 25 bp, Artificial
  probe
  misc_feature (1)..(25): SEQ ID NO: 3244; WAN024FEE-3_at; Start 538; Stop 562
tcggaagtcttgaaatcaacaggtc

SEQ ID NO: 202814 - DNA, 25 bp, Artificial
  probe
  misc_feature (1)..(25): SEQ ID NO: 3244; WAN024FEE-3_at; Start 758; Stop 782
caagtagtagttctagcgatagcag

SEQ ID NO: 202815 - DNA, 25 bp, Artificial
  probe
  misc_feature (1)..(25): SEQ ID NO: 3244; WAN024FEE-3_at; Start 471; Stop 495
gattcagcaagcttccccaagcatt

SEQ ID NO: 202816 - DNA, 25 bp, Artificial
  probe
  misc_feature (1)..(25): SEQ ID NO: 3244; WAN024FEE-3_at; Start 50; Stop 74
cagttgcccagcataccaatggcta

SEQ ID NO: 202817 - DNA, 25 bp, Artificial
  probe
  misc_feature (1)..(25): SEQ ID NO: 3244; WAN024FEE-3_at; Start 177; Stop 201
tcaagtctattcaaaagctactgcg

SEQ ID NO: 202818 - DNA, 25 bp, Artificial
  probe
  misc_feature (1)..(25): SEQ ID NO: 3244; WAN024FEE-3_at; Start 402; Stop 426
taatcattcattgtcacgtagagca

SEQ ID NO: 202819 - DNA, 25 bp, Artificial
  probe
  misc_feature (1)..(25): SEQ ID NO: 3244; WAN024FEE-3_at; Start 60; Stop 84
gcataccaatggctatcagacctta

SEQ ID NO: 202820 - DNA, 25 bp, Artificial
  probe
  misc_feature (1)..(25): SEQ ID NO: 3244; WAN024FEE-3_at; Start 523; Stop 547
cctagtgtagtgaaatcggaagtct

SEQ ID NO: 202821 - DNA, 25 bp, Artificial
  probe
  misc_feature (1)..(25): SEQ ID NO: 3244; WAN024FEE-3_at; Start 724; Stop 748
gggagtctaccaactccatccagct

SEQ ID NO: 202822 - DNA, 25 bp, Artificial
  probe
  misc_feature (1)..(25): SEQ ID NO: 3244; WAN024FEE-3_at; Start 777; Stop 801
tagcagtaactcaagtactacacga

SEQ ID NO: 202823 - DNA, 25 bp, Artificial
  probe
  misc_feature (1)..(25): SEQ ID NO: 3244; WAN024FEE-3_at; Start 327; Stop 351
caaccaagacgaaaatatgtggctc

SEQ ID NO: 202824 - DNA, 25 bp, Artificial
  probe
  misc_feature (1)..(25): SEQ ID NO: 3244; WAN024FEE-3_at; Start 433; Stop 457
tctaataactctaattacatggctc

SEQ ID NO: 202825 - DNA, 25 bp, Artificial
  probe
  misc_feature (1)..(25): SEQ ID NO: 3244; WAN024FEE-3_at; Start 115; Stop 139
gtgatttcaaagattgaagcagcag

SEQ ID NO: 202826 - DNA, 25 bp, Artificial
  probe
  misc_feature (1)..(25): SEQ ID NO: 3244; WAN024FEE-3_at; Start 238; Stop 262
tctcgtgtgacaacaaccttcaagt

SEQ ID NO: 202827 - DNA, 25 bp, Artificial
  probe
  misc_feature (1)..(25): SEQ ID NO: 3244; WAN024FEE-3_at; Start 510; Stop 534
ctttgctttagatcctagtgtagtg

SEQ ID NO: 202828 - DNA, 25 bp, Artificial
  probe
  misc_feature (1)..(25): SEQ ID NO: 3244; WAN024FEE-3_at; Start 193; Stop 217
gctactgcgacgattatgcagggat

SEQ ID NO: 202829 - DNA, 25 bp, Artificial
  probe
  misc_feature (1)..(25): SEQ ID NO: 3244; WAN024FEE-3_at; Start 792; Stop 816
tactacacgaccttcttcaagggcg

SEQ ID NO: 202830 - DNA, 25 bp, Artificial
  probe
  misc_feature (1)..(25): SEQ ID NO: 3244; WAN024FEE-3_at; Start 73; Stop 97
tatcagaccttagctaataatggag

SEQ ID NO: 202831 - DNA, 25 bp, Artificial
  probe
  misc_feature (1)..(25): SEQ ID NO: 3244; WAN024FEE-3_at; Start 300; Stop 324
agattggattgggaagactggtaca

SEQ ID NO: 202832 - DNA, 25 bp, Artificial
  probe
  misc_feature (1)..(25): SEQ ID NO: 3244; WAN024FEE-3_at; Start 210; Stop 234
gcagggattgctacgagaagttcta

SEQ ID NO: 202833 - DNA, 25 bp, Artificial
  probe
  misc_feature (1)..(25): SEQ ID NO: 3244; WAN024FEE-3_at; Start 387; Stop 411
gattgggcatgatgataatcattca

SEQ ID NO: 202834 - DNA, 25 bp, Artificial
  probe
  misc_feature (1)..(25): SEQ ID NO: 3244; WAN024FEE-3_at; Start 149; Stop 173
tggtgtatgagtatcaggataaacc

SEQ ID NO: 202835 - DNA, 25 bp, Artificial
  probe
  misc_feature (1)..(25): SEQ ID NO: 3244; WAN024FEE-3_at; Start 683; Stop 707
gaagtgatgcggattatcagaatgc

SEQ ID NO: 202836 - DNA, 25 bp, Artificial
  probe
  misc_feature (1)..(25): SEQ ID NO: 3244; WAN024FEE-3_at; Start 700; Stop 724
cagaatgcttggtctagtattgtgg

SEQ ID NO: 202837 - DNA, 25 bp, Artificial
  probe
  misc_feature (1)..(25): SEQ ID NO: 3244; WAN024FEE-3_at; Start 315; Stop 339
gactggtacaaccaaccaagacgaa

SEQ ID NO: 202838 - DNA, 25 bp, Artificial
  probe
  misc_feature (1)..(25): SEQ ID NO: 3244; WAN024FEE-3_at; Start 614; Stop 638
cgactgttaccagctattgggctaa

SEQ ID NO: 202839 - DNA, 25 bp, Artificial
  probe
  misc_feature (1)..(25): SEQ ID NO: 3968; WAN024FEE-5_at; Start 654; Stop 678
taaagatgagattttaacgacctat

SEQ ID NO: 202840 - DNA, 25 bp, Artificial
  probe
  misc_feature (1)..(25): SEQ ID NO: 3968; WAN024FEE-5_at; Start 391; Stop 415
tctatctcatctgagcaaatttcgg

SEQ ID NO: 202841 - DNA, 25 bp, Artificial
  probe
  misc_feature (1)..(25): SEQ ID NO: 3968; WAN024FEE-5_at; Start 732; Stop 756
tcggcaagcagctgagggaattttc

SEQ ID NO: 202842 - DNA, 25 bp, Artificial
  probe
  misc_feature (1)..(25): SEQ ID NO: 3968; WAN024FEE-5_at; Start 771; Stop 795
tcagttgactgttcctcaagcagca

SEQ ID NO: 202843 - DNA, 25 bp, Artificial
  probe
  misc_feature (1)..(25): SEQ ID NO: 3968; WAN024FEE-5_at; Start 588; Stop 612
tgcgccgaccttggctcgtaaggcg

SEQ ID NO: 202844 - DNA, 25 bp, Artificial
  probe
  misc_feature (1)..(25): SEQ ID NO: 3968; WAN024FEE-5_at; Start 353; Stop 377
cggtgattgcttccatagagagtga

SEQ ID NO: 202845 - DNA, 25 bp, Artificial
  probe
  misc_feature (1)..(25): SEQ ID NO: 3968; WAN024FEE-5_at; Start 94; Stop 118
cctggcaagaaaggttcaagtacca

SEQ ID NO: 202846 - DNA, 25 bp, Artificial
  probe
  misc_feature (1)..(25): SEQ ID NO: 3968; WAN024FEE-5_at; Start 448; Stop 472
gatgaacactttaaagaacataagg

SEQ ID NO: 202847 - DNA, 25 bp, Artificial
  probe
  misc_feature (1)..(25): SEQ ID NO: 3968; WAN024FEE-5_at; Start 75; Stop 99
aaataaaaaatcagctagacctggc

SEQ ID NO: 202848 - DNA, 25 bp, Artificial
  probe
  misc_feature (1)..(25): SEQ ID NO: 3968; WAN024FEE-5_at; Start 479; Stop 503
tacccaaggcggtgattcgtgcgac

SEQ ID NO: 202849 - DNA, 25 bp, Artificial
  probe
  misc_feature (1)..(25): SEQ ID NO: 3968; WAN024FEE-5_at; Start 693; Stop 717
ctttggccgaaataataagggacag

SEQ ID NO: 202850 - DNA, 25 bp, Artificial
  probe
  misc_feature (1)..(25): SEQ ID NO: 3968; WAN024FEE-5_at; Start 797; Stop 821
ttttagcaggacttccacagagtcc

SEQ ID NO: 202851 - DNA, 25 bp, Artificial
  probe
  misc_feature (1)..(25): SEQ ID NO: 3968; WAN024FEE-5_at; Start 85; Stop 109
tcagctagacctggcaagaaaggtt

SEQ ID NO: 202852 - DNA, 25 bp, Artificial
  probe
  misc_feature (1)..(25): SEQ ID NO: 3968; WAN024FEE-5_at; Start 309; Stop 333
caaggacatctcttctatttcagag

SEQ ID NO: 202853 - DNA, 25 bp, Artificial
  probe
  misc_feature (1)..(25): SEQ ID NO: 3968; WAN024FEE-5_at; Start 411; Stop 435
ttcggaaaatctgaagaaggctatc

SEQ ID NO: 202854 - DNA, 25 bp, Artificial
  probe
  misc_feature (1)..(25): SEQ ID NO: 3968; WAN024FEE-5_at; Start 749; Stop 773
gaattttcggtgtagatgccagtca

SEQ ID NO: 202855 - DNA, 25 bp, Artificial
  probe
  misc_feature (1)..(25): SEQ ID NO: 3968; WAN024FEE-5_at; Start 198; Stop 222
tgtactcggttttctaggaggaatg

SEQ ID NO: 202856 - DNA, 25 bp, Artificial
  probe
  misc_feature (1)..(25): SEQ ID NO: 3968; WAN024FEE-5_at; Start 340; Stop 364
tattcggacgggacggtgattgctt

SEQ ID NO: 202857 - DNA, 25 bp, Artificial
  probe
  misc_feature (1)..(25): SEQ ID NO: 3968; WAN024FEE-5_at; Start 121; Stop 145
aaatctaaaaccttagataagtcag

SEQ ID NO: 202858 - DNA, 25 bp, Artificial
  probe
  misc_feature (1)..(25): SEQ ID NO: 3968; WAN024FEE-5_at; Start 611; Stop 635
cggcagagattgtggatgctcttgc

SEQ ID NO: 202859 - DNA, 25 bp, Artificial
  probe
  misc_feature (1)..(25): SEQ ID NO: 3968; WAN024FEE-5_at; Start 435; Stop 459
cattgcgacagaagatgaacacttt

SEQ ID NO: 202860 - DNA, 25 bp, Artificial
  probe
  misc_feature (1)..(25): SEQ ID NO: 3968; WAN024FEE-5_at; Start 397; Stop 421
tcatctgagcaaatttcggaaaatc

SEQ ID NO: 202861 - DNA, 25 bp, Artificial
  probe
  misc_feature (1)..(25): SEQ ID NO: 3968; WAN024FEE-5_at; Start 247; Stop 271
tacggagtggccttatttgacaagg

SEQ ID NO: 202862 - DNA, 25 bp, Artificial
  probe
  misc_feature (1)..(25): SEQ ID NO: 3968; WAN024FEE-5_at; Start 756; Stop 780
cggtgtagatgccagtcagttgact

SEQ ID NO: 202863 - DNA, 25 bp, Artificial
  probe
  misc_feature (1)..(25): SEQ ID NO: 3968; WAN024FEE-5_at; Start 281; Stop 305
ctcagacagaagaattggtgaatca

SEQ ID NO: 202864 - DNA, 25 bp, Artificial
  probe
  misc_feature (1)..(25): SEQ ID NO: 3968; WAN024FEE-5_at; Start 364; Stop 388
tccatagagagtgatttgttgcgca

SEQ ID NO: 202865 - DNA, 25 bp, Artificial
  probe
  misc_feature (1)..(25): SEQ ID NO: 3968; WAN024FEE-5_at; Start 329; Stop 353
cagagattacctattcggacgggac

SEQ ID NO: 202866 - DNA, 25 bp, Artificial
  probe
  misc_feature (1)..(25): SEQ ID NO: 3968; WAN024FEE-5_at; Start 596; Stop 620
ccttggctcgtaaggcggcagagat

SEQ ID NO: 202867 - DNA, 25 bp, Artificial
  probe
  misc_feature (1)..(25): SEQ ID NO: 3968; WAN024FEE-5_at; Start 152; Stop 176
tcccagctattttactgagtataaa

SEQ ID NO: 202868 - DNA, 25 bp, Artificial
  probe
  misc_feature (1)..(25): SEQ ID NO: 3968; WAN024FEE-5_at; Start 423; Stop 447
gaagaaggctatcattgcgacagaa

SEQ ID NO: 202869 - DNA, 25 bp, Artificial
  probe
  misc_feature (1)..(25): SEQ ID NO: 3968; WAN024FEE-5_at; Start 698; Stop 722
gccgaaataataagggacagaatat

SEQ ID NO: 202870 - DNA, 25 bp, Artificial
  probe
  misc_feature (1)..(25): SEQ ID NO: 3968; WAN024FEE-5_at; Start 787; Stop 811
caagcagcatttttagcaggacttc

SEQ ID NO: 202871 - DNA, 25 bp, Artificial
  probe
  misc_feature (1)..(25): SEQ ID NO: 3968; WAN024FEE-5_at; Start 252; Stop 276
agtggccttatttgacaaggttcgg

SEQ ID NO: 202872 - DNA, 25 bp, Artificial
  probe
  misc_feature (1)..(25): SEQ ID NO: 3968; WAN024FEE-5_at; Start 296; Stop 320
tggtgaatcaggtcaaggacatctc

SEQ ID NO: 202873 - DNA, 25 bp, Artificial
  probe
  misc_feature (1)..(25): SEQ ID NO: 4474; WAN024FEE-M_at; Start 37; Stop 61
gagtgatgaagacctagaaattggc

SEQ ID NO: 202874 - DNA, 25 bp, Artificial
  probe
  misc_feature (1)..(25): SEQ ID NO: 4474; WAN024FEE-M_at; Start 590; Stop 614
tacggtattgctattgaccagggct

SEQ ID NO: 202875 - DNA, 25 bp, Artificial
  probe
  misc_feature (1)..(25): SEQ ID NO: 4474; WAN024FEE-M_at; Start 49; Stop 73
cctagaaattggcttaagacgggct

SEQ ID NO: 202876 - DNA, 25 bp, Artificial
  probe
  misc_feature (1)..(25): SEQ ID NO: 4474; WAN024FEE-M_at; Start 618; Stop 642
tgggaagtgaaacgattctatctaa

SEQ ID NO: 202877 - DNA, 25 bp, Artificial
  probe
  misc_feature (1)..(25): SEQ ID NO: 4474; WAN024FEE-M_at; Start 272; Stop 296
tccgctaaggagttgaaaaatgagg

SEQ ID NO: 202878 - DNA, 25 bp, Artificial
  probe
  misc_feature (1)..(25): SEQ ID NO: 4474; WAN024FEE-M_at; Start 28; Stop 52
ggagttgaagagtgatgaagaccta

SEQ ID NO: 202879 - DNA, 25 bp, Artificial
  probe
  misc_feature (1)..(25): SEQ ID NO: 4474; WAN024FEE-M_at; Start 66; Stop 90
gacgggctaaggcagttctttacag

SEQ ID NO: 202880 - DNA, 25 bp, Artificial
  probe
  misc_feature (1)..(25): SEQ ID NO: 4474; WAN024FEE-M_at; Start 430; Stop 454
cgatggaacaggtcgtgtagaagta

SEQ ID NO: 202881 - DNA, 25 bp, Artificial
  probe
  misc_feature (1)..(25): SEQ ID NO: 4474; WAN024FEE-M_at; Start 670; Stop 694
tccgattatgtatgctaatagcaag

SEQ ID NO: 202882 - DNA, 25 bp, Artificial
  probe
  misc_feature (1)..(25): SEQ ID NO: 4474; WAN024FEE-M_at; Start 542; Stop 566
tttgataccaaacgttcgccagctt

SEQ ID NO: 202883 - DNA, 25 bp, Artificial
  probe
  misc_feature (1)..(25): SEQ ID NO: 4474; WAN024FEE-M_at; Start 183; Stop 207
caggaatttcacgagactatttata

SEQ ID NO: 202884 - DNA, 25 bp, Artificial
  probe
  misc_feature (1)..(25): SEQ ID NO: 4474; WAN024FEE-M_at; Start 248; Stop 272
tatctagctcagagagacaatgtct

SEQ ID NO: 202885 - DNA, 25 bp, Artificial
  probe
  misc_feature (1)..(25): SEQ ID NO: 4474; WAN024FEE-M_at; Start 784; Stop 808
tgttgatgtcaagggttatatggaa

SEQ ID NO: 202886 - DNA, 25 bp, Artificial
  probe
  misc_feature (1)..(25): SEQ ID NO: 4474; WAN024FEE-M_at; Start 220; Stop 244
ggcagaagctcaagaacgtatgtat

SEQ ID NO: 202887 - DNA, 25 bp, Artificial
  probe
  misc_feature (1)..(25): SEQ ID NO: 4474; WAN024FEE-M_at; Start 402; Stop 426
cggttgctgattatggctatctttt

SEQ ID NO: 202888 - DNA, 25 bp, Artificial
  probe
  misc_feature (1)..(25): SEQ ID NO: 4474; WAN024FEE-M_at; Start 376; Stop 400
gaaaattcattctgccatgcaaagt

SEQ ID NO: 202889 - DNA, 25 bp, Artificial
  probe
  misc_feature (1)..(25): SEQ ID NO: 4474; WAN024FEE-M_at; Start 155; Stop 179
caggactttttaccatcgggcacgg

SEQ ID NO: 202890 - DNA, 25 bp, Artificial
  probe
  misc_feature (1)..(25): SEQ ID NO: 4474; WAN024FEE-M_at; Start 204; Stop 228
tatactttacaactttggcagaagc

SEQ ID NO: 202891 - DNA, 25 bp, Artificial
  probe
  misc_feature (1)..(25): SEQ ID NO: 4474; WAN024FEE-M_at; Start 499; Stop 523
tgtaggtggtcgtaattatcaagaa

SEQ ID NO: 202892 - DNA, 25 bp, Artificial
  probe
  misc_feature (1)..(25): SEQ ID NO: 4474; WAN024FEE-M_at; Start 443; Stop 467
cgtgtagaagtagggaatgtcttga

SEQ ID NO: 202893 - DNA, 25 bp, Artificial
  probe
  misc_feature (1)..(25): SEQ ID NO: 4474; WAN024FEE-M_at; Start 321; Stop 345
tggcagccaaggaaattgaaaatgg

SEQ ID NO: 202894 - DNA, 25 bp, Artificial
  probe
  misc_feature (1)..(25): SEQ ID NO: 4474; WAN024FEE-M_at; Start 100; Stop 124
tacaggtgcattaagcaaagacgag

SEQ ID NO: 202895 - DNA, 25 bp, Artificial
  probe
  misc_feature (1)..(25): SEQ ID NO: 4474; WAN024FEE-M_at; Start 119; Stop 143
gacgagtattctcagtacaaggatt

SEQ ID NO: 202896 - DNA, 25 bp, Artificial
  probe
  misc_feature (1)..(25): SEQ ID NO: 4474; WAN024FEE-M_at; Start 552; Stop 576
aacgttcgccagcttctactaccaa

SEQ ID NO: 202897 - DNA, 25 bp, Artificial
  probe
  misc_feature (1)..(25): SEQ ID NO: 4474; WAN024FEE-M_at; Start 475; Stop 499
ccaaacaggtgctattctaggcttt

SEQ ID NO: 202898 - DNA, 25 bp, Artificial
  probe
  misc_feature (1)..(25): SEQ ID NO: 4474; WAN024FEE-M_at; Start 304; Stop 328
gaagttttatcgagatttggcagcc

SEQ ID NO: 202899 - DNA, 25 bp, Artificial
  probe
  misc_feature (1)..(25): SEQ ID NO: 4474; WAN024FEE-M_at; Start 347; Stop 371
ggttataagattactactaccatag

SEQ ID NO: 202900 - DNA, 25 bp, Artificial
  probe
  misc_feature (1)..(25): SEQ ID NO: 4474; WAN024FEE-M_at; Start 259; Stop 283
gagagacaatgtctccgctaaggag

SEQ ID NO: 202901 - DNA, 25 bp, Artificial
  probe
  misc_feature (1)..(25): SEQ ID NO: 4474; WAN024FEE-M_at; Start 361; Stop 385
tactaccatagatcagaaaattcat

SEQ ID NO: 202902 - DNA, 25 bp, Artificial
  probe
  misc_feature (1)..(25): SEQ ID NO: 4474; WAN024FEE-M_at; Start 798; Stop 822
gttatatggaaaagatgggttacga

SEQ ID NO: 202903 - DNA, 25 bp, Artificial
  probe
  misc_feature (1)..(25): SEQ ID NO: 4474; WAN024FEE-M_at; Start 417; Stop 441
gctatcttttagacgatggaacagg

SEQ ID NO: 202904 - DNA, 25 bp, Artificial
  probe
  misc_feature (1)..(25): SEQ ID NO: 4474; WAN024FEE-M_at; Start 563; Stop 587
gcttctactaccaagcccttgctgg

SEQ ID NO: 202905 - DNA, 25 bp, Artificial
  probe
  misc_feature (1)..(25): SEQ ID NO: 4474; WAN024FEE-M_at; Start 606; Stop 630
accagggcttgatgggaagtgaaac

SEQ ID NO: 202906 - DNA, 25 bp, Artificial
  probe
  misc_feature (1)..(25): SEQ ID NO: 4474; WAN024FEE-M_at; Start 651; Stop 675
caaactttgctaatggcaatccgat

SEQ ID NO: 202907 - DNA, 25 bp, Artificial
  probe
  misc_feature (1)..(25): SEQ ID NO: 4249; WAN024FEF_at; Start 106; Stop 130
gaatttgagcctttgacggtggtca

SEQ ID NO: 202908 - DNA, 25 bp, Artificial
  probe
  misc_feature (1)..(25): SEQ ID NO: 4249; WAN024FEF_at; Start 129; Stop 153
caataaaaatccagatgaggacatt

SEQ ID NO: 202909 - DNA, 25 bp, Artificial
  probe
  misc_feature (1)..(25): SEQ ID NO: 4249; WAN024FEF_at; Start 102; Stop 126
tgatgaatttgagcctttgacggtg

SEQ ID NO: 202910 - DNA, 25 bp, Artificial
  probe
  misc_feature (1)..(25): SEQ ID NO: 4249; WAN024FEF_at; Start 75; Stop 99
tttaaaggactacatgaagaaggta

SEQ ID NO: 202911 - DNA, 25 bp, Artificial
  probe
  misc_feature (1)..(25): SEQ ID NO: 4249; WAN024FEF_at; Start 23; Stop 47
taaaacgaggtatggttatggaagc

SEQ ID NO: 202912 - DNA, 25 bp, Artificial
  probe
  misc_feature (1)..(25): SEQ ID NO: 4249; WAN024FEF_at; Start 66; Stop 90
ccgaaatcatttaaaggactacatg

SEQ ID NO: 202913 - DNA, 25 bp, Artificial
  probe
  misc_feature (1)..(25): SEQ ID NO: 4249; WAN024FEF_at; Start 46; Stop 70
gcagtcctttactcaacattccgaa

SEQ ID NO: 202914 - DNA, 25 bp, Artificial
  probe
  misc_feature (1)..(25): SEQ ID NO: 4249; WAN024FEF_at; Start 19; Stop 43
gagctaaaacgaggtatggttatgg

SEQ ID NO: 202915 - DNA, 25 bp, Artificial
  probe
  misc_feature (1)..(25): SEQ ID NO: 4249; WAN024FEF_at; Start 118; Stop 142
ttgacggtggtcaataaaaatccag

SEQ ID NO: 202916 - DNA, 25 bp, Artificial
  probe
  misc_feature (1)..(25): SEQ ID NO: 4249; WAN024FEF_at; Start 28; Stop 52
cgaggtatggttatggaagcagtcc

SEQ ID NO: 202917 - DNA, 25 bp, Artificial
  probe
  misc_feature (1)..(25): SEQ ID NO: 4249; WAN024FEF_at; Start 132; Stop 156
taaaaatccagatgaggacattgta

SEQ ID NO: 202918 - DNA, 25 bp, Artificial
  probe
  misc_feature (1)..(25): SEQ ID NO: 4249; WAN024FEF_at; Start 47; Stop 71
cagtcctttactcaacattccgaaa

SEQ ID NO: 202919 - DNA, 25 bp, Artificial
  probe
  misc_feature (1)..(25): SEQ ID NO: 4249; WAN024FEF_at; Start 84; Stop 108
ctacatgaagaaggtaaatgatgaa

SEQ ID NO: 202920 - DNA, 25 bp, Artificial
  probe
  misc_feature (1)..(25): SEQ ID NO: 4249; WAN024FEF_at; Start 42; Stop 66
ggaagcagtcctttactcaacattc

SEQ ID NO: 202921 - DNA, 25 bp, Artificial
  probe
  misc_feature (1)..(25): SEQ ID NO: 4249; WAN024FEF_at; Start 73; Stop 97
catttaaaggactacatgaagaagg

SEQ ID NO: 202922 - DNA, 25 bp, Artificial
  probe
  misc_feature (1)..(25): SEQ ID NO: 4249; WAN024FEF_at; Start 6; Stop 30
taatagtggaaaagagctaaaacga

SEQ ID NO: 202923 - DNA, 25 bp, Artificial
  probe
  misc_feature (1)..(25): SEQ ID NO: 4249; WAN024FEF_at; Start 100; Stop 124
aatgatgaatttgagcctttgacgg

SEQ ID NO: 202924 - DNA, 25 bp, Artificial
  probe
  misc_feature (1)..(25): SEQ ID NO: 4249; WAN024FEF_at; Start 93; Stop 117
gaaggtaaatgatgaatttgagcct

SEQ ID NO: 202925 - DNA, 25 bp, Artificial
  probe
  misc_feature (1)..(25): SEQ ID NO: 4249; WAN024FEF_at; Start 50; Stop 74
tcctttactcaacattccgaaatca

SEQ ID NO: 202926 - DNA, 25 bp, Artificial
  probe
  misc_feature (1)..(25): SEQ ID NO: 4249; WAN024FEF_at; Start 77; Stop 101
taaaggactacatgaagaaggtaaa

SEQ ID NO: 202927 - DNA, 25 bp, Artificial
  probe
  misc_feature (1)..(25): SEQ ID NO: 4249; WAN024FEF_at; Start 105; Stop 129
tgaatttgagcctttgacggtggtc

SEQ ID NO: 202928 - DNA, 25 bp, Artificial
  probe
  misc_feature (1)..(25): SEQ ID NO: 4249; WAN024FEF_at; Start 25; Stop 49
aaacgaggtatggttatggaagcag

SEQ ID NO: 202929 - DNA, 25 bp, Artificial
  probe
  misc_feature (1)..(25): SEQ ID NO: 4249; WAN024FEF_at; Start 82; Stop 106
gactacatgaagaaggtaaatgatg

SEQ ID NO: 202930 - DNA, 25 bp, Artificial
  probe
  misc_feature (1)..(25): SEQ ID NO: 4249; WAN024FEF_at; Start 39; Stop 63
tatggaagcagtcctttactcaaca

SEQ ID NO: 202931 - DNA, 25 bp, Artificial
  probe
  misc_feature (1)..(25): SEQ ID NO: 4249; WAN024FEF_at; Start 44; Stop 68
aagcagtcctttactcaacattccg

SEQ ID NO: 202932 - DNA, 25 bp, Artificial
  probe
  misc_feature (1)..(25): SEQ ID NO: 4249; WAN024FEF_at; Start 12; Stop 36
tggaaaagagctaaaacgaggtatg

SEQ ID NO: 202933 - DNA, 25 bp, Artificial
  probe
  misc_feature (1)..(25): SEQ ID NO: 4249; WAN024FEF_at; Start 107; Stop 131
aatttgagcctttgacggtggtcaa

SEQ ID NO: 202934 - DNA, 25 bp, Artificial
  probe
  misc_feature (1)..(25): SEQ ID NO: 4249; WAN024FEF_at; Start 33; Stop 57
tatggttatggaagcagtcctttac

SEQ ID NO: 202935 - DNA, 25 bp, Artificial
  probe
  misc_feature (1)..(25): SEQ ID NO: 4249; WAN024FEF_at; Start 36; Stop 60
ggttatggaagcagtcctttactca

SEQ ID NO: 202936 - DNA, 25 bp, Artificial
  probe
  misc_feature (1)..(25): SEQ ID NO: 4249; WAN024FEF_at; Start 1; Stop 25
gtgtataatagtggaaaagagctaa

SEQ ID NO: 202937 - DNA, 25 bp, Artificial
  probe
  misc_feature (1)..(25): SEQ ID NO: 4249; WAN024FEF_at; Start 62; Stop 86
cattccgaaatcatttaaaggacta

SEQ ID NO: 202938 - DNA, 25 bp, Artificial
  probe
  misc_feature (1)..(25): SEQ ID NO: 4249; WAN024FEF_at; Start 58; Stop 82
tcaacattccgaaatcatttaaagg

SEQ ID NO: 202939 - DNA, 25 bp, Artificial
  probe
  misc_feature (1)..(25): SEQ ID NO: 4249; WAN024FEF_at; Start 112; Stop 136
gagcctttgacggtggtcaataaaa

SEQ ID NO: 202940 - DNA, 25 bp, Artificial
  probe
  misc_feature (1)..(25): SEQ ID NO: 4249; WAN024FEF_at; Start 134; Stop 158
aaaatccagatgaggacattgtagt

SEQ ID NO: 202941 - DNA, 25 bp, Artificial
  probe
  misc_feature (1)..(25): SEQ ID NO: 4500; WAN024FEG_at; Start 125; Stop 149
tatcgagtcaggaaagtacttacaa

SEQ ID NO: 202942 - DNA, 25 bp, Artificial
  probe
  misc_feature (1)..(25): SEQ ID NO: 4500; WAN024FEG_at; Start 158; Stop 182
tcctgaaaaaggtattcgctttata

SEQ ID NO: 202943 - DNA, 25 bp, Artificial
  probe
  misc_feature (1)..(25): SEQ ID NO: 4500; WAN024FEG_at; Start 105; Stop 129
tctcgtttcggcagagattatatcg

SEQ ID NO: 202944 - DNA, 25 bp, Artificial
  probe
  misc_feature (1)..(25): SEQ ID NO: 4500; WAN024FEG_at; Start 216; Stop 240
gatgttagcgatatccatttaaggt

SEQ ID NO: 202945 - DNA, 25 bp, Artificial
  probe
  misc_feature (1)..(25): SEQ ID NO: 4500; WAN024FEG_at; Start 50; Stop 74
tatgattgatgacctgaataaagga

SEQ ID NO: 202946 - DNA, 25 bp, Artificial
  probe
  misc_feature (1)..(25): SEQ ID NO: 4500; WAN024FEG_at; Start 219; Stop 243
gttagcgatatccatttaaggtttg

SEQ ID NO: 202947 - DNA, 25 bp, Artificial
  probe
  misc_feature (1)..(25): SEQ ID NO: 4500; WAN024FEG_at; Start 207; Stop 231
gataatgcggatgttagcgatatcc

SEQ ID NO: 202948 - DNA, 25 bp, Artificial
  probe
  misc_feature (1)..(25): SEQ ID NO: 4500; WAN024FEG_at; Start 174; Stop 198
cgctttatatctgtaaatgataact

SEQ ID NO: 202949 - DNA, 25 bp, Artificial
  probe
  misc_feature (1)..(25): SEQ ID NO: 4500; WAN024FEG_at; Start 128; Stop 152
cgagtcaggaaagtacttacaaaag

SEQ ID NO: 202950 - DNA, 25 bp, Artificial
  probe
  misc_feature (1)..(25): SEQ ID NO: 4500; WAN024FEG_at; Start 123; Stop 147
tatatcgagtcaggaaagtacttac

SEQ ID NO: 202951 - DNA, 25 bp, Artificial
  probe
  misc_feature (1)..(25): SEQ ID NO: 4500; WAN024FEG_at; Start 112; Stop 136
tcggcagagattatatcgagtcagg

SEQ ID NO: 202952 - DNA, 25 bp, Artificial
  probe
  misc_feature (1)..(25): SEQ ID NO: 4500; WAN024FEG_at; Start 120; Stop 144
gattatatcgagtcaggaaagtact

SEQ ID NO: 202953 - DNA, 25 bp, Artificial
  probe
  misc_feature (1)..(25): SEQ ID NO: 4500; WAN024FEG_at; Start 85; Stop 109
tcattatggtaaaagatttatctcg

SEQ ID NO: 202954 - DNA, 25 bp, Artificial
  probe
  misc_feature (1)..(25): SEQ ID NO: 4500; WAN024FEG_at; Start 201; Stop 225
gatagtgataatgcggatgttagcg

SEQ ID NO: 202955 - DNA, 25 bp, Artificial
  probe
  misc_feature (1)..(25): SEQ ID NO: 4500; WAN024FEG_at; Start 95; Stop 119
aaaagatttatctcgtttcggcaga

SEQ ID NO: 202956 - DNA, 25 bp, Artificial
  probe
  misc_feature (1)..(25): SEQ ID NO: 4500; WAN024FEG_at; Start 29; Stop 53
tgagcgaccaaattttaagaatatg

SEQ ID NO: 202957 - DNA, 25 bp, Artificial
  probe
  misc_feature (1)..(25): SEQ ID NO: 4500; WAN024FEG_at; Start 168; Stop 192
ggtattcgctttatatctgtaaatg

SEQ ID NO: 202958 - DNA, 25 bp, Artificial
  probe
  misc_feature (1)..(25): SEQ ID NO: 4500; WAN024FEG_at; Start 194; Stop 218
taactatgatagtgataatgcggat

SEQ ID NO: 202959 - DNA, 25 bp, Artificial
  probe
  misc_feature (1)..(25): SEQ ID NO: 4500; WAN024FEG_at; Start 17; Stop 41
tggttctaattttgagcgaccaaat

SEQ ID NO: 202960 - DNA, 25 bp, Artificial
  probe
  misc_feature (1)..(25): SEQ ID NO: 4500; WAN024FEG_at; Start 72; Stop 96
ggaaagttttctatcattatggtaa

SEQ ID NO: 202961 - DNA, 25 bp, Artificial
  probe
  misc_feature (1)..(25): SEQ ID NO: 4500; WAN024FEG_at; Start 39; Stop 63
aattttaagaatatgattgatgacc

SEQ ID NO: 202962 - DNA, 25 bp, Artificial
  probe
  misc_feature (1)..(25): SEQ ID NO: 4500; WAN024FEG_at; Start 14; Stop 38
tagtggttctaattttgagcgacca

SEQ ID NO: 202963 - DNA, 25 bp, Artificial
  probe
  misc_feature (1)..(25): SEQ ID NO: 4500; WAN024FEG_at; Start 213; Stop 237
gcggatgttagcgatatccatttaa

SEQ ID NO: 202964 - DNA, 25 bp, Artificial
  probe
  misc_feature (1)..(25): SEQ ID NO: 4500; WAN024FEG_at; Start 97; Stop 121
aagatttatctcgtttcggcagaga

SEQ ID NO: 202965 - DNA, 25 bp, Artificial
  probe
  misc_feature (1)..(25): SEQ ID NO: 4500; WAN024FEG_at; Start 12; Stop 36
tatagtggttctaattttgagcgac

SEQ ID NO: 202966 - DNA, 25 bp, Artificial
  probe
  misc_feature (1)..(25): SEQ ID NO: 4500; WAN024FEG_at; Start 108; Stop 132
cgtttcggcagagattatatcgagt

SEQ ID NO: 202967 - DNA, 25 bp, Artificial
  probe
  misc_feature (1)..(25): SEQ ID NO: 4500; WAN024FEG_at; Start 164; Stop 188
aaaaggtattcgctttatatctgta

SEQ ID NO: 202968 - DNA, 25 bp, Artificial
  probe
  misc_feature (1)..(25): SEQ ID NO: 4500; WAN024FEG_at; Start 223; Stop 247
gcgatatccatttaaggtttgttta

SEQ ID NO: 202969 - DNA, 25 bp, Artificial
  probe
  misc_feature (1)..(25): SEQ ID NO: 4500; WAN024FEG_at; Start 115; Stop 139
gcagagattatatcgagtcaggaaa

SEQ ID NO: 202970 - DNA, 25 bp, Artificial
  probe
  misc_feature (1)..(25): SEQ ID NO: 4500; WAN024FEG_at; Start 1; Stop 25
tagatgatggatatagtggttctaa

SEQ ID NO: 202971 - DNA, 25 bp, Artificial
  probe
  misc_feature (1)..(25): SEQ ID NO: 4500; WAN024FEG_at; Start 56; Stop 80
tgatgacctgaataaaggaaagttt

SEQ ID NO: 202972 - DNA, 25 bp, Artificial
  probe
  misc_feature (1)..(25): SEQ ID NO: 4500; WAN024FEG_at; Start 132; Stop 156
tcaggaaagtacttacaaaagatat

SEQ ID NO: 202973 - DNA, 25 bp, Artificial
  probe
  misc_feature (1)..(25): SEQ ID NO: 4500; WAN024FEG_at; Start 209; Stop 233
taatgcggatgttagcgatatccat

SEQ ID NO: 202974 - DNA, 25 bp, Artificial
  probe
  misc_feature (1)..(25): SEQ ID NO: 4500; WAN024FEG_at; Start 44; Stop 68
taagaatatgattgatgacctgaat

SEQ ID NO: 202975 - DNA, 25 bp, Artificial
  probe
  misc_feature (1)..(25): SEQ ID NO: 2091; WAN024FEH_at; Start 26; Stop 50
caatgatgacggcaaaaacagcaat

SEQ ID NO: 202976 - DNA, 25 bp, Artificial
  probe
  misc_feature (1)..(25): SEQ ID NO: 2091; WAN024FEH_at; Start 20; Stop 44
ctaaaccaatgatgacggcaaaaac

SEQ ID NO: 202977 - DNA, 25 bp, Artificial
  probe
  misc_feature (1)..(25): SEQ ID NO: 2091; WAN024FEH_at; Start 14; Stop 38
caatgactaaaccaatgatgacggc

SEQ ID NO: 202978 - DNA, 25 bp, Artificial
  probe
  misc_feature (1)..(25): SEQ ID NO: 2091; WAN024FEH_at; Start 41; Stop 65
aaacagcaatcgcaagcgacatgat

SEQ ID NO: 202979 - DNA, 25 bp, Artificial
  probe
  misc_feature (1)..(25): SEQ ID NO: 2091; WAN024FEH_at; Start 119; Stop 143
cattctaccataaaaaagtgatttt

SEQ ID NO: 202980 - DNA, 25 bp, Artificial
  probe
  misc_feature (1)..(25): SEQ ID NO: 2091; WAN024FEH_at; Start 15; Stop 39
aatgactaaaccaatgatgacggca

SEQ ID NO: 202981 - DNA, 25 bp, Artificial
  probe
  misc_feature (1)..(25): SEQ ID NO: 2091; WAN024FEH_at; Start 12; Stop 36
tccaatgactaaaccaatgatgacg

SEQ ID NO: 202982 - DNA, 25 bp, Artificial
  probe
  misc_feature (1)..(25): SEQ ID NO: 2091; WAN024FEH_at; Start 18; Stop 42
gactaaaccaatgatgacggcaaaa

SEQ ID NO: 202983 - DNA, 25 bp, Artificial
  probe
  misc_feature (1)..(25): SEQ ID NO: 2091; WAN024FEH_at; Start 35; Stop 59
cggcaaaaacagcaatcgcaagcga

SEQ ID NO: 202984 - DNA, 25 bp, Artificial
  probe
  misc_feature (1)..(25): SEQ ID NO: 2091; WAN024FEH_at; Start 29; Stop 53
tgatgacggcaaaaacagcaatcgc

SEQ ID NO: 202985 - DNA, 25 bp, Artificial
  probe
  misc_feature (1)..(25): SEQ ID NO: 2091; WAN024FEH_at; Start 30; Stop 54
gatgacggcaaaaacagcaatcgca

SEQ ID NO: 202986 - DNA, 25 bp, Artificial
  probe
  misc_feature (1)..(25): SEQ ID NO: 2091; WAN024FEH_at; Start 44; Stop 68
cagcaatcgcaagcgacatgatttc

SEQ ID NO: 202987 - DNA, 25 bp, Artificial
  probe
  misc_feature (1)..(25): SEQ ID NO: 2091; WAN024FEH_at; Start 82; Stop 106
cattttattgttattccgaatgaca

SEQ ID NO: 202988 - DNA, 25 bp, Artificial
  probe
  misc_feature (1)..(25): SEQ ID NO: 2091; WAN024FEH_at; Start 56; Stop 80
gcgacatgatttccatgtttttacc

SEQ ID NO: 202989 - DNA, 25 bp, Artificial
  probe
  misc_feature (1)..(25): SEQ ID NO: 2091; WAN024FEH_at; Start 60; Stop 84
catgatttccatgtttttacctcat

SEQ ID NO: 202990 - DNA, 25 bp, Artificial
  probe
  misc_feature (1)..(25): SEQ ID NO: 2091; WAN024FEH_at; Start 38; Stop 62
caaaaacagcaatcgcaagcgacat

SEQ ID NO: 202991 - DNA, 25 bp, Artificial
  probe
  misc_feature (1)..(25): SEQ ID NO: 2091; WAN024FEH_at; Start 50; Stop 74
tcgcaagcgacatgatttccatgtt

SEQ ID NO: 202992 - DNA, 25 bp, Artificial
  probe
  misc_feature (1)..(25): SEQ ID NO: 2091; WAN024FEH_at; Start 32; Stop 56
tgacggcaaaaacagcaatcgcaag

SEQ ID NO: 202993 - DNA, 25 bp, Artificial
  probe
  misc_feature (1)..(25): SEQ ID NO: 2091; WAN024FEH_at; Start 103; Stop 127
gacatacattcttttacattctacc

SEQ ID NO: 202994 - DNA, 25 bp, Artificial
  probe
  misc_feature (1)..(25): SEQ ID NO: 2091; WAN024FEH_at; Start 87; Stop 111
tattgttattccgaatgacatacat

SEQ ID NO: 202995 - DNA, 25 bp, Artificial
  probe
  misc_feature (1)..(25): SEQ ID NO: 2091; WAN024FEH_at; Start 21; Stop 45
taaaccaatgatgacggcaaaaaca

SEQ ID NO: 202996 - DNA, 25 bp, Artificial
  probe
  misc_feature (1)..(25): SEQ ID NO: 2091; WAN024FEH_at; Start 17; Stop 41
tgactaaaccaatgatgacggcaaa

SEQ ID NO: 202997 - DNA, 25 bp, Artificial
  probe
  misc_feature (1)..(25): SEQ ID NO: 2091; WAN024FEH_at; Start 52; Stop 76
gcaagcgacatgatttccatgtttt

SEQ ID NO: 202998 - DNA, 25 bp, Artificial
  probe
  misc_feature (1)..(25): SEQ ID NO: 2091; WAN024FEH_at; Start 77; Stop 101
tacctcattttattgttattccgaa

SEQ ID NO: 202999 - DNA, 25 bp, Artificial
  probe
  misc_feature (1)..(25): SEQ ID NO: 2091; WAN024FEH_at; Start 3; Stop 27
gctgacatatccaatgactaaacca

SEQ ID NO: 203000 - DNA, 25 bp, Artificial
  probe
  misc_feature (1)..(25): SEQ ID NO: 2091; WAN024FEH_at; Start 2; Stop 26
tgctgacatatccaatgactaaacc

SEQ ID NO: 203001 - DNA, 25 bp, Artificial
  probe
  misc_feature (1)..(25): SEQ ID NO: 2091; WAN024FEH_at; Start 90; Stop 114
tgttattccgaatgacatacattct

SEQ ID NO: 203002 - DNA, 25 bp, Artificial
  probe
  misc_feature (1)..(25): SEQ ID NO: 2091; WAN024FEH_at; Start 115; Stop 139
tttacattctaccataaaaaagtga

SEQ ID NO: 203003 - DNA, 25 bp, Artificial
  probe
  misc_feature (1)..(25): SEQ ID NO: 2091; WAN024FEH_at; Start 48; Stop 72
aatcgcaagcgacatgatttccatg

SEQ ID NO: 203004 - DNA, 25 bp, Artificial
  probe
  misc_feature (1)..(25): SEQ ID NO: 2091; WAN024FEH_at; Start 6; Stop 30
gacatatccaatgactaaaccaatg

SEQ ID NO: 203005 - DNA, 25 bp, Artificial
  probe
  misc_feature (1)..(25): SEQ ID NO: 2091; WAN024FEH_at; Start 46; Stop 70
gcaatcgcaagcgacatgatttcca

SEQ ID NO: 203006 - DNA, 25 bp, Artificial
  probe
  misc_feature (1)..(25): SEQ ID NO: 2091; WAN024FEH_at; Start 23; Stop 47
aaccaatgatgacggcaaaaacagc

SEQ ID NO: 203007 - DNA, 25 bp, Artificial
  probe
  misc_feature (1)..(25): SEQ ID NO: 2091; WAN024FEH_at; Start 36; Stop 60
ggcaaaaacagcaatcgcaagcgac

SEQ ID NO: 203008 - DNA, 25 bp, Artificial
  probe
  misc_feature (1)..(25): SEQ ID NO: 2091; WAN024FEH_at; Start 33; Stop 57
gacggcaaaaacagcaatcgcaagc

SEQ ID NO: 203009 - DNA, 25 bp, Artificial
  probe
  misc_feature (1)..(25): SEQ ID NO: 3963; WAN024FEI_at; Start 52; Stop 76
gatacgaatttcacgtcctgcttga

SEQ ID NO: 203010 - DNA, 25 bp, Artificial
  probe
  misc_feature (1)..(25): SEQ ID NO: 3963; WAN024FEI_at; Start 319; Stop 343
aacgtggctaccttcaacctcatgg

SEQ ID NO: 203011 - DNA, 25 bp, Artificial
  probe
  misc_feature (1)..(25): SEQ ID NO: 3963; WAN024FEI_at; Start 146; Stop 170
tagctttcaagagactcactacgag

SEQ ID NO: 203012 - DNA, 25 bp, Artificial
  probe
  misc_feature (1)..(25): SEQ ID NO: 3963; WAN024FEI_at; Start 115; Stop 139
aatttcttccaaatcatggagacgc

SEQ ID NO: 203013 - DNA, 25 bp, Artificial
  probe
  misc_feature (1)..(25): SEQ ID NO: 3963; WAN024FEI_at; Start 242; Stop 266
tctccgtggtgactagcaatcgtat

SEQ ID NO: 203014 - DNA, 25 bp, Artificial
  probe
  misc_feature (1)..(25): SEQ ID NO: 3963; WAN024FEI_at; Start 197; Stop 221
tctgctgcagcgacgataactgcta

SEQ ID NO: 203015 - DNA, 25 bp, Artificial
  probe
  misc_feature (1)..(25): SEQ ID NO: 3963; WAN024FEI_at; Start 163; Stop 187
actacgagcacctggacgggctgcg

SEQ ID NO: 203016 - DNA, 25 bp, Artificial
  probe
  misc_feature (1)..(25): SEQ ID NO: 3963; WAN024FEI_at; Start 102; Stop 126
caaagccgttagcaatttcttccaa

SEQ ID NO: 203017 - DNA, 25 bp, Artificial
  probe
  misc_feature (1)..(25): SEQ ID NO: 3963; WAN024FEI_at; Start 388; Stop 412
aagagccgcattttcaccaagttcg

SEQ ID NO: 203018 - DNA, 25 bp, Artificial
  probe
  misc_feature (1)..(25): SEQ ID NO: 3963; WAN024FEI_at; Start 416; Stop 440
gccatgataccagccaacttagcaa

SEQ ID NO: 203019 - DNA, 25 bp, Artificial
  probe
  misc_feature (1)..(25): SEQ ID NO: 3963; WAN024FEI_at; Start 190; Stop 214
caaggcatctgctgcagcgacgata

SEQ ID NO: 203020 - DNA, 25 bp, Artificial
  probe
  misc_feature (1)..(25): SEQ ID NO: 3963; WAN024FEI_at; Start 453; Stop 477
ggcgcaaaacattttgtccatatga

SEQ ID NO: 203021 - DNA, 25 bp, Artificial
  probe
  misc_feature (1)..(25): SEQ ID NO: 3963; WAN024FEI_at; Start 38; Stop 62
cctggattgaccatgatacgaattt

SEQ ID NO: 203022 - DNA, 25 bp, Artificial
  probe
  misc_feature (1)..(25): SEQ ID NO: 3963; WAN024FEI_at; Start 75; Stop 99
gaagggcaaagctagtttgcactcc

SEQ ID NO: 203023 - DNA, 25 bp, Artificial
  probe
  misc_feature (1)..(25): SEQ ID NO: 3963; WAN024FEI_at; Start 62; Stop 86
tcacgtcctgcttgaagggcaaagc

SEQ ID NO: 203024 - DNA, 25 bp, Artificial
  probe
  misc_feature (1)..(25): SEQ ID NO: 3963; WAN024FEI_at; Start 211; Stop 235
gataactgctatcacgctctcagct

SEQ ID NO: 203025 - DNA, 25 bp, Artificial
  probe
  misc_feature (1)..(25): SEQ ID NO: 3963; WAN024FEI_at; Start 3; Stop 27
gagccaagattgtgactttgtcgtc

SEQ ID NO: 203026 - DNA, 25 bp, Artificial
  probe
  misc_feature (1)..(25): SEQ ID NO: 3963; WAN024FEI_at; Start 364; Stop 388
gtgaaggaatccagcacgacgggca

SEQ ID NO: 203027 - DNA, 25 bp, Artificial
  probe
  misc_feature (1)..(25): SEQ ID NO: 3963; WAN024FEI_at; Start 256; Stop 280
agcaatcgtattcaccacaactggg

SEQ ID NO: 203028 - DNA, 25 bp, Artificial
  probe
  misc_feature (1)..(25): SEQ ID NO: 3963; WAN024FEI_at; Start 354; Stop 378
tcccgatatcgtgaaggaatccagc

SEQ ID NO: 203029 - DNA, 25 bp, Artificial
  probe
  misc_feature (1)..(25): SEQ ID NO: 3963; WAN024FEI_at; Start 342; Stop 366
ggtcaatggctttcccgatatcgtg

SEQ ID NO: 203030 - DNA, 25 bp, Artificial
  probe
  misc_feature (1)..(25): SEQ ID NO: 3963; WAN024FEI_at; Start 290; Stop 314
tacttacgggccaattccataccga

SEQ ID NO: 203031 - DNA, 25 bp, Artificial
  probe
  misc_feature (1)..(25): SEQ ID NO: 3963; WAN024FEI_at; Start 403; Stop 427
accaagttcgctcgccatgatacca

SEQ ID NO: 203032 - DNA, 25 bp, Artificial
  probe
  misc_feature (1)..(25): SEQ ID NO: 3963; WAN024FEI_at; Start 334; Stop 358
aacctcatggtcaatggctttcccg

SEQ ID NO: 203033 - DNA, 25 bp, Artificial
  probe
  misc_feature (1)..(25): SEQ ID NO: 3963; WAN024FEI_at; Start 305; Stop 329
tccataccgatttcaacgtggctac

SEQ ID NO: 203034 - DNA, 25 bp, Artificial
  probe
  misc_feature (1)..(25): SEQ ID NO: 3963; WAN024FEI_at; Start 228; Stop 252
tctcagcttcaacatctccgtggtg

SEQ ID NO: 203035 - DNA, 25 bp, Artificial
  probe
  misc_feature (1)..(25): SEQ ID NO: 3963; WAN024FEI_at; Start 129; Stop 153
catggagacgcttgatgtagctttc

SEQ ID NO: 203036 - DNA, 25 bp, Artificial
  probe
  misc_feature (1)..(25): SEQ ID NO: 3963; WAN024FEI_at; Start 154; Stop 178
aagagactcactacgagcacctgga

SEQ ID NO: 203037 - DNA, 25 bp, Artificial
  probe
  misc_feature (1)..(25): SEQ ID NO: 3963; WAN024FEI_at; Start 377; Stop 401
gcacgacgggcaagagccgcatttt

SEQ ID NO: 203038 - DNA, 25 bp, Artificial
  probe
  misc_feature (1)..(25): SEQ ID NO: 3963; WAN024FEI_at; Start 178; Stop 202
acgggctgcgctcaaggcatctgct

SEQ ID NO: 203039 - DNA, 25 bp, Artificial
  probe
  misc_feature (1)..(25): SEQ ID NO: 3963; WAN024FEI_at; Start 438; Stop 462
caacctcaatcgaatggcgcaaaac

SEQ ID NO: 203040 - DNA, 25 bp, Artificial
  probe
  misc_feature (1)..(25): SEQ ID NO: 3963; WAN024FEI_at; Start 89; Stop 113
gtttgcactccttcaaagccgttag

SEQ ID NO: 203041 - DNA, 25 bp, Artificial
  probe
  misc_feature (1)..(25): SEQ ID NO: 3963; WAN024FEI_at; Start 24; Stop 48
cgtccttgatttttcctggattgac

SEQ ID NO: 203042 - DNA, 25 bp, Artificial
  probe
  misc_feature (1)..(25): SEQ ID NO: 3963; WAN024FEI_at; Start 431; Stop 455
aacttagcaacctcaatcgaatggc

SEQ ID NO: 203043 - DNA, 25 bp, Artificial
  probe
  misc_feature (1)..(25): SEQ ID NO: 4704; WAN024FEJ-3_at; Start 219; Stop 243
tagcagttatcgtcgctgcagcaga

SEQ ID NO: 203044 - DNA, 25 bp, Artificial
  probe
  misc_feature (1)..(25): SEQ ID NO: 4704; WAN024FEJ-3_at; Start 38; Stop 62
gaaaatgcggctcttgcccgtcgtg

SEQ ID NO: 203045 - DNA, 25 bp, Artificial
  probe
  misc_feature (1)..(25): SEQ ID NO: 4704; WAN024FEJ-3_at; Start 338; Stop 362
gaaggagtgcaaactagctttgccc

SEQ ID NO: 203046 - DNA, 25 bp, Artificial
  probe
  misc_feature (1)..(25): SEQ ID NO: 4704; WAN024FEJ-3_at; Start 190; Stop 214
ccacggagatgttgaagctgagagc

SEQ ID NO: 203047 - DNA, 25 bp, Artificial
  probe
  misc_feature (1)..(25): SEQ ID NO: 4704; WAN024FEJ-3_at; Start 327; Stop 351
ctaacggctttgaaggagtgcaaac

SEQ ID NO: 203048 - DNA, 25 bp, Artificial
  probe
  misc_feature (1)..(25): SEQ ID NO: 4704; WAN024FEJ-3_at; Start 486; Stop 510
tcaaggtaaccgtgattcgcgagct

SEQ ID NO: 203049 - DNA, 25 bp, Artificial
  probe
  misc_feature (1)..(25): SEQ ID NO: 4704; WAN024FEJ-3_at; Start 473; Stop 497
tatccaggaaatatcaaggtaaccg

SEQ ID NO: 203050 - DNA, 25 bp, Artificial
  probe
  misc_feature (1)..(25): SEQ ID NO: 4704; WAN024FEJ-3_at; Start 175; Stop 199
tacgattgctagtcaccacggagat

SEQ ID NO: 203051 - DNA, 25 bp, Artificial
  probe
  misc_feature (1)..(25): SEQ ID NO: 4704; WAN024FEJ-3_at; Start 412; Stop 436
ggacgacaaagtcacaatcttggct

SEQ ID NO: 203052 - DNA, 25 bp, Artificial
  probe
  misc_feature (1)..(25): SEQ ID NO: 4704; WAN024FEJ-3_at; Start 106; Stop 130
tgaaggtagccacgttgaaatcggt

SEQ ID NO: 203053 - DNA, 25 bp, Artificial
  probe
  misc_feature (1)..(25): SEQ ID NO: 4704; WAN024FEJ-3_at; Start 365; Stop 389
caagcaggacgtgaaattcgtatca

SEQ ID NO: 203054 - DNA, 25 bp, Artificial
  probe
  misc_feature (1)..(25): SEQ ID NO: 4704; WAN024FEJ-3_at; Start 427; Stop 451
aatcttggctcacaaagttcgtaag

SEQ ID NO: 203055 - DNA, 25 bp, Artificial
  probe
  misc_feature (1)..(25): SEQ ID NO: 4704; WAN024FEJ-3_at; Start 94; Stop 118
tgaccatgaggttgaaggtagccac

SEQ ID NO: 203056 - DNA, 25 bp, Artificial
  probe
  misc_feature (1)..(25): SEQ ID NO: 4704; WAN024FEJ-3_at; Start 354; Stop 378
gctttgcccttcaagcaggacgtga

SEQ ID NO: 203057 - DNA, 25 bp, Artificial
  probe
  misc_feature (1)..(25): SEQ ID NO: 4704; WAN024FEJ-3_at; Start 132; Stop 156
tggaattggcccgtaagtacaagga

SEQ ID NO: 203058 - DNA, 25 bp, Artificial
  probe
  misc_feature (1)..(25): SEQ ID NO: 4704; WAN024FEJ-3_at; Start 379; Stop 403
aattcgtatcatggtcaatccagga

SEQ ID NO: 203059 - DNA, 25 bp, Artificial
  probe
  misc_feature (1)..(25): SEQ ID NO: 4704; WAN024FEJ-3_at; Start 297; Stop 321
tcaagcgtctccatgatttggaaga

SEQ ID NO: 203060 - DNA, 25 bp, Artificial
  probe
  misc_feature (1)..(25): SEQ ID NO: 4704; WAN024FEJ-3_at; Start 13; Stop 37
tggtatcatggcgagcgaacttggt

SEQ ID NO: 203061 - DNA, 25 bp, Artificial
  probe
  misc_feature (1)..(25): SEQ ID NO: 4704; WAN024FEJ-3_at; Start 255; Stop 279
cagcccgtccaggtgctcgtagtga

SEQ ID NO: 203062 - DNA, 25 bp, Artificial
  probe
  misc_feature (1)..(25): SEQ ID NO: 4704; WAN024FEJ-3_at; Start 316; Stop 340
ggaagaaattgctaacggctttgaa

SEQ ID NO: 203063 - DNA, 25 bp, Artificial
  probe
  misc_feature (1)..(25): SEQ ID NO: 4704; WAN024FEJ-3_at; Start 28; Stop 52
cgaacttggtgaaaatgcggctctt

SEQ ID NO: 203064 - DNA, 25 bp, Artificial
  probe
  misc_feature (1)..(25): SEQ ID NO: 4704; WAN024FEJ-3_at; Start 394; Stop 418
caatccaggaaaaatcaaggacgac

SEQ ID NO: 203065 - DNA, 25 bp, Artificial
  probe
  misc_feature (1)..(25): SEQ ID NO: 4704; WAN024FEJ-3_at; Start 2; Stop 26
gctaagttggctggtatcatggcga

SEQ ID NO: 203066 - DNA, 25 bp, Artificial
  probe
  misc_feature (1)..(25): SEQ ID NO: 4704; WAN024FEJ-3_at; Start 51; Stop 75
ttgcccgtcgtgctggattccttca

SEQ ID NO: 203067 - DNA, 25 bp, Artificial
  probe
  misc_feature (1)..(25): SEQ ID NO: 4704; WAN024FEJ-3_at; Start 62; Stop 86
gctggattccttcacgatatcggga

SEQ ID NO: 203068 - DNA, 25 bp, Artificial
  probe
  misc_feature (1)..(25): SEQ ID NO: 4704; WAN024FEJ-3_at; Start 206; Stop 230
gctgagagcgtgatagcagttatcg

SEQ ID NO: 203069 - DNA, 25 bp, Artificial
  probe
  misc_feature (1)..(25): SEQ ID NO: 4704; WAN024FEJ-3_at; Start 235; Stop 259
tgcagcagatgccttgagcgcagcc

SEQ ID NO: 203070 - DNA, 25 bp, Artificial
  probe
  misc_feature (1)..(25): SEQ ID NO: 4704; WAN024FEJ-3_at; Start 270; Stop 294
ctcgtagtgagtctcttgaaagcta

SEQ ID NO: 203071 - DNA, 25 bp, Artificial
  probe
  misc_feature (1)..(25): SEQ ID NO: 4704; WAN024FEJ-3_at; Start 120; Stop 144
ttgaaatcggtatggaattggcccg

SEQ ID NO: 203072 - DNA, 25 bp, Artificial
  probe
  misc_feature (1)..(25): SEQ ID NO: 4704; WAN024FEJ-3_at; Start 458; Stop 482
gaaaacaatctcgattatccaggaa

SEQ ID NO: 203073 - DNA, 25 bp, Artificial
  probe
  misc_feature (1)..(25): SEQ ID NO: 4704; WAN024FEJ-3_at; Start 159; Stop 183
ccccagttgtggtgaatacgattgc

SEQ ID NO: 203074 - DNA, 25 bp, Artificial
  probe
  misc_feature (1)..(25): SEQ ID NO: 4704; WAN024FEJ-3_at; Start 502; Stop 526
tcgcgagcttcgtgcagtagattat

SEQ ID NO: 203075 - DNA, 25 bp, Artificial
  probe
  misc_feature (1)..(25): SEQ ID NO: 4704; WAN024FEJ-3_at; Start 77; Stop 101
gatatcgggaaagccattgaccatg

SEQ ID NO: 203076 - DNA, 25 bp, Artificial
  probe
  misc_feature (1)..(25): SEQ ID NO: 4704; WAN024FEJ-3_at; Start 287; Stop 311
gaaagctacatcaagcgtctccatg

SEQ ID NO: 203077 - DNA, 25 bp, Artificial
  probe
  misc_feature (1)..(25): SEQ ID NO: 2161; WAN024FEJ-5_at; Start 256; Stop 280
taccgtgaagaagtggacgctgaat

SEQ ID NO: 203078 - DNA, 25 bp, Artificial
  probe
  misc_feature (1)..(25): SEQ ID NO: 2161; WAN024FEJ-5_at; Start 130; Stop 154
caagaagcaactaatttacgtggac

SEQ ID NO: 203079 - DNA, 25 bp, Artificial
  probe
  misc_feature (1)..(25): SEQ ID NO: 2161; WAN024FEJ-5_at; Start 444; Stop 468
gcaattagaggaagtcgaaagacaa

SEQ ID NO: 203080 - DNA, 25 bp, Artificial
  probe
  misc_feature (1)..(25): SEQ ID NO: 2161; WAN024FEJ-5_at; Start 409; Stop 433
tctgatagagcgaaaaaccttgatg

SEQ ID NO: 203081 - DNA, 25 bp, Artificial
  probe
  misc_feature (1)..(25): SEQ ID NO: 2161; WAN024FEJ-5_at; Start 265; Stop 289
gaagtggacgctgaattcaaatcag

SEQ ID NO: 203082 - DNA, 25 bp, Artificial
  probe
  misc_feature (1)..(25): SEQ ID NO: 2161; WAN024FEJ-5_at; Start 227; Stop 251
tattggaggccaaagaagaagccag

SEQ ID NO: 203083 - DNA, 25 bp, Artificial
  probe
  misc_feature (1)..(25): SEQ ID NO: 2161; WAN024FEJ-5_at; Start 167; Stop 191
aagcggatttacttgttaatgaagc

SEQ ID NO: 203084 - DNA, 25 bp, Artificial
  probe
  misc_feature (1)..(25): SEQ ID NO: 2161; WAN024FEJ-5_at; Start 434; Stop 458
cgcgtgaagagcaattagaggaagt

SEQ ID NO: 203085 - DNA, 25 bp, Artificial
  probe
  misc_feature (1)..(25): SEQ ID NO: 2161; WAN024FEJ-5_at; Start 213; Stop 237
taaaaaagaagcactattggaggcc

SEQ ID NO: 203086 - DNA, 25 bp, Artificial
  probe
  misc_feature (1)..(25): SEQ ID NO: 2161; WAN024FEJ-5_at; Start 34; Stop 58
gccgtcatcattggtttagtcattg

SEQ ID NO: 203087 - DNA, 25 bp, Artificial
  probe
  misc_feature (1)..(25): SEQ ID NO: 2161; WAN024FEJ-5_at; Start 289; Stop 313
gaacgtcaagaactcaaacaaatcg

SEQ ID NO: 203088 - DNA, 25 bp, Artificial
  probe
  misc_feature (1)..(25): SEQ ID NO: 2161; WAN024FEJ-5_at; Start 50; Stop 74
tagtcattggatatgtcagcatctc

SEQ ID NO: 203089 - DNA, 25 bp, Artificial
  probe
  misc_feature (1)..(25): SEQ ID NO: 2161; WAN024FEJ-5_at; Start 397; Stop 421
gaacaaagtatttctgatagagcga

SEQ ID NO: 203090 - DNA, 25 bp, Artificial
  probe
  misc_feature (1)..(25): SEQ ID NO: 2161; WAN024FEJ-5_at; Start 19; Stop 43
gcgattgctgtttttgccgtcatca

SEQ ID NO: 203091 - DNA, 25 bp, Artificial
  probe
  misc_feature (1)..(25): SEQ ID NO: 2161; WAN024FEJ-5_at; Start 280; Stop 304
ttcaaatcagaacgtcaagaactca

SEQ ID NO: 203092 - DNA, 25 bp, Artificial
  probe
  misc_feature (1)..(25): SEQ ID NO: 2161; WAN024FEJ-5_at; Start 154; Stop 178
caagctgagcgtgaagcggatttac

SEQ ID NO: 203093 - DNA, 25 bp, Artificial
  probe
  misc_feature (1)..(25): SEQ ID NO: 2161; WAN024FEJ-5_at; Start 141; Stop 165
taatttacgtggacaagctgagcgt

SEQ ID NO: 203094 - DNA, 25 bp, Artificial
  probe
  misc_feature (1)..(25): SEQ ID NO: 2161; WAN024FEJ-5_at; Start 4; Stop 28
gaaatcatgtcgcttgcgattgctg

SEQ ID NO: 203095 - DNA, 25 bp, Artificial
  probe
  misc_feature (1)..(25): SEQ ID NO: 2161; WAN024FEJ-5_at; Start 304; Stop 328
aaacaaatcgaaagtcgtttgacag

SEQ ID NO: 203096 - DNA, 25 bp, Artificial
  probe
  misc_feature (1)..(25): SEQ ID NO: 2161; WAN024FEJ-5_at; Start 345; Stop 369
tgaccgtaaggacgacaatttgacg

SEQ ID NO: 203097 - DNA, 25 bp, Artificial
  probe
  misc_feature (1)..(25): SEQ ID NO: 2161; WAN024FEJ-5_at; Start 63; Stop 87
tgtcagcatctcagctaagatgaaa

SEQ ID NO: 203098 - DNA, 25 bp, Artificial
  probe
  misc_feature (1)..(25): SEQ ID NO: 2161; WAN024FEJ-5_at; Start 80; Stop 104
agatgaaatcatctcaggaagctgc

SEQ ID NO: 203099 - DNA, 25 bp, Artificial
  probe
  misc_feature (1)..(25): SEQ ID NO: 2161; WAN024FEJ-5_at; Start 196; Stop 220
cgtgaaagcaagtctcttaaaaaag

SEQ ID NO: 203100 - DNA, 25 bp, Artificial
  probe
  misc_feature (1)..(25): SEQ ID NO: 2161; WAN024FEJ-5_at; Start 368; Stop 392
cgagtaaagaacaaacacttgaaca

SEQ ID NO: 203101 - DNA, 25 bp, Artificial
  probe
  misc_feature (1)..(25): SEQ ID NO: 2161; WAN024FEJ-5_at; Start 332; Stop 356
gagctactagccttgaccgtaagga

SEQ ID NO: 203102 - DNA, 25 bp, Artificial
  probe
  misc_feature (1)..(25): SEQ ID NO: 2161; WAN024FEJ-5_at; Start 241; Stop 265
gaagaagccagaaaataccgtgaag

SEQ ID NO: 203103 - DNA, 25 bp, Artificial
  probe
  misc_feature (1)..(25): SEQ ID NO: 2161; WAN024FEJ-5_at; Start 419; Stop 443
cgaaaaaccttgatgcgcgtgaaga

SEQ ID NO: 203104 - DNA, 25 bp, Artificial
  probe
  misc_feature (1)..(25): SEQ ID NO: 2161; WAN024FEJ-5_at; Start 516; Stop 540
acgagatattatcttggctcagaca

SEQ ID NO: 203105 - DNA, 25 bp, Artificial
  probe
  misc_feature (1)..(25): SEQ ID NO: 2161; WAN024FEJ-5_at; Start 355; Stop 379
gacgacaatttgacgagtaaagaac

SEQ ID NO: 203106 - DNA, 25 bp, Artificial
  probe
  misc_feature (1)..(25): SEQ ID NO: 2161; WAN024FEJ-5_at; Start 318; Stop 342
tcgtttgacagagagagctactagc

SEQ ID NO: 203107 - DNA, 25 bp, Artificial
  probe
  misc_feature (1)..(25): SEQ ID NO: 2161; WAN024FEJ-5_at; Start 472; Stop 496
gaagcagaactagagcgtattggtg

SEQ ID NO: 203108 - DNA, 25 bp, Artificial
  probe
  misc_feature (1)..(25): SEQ ID NO: 2161; WAN024FEJ-5_at; Start 458; Stop 482
tcgaaagacaaaaagaagcagaact

SEQ ID NO: 203109 - DNA, 25 bp, Artificial
  probe
  misc_feature (1)..(25): SEQ ID NO: 2161; WAN024FEJ-5_at; Start 114; Stop 138
gcttttaaatgctgaacaagaagca

SEQ ID NO: 203110 - DNA, 25 bp, Artificial
  probe
  misc_feature (1)..(25): SEQ ID NO: 2161; WAN024FEJ-5_at; Start 504; Stop 528
tcaggcagaagcacgagatattatc

SEQ ID NO: 203111 - DNA, 25 bp, Artificial
  probe
  misc_feature (1)..(25): SEQ ID NO: 425; WAN024FEJ-M_at; Start 276; Stop 300
tgtcaggatttgatccgattcgtcg

SEQ ID NO: 203112 - DNA, 25 bp, Artificial
  probe
  misc_feature (1)..(25): SEQ ID NO: 425; WAN024FEJ-M_at; Start 307; Stop 331
tgcccgtatgactatggaaatgttg

SEQ ID NO: 203113 - DNA, 25 bp, Artificial
  probe
  misc_feature (1)..(25): SEQ ID NO: 425; WAN024FEJ-M_at; Start 193; Stop 217
tcgtgaaggtcgtaacattcgtacc

SEQ ID NO: 203114 - DNA, 25 bp, Artificial
  probe
  misc_feature (1)..(25): SEQ ID NO: 425; WAN024FEJ-M_at; Start 143; Stop 167
aactcaacagttcatctgccagacg

SEQ ID NO: 203115 - DNA, 25 bp, Artificial
  probe
  misc_feature (1)..(25): SEQ ID NO: 425; WAN024FEJ-M_at; Start 246; Stop 270
ttatcgacgatacaccagaagtggt

SEQ ID NO: 203116 - DNA, 25 bp, Artificial
  probe
  misc_feature (1)..(25): SEQ ID NO: 425; WAN024FEJ-M_at; Start 184; Stop 208
cattattggtcgtgaaggtcgtaac

SEQ ID NO: 203117 - DNA, 25 bp, Artificial
  probe
  misc_feature (1)..(25): SEQ ID NO: 425; WAN024FEJ-M_at; Start 237; Stop 261
tcgatgtgattatcgacgatacacc

SEQ ID NO: 203118 - DNA, 25 bp, Artificial
  probe
  misc_feature (1)..(25): SEQ ID NO: 425; WAN024FEJ-M_at; Start 20; Stop 44
gagattgccagtcgcattcgcgaag

SEQ ID NO: 203119 - DNA, 25 bp, Artificial
  probe
  misc_feature (1)..(25): SEQ ID NO: 425; WAN024FEJ-M_at; Start 333; Stop 357
tcaaagatggtcgtatacatccagc

SEQ ID NO: 203120 - DNA, 25 bp, Artificial
  probe
  misc_feature (1)..(25): SEQ ID NO: 425; WAN024FEJ-M_at; Start 106; Stop 130
gcaacgtatcgctggtgaatatgta

SEQ ID NO: 203121 - DNA, 25 bp, Artificial
  probe
  misc_feature (1)..(25): SEQ ID NO: 425; WAN024FEJ-M_at; Start 97; Stop 121
tcaagctatgcaacgtatcgctggt

SEQ ID NO: 203122 - DNA, 25 bp, Artificial
  probe
  misc_feature (1)..(25): SEQ ID NO: 425; WAN024FEJ-M_at; Start 128; Stop 152
gtagcggagtcaacaaactcaacag

SEQ ID NO: 203123 - DNA, 25 bp, Artificial
  probe
  misc_feature (1)..(25): SEQ ID NO: 425; WAN024FEJ-M_at; Start 428; Stop 452
gctgcctatgaaattggtgcgccaa

SEQ ID NO: 203124 - DNA, 25 bp, Artificial
  probe
  misc_feature (1)..(25): SEQ ID NO: 425; WAN024FEJ-M_at; Start 261; Stop 285
cagaagtggtgaccttgtcaggatt

SEQ ID NO: 203125 - DNA, 25 bp, Artificial
  probe
  misc_feature (1)..(25): SEQ ID NO: 425; WAN024FEJ-M_at; Start 503; Stop 527
tcatatggacaaaatgttttgcgcc

SEQ ID NO: 203126 - DNA, 25 bp, Artificial
  probe
  misc_feature (1)..(25): SEQ ID NO: 425; WAN024FEJ-M_at; Start 346; Stop 370
tatacatccagctcgtatcgaagag

SEQ ID NO: 203127 - DNA, 25 bp, Artificial
  probe
  misc_feature (1)..(25): SEQ ID NO: 425; WAN024FEJ-M_at; Start 50; Stop 74
caagaggtcaaggaacgttctgaca

SEQ ID NO: 203128 - DNA, 25 bp, Artificial
  probe
  misc_feature (1)..(25): SEQ ID NO: 425; WAN024FEJ-M_at; Start 475; Stop 499
gattatgggacgtttgcagttccgt

SEQ ID NO: 203129 - DNA, 25 bp, Artificial
  probe
  misc_feature (1)..(25): SEQ ID NO: 425; WAN024FEJ-M_at; Start 389; Stop 413
caagagattgacaataagattcgtg

SEQ ID NO: 203130 - DNA, 25 bp, Artificial
  probe
  misc_feature (1)..(25): SEQ ID NO: 425; WAN024FEJ-M_at; Start 5; Stop 29
gaaaacttgaccagggagattgcca

SEQ ID NO: 203131 - DNA, 25 bp, Artificial
  probe
  misc_feature (1)..(25): SEQ ID NO: 425; WAN024FEJ-M_at; Start 416; Stop 440
tacggtgaggctgctgcctatgaaa

SEQ ID NO: 203132 - DNA, 25 bp, Artificial
  probe
  misc_feature (1)..(25): SEQ ID NO: 425; WAN024FEJ-M_at; Start 376; Stop 400
tgagaaaaaccgtcaagagattgac

SEQ ID NO: 203133 - DNA, 25 bp, Artificial
  probe
  misc_feature (1)..(25): SEQ ID NO: 425; WAN024FEJ-M_at; Start 57; Stop 81
tcaaggaacgttctgacaaaatggc

SEQ ID NO: 203134 - DNA, 25 bp, Artificial
  probe
  misc_feature (1)..(25): SEQ ID NO: 425; WAN024FEJ-M_at; Start 159; Stop 183
tgccagacgatactatgaagggacg

SEQ ID NO: 203135 - DNA, 25 bp, Artificial
  probe
  misc_feature (1)..(25): SEQ ID NO: 425; WAN024FEJ-M_at; Start 292; Stop 316
gattcgtcgtgagattgcccgtatg

SEQ ID NO: 203136 - DNA, 25 bp, Artificial
  probe
  misc_feature (1)..(25): SEQ ID NO: 425; WAN024FEJ-M_at; Start 172; Stop 196
tatgaagggacgcattattggtcgt

SEQ ID NO: 203137 - DNA, 25 bp, Artificial
  probe
  misc_feature (1)..(25): SEQ ID NO: 425; WAN024FEJ-M_at; Start 117; Stop 141
ctggtgaatatgtagcggagtcaac

SEQ ID NO: 203138 - DNA, 25 bp, Artificial
  probe
  misc_feature (1)..(25): SEQ ID NO: 425; WAN024FEJ-M_at; Start 361; Stop 385
tatcgaagagttggttgagaaaaac

SEQ ID NO: 203139 - DNA, 25 bp, Artificial
  probe
  misc_feature (1)..(25): SEQ ID NO: 425; WAN024FEJ-M_at; Start 490; Stop 514
gcagttccgtacttcatatggacaa

SEQ ID NO: 203140 - DNA, 25 bp, Artificial
  probe
  misc_feature (1)..(25): SEQ ID NO: 425; WAN024FEJ-M_at; Start 321; Stop 345
tggaaatgttgctcaaagatggtcg

SEQ ID NO: 203141 - DNA, 25 bp, Artificial
  probe
  misc_feature (1)..(25): SEQ ID NO: 425; WAN024FEJ-M_at; Start 83; Stop 107
aaggacatcttggttcaagctatgc

SEQ ID NO: 203142 - DNA, 25 bp, Artificial
  probe
  misc_feature (1)..(25): SEQ ID NO: 425; WAN024FEJ-M_at; Start 515; Stop 539
aatgttttgcgccattcgattgagg

SEQ ID NO: 203143 - DNA, 25 bp, Artificial
  probe
  misc_feature (1)..(25): SEQ ID NO: 425; WAN024FEJ-M_at; Start 445; Stop 469
tgcgccaaaccttcatccagacttg

SEQ ID NO: 203144 - DNA, 25 bp, Artificial
  probe
  misc_feature (1)..(25): SEQ ID NO: 425; WAN024FEJ-M_at; Start 403; Stop 427
taagattcgtgaatacggtgaggct

SEQ ID NO: 203145 - DNA, 25 bp, Artificial
  probe
  misc_feature (1)..(25): SEQ ID NO: 5562; WAN024FEK_at; Start 165; Stop 189
ccaaggtttcattgacataggtcag

SEQ ID NO: 203146 - DNA, 25 bp, Artificial
  probe
  misc_feature (1)..(25): SEQ ID NO: 5562; WAN024FEK_at; Start 2; Stop 26
tgggcaatcacttctgcactatctg

SEQ ID NO: 203147 - DNA, 25 bp, Artificial
  probe
  misc_feature (1)..(25): SEQ ID NO: 5562; WAN024FEK_at; Start 120; Stop 144
gagcaccctgaacttcaatttcaag

SEQ ID NO: 203148 - DNA, 25 bp, Artificial
  probe
  misc_feature (1)..(25): SEQ ID NO: 5562; WAN024FEK_at; Start 88; Stop 112
gacagcatctggaacctttttcttg

SEQ ID NO: 203149 - DNA, 25 bp, Artificial
  probe
  misc_feature (1)..(25): SEQ ID NO: 5562; WAN024FEK_at; Start 40; Stop 64
caagcgatcttgcaattcatccaaa

SEQ ID NO: 203150 - DNA, 25 bp, Artificial
  probe
  misc_feature (1)..(25): SEQ ID NO: 5562; WAN024FEK_at; Start 209; Stop 233
ccgacatattctgcgtattccaaca

SEQ ID NO: 203151 - DNA, 25 bp, Artificial
  probe
  misc_feature (1)..(25): SEQ ID NO: 5562; WAN024FEK_at; Start 318; Stop 342
cgcgtgtcgtcatcgatacagaata

SEQ ID NO: 203152 - DNA, 25 bp, Artificial
  probe
  misc_feature (1)..(25): SEQ ID NO: 5562; WAN024FEK_at; Start 25; Stop 49
tgttccacgacctaccaagcgatct

SEQ ID NO: 203153 - DNA, 25 bp, Artificial
  probe
  misc_feature (1)..(25): SEQ ID NO: 5562; WAN024FEK_at; Start 157; Stop 181
tcccttgtccaaggtttcattgaca

SEQ ID NO: 203154 - DNA, 25 bp, Artificial
  probe
  misc_feature (1)..(25): SEQ ID NO: 5562; WAN024FEK_at; Start 109; Stop 133
cttgacctgaagagcaccctgaact

SEQ ID NO: 203155 - DNA, 25 bp, Artificial
  probe
  misc_feature (1)..(25): SEQ ID NO: 5562; WAN024FEK_at; Start 135; Stop 159
caatttcaaggaaaacatcgattcc

SEQ ID NO: 203156 - DNA, 25 bp, Artificial
  probe
  misc_feature (1)..(25): SEQ ID NO: 5562; WAN024FEK_at; Start 59; Stop 83
tccaaatctggtggtgtcaggaaga

SEQ ID NO: 203157 - DNA, 25 bp, Artificial
  probe
  misc_feature (1)..(25): SEQ ID NO: 5562; WAN024FEK_at; Start 277; Stop 301
gaagaaatagtcaacaccgtccact

SEQ ID NO: 203158 - DNA, 25 bp, Artificial
  probe
  misc_feature (1)..(25): SEQ ID NO: 5562; WAN024FEK_at; Start 189; Stop 213
gaggagttccatagtagttaccgac

SEQ ID NO: 203159 - DNA, 25 bp, Artificial
  probe
  misc_feature (1)..(25): SEQ ID NO: 5562; WAN024FEK_at; Start 305; Stop 329
ccaggacgttgtgcgcgtgtcgtca

SEQ ID NO: 203160 - DNA, 25 bp, Artificial
  probe
  misc_feature (1)..(25): SEQ ID NO: 5562; WAN024FEK_at; Start 82; Stop 106
gataaagacagcatctggaaccttt

SEQ ID NO: 203161 - DNA, 25 bp, Artificial
  probe
  misc_feature (1)..(25): SEQ ID NO: 5562; WAN024FEK_at; Start 267; Stop 291
cacgagtacggaagaaatagtcaac

SEQ ID NO: 203162 - DNA, 25 bp, Artificial
  probe
  misc_feature (1)..(25): SEQ ID NO: 5562; WAN024FEK_at; Start 345; Stop 369
gaaattggttttcagaactctcaaa

SEQ ID NO: 203163 - DNA, 25 bp, Artificial
  probe
  misc_feature (1)..(25): SEQ ID NO: 5562; WAN024FEK_at; Start 236; Stop 260
tgtccttgacgaatcagctcttcaa

SEQ ID NO: 203164 - DNA, 25 bp, Artificial
  probe
  misc_feature (1)..(25): SEQ ID NO: 5562; WAN024FEK_at; Start 220; Stop 244
tgcgtattccaacatctgtccttga

SEQ ID NO: 203165 - DNA, 25 bp, Artificial
  probe
  misc_feature (1)..(25): SEQ ID NO: 5562; WAN024FEK_at; Start 174; Stop 198
cattgacataggtcagaggagttcc

SEQ ID NO: 203166 - DNA, 25 bp, Artificial
  probe
  misc_feature (1)..(25): SEQ ID NO: 5562; WAN024FEK_at; Start 246; Stop 270
gaatcagctcttcaaattcttcacg

SEQ ID NO: 203167 - DNA, 25 bp, Artificial
  probe
  misc_feature (1)..(25): SEQ ID NO: 5562; WAN024FEK_at; Start 254; Stop 278
tcttcaaattcttcacgagtacgga

SEQ ID NO: 203168 - DNA, 25 bp, Artificial
  probe
  misc_feature (1)..(25): SEQ ID NO: 5562; WAN024FEK_at; Start 200; Stop 224
tagtagttaccgacatattctgcgt

SEQ ID NO: 203169 - DNA, 25 bp, Artificial
  probe
  misc_feature (1)..(25): SEQ ID NO: 5562; WAN024FEK_at; Start 356; Stop 380
tcagaactctcaaaaatctctcttc

SEQ ID NO: 203170 - DNA, 25 bp, Artificial
  probe
  misc_feature (1)..(25): SEQ ID NO: 5562; WAN024FEK_at; Start 99; Stop 123
gaacctttttcttgacctgaagagc

SEQ ID NO: 203171 - DNA, 25 bp, Artificial
  probe
  misc_feature (1)..(25): SEQ ID NO: 5562; WAN024FEK_at; Start 10; Stop 34
cacttctgcactatctgttccacga

SEQ ID NO: 203172 - DNA, 25 bp, Artificial
  probe
  misc_feature (1)..(25): SEQ ID NO: 5562; WAN024FEK_at; Start 314; Stop 338
tgtgcgcgtgtcgtcatcgatacag

SEQ ID NO: 203173 - DNA, 25 bp, Artificial
  probe
  misc_feature (1)..(25): SEQ ID NO: 5562; WAN024FEK_at; Start 298; Stop 322
cacttctccaggacgttgtgcgcgt

SEQ ID NO: 203174 - DNA, 25 bp, Artificial
  probe
  misc_feature (1)..(25): SEQ ID NO: 5562; WAN024FEK_at; Start 146; Stop 170
aaaacatcgattcccttgtccaagg

SEQ ID NO: 203175 - DNA, 25 bp, Artificial
  probe
  misc_feature (1)..(25): SEQ ID NO: 5562; WAN024FEK_at; Start 73; Stop 97
tgtcaggaagataaagacagcatct

SEQ ID NO: 203176 - DNA, 25 bp, Artificial
  probe
  misc_feature (1)..(25): SEQ ID NO: 5562; WAN024FEK_at; Start 328; Stop 352
catcgatacagaatattgaaattgg

SEQ ID NO: 203177 - DNA, 25 bp, Artificial
  probe
  misc_feature (1)..(25): SEQ ID NO: 5562; WAN024FEK_at; Start 50; Stop 74
tgcaattcatccaaatctggtggtg

SEQ ID NO: 203178 - DNA, 25 bp, Artificial
  probe
  misc_feature (1)..(25): SEQ ID NO: 5562; WAN024FEK_at; Start 229; Stop 253
caacatctgtccttgacgaatcagc

SEQ ID NO: 203179 - DNA, 25 bp, Artificial
  probe
  misc_feature (1)..(25): SEQ ID NO: 2427; WAN024FEL_at; Start 536; Stop 560
tcaaatgtgtgattgaagcagaaca

SEQ ID NO: 203180 - DNA, 25 bp, Artificial
  probe
  misc_feature (1)..(25): SEQ ID NO: 2427; WAN024FEL_at; Start 312; Stop 336
agttcagggtgctcttcaggtcaag

SEQ ID NO: 203181 - DNA, 25 bp, Artificial
  probe
  misc_feature (1)..(25): SEQ ID NO: 2427; WAN024FEL_at; Start 396; Stop 420
agatcgcttggtaggtcgtggaaca

SEQ ID NO: 203182 - DNA, 25 bp, Artificial
  probe
  misc_feature (1)..(25): SEQ ID NO: 2427; WAN024FEL_at; Start 121; Stop 145
acacgcgcacaacgtcctggagaag

SEQ ID NO: 203183 - DNA, 25 bp, Artificial
  probe
  misc_feature (1)..(25): SEQ ID NO: 2427; WAN024FEL_at; Start 167; Stop 191
tccgtactcgtgaagaatttgaaga

SEQ ID NO: 203184 - DNA, 25 bp, Artificial
  probe
  misc_feature (1)..(25): SEQ ID NO: 2427; WAN024FEL_at; Start 434; Stop 458
tgattgcccaacgaatcgaaaaggc

SEQ ID NO: 203185 - DNA, 25 bp, Artificial
  probe
  misc_feature (1)..(25): SEQ ID NO: 2427; WAN024FEL_at; Start 201; Stop 225
tcaaggacagatgttggaatacgca

SEQ ID NO: 203186 - DNA, 25 bp, Artificial
  probe
  misc_feature (1)..(25): SEQ ID NO: 2427; WAN024FEL_at; Start 275; Stop 299
ccttggacaagggaatcgatgtttt

SEQ ID NO: 203187 - DNA, 25 bp, Artificial
  probe
  misc_feature (1)..(25): SEQ ID NO: 2427; WAN024FEL_at; Start 382; Stop 406
ttggatgaattgcaagatcgcttgg

SEQ ID NO: 203188 - DNA, 25 bp, Artificial
  probe
  misc_feature (1)..(25): SEQ ID NO: 2427; WAN024FEL_at; Start 128; Stop 152
cacaacgtcctggagaagtggacgg

SEQ ID NO: 203189 - DNA, 25 bp, Artificial
  probe
  misc_feature (1)..(25): SEQ ID NO: 2427; WAN024FEL_at; Start 187; Stop 211
gaagagctgattcgtcaaggacaga

SEQ ID NO: 203190 - DNA, 25 bp, Artificial
  probe
  misc_feature (1)..(25): SEQ ID NO: 2427; WAN024FEL_at; Start 349; Stop 373
gatgctgtctttatcttcctgacac

SEQ ID NO: 203191 - DNA, 25 bp, Artificial
  probe
  misc_feature (1)..(25): SEQ ID NO: 2427; WAN024FEL_at; Start 525; Stop 549
tgctgaacgtgtcaaatgtgtgatt

SEQ ID NO: 203192 - DNA, 25 bp, Artificial
  probe
  misc_feature (1)..(25): SEQ ID NO: 2427; WAN024FEL_at; Start 411; Stop 435
tcgtggaacagatagtgcagaagtg

SEQ ID NO: 203193 - DNA, 25 bp, Artificial
  probe
  misc_feature (1)..(25): SEQ ID NO: 2427; WAN024FEL_at; Start 563; Stop 587
tctgtgtggatcgtgtcattggtca

SEQ ID NO: 203194 - DNA, 25 bp, Artificial
  probe
  misc_feature (1)..(25): SEQ ID NO: 2427; WAN024FEL_at; Start 3; Stop 27
ggcagaccgaggcttactaatcgtt

SEQ ID NO: 203195 - DNA, 25 bp, Artificial
  probe
  misc_feature (1)..(25): SEQ ID NO: 2427; WAN024FEL_at; Start 212; Stop 236
tgttggaatacgcagaatatgtcgg

SEQ ID NO: 203196 - DNA, 25 bp, Artificial
  probe
  misc_feature (1)..(25): SEQ ID NO: 2427; WAN024FEL_at; Start 333; Stop 357
caagaaaaaggttccagatgctgtc

SEQ ID NO: 203197 - DNA, 25 bp, Artificial
  probe
  misc_feature (1)..(25): SEQ ID NO: 2427; WAN024FEL_at; Start 324; Stop 348
tcttcaggtcaagaaaaaggttcca

SEQ ID NO: 203198 - DNA, 25 bp, Artificial
  probe
  misc_feature (1)..(25): SEQ ID NO: 2427; WAN024FEL_at; Start 106; Stop 130
tctgtatcgatgacgacacgcgcac

SEQ ID NO: 203199 - DNA, 25 bp, Artificial
  probe
  misc_feature (1)..(25): SEQ ID NO: 2427; WAN024FEL_at; Start 463; Stop 487
gaagaaattgccctcatgcgtgagt

SEQ ID NO: 203200 - DNA, 25 bp, Artificial
  probe
  misc_feature (1)..(25): SEQ ID NO: 2427; WAN024FEL_at; Start 154; Stop 178
gttgactatttcttccgtactcgtg

SEQ ID NO: 203201 - DNA, 25 bp, Artificial
  probe
  misc_feature (1)..(25): SEQ ID NO: 2427; WAN024FEL_at; Start 56; Stop 80
gaacggttagaagagagatttttga

SEQ ID NO: 203202 - DNA, 25 bp, Artificial
  probe
  misc_feature (1)..(25): SEQ ID NO: 2427; WAN024FEL_at; Start 72; Stop 96
gatttttgagagttctgaaaaccaa

SEQ ID NO: 203203 - DNA, 25 bp, Artificial
  probe
  misc_feature (1)..(25): SEQ ID NO: 2427; WAN024FEL_at; Start 579; Stop 603
cattggtcactatcaggagatgtta

SEQ ID NO: 203204 - DNA, 25 bp, Artificial
  probe
  misc_feature (1)..(25): SEQ ID NO: 2427; WAN024FEL_at; Start 419; Stop 443
cagatagtgcagaagtgattgccca

SEQ ID NO: 203205 - DNA, 25 bp, Artificial
  probe
  misc_feature (1)..(25): SEQ ID NO: 2427; WAN024FEL_at; Start 449; Stop 473
tcgaaaaggccaaggaagaaattgc

SEQ ID NO: 203206 - DNA, 25 bp, Artificial
  probe
  misc_feature (1)..(25): SEQ ID NO: 2427; WAN024FEL_at; Start 299; Stop 323
tccttgaaattgaagttcagggtgc

SEQ ID NO: 203207 - DNA, 25 bp, Artificial
  probe
  misc_feature (1)..(25): SEQ ID NO: 2427; WAN024FEL_at; Start 365; Stop 389
tcctgacaccaccagatttggatga

SEQ ID NO: 203208 - DNA, 25 bp, Artificial
  probe
  misc_feature (1)..(25): SEQ ID NO: 2427; WAN024FEL_at; Start 144; Stop 168
agtggacggtgttgactatttcttc

SEQ ID NO: 203209 - DNA, 25 bp, Artificial
  probe
  misc_feature (1)..(25): SEQ ID NO: 2427; WAN024FEL_at; Start 473; Stop 497
ccctcatgcgtgagtatgattatgc

SEQ ID NO: 203210 - DNA, 25 bp, Artificial
  probe
  misc_feature (1)..(25): SEQ ID NO: 2427; WAN024FEL_at; Start 19; Stop 43
ctaatcgttttttctggtccttcag

SEQ ID NO: 203211 - DNA, 25 bp, Artificial
  probe
  misc_feature (1)..(25): SEQ ID NO: 2427; WAN024FEL_at; Start 244; Stop 268
tatggaactcctctgacctatgtca

SEQ ID NO: 203212 - DNA, 25 bp, Artificial
  probe
  misc_feature (1)..(25): SEQ ID NO: 2427; WAN024FEL_at; Start 597; Stop 621
gatgttaccaaaatctccaactacc

SEQ ID NO: 203213 - DNA, 25 bp, Artificial
  probe
  misc_feature (1)..(25): SEQ ID NO: 7306; WAN024FEM_at; Start 147; Stop 171
caaagctagaataaccacggcgatt

SEQ ID NO: 203214 - DNA, 25 bp, Artificial
  probe
  misc_feature (1)..(25): SEQ ID NO: 7306; WAN024FEM_at; Start 4; Stop 28
gctcttacagttaggacagacctga

SEQ ID NO: 203215 - DNA, 25 bp, Artificial
  probe
  misc_feature (1)..(25): SEQ ID NO: 7306; WAN024FEM_at; Start 201; Stop 225
ccagacggtcttggatagcctctag

SEQ ID NO: 203216 - DNA, 25 bp, Artificial
  probe
  misc_feature (1)..(25): SEQ ID NO: 7306; WAN024FEM_at; Start 180; Stop 204
gaaccatctgctcttttttaaccag

SEQ ID NO: 203217 - DNA, 25 bp, Artificial
  probe
  misc_feature (1)..(25): SEQ ID NO: 7306; WAN024FEM_at; Start 75; Stop 99
tatccatatgcaaggtcagagaaat

SEQ ID NO: 203218 - DNA, 25 bp, Artificial
  probe
  misc_feature (1)..(25): SEQ ID NO: 7306; WAN024FEM_at; Start 58; Stop 82
gcagttcatagtcttggtatccata

SEQ ID NO: 203219 - DNA, 25 bp, Artificial
  probe
  misc_feature (1)..(25): SEQ ID NO: 7306; WAN024FEM_at; Start 93; Stop 117
gagaaatatcacagttgggacaagt

SEQ ID NO: 203220 - DNA, 25 bp, Artificial
  probe
  misc_feature (1)..(25): SEQ ID NO: 7306; WAN024FEM_at; Start 174; Stop 198
gcatgagaaccatctgctctttttt

SEQ ID NO: 203221 - DNA, 25 bp, Artificial
  probe
  misc_feature (1)..(25): SEQ ID NO: 7306; WAN024FEM_at; Start 198; Stop 222
taaccagacggtcttggatagcctc

SEQ ID NO: 203222 - DNA, 25 bp, Artificial
  probe
  misc_feature (1)..(25): SEQ ID NO: 7306; WAN024FEM_at; Start 104; Stop 128
cagttgggacaagtatccaccgtcc

SEQ ID NO: 203223 - DNA, 25 bp, Artificial
  probe
  misc_feature (1)..(25): SEQ ID NO: 7306; WAN024FEM_at; Start 83; Stop 107
tgcaaggtcagagaaatatcacagt

SEQ ID NO: 203224 - DNA, 25 bp, Artificial
  probe
  misc_feature (1)..(25): SEQ ID NO: 7306; WAN024FEM_at; Start 26; Stop 50
tgaggaatatccttcgagaaaccac

SEQ ID NO: 203225 - DNA, 25 bp, Artificial
  probe
  misc_feature (1)..(25): SEQ ID NO: 7306; WAN024FEM_at; Start 39; Stop 63
tcgagaaaccacaataatggcagtt

SEQ ID NO: 203226 - DNA, 25 bp, Artificial
  probe
  misc_feature (1)..(25): SEQ ID NO: 7306; WAN024FEM_at; Start 144; Stop 168
tgacaaagctagaataaccacggcg

SEQ ID NO: 203227 - DNA, 25 bp, Artificial
  probe
  misc_feature (1)..(25): SEQ ID NO: 7306; WAN024FEM_at; Start 158; Stop 182
taaccacggcgattgagcatgagaa

SEQ ID NO: 203228 - DNA, 25 bp, Artificial
  probe
  misc_feature (1)..(25): SEQ ID NO: 7306; WAN024FEM_at; Start 35; Stop 59
tccttcgagaaaccacaataatggc

SEQ ID NO: 203229 - DNA, 25 bp, Artificial
  probe
  misc_feature (1)..(25): SEQ ID NO: 7306; WAN024FEM_at; Start 101; Stop 125
tcacagttgggacaagtatccaccg

SEQ ID NO: 203230 - DNA, 25 bp, Artificial
  probe
  misc_feature (1)..(25): SEQ ID NO: 7306; WAN024FEM_at; Start 64; Stop 88
catagtcttggtatccatatgcaag

SEQ ID NO: 203231 - DNA, 25 bp, Artificial
  probe
  misc_feature (1)..(25): SEQ ID NO: 7306; WAN024FEM_at; Start 1; Stop 25
gtggctcttacagttaggacagacc

SEQ ID NO: 203232 - DNA, 25 bp, Artificial
  probe
  misc_feature (1)..(25): SEQ ID NO: 7306; WAN024FEM_at; Start 108; Stop 132
tgggacaagtatccaccgtcccaca

SEQ ID NO: 203233 - DNA, 25 bp, Artificial
  probe
  misc_feature (1)..(25): SEQ ID NO: 7306; WAN024FEM_at; Start 90; Stop 114
tcagagaaatatcacagttgggaca

SEQ ID NO: 203234 - DNA, 25 bp, Artificial
  probe
  misc_feature (1)..(25): SEQ ID NO: 7306; WAN024FEM_at; Start 20; Stop 44
cagacctgaggaatatccttcgaga

SEQ ID NO: 203235 - DNA, 25 bp, Artificial
  probe
  misc_feature (1)..(25): SEQ ID NO: 7306; WAN024FEM_at; Start 50; Stop 74
caataatggcagttcatagtcttgg

SEQ ID NO: 203236 - DNA, 25 bp, Artificial
  probe
  misc_feature (1)..(25): SEQ ID NO: 7306; WAN024FEM_at; Start 131; Stop 155
cactcccgacacatgacaaagctag

SEQ ID NO: 203237 - DNA, 25 bp, Artificial
  probe
  misc_feature (1)..(25): SEQ ID NO: 7306; WAN024FEM_at; Start 152; Stop 176
ctagaataaccacggcgattgagca

SEQ ID NO: 203238 - DNA, 25 bp, Artificial
  probe
  misc_feature (1)..(25): SEQ ID NO: 7306; WAN024FEM_at; Start 186; Stop 210
tctgctcttttttaaccagacggtc

SEQ ID NO: 203239 - DNA, 25 bp, Artificial
  probe
  misc_feature (1)..(25): SEQ ID NO: 7306; WAN024FEM_at; Start 9; Stop 33
tacagttaggacagacctgaggaat

SEQ ID NO: 203240 - DNA, 25 bp, Artificial
  probe
  misc_feature (1)..(25): SEQ ID NO: 7306; WAN024FEM_at; Start 29; Stop 53
ggaatatccttcgagaaaccacaat

SEQ ID NO: 203241 - DNA, 25 bp, Artificial
  probe
  misc_feature (1)..(25): SEQ ID NO: 7306; WAN024FEM_at; Start 162; Stop 186
cacggcgattgagcatgagaaccat

SEQ ID NO: 203242 - DNA, 25 bp, Artificial
  probe
  misc_feature (1)..(25): SEQ ID NO: 7306; WAN024FEM_at; Start 13; Stop 37
gttaggacagacctgaggaatatcc

SEQ ID NO: 203243 - DNA, 25 bp, Artificial
  probe
  misc_feature (1)..(25): SEQ ID NO: 7306; WAN024FEM_at; Start 138; Stop 162
gacacatgacaaagctagaataacc

SEQ ID NO: 203244 - DNA, 25 bp, Artificial
  probe
  misc_feature (1)..(25): SEQ ID NO: 7306; WAN024FEM_at; Start 134; Stop 158
tcccgacacatgacaaagctagaat

SEQ ID NO: 203245 - DNA, 25 bp, Artificial
  probe
  misc_feature (1)..(25): SEQ ID NO: 7306; WAN024FEM_at; Start 167; Stop 191
cgattgagcatgagaaccatctgct

SEQ ID NO: 203246 - DNA, 25 bp, Artificial
  probe
  misc_feature (1)..(25): SEQ ID NO: 7306; WAN024FEM_at; Start 72; Stop 96
tggtatccatatgcaaggtcagaga

SEQ ID NO: 203247 - DNA, 25 bp, Artificial
  probe
  misc_feature (1)..(25): SEQ ID NO: 7241; WAN024FEN_at; Start 231; Stop 255
caggcagattcaaggccgtatccgc

SEQ ID NO: 203248 - DNA, 25 bp, Artificial
  probe
  misc_feature (1)..(25): SEQ ID NO: 7241; WAN024FEN_at; Start 132; Stop 156
tgtaggactgtatcaagacttgacc

SEQ ID NO: 203249 - DNA, 25 bp, Artificial
  probe
  misc_feature (1)..(25): SEQ ID NO: 7241; WAN024FEN_at; Start 29; Stop 53
tagtaaggtggatagccgagttgtc

SEQ ID NO: 203250 - DNA, 25 bp, Artificial
  probe
  misc_feature (1)..(25): SEQ ID NO: 7241; WAN024FEN_at; Start 88; Stop 112
gtaatcttgatccttggcaaatcga

SEQ ID NO: 203251 - DNA, 25 bp, Artificial
  probe
  misc_feature (1)..(25): SEQ ID NO: 7241; WAN024FEN_at; Start 226; Stop 250
gaaatcaggcagattcaaggccgta

SEQ ID NO: 203252 - DNA, 25 bp, Artificial
  probe
  misc_feature (1)..(25): SEQ ID NO: 7241; WAN024FEN_at; Start 184; Stop 208
tgccacctgagtcaagagctggaag

SEQ ID NO: 203253 - DNA, 25 bp, Artificial
  probe
  misc_feature (1)..(25): SEQ ID NO: 7241; WAN024FEN_at; Start 99; Stop 123
ccttggcaaatcgaatagcatagtg

SEQ ID NO: 203254 - DNA, 25 bp, Artificial
  probe
  misc_feature (1)..(25): SEQ ID NO: 7241; WAN024FEN_at; Start 109; Stop 133
tcgaatagcatagtgctgcggattg

SEQ ID NO: 203255 - DNA, 25 bp, Artificial
  probe
  misc_feature (1)..(25): SEQ ID NO: 7241; WAN024FEN_at; Start 237; Stop 261
gattcaaggccgtatccgcatttag

SEQ ID NO: 203256 - DNA, 25 bp, Artificial
  probe
  misc_feature (1)..(25): SEQ ID NO: 7241; WAN024FEN_at; Start 152; Stop 176
tgacctgctttttcagcccgacctg

SEQ ID NO: 203257 - DNA, 25 bp, Artificial
  probe
  misc_feature (1)..(25): SEQ ID NO: 7241; WAN024FEN_at; Start 196; Stop 220
caagagctggaaggttctctcagaa

SEQ ID NO: 203258 - DNA, 25 bp, Artificial
  probe
  misc_feature (1)..(25): SEQ ID NO: 7241; WAN024FEN_at; Start 43; Stop 67
gccgagttgtcgtctgattcccatt

SEQ ID NO: 203259 - DNA, 25 bp, Artificial
  probe
  misc_feature (1)..(25): SEQ ID NO: 7241; WAN024FEN_at; Start 96; Stop 120
gatccttggcaaatcgaatagcata

SEQ ID NO: 203260 - DNA, 25 bp, Artificial
  probe
  misc_feature (1)..(25): SEQ ID NO: 7241; WAN024FEN_at; Start 7; Stop 31
aagggtaataccaatcgtgaaatag

SEQ ID NO: 203261 - DNA, 25 bp, Artificial
  probe
  misc_feature (1)..(25): SEQ ID NO: 7241; WAN024FEN_at; Start 180; Stop 204
gacctgccacctgagtcaagagctg

SEQ ID NO: 203262 - DNA, 25 bp, Artificial
  probe
  misc_feature (1)..(25): SEQ ID NO: 7241; WAN024FEN_at; Start 211; Stop 235
tctctcagaagaacggaaatcaggc

SEQ ID NO: 203263 - DNA, 25 bp, Artificial
  probe
  misc_feature (1)..(25): SEQ ID NO: 7241; WAN024FEN_at; Start 189; Stop 213
cctgagtcaagagctggaaggttct

SEQ ID NO: 203264 - DNA, 25 bp, Artificial
  probe
  misc_feature (1)..(25): SEQ ID NO: 7241; WAN024FEN_at; Start 58; Stop 82
gattcccatttcataggcataaaag

SEQ ID NO: 203265 - DNA, 25 bp, Artificial
  probe
  misc_feature (1)..(25): SEQ ID NO: 7241; WAN024FEN_at; Start 148; Stop 172
gacttgacctgctttttcagcccga

SEQ ID NO: 203266 - DNA, 25 bp, Artificial
  probe
  misc_feature (1)..(25): SEQ ID NO: 7241; WAN024FEN_at; Start 215; Stop 239
tcagaagaacggaaatcaggcagat

SEQ ID NO: 203267 - DNA, 25 bp, Artificial
  probe
  misc_feature (1)..(25): SEQ ID NO: 7241; WAN024FEN_at; Start 80; Stop 104
aagccttcgtaatcttgatccttgg

SEQ ID NO: 203268 - DNA, 25 bp, Artificial
  probe
  misc_feature (1)..(25): SEQ ID NO: 7241; WAN024FEN_at; Start 1; Stop 25
gtgagaaagggtaataccaatcgtg

SEQ ID NO: 203269 - DNA, 25 bp, Artificial
  probe
  misc_feature (1)..(25): SEQ ID NO: 7241; WAN024FEN_at; Start 39; Stop 63
gatagccgagttgtcgtctgattcc

SEQ ID NO: 203270 - DNA, 25 bp, Artificial
  probe
  misc_feature (1)..(25): SEQ ID NO: 7241; WAN024FEN_at; Start 21; Stop 45
tcgtgaaatagtaaggtggatagcc

SEQ ID NO: 203271 - DNA, 25 bp, Artificial
  probe
  misc_feature (1)..(25): SEQ ID NO: 7241; WAN024FEN_at; Start 117; Stop 141
catagtgctgcggattgtaggactg

SEQ ID NO: 203272 - DNA, 25 bp, Artificial
  probe
  misc_feature (1)..(25): SEQ ID NO: 7241; WAN024FEN_at; Start 175; Stop 199
tgctcgacctgccacctgagtcaag

SEQ ID NO: 203273 - DNA, 25 bp, Artificial
  probe
  misc_feature (1)..(25): SEQ ID NO: 7241; WAN024FEN_at; Start 15; Stop 39
taccaatcgtgaaatagtaaggtgg

SEQ ID NO: 203274 - DNA, 25 bp, Artificial
  probe
  misc_feature (1)..(25): SEQ ID NO: 7241; WAN024FEN_at; Start 50; Stop 74
tgtcgtctgattcccatttcatagg

SEQ ID NO: 203275 - DNA, 25 bp, Artificial
  probe
  misc_feature (1)..(25): SEQ ID NO: 7241; WAN024FEN_at; Start 123; Stop 147
gctgcggattgtaggactgtatcaa

SEQ ID NO: 203276 - DNA, 25 bp, Artificial
  probe
  misc_feature (1)..(25): SEQ ID NO: 7241; WAN024FEN_at; Start 105; Stop 129
caaatcgaatagcatagtgctgcgg

SEQ ID NO: 203277 - DNA, 25 bp, Artificial
  probe
  misc_feature (1)..(25): SEQ ID NO: 7241; WAN024FEN_at; Start 73; Stop 97
ggcataaaagccttcgtaatcttga

SEQ ID NO: 203278 - DNA, 25 bp, Artificial
  probe
  misc_feature (1)..(25): SEQ ID NO: 7241; WAN024FEN_at; Start 64; Stop 88
catttcataggcataaaagccttcg

SEQ ID NO: 203279 - DNA, 25 bp, Artificial
  probe
  misc_feature (1)..(25): SEQ ID NO: 7241; WAN024FEN_at; Start 136; Stop 160
ggactgtatcaagacttgacctgct

SEQ ID NO: 203280 - DNA, 25 bp, Artificial
  probe
  misc_feature (1)..(25): SEQ ID NO: 7241; WAN024FEN_at; Start 199; Stop 223
gagctggaaggttctctcagaagaa

SEQ ID NO: 203281 - DNA, 25 bp, Artificial
  probe
  misc_feature (1)..(25): SEQ ID NO: 2458; WAN024FEO_at; Start 2188; Stop 2212
tcaggcttgtcagagaccagtccca

SEQ ID NO: 203282 - DNA, 25 bp, Artificial
  probe
  misc_feature (1)..(25): SEQ ID NO: 2458; WAN024FEO_at; Start 2172; Stop 2196
catgaacattttgcggtcaggcttg

SEQ ID NO: 203283 - DNA, 25 bp, Artificial
  probe
  misc_feature (1)..(25): SEQ ID NO: 2458; WAN024FEO_at; Start 1248; Stop 1272
ggtacttggatctgcaacgccgagc

SEQ ID NO: 203284 - DNA, 25 bp, Artificial
  probe
  misc_feature (1)..(25): SEQ ID NO: 2458; WAN024FEO_at; Start 1865; Stop 1889
tcggagttctaaatgcggatacggc

SEQ ID NO: 203285 - DNA, 25 bp, Artificial
  probe
  misc_feature (1)..(25): SEQ ID NO: 2458; WAN024FEO_at; Start 1623; Stop 1647
tcaggtctgtcctaactgtaagagc

SEQ ID NO: 203286 - DNA, 25 bp, Artificial
  probe
  misc_feature (1)..(25): SEQ ID NO: 2458; WAN024FEO_at; Start 376; Stop 400
ttgagtcaggaagaacgagtgcgcc

SEQ ID NO: 203287 - DNA, 25 bp, Artificial
  probe
  misc_feature (1)..(25): SEQ ID NO: 2458; WAN024FEO_at; Start 1171; Stop 1195
tataagcaggacagcaatccccgtt

SEQ ID NO: 203288 - DNA, 25 bp, Artificial
  probe
  misc_feature (1)..(25): SEQ ID NO: 2458; WAN024FEO_at; Start 1880; Stop 1904
cggatacggccttgaatctgcctga

SEQ ID NO: 203289 - DNA, 25 bp, Artificial
  probe
  misc_feature (1)..(25): SEQ ID NO: 2458; WAN024FEO_at; Start 1693; Stop 1717
gagctagcagaactctttccccaag

SEQ ID NO: 203290 - DNA, 25 bp, Artificial
  probe
  misc_feature (1)..(25): SEQ ID NO: 2458; WAN024FEO_at; Start 1569; Stop 1593
tatggataccaagactatgaactgc

SEQ ID NO: 203291 - DNA, 25 bp, Artificial
  probe
  misc_feature (1)..(25): SEQ ID NO: 2458; WAN024FEO_at; Start 1005; Stop 1029
caaggtagccattcttcactcagga

SEQ ID NO: 203292 - DNA, 25 bp, Artificial
  probe
  misc_feature (1)..(25): SEQ ID NO: 2458; WAN024FEO_at; Start 42; Stop 66
gacggaccagccctatagttacagg

SEQ ID NO: 203293 - DNA, 25 bp, Artificial
  probe
  misc_feature (1)..(25): SEQ ID NO: 2458; WAN024FEO_at; Start 479; Stop 503
aaggcctgcttggtctggaatatca

SEQ ID NO: 203294 - DNA, 25 bp, Artificial
  probe
  misc_feature (1)..(25): SEQ ID NO: 2458; WAN024FEO_at; Start 1114; Stop 1138
tttgctcctctgaaaaatctgggtg

SEQ ID NO: 203295 - DNA, 25 bp, Artificial
  probe
  misc_feature (1)..(25): SEQ ID NO: 2458; WAN024FEO_at; Start 1466; Stop 1490
tggttctcatgctcaatcgccgtgg

SEQ ID NO: 203296 - DNA, 25 bp, Artificial
  probe
  misc_feature (1)..(25): SEQ ID NO: 2458; WAN024FEO_at; Start 895; Stop 919
ttgcagattatccaaggtgccctgg

SEQ ID NO: 203297 - DNA, 25 bp, Artificial
  probe
  misc_feature (1)..(25): SEQ ID NO: 2458; WAN024FEO_at; Start 248; Stop 272
cagaacaactctggctggctgagga

SEQ ID NO: 203298 - DNA, 25 bp, Artificial
  probe
  misc_feature (1)..(25): SEQ ID NO: 2458; WAN024FEO_at; Start 570; Stop 594
tgttgagatttctacacgtgccaag

SEQ ID NO: 203299 - DNA, 25 bp, Artificial
  probe
  misc_feature (1)..(25): SEQ ID NO: 2458; WAN024FEO_at; Start 703; Stop 727
ggtgctgttaccatagtccaaaagg

SEQ ID NO: 203300 - DNA, 25 bp, Artificial
  probe
  misc_feature (1)..(25): SEQ ID NO: 2458; WAN024FEO_at; Start 464; Stop 488
tgcgtttgactagaaaaggcctgct

SEQ ID NO: 203301 - DNA, 25 bp, Artificial
  probe
  misc_feature (1)..(25): SEQ ID NO: 2458; WAN024FEO_at; Start 1336; Stop 1360
aatcctttggctacaatccctgagg

SEQ ID NO: 203302 - DNA, 25 bp, Artificial
  probe
  misc_feature (1)..(25): SEQ ID NO: 2458; WAN024FEO_at; Start 265; Stop 289
gctgaggagttacgcaaatctgtct

SEQ ID NO: 203303 - DNA, 25 bp, Artificial
  probe
  misc_feature (1)..(25): SEQ ID NO: 2458; WAN024FEO_at; Start 1424; Stop 1448
tgctagaggctatccaagaccgtct

SEQ ID NO: 203304 - DNA, 25 bp, Artificial
  probe
  misc_feature (1)..(25): SEQ ID NO: 2458; WAN024FEO_at; Start 23; Stop 47
tagatgtgcccttgatgcagacgga

SEQ ID NO: 203305 - DNA, 25 bp, Artificial
  probe
  misc_feature (1)..(25): SEQ ID NO: 2458; WAN024FEO_at; Start 962; Stop 986
tgactcctcagatgaccgagcgttt

SEQ ID NO: 203306 - DNA, 25 bp, Artificial
  probe
  misc_feature (1)..(25): SEQ ID NO: 2458; WAN024FEO_at; Start 632; Stop 656
cagagagcgcttccttggctagctt

SEQ ID NO: 203307 - DNA, 25 bp, Artificial
  probe
  misc_feature (1)..(25): SEQ ID NO: 2458; WAN024FEO_at; Start 501; Stop 525
tcaggcagtcgatcaaaagaaggtc

SEQ ID NO: 203308 - DNA, 25 bp, Artificial
  probe
  misc_feature (1)..(25): SEQ ID NO: 2458; WAN024FEO_at; Start 2067; Stop 2091
aatgggaatcagacgacaactcggc

SEQ ID NO: 203309 - DNA, 25 bp, Artificial
  probe
  misc_feature (1)..(25): SEQ ID NO: 2458; WAN024FEO_at; Start 659; Stop 683
tagagtcctactcgcgagagcaagt

SEQ ID NO: 203310 - DNA, 25 bp, Artificial
  probe
  misc_feature (1)..(25): SEQ ID NO: 2458; WAN024FEO_at; Start 616; Stop 640
tatctgctgtctcatccagagagcg

SEQ ID NO: 203311 - DNA, 25 bp, Artificial
  probe
  misc_feature (1)..(25): SEQ ID NO: 2458; WAN024FEO_at; Start 349; Stop 373
gacaagattctctatcctctggaag

SEQ ID NO: 203312 - DNA, 25 bp, Artificial
  probe
  misc_feature (1)..(25): SEQ ID NO: 2458; WAN024FEO_at; Start 2335; Stop 2359
caagaacgggaaaatagtgagctcc

SEQ ID NO: 203313 - DNA, 25 bp, Artificial
  probe
  misc_feature (1)..(25): SEQ ID NO: 2458; WAN024FEO_at; Start 1286; Stop 1310
cacgtgctggcaaaggcgtctatca

SEQ ID NO: 203314 - DNA, 25 bp, Artificial
  probe
  misc_feature (1)..(25): SEQ ID NO: 2458; WAN024FEO_at; Start 1663; Stop 1687
tatgggacgggaactcagaaggctt

SEQ ID NO: 203315 - DNA, 25 bp, Artificial
  probe
  misc_feature (1)..(25): SEQ ID NO: 2628; WAN024FEP_at; Start 103; Stop 127
gcttggatttcctcttttcgactta

SEQ ID NO: 203316 - DNA, 25 bp, Artificial
  probe
  misc_feature (1)..(25): SEQ ID NO: 2628; WAN024FEP_at; Start 81; Stop 105
ggaattattcgcctccaacaaggct

SEQ ID NO: 203317 - DNA, 25 bp, Artificial
  probe
  misc_feature (1)..(25): SEQ ID NO: 2628; WAN024FEP_at; Start 199; Stop 223
ccgtattcttccttgagtttggcaa

SEQ ID NO: 203318 - DNA, 25 bp, Artificial
  probe
  misc_feature (1)..(25): SEQ ID NO: 2628; WAN024FEP_at; Start 205; Stop 229
tcttccttgagtttggcaactagcc

SEQ ID NO: 203319 - DNA, 25 bp, Artificial
  probe
  misc_feature (1)..(25): SEQ ID NO: 2628; WAN024FEP_at; Start 68; Stop 92
tggttgctaaaagggaattattcgc

SEQ ID NO: 203320 - DNA, 25 bp, Artificial
  probe
  misc_feature (1)..(25): SEQ ID NO: 2628; WAN024FEP_at; Start 73; Stop 97
gctaaaagggaattattcgcctcca

SEQ ID NO: 203321 - DNA, 25 bp, Artificial
  probe
  misc_feature (1)..(25): SEQ ID NO: 2628; WAN024FEP_at; Start 8; Stop 32
tggctccatccgcaaacaaattatg

SEQ ID NO: 203322 - DNA, 25 bp, Artificial
  probe
  misc_feature (1)..(25): SEQ ID NO: 2628; WAN024FEP_at; Start 153; Stop 177
gtttcgcactaacaggctttcaaag

SEQ ID NO: 203323 - DNA, 25 bp, Artificial
  probe
  misc_feature (1)..(25): SEQ ID NO: 2628; WAN024FEP_at; Start 64; Stop 88
ccagtggttgctaaaagggaattat

SEQ ID NO: 203324 - DNA, 25 bp, Artificial
  probe
  misc_feature (1)..(25): SEQ ID NO: 2628; WAN024FEP_at; Start 94; Stop 118
tccaacaaggcttggatttcctctt

SEQ ID NO: 203325 - DNA, 25 bp, Artificial
  probe
  misc_feature (1)..(25): SEQ ID NO: 2628; WAN024FEP_at; Start 159; Stop 183
cactaacaggctttcaaagatggct

SEQ ID NO: 203326 - DNA, 25 bp, Artificial
  probe
  misc_feature (1)..(25): SEQ ID NO: 2628; WAN024FEP_at; Start 39; Stop 63
aaaatgcccctgctccttaaccaga

SEQ ID NO: 203327 - DNA, 25 bp, Artificial
  probe
  misc_feature (1)..(25): SEQ ID NO: 2628; WAN024FEP_at; Start 26; Stop 50
aattatgccctgcaaaatgcccctg

SEQ ID NO: 203328 - DNA, 25 bp, Artificial
  probe
  misc_feature (1)..(25): SEQ ID NO: 2628; WAN024FEP_at; Start 49; Stop 73
tgctccttaaccagaccagtggttg

SEQ ID NO: 203329 - DNA, 25 bp, Artificial
  probe
  misc_feature (1)..(25): SEQ ID NO: 2628; WAN024FEP_at; Start 145; Stop 169
ctggctttgtttcgcactaacaggc

SEQ ID NO: 203330 - DNA, 25 bp, Artificial
  probe
  misc_feature (1)..(25): SEQ ID NO: 2628; WAN024FEP_at; Start 28; Stop 52
ttatgccctgcaaaatgcccctgct

SEQ ID NO: 203331 - DNA, 25 bp, Artificial
  probe
  misc_feature (1)..(25): SEQ ID NO: 2628; WAN024FEP_at; Start 181; Stop 205
gcttttgctctctcctctccgtatt

SEQ ID NO: 203332 - DNA, 25 bp, Artificial
  probe
  misc_feature (1)..(25): SEQ ID NO: 2628; WAN024FEP_at; Start 171; Stop 195
ttcaaagatggcttttgctctctcc

SEQ ID NO: 203333 - DNA, 25 bp, Artificial
  probe
  misc_feature (1)..(25): SEQ ID NO: 2628; WAN024FEP_at; Start 16; Stop 40
tccgcaaacaaattatgccctgcaa

SEQ ID NO: 203334 - DNA, 25 bp, Artificial
  probe
  misc_feature (1)..(25): SEQ ID NO: 2628; WAN024FEP_at; Start 140; Stop 164
gaatactggctttgtttcgcactaa

SEQ ID NO: 203335 - DNA, 25 bp, Artificial
  probe
  misc_feature (1)..(25): SEQ ID NO: 2628; WAN024FEP_at; Start 135; Stop 159
tacacgaatactggctttgtttcgc

SEQ ID NO: 203336 - DNA, 25 bp, Artificial
  probe
  misc_feature (1)..(25): SEQ ID NO: 2628; WAN024FEP_at; Start 218; Stop 242
tggcaactagccaaactgggagaga

SEQ ID NO: 203337 - DNA, 25 bp, Artificial
  probe
  misc_feature (1)..(25): SEQ ID NO: 2628; WAN024FEP_at; Start 125; Stop 149
ttaggtctgttacacgaatactggc

SEQ ID NO: 203338 - DNA, 25 bp, Artificial
  probe
  misc_feature (1)..(25): SEQ ID NO: 2628; WAN024FEP_at; Start 86; Stop 110
tattcgcctccaacaaggcttggat

SEQ ID NO: 203339 - DNA, 25 bp, Artificial
  probe
  misc_feature (1)..(25): SEQ ID NO: 2628; WAN024FEP_at; Start 78; Stop 102
aagggaattattcgcctccaacaag

SEQ ID NO: 203340 - DNA, 25 bp, Artificial
  probe
  misc_feature (1)..(25): SEQ ID NO: 2628; WAN024FEP_at; Start 99; Stop 123
caaggcttggatttcctcttttcga

SEQ ID NO: 203341 - DNA, 25 bp, Artificial
  probe
  misc_feature (1)..(25): SEQ ID NO: 2628; WAN024FEP_at; Start 222; Stop 246
aactagccaaactgggagagaatag

SEQ ID NO: 203342 - DNA, 25 bp, Artificial
  probe
  misc_feature (1)..(25): SEQ ID NO: 2628; WAN024FEP_at; Start 60; Stop 84
cagaccagtggttgctaaaagggaa

SEQ ID NO: 203343 - DNA, 25 bp, Artificial
  probe
  misc_feature (1)..(25): SEQ ID NO: 2628; WAN024FEP_at; Start 177; Stop 201
gatggcttttgctctctcctctccg

SEQ ID NO: 203344 - DNA, 25 bp, Artificial
  probe
  misc_feature (1)..(25): SEQ ID NO: 2628; WAN024FEP_at; Start 2; Stop 26
tggtaatggctccatccgcaaacaa

SEQ ID NO: 203345 - DNA, 25 bp, Artificial
  probe
  misc_feature (1)..(25): SEQ ID NO: 2628; WAN024FEP_at; Start 117; Stop 141
ttttcgacttaggtctgttacacga

SEQ ID NO: 203346 - DNA, 25 bp, Artificial
  probe
  misc_feature (1)..(25): SEQ ID NO: 2628; WAN024FEP_at; Start 191; Stop 215
tctcctctccgtattcttccttgag

SEQ ID NO: 203347 - DNA, 25 bp, Artificial
  probe
  misc_feature (1)..(25): SEQ ID NO: 2628; WAN024FEP_at; Start 129; Stop 153
gtctgttacacgaatactggctttg

SEQ ID NO: 203348 - DNA, 25 bp, Artificial
  probe
  misc_feature (1)..(25): SEQ ID NO: 2628; WAN024FEP_at; Start 165; Stop 189
caggctttcaaagatggcttttgct

SEQ ID NO: 203349 - DNA, 25 bp, Artificial
  probe
  misc_feature (1)..(25): SEQ ID NO: 5628; WAN024FEQ_at; Start 578; Stop 602
aaatccaagccttgttggaggcgaa

SEQ ID NO: 203350 - DNA, 25 bp, Artificial
  probe
  misc_feature (1)..(25): SEQ ID NO: 5628; WAN024FEQ_at; Start 204; Stop 228
tatcgaagacagagaccagttagac

SEQ ID NO: 203351 - DNA, 25 bp, Artificial
  probe
  misc_feature (1)..(25): SEQ ID NO: 5628; WAN024FEQ_at; Start 727; Stop 751
gatttacaaggtgatgagcgagtgc

SEQ ID NO: 203352 - DNA, 25 bp, Artificial
  probe
  misc_feature (1)..(25): SEQ ID NO: 5628; WAN024FEQ_at; Start 1087; Stop 1111
tgtcaaatactaggcaaaggtggta

SEQ ID NO: 203353 - DNA, 25 bp, Artificial
  probe
  misc_feature (1)..(25): SEQ ID NO: 5628; WAN024FEQ_at; Start 1179; Stop 1203
gagtcatcccgagttcgagcaggta

SEQ ID NO: 203354 - DNA, 25 bp, Artificial
  probe
  misc_feature (1)..(25): SEQ ID NO: 5628; WAN024FEQ_at; Start 162; Stop 186
ggtagcccgtaaactgactctggaa

SEQ ID NO: 203355 - DNA, 25 bp, Artificial
  probe
  misc_feature (1)..(25): SEQ ID NO: 5628; WAN024FEQ_at; Start 702; Stop 726
cagtcagctggttgctccgacgctt

SEQ ID NO: 203356 - DNA, 25 bp, Artificial
  probe
  misc_feature (1)..(25): SEQ ID NO: 5628; WAN024FEQ_at; Start 487; Stop 511
tacggagaggagagagcaaaagcca

SEQ ID NO: 203357 - DNA, 25 bp, Artificial
  probe
  misc_feature (1)..(25): SEQ ID NO: 5628; WAN024FEQ_at; Start 462; Stop 486
gctagttgccaaactcaaggaagaa

SEQ ID NO: 203358 - DNA, 25 bp, Artificial
  probe
  misc_feature (1)..(25): SEQ ID NO: 5628; WAN024FEQ_at; Start 1042; Stop 1066
ttcgcgtccttgcaggaaattcagt

SEQ ID NO: 203359 - DNA, 25 bp, Artificial
  probe
  misc_feature (1)..(25): SEQ ID NO: 5628; WAN024FEQ_at; Start 537; Stop 561
caaagccagtattcgtgtaacagac

SEQ ID NO: 203360 - DNA, 25 bp, Artificial
  probe
  misc_feature (1)..(25): SEQ ID NO: 5628; WAN024FEQ_at; Start 414; Stop 438
caagcgaaaaaacaagcgtgactcc

SEQ ID NO: 203361 - DNA, 25 bp, Artificial
  probe
  misc_feature (1)..(25): SEQ ID NO: 5628; WAN024FEQ_at; Start 1127; Stop 1151
cctgcactatcgtctcagaggagaa

SEQ ID NO: 203362 - DNA, 25 bp, Artificial
  probe
  misc_feature (1)..(25): SEQ ID NO: 5628; WAN024FEQ_at; Start 521; Stop 545
gcctgttagtgcgaaacaaagccag

SEQ ID NO: 203363 - DNA, 25 bp, Artificial
  probe
  misc_feature (1)..(25): SEQ ID NO: 5628; WAN024FEQ_at; Start 658; Stop 682
cataatttgtttgcggatggagcca

SEQ ID NO: 203364 - DNA, 25 bp, Artificial
  probe
  misc_feature (1)..(25): SEQ ID NO: 5628; WAN024FEQ_at; Start 438; Stop 462
cattgcctattctctcccagtttgg

SEQ ID NO: 203365 - DNA, 25 bp, Artificial
  probe
  misc_feature (1)..(25): SEQ ID NO: 5628; WAN024FEQ_at; Start 177; Stop 201
gactctggaatggtacctatcccac

SEQ ID NO: 203366 - DNA, 25 bp, Artificial
  probe
  misc_feature (1)..(25): SEQ ID NO: 5628; WAN024FEQ_at; Start 983; Stop 1007
caggaatcggtcttttgcgccgaaa

SEQ ID NO: 203367 - DNA, 25 bp, Artificial
  probe
  misc_feature (1)..(25): SEQ ID NO: 5628; WAN024FEQ_at; Start 759; Stop 783
ctgtgcggctccaggtgggaaaaca

SEQ ID NO: 203368 - DNA, 25 bp, Artificial
  probe
  misc_feature (1)..(25): SEQ ID NO: 5628; WAN024FEQ_at; Start 563; Stop 587
taagtcgaaaagaggaaatccaagc

SEQ ID NO: 203369 - DNA, 25 bp, Artificial
  probe
  misc_feature (1)..(25): SEQ ID NO: 5628; WAN024FEQ_at; Start 617; Stop 641
caaccactggtctggttaaggagca

SEQ ID NO: 203370 - DNA, 25 bp, Artificial
  probe
  misc_feature (1)..(25): SEQ ID NO: 5628; WAN024FEQ_at; Start 255; Stop 279
gagtgcctaccaactccgctatttg

SEQ ID NO: 203371 - DNA, 25 bp, Artificial
  probe
  misc_feature (1)..(25): SEQ ID NO: 5628; WAN024FEQ_at; Start 1227; Stop 1251
tatcatgaaagacggctgtatcctc

SEQ ID NO: 203372 - DNA, 25 bp, Artificial
  probe
  misc_feature (1)..(25): SEQ ID NO: 5628; WAN024FEQ_at; Start 395; Stop 419
ggccagatattgctagcatcaagcg

SEQ ID NO: 203373 - DNA, 25 bp, Artificial
  probe
  misc_feature (1)..(25): SEQ ID NO: 5628; WAN024FEQ_at; Start 1026; Stop 1050
taaagaaacggcagatttcgcgtcc

SEQ ID NO: 203374 - DNA, 25 bp, Artificial
  probe
  misc_feature (1)..(25): SEQ ID NO: 5628; WAN024FEQ_at; Start 859; Stop 883
caagaaaatgcccaacgtctgggag

SEQ ID NO: 203375 - DNA, 25 bp, Artificial
  probe
  misc_feature (1)..(25): SEQ ID NO: 5628; WAN024FEQ_at; Start 280; Stop 304
gacaagattccagatcatgctgtgg

SEQ ID NO: 203376 - DNA, 25 bp, Artificial
  probe
  misc_feature (1)..(25): SEQ ID NO: 5628; WAN024FEQ_at; Start 125; Stop 149
cagacaagggcttagtgaccgagct

SEQ ID NO: 203377 - DNA, 25 bp, Artificial
  probe
  misc_feature (1)..(25): SEQ ID NO: 5628; WAN024FEQ_at; Start 819; Stop 843
tactgctctggacttgtacgaccac

SEQ ID NO: 203378 - DNA, 25 bp, Artificial
  probe
  misc_feature (1)..(25): SEQ ID NO: 5628; WAN024FEQ_at; Start 776; Stop 800
ggaaaacagcccatatagcctctta

SEQ ID NO: 203379 - DNA, 25 bp, Artificial
  probe
  misc_feature (1)..(25): SEQ ID NO: 5628; WAN024FEQ_at; Start 927; Stop 951
gcatgagttttttgaccaggattcc

SEQ ID NO: 203380 - DNA, 25 bp, Artificial
  probe
  misc_feature (1)..(25): SEQ ID NO: 5628; WAN024FEQ_at; Start 1164; Stop 1188
taaggcctttttagagagtcatccc

SEQ ID NO: 203381 - DNA, 25 bp, Artificial
  probe
  misc_feature (1)..(25): SEQ ID NO: 5628; WAN024FEQ_at; Start 804; Stop 828
tacgacaggtcaggttactgctctg

SEQ ID NO: 203382 - DNA, 25 bp, Artificial
  probe
  misc_feature (1)..(25): SEQ ID NO: 5628; WAN024FEQ_at; Start 904; Stop 928
caaaaattggatgccagaaaggtgc

SEQ ID NO: 203383 - DNA, 25 bp, Artificial
  probe
  misc_feature (1)..(25): SEQ ID NO: 2036; WAN024FER_at; Start 119; Stop 143
ggatttctgagccacttttaaggag

SEQ ID NO: 203384 - DNA, 25 bp, Artificial
  probe
  misc_feature (1)..(25): SEQ ID NO: 2036; WAN024FER_at; Start 62; Stop 86
tgcaatccacaatcccctgcgaatg

SEQ ID NO: 203385 - DNA, 25 bp, Artificial
  probe
  misc_feature (1)..(25): SEQ ID NO: 2036; WAN024FER_at; Start 24; Stop 48
aatagagaaaaagatagcggcaggc

SEQ ID NO: 203386 - DNA, 25 bp, Artificial
  probe
  misc_feature (1)..(25): SEQ ID NO: 2036; WAN024FER_at; Start 170; Stop 194
caatgacggcatttaattcttttga

SEQ ID NO: 203387 - DNA, 25 bp, Artificial
  probe
  misc_feature (1)..(25): SEQ ID NO: 2036; WAN024FER_at; Start 81; Stop 105
cgaatgcgcgattcgaatcatggta

SEQ ID NO: 203388 - DNA, 25 bp, Artificial
  probe
  misc_feature (1)..(25): SEQ ID NO: 2036; WAN024FER_at; Start 111; Stop 135
tacacgatggatttctgagccactt

SEQ ID NO: 203389 - DNA, 25 bp, Artificial
  probe
  misc_feature (1)..(25): SEQ ID NO: 2036; WAN024FER_at; Start 279; Stop 303
gacaaagattgattactcattttga

SEQ ID NO: 203390 - DNA, 25 bp, Artificial
  probe
  misc_feature (1)..(25): SEQ ID NO: 2036; WAN024FER_at; Start 86; Stop 110
gcgcgattcgaatcatggtatcttc

SEQ ID NO: 203391 - DNA, 25 bp, Artificial
  probe
  misc_feature (1)..(25): SEQ ID NO: 2036; WAN024FER_at; Start 137; Stop 161
taaggagaatagtccccgctagcat

SEQ ID NO: 203392 - DNA, 25 bp, Artificial
  probe
  misc_feature (1)..(25): SEQ ID NO: 2036; WAN024FER_at; Start 201; Stop 225
catgctttcctccttttatcaactc

SEQ ID NO: 203393 - DNA, 25 bp, Artificial
  probe
  misc_feature (1)..(25): SEQ ID NO: 2036; WAN024FER_at; Start 266; Stop 290
gccatgaaatcatgacaaagattga

SEQ ID NO: 203394 - DNA, 25 bp, Artificial
  probe
  misc_feature (1)..(25): SEQ ID NO: 2036; WAN024FER_at; Start 174; Stop 198
gacggcatttaattcttttgattct

SEQ ID NO: 203395 - DNA, 25 bp, Artificial
  probe
  misc_feature (1)..(25): SEQ ID NO: 2036; WAN024FER_at; Start 56; Stop 80
ggacattgcaatccacaatcccctg

SEQ ID NO: 203396 - DNA, 25 bp, Artificial
  probe
  misc_feature (1)..(25): SEQ ID NO: 2036; WAN024FER_at; Start 90; Stop 114
gattcgaatcatggtatcttctaca

SEQ ID NO: 203397 - DNA, 25 bp, Artificial
  probe
  misc_feature (1)..(25): SEQ ID NO: 2036; WAN024FER_at; Start 154; Stop 178
gctagcataatcacatcaatgacgg

SEQ ID NO: 203398 - DNA, 25 bp, Artificial
  probe
  misc_feature (1)..(25): SEQ ID NO: 2036; WAN024FER_at; Start 48; Stop 72
catggcaaggacattgcaatccaca

SEQ ID NO: 203399 - DNA, 25 bp, Artificial
  probe
  misc_feature (1)..(25): SEQ ID NO: 2036; WAN024FER_at; Start 99; Stop 123
catggtatcttctacacgatggatt

SEQ ID NO: 203400 - DNA, 25 bp, Artificial
  probe
  misc_feature (1)..(25): SEQ ID NO: 2036; WAN024FER_at; Start 217; Stop 241
tatcaactccctctattctatcaca

SEQ ID NO: 203401 - DNA, 25 bp, Artificial
  probe
  misc_feature (1)..(25): SEQ ID NO: 2036; WAN024FER_at; Start 275; Stop 299
tcatgacaaagattgattactcatt

SEQ ID NO: 203402 - DNA, 25 bp, Artificial
  probe
  misc_feature (1)..(25): SEQ ID NO: 2036; WAN024FER_at; Start 38; Stop 62
tagcggcaggcatggcaaggacatt

SEQ ID NO: 203403 - DNA, 25 bp, Artificial
  probe
  misc_feature (1)..(25): SEQ ID NO: 2036; WAN024FER_at; Start 135; Stop 159
tttaaggagaatagtccccgctagc

SEQ ID NO: 203404 - DNA, 25 bp, Artificial
  probe
  misc_feature (1)..(25): SEQ ID NO: 2036; WAN024FER_at; Start 127; Stop 151
gagccacttttaaggagaatagtcc

SEQ ID NO: 203405 - DNA, 25 bp, Artificial
  probe
  misc_feature (1)..(25): SEQ ID NO: 2036; WAN024FER_at; Start 2; Stop 26
tgcgcgaaatattggtattttcaat

SEQ ID NO: 203406 - DNA, 25 bp, Artificial
  probe
  misc_feature (1)..(25): SEQ ID NO: 2036; WAN024FER_at; Start 26; Stop 50
tagagaaaaagatagcggcaggcat

SEQ ID NO: 203407 - DNA, 25 bp, Artificial
  probe
  misc_feature (1)..(25): SEQ ID NO: 2036; WAN024FER_at; Start 189; Stop 213
ttttgattcttccatgctttcctcc

SEQ ID NO: 203408 - DNA, 25 bp, Artificial
  probe
  misc_feature (1)..(25): SEQ ID NO: 2036; WAN024FER_at; Start 143; Stop 167
gaatagtccccgctagcataatcac

SEQ ID NO: 203409 - DNA, 25 bp, Artificial
  probe
  misc_feature (1)..(25): SEQ ID NO: 2036; WAN024FER_at; Start 106; Stop 130
tcttctacacgatggatttctgagc

SEQ ID NO: 203410 - DNA, 25 bp, Artificial
  probe
  misc_feature (1)..(25): SEQ ID NO: 2036; WAN024FER_at; Start 43; Stop 67
gcaggcatggcaaggacattgcaat

SEQ ID NO: 203411 - DNA, 25 bp, Artificial
  probe
  misc_feature (1)..(25): SEQ ID NO: 2036; WAN024FER_at; Start 52; Stop 76
gcaaggacattgcaatccacaatcc

SEQ ID NO: 203412 - DNA, 25 bp, Artificial
  probe
  misc_feature (1)..(25): SEQ ID NO: 2036; WAN024FER_at; Start 158; Stop 182
gcataatcacatcaatgacggcatt

SEQ ID NO: 203413 - DNA, 25 bp, Artificial
  probe
  misc_feature (1)..(25): SEQ ID NO: 2036; WAN024FER_at; Start 256; Stop 280
aaaaatctttgccatgaaatcatga

SEQ ID NO: 203414 - DNA, 25 bp, Artificial
  probe
  misc_feature (1)..(25): SEQ ID NO: 2036; WAN024FER_at; Start 124; Stop 148
tctgagccacttttaaggagaatag

SEQ ID NO: 203415 - DNA, 25 bp, Artificial
  probe
  misc_feature (1)..(25): SEQ ID NO: 2036; WAN024FER_at; Start 95; Stop 119
gaatcatggtatcttctacacgatg

SEQ ID NO: 203416 - DNA, 25 bp, Artificial
  probe
  misc_feature (1)..(25): SEQ ID NO: 2036; WAN024FER_at; Start 72; Stop 96
aatcccctgcgaatgcgcgattcga

SEQ ID NO: 203417 - DNA, 25 bp, Artificial
  probe
  misc_feature (1)..(25): SEQ ID NO: 2206; WAN024FES_at; Start 559; Stop 583
tacacaggttttccttcaacggcag

SEQ ID NO: 203418 - DNA, 25 bp, Artificial
  probe
  misc_feature (1)..(25): SEQ ID NO: 2206; WAN024FES_at; Start 177; Stop 201
tattgaaaataccaatatttcgcgc

SEQ ID NO: 203419 - DNA, 25 bp, Artificial
  probe
  misc_feature (1)..(25): SEQ ID NO: 2206; WAN024FES_at; Start 682; Stop 706
agtaagatgtttgaatccctgctca

SEQ ID NO: 203420 - DNA, 25 bp, Artificial
  probe
  misc_feature (1)..(25): SEQ ID NO: 2206; WAN024FES_at; Start 207; Stop 231
gcgcgtgacctcctcttcttataac

SEQ ID NO: 203421 - DNA, 25 bp, Artificial
  probe
  misc_feature (1)..(25): SEQ ID NO: 2206; WAN024FES_at; Start 142; Stop 166
aatgtccttgccatgcctgccgcta

SEQ ID NO: 203422 - DNA, 25 bp, Artificial
  probe
  misc_feature (1)..(25): SEQ ID NO: 2206; WAN024FES_at; Start 625; Stop 649
attgccttgaccaatgcggtccgtg

SEQ ID NO: 203423 - DNA, 25 bp, Artificial
  probe
  misc_feature (1)..(25): SEQ ID NO: 2206; WAN024FES_at; Start 363; Stop 387
tctggctgcgacctttagtgctcct

SEQ ID NO: 203424 - DNA, 25 bp, Artificial
  probe
  misc_feature (1)..(25): SEQ ID NO: 2206; WAN024FES_at; Start 408; Stop 432
cggaaatatctacgacgcacttggg

SEQ ID NO: 203425 - DNA, 25 bp, Artificial
  probe
  misc_feature (1)..(25): SEQ ID NO: 2206; WAN024FES_at; Start 467; Stop 491
ccctctatgtggaaaaatttatccg

SEQ ID NO: 203426 - DNA, 25 bp, Artificial
  probe
  misc_feature (1)..(25): SEQ ID NO: 2206; WAN024FES_at; Start 723; Stop 747
ggcaggaacttctgtcgccttggta

SEQ ID NO: 203427 - DNA, 25 bp, Artificial
  probe
  misc_feature (1)..(25): SEQ ID NO: 2206; WAN024FES_at; Start 282; Stop 306
gcagattgacttagaaacagccttt

SEQ ID NO: 203428 - DNA, 25 bp, Artificial
  probe
  misc_feature (1)..(25): SEQ ID NO: 2206; WAN024FES_at; Start 654; Stop 678
tatgaccaaccacataaactctggt

SEQ ID NO: 203429 - DNA, 25 bp, Artificial
  probe
  misc_feature (1)..(25): SEQ ID NO: 2206; WAN024FES_at; Start 348; Stop 372
taagttgcaggtaactctggctgcg

SEQ ID NO: 203430 - DNA, 25 bp, Artificial
  probe
  misc_feature (1)..(25): SEQ ID NO: 2206; WAN024FES_at; Start 251; Stop 275
tgaaccagatttctcgtcagctagt

SEQ ID NO: 203431 - DNA, 25 bp, Artificial
  probe
  misc_feature (1)..(25): SEQ ID NO: 2206; WAN024FES_at; Start 79; Stop 103
gaaatccatcgtgtagaagatacca

SEQ ID NO: 203432 - DNA, 25 bp, Artificial
  probe
  misc_feature (1)..(25): SEQ ID NO: 2206; WAN024FES_at; Start 575; Stop 599
caacggcagatttgattatagctgg

SEQ ID NO: 203433 - DNA, 25 bp, Artificial
  probe
  misc_feature (1)..(25): SEQ ID NO: 2206; WAN024FES_at; Start 639; Stop 663
tgcggtccgtgatattatgaccaac

SEQ ID NO: 203434 - DNA, 25 bp, Artificial
  probe
  misc_feature (1)..(25): SEQ ID NO: 2206; WAN024FES_at; Start 588; Stop 612
gattatagctggtgcggtcatgccg

SEQ ID NO: 203435 - DNA, 25 bp, Artificial
  probe
  misc_feature (1)..(25): SEQ ID NO: 2206; WAN024FES_at; Start 223; Stop 247
tcttataacatcgaaaaagtctgcg

SEQ ID NO: 203436 - DNA, 25 bp, Artificial
  probe
  misc_feature (1)..(25): SEQ ID NO: 2206; WAN024FES_at; Start 53; Stop 77
ggactattctccttaaaagtggctc

SEQ ID NO: 203437 - DNA, 25 bp, Artificial
  probe
  misc_feature (1)..(25): SEQ ID NO: 2206; WAN024FES_at; Start 499; Stop 523
tttgtgacagcctttgctggagcct

SEQ ID NO: 203438 - DNA, 25 bp, Artificial
  probe
  misc_feature (1)..(25): SEQ ID NO: 2206; WAN024FES_at; Start 29; Stop 53
tcattgatgtgattatgctagcggg

SEQ ID NO: 203439 - DNA, 25 bp, Artificial
  probe
  misc_feature (1)..(25): SEQ ID NO: 2206; WAN024FES_at; Start 297; Stop 321
aacagcctttaagcaattgacggcc

SEQ ID NO: 203440 - DNA, 25 bp, Artificial
  probe
  misc_feature (1)..(25): SEQ ID NO: 2206; WAN024FES_at; Start 486; Stop 510
tatccgaattccctttgtgacagcc

SEQ ID NO: 203441 - DNA, 25 bp, Artificial
  probe
  misc_feature (1)..(25): SEQ ID NO: 2206; WAN024FES_at; Start 544; Stop 568
cagttttgggctcgctacacaggtt

SEQ ID NO: 203442 - DNA, 25 bp, Artificial
  probe
  misc_feature (1)..(25): SEQ ID NO: 2206; WAN024FES_at; Start 7; Stop 31
gaatcaaaagaattaaatgccgtca

SEQ ID NO: 203443 - DNA, 25 bp, Artificial
  probe
  misc_feature (1)..(25): SEQ ID NO: 2206; WAN024FES_at; Start 66; Stop 90
taaaagtggctcagaaatccatcgt

SEQ ID NO: 203444 - DNA, 25 bp, Artificial
  probe
  misc_feature (1)..(25): SEQ ID NO: 2206; WAN024FES_at; Start 192; Stop 216
tatttcgcgcatgaagcgcgtgacc

SEQ ID NO: 203445 - DNA, 25 bp, Artificial
  probe
  misc_feature (1)..(25): SEQ ID NO: 2206; WAN024FES_at; Start 129; Stop 153
gattgtggattgcaatgtccttgcc

SEQ ID NO: 203446 - DNA, 25 bp, Artificial
  probe
  misc_feature (1)..(25): SEQ ID NO: 2206; WAN024FES_at; Start 514; Stop 538
gctggagcctttgtctttgggataa

SEQ ID NO: 203447 - DNA, 25 bp, Artificial
  probe
  misc_feature (1)..(25): SEQ ID NO: 2206; WAN024FES_at; Start 739; Stop 763
gccttggtattgatgaactaactaa

SEQ ID NO: 203448 - DNA, 25 bp, Artificial
  probe
  misc_feature (1)..(25): SEQ ID NO: 2206; WAN024FES_at; Start 94; Stop 118
gaagataccatgattcgaatcgcgc

SEQ ID NO: 203449 - DNA, 25 bp, Artificial
  probe
  misc_feature (1)..(25): SEQ ID NO: 2206; WAN024FES_at; Start 433; Stop 457
gcaggagtggcgaccttatttggtt

SEQ ID NO: 203450 - DNA, 25 bp, Artificial
  probe
  misc_feature (1)..(25): SEQ ID NO: 2206; WAN024FES_at; Start 235; Stop 259
gaaaaagtctgcgatgtgaaccaga

SEQ ID NO: 203451 - DNA, 25 bp, Artificial
  probe
  misc_feature (1)..(25): SEQ ID NO: 7701; WAN024FET_at; Start 54; Stop 78
tacgatactcgatgtgtttttatat

SEQ ID NO: 203452 - DNA, 25 bp, Artificial
  probe
  misc_feature (1)..(25): SEQ ID NO: 7701; WAN024FET_at; Start 52; Stop 76
tctacgatactcgatgtgtttttat

SEQ ID NO: 203453 - DNA, 25 bp, Artificial
  probe
  misc_feature (1)..(25): SEQ ID NO: 7701; WAN024FET_at; Start 38; Stop 62
ttatttctgtaaagtctacgatact

SEQ ID NO: 203454 - DNA, 25 bp, Artificial
  probe
  misc_feature (1)..(25): SEQ ID NO: 7701; WAN024FET_at; Start 5; Stop 29
taatttatttatctcatttttcaga

SEQ ID NO: 203455 - DNA, 25 bp, Artificial
  probe
  misc_feature (1)..(25): SEQ ID NO: 7701; WAN024FET_at; Start 46; Stop 70
gtaaagtctacgatactcgatgtgt

SEQ ID NO: 203456 - DNA, 25 bp, Artificial
  probe
  misc_feature (1)..(25): SEQ ID NO: 7701; WAN024FET_at; Start 7; Stop 31
atttatttatctcatttttcagaaa

SEQ ID NO: 203457 - DNA, 25 bp, Artificial
  probe
  misc_feature (1)..(25): SEQ ID NO: 7701; WAN024FET_at; Start 36; Stop 60
ttttatttctgtaaagtctacgata

SEQ ID NO: 203458 - DNA, 25 bp, Artificial
  probe
  misc_feature (1)..(25): SEQ ID NO: 7701; WAN024FET_at; Start 45; Stop 69
tgtaaagtctacgatactcgatgtg

SEQ ID NO: 203459 - DNA, 25 bp, Artificial
  probe
  misc_feature (1)..(25): SEQ ID NO: 7701; WAN024FET_at; Start 43; Stop 67
tctgtaaagtctacgatactcgatg

SEQ ID NO: 203460 - DNA, 25 bp, Artificial
  probe
  misc_feature (1)..(25): SEQ ID NO: 7701; WAN024FET_at; Start 53; Stop 77
ctacgatactcgatgtgtttttata

SEQ ID NO: 203461 - DNA, 25 bp, Artificial
  probe
  misc_feature (1)..(25): SEQ ID NO: 7701; WAN024FET_at; Start 47; Stop 71
taaagtctacgatactcgatgtgtt

SEQ ID NO: 203462 - DNA, 25 bp, Artificial
  probe
  misc_feature (1)..(25): SEQ ID NO: 7701; WAN024FET_at; Start 34; Stop 58
tcttttatttctgtaaagtctacga

SEQ ID NO: 203463 - DNA, 25 bp, Artificial
  probe
  misc_feature (1)..(25): SEQ ID NO: 7701; WAN024FET_at; Start 51; Stop 75
gtctacgatactcgatgtgttttta

SEQ ID NO: 203464 - DNA, 25 bp, Artificial
  probe
  misc_feature (1)..(25): SEQ ID NO: 7701; WAN024FET_at; Start 44; Stop 68
ctgtaaagtctacgatactcgatgt

SEQ ID NO: 203465 - DNA, 25 bp, Artificial
  probe
  misc_feature (1)..(25): SEQ ID NO: 7701; WAN024FET_at; Start 37; Stop 61
tttatttctgtaaagtctacgatac

SEQ ID NO: 203466 - DNA, 25 bp, Artificial
  probe
  misc_feature (1)..(25): SEQ ID NO: 7701; WAN024FET_at; Start 55; Stop 79
acgatactcgatgtgtttttatata

SEQ ID NO: 203467 - DNA, 25 bp, Artificial
  probe
  misc_feature (1)..(25): SEQ ID NO: 7701; WAN024FET_at; Start 40; Stop 64
atttctgtaaagtctacgatactcg

SEQ ID NO: 203468 - DNA, 25 bp, Artificial
  probe
  misc_feature (1)..(25): SEQ ID NO: 7701; WAN024FET_at; Start 8; Stop 32
tttatttatctcatttttcagaaaa

SEQ ID NO: 203469 - DNA, 25 bp, Artificial
  probe
  misc_feature (1)..(25): SEQ ID NO: 7701; WAN024FET_at; Start 39; Stop 63
tatttctgtaaagtctacgatactc

SEQ ID NO: 203470 - DNA, 25 bp, Artificial
  probe
  misc_feature (1)..(25): SEQ ID NO: 7701; WAN024FET_at; Start 35; Stop 59
cttttatttctgtaaagtctacgat

SEQ ID NO: 203471 - DNA, 25 bp, Artificial
  probe
  misc_feature (1)..(25): SEQ ID NO: 7701; WAN024FET_at; Start 41; Stop 65
tttctgtaaagtctacgatactcga

SEQ ID NO: 203472 - DNA, 25 bp, Artificial
  probe
  misc_feature (1)..(25): SEQ ID NO: 7701; WAN024FET_at; Start 50; Stop 74
agtctacgatactcgatgtgttttt

SEQ ID NO: 203473 - DNA, 25 bp, Artificial
  probe
  misc_feature (1)..(25): SEQ ID NO: 7701; WAN024FET_at; Start 25; Stop 49
tcagaaaattcttttatttctgtaa

SEQ ID NO: 203474 - DNA, 25 bp, Artificial
  probe
  misc_feature (1)..(25): SEQ ID NO: 7701; WAN024FET_at; Start 49; Stop 73
aagtctacgatactcgatgtgtttt

SEQ ID NO: 203475 - DNA, 25 bp, Artificial
  probe
  misc_feature (1)..(25): SEQ ID NO: 7701; WAN024FET_at; Start 48; Stop 72
aaagtctacgatactcgatgtgttt

SEQ ID NO: 203476 - DNA, 25 bp, Artificial
  probe
  misc_feature (1)..(25): SEQ ID NO: 7701; WAN024FET_at; Start 4; Stop 28
ttaatttatttatctcatttttcag

SEQ ID NO: 203477 - DNA, 25 bp, Artificial
  probe
  misc_feature (1)..(25): SEQ ID NO: 7701; WAN024FET_at; Start 42; Stop 66
ttctgtaaagtctacgatactcgat

SEQ ID NO: 203478 - DNA, 25 bp, Artificial
  probe
  misc_feature (1)..(25): SEQ ID NO: 7701; WAN024FET_at; Start 6; Stop 30
aatttatttatctcatttttcagaa

SEQ ID NO: 203479 - DNA, 25 bp, Artificial
  probe
  misc_feature (1)..(25): SEQ ID NO: 2972; WAN024FEU_at; Start 104; Stop 128
gctttattatagtcccctgtcacaa

SEQ ID NO: 203480 - DNA, 25 bp, Artificial
  probe
  misc_feature (1)..(25): SEQ ID NO: 2972; WAN024FEU_at; Start 195; Stop 219
ccacagcaggtgtcttataaagaat

SEQ ID NO: 203481 - DNA, 25 bp, Artificial
  probe
  misc_feature (1)..(25): SEQ ID NO: 2972; WAN024FEU_at; Start 23; Stop 47
agtctgagaatcactgttccgctag

SEQ ID NO: 203482 - DNA, 25 bp, Artificial
  probe
  misc_feature (1)..(25): SEQ ID NO: 2972; WAN024FEU_at; Start 155; Stop 179
taacctggaaccagcggtgccaaaa

SEQ ID NO: 203483 - DNA, 25 bp, Artificial
  probe
  misc_feature (1)..(25): SEQ ID NO: 2972; WAN024FEU_at; Start 116; Stop 140
tcccctgtcacaaaaaaggcagttg

SEQ ID NO: 203484 - DNA, 25 bp, Artificial
  probe
  misc_feature (1)..(25): SEQ ID NO: 2972; WAN024FEU_at; Start 28; Stop 52
gagaatcactgttccgctagccatt

SEQ ID NO: 203485 - DNA, 25 bp, Artificial
  probe
  misc_feature (1)..(25): SEQ ID NO: 2972; WAN024FEU_at; Start 37; Stop 61
tgttccgctagccattccaatagag

SEQ ID NO: 203486 - DNA, 25 bp, Artificial
  probe
  misc_feature (1)..(25): SEQ ID NO: 2972; WAN024FEU_at; Start 193; Stop 217
gaccacagcaggtgtcttataaaga

SEQ ID NO: 203487 - DNA, 25 bp, Artificial
  probe
  misc_feature (1)..(25): SEQ ID NO: 2972; WAN024FEU_at; Start 70; Stop 94
agccaacatgacaaccaaggtcgca

SEQ ID NO: 203488 - DNA, 25 bp, Artificial
  probe
  misc_feature (1)..(25): SEQ ID NO: 2972; WAN024FEU_at; Start 177; Stop 201
aaatggccaagataaagaccacagc

SEQ ID NO: 203489 - DNA, 25 bp, Artificial
  probe
  misc_feature (1)..(25): SEQ ID NO: 2972; WAN024FEU_at; Start 101; Stop 125
agtgctttattatagtcccctgtca

SEQ ID NO: 203490 - DNA, 25 bp, Artificial
  probe
  misc_feature (1)..(25): SEQ ID NO: 2972; WAN024FEU_at; Start 153; Stop 177
gataacctggaaccagcggtgccaa

SEQ ID NO: 203491 - DNA, 25 bp, Artificial
  probe
  misc_feature (1)..(25): SEQ ID NO: 2972; WAN024FEU_at; Start 93; Stop 117
cacttgccagtgctttattatagtc

SEQ ID NO: 203492 - DNA, 25 bp, Artificial
  probe
  misc_feature (1)..(25): SEQ ID NO: 2972; WAN024FEU_at; Start 25; Stop 49
tctgagaatcactgttccgctagcc

SEQ ID NO: 203493 - DNA, 25 bp, Artificial
  probe
  misc_feature (1)..(25): SEQ ID NO: 2972; WAN024FEU_at; Start 85; Stop 109
caaggtcgcacttgccagtgcttta

SEQ ID NO: 203494 - DNA, 25 bp, Artificial
  probe
  misc_feature (1)..(25): SEQ ID NO: 2972; WAN024FEU_at; Start 181; Stop 205
ggccaagataaagaccacagcaggt

SEQ ID NO: 203495 - DNA, 25 bp, Artificial
  probe
  misc_feature (1)..(25): SEQ ID NO: 2972; WAN024FEU_at; Start 81; Stop 105
caaccaaggtcgcacttgccagtgc

SEQ ID NO: 203496 - DNA, 25 bp, Artificial
  probe
  misc_feature (1)..(25): SEQ ID NO: 2972; WAN024FEU_at; Start 111; Stop 135
tatagtcccctgtcacaaaaaaggc

SEQ ID NO: 203497 - DNA, 25 bp, Artificial
  probe
  misc_feature (1)..(25): SEQ ID NO: 2972; WAN024FEU_at; Start 73; Stop 97
caacatgacaaccaaggtcgcactt

SEQ ID NO: 203498 - DNA, 25 bp, Artificial
  probe
  misc_feature (1)..(25): SEQ ID NO: 2972; WAN024FEU_at; Start 40; Stop 64
tccgctagccattccaatagagatt

SEQ ID NO: 203499 - DNA, 25 bp, Artificial
  probe
  misc_feature (1)..(25): SEQ ID NO: 2972; WAN024FEU_at; Start 200; Stop 224
gcaggtgtcttataaagaatactta

SEQ ID NO: 203500 - DNA, 25 bp, Artificial
  probe
  misc_feature (1)..(25): SEQ ID NO: 2972; WAN024FEU_at; Start 146; Stop 170
taggagagataacctggaaccagcg

SEQ ID NO: 203501 - DNA, 25 bp, Artificial
  probe
  misc_feature (1)..(25): SEQ ID NO: 2972; WAN024FEU_at; Start 161; Stop 185
ggaaccagcggtgccaaaatggcca

SEQ ID NO: 203502 - DNA, 25 bp, Artificial
  probe
  misc_feature (1)..(25): SEQ ID NO: 2972; WAN024FEU_at; Start 184; Stop 208
caagataaagaccacagcaggtgtc

SEQ ID NO: 203503 - DNA, 25 bp, Artificial
  probe
  misc_feature (1)..(25): SEQ ID NO: 2972; WAN024FEU_at; Start 187; Stop 211
gataaagaccacagcaggtgtctta

SEQ ID NO: 203504 - DNA, 25 bp, Artificial
  probe
  misc_feature (1)..(25): SEQ ID NO: 2972; WAN024FEU_at; Start 78; Stop 102
tgacaaccaaggtcgcacttgccag

SEQ ID NO: 203505 - DNA, 25 bp, Artificial
  probe
  misc_feature (1)..(25): SEQ ID NO: 2972; WAN024FEU_at; Start 113; Stop 137
tagtcccctgtcacaaaaaaggcag

SEQ ID NO: 203506 - DNA, 25 bp, Artificial
  probe
  misc_feature (1)..(25): SEQ ID NO: 2972; WAN024FEU_at; Start 44; Stop 68
ctagccattccaatagagattacca

SEQ ID NO: 203507 - DNA, 25 bp, Artificial
  probe
  misc_feature (1)..(25): SEQ ID NO: 2972; WAN024FEU_at; Start 173; Stop 197
gccaaaatggccaagataaagacca

SEQ ID NO: 203508 - DNA, 25 bp, Artificial
  probe
  misc_feature (1)..(25): SEQ ID NO: 2972; WAN024FEU_at; Start 142; Stop 166
tcggtaggagagataacctggaacc

SEQ ID NO: 203509 - DNA, 25 bp, Artificial
  probe
  misc_feature (1)..(25): SEQ ID NO: 2972; WAN024FEU_at; Start 160; Stop 184
tggaaccagcggtgccaaaatggcc

SEQ ID NO: 203510 - DNA, 25 bp, Artificial
  probe
  misc_feature (1)..(25): SEQ ID NO: 2972; WAN024FEU_at; Start 33; Stop 57
tcactgttccgctagccattccaat

SEQ ID NO: 203511 - DNA, 25 bp, Artificial
  probe
  misc_feature (1)..(25): SEQ ID NO: 2972; WAN024FEU_at; Start 97; Stop 121
tgccagtgctttattatagtcccct

SEQ ID NO: 203512 - DNA, 25 bp, Artificial
  probe
  misc_feature (1)..(25): SEQ ID NO: 2972; WAN024FEU_at; Start 149; Stop 173
gagagataacctggaaccagcggtg

SEQ ID NO: 203513 - DNA, 25 bp, Artificial
  probe
  misc_feature (1)..(25): SEQ ID NO: 1347; WAN024FEV_at; Start 381; Stop 405
tattggaatggctagcggaacagtg

SEQ ID NO: 203514 - DNA, 25 bp, Artificial
  probe
  misc_feature (1)..(25): SEQ ID NO: 1347; WAN024FEV_at; Start 46; Stop 70
gccattatcacttttttaatcgtac

SEQ ID NO: 203515 - DNA, 25 bp, Artificial
  probe
  misc_feature (1)..(25): SEQ ID NO: 1347; WAN024FEV_at; Start 222; Stop 246
tctttataagacacctgctgtggtc

SEQ ID NO: 203516 - DNA, 25 bp, Artificial
  probe
  misc_feature (1)..(25): SEQ ID NO: 1347; WAN024FEV_at; Start 112; Stop 136
ggcatgactgtctggctaatctatc

SEQ ID NO: 203517 - DNA, 25 bp, Artificial
  probe
  misc_feature (1)..(25): SEQ ID NO: 1347; WAN024FEV_at; Start 392; Stop 416
ctagcggaacagtgattctcagact

SEQ ID NO: 203518 - DNA, 25 bp, Artificial
  probe
  misc_feature (1)..(25): SEQ ID NO: 1347; WAN024FEV_at; Start 34; Stop 58
gcaagttttcttgccattatcactt

SEQ ID NO: 203519 - DNA, 25 bp, Artificial
  probe
  misc_feature (1)..(25): SEQ ID NO: 1347; WAN024FEV_at; Start 242; Stop 266
tggtctttatcttggccattttggc

SEQ ID NO: 203520 - DNA, 25 bp, Artificial
  probe
  misc_feature (1)..(25): SEQ ID NO: 1347; WAN024FEV_at; Start 273; Stop 297
ggttccaggttatctctcctaccga

SEQ ID NO: 203521 - DNA, 25 bp, Artificial
  probe
  misc_feature (1)..(25): SEQ ID NO: 1347; WAN024FEV_at; Start 14; Stop 38
cctttttattacaagcagtagcaag

SEQ ID NO: 203522 - DNA, 25 bp, Artificial
  probe
  misc_feature (1)..(25): SEQ ID NO: 1347; WAN024FEV_at; Start 233; Stop 257
cacctgctgtggtctttatcttggc

SEQ ID NO: 203523 - DNA, 25 bp, Artificial
  probe
  misc_feature (1)..(25): SEQ ID NO: 1347; WAN024FEV_at; Start 23; Stop 47
tacaagcagtagcaagttttcttgc

SEQ ID NO: 203524 - DNA, 25 bp, Artificial
  probe
  misc_feature (1)..(25): SEQ ID NO: 1347; WAN024FEV_at; Start 170; Stop 194
ctaccttcattgcagccattattgg

SEQ ID NO: 203525 - DNA, 25 bp, Artificial
  probe
  misc_feature (1)..(25): SEQ ID NO: 1347; WAN024FEV_at; Start 104; Stop 128
ggattttgggcatgactgtctggct

SEQ ID NO: 203526 - DNA, 25 bp, Artificial
  probe
  misc_feature (1)..(25): SEQ ID NO: 1347; WAN024FEV_at; Start 135; Stop 159
tctcttgctcaaggaaccgaccaat

SEQ ID NO: 203527 - DNA, 25 bp, Artificial
  probe
  misc_feature (1)..(25): SEQ ID NO: 1347; WAN024FEV_at; Start 199; Stop 223
tgtgtcagccagattttaagtattc

SEQ ID NO: 203528 - DNA, 25 bp, Artificial
  probe
  misc_feature (1)..(25): SEQ ID NO: 1347; WAN024FEV_at; Start 215; Stop 239
taagtattctttataagacacctgc

SEQ ID NO: 203529 - DNA, 25 bp, Artificial
  probe
  misc_feature (1)..(25): SEQ ID NO: 1347; WAN024FEV_at; Start 320; Stop 344
gggactataataaagcactggcaag

SEQ ID NO: 203530 - DNA, 25 bp, Artificial
  probe
  misc_feature (1)..(25): SEQ ID NO: 1347; WAN024FEV_at; Start 256; Stop 280
gccattttggcaccgctggttccag

SEQ ID NO: 203531 - DNA, 25 bp, Artificial
  probe
  misc_feature (1)..(25): SEQ ID NO: 1347; WAN024FEV_at; Start 125; Stop 149
ggctaatctatctcttgctcaagga

SEQ ID NO: 203532 - DNA, 25 bp, Artificial
  probe
  misc_feature (1)..(25): SEQ ID NO: 1347; WAN024FEV_at; Start 374; Stop 398
taatctctattggaatggctagcgg

SEQ ID NO: 203533 - DNA, 25 bp, Artificial
  probe
  misc_feature (1)..(25): SEQ ID NO: 1347; WAN024FEV_at; Start 424; Stop 448
tatataaaaacacatcgagtatcgt

SEQ ID NO: 203534 - DNA, 25 bp, Artificial
  probe
  misc_feature (1)..(25): SEQ ID NO: 1347; WAN024FEV_at; Start 345; Stop 369
tgcgaccttggttgtcatgttggct

SEQ ID NO: 203535 - DNA, 25 bp, Artificial
  probe
  misc_feature (1)..(25): SEQ ID NO: 1347; WAN024FEV_at; Start 299; Stop 323
caactgccttttttgtgacagggga

SEQ ID NO: 203536 - DNA, 25 bp, Artificial
  probe
  misc_feature (1)..(25): SEQ ID NO: 1347; WAN024FEV_at; Start 62; Stop 86
taatcgtactcaatgtgcaacggtc

SEQ ID NO: 203537 - DNA, 25 bp, Artificial
  probe
  misc_feature (1)..(25): SEQ ID NO: 1347; WAN024FEV_at; Start 7; Stop 31
ctaacaacctttttattacaagcag

SEQ ID NO: 203538 - DNA, 25 bp, Artificial
  probe
  misc_feature (1)..(25): SEQ ID NO: 1347; WAN024FEV_at; Start 337; Stop 361
ctggcaagtgcgaccttggttgtca

SEQ ID NO: 203539 - DNA, 25 bp, Artificial
  probe
  misc_feature (1)..(25): SEQ ID NO: 1347; WAN024FEV_at; Start 147; Stop 171
ggaaccgaccaatgtcattgtagct

SEQ ID NO: 203540 - DNA, 25 bp, Artificial
  probe
  misc_feature (1)..(25): SEQ ID NO: 1347; WAN024FEV_at; Start 70; Stop 94
ctcaatgtgcaacggtctatgctct

SEQ ID NO: 203541 - DNA, 25 bp, Artificial
  probe
  misc_feature (1)..(25): SEQ ID NO: 1347; WAN024FEV_at; Start 162; Stop 186
cattgtagctaccttcattgcagcc

SEQ ID NO: 203542 - DNA, 25 bp, Artificial
  probe
  misc_feature (1)..(25): SEQ ID NO: 1347; WAN024FEV_at; Start 387; Stop 411
aatggctagcggaacagtgattctc

SEQ ID NO: 203543 - DNA, 25 bp, Artificial
  probe
  misc_feature (1)..(25): SEQ ID NO: 1347; WAN024FEV_at; Start 141; Stop 165
gctcaaggaaccgaccaatgtcatt

SEQ ID NO: 203544 - DNA, 25 bp, Artificial
  probe
  misc_feature (1)..(25): SEQ ID NO: 1347; WAN024FEV_at; Start 185; Stop 209
ccattattggttcttgtgtcagcca

SEQ ID NO: 203545 - DNA, 25 bp, Artificial
  probe
  misc_feature (1)..(25): SEQ ID NO: 1347; WAN024FEV_at; Start 263; Stop 287
tggcaccgctggttccaggttatct

SEQ ID NO: 203546 - DNA, 25 bp, Artificial
  probe
  misc_feature (1)..(25): SEQ ID NO: 1347; WAN024FEV_at; Start 327; Stop 351
taataaagcactggcaagtgcgacc

SEQ ID NO: 203547 - DNA, 25 bp, Artificial
  probe
  misc_feature (1)..(25): SEQ ID NO: 1992; WAN024FEW_at; Start 109; Stop 133
atagagtcactagcactggccgcca

SEQ ID NO: 203548 - DNA, 25 bp, Artificial
  probe
  misc_feature (1)..(25): SEQ ID NO: 1992; WAN024FEW_at; Start 172; Stop 196
tccttgagtaagagtcctttactta

SEQ ID NO: 203549 - DNA, 25 bp, Artificial
  probe
  misc_feature (1)..(25): SEQ ID NO: 1992; WAN024FEW_at; Start 100; Stop 124
tcagttaaaatagagtcactagcac

SEQ ID NO: 203550 - DNA, 25 bp, Artificial
  probe
  misc_feature (1)..(25): SEQ ID NO: 1992; WAN024FEW_at; Start 119; Stop 143
tagcactggccgccaaggtcacgat

SEQ ID NO: 203551 - DNA, 25 bp, Artificial
  probe
  misc_feature (1)..(25): SEQ ID NO: 1992; WAN024FEW_at; Start 64; Stop 88
gccacaatgaccatgtcaacttctt

SEQ ID NO: 203552 - DNA, 25 bp, Artificial
  probe
  misc_feature (1)..(25): SEQ ID NO: 1992; WAN024FEW_at; Start 202; Stop 226
tcagggtcaattcccctcgcttctg

SEQ ID NO: 203553 - DNA, 25 bp, Artificial
  probe
  misc_feature (1)..(25): SEQ ID NO: 1992; WAN024FEW_at; Start 149; Stop 173
cagttaggggcgcaatactcaattc

SEQ ID NO: 203554 - DNA, 25 bp, Artificial
  probe
  misc_feature (1)..(25): SEQ ID NO: 1992; WAN024FEW_at; Start 207; Stop 231
gtcaattcccctcgcttctgctaag

SEQ ID NO: 203555 - DNA, 25 bp, Artificial
  probe
  misc_feature (1)..(25): SEQ ID NO: 1992; WAN024FEW_at; Start 156; Stop 180
gggcgcaatactcaattccttgagt

SEQ ID NO: 203556 - DNA, 25 bp, Artificial
  probe
  misc_feature (1)..(25): SEQ ID NO: 1992; WAN024FEW_at; Start 107; Stop 131
aaatagagtcactagcactggccgc

SEQ ID NO: 203557 - DNA, 25 bp, Artificial
  probe
  misc_feature (1)..(25): SEQ ID NO: 1992; WAN024FEW_at; Start 210; Stop 234
aattcccctcgcttctgctaagtct

SEQ ID NO: 203558 - DNA, 25 bp, Artificial
  probe
  misc_feature (1)..(25): SEQ ID NO: 1992; WAN024FEW_at; Start 111; Stop 135
agagtcactagcactggccgccaag

SEQ ID NO: 203559 - DNA, 25 bp, Artificial
  probe
  misc_feature (1)..(25): SEQ ID NO: 1992; WAN024FEW_at; Start 174; Stop 198
cttgagtaagagtcctttacttaat

SEQ ID NO: 203560 - DNA, 25 bp, Artificial
  probe
  misc_feature (1)..(25): SEQ ID NO: 1992; WAN024FEW_at; Start 217; Stop 241
ctcgcttctgctaagtcttgtaatt

SEQ ID NO: 203561 - DNA, 25 bp, Artificial
  probe
  misc_feature (1)..(25): SEQ ID NO: 1992; WAN024FEW_at; Start 105; Stop 129
taaaatagagtcactagcactggcc

SEQ ID NO: 203562 - DNA, 25 bp, Artificial
  probe
  misc_feature (1)..(25): SEQ ID NO: 1992; WAN024FEW_at; Start 68; Stop 92
caatgaccatgtcaacttcttgtct

SEQ ID NO: 203563 - DNA, 25 bp, Artificial
  probe
  misc_feature (1)..(25): SEQ ID NO: 1992; WAN024FEW_at; Start 113; Stop 137
agtcactagcactggccgccaaggt

SEQ ID NO: 203564 - DNA, 25 bp, Artificial
  probe
  misc_feature (1)..(25): SEQ ID NO: 1992; WAN024FEW_at; Start 75; Stop 99
catgtcaacttcttgtctttcttgc

SEQ ID NO: 203565 - DNA, 25 bp, Artificial
  probe
  misc_feature (1)..(25): SEQ ID NO: 1992; WAN024FEW_at; Start 220; Stop 244
gcttctgctaagtcttgtaatttca

SEQ ID NO: 203566 - DNA, 25 bp, Artificial
  probe
  misc_feature (1)..(25): SEQ ID NO: 1992; WAN024FEW_at; Start 158; Stop 182
gcgcaatactcaattccttgagtaa

SEQ ID NO: 203567 - DNA, 25 bp, Artificial
  probe
  misc_feature (1)..(25): SEQ ID NO: 1992; WAN024FEW_at; Start 94; Stop 118
tcttgctcagttaaaatagagtcac

SEQ ID NO: 203568 - DNA, 25 bp, Artificial
  probe
  misc_feature (1)..(25): SEQ ID NO: 1992; WAN024FEW_at; Start 85; Stop 109
tcttgtctttcttgctcagttaaaa

SEQ ID NO: 203569 - DNA, 25 bp, Artificial
  probe
  misc_feature (1)..(25): SEQ ID NO: 1992; WAN024FEW_at; Start 215; Stop 239
ccctcgcttctgctaagtcttgtaa

SEQ ID NO: 203570 - DNA, 25 bp, Artificial
  probe
  misc_feature (1)..(25): SEQ ID NO: 1992; WAN024FEW_at; Start 88; Stop 112
tgtctttcttgctcagttaaaatag

SEQ ID NO: 203571 - DNA, 25 bp, Artificial
  probe
  misc_feature (1)..(25): SEQ ID NO: 1992; WAN024FEW_at; Start 103; Stop 127
gttaaaatagagtcactagcactgg

SEQ ID NO: 203572 - DNA, 25 bp, Artificial
  probe
  misc_feature (1)..(25): SEQ ID NO: 1992; WAN024FEW_at; Start 168; Stop 192
caattccttgagtaagagtccttta

SEQ ID NO: 203573 - DNA, 25 bp, Artificial
  probe
  misc_feature (1)..(25): SEQ ID NO: 1992; WAN024FEW_at; Start 106; Stop 130
aaaatagagtcactagcactggccg

SEQ ID NO: 203574 - DNA, 25 bp, Artificial
  probe
  misc_feature (1)..(25): SEQ ID NO: 1992; WAN024FEW_at; Start 164; Stop 188
tactcaattccttgagtaagagtcc

SEQ ID NO: 203575 - DNA, 25 bp, Artificial
  probe
  misc_feature (1)..(25): SEQ ID NO: 1992; WAN024FEW_at; Start 71; Stop 95
tgaccatgtcaacttcttgtctttc

SEQ ID NO: 203576 - DNA, 25 bp, Artificial
  probe
  misc_feature (1)..(25): SEQ ID NO: 1992; WAN024FEW_at; Start 98; Stop 122
gctcagttaaaatagagtcactagc

SEQ ID NO: 203577 - DNA, 25 bp, Artificial
  probe
  misc_feature (1)..(25): SEQ ID NO: 1992; WAN024FEW_at; Start 200; Stop 224
tttcagggtcaattcccctcgcttc

SEQ ID NO: 203578 - DNA, 25 bp, Artificial
  probe
  misc_feature (1)..(25): SEQ ID NO: 1992; WAN024FEW_at; Start 80; Stop 104
caacttcttgtctttcttgctcagt

SEQ ID NO: 203579 - DNA, 25 bp, Artificial
  probe
  misc_feature (1)..(25): SEQ ID NO: 1992; WAN024FEW_at; Start 213; Stop 237
tcccctcgcttctgctaagtcttgt

SEQ ID NO: 203580 - DNA, 25 bp, Artificial
  probe
  misc_feature (1)..(25): SEQ ID NO: 1992; WAN024FEW_at; Start 205; Stop 229
gggtcaattcccctcgcttctgcta

SEQ ID NO: 203581 - DNA, 25 bp, Artificial
  probe
  misc_feature (1)..(25): SEQ ID NO: 4109; WAN024FEX_at; Start 397; Stop 421
aaagggctggatgcccagcaagcca

SEQ ID NO: 203582 - DNA, 25 bp, Artificial
  probe
  misc_feature (1)..(25): SEQ ID NO: 4109; WAN024FEX_at; Start 147; Stop 171
aatccatgatgtcacgggtctgagc

SEQ ID NO: 203583 - DNA, 25 bp, Artificial
  probe
  misc_feature (1)..(25): SEQ ID NO: 4109; WAN024FEX_at; Start 196; Stop 220
catgcgtggattttgtgtaatcaac

SEQ ID NO: 203584 - DNA, 25 bp, Artificial
  probe
  misc_feature (1)..(25): SEQ ID NO: 4109; WAN024FEX_at; Start 73; Stop 97
caaactatccaagtattgttgggta

SEQ ID NO: 203585 - DNA, 25 bp, Artificial
  probe
  misc_feature (1)..(25): SEQ ID NO: 4109; WAN024FEX_at; Start 107; Stop 131
ccatttacataaggagttgtcgagt

SEQ ID NO: 203586 - DNA, 25 bp, Artificial
  probe
  misc_feature (1)..(25): SEQ ID NO: 4109; WAN024FEX_at; Start 186; Stop 210
taaaggccatcatgcgtggattttg

SEQ ID NO: 203587 - DNA, 25 bp, Artificial
  probe
  misc_feature (1)..(25): SEQ ID NO: 4109; WAN024FEX_at; Start 315; Stop 339
gagaattttccacatgcaatttggc

SEQ ID NO: 203588 - DNA, 25 bp, Artificial
  probe
  misc_feature (1)..(25): SEQ ID NO: 4109; WAN024FEX_at; Start 24; Stop 48
catccaaagtaagctggtagcgttt

SEQ ID NO: 203589 - DNA, 25 bp, Artificial
  probe
  misc_feature (1)..(25): SEQ ID NO: 4109; WAN024FEX_at; Start 131; Stop 155
taatttggtcgccagaaatccatga

SEQ ID NO: 203590 - DNA, 25 bp, Artificial
  probe
  misc_feature (1)..(25): SEQ ID NO: 4109; WAN024FEX_at; Start 388; Stop 412
actacgagcaaagggctggatgccc

SEQ ID NO: 203591 - DNA, 25 bp, Artificial
  probe
  misc_feature (1)..(25): SEQ ID NO: 4109; WAN024FEX_at; Start 98; Stop 122
gaatagacaccatttacataaggag

SEQ ID NO: 203592 - DNA, 25 bp, Artificial
  probe
  misc_feature (1)..(25): SEQ ID NO: 4109; WAN024FEX_at; Start 272; Stop 296
tatttggcaatatcactggcaatga

SEQ ID NO: 203593 - DNA, 25 bp, Artificial
  probe
  misc_feature (1)..(25): SEQ ID NO: 4109; WAN024FEX_at; Start 212; Stop 236
gtaatcaacatagctacacttccag

SEQ ID NO: 203594 - DNA, 25 bp, Artificial
  probe
  misc_feature (1)..(25): SEQ ID NO: 4109; WAN024FEX_at; Start 177; Stop 201
tgtcattattaaaggccatcatgcg

SEQ ID NO: 203595 - DNA, 25 bp, Artificial
  probe
  misc_feature (1)..(25): SEQ ID NO: 4109; WAN024FEX_at; Start 1; Stop 25
gtggaaacaaacagccgcaaaatca

SEQ ID NO: 203596 - DNA, 25 bp, Artificial
  probe
  misc_feature (1)..(25): SEQ ID NO: 4109; WAN024FEX_at; Start 231; Stop 255
ttccagcaccttgagttggttctcc

SEQ ID NO: 203597 - DNA, 25 bp, Artificial
  probe
  misc_feature (1)..(25): SEQ ID NO: 4109; WAN024FEX_at; Start 8; Stop 32
caaacagccgcaaaatcatccaaag

SEQ ID NO: 203598 - DNA, 25 bp, Artificial
  probe
  misc_feature (1)..(25): SEQ ID NO: 4109; WAN024FEX_at; Start 285; Stop 309
cactggcaatgaccaagaccttgga

SEQ ID NO: 203599 - DNA, 25 bp, Artificial
  probe
  misc_feature (1)..(25): SEQ ID NO: 4109; WAN024FEX_at; Start 170; Stop 194
gctacattgtcattattaaaggcca

SEQ ID NO: 203600 - DNA, 25 bp, Artificial
  probe
  misc_feature (1)..(25): SEQ ID NO: 4109; WAN024FEX_at; Start 17; Stop 41
gcaaaatcatccaaagtaagctggt

SEQ ID NO: 203601 - DNA, 25 bp, Artificial
  probe
  misc_feature (1)..(25): SEQ ID NO: 4109; WAN024FEX_at; Start 36; Stop 60
gctggtagcgtttttgatattcaag

SEQ ID NO: 203602 - DNA, 25 bp, Artificial
  probe
  misc_feature (1)..(25): SEQ ID NO: 4109; WAN024FEX_at; Start 222; Stop 246
tagctacacttccagcaccttgagt

SEQ ID NO: 203603 - DNA, 25 bp, Artificial
  probe
  misc_feature (1)..(25): SEQ ID NO: 4109; WAN024FEX_at; Start 85; Stop 109
gtattgttgggtagaatagacacca

SEQ ID NO: 203604 - DNA, 25 bp, Artificial
  probe
  misc_feature (1)..(25): SEQ ID NO: 4109; WAN024FEX_at; Start 60; Stop 84
gccaagtcgttttcaaactatccaa

SEQ ID NO: 203605 - DNA, 25 bp, Artificial
  probe
  misc_feature (1)..(25): SEQ ID NO: 4109; WAN024FEX_at; Start 370; Stop 394
ggcttctttaatctcgaaactacga

SEQ ID NO: 203606 - DNA, 25 bp, Artificial
  probe
  misc_feature (1)..(25): SEQ ID NO: 4109; WAN024FEX_at; Start 139; Stop 163
tcgccagaaatccatgatgtcacgg

SEQ ID NO: 203607 - DNA, 25 bp, Artificial
  probe
  misc_feature (1)..(25): SEQ ID NO: 4109; WAN024FEX_at; Start 308; Stop 332
gactccggagaattttccacatgca

SEQ ID NO: 203608 - DNA, 25 bp, Artificial
  probe
  misc_feature (1)..(25): SEQ ID NO: 4109; WAN024FEX_at; Start 381; Stop 405
tctcgaaactacgagcaaagggctg

SEQ ID NO: 203609 - DNA, 25 bp, Artificial
  probe
  misc_feature (1)..(25): SEQ ID NO: 4109; WAN024FEX_at; Start 159; Stop 183
cacgggtctgagctacattgtcatt

SEQ ID NO: 203610 - DNA, 25 bp, Artificial
  probe
  misc_feature (1)..(25): SEQ ID NO: 4109; WAN024FEX_at; Start 295; Stop 319
gaccaagaccttggactccggagaa

SEQ ID NO: 203611 - DNA, 25 bp, Artificial
  probe
  misc_feature (1)..(25): SEQ ID NO: 4109; WAN024FEX_at; Start 120; Stop 144
gagttgtcgagtaatttggtcgcca

SEQ ID NO: 203612 - DNA, 25 bp, Artificial
  probe
  misc_feature (1)..(25): SEQ ID NO: 4109; WAN024FEX_at; Start 365; Stop 389
tagcaggcttctttaatctcgaaac

SEQ ID NO: 203613 - DNA, 25 bp, Artificial
  probe
  misc_feature (1)..(25): SEQ ID NO: 4109; WAN024FEX_at; Start 51; Stop 75
gatattcaagccaagtcgttttcaa

SEQ ID NO: 203614 - DNA, 25 bp, Artificial
  probe
  misc_feature (1)..(25): SEQ ID NO: 4109; WAN024FEX_at; Start 330; Stop 354
gcaatttggcataatggagggcagc

SEQ ID NO: 203615 - DNA, 25 bp, Artificial
  probe
  misc_feature (1)..(25): SEQ ID NO: 1249; WAN024FEY_at; Start 645; Stop 669
tagtttgaaaacgacttggcttgaa

SEQ ID NO: 203616 - DNA, 25 bp, Artificial
  probe
  misc_feature (1)..(25): SEQ ID NO: 1249; WAN024FEY_at; Start 779; Stop 803
tgcctcaagagaaaaaagacctctt

SEQ ID NO: 203617 - DNA, 25 bp, Artificial
  probe
  misc_feature (1)..(25): SEQ ID NO: 1249; WAN024FEY_at; Start 551; Stop 575
tagctcagacccgtgacatcatgga

SEQ ID NO: 203618 - DNA, 25 bp, Artificial
  probe
  misc_feature (1)..(25): SEQ ID NO: 1249; WAN024FEY_at; Start 666; Stop 690
tgaatatcaaaaacgctaccagctt

SEQ ID NO: 203619 - DNA, 25 bp, Artificial
  probe
  misc_feature (1)..(25): SEQ ID NO: 1249; WAN024FEY_at; Start 565; Stop 589
gacatcatggatttctggcgaccaa

SEQ ID NO: 203620 - DNA, 25 bp, Artificial
  probe
  misc_feature (1)..(25): SEQ ID NO: 1249; WAN024FEY_at; Start 393; Stop 417
gcatgtggaaaattctccggagtcc

SEQ ID NO: 203621 - DNA, 25 bp, Artificial
  probe
  misc_feature (1)..(25): SEQ ID NO: 1249; WAN024FEY_at; Start 216; Stop 240
tgagcaagaaagacaagaagttgac

SEQ ID NO: 203622 - DNA, 25 bp, Artificial
  probe
  misc_feature (1)..(25): SEQ ID NO: 1249; WAN024FEY_at; Start 79; Stop 103
ttacaagacttagcagaagcgaggg

SEQ ID NO: 203623 - DNA, 25 bp, Artificial
  probe
  misc_feature (1)..(25): SEQ ID NO: 1249; WAN024FEY_at; Start 472; Stop 496
gaaccaactcaaggtgctggaagtg

SEQ ID NO: 203624 - DNA, 25 bp, Artificial
  probe
  misc_feature (1)..(25): SEQ ID NO: 1249; WAN024FEY_at; Start 297; Stop 321
tgtgcatggcttgctgggcatccag

SEQ ID NO: 203625 - DNA, 25 bp, Artificial
  probe
  misc_feature (1)..(25): SEQ ID NO: 1249; WAN024FEY_at; Start 856; Stop 880
tacacaggttcacttttccttggac

SEQ ID NO: 203626 - DNA, 25 bp, Artificial
  probe
  misc_feature (1)..(25): SEQ ID NO: 1249; WAN024FEY_at; Start 280; Stop 304
aaggctgcggccgtctttgtgcatg

SEQ ID NO: 203627 - DNA, 25 bp, Artificial
  probe
  misc_feature (1)..(25): SEQ ID NO: 1249; WAN024FEY_at; Start 824; Stop 848
ctattctctacagtcaaaaggtggg

SEQ ID NO: 203628 - DNA, 25 bp, Artificial
  probe
  misc_feature (1)..(25): SEQ ID NO: 1249; WAN024FEY_at; Start 933; Stop 957
cctttatagttacggaagtggagct

SEQ ID NO: 203629 - DNA, 25 bp, Artificial
  probe
  misc_feature (1)..(25): SEQ ID NO: 1249; WAN024FEY_at; Start 333; Stop 357
tagtttcgagattaaagaagcctgc

SEQ ID NO: 203630 - DNA, 25 bp, Artificial
  probe
  misc_feature (1)..(25): SEQ ID NO: 1249; WAN024FEY_at; Start 182; Stop 206
ccttggcggccagtgctagtgactc

SEQ ID NO: 203631 - DNA, 25 bp, Artificial
  probe
  misc_feature (1)..(25): SEQ ID NO: 1249; WAN024FEY_at; Start 144; Stop 168
ggaattgagtattgcgcccctaact

SEQ ID NO: 203632 - DNA, 25 bp, Artificial
  probe
  misc_feature (1)..(25): SEQ ID NO: 1249; WAN024FEY_at; Start 126; Stop 150
taaaggactcttactcaaggaattg

SEQ ID NO: 203633 - DNA, 25 bp, Artificial
  probe
  misc_feature (1)..(25): SEQ ID NO: 1249; WAN024FEY_at; Start 1113; Stop 1137
ccagtttgctggctatgaaaatcaa

SEQ ID NO: 203634 - DNA, 25 bp, Artificial
  probe
  misc_feature (1)..(25): SEQ ID NO: 1249; WAN024FEY_at; Start 266; Stop 290
gaattgaccagagtaaggctgcggc

SEQ ID NO: 203635 - DNA, 25 bp, Artificial
  probe
  misc_feature (1)..(25): SEQ ID NO: 1249; WAN024FEY_at; Start 510; Stop 534
tacacaaaatccacgcatgatggcc

SEQ ID NO: 203636 - DNA, 25 bp, Artificial
  probe
  misc_feature (1)..(25): SEQ ID NO: 1249; WAN024FEY_at; Start 523; Stop 547
cgcatgatggcctttaataatgaca

SEQ ID NO: 203637 - DNA, 25 bp, Artificial
  probe
  misc_feature (1)..(25): SEQ ID NO: 1249; WAN024FEY_at; Start 1165; Stop 1189
caccaacgccgttatagcaaggttg

SEQ ID NO: 203638 - DNA, 25 bp, Artificial
  probe
  misc_feature (1)..(25): SEQ ID NO: 1249; WAN024FEY_at; Start 721; Stop 745
cacttgccttatcctaaattagcgc

SEQ ID NO: 203639 - DNA, 25 bp, Artificial
  probe
  misc_feature (1)..(25): SEQ ID NO: 1249; WAN024FEY_at; Start 612; Stop 636
aaatggtgtctattctacccaacaa

SEQ ID NO: 203640 - DNA, 25 bp, Artificial
  probe
  misc_feature (1)..(25): SEQ ID NO: 1249; WAN024FEY_at; Start 40; Stop 64
gataagattggttttgcgaccagtc

SEQ ID NO: 203641 - DNA, 25 bp, Artificial
  probe
  misc_feature (1)..(25): SEQ ID NO: 1249; WAN024FEY_at; Start 370; Stop 394
gctgccctccattatgccaaattgc

SEQ ID NO: 203642 - DNA, 25 bp, Artificial
  probe
  misc_feature (1)..(25): SEQ ID NO: 1249; WAN024FEY_at; Start 426; Stop 450
ggtcattgccagtgatattgccaaa

SEQ ID NO: 203643 - DNA, 25 bp, Artificial
  probe
  misc_feature (1)..(25): SEQ ID NO: 1249; WAN024FEY_at; Start 888; Stop 912
tctcttggaaaatacagatagcttg

SEQ ID NO: 203644 - DNA, 25 bp, Artificial
  probe
  misc_feature (1)..(25): SEQ ID NO: 1249; WAN024FEY_at; Start 580; Stop 604
tggcgaccaaattactcgacaactc

SEQ ID NO: 203645 - DNA, 25 bp, Artificial
  probe
  misc_feature (1)..(25): SEQ ID NO: 1249; WAN024FEY_at; Start 1022; Stop 1046
tgaacaagctcaaccaacgaactgc

SEQ ID NO: 203646 - DNA, 25 bp, Artificial
  probe
  misc_feature (1)..(25): SEQ ID NO: 1249; WAN024FEY_at; Start 1045; Stop 1069
gccctatccgttgcagactatgaaa

SEQ ID NO: 203647 - DNA, 25 bp, Artificial
  probe
  misc_feature (1)..(25): SEQ ID NO: 1249; WAN024FEY_at; Start 540; Stop 564
taatgacaatgtagctcagacccgt

SEQ ID NO: 203648 - DNA, 25 bp, Artificial
  probe
  misc_feature (1)..(25): SEQ ID NO: 1249; WAN024FEY_at; Start 948; Stop 972
aagtggagctgtggctgagttcttc

SEQ ID NO: 203649 - DNA, 25 bp, Artificial
  probe
  misc_feature (1)..(25): SEQ ID NO: 5296; WAN024FEZ_at; Start 59; Stop 83
gccaattgagggtagtaattttcga

SEQ ID NO: 203650 - DNA, 25 bp, Artificial
  probe
  misc_feature (1)..(25): SEQ ID NO: 5296; WAN024FEZ_at; Start 358; Stop 382
catgatgatagactgggcacctgtc

SEQ ID NO: 203651 - DNA, 25 bp, Artificial
  probe
  misc_feature (1)..(25): SEQ ID NO: 5296; WAN024FEZ_at; Start 195; Stop 219
tggcatctggtttttcccgggtcaa

SEQ ID NO: 203652 - DNA, 25 bp, Artificial
  probe
  misc_feature (1)..(25): SEQ ID NO: 5296; WAN024FEZ_at; Start 47; Stop 71
tgcttgatagtagccaattgagggt

SEQ ID NO: 203653 - DNA, 25 bp, Artificial
  probe
  misc_feature (1)..(25): SEQ ID NO: 5296; WAN024FEZ_at; Start 2; Stop 26
tgcaagagaagatcaatagtgagac

SEQ ID NO: 203654 - DNA, 25 bp, Artificial
  probe
  misc_feature (1)..(25): SEQ ID NO: 5296; WAN024FEZ_at; Start 115; Stop 139
gagctcttttgggacagaaatgccc

SEQ ID NO: 203655 - DNA, 25 bp, Artificial
  probe
  misc_feature (1)..(25): SEQ ID NO: 5296; WAN024FEZ_at; Start 376; Stop 400
acctgtcttgaccaaggtttgggca

SEQ ID NO: 203656 - DNA, 25 bp, Artificial
  probe
  misc_feature (1)..(25): SEQ ID NO: 5296; WAN024FEZ_at; Start 247; Stop 271
gacgggagaaaagtcactggaaaca

SEQ ID NO: 203657 - DNA, 25 bp, Artificial
  probe
  misc_feature (1)..(25): SEQ ID NO: 5296; WAN024FEZ_at; Start 127; Stop 151
gacagaaatgcccaattcttgagcg

SEQ ID NO: 203658 - DNA, 25 bp, Artificial
  probe
  misc_feature (1)..(25): SEQ ID NO: 5296; WAN024FEZ_at; Start 109; Stop 133
gaccttgagctcttttgggacagaa

SEQ ID NO: 203659 - DNA, 25 bp, Artificial
  probe
  misc_feature (1)..(25): SEQ ID NO: 5296; WAN024FEZ_at; Start 206; Stop 230
ttttcccgggtcaagatattcttga

SEQ ID NO: 203660 - DNA, 25 bp, Artificial
  probe
  misc_feature (1)..(25): SEQ ID NO: 5296; WAN024FEZ_at; Start 388; Stop 412
caaggtttgggcagcaagaacccca

SEQ ID NO: 203661 - DNA, 25 bp, Artificial
  probe
  misc_feature (1)..(25): SEQ ID NO: 5296; WAN024FEZ_at; Start 12; Stop 36
gatcaatagtgagacaagcaatctc

SEQ ID NO: 203662 - DNA, 25 bp, Artificial
  probe
  misc_feature (1)..(25): SEQ ID NO: 5296; WAN024FEZ_at; Start 276; Stop 300
taataggagcttttgggagtacgga

SEQ ID NO: 203663 - DNA, 25 bp, Artificial
  probe
  misc_feature (1)..(25): SEQ ID NO: 5296; WAN024FEZ_at; Start 261; Stop 285
cactggaaacattgataataggagc

SEQ ID NO: 203664 - DNA, 25 bp, Artificial
  probe
  misc_feature (1)..(25): SEQ ID NO: 5296; WAN024FEZ_at; Start 180; Stop 204
catccgaagcaaaaatggcatctgg

SEQ ID NO: 203665 - DNA, 25 bp, Artificial
  probe
  misc_feature (1)..(25): SEQ ID NO: 5296; WAN024FEZ_at; Start 341; Stop 365
ttgtcattccctgtaatcatgatga

SEQ ID NO: 203666 - DNA, 25 bp, Artificial
  probe
  misc_feature (1)..(25): SEQ ID NO: 5296; WAN024FEZ_at; Start 98; Stop 122
tcatagccgatgaccttgagctctt

SEQ ID NO: 203667 - DNA, 25 bp, Artificial
  probe
  misc_feature (1)..(25): SEQ ID NO: 5296; WAN024FEZ_at; Start 228; Stop 252
tgatttccatttcttttctgacggg

SEQ ID NO: 203668 - DNA, 25 bp, Artificial
  probe
  misc_feature (1)..(25): SEQ ID NO: 5296; WAN024FEZ_at; Start 354; Stop 378
taatcatgatgatagactgggcacc

SEQ ID NO: 203669 - DNA, 25 bp, Artificial
  probe
  misc_feature (1)..(25): SEQ ID NO: 5296; WAN024FEZ_at; Start 411; Stop 435
caccagcatagttgtcagaggagac

SEQ ID NO: 203670 - DNA, 25 bp, Artificial
  probe
  misc_feature (1)..(25): SEQ ID NO: 5296; WAN024FEZ_at; Start 24; Stop 48
gacaagcaatctcttccaaaggttg

SEQ ID NO: 203671 - DNA, 25 bp, Artificial
  probe
  misc_feature (1)..(25): SEQ ID NO: 5296; WAN024FEZ_at; Start 296; Stop 320
acggatgcaaaaccagcgtggcgca

SEQ ID NO: 203672 - DNA, 25 bp, Artificial
  probe
  misc_feature (1)..(25): SEQ ID NO: 5296; WAN024FEZ_at; Start 289; Stop 313
tgggagtacggatgcaaaaccagcg

SEQ ID NO: 203673 - DNA, 25 bp, Artificial
  probe
  misc_feature (1)..(25): SEQ ID NO: 5296; WAN024FEZ_at; Start 401; Stop 425
gcaagaaccccaccagcatagttgt

SEQ ID NO: 203674 - DNA, 25 bp, Artificial
  probe
  misc_feature (1)..(25): SEQ ID NO: 5296; WAN024FEZ_at; Start 139; Stop 163
caattcttgagcgattttaatgacc

SEQ ID NO: 203675 - DNA, 25 bp, Artificial
  probe
  misc_feature (1)..(25): SEQ ID NO: 5296; WAN024FEZ_at; Start 303; Stop 327
caaaaccagcgtggcgcagtccggt

SEQ ID NO: 203676 - DNA, 25 bp, Artificial
  probe
  misc_feature (1)..(25): SEQ ID NO: 5296; WAN024FEZ_at; Start 242; Stop 266
tttctgacgggagaaaagtcactgg

SEQ ID NO: 203677 - DNA, 25 bp, Artificial
  probe
  misc_feature (1)..(25): SEQ ID NO: 5296; WAN024FEZ_at; Start 76; Stop 100
attttcgataaagtaggtcccatca

SEQ ID NO: 203678 - DNA, 25 bp, Artificial
  probe
  misc_feature (1)..(25): SEQ ID NO: 5296; WAN024FEZ_at; Start 39; Stop 63
ccaaaggttgcttgatagtagccaa

SEQ ID NO: 203679 - DNA, 25 bp, Artificial
  probe
  misc_feature (1)..(25): SEQ ID NO: 5296; WAN024FEZ_at; Start 165; Stop 189
gaatagctgtcaaatcatccgaagc

SEQ ID NO: 203680 - DNA, 25 bp, Artificial
  probe
  misc_feature (1)..(25): SEQ ID NO: 5296; WAN024FEZ_at; Start 84; Stop 108
taaagtaggtcccatcatagccgat

SEQ ID NO: 203681 - DNA, 25 bp, Artificial
  probe
  misc_feature (1)..(25): SEQ ID NO: 5296; WAN024FEZ_at; Start 368; Stop 392
gactgggcacctgtcttgaccaagg

SEQ ID NO: 203682 - DNA, 25 bp, Artificial
  probe
  misc_feature (1)..(25): SEQ ID NO: 5296; WAN024FEZ_at; Start 150; Stop 174
cgattttaatgaccagaatagctgt

SEQ ID NO: 203683 - DNA, 25 bp, Artificial
  probe
  misc_feature (1)..(25): SEQ ID NO: 2663; WAN024FF2_at; Start 891; Stop 915
aaagattgaaggcaaggaagtcgcc

SEQ ID NO: 203684 - DNA, 25 bp, Artificial
  probe
  misc_feature (1)..(25): SEQ ID NO: 2663; WAN024FF2_at; Start 271; Stop 295
tacaagaccatcatctgcaacagtg

SEQ ID NO: 203685 - DNA, 25 bp, Artificial
  probe
  misc_feature (1)..(25): SEQ ID NO: 2663; WAN024FF2_at; Start 777; Stop 801
caaggtcatcggctatgatgggacc

SEQ ID NO: 203686 - DNA, 25 bp, Artificial
  probe
  misc_feature (1)..(25): SEQ ID NO: 2663; WAN024FF2_at; Start 932; Stop 956
taccagttacgctattaccaggaaa

SEQ ID NO: 203687 - DNA, 25 bp, Artificial
  probe
  misc_feature (1)..(25): SEQ ID NO: 2663; WAN024FF2_at; Start 134; Stop 158
gctataaacccaacaacctggctcg

SEQ ID NO: 203688 - DNA, 25 bp, Artificial
  probe
  misc_feature (1)..(25): SEQ ID NO: 2663; WAN024FF2_at; Start 903; Stop 927
caaggaagtcgccacaactggttac

SEQ ID NO: 203689 - DNA, 25 bp, Artificial
  probe
  misc_feature (1)..(25): SEQ ID NO: 2663; WAN024FF2_at; Start 640; Stop 664
cccgtcagaaaagaaatggaaatca

SEQ ID NO: 203690 - DNA, 25 bp, Artificial
  probe
  misc_feature (1)..(25): SEQ ID NO: 2663; WAN024FF2_at; Start 706; Stop 730
tcggatgatttgacagctattctgg

SEQ ID NO: 203691 - DNA, 25 bp, Artificial
  probe
  misc_feature (1)..(25): SEQ ID NO: 2663; WAN024FF2_at; Start 431; Stop 455
gaaacctatcgccagacatccctgt

SEQ ID NO: 203692 - DNA, 25 bp, Artificial
  probe
  misc_feature (1)..(25): SEQ ID NO: 2663; WAN024FF2_at; Start 512; Stop 536
caggtgcccagtctatcatcatgat

SEQ ID NO: 203693 - DNA, 25 bp, Artificial
  probe
  misc_feature (1)..(25): SEQ ID NO: 2663; WAN024FF2_at; Start 829; Stop 853
ttggctactatcaagcaacctttgg

SEQ ID NO: 203694 - DNA, 25 bp, Artificial
  probe
  misc_feature (1)..(25): SEQ ID NO: 2663; WAN024FF2_at; Start 3; Stop 27
ggtcgcaaaactaactgatgtcgcc

SEQ ID NO: 203695 - DNA, 25 bp, Artificial
  probe
  misc_feature (1)..(25): SEQ ID NO: 2663; WAN024FF2_at; Start 390; Stop 414
agactacaatcgtgtgacagcgccg

SEQ ID NO: 203696 - DNA, 25 bp, Artificial
  probe
  misc_feature (1)..(25): SEQ ID NO: 2663; WAN024FF2_at; Start 567; Stop 591
cggactgcgccacgctggttttgca

SEQ ID NO: 203697 - DNA, 25 bp, Artificial
  probe
  misc_feature (1)..(25): SEQ ID NO: 2663; WAN024FF2_at; Start 484; Stop 508
gttcttgctgcccaaaccttggtca

SEQ ID NO: 203698 - DNA, 25 bp, Artificial
  probe
  misc_feature (1)..(25): SEQ ID NO: 2663; WAN024FF2_at; Start 497; Stop 521
aaaccttggtcaagacaggtgccca

SEQ ID NO: 203699 - DNA, 25 bp, Artificial
  probe
  misc_feature (1)..(25): SEQ ID NO: 2663; WAN024FF2_at; Start 809; Stop 833
tcgaaaattactaccctcaattggc

SEQ ID NO: 203700 - DNA, 25 bp, Artificial
  probe
  misc_feature (1)..(25): SEQ ID NO: 2663; WAN024FF2_at; Start 405; Stop 429
gacagcgccgattatttcctttgac

SEQ ID NO: 203701 - DNA, 25 bp, Artificial
  probe
  misc_feature (1)..(25): SEQ ID NO: 2663; WAN024FF2_at; Start 322; Stop 346
tacatcgaaatgttggaagccaatc

SEQ ID NO: 203702 - DNA, 25 bp, Artificial
  probe
  misc_feature (1)..(25): SEQ ID NO: 2663; WAN024FF2_at; Start 671; Stop 695
tcttgacccgggaaaaaccagatgc

SEQ ID NO: 203703 - DNA, 25 bp, Artificial
  probe
  misc_feature (1)..(25): SEQ ID NO: 2663; WAN024FF2_at; Start 150; Stop 174
cctggctcgtagtctgcaaggaaaa

SEQ ID NO: 203704 - DNA, 25 bp, Artificial
  probe
  misc_feature (1)..(25): SEQ ID NO: 2663; WAN024FF2_at; Start 731; Stop 755
tcattaaaatcgctcaagaattggg

SEQ ID NO: 203705 - DNA, 25 bp, Artificial
  probe
  misc_feature (1)..(25): SEQ ID NO: 2663; WAN024FF2_at; Start 291; Stop 315
cagtgaacatgattctgagaaggaa

SEQ ID NO: 203706 - DNA, 25 bp, Artificial
  probe
  misc_feature (1)..(25): SEQ ID NO: 2663; WAN024FF2_at; Start 33; Stop 57
tgcaggcgtcagtcctactaccgtt

SEQ ID NO: 203707 - DNA, 25 bp, Artificial
  probe
  misc_feature (1)..(25): SEQ ID NO: 2663; WAN024FF2_at; Start 18; Stop 42
tgatgtcgccaaacttgcaggcgtc

SEQ ID NO: 203708 - DNA, 25 bp, Artificial
  probe
  misc_feature (1)..(25): SEQ ID NO: 2663; WAN024FF2_at; Start 245; Stop 269
tggaacaccaactcttcaaaaatgg

SEQ ID NO: 203709 - DNA, 25 bp, Artificial
  probe
  misc_feature (1)..(25): SEQ ID NO: 2663; WAN024FF2_at; Start 844; Stop 868
caacctttggaagagattgcttgtc

SEQ ID NO: 203710 - DNA, 25 bp, Artificial
  probe
  misc_feature (1)..(25): SEQ ID NO: 2663; WAN024FF2_at; Start 792; Stop 816
tgatgggacctactttatcgaaaat

SEQ ID NO: 203711 - DNA, 25 bp, Artificial
  probe
  misc_feature (1)..(25): SEQ ID NO: 2663; WAN024FF2_at; Start 759; Stop 783
ttctgtcccaaaagagctcaaggtc

SEQ ID NO: 203712 - DNA, 25 bp, Artificial
  probe
  misc_feature (1)..(25): SEQ ID NO: 2663; WAN024FF2_at; Start 580; Stop 604
gctggttttgcatccgtactcccaa

SEQ ID NO: 203713 - DNA, 25 bp, Artificial
  probe
  misc_feature (1)..(25): SEQ ID NO: 2663; WAN024FF2_at; Start 352; Stop 376
gacggcatcatttctggtagtcaca

SEQ ID NO: 203714 - DNA, 25 bp, Artificial
  probe
  misc_feature (1)..(25): SEQ ID NO: 2663; WAN024FF2_at; Start 458; Stop 482
tctcctctgacaactatgctggtgg

SEQ ID NO: 203715 - DNA, 25 bp, Artificial
  probe
  misc_feature (1)..(25): SEQ ID NO: 2663; WAN024FF2_at; Start 625; Stop 649
tccagtgacttttctcccgtcagaa

SEQ ID NO: 203716 - DNA, 25 bp, Artificial
  probe
  misc_feature (1)..(25): SEQ ID NO: 2663; WAN024FF2_at; Start 686; Stop 710
aaccagatgccatttttgcttcgga

SEQ ID NO: 203717 - DNA, 25 bp, Artificial
  probe
  misc_feature (1)..(25): SEQ ID NO: 5627; WAN024FF3_at; Start 296; Stop 320
gttacttcaccaccttgagcaactg

SEQ ID NO: 203718 - DNA, 25 bp, Artificial
  probe
  misc_feature (1)..(25): SEQ ID NO: 5627; WAN024FF3_at; Start 273; Stop 297
tgaaaccaaagaagttcatcgctgt

SEQ ID NO: 203719 - DNA, 25 bp, Artificial
  probe
  misc_feature (1)..(25): SEQ ID NO: 5627; WAN024FF3_at; Start 254; Stop 278
tgcaaaccaacaacagggatgaaac

SEQ ID NO: 203720 - DNA, 25 bp, Artificial
  probe
  misc_feature (1)..(25): SEQ ID NO: 5627; WAN024FF3_at; Start 260; Stop 284
ccaacaacagggatgaaaccaaaga

SEQ ID NO: 203721 - DNA, 25 bp, Artificial
  probe
  misc_feature (1)..(25): SEQ ID NO: 5627; WAN024FF3_at; Start 236; Stop 260
gctggaagaacggaaccttgcaaac

SEQ ID NO: 203722 - DNA, 25 bp, Artificial
  probe
  misc_feature (1)..(25): SEQ ID NO: 5627; WAN024FF3_at; Start 203; Stop 227
tcaaatttagctccgacaaccccga

SEQ ID NO: 203723 - DNA, 25 bp, Artificial
  probe
  misc_feature (1)..(25): SEQ ID NO: 5627; WAN024FF3_at; Start 55; Stop 79
cgcttttgtagcaataaggatgtag

SEQ ID NO: 203724 - DNA, 25 bp, Artificial
  probe
  misc_feature (1)..(25): SEQ ID NO: 5627; WAN024FF3_at; Start 83; Stop 107
tcaacaacgtggaaaactggtccaa

SEQ ID NO: 203725 - DNA, 25 bp, Artificial
  probe
  misc_feature (1)..(25): SEQ ID NO: 5627; WAN024FF3_at; Start 217; Stop 241
gacaaccccgatgatgaaggctgga

SEQ ID NO: 203726 - DNA, 25 bp, Artificial
  probe
  misc_feature (1)..(25): SEQ ID NO: 5627; WAN024FF3_at; Start 126; Stop 150
tagacatgaccaaaagtgtcacgaa

SEQ ID NO: 203727 - DNA, 25 bp, Artificial
  probe
  misc_feature (1)..(25): SEQ ID NO: 5627; WAN024FF3_at; Start 169; Stop 193
aatgacatctggaacaaccttgcgg

SEQ ID NO: 203728 - DNA, 25 bp, Artificial
  probe
  misc_feature (1)..(25): SEQ ID NO: 5627; WAN024FF3_at; Start 188; Stop 212
ttgcggacagctttttcaaatttag

SEQ ID NO: 203729 - DNA, 25 bp, Artificial
  probe
  misc_feature (1)..(25): SEQ ID NO: 5627; WAN024FF3_at; Start 41; Stop 65
ggcatgctaagaatcgcttttgtag

SEQ ID NO: 203730 - DNA, 25 bp, Artificial
  probe
  misc_feature (1)..(25): SEQ ID NO: 5627; WAN024FF3_at; Start 311; Stop 335
tgagcaactgcccaagcgtttggaa

SEQ ID NO: 203731 - DNA, 25 bp, Artificial
  probe
  misc_feature (1)..(25): SEQ ID NO: 5627; WAN024FF3_at; Start 176; Stop 200
tctggaacaaccttgcggacagctt

SEQ ID NO: 203732 - DNA, 25 bp, Artificial
  probe
  misc_feature (1)..(25): SEQ ID NO: 5627; WAN024FF3_at; Start 222; Stop 246
ccccgatgatgaaggctggaagaac

SEQ ID NO: 203733 - DNA, 25 bp, Artificial
  probe
  misc_feature (1)..(25): SEQ ID NO: 5627; WAN024FF3_at; Start 18; Stop 42
tcaagaaaccaccaagaccaaatgg

SEQ ID NO: 203734 - DNA, 25 bp, Artificial
  probe
  misc_feature (1)..(25): SEQ ID NO: 5627; WAN024FF3_at; Start 111; Stop 135
caaagagtccaaggatagacatgac

SEQ ID NO: 203735 - DNA, 25 bp, Artificial
  probe
  misc_feature (1)..(25): SEQ ID NO: 5627; WAN024FF3_at; Start 209; Stop 233
ttagctccgacaaccccgatgatga

SEQ ID NO: 203736 - DNA, 25 bp, Artificial
  probe
  misc_feature (1)..(25): SEQ ID NO: 5627; WAN024FF3_at; Start 145; Stop 169
cacgaatggtgttaccaagaggtca

SEQ ID NO: 203737 - DNA, 25 bp, Artificial
  probe
  misc_feature (1)..(25): SEQ ID NO: 5627; WAN024FF3_at; Start 248; Stop 272
gaaccttgcaaaccaacaacaggga

SEQ ID NO: 203738 - DNA, 25 bp, Artificial
  probe
  misc_feature (1)..(25): SEQ ID NO: 5627; WAN024FF3_at; Start 154; Stop 178
tgttaccaagaggtcaatgacatct

SEQ ID NO: 203739 - DNA, 25 bp, Artificial
  probe
  misc_feature (1)..(25): SEQ ID NO: 5627; WAN024FF3_at; Start 90; Stop 114
cgtggaaaactggtccaatgacaaa

SEQ ID NO: 203740 - DNA, 25 bp, Artificial
  probe
  misc_feature (1)..(25): SEQ ID NO: 5627; WAN024FF3_at; Start 69; Stop 93
taaggatgtagttttcaacaacgtg

SEQ ID NO: 203741 - DNA, 25 bp, Artificial
  probe
  misc_feature (1)..(25): SEQ ID NO: 5627; WAN024FF3_at; Start 33; Stop 57
gaccaaatggcatgctaagaatcgc

SEQ ID NO: 203742 - DNA, 25 bp, Artificial
  probe
  misc_feature (1)..(25): SEQ ID NO: 5627; WAN024FF3_at; Start 118; Stop 142
tccaaggatagacatgaccaaaagt

SEQ ID NO: 203743 - DNA, 25 bp, Artificial
  probe
  misc_feature (1)..(25): SEQ ID NO: 5627; WAN024FF3_at; Start 22; Stop 46
gaaaccaccaagaccaaatggcatg

SEQ ID NO: 203744 - DNA, 25 bp, Artificial
  probe
  misc_feature (1)..(25): SEQ ID NO: 5627; WAN024FF3_at; Start 283; Stop 307
gaagttcatcgctgttacttcacca

SEQ ID NO: 203745 - DNA, 25 bp, Artificial
  probe
  misc_feature (1)..(25): SEQ ID NO: 5627; WAN024FF3_at; Start 2; Stop 26
tggtgaaccccaccaatcaagaaac

SEQ ID NO: 203746 - DNA, 25 bp, Artificial
  probe
  misc_feature (1)..(25): SEQ ID NO: 5627; WAN024FF3_at; Start 314; Stop 338
gcaactgcccaagcgtttggaagtg

SEQ ID NO: 203747 - DNA, 25 bp, Artificial
  probe
  misc_feature (1)..(25): SEQ ID NO: 5627; WAN024FF3_at; Start 228; Stop 252
tgatgaaggctggaagaacggaacc

SEQ ID NO: 203748 - DNA, 25 bp, Artificial
  probe
  misc_feature (1)..(25): SEQ ID NO: 5627; WAN024FF3_at; Start 100; Stop 124
tggtccaatgacaaagagtccaagg

SEQ ID NO: 203749 - DNA, 25 bp, Artificial
  probe
  misc_feature (1)..(25): SEQ ID NO: 5627; WAN024FF3_at; Start 136; Stop 160
caaaagtgtcacgaatggtgttacc

SEQ ID NO: 203750 - DNA, 25 bp, Artificial
  probe
  misc_feature (1)..(25): SEQ ID NO: 5627; WAN024FF3_at; Start 183; Stop 207
caaccttgcggacagctttttcaaa

SEQ ID NO: 203751 - DNA, 25 bp, Artificial
  probe
  misc_feature (1)..(25): SEQ ID NO: 1760; WAN024FF4_at; Start 195; Stop 219
tgttttaacaccaaccgcaacagta

SEQ ID NO: 203752 - DNA, 25 bp, Artificial
  probe
  misc_feature (1)..(25): SEQ ID NO: 1760; WAN024FF4_at; Start 20; Stop 44
cagtaccagcaagtccaaggataga

SEQ ID NO: 203753 - DNA, 25 bp, Artificial
  probe
  misc_feature (1)..(25): SEQ ID NO: 1760; WAN024FF4_at; Start 94; Stop 118
ttacggaagcgcaagttcaccccga

SEQ ID NO: 203754 - DNA, 25 bp, Artificial
  probe
  misc_feature (1)..(25): SEQ ID NO: 1760; WAN024FF4_at; Start 90; Stop 114
tggtttacggaagcgcaagttcacc

SEQ ID NO: 203755 - DNA, 25 bp, Artificial
  probe
  misc_feature (1)..(25): SEQ ID NO: 1760; WAN024FF4_at; Start 120; Stop 144
gatagcaggctctgtaatacctagg

SEQ ID NO: 203756 - DNA, 25 bp, Artificial
  probe
  misc_feature (1)..(25): SEQ ID NO: 1760; WAN024FF4_at; Start 158; Stop 182
cagccgggaaagcaagtgttttcag

SEQ ID NO: 203757 - DNA, 25 bp, Artificial
  probe
  misc_feature (1)..(25): SEQ ID NO: 1760; WAN024FF4_at; Start 197; Stop 221
ttttaacaccaaccgcaacagtagc

SEQ ID NO: 203758 - DNA, 25 bp, Artificial
  probe
  misc_feature (1)..(25): SEQ ID NO: 1760; WAN024FF4_at; Start 9; Stop 33
gataccattaccagtaccagcaagt

SEQ ID NO: 203759 - DNA, 25 bp, Artificial
  probe
  misc_feature (1)..(25): SEQ ID NO: 1760; WAN024FF4_at; Start 42; Stop 66
agaagccaatccaccaccgattgca

SEQ ID NO: 203760 - DNA, 25 bp, Artificial
  probe
  misc_feature (1)..(25): SEQ ID NO: 1760; WAN024FF4_at; Start 139; Stop 163
cctaggaaggcagaaagagcagccg

SEQ ID NO: 203761 - DNA, 25 bp, Artificial
  probe
  misc_feature (1)..(25): SEQ ID NO: 1760; WAN024FF4_at; Start 6; Stop 30
ggtgataccattaccagtaccagca

SEQ ID NO: 203762 - DNA, 25 bp, Artificial
  probe
  misc_feature (1)..(25): SEQ ID NO: 1760; WAN024FF4_at; Start 84; Stop 108
gaagaatggtttacggaagcgcaag

SEQ ID NO: 203763 - DNA, 25 bp, Artificial
  probe
  misc_feature (1)..(25): SEQ ID NO: 1760; WAN024FF4_at; Start 207; Stop 231
aaccgcaacagtagcagcaccttga

SEQ ID NO: 203764 - DNA, 25 bp, Artificial
  probe
  misc_feature (1)..(25): SEQ ID NO: 1760; WAN024FF4_at; Start 134; Stop 158
taatacctaggaaggcagaaagagc

SEQ ID NO: 203765 - DNA, 25 bp, Artificial
  probe
  misc_feature (1)..(25): SEQ ID NO: 1760; WAN024FF4_at; Start 14; Stop 38
cattaccagtaccagcaagtccaag

SEQ ID NO: 203766 - DNA, 25 bp, Artificial
  probe
  misc_feature (1)..(25): SEQ ID NO: 1760; WAN024FF4_at; Start 110; Stop 134
tcaccccgaagatagcaggctctgt

SEQ ID NO: 203767 - DNA, 25 bp, Artificial
  probe
  misc_feature (1)..(25): SEQ ID NO: 1760; WAN024FF4_at; Start 148; Stop 172
gcagaaagagcagccgggaaagcaa

SEQ ID NO: 203768 - DNA, 25 bp, Artificial
  probe
  misc_feature (1)..(25): SEQ ID NO: 1760; WAN024FF4_at; Start 2; Stop 26
tgatggtgataccattaccagtacc

SEQ ID NO: 203769 - DNA, 25 bp, Artificial
  probe
  misc_feature (1)..(25): SEQ ID NO: 1760; WAN024FF4_at; Start 155; Stop 179
gagcagccgggaaagcaagtgtttt

SEQ ID NO: 203770 - DNA, 25 bp, Artificial
  probe
  misc_feature (1)..(25): SEQ ID NO: 1760; WAN024FF4_at; Start 125; Stop 149
caggctctgtaatacctaggaaggc

SEQ ID NO: 203771 - DNA, 25 bp, Artificial
  probe
  misc_feature (1)..(25): SEQ ID NO: 1760; WAN024FF4_at; Start 82; Stop 106
aggaagaatggtttacggaagcgca

SEQ ID NO: 203772 - DNA, 25 bp, Artificial
  probe
  misc_feature (1)..(25): SEQ ID NO: 1760; WAN024FF4_at; Start 25; Stop 49
ccagcaagtccaaggatagaagcca

SEQ ID NO: 203773 - DNA, 25 bp, Artificial
  probe
  misc_feature (1)..(25): SEQ ID NO: 1760; WAN024FF4_at; Start 29; Stop 53
caagtccaaggatagaagccaatcc

SEQ ID NO: 203774 - DNA, 25 bp, Artificial
  probe
  misc_feature (1)..(25): SEQ ID NO: 1760; WAN024FF4_at; Start 106; Stop 130
aagttcaccccgaagatagcaggct

SEQ ID NO: 203775 - DNA, 25 bp, Artificial
  probe
  misc_feature (1)..(25): SEQ ID NO: 1760; WAN024FF4_at; Start 128; Stop 152
gctctgtaatacctaggaaggcaga

SEQ ID NO: 203776 - DNA, 25 bp, Artificial
  probe
  misc_feature (1)..(25): SEQ ID NO: 1760; WAN024FF4_at; Start 56; Stop 80
caccgattgcaccagcaatcaatga

SEQ ID NO: 203777 - DNA, 25 bp, Artificial
  probe
  misc_feature (1)..(25): SEQ ID NO: 1760; WAN024FF4_at; Start 17; Stop 41
taccagtaccagcaagtccaaggat

SEQ ID NO: 203778 - DNA, 25 bp, Artificial
  probe
  misc_feature (1)..(25): SEQ ID NO: 1760; WAN024FF4_at; Start 63; Stop 87
tgcaccagcaatcaatgaaaggaag

SEQ ID NO: 203779 - DNA, 25 bp, Artificial
  probe
  misc_feature (1)..(25): SEQ ID NO: 1760; WAN024FF4_at; Start 39; Stop 63
gatagaagccaatccaccaccgatt

SEQ ID NO: 203780 - DNA, 25 bp, Artificial
  probe
  misc_feature (1)..(25): SEQ ID NO: 1760; WAN024FF4_at; Start 100; Stop 124
aagcgcaagttcaccccgaagatag

SEQ ID NO: 203781 - DNA, 25 bp, Artificial
  probe
  misc_feature (1)..(25): SEQ ID NO: 1760; WAN024FF4_at; Start 114; Stop 138
cccgaagatagcaggctctgtaata

SEQ ID NO: 203782 - DNA, 25 bp, Artificial
  probe
  misc_feature (1)..(25): SEQ ID NO: 1760; WAN024FF4_at; Start 137; Stop 161
tacctaggaaggcagaaagagcagc

SEQ ID NO: 203783 - DNA, 25 bp, Artificial
  probe
  misc_feature (1)..(25): SEQ ID NO: 1760; WAN024FF4_at; Start 201; Stop 225
aacaccaaccgcaacagtagcagca

SEQ ID NO: 203784 - DNA, 25 bp, Artificial
  probe
  misc_feature (1)..(25): SEQ ID NO: 1760; WAN024FF4_at; Start 65; Stop 89
caccagcaatcaatgaaaggaagaa

SEQ ID NO: 203785 - DNA, 25 bp, Artificial
  probe
  misc_feature (1)..(25): SEQ ID NO: 4874; WAN024FF5_at; Start 222; Stop 246
ccctgagttaaagaaagcaccttga

SEQ ID NO: 203786 - DNA, 25 bp, Artificial
  probe
  misc_feature (1)..(25): SEQ ID NO: 4874; WAN024FF5_at; Start 19; Stop 43
cccatgaagagacctgtcgctacga

SEQ ID NO: 203787 - DNA, 25 bp, Artificial
  probe
  misc_feature (1)..(25): SEQ ID NO: 4874; WAN024FF5_at; Start 121; Stop 145
tctgctttcatgtcatccttagatg

SEQ ID NO: 203788 - DNA, 25 bp, Artificial
  probe
  misc_feature (1)..(25): SEQ ID NO: 4874; WAN024FF5_at; Start 50; Stop 74
ggatgattggaacgaaaacatcacc

SEQ ID NO: 203789 - DNA, 25 bp, Artificial
  probe
  misc_feature (1)..(25): SEQ ID NO: 4874; WAN024FF5_at; Start 86; Stop 110
tagcacgttggaaccagttcccttg

SEQ ID NO: 203790 - DNA, 25 bp, Artificial
  probe
  misc_feature (1)..(25): SEQ ID NO: 4874; WAN024FF5_at; Start 77; Stop 101
aagtacggatagcacgttggaacca

SEQ ID NO: 203791 - DNA, 25 bp, Artificial
  probe
  misc_feature (1)..(25): SEQ ID NO: 4874; WAN024FF5_at; Start 36; Stop 60
cgctacgataactgggatgattgga

SEQ ID NO: 203792 - DNA, 25 bp, Artificial
  probe
  misc_feature (1)..(25): SEQ ID NO: 4874; WAN024FF5_at; Start 128; Stop 152
tcatgtcatccttagatgatgttgg

SEQ ID NO: 203793 - DNA, 25 bp, Artificial
  probe
  misc_feature (1)..(25): SEQ ID NO: 4874; WAN024FF5_at; Start 44; Stop 68
taactgggatgattggaacgaaaac

SEQ ID NO: 203794 - DNA, 25 bp, Artificial
  probe
  misc_feature (1)..(25): SEQ ID NO: 4874; WAN024FF5_at; Start 131; Stop 155
tgtcatccttagatgatgttggtaa

SEQ ID NO: 203795 - DNA, 25 bp, Artificial
  probe
  misc_feature (1)..(25): SEQ ID NO: 4874; WAN024FF5_at; Start 214; Stop 238
tggtattgccctgagttaaagaaag

SEQ ID NO: 203796 - DNA, 25 bp, Artificial
  probe
  misc_feature (1)..(25): SEQ ID NO: 4874; WAN024FF5_at; Start 221; Stop 245
gccctgagttaaagaaagcaccttg

SEQ ID NO: 203797 - DNA, 25 bp, Artificial
  probe
  misc_feature (1)..(25): SEQ ID NO: 4874; WAN024FF5_at; Start 101; Stop 125
agttcccttgtttagcaacttctgc

SEQ ID NO: 203798 - DNA, 25 bp, Artificial
  probe
  misc_feature (1)..(25): SEQ ID NO: 4874; WAN024FF5_at; Start 180; Stop 204
cattttgttaactgtacctgtacca

SEQ ID NO: 203799 - DNA, 25 bp, Artificial
  probe
  misc_feature (1)..(25): SEQ ID NO: 4874; WAN024FF5_at; Start 80; Stop 104
tacggatagcacgttggaaccagtt

SEQ ID NO: 203800 - DNA, 25 bp, Artificial
  probe
  misc_feature (1)..(25): SEQ ID NO: 4874; WAN024FF5_at; Start 13; Stop 37
cgcacacccatgaagagacctgtcg

SEQ ID NO: 203801 - DNA, 25 bp, Artificial
  probe
  misc_feature (1)..(25): SEQ ID NO: 4874; WAN024FF5_at; Start 93; Stop 117
ttggaaccagttcccttgtttagca

SEQ ID NO: 203802 - DNA, 25 bp, Artificial
  probe
  misc_feature (1)..(25): SEQ ID NO: 4874; WAN024FF5_at; Start 16; Stop 40
acacccatgaagagacctgtcgcta

SEQ ID NO: 203803 - DNA, 25 bp, Artificial
  probe
  misc_feature (1)..(25): SEQ ID NO: 4874; WAN024FF5_at; Start 32; Stop 56
ctgtcgctacgataactgggatgat

SEQ ID NO: 203804 - DNA, 25 bp, Artificial
  probe
  misc_feature (1)..(25): SEQ ID NO: 4874; WAN024FF5_at; Start 23; Stop 47
tgaagagacctgtcgctacgataac

SEQ ID NO: 203805 - DNA, 25 bp, Artificial
  probe
  misc_feature (1)..(25): SEQ ID NO: 4874; WAN024FF5_at; Start 1; Stop 25
ttgaaaagaccacgcacacccatga

SEQ ID NO: 203806 - DNA, 25 bp, Artificial
  probe
  misc_feature (1)..(25): SEQ ID NO: 4874; WAN024FF5_at; Start 84; Stop 108
gatagcacgttggaaccagttccct

SEQ ID NO: 203807 - DNA, 25 bp, Artificial
  probe
  misc_feature (1)..(25): SEQ ID NO: 4874; WAN024FF5_at; Start 157; Stop 181
ccaagtacaacaacttcatcgtaca

SEQ ID NO: 203808 - DNA, 25 bp, Artificial
  probe
  misc_feature (1)..(25): SEQ ID NO: 4874; WAN024FF5_at; Start 203; Stop 227
caaagataatttggtattgccctga

SEQ ID NO: 203809 - DNA, 25 bp, Artificial
  probe
  misc_feature (1)..(25): SEQ ID NO: 4874; WAN024FF5_at; Start 39; Stop 63
tacgataactgggatgattggaacg

SEQ ID NO: 203810 - DNA, 25 bp, Artificial
  probe
  misc_feature (1)..(25): SEQ ID NO: 4874; WAN024FF5_at; Start 207; Stop 231
gataatttggtattgccctgagtta

SEQ ID NO: 203811 - DNA, 25 bp, Artificial
  probe
  misc_feature (1)..(25): SEQ ID NO: 4874; WAN024FF5_at; Start 167; Stop 191
caacttcatcgtacattttgttaac

SEQ ID NO: 203812 - DNA, 25 bp, Artificial
  probe
  misc_feature (1)..(25): SEQ ID NO: 4874; WAN024FF5_at; Start 29; Stop 53
gacctgtcgctacgataactgggat

SEQ ID NO: 203813 - DNA, 25 bp, Artificial
  probe
  misc_feature (1)..(25): SEQ ID NO: 4874; WAN024FF5_at; Start 27; Stop 51
gagacctgtcgctacgataactggg

SEQ ID NO: 203814 - DNA, 25 bp, Artificial
  probe
  misc_feature (1)..(25): SEQ ID NO: 4874; WAN024FF5_at; Start 6; Stop 30
aagaccacgcacacccatgaagaga

SEQ ID NO: 203815 - DNA, 25 bp, Artificial
  probe
  misc_feature (1)..(25): SEQ ID NO: 4874; WAN024FF5_at; Start 115; Stop 139
gcaacttctgctttcatgtcatcct

SEQ ID NO: 203816 - DNA, 25 bp, Artificial
  probe
  misc_feature (1)..(25): SEQ ID NO: 4874; WAN024FF5_at; Start 217; Stop 241
tattgccctgagttaaagaaagcac

SEQ ID NO: 203817 - DNA, 25 bp, Artificial
  probe
  misc_feature (1)..(25): SEQ ID NO: 4874; WAN024FF5_at; Start 194; Stop 218
tacctgtaccaaagataatttggta

SEQ ID NO: 203818 - DNA, 25 bp, Artificial
  probe
  misc_feature (1)..(25): SEQ ID NO: 4874; WAN024FF5_at; Start 11; Stop 35
cacgcacacccatgaagagacctgt

SEQ ID NO: 203819 - DNA, 25 bp, Artificial
  probe
  misc_feature (1)..(25): SEQ ID NO: 5291; WAN024FF6_at; Start 512; Stop 536
tatttggtggaaatcctgccgttgg

SEQ ID NO: 203820 - DNA, 25 bp, Artificial
  probe
  misc_feature (1)..(25): SEQ ID NO: 5291; WAN024FF6_at; Start 713; Stop 737
tccgcaaggttgttccagatgtcat

SEQ ID NO: 203821 - DNA, 25 bp, Artificial
  probe
  misc_feature (1)..(25): SEQ ID NO: 5291; WAN024FF6_at; Start 1441; Stop 1465
gaaacacttgtaactcctatcgtcg

SEQ ID NO: 203822 - DNA, 25 bp, Artificial
  probe
  misc_feature (1)..(25): SEQ ID NO: 5291; WAN024FF6_at; Start 1579; Stop 1603
gaagtttcaattgcctttccaacag

SEQ ID NO: 203823 - DNA, 25 bp, Artificial
  probe
  misc_feature (1)..(25): SEQ ID NO: 5291; WAN024FF6_at; Start 1491; Stop 1515
caatgacccagtcttctcaagtgga

SEQ ID NO: 203824 - DNA, 25 bp, Artificial
  probe
  misc_feature (1)..(25): SEQ ID NO: 5291; WAN024FF6_at; Start 697; Stop 721
aaatttgaaaaagctgtccgcaagg

SEQ ID NO: 203825 - DNA, 25 bp, Artificial
  probe
  misc_feature (1)..(25): SEQ ID NO: 5291; WAN024FF6_at; Start 300; Stop 324
gaactggttccaacgtgctatccgt

SEQ ID NO: 203826 - DNA, 25 bp, Artificial
  probe
  misc_feature (1)..(25): SEQ ID NO: 5291; WAN024FF6_at; Start 1506; Stop 1530
ctcaagtggagctatgggacaaggt

SEQ ID NO: 203827 - DNA, 25 bp, Artificial
  probe
  misc_feature (1)..(25): SEQ ID NO: 5291; WAN024FF6_at; Start 1420; Stop 1444
gcgccagcagctcttcaaaatgaaa

SEQ ID NO: 203828 - DNA, 25 bp, Artificial
  probe
  misc_feature (1)..(25): SEQ ID NO: 5291; WAN024FF6_at; Start 908; Stop 932
tgatcgtcgtgtcaggtgtgcacca

SEQ ID NO: 203829 - DNA, 25 bp, Artificial
  probe
  misc_feature (1)..(25): SEQ ID NO: 5291; WAN024FF6_at; Start 1134; Stop 1158
ggtgaacttgcgcttccgtaaacca

SEQ ID NO: 203830 - DNA, 25 bp, Artificial
  probe
  misc_feature (1)..(25): SEQ ID NO: 5291; WAN024FF6_at; Start 955; Stop 979
caattacttgctgctgaccatgcta

SEQ ID NO: 203831 - DNA, 25 bp, Artificial
  probe
  misc_feature (1)..(25): SEQ ID NO: 5291; WAN024FF6_at; Start 44; Stop 68
ccttgggcggacgtgaaaatgtcaa

SEQ ID NO: 203832 - DNA, 25 bp, Artificial
  probe
  misc_feature (1)..(25): SEQ ID NO: 5291; WAN024FF6_at; Start 1598; Stop 1622
caacagggcacgcttttggtttgaa

SEQ ID NO: 203833 - DNA, 25 bp, Artificial
  probe
  misc_feature (1)..(25): SEQ ID NO: 5291; WAN024FF6_at; Start 1110; Stop 1134
tattacagagcctgctatcttcggg

SEQ ID NO: 203834 - DNA, 25 bp, Artificial
  probe
  misc_feature (1)..(25): SEQ ID NO: 5291; WAN024FF6_at; Start 365; Stop 389
tagcgacaggtctcttcatgggtgt

SEQ ID NO: 203835 - DNA, 25 bp, Artificial
  probe
  misc_feature (1)..(25): SEQ ID NO: 5291; WAN024FF6_at; Start 1208; Stop 1232
tccttggacttgctggtactggtaa

SEQ ID NO: 203836 - DNA, 25 bp, Artificial
  probe
  misc_feature (1)..(25): SEQ ID NO: 5291; WAN024FF6_at; Start 1017; Stop 1041
tcaaggtgctgctactgttgcggtt

SEQ ID NO: 203837 - DNA, 25 bp, Artificial
  probe
  misc_feature (1)..(25): SEQ ID NO: 5291; WAN024FF6_at; Start 1360; Stop 1384
gaagtagacgcaactgcagctgcaa

SEQ ID NO: 203838 - DNA, 25 bp, Artificial
  probe
  misc_feature (1)..(25): SEQ ID NO: 5291; WAN024FF6_at; Start 1825; Stop 1849
tcagtagctccagtcgcaacaggtt

SEQ ID NO: 203839 - DNA, 25 bp, Artificial
  probe
  misc_feature (1)..(25): SEQ ID NO: 5291; WAN024FF6_at; Start 460; Stop 484
gatacagccttcatcatcttgccag

SEQ ID NO: 203840 - DNA, 25 bp, Artificial
  probe
  misc_feature (1)..(25): SEQ ID NO: 5291; WAN024FF6_at; Start 381; Stop 405
catgggtgtgcgtggtcttttcaac

SEQ ID NO: 203841 - DNA, 25 bp, Artificial
  probe
  misc_feature (1)..(25): SEQ ID NO: 5291; WAN024FF6_at; Start 1468; Stop 1492
gatgttgtcgctcttgctgatgtca

SEQ ID NO: 203842 - DNA, 25 bp, Artificial
  probe
  misc_feature (1)..(25): SEQ ID NO: 5291; WAN024FF6_at; Start 412; Stop 436
gaaatgccacttccaggtgactttg

SEQ ID NO: 203843 - DNA, 25 bp, Artificial
  probe
  misc_feature (1)..(25): SEQ ID NO: 5291; WAN024FF6_at; Start 1406; Stop 1430
aaaaagaagaagttgcgccagcagc

SEQ ID NO: 203844 - DNA, 25 bp, Artificial
  probe
  misc_feature (1)..(25): SEQ ID NO: 5291; WAN024FF6_at; Start 547; Stop 571
ggtatgatgcttgtctctggctcac

SEQ ID NO: 203845 - DNA, 25 bp, Artificial
  probe
  misc_feature (1)..(25): SEQ ID NO: 5291; WAN024FF6_at; Start 562; Stop 586
tctggctcacttccaaacgcttggg

SEQ ID NO: 203846 - DNA, 25 bp, Artificial
  probe
  misc_feature (1)..(25): SEQ ID NO: 5291; WAN024FF6_at; Start 1256; Stop 1280
caatgctttatgttggtaacggaca

SEQ ID NO: 203847 - DNA, 25 bp, Artificial
  probe
  misc_feature (1)..(25): SEQ ID NO: 5291; WAN024FF6_at; Start 160; Stop 184
caaggtgctttctttaactcagggc

SEQ ID NO: 203848 - DNA, 25 bp, Artificial
  probe
  misc_feature (1)..(25): SEQ ID NO: 5291; WAN024FF6_at; Start 494; Stop 518
tgtggtcaaccttccgtgtatttgg

SEQ ID NO: 203849 - DNA, 25 bp, Artificial
  probe
  misc_feature (1)..(25): SEQ ID NO: 5291; WAN024FF6_at; Start 29; Stop 53
aaaaagtcatcgatgccttgggcgg

SEQ ID NO: 203850 - DNA, 25 bp, Artificial
  probe
  misc_feature (1)..(25): SEQ ID NO: 5291; WAN024FF6_at; Start 350; Stop 374
tcatcccagttatcgtagcgacagg

SEQ ID NO: 203851 - DNA, 25 bp, Artificial
  probe
  misc_feature (1)..(25): SEQ ID NO: 5291; WAN024FF6_at; Start 660; Stop 684
cgttcttccagccttcatcatcggg

SEQ ID NO: 203852 - DNA, 25 bp, Artificial
  probe
  misc_feature (1)..(25): SEQ ID NO: 5291; WAN024FF6_at; Start 1068; Stop 1092
gaaaacacttgctttcccggctgct

SEQ ID NO: 203853 - DNA, 25 bp, Artificial
  probe
  misc_feature (1)..(25): SEQ ID NO: 5700; WAN024FF7_at; Start 132; Stop 156
gttaaagttttcatcaccgacagca

SEQ ID NO: 203854 - DNA, 25 bp, Artificial
  probe
  misc_feature (1)..(25): SEQ ID NO: 5700; WAN024FF7_at; Start 150; Stop 174
gacagcacagacaaactttgtaccg

SEQ ID NO: 203855 - DNA, 25 bp, Artificial
  probe
  misc_feature (1)..(25): SEQ ID NO: 5700; WAN024FF7_at; Start 1; Stop 25
ttgtcaatatcaatcggcccaaatg

SEQ ID NO: 203856 - DNA, 25 bp, Artificial
  probe
  misc_feature (1)..(25): SEQ ID NO: 5700; WAN024FF7_at; Start 154; Stop 178
gcacagacaaactttgtaccgcccg

SEQ ID NO: 203857 - DNA, 25 bp, Artificial
  probe
  misc_feature (1)..(25): SEQ ID NO: 5700; WAN024FF7_at; Start 83; Stop 107
cgattgtttcgattggagttgttgt

SEQ ID NO: 203858 - DNA, 25 bp, Artificial
  probe
  misc_feature (1)..(25): SEQ ID NO: 5700; WAN024FF7_at; Start 41; Stop 65
cagcaaggttatcgaattttgagaa

SEQ ID NO: 203859 - DNA, 25 bp, Artificial
  probe
  misc_feature (1)..(25): SEQ ID NO: 5700; WAN024FF7_at; Start 28; Stop 52
ccaactgcaagaccagcaaggttat

SEQ ID NO: 203860 - DNA, 25 bp, Artificial
  probe
  misc_feature (1)..(25): SEQ ID NO: 5700; WAN024FF7_at; Start 156; Stop 180
acagacaaactttgtaccgcccgct

SEQ ID NO: 203861 - DNA, 25 bp, Artificial
  probe
  misc_feature (1)..(25): SEQ ID NO: 5700; WAN024FF7_at; Start 10; Stop 34
tcaatcggcccaaatgaaccaactg

SEQ ID NO: 203862 - DNA, 25 bp, Artificial
  probe
  misc_feature (1)..(25): SEQ ID NO: 5700; WAN024FF7_at; Start 138; Stop 162
gttttcatcaccgacagcacagaca

SEQ ID NO: 203863 - DNA, 25 bp, Artificial
  probe
  misc_feature (1)..(25): SEQ ID NO: 5700; WAN024FF7_at; Start 24; Stop 48
tgaaccaactgcaagaccagcaagg

SEQ ID NO: 203864 - DNA, 25 bp, Artificial
  probe
  misc_feature (1)..(25): SEQ ID NO: 5700; WAN024FF7_at; Start 8; Stop 32
tatcaatcggcccaaatgaaccaac

SEQ ID NO: 203865 - DNA, 25 bp, Artificial
  probe
  misc_feature (1)..(25): SEQ ID NO: 5700; WAN024FF7_at; Start 70; Stop 94
tcaatggttttatcgattgtttcga

SEQ ID NO: 203866 - DNA, 25 bp, Artificial
  probe
  misc_feature (1)..(25): SEQ ID NO: 5700; WAN024FF7_at; Start 52; Stop 76
tcgaattttgagaagaactcaatgg

SEQ ID NO: 203867 - DNA, 25 bp, Artificial
  probe
  misc_feature (1)..(25): SEQ ID NO: 5700; WAN024FF7_at; Start 38; Stop 62
gaccagcaaggttatcgaattttga

SEQ ID NO: 203868 - DNA, 25 bp, Artificial
  probe
  misc_feature (1)..(25): SEQ ID NO: 5700; WAN024FF7_at; Start 147; Stop 171
accgacagcacagacaaactttgta

SEQ ID NO: 203869 - DNA, 25 bp, Artificial
  probe
  misc_feature (1)..(25): SEQ ID NO: 5700; WAN024FF7_at; Start 135; Stop 159
aaagttttcatcaccgacagcacag

SEQ ID NO: 203870 - DNA, 25 bp, Artificial
  probe
  misc_feature (1)..(25): SEQ ID NO: 5700; WAN024FF7_at; Start 176; Stop 200
ccgcttccaagcttccatataattt

SEQ ID NO: 203871 - DNA, 25 bp, Artificial
  probe
  misc_feature (1)..(25): SEQ ID NO: 5700; WAN024FF7_at; Start 145; Stop 169
tcaccgacagcacagacaaactttg

SEQ ID NO: 203872 - DNA, 25 bp, Artificial
  probe
  misc_feature (1)..(25): SEQ ID NO: 5700; WAN024FF7_at; Start 141; Stop 165
ttcatcaccgacagcacagacaaac

SEQ ID NO: 203873 - DNA, 25 bp, Artificial
  probe
  misc_feature (1)..(25): SEQ ID NO: 5700; WAN024FF7_at; Start 31; Stop 55
actgcaagaccagcaaggttatcga

SEQ ID NO: 203874 - DNA, 25 bp, Artificial
  probe
  misc_feature (1)..(25): SEQ ID NO: 5700; WAN024FF7_at; Start 124; Stop 148
tctacaacgttaaagttttcatcac

SEQ ID NO: 203875 - DNA, 25 bp, Artificial
  probe
  misc_feature (1)..(25): SEQ ID NO: 5700; WAN024FF7_at; Start 91; Stop 115
tcgattggagttgttgttggaaatt

SEQ ID NO: 203876 - DNA, 25 bp, Artificial
  probe
  misc_feature (1)..(25): SEQ ID NO: 5700; WAN024FF7_at; Start 61; Stop 85
gagaagaactcaatggttttatcga

SEQ ID NO: 203877 - DNA, 25 bp, Artificial
  probe
  misc_feature (1)..(25): SEQ ID NO: 5700; WAN024FF7_at; Start 201; Stop 225
tgtcatgataaacctcttgttttta

SEQ ID NO: 203878 - DNA, 25 bp, Artificial
  probe
  misc_feature (1)..(25): SEQ ID NO: 5700; WAN024FF7_at; Start 16; Stop 40
ggcccaaatgaaccaactgcaagac

SEQ ID NO: 203879 - DNA, 25 bp, Artificial
  probe
  misc_feature (1)..(25): SEQ ID NO: 5700; WAN024FF7_at; Start 190; Stop 214
ccatataattttgtcatgataaacc

SEQ ID NO: 203880 - DNA, 25 bp, Artificial
  probe
  misc_feature (1)..(25): SEQ ID NO: 5700; WAN024FF7_at; Start 34; Stop 58
gcaagaccagcaaggttatcgaatt

SEQ ID NO: 203881 - DNA, 25 bp, Artificial
  probe
  misc_feature (1)..(25): SEQ ID NO: 5700; WAN024FF7_at; Start 96; Stop 120
tggagttgttgttggaaattgtgtt

SEQ ID NO: 203882 - DNA, 25 bp, Artificial
  probe
  misc_feature (1)..(25): SEQ ID NO: 5700; WAN024FF7_at; Start 14; Stop 38
tcggcccaaatgaaccaactgcaag

SEQ ID NO: 203883 - DNA, 25 bp, Artificial
  probe
  misc_feature (1)..(25): SEQ ID NO: 5700; WAN024FF7_at; Start 19; Stop 43
ccaaatgaaccaactgcaagaccag

SEQ ID NO: 203884 - DNA, 25 bp, Artificial
  probe
  misc_feature (1)..(25): SEQ ID NO: 5700; WAN024FF7_at; Start 47; Stop 71
ggttatcgaattttgagaagaactc

SEQ ID NO: 203885 - DNA, 25 bp, Artificial
  probe
  misc_feature (1)..(25): SEQ ID NO: 5700; WAN024FF7_at; Start 183; Stop 207
caagcttccatataattttgtcatg

SEQ ID NO: 203886 - DNA, 25 bp, Artificial
  probe
  misc_feature (1)..(25): SEQ ID NO: 5700; WAN024FF7_at; Start 195; Stop 219
taattttgtcatgataaacctcttg

SEQ ID NO: 203887 - DNA, 25 bp, Artificial
  probe
  misc_feature (1)..(25): SEQ ID NO: 2152; WAN024FF8_at; Start 178; Stop 202
attgttacgggcaaccatttcaccg

SEQ ID NO: 203888 - DNA, 25 bp, Artificial
  probe
  misc_feature (1)..(25): SEQ ID NO: 2152; WAN024FF8_at; Start 45; Stop 69
ggtgtctagcaacataataatgacc

SEQ ID NO: 203889 - DNA, 25 bp, Artificial
  probe
  misc_feature (1)..(25): SEQ ID NO: 2152; WAN024FF8_at; Start 186; Stop 210
gggcaaccatttcaccgtaagcaga

SEQ ID NO: 203890 - DNA, 25 bp, Artificial
  probe
  misc_feature (1)..(25): SEQ ID NO: 2152; WAN024FF8_at; Start 207; Stop 231
cagagctgtttacgtctgttgtgaa

SEQ ID NO: 203891 - DNA, 25 bp, Artificial
  probe
  misc_feature (1)..(25): SEQ ID NO: 2152; WAN024FF8_at; Start 98; Stop 122
aactcaccacgttggatgacgcctg

SEQ ID NO: 203892 - DNA, 25 bp, Artificial
  probe
  misc_feature (1)..(25): SEQ ID NO: 2152; WAN024FF8_at; Start 113; Stop 137
atgacgcctgcaccgatacctgtac

SEQ ID NO: 203893 - DNA, 25 bp, Artificial
  probe
  misc_feature (1)..(25): SEQ ID NO: 2152; WAN024FF8_at; Start 192; Stop 216
ccatttcaccgtaagcagagctgtt

SEQ ID NO: 203894 - DNA, 25 bp, Artificial
  probe
  misc_feature (1)..(25): SEQ ID NO: 2152; WAN024FF8_at; Start 21; Stop 45
taaactctttttcaatatccattgg

SEQ ID NO: 203895 - DNA, 25 bp, Artificial
  probe
  misc_feature (1)..(25): SEQ ID NO: 2152; WAN024FF8_at; Start 124; Stop 148
accgatacctgtaccgattgtgtag

SEQ ID NO: 203896 - DNA, 25 bp, Artificial
  probe
  misc_feature (1)..(25): SEQ ID NO: 2152; WAN024FF8_at; Start 59; Stop 83
taataatgacccatttcagggtgac

SEQ ID NO: 203897 - DNA, 25 bp, Artificial
  probe
  misc_feature (1)..(25): SEQ ID NO: 2152; WAN024FF8_at; Start 90; Stop 114
caccgataaactcaccacgttggat

SEQ ID NO: 203898 - DNA, 25 bp, Artificial
  probe
  misc_feature (1)..(25): SEQ ID NO: 2152; WAN024FF8_at; Start 118; Stop 142
gcctgcaccgatacctgtaccgatt

SEQ ID NO: 203899 - DNA, 25 bp, Artificial
  probe
  misc_feature (1)..(25): SEQ ID NO: 2152; WAN024FF8_at; Start 201; Stop 225
cgtaagcagagctgtttacgtctgt

SEQ ID NO: 203900 - DNA, 25 bp, Artificial
  probe
  misc_feature (1)..(25): SEQ ID NO: 2152; WAN024FF8_at; Start 165; Stop 189
tacgaccaccagcattgttacgggc

SEQ ID NO: 203901 - DNA, 25 bp, Artificial
  probe
  misc_feature (1)..(25): SEQ ID NO: 2152; WAN024FF8_at; Start 133; Stop 157
tgtaccgattgtgtagtaaaccaag

SEQ ID NO: 203902 - DNA, 25 bp, Artificial
  probe
  misc_feature (1)..(25): SEQ ID NO: 2152; WAN024FF8_at; Start 75; Stop 99
cagggtgacccacaccaccgataaa

SEQ ID NO: 203903 - DNA, 25 bp, Artificial
  probe
  misc_feature (1)..(25): SEQ ID NO: 2152; WAN024FF8_at; Start 94; Stop 118
gataaactcaccacgttggatgacg

SEQ ID NO: 203904 - DNA, 25 bp, Artificial
  probe
  misc_feature (1)..(25): SEQ ID NO: 2152; WAN024FF8_at; Start 171; Stop 195
caccagcattgttacgggcaaccat

SEQ ID NO: 203905 - DNA, 25 bp, Artificial
  probe
  misc_feature (1)..(25): SEQ ID NO: 2152; WAN024FF8_at; Start 221; Stop 245
tctgttgtgaagtacattggcacgt

SEQ ID NO: 203906 - DNA, 25 bp, Artificial
  probe
  misc_feature (1)..(25): SEQ ID NO: 2152; WAN024FF8_at; Start 62; Stop 86
taatgacccatttcagggtgaccca

SEQ ID NO: 203907 - DNA, 25 bp, Artificial
  probe
  misc_feature (1)..(25): SEQ ID NO: 2152; WAN024FF8_at; Start 163; Stop 187
gatacgaccaccagcattgttacgg

SEQ ID NO: 203908 - DNA, 25 bp, Artificial
  probe
  misc_feature (1)..(25): SEQ ID NO: 2152; WAN024FF8_at; Start 142; Stop 166
tgtgtagtaaaccaagttttcgata

SEQ ID NO: 203909 - DNA, 25 bp, Artificial
  probe
  misc_feature (1)..(25): SEQ ID NO: 2152; WAN024FF8_at; Start 71; Stop 95
atttcagggtgacccacaccaccga

SEQ ID NO: 203910 - DNA, 25 bp, Artificial
  probe
  misc_feature (1)..(25): SEQ ID NO: 2152; WAN024FF8_at; Start 168; Stop 192
gaccaccagcattgttacgggcaac

SEQ ID NO: 203911 - DNA, 25 bp, Artificial
  probe
  misc_feature (1)..(25): SEQ ID NO: 2152; WAN024FF8_at; Start 131; Stop 155
cctgtaccgattgtgtagtaaacca

SEQ ID NO: 203912 - DNA, 25 bp, Artificial
  probe
  misc_feature (1)..(25): SEQ ID NO: 2152; WAN024FF8_at; Start 154; Stop 178
caagttttcgatacgaccaccagca

SEQ ID NO: 203913 - DNA, 25 bp, Artificial
  probe
  misc_feature (1)..(25): SEQ ID NO: 2152; WAN024FF8_at; Start 34; Stop 58
aatatccattgggtgtctagcaaca

SEQ ID NO: 203914 - DNA, 25 bp, Artificial
  probe
  misc_feature (1)..(25): SEQ ID NO: 2152; WAN024FF8_at; Start 39; Stop 63
ccattgggtgtctagcaacataata

SEQ ID NO: 203915 - DNA, 25 bp, Artificial
  probe
  misc_feature (1)..(25): SEQ ID NO: 2152; WAN024FF8_at; Start 217; Stop 241
tacgtctgttgtgaagtacattggc

SEQ ID NO: 203916 - DNA, 25 bp, Artificial
  probe
  misc_feature (1)..(25): SEQ ID NO: 2152; WAN024FF8_at; Start 158; Stop 182
ttttcgatacgaccaccagcattgt

SEQ ID NO: 203917 - DNA, 25 bp, Artificial
  probe
  misc_feature (1)..(25): SEQ ID NO: 2152; WAN024FF8_at; Start 195; Stop 219
tttcaccgtaagcagagctgtttac

SEQ ID NO: 203918 - DNA, 25 bp, Artificial
  probe
  misc_feature (1)..(25): SEQ ID NO: 2152; WAN024FF8_at; Start 109; Stop 133
ttggatgacgcctgcaccgatacct

SEQ ID NO: 203919 - DNA, 25 bp, Artificial
  probe
  misc_feature (1)..(25): SEQ ID NO: 2152; WAN024FF8_at; Start 225; Stop 249
ttgtgaagtacattggcacgtttag

SEQ ID NO: 203920 - DNA, 25 bp, Artificial
  probe
  misc_feature (1)..(25): SEQ ID NO: 2152; WAN024FF8_at; Start 105; Stop 129
cacgttggatgacgcctgcaccgat

SEQ ID NO: 203921 - DNA, 25 bp, Artificial
  probe
  misc_feature (1)..(25): SEQ ID NO: 1314; WAN024FF9_at; Start 781; Stop 805
tacctaccagtaccagatgtgcgtg

SEQ ID NO: 203922 - DNA, 25 bp, Artificial
  probe
  misc_feature (1)..(25): SEQ ID NO: 1314; WAN024FF9_at; Start 680; Stop 704
tgactttccgcccagacgtgattgt

SEQ ID NO: 203923 - DNA, 25 bp, Artificial
  probe
  misc_feature (1)..(25): SEQ ID NO: 1314; WAN024FF9_at; Start 728; Stop 752
aacaacatatgctggaccgtgtccg

SEQ ID NO: 203924 - DNA, 25 bp, Artificial
  probe
  misc_feature (1)..(25): SEQ ID NO: 1314; WAN024FF9_at; Start 213; Stop 237
aaaaacttatggctttatcacgacg

SEQ ID NO: 203925 - DNA, 25 bp, Artificial
  probe
  misc_feature (1)..(25): SEQ ID NO: 1314; WAN024FF9_at; Start 741; Stop 765
ggaccgtgtccgtgagaaatttaca

SEQ ID NO: 203926 - DNA, 25 bp, Artificial
  probe
  misc_feature (1)..(25): SEQ ID NO: 1314; WAN024FF9_at; Start 136; Stop 160
gagttcttctcaaaattcgataacc

SEQ ID NO: 203927 - DNA, 25 bp, Artificial
  probe
  misc_feature (1)..(25): SEQ ID NO: 1314; WAN024FF9_at; Start 631; Stop 655
tgggatgttcaagcctactatatcg

SEQ ID NO: 203928 - DNA, 25 bp, Artificial
  probe
  misc_feature (1)..(25): SEQ ID NO: 1314; WAN024FF9_at; Start 794; Stop 818
cagatgtgcgtgactatatcgtgac

SEQ ID NO: 203929 - DNA, 25 bp, Artificial
  probe
  misc_feature (1)..(25): SEQ ID NO: 1314; WAN024FF9_at; Start 101; Stop 125
caacaactccaatcgaaacaatcga

SEQ ID NO: 203930 - DNA, 25 bp, Artificial
  probe
  misc_feature (1)..(25): SEQ ID NO: 1314; WAN024FF9_at; Start 491; Stop 515
gacacccaatggatattgaaaaaga

SEQ ID NO: 203931 - DNA, 25 bp, Artificial
  probe
  misc_feature (1)..(25): SEQ ID NO: 1314; WAN024FF9_at; Start 360; Stop 384
caatgctggtggtcgtatcgaaaac

SEQ ID NO: 203932 - DNA, 25 bp, Artificial
  probe
  misc_feature (1)..(25): SEQ ID NO: 1314; WAN024FF9_at; Start 182; Stop 206
catttgggccgattgatattgacaa

SEQ ID NO: 203933 - DNA, 25 bp, Artificial
  probe
  misc_feature (1)..(25): SEQ ID NO: 1314; WAN024FF9_at; Start 386; Stop 410
tggtttactacacaatcggtacagg

SEQ ID NO: 203934 - DNA, 25 bp, Artificial
  probe
  misc_feature (1)..(25): SEQ ID NO: 1314; WAN024FF9_at; Start 716; Stop 740
gggtcatggctcaacaacatatgct

SEQ ID NO: 203935 - DNA, 25 bp, Artificial
  probe
  misc_feature (1)..(25): SEQ ID NO: 1314; WAN024FF9_at; Start 832; Stop 856
ggaaatggttctgccacacttggga

SEQ ID NO: 203936 - DNA, 25 bp, Artificial
  probe
  misc_feature (1)..(25): SEQ ID NO: 1314; WAN024FF9_at; Start 115; Stop 139
gaaacaatcgataaaaccattgagt

SEQ ID NO: 203937 - DNA, 25 bp, Artificial
  probe
  misc_feature (1)..(25): SEQ ID NO: 1314; WAN024FF9_at; Start 819; Stop 843
gccagcagtcgcaggaaatggttct

SEQ ID NO: 203938 - DNA, 25 bp, Artificial
  probe
  misc_feature (1)..(25): SEQ ID NO: 1314; WAN024FF9_at; Start 806; Stop 830
actatatcgtgacgccagcagtcgc

SEQ ID NO: 203939 - DNA, 25 bp, Artificial
  probe
  misc_feature (1)..(25): SEQ ID NO: 1314; WAN024FF9_at; Start 456; Stop 480
gggtcaccctgaaatgggtcattat

SEQ ID NO: 203940 - DNA, 25 bp, Artificial
  probe
  misc_feature (1)..(25): SEQ ID NO: 1314; WAN024FF9_at; Start 691; Stop 715
ccagacgtgattgtctttggtggag

SEQ ID NO: 203941 - DNA, 25 bp, Artificial
  probe
  misc_feature (1)..(25): SEQ ID NO: 1314; WAN024FF9_at; Start 87; Stop 111
aacacaatttccaacaacaactcca

SEQ ID NO: 203942 - DNA, 25 bp, Artificial
  probe
  misc_feature (1)..(25): SEQ ID NO: 1314; WAN024FF9_at; Start 234; Stop 258
gacgactccaaaaccaaactgggca

SEQ ID NO: 203943 - DNA, 25 bp, Artificial
  probe
  misc_feature (1)..(25): SEQ ID NO: 1314; WAN024FF9_at; Start 38; Stop 62
caaagtttgtctgtgctgtcggtga

SEQ ID NO: 203944 - DNA, 25 bp, Artificial
  probe
  misc_feature (1)..(25): SEQ ID NO: 1314; WAN024FF9_at; Start 220; Stop 244
tatggctttatcacgacgactccaa

SEQ ID NO: 203945 - DNA, 25 bp, Artificial
  probe
  misc_feature (1)..(25): SEQ ID NO: 1314; WAN024FF9_at; Start 5; Stop 29
caaaattatatggaagcttggaagc

SEQ ID NO: 203946 - DNA, 25 bp, Artificial
  probe
  misc_feature (1)..(25): SEQ ID NO: 1314; WAN024FF9_at; Start 756; Stop 780
gaaatttacatctcttcttaatggt

SEQ ID NO: 203947 - DNA, 25 bp, Artificial
  probe
  misc_feature (1)..(25): SEQ ID NO: 1314; WAN024FF9_at; Start 52; Stop 76
gctgtcggtgatgaaaactttaacg

SEQ ID NO: 203948 - DNA, 25 bp, Artificial
  probe
  misc_feature (1)..(25): SEQ ID NO: 1314; WAN024FF9_at; Start 771; Stop 795
tcttaatggttacctaccagtacca

SEQ ID NO: 203949 - DNA, 25 bp, Artificial
  probe
  misc_feature (1)..(25): SEQ ID NO: 1314; WAN024FF9_at; Start 646; Stop 670
tactatatcgctcaagctgcggtta

SEQ ID NO: 203950 - DNA, 25 bp, Artificial
  probe
  misc_feature (1)..(25): SEQ ID NO: 1314; WAN024FF9_at; Start 443; Stop 467
ttatcggtggtgtgggtcaccctga

SEQ ID NO: 203951 - DNA, 25 bp, Artificial
  probe
  misc_feature (1)..(25): SEQ ID NO: 1314; WAN024FF9_at; Start 168; Stop 192
tcttgcagttggttcatttgggccg

SEQ ID NO: 203952 - DNA, 25 bp, Artificial
  probe
  misc_feature (1)..(25): SEQ ID NO: 1314; WAN024FF9_at; Start 618; Stop 642
caacaaccctgtttgggatgttcaa

SEQ ID NO: 203953 - DNA, 25 bp, Artificial
  probe
  misc_feature (1)..(25): SEQ ID NO: 1314; WAN024FF9_at; Start 394; Stop 418
tacacaatcggtacaggtatcggtg

SEQ ID NO: 203954 - DNA, 25 bp, Artificial
  probe
  misc_feature (1)..(25): SEQ ID NO: 1314; WAN024FF9_at; Start 375; Stop 399
tatcgaaaacttggtttactacaca

SEQ ID NO: 203955 - DNA, 25 bp, Artificial
  probe
  misc_feature (1)..(25): SEQ ID NO: 2848; WAN024FFA_at; Start 83; Stop 107
ggagtttgattttctgtatttgggc

SEQ ID NO: 203956 - DNA, 25 bp, Artificial
  probe
  misc_feature (1)..(25): SEQ ID NO: 2848; WAN024FFA_at; Start 197; Stop 221
tacagattttacagactgtcgtccc

SEQ ID NO: 203957 - DNA, 25 bp, Artificial
  probe
  misc_feature (1)..(25): SEQ ID NO: 2848; WAN024FFA_at; Start 533; Stop 557
tcatcattctgaccaaaccctttac

SEQ ID NO: 203958 - DNA, 25 bp, Artificial
  probe
  misc_feature (1)..(25): SEQ ID NO: 2848; WAN024FFA_at; Start 54; Stop 78
caatatctcatcgattgtcggtggg

SEQ ID NO: 203959 - DNA, 25 bp, Artificial
  probe
  misc_feature (1)..(25): SEQ ID NO: 2848; WAN024FFA_at; Start 42; Stop 66
gcagcgagttatcaatatctcatcg

SEQ ID NO: 203960 - DNA, 25 bp, Artificial
  probe
  misc_feature (1)..(25): SEQ ID NO: 2848; WAN024FFA_at; Start 2; Stop 26
tgtcacaggataaacaaatgaaagc

SEQ ID NO: 203961 - DNA, 25 bp, Artificial
  probe
  misc_feature (1)..(25): SEQ ID NO: 2848; WAN024FFA_at; Start 591; Stop 615
tattgactttttctggcaaatgctt

SEQ ID NO: 203962 - DNA, 25 bp, Artificial
  probe
  misc_feature (1)..(25): SEQ ID NO: 2848; WAN024FFA_at; Start 97; Stop 121
tgtatttgggcttatcaggctggga

SEQ ID NO: 203963 - DNA, 25 bp, Artificial
  probe
  misc_feature (1)..(25): SEQ ID NO: 2848; WAN024FFA_at; Start 285; Stop 309
tatctacaactatatcggcatcgtg

SEQ ID NO: 203964 - DNA, 25 bp, Artificial
  probe
  misc_feature (1)..(25): SEQ ID NO: 2848; WAN024FFA_at; Start 368; Stop 392
ctgtcgtcagcaagcgcacctacga

SEQ ID NO: 203965 - DNA, 25 bp, Artificial
  probe
  misc_feature (1)..(25): SEQ ID NO: 2848; WAN024FFA_at; Start 377; Stop 401
gcaagcgcacctacgacaagtacat

SEQ ID NO: 203966 - DNA, 25 bp, Artificial
  probe
  misc_feature (1)..(25): SEQ ID NO: 2848; WAN024FFA_at; Start 470; Stop 494
cagctgactttctctgtatgctggc

SEQ ID NO: 203967 - DNA, 25 bp, Artificial
  probe
  misc_feature (1)..(25): SEQ ID NO: 2848; WAN024FFA_at; Start 560; Stop 584
tcgtggtttatacctacggtctgac

SEQ ID NO: 203968 - DNA, 25 bp, Artificial
  probe
  misc_feature (1)..(25): SEQ ID NO: 2848; WAN024FFA_at; Start 260; Stop 284
ttatctacgggcacatcatcgggac

SEQ ID NO: 203969 - DNA, 25 bp, Artificial
  probe
  misc_feature (1)..(25): SEQ ID NO: 2848; WAN024FFA_at; Start 574; Stop 598
tacggtctgacctatattattgact

SEQ ID NO: 203970 - DNA, 25 bp, Artificial
  probe
  misc_feature (1)..(25): SEQ ID NO: 2848; WAN024FFA_at; Start 254; Stop 278
gggtctttatctacgggcacatcat

SEQ ID NO: 203971 - DNA, 25 bp, Artificial
  probe
  misc_feature (1)..(25): SEQ ID NO: 2848; WAN024FFA_at; Start 414; Stop 438
taagggcaatcgttttgaccgcttc

SEQ ID NO: 203972 - DNA, 25 bp, Artificial
  probe
  misc_feature (1)..(25): SEQ ID NO: 2848; WAN024FFA_at; Start 458; Stop 482
ggcccattagcccagctgactttct

SEQ ID NO: 203973 - DNA, 25 bp, Artificial
  probe
  misc_feature (1)..(25): SEQ ID NO: 2848; WAN024FFA_at; Start 124; Stop 148
ttacaatccaaggaaaccctctctg

SEQ ID NO: 203974 - DNA, 25 bp, Artificial
  probe
  misc_feature (1)..(25): SEQ ID NO: 2848; WAN024FFA_at; Start 265; Stop 289
tacgggcacatcatcgggactatct

SEQ ID NO: 203975 - DNA, 25 bp, Artificial
  probe
  misc_feature (1)..(25): SEQ ID NO: 2848; WAN024FFA_at; Start 210; Stop 234
gactgtcgtccctatcattccaggg

SEQ ID NO: 203976 - DNA, 25 bp, Artificial
  probe
  misc_feature (1)..(25): SEQ ID NO: 2848; WAN024FFA_at; Start 341; Stop 365
gcctatacggagctgcctttgtcca

SEQ ID NO: 203977 - DNA, 25 bp, Artificial
  probe
  misc_feature (1)..(25): SEQ ID NO: 2848; WAN024FFA_at; Start 452; Stop 476
tgatttggcccattagcccagctga

SEQ ID NO: 203978 - DNA, 25 bp, Artificial
  probe
  misc_feature (1)..(25): SEQ ID NO: 2848; WAN024FFA_at; Start 177; Stop 201
tccacctctctttatctttttacag

SEQ ID NO: 203979 - DNA, 25 bp, Artificial
  probe
  misc_feature (1)..(25): SEQ ID NO: 2848; WAN024FFA_at; Start 405; Stop 429
ctggctagataagggcaatcgtttt

SEQ ID NO: 203980 - DNA, 25 bp, Artificial
  probe
  misc_feature (1)..(25): SEQ ID NO: 2848; WAN024FFA_at; Start 445; Stop 469
tttatgatgatttggcccattagcc

SEQ ID NO: 203981 - DNA, 25 bp, Artificial
  probe
  misc_feature (1)..(25): SEQ ID NO: 2848; WAN024FFA_at; Start 278; Stop 302
tcgggactatctacaactatatcgg

SEQ ID NO: 203982 - DNA, 25 bp, Artificial
  probe
  misc_feature (1)..(25): SEQ ID NO: 2848; WAN024FFA_at; Start 135; Stop 159
ggaaaccctctctgcctttatccag

SEQ ID NO: 203983 - DNA, 25 bp, Artificial
  probe
  misc_feature (1)..(25): SEQ ID NO: 2848; WAN024FFA_at; Start 297; Stop 321
tatcggcatcgtgattggctgtgcc

SEQ ID NO: 203984 - DNA, 25 bp, Artificial
  probe
  misc_feature (1)..(25): SEQ ID NO: 2848; WAN024FFA_at; Start 228; Stop 252
tccaggggccttgacctcggtggct

SEQ ID NO: 203985 - DNA, 25 bp, Artificial
  probe
  misc_feature (1)..(25): SEQ ID NO: 2848; WAN024FFA_at; Start 338; Stop 362
tgcgcctatacggagctgcctttgt

SEQ ID NO: 203986 - DNA, 25 bp, Artificial
  probe
  misc_feature (1)..(25): SEQ ID NO: 2848; WAN024FFA_at; Start 109; Stop 133
tatcaggctgggattttacaatcca

SEQ ID NO: 203987 - DNA, 25 bp, Artificial
  probe
  misc_feature (1)..(25): SEQ ID NO: 2848; WAN024FFA_at; Start 311; Stop 335
ttggctgtgccattatcttttatct

SEQ ID NO: 203988 - DNA, 25 bp, Artificial
  probe
  misc_feature (1)..(25): SEQ ID NO: 2848; WAN024FFA_at; Start 429; Stop 453
tgaccgcttctttatttttatgatg

SEQ ID NO: 203989 - DNA, 25 bp, Artificial
  probe
  misc_feature (1)..(25): SEQ ID NO: 5873; WAN024FFB_at; Start 469; Stop 493
gtcagtgagttagagagcttgctcc

SEQ ID NO: 203990 - DNA, 25 bp, Artificial
  probe
  misc_feature (1)..(25): SEQ ID NO: 5873; WAN024FFB_at; Start 110; Stop 134
gccaagcagaagaagggaacaccat

SEQ ID NO: 203991 - DNA, 25 bp, Artificial
  probe
  misc_feature (1)..(25): SEQ ID NO: 5873; WAN024FFB_at; Start 442; Stop 466
gctagtgtctatcgtagttttaagg

SEQ ID NO: 203992 - DNA, 25 bp, Artificial
  probe
  misc_feature (1)..(25): SEQ ID NO: 5873; WAN024FFB_at; Start 345; Stop 369
ccgtggtcgaaatgaaaatgaaatt

SEQ ID NO: 203993 - DNA, 25 bp, Artificial
  probe
  misc_feature (1)..(25): SEQ ID NO: 5873; WAN024FFB_at; Start 103; Stop 127
gatagtcgccaagcagaagaaggga

SEQ ID NO: 203994 - DNA, 25 bp, Artificial
  probe
  misc_feature (1)..(25): SEQ ID NO: 5873; WAN024FFB_at; Start 261; Stop 285
taatgggattatccgctcagcccag

SEQ ID NO: 203995 - DNA, 25 bp, Artificial
  probe
  misc_feature (1)..(25): SEQ ID NO: 5873; WAN024FFB_at; Start 174; Stop 198
tacaacctacgaacgagtagaagaa

SEQ ID NO: 203996 - DNA, 25 bp, Artificial
  probe
  misc_feature (1)..(25): SEQ ID NO: 5873; WAN024FFB_at; Start 496; Stop 520
caaatcacccagtcctctaaaaaga

SEQ ID NO: 203997 - DNA, 25 bp, Artificial
  probe
  misc_feature (1)..(25): SEQ ID NO: 5873; WAN024FFB_at; Start 296; Stop 320
tgtcaagtgatgaaatcaacatggt

SEQ ID NO: 203998 - DNA, 25 bp, Artificial
  probe
  misc_feature (1)..(25): SEQ ID NO: 5873; WAN024FFB_at; Start 378; Stop 402
ggacattggttcactcgtcatggag

SEQ ID NO: 203999 - DNA, 25 bp, Artificial
  probe
  misc_feature (1)..(25): SEQ ID NO: 5873; WAN024FFB_at; Start 274; Stop 298
cgctcagcccagaaacgtcctgtgt

SEQ ID NO: 204000 - DNA, 25 bp, Artificial
  probe
  misc_feature (1)..(25): SEQ ID NO: 5873; WAN024FFB_at; Start 285; Stop 309
gaaacgtcctgtgtcaagtgatgaa

SEQ ID NO: 204001 - DNA, 25 bp, Artificial
  probe
  misc_feature (1)..(25): SEQ ID NO: 5873; WAN024FFB_at; Start 132; Stop 156
cattcgtagaagacgtgagtgcgac

SEQ ID NO: 204002 - DNA, 25 bp, Artificial
  probe
  misc_feature (1)..(25): SEQ ID NO: 5873; WAN024FFB_at; Start 454; Stop 478
cgtagttttaaggatgtcagtgagt

SEQ ID NO: 204003 - DNA, 25 bp, Artificial
  probe
  misc_feature (1)..(25): SEQ ID NO: 5873; WAN024FFB_at; Start 389; Stop 413
cactcgtcatggaggagttggctga

SEQ ID NO: 204004 - DNA, 25 bp, Artificial
  probe
  misc_feature (1)..(25): SEQ ID NO: 5873; WAN024FFB_at; Start 413; Stop 437
aattggacgagattacctatgtacg

SEQ ID NO: 204005 - DNA, 25 bp, Artificial
  probe
  misc_feature (1)..(25): SEQ ID NO: 5873; WAN024FFB_at; Start 57; Stop 81
aaggatgcgttgtccaaaatgtggg

SEQ ID NO: 204006 - DNA, 25 bp, Artificial
  probe
  misc_feature (1)..(25): SEQ ID NO: 5873; WAN024FFB_at; Start 428; Stop 452
cctatgtacgttttgctagtgtcta

SEQ ID NO: 204007 - DNA, 25 bp, Artificial
  probe
  misc_feature (1)..(25): SEQ ID NO: 5873; WAN024FFB_at; Start 121; Stop 145
gaagggaacaccattcgtagaagac

SEQ ID NO: 204008 - DNA, 25 bp, Artificial
  probe
  misc_feature (1)..(25): SEQ ID NO: 5873; WAN024FFB_at; Start 483; Stop 507
gagcttgctccaacaaatcacccag

SEQ ID NO: 204009 - DNA, 25 bp, Artificial
  probe
  misc_feature (1)..(25): SEQ ID NO: 5873; WAN024FFB_at; Start 230; Stop 254
cacgggaacaattctccagagataa

SEQ ID NO: 204010 - DNA, 25 bp, Artificial
  probe
  misc_feature (1)..(25): SEQ ID NO: 5873; WAN024FFB_at; Start 28; Stop 52
tataatgaaaagaaaacgataagga

SEQ ID NO: 204011 - DNA, 25 bp, Artificial
  probe
  misc_feature (1)..(25): SEQ ID NO: 5873; WAN024FFB_at; Start 154; Stop 178
gacgaatgccaacaccgttttacaa

SEQ ID NO: 204012 - DNA, 25 bp, Artificial
  probe
  misc_feature (1)..(25): SEQ ID NO: 5873; WAN024FFB_at; Start 187; Stop 211
cgagtagaagaaagaaccttagtgg

SEQ ID NO: 204013 - DNA, 25 bp, Artificial
  probe
  misc_feature (1)..(25): SEQ ID NO: 5873; WAN024FFB_at; Start 147; Stop 171
tgagtgcgacgaatgccaacaccgt

SEQ ID NO: 204014 - DNA, 25 bp, Artificial
  probe
  misc_feature (1)..(25): SEQ ID NO: 5873; WAN024FFB_at; Start 327; Stop 351
tcgtatcgaacagaaactccgtggt

SEQ ID NO: 204015 - DNA, 25 bp, Artificial
  probe
  misc_feature (1)..(25): SEQ ID NO: 5873; WAN024FFB_at; Start 80; Stop 104
gggctaccaagtcaagtgttatcga

SEQ ID NO: 204016 - DNA, 25 bp, Artificial
  probe
  misc_feature (1)..(25): SEQ ID NO: 5873; WAN024FFB_at; Start 92; Stop 116
caagtgttatcgatagtcgccaagc

SEQ ID NO: 204017 - DNA, 25 bp, Artificial
  probe
  misc_feature (1)..(25): SEQ ID NO: 5873; WAN024FFB_at; Start 245; Stop 269
ccagagataaaatctttaatgggat

SEQ ID NO: 204018 - DNA, 25 bp, Artificial
  probe
  misc_feature (1)..(25): SEQ ID NO: 5873; WAN024FFB_at; Start 312; Stop 336
caacatggtagtcaatcgtatcgaa

SEQ ID NO: 204019 - DNA, 25 bp, Artificial
  probe
  misc_feature (1)..(25): SEQ ID NO: 5873; WAN024FFB_at; Start 337; Stop 361
cagaaactccgtggtcgaaatgaaa

SEQ ID NO: 204020 - DNA, 25 bp, Artificial
  probe
  misc_feature (1)..(25): SEQ ID NO: 5873; WAN024FFB_at; Start 363; Stop 387
tgaaattcaaagtgaggacattggt

SEQ ID NO: 204021 - DNA, 25 bp, Artificial
  probe
  misc_feature (1)..(25): SEQ ID NO: 5873; WAN024FFB_at; Start 405; Stop 429
gttggctgaattggacgagattacc

SEQ ID NO: 204022 - DNA, 25 bp, Artificial
  probe
  misc_feature (1)..(25): SEQ ID NO: 5873; WAN024FFB_at; Start 51; Stop 75
gagggaaaggatgcgttgtccaaaa

SEQ ID NO: 204023 - DNA, 25 bp, Artificial
  probe
  misc_feature (1)..(25): SEQ ID NO: 5535; WAN024FFC_at; Start 131; Stop 155
ctgtttgggtaatggttcccttgcg

SEQ ID NO: 204024 - DNA, 25 bp, Artificial
  probe
  misc_feature (1)..(25): SEQ ID NO: 5535; WAN024FFC_at; Start 227; Stop 251
taagactaaagtcagaggaaactgg

SEQ ID NO: 204025 - DNA, 25 bp, Artificial
  probe
  misc_feature (1)..(25): SEQ ID NO: 5535; WAN024FFC_at; Start 102; Stop 126
gccagccatctgttgcaagagttct

SEQ ID NO: 204026 - DNA, 25 bp, Artificial
  probe
  misc_feature (1)..(25): SEQ ID NO: 5535; WAN024FFC_at; Start 100; Stop 124
aagccagccatctgttgcaagagtt

SEQ ID NO: 204027 - DNA, 25 bp, Artificial
  probe
  misc_feature (1)..(25): SEQ ID NO: 5535; WAN024FFC_at; Start 223; Stop 247
tccttaagactaaagtcagaggaaa

SEQ ID NO: 204028 - DNA, 25 bp, Artificial
  probe
  misc_feature (1)..(25): SEQ ID NO: 5535; WAN024FFC_at; Start 138; Stop 162
ggtaatggttcccttgcgtgtttgc

SEQ ID NO: 204029 - DNA, 25 bp, Artificial
  probe
  misc_feature (1)..(25): SEQ ID NO: 5535; WAN024FFC_at; Start 103; Stop 127
ccagccatctgttgcaagagttctc

SEQ ID NO: 204030 - DNA, 25 bp, Artificial
  probe
  misc_feature (1)..(25): SEQ ID NO: 5535; WAN024FFC_at; Start 124; Stop 148
tctctttctgtttgggtaatggttc

SEQ ID NO: 204031 - DNA, 25 bp, Artificial
  probe
  misc_feature (1)..(25): SEQ ID NO: 5535; WAN024FFC_at; Start 3; Stop 27
ggctaccttcatggcatatttctca

SEQ ID NO: 204032 - DNA, 25 bp, Artificial
  probe
  misc_feature (1)..(25): SEQ ID NO: 5535; WAN024FFC_at; Start 104; Stop 128
cagccatctgttgcaagagttctct

SEQ ID NO: 204033 - DNA, 25 bp, Artificial
  probe
  misc_feature (1)..(25): SEQ ID NO: 5535; WAN024FFC_at; Start 1; Stop 25
ttggctaccttcatggcatatttct

SEQ ID NO: 204034 - DNA, 25 bp, Artificial
  probe
  misc_feature (1)..(25): SEQ ID NO: 5535; WAN024FFC_at; Start 117; Stop 141
caagagttctctttctgtttgggta

SEQ ID NO: 204035 - DNA, 25 bp, Artificial
  probe
  misc_feature (1)..(25): SEQ ID NO: 5535; WAN024FFC_at; Start 143; Stop 167
tggttcccttgcgtgtttgcttgat

SEQ ID NO: 204036 - DNA, 25 bp, Artificial
  probe
  misc_feature (1)..(25): SEQ ID NO: 5535; WAN024FFC_at; Start 107; Stop 131
ccatctgttgcaagagttctctttc

SEQ ID NO: 204037 - DNA, 25 bp, Artificial
  probe
  misc_feature (1)..(25): SEQ ID NO: 5535; WAN024FFC_at; Start 20; Stop 44
atttctcattgatatttgccgaatc

SEQ ID NO: 204038 - DNA, 25 bp, Artificial
  probe
  misc_feature (1)..(25): SEQ ID NO: 5535; WAN024FFC_at; Start 17; Stop 41
catatttctcattgatatttgccga

SEQ ID NO: 204039 - DNA, 25 bp, Artificial
  probe
  misc_feature (1)..(25): SEQ ID NO: 5535; WAN024FFC_at; Start 148; Stop 172
cccttgcgtgtttgcttgatttctg

SEQ ID NO: 204040 - DNA, 25 bp, Artificial
  probe
  misc_feature (1)..(25): SEQ ID NO: 5535; WAN024FFC_at; Start 139; Stop 163
gtaatggttcccttgcgtgtttgct

SEQ ID NO: 204041 - DNA, 25 bp, Artificial
  probe
  misc_feature (1)..(25): SEQ ID NO: 5535; WAN024FFC_at; Start 98; Stop 122
ccaagccagccatctgttgcaagag

SEQ ID NO: 204042 - DNA, 25 bp, Artificial
  probe
  misc_feature (1)..(25): SEQ ID NO: 5535; WAN024FFC_at; Start 110; Stop 134
tctgttgcaagagttctctttctgt

SEQ ID NO: 204043 - DNA, 25 bp, Artificial
  probe
  misc_feature (1)..(25): SEQ ID NO: 5535; WAN024FFC_at; Start 144; Stop 168
ggttcccttgcgtgtttgcttgatt

SEQ ID NO: 204044 - DNA, 25 bp, Artificial
  probe
  misc_feature (1)..(25): SEQ ID NO: 5535; WAN024FFC_at; Start 106; Stop 130
gccatctgttgcaagagttctcttt

SEQ ID NO: 204045 - DNA, 25 bp, Artificial
  probe
  misc_feature (1)..(25): SEQ ID NO: 5535; WAN024FFC_at; Start 99; Stop 123
caagccagccatctgttgcaagagt

SEQ ID NO: 204046 - DNA, 25 bp, Artificial
  probe
  misc_feature (1)..(25): SEQ ID NO: 5535; WAN024FFC_at; Start 146; Stop 170
ttcccttgcgtgtttgcttgatttc

SEQ ID NO: 204047 - DNA, 25 bp, Artificial
  probe
  misc_feature (1)..(25): SEQ ID NO: 5535; WAN024FFC_at; Start 175; Stop 199
aagaactgcagggcagttttacttt

SEQ ID NO: 204048 - DNA, 25 bp, Artificial
  probe
  misc_feature (1)..(25): SEQ ID NO: 5535; WAN024FFC_at; Start 141; Stop 165
aatggttcccttgcgtgtttgcttg

SEQ ID NO: 204049 - DNA, 25 bp, Artificial
  probe
  misc_feature (1)..(25): SEQ ID NO: 5535; WAN024FFC_at; Start 96; Stop 120
gcccaagccagccatctgttgcaag

SEQ ID NO: 204050 - DNA, 25 bp, Artificial
  probe
  misc_feature (1)..(25): SEQ ID NO: 5535; WAN024FFC_at; Start 6; Stop 30
taccttcatggcatatttctcattg

SEQ ID NO: 204051 - DNA, 25 bp, Artificial
  probe
  misc_feature (1)..(25): SEQ ID NO: 5535; WAN024FFC_at; Start 130; Stop 154
tctgtttgggtaatggttcccttgc

SEQ ID NO: 204052 - DNA, 25 bp, Artificial
  probe
  misc_feature (1)..(25): SEQ ID NO: 5535; WAN024FFC_at; Start 229; Stop 253
agactaaagtcagaggaaactggtt

SEQ ID NO: 204053 - DNA, 25 bp, Artificial
  probe
  misc_feature (1)..(25): SEQ ID NO: 5535; WAN024FFC_at; Start 8; Stop 32
ccttcatggcatatttctcattgat

SEQ ID NO: 204054 - DNA, 25 bp, Artificial
  probe
  misc_feature (1)..(25): SEQ ID NO: 5535; WAN024FFC_at; Start 101; Stop 125
agccagccatctgttgcaagagttc

SEQ ID NO: 204055 - DNA, 25 bp, Artificial
  probe
  misc_feature (1)..(25): SEQ ID NO: 5535; WAN024FFC_at; Start 149; Stop 173
ccttgcgtgtttgcttgatttctgc

SEQ ID NO: 204056 - DNA, 25 bp, Artificial
  probe
  misc_feature (1)..(25): SEQ ID NO: 5535; WAN024FFC_at; Start 120; Stop 144
gagttctctttctgtttgggtaatg

SEQ ID NO: 204057 - DNA, 25 bp, Artificial
  probe
  misc_feature (1)..(25): SEQ ID NO: 1109; WAN024FFD_at; Start 1108; Stop 1132
ttagaagagatggaacgccaaaccc

SEQ ID NO: 204058 - DNA, 25 bp, Artificial
  probe
  misc_feature (1)..(25): SEQ ID NO: 1109; WAN024FFD_at; Start 1106; Stop 1130
aattagaagagatggaacgccaaac

SEQ ID NO: 204059 - DNA, 25 bp, Artificial
  probe
  misc_feature (1)..(25): SEQ ID NO: 1109; WAN024FFD_at; Start 1097; Stop 1121
ccgctgaggaattagaagagatgga

SEQ ID NO: 204060 - DNA, 25 bp, Artificial
  probe
  misc_feature (1)..(25): SEQ ID NO: 1109; WAN024FFD_at; Start 979; Stop 1003
gcagtcttgcgcatccgtgagcgag

SEQ ID NO: 204061 - DNA, 25 bp, Artificial
  probe
  misc_feature (1)..(25): SEQ ID NO: 1109; WAN024FFD_at; Start 1104; Stop 1128
ggaattagaagagatggaacgccaa

SEQ ID NO: 204062 - DNA, 25 bp, Artificial
  probe
  misc_feature (1)..(25): SEQ ID NO: 1109; WAN024FFD_at; Start 154; Stop 178
tatcttttttcaagtatcctcaatc

SEQ ID NO: 204063 - DNA, 25 bp, Artificial
  probe
  misc_feature (1)..(25): SEQ ID NO: 1109; WAN024FFD_at; Start 1092; Stop 1116
gtcatccgctgaggaattagaagag

SEQ ID NO: 204064 - DNA, 25 bp, Artificial
  probe
  misc_feature (1)..(25): SEQ ID NO: 1109; WAN024FFD_at; Start 1124; Stop 1148
gccaaaccctagaattattagcaaa

SEQ ID NO: 204065 - DNA, 25 bp, Artificial
  probe
  misc_feature (1)..(25): SEQ ID NO: 1109; WAN024FFD_at; Start 1096; Stop 1120
tccgctgaggaattagaagagatgg

SEQ ID NO: 204066 - DNA, 25 bp, Artificial
  probe
  misc_feature (1)..(25): SEQ ID NO: 1109; WAN024FFD_at; Start 1089; Stop 1113
tacgtcatccgctgaggaattagaa

SEQ ID NO: 204067 - DNA, 25 bp, Artificial
  probe
  misc_feature (1)..(25): SEQ ID NO: 1109; WAN024FFD_at; Start 1085; Stop 1109
aaaatacgtcatccgctgaggaatt

SEQ ID NO: 204068 - DNA, 25 bp, Artificial
  probe
  misc_feature (1)..(25): SEQ ID NO: 1109; WAN024FFD_at; Start 1111; Stop 1135
gaagagatggaacgccaaaccctag

SEQ ID NO: 204069 - DNA, 25 bp, Artificial
  probe
  misc_feature (1)..(25): SEQ ID NO: 1109; WAN024FFD_at; Start 1099; Stop 1123
gctgaggaattagaagagatggaac

SEQ ID NO: 204070 - DNA, 25 bp, Artificial
  probe
  misc_feature (1)..(25): SEQ ID NO: 1109; WAN024FFD_at; Start 1102; Stop 1126
gaggaattagaagagatggaacgcc

SEQ ID NO: 204071 - DNA, 25 bp, Artificial
  probe
  misc_feature (1)..(25): SEQ ID NO: 1109; WAN024FFD_at; Start 1122; Stop 1146
acgccaaaccctagaattattagca

SEQ ID NO: 204072 - DNA, 25 bp, Artificial
  probe
  misc_feature (1)..(25): SEQ ID NO: 1109; WAN024FFD_at; Start 1078; Stop 1102
gaatataaaaatacgtcatccgctg

SEQ ID NO: 204073 - DNA, 25 bp, Artificial
  probe
  misc_feature (1)..(25): SEQ ID NO: 1109; WAN024FFD_at; Start 1109; Stop 1133
tagaagagatggaacgccaaaccct

SEQ ID NO: 204074 - DNA, 25 bp, Artificial
  probe
  misc_feature (1)..(25): SEQ ID NO: 1109; WAN024FFD_at; Start 1144; Stop 1168
gcaaaattagataacggaggtgatt

SEQ ID NO: 204075 - DNA, 25 bp, Artificial
  probe
  misc_feature (1)..(25): SEQ ID NO: 1109; WAN024FFD_at; Start 1116; Stop 1140
gatggaacgccaaaccctagaatta

SEQ ID NO: 204076 - DNA, 25 bp, Artificial
  probe
  misc_feature (1)..(25): SEQ ID NO: 1109; WAN024FFD_at; Start 1117; Stop 1141
atggaacgccaaaccctagaattat

SEQ ID NO: 204077 - DNA, 25 bp, Artificial
  probe
  misc_feature (1)..(25): SEQ ID NO: 1109; WAN024FFD_at; Start 1081; Stop 1105
tataaaaatacgtcatccgctgagg

SEQ ID NO: 204078 - DNA, 25 bp, Artificial
  probe
  misc_feature (1)..(25): SEQ ID NO: 1109; WAN024FFD_at; Start 1146; Stop 1170
aaaattagataacggaggtgattag

SEQ ID NO: 204079 - DNA, 25 bp, Artificial
  probe
  misc_feature (1)..(25): SEQ ID NO: 1109; WAN024FFD_at; Start 1103; Stop 1127
aggaattagaagagatggaacgcca

SEQ ID NO: 204080 - DNA, 25 bp, Artificial
  probe
  misc_feature (1)..(25): SEQ ID NO: 1109; WAN024FFD_at; Start 1141; Stop 1165
ttagcaaaattagataacggaggtg

SEQ ID NO: 204081 - DNA, 25 bp, Artificial
  probe
  misc_feature (1)..(25): SEQ ID NO: 1109; WAN024FFD_at; Start 1101; Stop 1125
tgaggaattagaagagatggaacgc

SEQ ID NO: 204082 - DNA, 25 bp, Artificial
  probe
  misc_feature (1)..(25): SEQ ID NO: 1109; WAN024FFD_at; Start 158; Stop 182
ttttttcaagtatcctcaatcatct

SEQ ID NO: 204083 - DNA, 25 bp, Artificial
  probe
  misc_feature (1)..(25): SEQ ID NO: 1109; WAN024FFD_at; Start 1074; Stop 1098
tcctgaatataaaaatacgtcatcc

SEQ ID NO: 204084 - DNA, 25 bp, Artificial
  probe
  misc_feature (1)..(25): SEQ ID NO: 1109; WAN024FFD_at; Start 1105; Stop 1129
gaattagaagagatggaacgccaaa

SEQ ID NO: 204085 - DNA, 25 bp, Artificial
  probe
  misc_feature (1)..(25): SEQ ID NO: 1109; WAN024FFD_at; Start 1094; Stop 1118
catccgctgaggaattagaagagat

SEQ ID NO: 204086 - DNA, 25 bp, Artificial
  probe
  misc_feature (1)..(25): SEQ ID NO: 1109; WAN024FFD_at; Start 1139; Stop 1163
tattagcaaaattagataacggagg

SEQ ID NO: 204087 - DNA, 25 bp, Artificial
  probe
  misc_feature (1)..(25): SEQ ID NO: 1109; WAN024FFD_at; Start 1142; Stop 1166
tagcaaaattagataacggaggtga

SEQ ID NO: 204088 - DNA, 25 bp, Artificial
  probe
  misc_feature (1)..(25): SEQ ID NO: 1109; WAN024FFD_at; Start 1114; Stop 1138
gagatggaacgccaaaccctagaat

SEQ ID NO: 204089 - DNA, 25 bp, Artificial
  probe
  misc_feature (1)..(25): SEQ ID NO: 1109; WAN024FFD_at; Start 1093; Stop 1117
tcatccgctgaggaattagaagaga

SEQ ID NO: 204090 - DNA, 25 bp, Artificial
  probe
  misc_feature (1)..(25): SEQ ID NO: 1109; WAN024FFD_at; Start 1091; Stop 1115
cgtcatccgctgaggaattagaaga

SEQ ID NO: 204091 - DNA, 25 bp, Artificial
  probe
  misc_feature (1)..(25): SEQ ID NO: 1108; WAN024FFE_at; Start 1100; Stop 1124
aggaaactcgtctggaactagaacg

SEQ ID NO: 204092 - DNA, 25 bp, Artificial
  probe
  misc_feature (1)..(25): SEQ ID NO: 1108; WAN024FFE_at; Start 1097; Stop 1121
gcgaggaaactcgtctggaactaga

SEQ ID NO: 204093 - DNA, 25 bp, Artificial
  probe
  misc_feature (1)..(25): SEQ ID NO: 1108; WAN024FFE_at; Start 1090; Stop 1114
gaaaccagcgaggaaactcgtctgg

SEQ ID NO: 204094 - DNA, 25 bp, Artificial
  probe
  misc_feature (1)..(25): SEQ ID NO: 1108; WAN024FFE_at; Start 1104; Stop 1128
aactcgtctggaactagaacgtaag

SEQ ID NO: 204095 - DNA, 25 bp, Artificial
  probe
  misc_feature (1)..(25): SEQ ID NO: 1108; WAN024FFE_at; Start 1098; Stop 1122
cgaggaaactcgtctggaactagaa

SEQ ID NO: 204096 - DNA, 25 bp, Artificial
  probe
  misc_feature (1)..(25): SEQ ID NO: 1108; WAN024FFE_at; Start 1091; Stop 1115
aaaccagcgaggaaactcgtctgga

SEQ ID NO: 204097 - DNA, 25 bp, Artificial
  probe
  misc_feature (1)..(25): SEQ ID NO: 1108; WAN024FFE_at; Start 1135; Stop 1159
gaactattagctcgattagaaaaag

SEQ ID NO: 204098 - DNA, 25 bp, Artificial
  probe
  misc_feature (1)..(25): SEQ ID NO: 1108; WAN024FFE_at; Start 1114; Stop 1138
gaactagaacgtaagaagcaagaac

SEQ ID NO: 204099 - DNA, 25 bp, Artificial
  probe
  misc_feature (1)..(25): SEQ ID NO: 1108; WAN024FFE_at; Start 1125; Stop 1149
taagaagcaagaactattagctcga

SEQ ID NO: 204100 - DNA, 25 bp, Artificial
  probe
  misc_feature (1)..(25): SEQ ID NO: 1108; WAN024FFE_at; Start 1110; Stop 1134
tctggaactagaacgtaagaagcaa

SEQ ID NO: 204101 - DNA, 25 bp, Artificial
  probe
  misc_feature (1)..(25): SEQ ID NO: 1108; WAN024FFE_at; Start 1075; Stop 1099
cctgaatataagaatgaaaccagcg

SEQ ID NO: 204102 - DNA, 25 bp, Artificial
  probe
  misc_feature (1)..(25): SEQ ID NO: 1108; WAN024FFE_at; Start 1078; Stop 1102
gaatataagaatgaaaccagcgagg

SEQ ID NO: 204103 - DNA, 25 bp, Artificial
  probe
  misc_feature (1)..(25): SEQ ID NO: 1108; WAN024FFE_at; Start 1095; Stop 1119
cagcgaggaaactcgtctggaacta

SEQ ID NO: 204104 - DNA, 25 bp, Artificial
  probe
  misc_feature (1)..(25): SEQ ID NO: 1108; WAN024FFE_at; Start 1079; Stop 1103
aatataagaatgaaaccagcgagga

SEQ ID NO: 204105 - DNA, 25 bp, Artificial
  probe
  misc_feature (1)..(25): SEQ ID NO: 1108; WAN024FFE_at; Start 1145; Stop 1169
ctcgattagaaaaaggaggagatct

SEQ ID NO: 204106 - DNA, 25 bp, Artificial
  probe
  misc_feature (1)..(25): SEQ ID NO: 1108; WAN024FFE_at; Start 1128; Stop 1152
gaagcaagaactattagctcgatta

SEQ ID NO: 204107 - DNA, 25 bp, Artificial
  probe
  misc_feature (1)..(25): SEQ ID NO: 1108; WAN024FFE_at; Start 1139; Stop 1163
tattagctcgattagaaaaaggagg

SEQ ID NO: 204108 - DNA, 25 bp, Artificial
  probe
  misc_feature (1)..(25): SEQ ID NO: 1108; WAN024FFE_at; Start 1102; Stop 1126
gaaactcgtctggaactagaacgta

SEQ ID NO: 204109 - DNA, 25 bp, Artificial
  probe
  misc_feature (1)..(25): SEQ ID NO: 1108; WAN024FFE_at; Start 1099; Stop 1123
gaggaaactcgtctggaactagaac

SEQ ID NO: 204110 - DNA, 25 bp, Artificial
  probe
  misc_feature (1)..(25): SEQ ID NO: 1108; WAN024FFE_at; Start 1077; Stop 1101
tgaatataagaatgaaaccagcgag

SEQ ID NO: 204111 - DNA, 25 bp, Artificial
  probe
  misc_feature (1)..(25): SEQ ID NO: 1108; WAN024FFE_at; Start 1107; Stop 1131
tcgtctggaactagaacgtaagaag

SEQ ID NO: 204112 - DNA, 25 bp, Artificial
  probe
  misc_feature (1)..(25): SEQ ID NO: 1108; WAN024FFE_at; Start 1108; Stop 1132
cgtctggaactagaacgtaagaagc

SEQ ID NO: 204113 - DNA, 25 bp, Artificial
  probe
  misc_feature (1)..(25): SEQ ID NO: 1108; WAN024FFE_at; Start 1131; Stop 1155
gcaagaactattagctcgattagaa

SEQ ID NO: 204114 - DNA, 25 bp, Artificial
  probe
  misc_feature (1)..(25): SEQ ID NO: 1108; WAN024FFE_at; Start 1105; Stop 1129
actcgtctggaactagaacgtaaga

SEQ ID NO: 204115 - DNA, 25 bp, Artificial
  probe
  misc_feature (1)..(25): SEQ ID NO: 1108; WAN024FFE_at; Start 1120; Stop 1144
gaacgtaagaagcaagaactattag

SEQ ID NO: 204116 - DNA, 25 bp, Artificial
  probe
  misc_feature (1)..(25): SEQ ID NO: 1108; WAN024FFE_at; Start 1146; Stop 1170
tcgattagaaaaaggaggagatcta

SEQ ID NO: 204117 - DNA, 25 bp, Artificial
  probe
  misc_feature (1)..(25): SEQ ID NO: 1108; WAN024FFE_at; Start 1144; Stop 1168
gctcgattagaaaaaggaggagatc

SEQ ID NO: 204118 - DNA, 25 bp, Artificial
  probe
  misc_feature (1)..(25): SEQ ID NO: 1108; WAN024FFE_at; Start 1123; Stop 1147
cgtaagaagcaagaactattagctc

SEQ ID NO: 204119 - DNA, 25 bp, Artificial
  probe
  misc_feature (1)..(25): SEQ ID NO: 1108; WAN024FFE_at; Start 1092; Stop 1116
aaccagcgaggaaactcgtctggaa

SEQ ID NO: 204120 - DNA, 25 bp, Artificial
  probe
  misc_feature (1)..(25): SEQ ID NO: 1108; WAN024FFE_at; Start 1141; Stop 1165
ttagctcgattagaaaaaggaggag

SEQ ID NO: 204121 - DNA, 25 bp, Artificial
  probe
  misc_feature (1)..(25): SEQ ID NO: 1108; WAN024FFE_at; Start 1112; Stop 1136
tggaactagaacgtaagaagcaaga

SEQ ID NO: 204122 - DNA, 25 bp, Artificial
  probe
  misc_feature (1)..(25): SEQ ID NO: 1108; WAN024FFE_at; Start 1115; Stop 1139
aactagaacgtaagaagcaagaact

SEQ ID NO: 204123 - DNA, 25 bp, Artificial
  probe
  misc_feature (1)..(25): SEQ ID NO: 1108; WAN024FFE_at; Start 1094; Stop 1118
ccagcgaggaaactcgtctggaact

SEQ ID NO: 204124 - DNA, 25 bp, Artificial
  probe
  misc_feature (1)..(25): SEQ ID NO: 1108; WAN024FFE_at; Start 1117; Stop 1141
ctagaacgtaagaagcaagaactat

SEQ ID NO: 204125 - DNA, 25 bp, Artificial
  probe
  misc_feature (1)..(25): SEQ ID NO: 5716; WAN024FFF_at; Start 83; Stop 107
gctcccttttctgctcggttcaaat

SEQ ID NO: 204126 - DNA, 25 bp, Artificial
  probe
  misc_feature (1)..(25): SEQ ID NO: 5716; WAN024FFF_at; Start 193; Stop 217
tcgtaccacaatcacagagtaggat

SEQ ID NO: 204127 - DNA, 25 bp, Artificial
  probe
  misc_feature (1)..(25): SEQ ID NO: 5716; WAN024FFF_at; Start 81; Stop 105
gggctcccttttctgctcggttcaa

SEQ ID NO: 204128 - DNA, 25 bp, Artificial
  probe
  misc_feature (1)..(25): SEQ ID NO: 5716; WAN024FFF_at; Start 126; Stop 150
aaacagcagactggcgaatggcttc

SEQ ID NO: 204129 - DNA, 25 bp, Artificial
  probe
  misc_feature (1)..(25): SEQ ID NO: 5716; WAN024FFF_at; Start 191; Stop 215
cttcgtaccacaatcacagagtagg

SEQ ID NO: 204130 - DNA, 25 bp, Artificial
  probe
  misc_feature (1)..(25): SEQ ID NO: 5716; WAN024FFF_at; Start 207; Stop 231
cagagtaggattggaaattcttcca

SEQ ID NO: 204131 - DNA, 25 bp, Artificial
  probe
  misc_feature (1)..(25): SEQ ID NO: 5716; WAN024FFF_at; Start 146; Stop 170
gcttcttgaggtaccaattcataca

SEQ ID NO: 204132 - DNA, 25 bp, Artificial
  probe
  misc_feature (1)..(25): SEQ ID NO: 5716; WAN024FFF_at; Start 205; Stop 229
cacagagtaggattggaaattcttc

SEQ ID NO: 204133 - DNA, 25 bp, Artificial
  probe
  misc_feature (1)..(25): SEQ ID NO: 5716; WAN024FFF_at; Start 157; Stop 181
taccaattcatacaaggcatctttc

SEQ ID NO: 204134 - DNA, 25 bp, Artificial
  probe
  misc_feature (1)..(25): SEQ ID NO: 5716; WAN024FFF_at; Start 101; Stop 125
ttcaaatctccgacaaagagaagga

SEQ ID NO: 204135 - DNA, 25 bp, Artificial
  probe
  misc_feature (1)..(25): SEQ ID NO: 5716; WAN024FFF_at; Start 116; Stop 140
aagagaaggaaaacagcagactggc

SEQ ID NO: 204136 - DNA, 25 bp, Artificial
  probe
  misc_feature (1)..(25): SEQ ID NO: 5716; WAN024FFF_at; Start 120; Stop 144
gaaggaaaacagcagactggcgaat

SEQ ID NO: 204137 - DNA, 25 bp, Artificial
  probe
  misc_feature (1)..(25): SEQ ID NO: 5716; WAN024FFF_at; Start 97; Stop 121
tcggttcaaatctccgacaaagaga

SEQ ID NO: 204138 - DNA, 25 bp, Artificial
  probe
  misc_feature (1)..(25): SEQ ID NO: 5716; WAN024FFF_at; Start 152; Stop 176
tgaggtaccaattcatacaaggcat

SEQ ID NO: 204139 - DNA, 25 bp, Artificial
  probe
  misc_feature (1)..(25): SEQ ID NO: 5716; WAN024FFF_at; Start 112; Stop 136
gacaaagagaaggaaaacagcagac

SEQ ID NO: 204140 - DNA, 25 bp, Artificial
  probe
  misc_feature (1)..(25): SEQ ID NO: 5716; WAN024FFF_at; Start 212; Stop 236
taggattggaaattcttccaagatg

SEQ ID NO: 204141 - DNA, 25 bp, Artificial
  probe
  misc_feature (1)..(25): SEQ ID NO: 5716; WAN024FFF_at; Start 66; Stop 90
tgtcggtatgaagtcgggctccctt

SEQ ID NO: 204142 - DNA, 25 bp, Artificial
  probe
  misc_feature (1)..(25): SEQ ID NO: 5716; WAN024FFF_at; Start 74; Stop 98
tgaagtcgggctcccttttctgctc

SEQ ID NO: 204143 - DNA, 25 bp, Artificial
  probe
  misc_feature (1)..(25): SEQ ID NO: 5716; WAN024FFF_at; Start 132; Stop 156
cagactggcgaatggcttcttgagg

SEQ ID NO: 204144 - DNA, 25 bp, Artificial
  probe
  misc_feature (1)..(25): SEQ ID NO: 5716; WAN024FFF_at; Start 129; Stop 153
cagcagactggcgaatggcttcttg

SEQ ID NO: 204145 - DNA, 25 bp, Artificial
  probe
  misc_feature (1)..(25): SEQ ID NO: 5716; WAN024FFF_at; Start 155; Stop 179
ggtaccaattcatacaaggcatctt

SEQ ID NO: 204146 - DNA, 25 bp, Artificial
  probe
  misc_feature (1)..(25): SEQ ID NO: 5716; WAN024FFF_at; Start 142; Stop 166
aatggcttcttgaggtaccaattca

SEQ ID NO: 204147 - DNA, 25 bp, Artificial
  probe
  misc_feature (1)..(25): SEQ ID NO: 5716; WAN024FFF_at; Start 77; Stop 101
agtcgggctcccttttctgctcggt

SEQ ID NO: 204148 - DNA, 25 bp, Artificial
  probe
  misc_feature (1)..(25): SEQ ID NO: 5716; WAN024FFF_at; Start 178; Stop 202
tttcttctcttgacttcgtaccaca

SEQ ID NO: 204149 - DNA, 25 bp, Artificial
  probe
  misc_feature (1)..(25): SEQ ID NO: 5716; WAN024FFF_at; Start 188; Stop 212
tgacttcgtaccacaatcacagagt

SEQ ID NO: 204150 - DNA, 25 bp, Artificial
  probe
  misc_feature (1)..(25): SEQ ID NO: 5716; WAN024FFF_at; Start 65; Stop 89
gtgtcggtatgaagtcgggctccct

SEQ ID NO: 204151 - DNA, 25 bp, Artificial
  probe
  misc_feature (1)..(25): SEQ ID NO: 5716; WAN024FFF_at; Start 136; Stop 160
ctggcgaatggcttcttgaggtacc

SEQ ID NO: 204152 - DNA, 25 bp, Artificial
  probe
  misc_feature (1)..(25): SEQ ID NO: 5716; WAN024FFF_at; Start 107; Stop 131
tctccgacaaagagaaggaaaacag

SEQ ID NO: 204153 - DNA, 25 bp, Artificial
  probe
  misc_feature (1)..(25): SEQ ID NO: 5716; WAN024FFF_at; Start 88; Stop 112
cttttctgctcggttcaaatctccg

SEQ ID NO: 204154 - DNA, 25 bp, Artificial
  probe
  misc_feature (1)..(25): SEQ ID NO: 5716; WAN024FFF_at; Start 196; Stop 220
taccacaatcacagagtaggattgg

SEQ ID NO: 204155 - DNA, 25 bp, Artificial
  probe
  misc_feature (1)..(25): SEQ ID NO: 5716; WAN024FFF_at; Start 123; Stop 147
ggaaaacagcagactggcgaatggc

SEQ ID NO: 204156 - DNA, 25 bp, Artificial
  probe
  misc_feature (1)..(25): SEQ ID NO: 5716; WAN024FFF_at; Start 94; Stop 118
tgctcggttcaaatctccgacaaag

SEQ ID NO: 204157 - DNA, 25 bp, Artificial
  probe
  misc_feature (1)..(25): SEQ ID NO: 5716; WAN024FFF_at; Start 138; Stop 162
ggcgaatggcttcttgaggtaccaa

SEQ ID NO: 204158 - DNA, 25 bp, Artificial
  probe
  misc_feature (1)..(25): SEQ ID NO: 5716; WAN024FFF_at; Start 171; Stop 195
aggcatctttcttctcttgacttcg

SEQ ID NO: 204159 - DNA, 25 bp, Artificial
  probe
  misc_feature (1)..(25): SEQ ID NO: 5122; WAN024FFG_at; Start 40; Stop 64
gctgactccagcttgtggtcgcacg

SEQ ID NO: 204160 - DNA, 25 bp, Artificial
  probe
  misc_feature (1)..(25): SEQ ID NO: 5122; WAN024FFG_at; Start 39; Stop 63
cgctgactccagcttgtggtcgcac

SEQ ID NO: 204161 - DNA, 25 bp, Artificial
  probe
  misc_feature (1)..(25): SEQ ID NO: 5122; WAN024FFG_at; Start 84; Stop 108
tgaacacggtcataagcttggattg

SEQ ID NO: 204162 - DNA, 25 bp, Artificial
  probe
  misc_feature (1)..(25): SEQ ID NO: 5122; WAN024FFG_at; Start 100; Stop 124
cttggattgcctcagttgactgttc

SEQ ID NO: 204163 - DNA, 25 bp, Artificial
  probe
  misc_feature (1)..(25): SEQ ID NO: 5122; WAN024FFG_at; Start 5; Stop 29
gcttggttcagcttgaccaaactgt

SEQ ID NO: 204164 - DNA, 25 bp, Artificial
  probe
  misc_feature (1)..(25): SEQ ID NO: 5122; WAN024FFG_at; Start 82; Stop 106
cctgaacacggtcataagcttggat

SEQ ID NO: 204165 - DNA, 25 bp, Artificial
  probe
  misc_feature (1)..(25): SEQ ID NO: 5122; WAN024FFG_at; Start 43; Stop 67
gactccagcttgtggtcgcacgcgc

SEQ ID NO: 204166 - DNA, 25 bp, Artificial
  probe
  misc_feature (1)..(25): SEQ ID NO: 5122; WAN024FFG_at; Start 76; Stop 100
agtcagcctgaacacggtcataagc

SEQ ID NO: 204167 - DNA, 25 bp, Artificial
  probe
  misc_feature (1)..(25): SEQ ID NO: 5122; WAN024FFG_at; Start 9; Stop 33
ggttcagcttgaccaaactgttctg

SEQ ID NO: 204168 - DNA, 25 bp, Artificial
  probe
  misc_feature (1)..(25): SEQ ID NO: 5122; WAN024FFG_at; Start 75; Stop 99
tagtcagcctgaacacggtcataag

SEQ ID NO: 204169 - DNA, 25 bp, Artificial
  probe
  misc_feature (1)..(25): SEQ ID NO: 5122; WAN024FFG_at; Start 98; Stop 122
agcttggattgcctcagttgactgt

SEQ ID NO: 204170 - DNA, 25 bp, Artificial
  probe
  misc_feature (1)..(25): SEQ ID NO: 5122; WAN024FFG_at; Start 11; Stop 35
ttcagcttgaccaaactgttctgct

SEQ ID NO: 204171 - DNA, 25 bp, Artificial
  probe
  misc_feature (1)..(25): SEQ ID NO: 5122; WAN024FFG_at; Start 106; Stop 130
ttgcctcagttgactgttcttggta

SEQ ID NO: 204172 - DNA, 25 bp, Artificial
  probe
  misc_feature (1)..(25): SEQ ID NO: 5122; WAN024FFG_at; Start 53; Stop 77
tgtggtcgcacgcgccccagcatag

SEQ ID NO: 204173 - DNA, 25 bp, Artificial
  probe
  misc_feature (1)..(25): SEQ ID NO: 5122; WAN024FFG_at; Start 78; Stop 102
tcagcctgaacacggtcataagctt

SEQ ID NO: 204174 - DNA, 25 bp, Artificial
  probe
  misc_feature (1)..(25): SEQ ID NO: 5122; WAN024FFG_at; Start 96; Stop 120
taagcttggattgcctcagttgact

SEQ ID NO: 204175 - DNA, 25 bp, Artificial
  probe
  misc_feature (1)..(25): SEQ ID NO: 5122; WAN024FFG_at; Start 112; Stop 136
cagttgactgttcttggtattcttc

SEQ ID NO: 204176 - DNA, 25 bp, Artificial
  probe
  misc_feature (1)..(25): SEQ ID NO: 5122; WAN024FFG_at; Start 92; Stop 116
gtcataagcttggattgcctcagtt

SEQ ID NO: 204177 - DNA, 25 bp, Artificial
  probe
  misc_feature (1)..(25): SEQ ID NO: 5122; WAN024FFG_at; Start 104; Stop 128
gattgcctcagttgactgttcttgg

SEQ ID NO: 204178 - DNA, 25 bp, Artificial
  probe
  misc_feature (1)..(25): SEQ ID NO: 5122; WAN024FFG_at; Start 86; Stop 110
aacacggtcataagcttggattgcc

SEQ ID NO: 204179 - DNA, 25 bp, Artificial
  probe
  misc_feature (1)..(25): SEQ ID NO: 5122; WAN024FFG_at; Start 121; Stop 145
gttcttggtattcttcctcaaagac

SEQ ID NO: 204180 - DNA, 25 bp, Artificial
  probe
  misc_feature (1)..(25): SEQ ID NO: 5122; WAN024FFG_at; Start 13; Stop 37
cagcttgaccaaactgttctgctag

SEQ ID NO: 204181 - DNA, 25 bp, Artificial
  probe
  misc_feature (1)..(25): SEQ ID NO: 5122; WAN024FFG_at; Start 91; Stop 115
ggtcataagcttggattgcctcagt

SEQ ID NO: 204182 - DNA, 25 bp, Artificial
  probe
  misc_feature (1)..(25): SEQ ID NO: 5122; WAN024FFG_at; Start 117; Stop 141
gactgttcttggtattcttcctcaa

SEQ ID NO: 204183 - DNA, 25 bp, Artificial
  probe
  misc_feature (1)..(25): SEQ ID NO: 5122; WAN024FFG_at; Start 71; Stop 95
agcatagtcagcctgaacacggtca

SEQ ID NO: 204184 - DNA, 25 bp, Artificial
  probe
  misc_feature (1)..(25): SEQ ID NO: 5122; WAN024FFG_at; Start 90; Stop 114
cggtcataagcttggattgcctcag

SEQ ID NO: 204185 - DNA, 25 bp, Artificial
  probe
  misc_feature (1)..(25): SEQ ID NO: 5122; WAN024FFG_at; Start 109; Stop 133
cctcagttgactgttcttggtattc

SEQ ID NO: 204186 - DNA, 25 bp, Artificial
  probe
  misc_feature (1)..(25): SEQ ID NO: 5122; WAN024FFG_at; Start 94; Stop 118
cataagcttggattgcctcagttga

SEQ ID NO: 204187 - DNA, 25 bp, Artificial
  probe
  misc_feature (1)..(25): SEQ ID NO: 5122; WAN024FFG_at; Start 42; Stop 66
tgactccagcttgtggtcgcacgcg

SEQ ID NO: 204188 - DNA, 25 bp, Artificial
  probe
  misc_feature (1)..(25): SEQ ID NO: 5122; WAN024FFG_at; Start 88; Stop 112
cacggtcataagcttggattgcctc

SEQ ID NO: 204189 - DNA, 25 bp, Artificial
  probe
  misc_feature (1)..(25): SEQ ID NO: 5122; WAN024FFG_at; Start 2; Stop 26
tgagcttggttcagcttgaccaaac

SEQ ID NO: 204190 - DNA, 25 bp, Artificial
  probe
  misc_feature (1)..(25): SEQ ID NO: 5122; WAN024FFG_at; Start 69; Stop 93
ccagcatagtcagcctgaacacggt

SEQ ID NO: 204191 - DNA, 25 bp, Artificial
  probe
  misc_feature (1)..(25): SEQ ID NO: 5122; WAN024FFG_at; Start 73; Stop 97
catagtcagcctgaacacggtcata

SEQ ID NO: 204192 - DNA, 25 bp, Artificial
  probe
  misc_feature (1)..(25): SEQ ID NO: 5122; WAN024FFG_at; Start 81; Stop 105
gcctgaacacggtcataagcttgga

SEQ ID NO: 204193 - DNA, 25 bp, Artificial
  probe
  misc_feature (1)..(25): SEQ ID NO: 1355; WAN024FFH_at; Start 556; Stop 580
gaacagtcaactgaggcaatccaag

SEQ ID NO: 204194 - DNA, 25 bp, Artificial
  probe
  misc_feature (1)..(25): SEQ ID NO: 1355; WAN024FFH_at; Start 230; Stop 254
tctttgtcggagatttgaaccgagc

SEQ ID NO: 204195 - DNA, 25 bp, Artificial
  probe
  misc_feature (1)..(25): SEQ ID NO: 1355; WAN024FFH_at; Start 243; Stop 267
tttgaaccgagcagaaaagggagcc

SEQ ID NO: 204196 - DNA, 25 bp, Artificial
  probe
  misc_feature (1)..(25): SEQ ID NO: 1355; WAN024FFH_at; Start 237; Stop 261
cggagatttgaaccgagcagaaaag

SEQ ID NO: 204197 - DNA, 25 bp, Artificial
  probe
  misc_feature (1)..(25): SEQ ID NO: 1355; WAN024FFH_at; Start 195; Stop 219
tcaagaagccattcgccagtctgct

SEQ ID NO: 204198 - DNA, 25 bp, Artificial
  probe
  misc_feature (1)..(25): SEQ ID NO: 1355; WAN024FFH_at; Start 92; Stop 116
tgacagcagcccagatggcatcatc

SEQ ID NO: 204199 - DNA, 25 bp, Artificial
  probe
  misc_feature (1)..(25): SEQ ID NO: 1355; WAN024FFH_at; Start 558; Stop 582
acagtcaactgaggcaatccaagct

SEQ ID NO: 204200 - DNA, 25 bp, Artificial
  probe
  misc_feature (1)..(25): SEQ ID NO: 1355; WAN024FFH_at; Start 547; Stop 571
gaataccaagaacagtcaactgagg

SEQ ID NO: 204201 - DNA, 25 bp, Artificial
  probe
  misc_feature (1)..(25): SEQ ID NO: 1355; WAN024FFH_at; Start 199; Stop 223
gaagccattcgccagtctgctgttt

SEQ ID NO: 204202 - DNA, 25 bp, Artificial
  probe
  misc_feature (1)..(25): SEQ ID NO: 1355; WAN024FFH_at; Start 562; Stop 586
tcaactgaggcaatccaagcttatg

SEQ ID NO: 204203 - DNA, 25 bp, Artificial
  probe
  misc_feature (1)..(25): SEQ ID NO: 1355; WAN024FFH_at; Start 269; Stop 293
gacttcataccgacaccttccaacc

SEQ ID NO: 204204 - DNA, 25 bp, Artificial
  probe
  misc_feature (1)..(25): SEQ ID NO: 1355; WAN024FFH_at; Start 667; Stop 691
gaaccaagctcaactagaaaaaatc

SEQ ID NO: 204205 - DNA, 25 bp, Artificial
  probe
  misc_feature (1)..(25): SEQ ID NO: 1355; WAN024FFH_at; Start 174; Stop 198
tgccttgtatgaattggtacctcaa

SEQ ID NO: 204206 - DNA, 25 bp, Artificial
  probe
  misc_feature (1)..(25): SEQ ID NO: 1355; WAN024FFH_at; Start 3; Stop 27
gacagaaaccattaaattgatgaag

SEQ ID NO: 204207 - DNA, 25 bp, Artificial
  probe
  misc_feature (1)..(25): SEQ ID NO: 1355; WAN024FFH_at; Start 569; Stop 593
aggcaatccaagcttatgaccgtgt

SEQ ID NO: 204208 - DNA, 25 bp, Artificial
  probe
  misc_feature (1)..(25): SEQ ID NO: 1355; WAN024FFH_at; Start 617; Stop 641
gtgcgaccacaagctggagtcagcg

SEQ ID NO: 204209 - DNA, 25 bp, Artificial
  probe
  misc_feature (1)..(25): SEQ ID NO: 1355; WAN024FFH_at; Start 184; Stop 208
gaattggtacctcaagaagccattc

SEQ ID NO: 204210 - DNA, 25 bp, Artificial
  probe
  misc_feature (1)..(25): SEQ ID NO: 1355; WAN024FFH_at; Start 14; Stop 38
ttaaattgatgaaggctcatacttc

SEQ ID NO: 204211 - DNA, 25 bp, Artificial
  probe
  misc_feature (1)..(25): SEQ ID NO: 1355; WAN024FFH_at; Start 553; Stop 577
caagaacagtcaactgaggcaatcc

SEQ ID NO: 204212 - DNA, 25 bp, Artificial
  probe
  misc_feature (1)..(25): SEQ ID NO: 1355; WAN024FFH_at; Start 170; Stop 194
aagatgccttgtatgaattggtacc

SEQ ID NO: 204213 - DNA, 25 bp, Artificial
  probe
  misc_feature (1)..(25): SEQ ID NO: 1355; WAN024FFH_at; Start 543; Stop 567
ggaagaataccaagaacagtcaact

SEQ ID NO: 204214 - DNA, 25 bp, Artificial
  probe
  misc_feature (1)..(25): SEQ ID NO: 1355; WAN024FFH_at; Start 613; Stop 637
gcgcgtgcgaccacaagctggagtc

SEQ ID NO: 204215 - DNA, 25 bp, Artificial
  probe
  misc_feature (1)..(25): SEQ ID NO: 1355; WAN024FFH_at; Start 107; Stop 131
tggcatcatcttggaagaatttcca

SEQ ID NO: 204216 - DNA, 25 bp, Artificial
  probe
  misc_feature (1)..(25): SEQ ID NO: 1355; WAN024FFH_at; Start 567; Stop 591
tgaggcaatccaagcttatgaccgt

SEQ ID NO: 204217 - DNA, 25 bp, Artificial
  probe
  misc_feature (1)..(25): SEQ ID NO: 1355; WAN024FFH_at; Start 120; Stop 144
gaagaatttccaatcctactctgtg

SEQ ID NO: 204218 - DNA, 25 bp, Artificial
  probe
  misc_feature (1)..(25): SEQ ID NO: 1355; WAN024FFH_at; Start 160; Stop 184
caagagaagaaagatgccttgtatg

SEQ ID NO: 204219 - DNA, 25 bp, Artificial
  probe
  misc_feature (1)..(25): SEQ ID NO: 1355; WAN024FFH_at; Start 217; Stop 241
gctgttttccttctctttgtcggag

SEQ ID NO: 204220 - DNA, 25 bp, Artificial
  probe
  misc_feature (1)..(25): SEQ ID NO: 1355; WAN024FFH_at; Start 209; Stop 233
gccagtctgctgttttccttctctt

SEQ ID NO: 204221 - DNA, 25 bp, Artificial
  probe
  misc_feature (1)..(25): SEQ ID NO: 1355; WAN024FFH_at; Start 181; Stop 205
tatgaattggtacctcaagaagcca

SEQ ID NO: 204222 - DNA, 25 bp, Artificial
  probe
  misc_feature (1)..(25): SEQ ID NO: 1355; WAN024FFH_at; Start 11; Stop 35
ccattaaattgatgaaggctcatac

SEQ ID NO: 204223 - DNA, 25 bp, Artificial
  probe
  misc_feature (1)..(25): SEQ ID NO: 1355; WAN024FFH_at; Start 204; Stop 228
cattcgccagtctgctgttttcctt

SEQ ID NO: 204224 - DNA, 25 bp, Artificial
  probe
  misc_feature (1)..(25): SEQ ID NO: 1355; WAN024FFH_at; Start 102; Stop 126
ccagatggcatcatcttggaagaat

SEQ ID NO: 204225 - DNA, 25 bp, Artificial
  probe
  misc_feature (1)..(25): SEQ ID NO: 1355; WAN024FFH_at; Start 134; Stop 158
cctactctgtgattgtggtacgaag

SEQ ID NO: 204226 - DNA, 25 bp, Artificial
  probe
  misc_feature (1)..(25): SEQ ID NO: 1355; WAN024FFH_at; Start 98; Stop 122
cagcccagatggcatcatcttggaa

SEQ ID NO: 204227 - DNA, 25 bp, Artificial
  probe
  misc_feature (1)..(25): SEQ ID NO: 2899; WAN024FFI_at; Start 63; Stop 87
ctggattgaaaaggccaacagaaat

SEQ ID NO: 204228 - DNA, 25 bp, Artificial
  probe
  misc_feature (1)..(25): SEQ ID NO: 2899; WAN024FFI_at; Start 57; Stop 81
tgataactggattgaaaaggccaac

SEQ ID NO: 204229 - DNA, 25 bp, Artificial
  probe
  misc_feature (1)..(25): SEQ ID NO: 2899; WAN024FFI_at; Start 317; Stop 341
tagggaagtctaagggtggaaggca

SEQ ID NO: 204230 - DNA, 25 bp, Artificial
  probe
  misc_feature (1)..(25): SEQ ID NO: 2899; WAN024FFI_at; Start 273; Stop 297
aacttattcctgtttcaaagaaatg

SEQ ID NO: 204231 - DNA, 25 bp, Artificial
  probe
  misc_feature (1)..(25): SEQ ID NO: 2899; WAN024FFI_at; Start 226; Stop 250
ggcatttggtttctttttattctgc

SEQ ID NO: 204232 - DNA, 25 bp, Artificial
  probe
  misc_feature (1)..(25): SEQ ID NO: 2899; WAN024FFI_at; Start 69; Stop 93
tgaaaaggccaacagaaatagtaag

SEQ ID NO: 204233 - DNA, 25 bp, Artificial
  probe
  misc_feature (1)..(25): SEQ ID NO: 2899; WAN024FFI_at; Start 38; Stop 62
tagcaccgtacttttattttgataa

SEQ ID NO: 204234 - DNA, 25 bp, Artificial
  probe
  misc_feature (1)..(25): SEQ ID NO: 2899; WAN024FFI_at; Start 128; Stop 152
acatccccttctattctctttttag

SEQ ID NO: 204235 - DNA, 25 bp, Artificial
  probe
  misc_feature (1)..(25): SEQ ID NO: 2899; WAN024FFI_at; Start 58; Stop 82
gataactggattgaaaaggccaaca

SEQ ID NO: 204236 - DNA, 25 bp, Artificial
  probe
  misc_feature (1)..(25): SEQ ID NO: 2899; WAN024FFI_at; Start 294; Stop 318
aatgtttcgcttgagacaggaacta

SEQ ID NO: 204237 - DNA, 25 bp, Artificial
  probe
  misc_feature (1)..(25): SEQ ID NO: 2899; WAN024FFI_at; Start 66; Stop 90
gattgaaaaggccaacagaaatagt

SEQ ID NO: 204238 - DNA, 25 bp, Artificial
  probe
  misc_feature (1)..(25): SEQ ID NO: 2899; WAN024FFI_at; Start 60; Stop 84
taactggattgaaaaggccaacaga

SEQ ID NO: 204239 - DNA, 25 bp, Artificial
  probe
  misc_feature (1)..(25): SEQ ID NO: 2899; WAN024FFI_at; Start 296; Stop 320
tgtttcgcttgagacaggaactagg

SEQ ID NO: 204240 - DNA, 25 bp, Artificial
  probe
  misc_feature (1)..(25): SEQ ID NO: 2899; WAN024FFI_at; Start 133; Stop 157
cccttctattctctttttagccttg

SEQ ID NO: 204241 - DNA, 25 bp, Artificial
  probe
  misc_feature (1)..(25): SEQ ID NO: 2899; WAN024FFI_at; Start 54; Stop 78
ttttgataactggattgaaaaggcc

SEQ ID NO: 204242 - DNA, 25 bp, Artificial
  probe
  misc_feature (1)..(25): SEQ ID NO: 2899; WAN024FFI_at; Start 9; Stop 33
gatggaacatttgtttaaattctta

SEQ ID NO: 204243 - DNA, 25 bp, Artificial
  probe
  misc_feature (1)..(25): SEQ ID NO: 2899; WAN024FFI_at; Start 44; Stop 68
cgtacttttattttgataactggat

SEQ ID NO: 204244 - DNA, 25 bp, Artificial
  probe
  misc_feature (1)..(25): SEQ ID NO: 2899; WAN024FFI_at; Start 246; Stop 270
tctgctagctattggtatgaattgg

SEQ ID NO: 204245 - DNA, 25 bp, Artificial
  probe
  misc_feature (1)..(25): SEQ ID NO: 2899; WAN024FFI_at; Start 241; Stop 265
tttattctgctagctattggtatga

SEQ ID NO: 204246 - DNA, 25 bp, Artificial
  probe
  misc_feature (1)..(25): SEQ ID NO: 2899; WAN024FFI_at; Start 303; Stop 327
cttgagacaggaactagggaagtct

SEQ ID NO: 204247 - DNA, 25 bp, Artificial
  probe
  misc_feature (1)..(25): SEQ ID NO: 2899; WAN024FFI_at; Start 298; Stop 322
tttcgcttgagacaggaactaggga

SEQ ID NO: 204248 - DNA, 25 bp, Artificial
  probe
  misc_feature (1)..(25): SEQ ID NO: 2899; WAN024FFI_at; Start 280; Stop 304
tcctgtttcaaagaaatgtttcgct

SEQ ID NO: 204249 - DNA, 25 bp, Artificial
  probe
  misc_feature (1)..(25): SEQ ID NO: 2899; WAN024FFI_at; Start 233; Stop 257
ggtttctttttattctgctagctat

SEQ ID NO: 204250 - DNA, 25 bp, Artificial
  probe
  misc_feature (1)..(25): SEQ ID NO: 2899; WAN024FFI_at; Start 305; Stop 329
tgagacaggaactagggaagtctaa

SEQ ID NO: 204251 - DNA, 25 bp, Artificial
  probe
  misc_feature (1)..(25): SEQ ID NO: 2899; WAN024FFI_at; Start 300; Stop 324
tcgcttgagacaggaactagggaag

SEQ ID NO: 204252 - DNA, 25 bp, Artificial
  probe
  misc_feature (1)..(25): SEQ ID NO: 2899; WAN024FFI_at; Start 253; Stop 277
gctattggtatgaattggttaactt

SEQ ID NO: 204253 - DNA, 25 bp, Artificial
  probe
  misc_feature (1)..(25): SEQ ID NO: 2899; WAN024FFI_at; Start 321; Stop 345
gaagtctaagggtggaaggcattga

SEQ ID NO: 204254 - DNA, 25 bp, Artificial
  probe
  misc_feature (1)..(25): SEQ ID NO: 2899; WAN024FFI_at; Start 307; Stop 331
agacaggaactagggaagtctaagg

SEQ ID NO: 204255 - DNA, 25 bp, Artificial
  probe
  misc_feature (1)..(25): SEQ ID NO: 2899; WAN024FFI_at; Start 260; Stop 284
gtatgaattggttaacttattcctg

SEQ ID NO: 204256 - DNA, 25 bp, Artificial
  probe
  misc_feature (1)..(25): SEQ ID NO: 2899; WAN024FFI_at; Start 289; Stop 313
aaagaaatgtttcgcttgagacagg

SEQ ID NO: 204257 - DNA, 25 bp, Artificial
  probe
  misc_feature (1)..(25): SEQ ID NO: 2899; WAN024FFI_at; Start 251; Stop 275
tagctattggtatgaattggttaac

SEQ ID NO: 204258 - DNA, 25 bp, Artificial
  probe
  misc_feature (1)..(25): SEQ ID NO: 2899; WAN024FFI_at; Start 2; Stop 26
tgtcggtgatggaacatttgtttaa

SEQ ID NO: 204259 - DNA, 25 bp, Artificial
  probe
  misc_feature (1)..(25): SEQ ID NO: 2899; WAN024FFI_at; Start 292; Stop 316
gaaatgtttcgcttgagacaggaac

SEQ ID NO: 204260 - DNA, 25 bp, Artificial
  probe
  misc_feature (1)..(25): SEQ ID NO: 2899; WAN024FFI_at; Start 301; Stop 325
cgcttgagacaggaactagggaagt

SEQ ID NO: 204261 - DNA, 25 bp, Artificial
  probe
  misc_feature (1)..(25): SEQ ID NO: 4016; WAN024FFJ_at; Start 114; Stop 138
ctggatttacatcaccctctatgct

SEQ ID NO: 204262 - DNA, 25 bp, Artificial
  probe
  misc_feature (1)..(25): SEQ ID NO: 4016; WAN024FFJ_at; Start 107; Stop 131
atttttactggatttacatcaccct

SEQ ID NO: 204263 - DNA, 25 bp, Artificial
  probe
  misc_feature (1)..(25): SEQ ID NO: 4016; WAN024FFJ_at; Start 109; Stop 133
ttttactggatttacatcaccctct

SEQ ID NO: 204264 - DNA, 25 bp, Artificial
  probe
  misc_feature (1)..(25): SEQ ID NO: 4016; WAN024FFJ_at; Start 220; Stop 244
ggtatttggctattattactactta

SEQ ID NO: 204265 - DNA, 25 bp, Artificial
  probe
  misc_feature (1)..(25): SEQ ID NO: 4016; WAN024FFJ_at; Start 18; Stop 42
taaaatgataatcttattaccctgt

SEQ ID NO: 204266 - DNA, 25 bp, Artificial
  probe
  misc_feature (1)..(25): SEQ ID NO: 4016; WAN024FFJ_at; Start 116; Stop 140
ggatttacatcaccctctatgctct

SEQ ID NO: 204267 - DNA, 25 bp, Artificial
  probe
  misc_feature (1)..(25): SEQ ID NO: 4016; WAN024FFJ_at; Start 226; Stop 250
tggctattattactacttatcgctt

SEQ ID NO: 204268 - DNA, 25 bp, Artificial
  probe
  misc_feature (1)..(25): SEQ ID NO: 4016; WAN024FFJ_at; Start 115; Stop 139
tggatttacatcaccctctatgctc

SEQ ID NO: 204269 - DNA, 25 bp, Artificial
  probe
  misc_feature (1)..(25): SEQ ID NO: 4016; WAN024FFJ_at; Start 40; Stop 64
tgtttttactttttcagctggattg

SEQ ID NO: 204270 - DNA, 25 bp, Artificial
  probe
  misc_feature (1)..(25): SEQ ID NO: 4016; WAN024FFJ_at; Start 108; Stop 132
tttttactggatttacatcaccctc

SEQ ID NO: 204271 - DNA, 25 bp, Artificial
  probe
  misc_feature (1)..(25): SEQ ID NO: 4016; WAN024FFJ_at; Start 23; Stop 47
tgataatcttattaccctgttttta

SEQ ID NO: 204272 - DNA, 25 bp, Artificial
  probe
  misc_feature (1)..(25): SEQ ID NO: 4016; WAN024FFJ_at; Start 126; Stop 150
caccctctatgctctttttagcctt

SEQ ID NO: 204273 - DNA, 25 bp, Artificial
  probe
  misc_feature (1)..(25): SEQ ID NO: 4016; WAN024FFJ_at; Start 112; Stop 136
tactggatttacatcaccctctatg

SEQ ID NO: 204274 - DNA, 25 bp, Artificial
  probe
  misc_feature (1)..(25): SEQ ID NO: 4016; WAN024FFJ_at; Start 127; Stop 151
accctctatgctctttttagccttg

SEQ ID NO: 204275 - DNA, 25 bp, Artificial
  probe
  misc_feature (1)..(25): SEQ ID NO: 4016; WAN024FFJ_at; Start 225; Stop 249
ttggctattattactacttatcgct

SEQ ID NO: 204276 - DNA, 25 bp, Artificial
  probe
  misc_feature (1)..(25): SEQ ID NO: 4016; WAN024FFJ_at; Start 118; Stop 142
atttacatcaccctctatgctcttt

SEQ ID NO: 204277 - DNA, 25 bp, Artificial
  probe
  misc_feature (1)..(25): SEQ ID NO: 4016; WAN024FFJ_at; Start 235; Stop 259
ttactacttatcgcttttgctagtg

SEQ ID NO: 204278 - DNA, 25 bp, Artificial
  probe
  misc_feature (1)..(25): SEQ ID NO: 4016; WAN024FFJ_at; Start 113; Stop 137
actggatttacatcaccctctatgc

SEQ ID NO: 204279 - DNA, 25 bp, Artificial
  probe
  misc_feature (1)..(25): SEQ ID NO: 4016; WAN024FFJ_at; Start 19; Stop 43
aaaatgataatcttattaccctgtt

SEQ ID NO: 204280 - DNA, 25 bp, Artificial
  probe
  misc_feature (1)..(25): SEQ ID NO: 4016; WAN024FFJ_at; Start 233; Stop 257
tattactacttatcgcttttgctag

SEQ ID NO: 204281 - DNA, 25 bp, Artificial
  probe
  misc_feature (1)..(25): SEQ ID NO: 4016; WAN024FFJ_at; Start 38; Stop 62
cctgtttttactttttcagctggat

SEQ ID NO: 204282 - DNA, 25 bp, Artificial
  probe
  misc_feature (1)..(25): SEQ ID NO: 4016; WAN024FFJ_at; Start 41; Stop 65
gtttttactttttcagctggattga

SEQ ID NO: 204283 - DNA, 25 bp, Artificial
  probe
  misc_feature (1)..(25): SEQ ID NO: 4016; WAN024FFJ_at; Start 125; Stop 149
tcaccctctatgctctttttagcct

SEQ ID NO: 204284 - DNA, 25 bp, Artificial
  probe
  misc_feature (1)..(25): SEQ ID NO: 4016; WAN024FFJ_at; Start 122; Stop 146
acatcaccctctatgctctttttag

SEQ ID NO: 204285 - DNA, 25 bp, Artificial
  probe
  misc_feature (1)..(25): SEQ ID NO: 4016; WAN024FFJ_at; Start 224; Stop 248
tttggctattattactacttatcgc

SEQ ID NO: 204286 - DNA, 25 bp, Artificial
  probe
  misc_feature (1)..(25): SEQ ID NO: 4016; WAN024FFJ_at; Start 210; Stop 234
caagttatggggtatttggctatta

SEQ ID NO: 204287 - DNA, 25 bp, Artificial
  probe
  misc_feature (1)..(25): SEQ ID NO: 4016; WAN024FFJ_at; Start 230; Stop 254
tattattactacttatcgcttttgc

SEQ ID NO: 204288 - DNA, 25 bp, Artificial
  probe
  misc_feature (1)..(25): SEQ ID NO: 4016; WAN024FFJ_at; Start 110; Stop 134
tttactggatttacatcaccctcta

SEQ ID NO: 204289 - DNA, 25 bp, Artificial
  probe
  misc_feature (1)..(25): SEQ ID NO: 4016; WAN024FFJ_at; Start 119; Stop 143
tttacatcaccctctatgctctttt

SEQ ID NO: 204290 - DNA, 25 bp, Artificial
  probe
  misc_feature (1)..(25): SEQ ID NO: 4016; WAN024FFJ_at; Start 227; Stop 251
ggctattattactacttatcgcttt

SEQ ID NO: 204291 - DNA, 25 bp, Artificial
  probe
  misc_feature (1)..(25): SEQ ID NO: 4016; WAN024FFJ_at; Start 21; Stop 45
aatgataatcttattaccctgtttt

SEQ ID NO: 204292 - DNA, 25 bp, Artificial
  probe
  misc_feature (1)..(25): SEQ ID NO: 4016; WAN024FFJ_at; Start 234; Stop 258
attactacttatcgcttttgctagt

SEQ ID NO: 204293 - DNA, 25 bp, Artificial
  probe
  misc_feature (1)..(25): SEQ ID NO: 4016; WAN024FFJ_at; Start 123; Stop 147
catcaccctctatgctctttttagc

SEQ ID NO: 204294 - DNA, 25 bp, Artificial
  probe
  misc_feature (1)..(25): SEQ ID NO: 4016; WAN024FFJ_at; Start 111; Stop 135
ttactggatttacatcaccctctat

SEQ ID NO: 204295 - DNA, 25 bp, Artificial
  probe
  misc_feature (1)..(25): SEQ ID NO: 6539; WAN024FFK_at; Start 211; Stop 235
catgttttcaaaactgggaataact

SEQ ID NO: 204296 - DNA, 25 bp, Artificial
  probe
  misc_feature (1)..(25): SEQ ID NO: 6539; WAN024FFK_at; Start 160; Stop 184
tatatacttgaattctgccaagctc

SEQ ID NO: 204297 - DNA, 25 bp, Artificial
  probe
  misc_feature (1)..(25): SEQ ID NO: 6539; WAN024FFK_at; Start 12; Stop 36
tattttgaataggaacatcgtgatg

SEQ ID NO: 204298 - DNA, 25 bp, Artificial
  probe
  misc_feature (1)..(25): SEQ ID NO: 6539; WAN024FFK_at; Start 234; Stop 258
ctttaccgtgttcaatatttgttag

SEQ ID NO: 204299 - DNA, 25 bp, Artificial
  probe
  misc_feature (1)..(25): SEQ ID NO: 6539; WAN024FFK_at; Start 181; Stop 205
gctcatatcaatttgttcaagaaga

SEQ ID NO: 204300 - DNA, 25 bp, Artificial
  probe
  misc_feature (1)..(25): SEQ ID NO: 6539; WAN024FFK_at; Start 101; Stop 125
gacggattttggctctctacaataa

SEQ ID NO: 204301 - DNA, 25 bp, Artificial
  probe
  misc_feature (1)..(25): SEQ ID NO: 6539; WAN024FFK_at; Start 53; Stop 77
tgacatttctcagtgagttcaacca

SEQ ID NO: 204302 - DNA, 25 bp, Artificial
  probe
  misc_feature (1)..(25): SEQ ID NO: 6539; WAN024FFK_at; Start 147; Stop 171
ggtattcgttgcatatatacttgaa

SEQ ID NO: 204303 - DNA, 25 bp, Artificial
  probe
  misc_feature (1)..(25): SEQ ID NO: 6539; WAN024FFK_at; Start 124; Stop 148
aatatctcgccttttactaggatgg

SEQ ID NO: 204304 - DNA, 25 bp, Artificial
  probe
  misc_feature (1)..(25): SEQ ID NO: 6539; WAN024FFK_at; Start 67; Stop 91
gagttcaaccatttttctagtatct

SEQ ID NO: 204305 - DNA, 25 bp, Artificial
  probe
  misc_feature (1)..(25): SEQ ID NO: 6539; WAN024FFK_at; Start 188; Stop 212
tcaatttgttcaagaagaaatacca

SEQ ID NO: 204306 - DNA, 25 bp, Artificial
  probe
  misc_feature (1)..(25): SEQ ID NO: 6539; WAN024FFK_at; Start 112; Stop 136
gctctctacaataatatctcgcctt

SEQ ID NO: 204307 - DNA, 25 bp, Artificial
  probe
  misc_feature (1)..(25): SEQ ID NO: 6539; WAN024FFK_at; Start 134; Stop 158
cttttactaggatggtattcgttgc

SEQ ID NO: 204308 - DNA, 25 bp, Artificial
  probe
  misc_feature (1)..(25): SEQ ID NO: 6539; WAN024FFK_at; Start 109; Stop 133
ttggctctctacaataatatctcgc

SEQ ID NO: 204309 - DNA, 25 bp, Artificial
  probe
  misc_feature (1)..(25): SEQ ID NO: 6539; WAN024FFK_at; Start 93; Stop 117
gaaaagtagacggattttggctctc

SEQ ID NO: 204310 - DNA, 25 bp, Artificial
  probe
  misc_feature (1)..(25): SEQ ID NO: 6539; WAN024FFK_at; Start 45; Stop 69
gatatttttgacatttctcagtgag

SEQ ID NO: 204311 - DNA, 25 bp, Artificial
  probe
  misc_feature (1)..(25): SEQ ID NO: 6539; WAN024FFK_at; Start 157; Stop 181
gcatatatacttgaattctgccaag

SEQ ID NO: 204312 - DNA, 25 bp, Artificial
  probe
  misc_feature (1)..(25): SEQ ID NO: 6539; WAN024FFK_at; Start 32; Stop 56
tgatgtgtcttaagatatttttgac

SEQ ID NO: 204313 - DNA, 25 bp, Artificial
  probe
  misc_feature (1)..(25): SEQ ID NO: 6539; WAN024FFK_at; Start 177; Stop 201
ccaagctcatatcaatttgttcaag

SEQ ID NO: 204314 - DNA, 25 bp, Artificial
  probe
  misc_feature (1)..(25): SEQ ID NO: 6539; WAN024FFK_at; Start 168; Stop 192
tgaattctgccaagctcatatcaat

SEQ ID NO: 204315 - DNA, 25 bp, Artificial
  probe
  misc_feature (1)..(25): SEQ ID NO: 6539; WAN024FFK_at; Start 62; Stop 86
tcagtgagttcaaccatttttctag

SEQ ID NO: 204316 - DNA, 25 bp, Artificial
  probe
  misc_feature (1)..(25): SEQ ID NO: 6539; WAN024FFK_at; Start 24; Stop 48
gaacatcgtgatgtgtcttaagata

SEQ ID NO: 204317 - DNA, 25 bp, Artificial
  probe
  misc_feature (1)..(25): SEQ ID NO: 6539; WAN024FFK_at; Start 95; Stop 119
aaagtagacggattttggctctcta

SEQ ID NO: 204318 - DNA, 25 bp, Artificial
  probe
  misc_feature (1)..(25): SEQ ID NO: 6539; WAN024FFK_at; Start 138; Stop 162
tactaggatggtattcgttgcatat

SEQ ID NO: 204319 - DNA, 25 bp, Artificial
  probe
  misc_feature (1)..(25): SEQ ID NO: 6539; WAN024FFK_at; Start 72; Stop 96
caaccatttttctagtatcttgaaa

SEQ ID NO: 204320 - DNA, 25 bp, Artificial
  probe
  misc_feature (1)..(25): SEQ ID NO: 6539; WAN024FFK_at; Start 173; Stop 197
tctgccaagctcatatcaatttgtt

SEQ ID NO: 204321 - DNA, 25 bp, Artificial
  probe
  misc_feature (1)..(25): SEQ ID NO: 6539; WAN024FFK_at; Start 17; Stop 41
tgaataggaacatcgtgatgtgtct

SEQ ID NO: 204322 - DNA, 25 bp, Artificial
  probe
  misc_feature (1)..(25): SEQ ID NO: 6539; WAN024FFK_at; Start 130; Stop 154
tcgccttttactaggatggtattcg

SEQ ID NO: 204323 - DNA, 25 bp, Artificial
  probe
  misc_feature (1)..(25): SEQ ID NO: 6539; WAN024FFK_at; Start 126; Stop 150
tatctcgccttttactaggatggta

SEQ ID NO: 204324 - DNA, 25 bp, Artificial
  probe
  misc_feature (1)..(25): SEQ ID NO: 6539; WAN024FFK_at; Start 203; Stop 227
agaaataccatgttttcaaaactgg

SEQ ID NO: 204325 - DNA, 25 bp, Artificial
  probe
  misc_feature (1)..(25): SEQ ID NO: 6539; WAN024FFK_at; Start 194; Stop 218
tgttcaagaagaaataccatgtttt

SEQ ID NO: 204326 - DNA, 25 bp, Artificial
  probe
  misc_feature (1)..(25): SEQ ID NO: 6539; WAN024FFK_at; Start 89; Stop 113
tcttgaaaagtagacggattttggc

SEQ ID NO: 204327 - DNA, 25 bp, Artificial
  probe
  misc_feature (1)..(25): SEQ ID NO: 6539; WAN024FFK_at; Start 3; Stop 27
gacgatagatattttgaataggaac

SEQ ID NO: 204328 - DNA, 25 bp, Artificial
  probe
  misc_feature (1)..(25): SEQ ID NO: 6539; WAN024FFK_at; Start 27; Stop 51
catcgtgatgtgtcttaagatattt

SEQ ID NO: 204329 - DNA, 25 bp, Artificial
  probe
  misc_feature (1)..(25): SEQ ID NO: 1547; WAN024FFL_at; Start 346; Stop 370
tatcgtcatacaaaaattgtcacag

SEQ ID NO: 204330 - DNA, 25 bp, Artificial
  probe
  misc_feature (1)..(25): SEQ ID NO: 1547; WAN024FFL_at; Start 136; Stop 160
gaaaacatggtatttcttcttgaac

SEQ ID NO: 204331 - DNA, 25 bp, Artificial
  probe
  misc_feature (1)..(25): SEQ ID NO: 1547; WAN024FFL_at; Start 319; Stop 343
catcacgatgttcctattcaaaata

SEQ ID NO: 204332 - DNA, 25 bp, Artificial
  probe
  misc_feature (1)..(25): SEQ ID NO: 1547; WAN024FFL_at; Start 43; Stop 67
tcaaaaggattgacccaacaagatg

SEQ ID NO: 204333 - DNA, 25 bp, Artificial
  probe
  misc_feature (1)..(25): SEQ ID NO: 1547; WAN024FFL_at; Start 641; Stop 665
tcaaagaatgtgaaacaatcaccct

SEQ ID NO: 204334 - DNA, 25 bp, Artificial
  probe
  misc_feature (1)..(25): SEQ ID NO: 1547; WAN024FFL_at; Start 532; Stop 556
gatagaattatgaaaaccatcgaga

SEQ ID NO: 204335 - DNA, 25 bp, Artificial
  probe
  misc_feature (1)..(25): SEQ ID NO: 1547; WAN024FFL_at; Start 662; Stop 686
ccctacaacttttggtattagcaga

SEQ ID NO: 204336 - DNA, 25 bp, Artificial
  probe
  misc_feature (1)..(25): SEQ ID NO: 1547; WAN024FFL_at; Start 304; Stop 328
aaatatcttaagacacatcacgatg

SEQ ID NO: 204337 - DNA, 25 bp, Artificial
  probe
  misc_feature (1)..(25): SEQ ID NO: 1547; WAN024FFL_at; Start 718; Stop 742
tctcaagtacgcttgggaatactac

SEQ ID NO: 204338 - DNA, 25 bp, Artificial
  probe
  misc_feature (1)..(25): SEQ ID NO: 1547; WAN024FFL_at; Start 597; Stop 621
ttttttagccaatctctccactgta

SEQ ID NO: 204339 - DNA, 25 bp, Artificial
  probe
  misc_feature (1)..(25): SEQ ID NO: 1547; WAN024FFL_at; Start 511; Stop 535
gaaaatcttccccttcttattgata

SEQ ID NO: 204340 - DNA, 25 bp, Artificial
  probe
  misc_feature (1)..(25): SEQ ID NO: 1547; WAN024FFL_at; Start 700; Stop 724
tacgatattcttggattctctcaag

SEQ ID NO: 204341 - DNA, 25 bp, Artificial
  probe
  misc_feature (1)..(25): SEQ ID NO: 1547; WAN024FFL_at; Start 438; Stop 462
tcttgaacctatggatacatggtac

SEQ ID NO: 204342 - DNA, 25 bp, Artificial
  probe
  misc_feature (1)..(25): SEQ ID NO: 1547; WAN024FFL_at; Start 733; Stop 757
ggaatactacaacataactccgatt

SEQ ID NO: 204343 - DNA, 25 bp, Artificial
  probe
  misc_feature (1)..(25): SEQ ID NO: 1547; WAN024FFL_at; Start 101; Stop 125
caaatattgaacacggtaaagttat

SEQ ID NO: 204344 - DNA, 25 bp, Artificial
  probe
  misc_feature (1)..(25): SEQ ID NO: 1547; WAN024FFL_at; Start 207; Stop 231
ccatcctagtaaaaggcgagatatt

SEQ ID NO: 204345 - DNA, 25 bp, Artificial
  probe
  misc_feature (1)..(25): SEQ ID NO: 1547; WAN024FFL_at; Start 58; Stop 82
caacaagatgtatgtggacaagtca

SEQ ID NO: 204346 - DNA, 25 bp, Artificial
  probe
  misc_feature (1)..(25): SEQ ID NO: 1547; WAN024FFL_at; Start 192; Stop 216
tatatgcaacgaataccatcctagt

SEQ ID NO: 204347 - DNA, 25 bp, Artificial
  probe
  misc_feature (1)..(25): SEQ ID NO: 1547; WAN024FFL_at; Start 157; Stop 181
gaacaaattgatatgagcttggcag

SEQ ID NO: 204348 - DNA, 25 bp, Artificial
  probe
  misc_feature (1)..(25): SEQ ID NO: 1547; WAN024FFL_at; Start 548; Stop 572
ccatcgagaaatataaatacttccg

SEQ ID NO: 204349 - DNA, 25 bp, Artificial
  probe
  misc_feature (1)..(25): SEQ ID NO: 1547; WAN024FFL_at; Start 283; Stop 307
gaactcactgagaaatgtcaaaaat

SEQ ID NO: 204350 - DNA, 25 bp, Artificial
  probe
  misc_feature (1)..(25): SEQ ID NO: 1547; WAN024FFL_at; Start 384; Stop 408
aggattcaaaaacaaccacgtcttg

SEQ ID NO: 204351 - DNA, 25 bp, Artificial
  probe
  misc_feature (1)..(25): SEQ ID NO: 1547; WAN024FFL_at; Start 178; Stop 202
gcagaattcaagtatatatgcaacg

SEQ ID NO: 204352 - DNA, 25 bp, Artificial
  probe
  misc_feature (1)..(25): SEQ ID NO: 1547; WAN024FFL_at; Start 453; Stop 477
tacatggtacattagtgatttgaaa

SEQ ID NO: 204353 - DNA, 25 bp, Artificial
  probe
  misc_feature (1)..(25): SEQ ID NO: 1547; WAN024FFL_at; Start 752; Stop 776
ccgatttgattgataaaggaataac

SEQ ID NO: 204354 - DNA, 25 bp, Artificial
  probe
  misc_feature (1)..(25): SEQ ID NO: 1547; WAN024FFL_at; Start 779; Stop 803
tattacgactaaccaaagaagaggc

SEQ ID NO: 204355 - DNA, 25 bp, Artificial
  probe
  misc_feature (1)..(25): SEQ ID NO: 1547; WAN024FFL_at; Start 267; Stop 291
tactagaaaaatggttgaactcact

SEQ ID NO: 204356 - DNA, 25 bp, Artificial
  probe
  misc_feature (1)..(25): SEQ ID NO: 1547; WAN024FFL_at; Start 424; Stop 448
gaaatttgggactatcttgaaccta

SEQ ID NO: 204357 - DNA, 25 bp, Artificial
  probe
  misc_feature (1)..(25): SEQ ID NO: 1547; WAN024FFL_at; Start 796; Stop 820
gaagaggcattagttaaaatactcg

SEQ ID NO: 204358 - DNA, 25 bp, Artificial
  probe
  misc_feature (1)..(25): SEQ ID NO: 1547; WAN024FFL_at; Start 236; Stop 260
tagagagccaaaatccgtctacttt

SEQ ID NO: 204359 - DNA, 25 bp, Artificial
  probe
  misc_feature (1)..(25): SEQ ID NO: 1547; WAN024FFL_at; Start 250; Stop 274
ccgtctacttttcaagatactagaa

SEQ ID NO: 204360 - DNA, 25 bp, Artificial
  probe
  misc_feature (1)..(25): SEQ ID NO: 1547; WAN024FFL_at; Start 469; Stop 493
gatttgaaattgcttggaaccattc

SEQ ID NO: 204361 - DNA, 25 bp, Artificial
  probe
  misc_feature (1)..(25): SEQ ID NO: 1547; WAN024FFL_at; Start 222; Stop 246
gcgagatattattgtagagagccaa

SEQ ID NO: 204362 - DNA, 25 bp, Artificial
  probe
  misc_feature (1)..(25): SEQ ID NO: 1547; WAN024FFL_at; Start 31; Stop 55
gaaattcgaaagtcaaaaggattga

SEQ ID NO: 204363 - DNA, 25 bp, Artificial
  probe
  misc_feature (1)..(25): SEQ ID NO: 5783; WAN024FFM_at; Start 68; Stop 92
taaggagtaaagagtttcatcaaac

SEQ ID NO: 204364 - DNA, 25 bp, Artificial
  probe
  misc_feature (1)..(25): SEQ ID NO: 5783; WAN024FFM_at; Start 199; Stop 223
gattgccgaacgagtcacattcccc

SEQ ID NO: 204365 - DNA, 25 bp, Artificial
  probe
  misc_feature (1)..(25): SEQ ID NO: 5783; WAN024FFM_at; Start 132; Stop 156
gaaccatatagtaaggcaaggcact

SEQ ID NO: 204366 - DNA, 25 bp, Artificial
  probe
  misc_feature (1)..(25): SEQ ID NO: 5783; WAN024FFM_at; Start 47; Stop 71
taagggacaatataaaggatataag

SEQ ID NO: 204367 - DNA, 25 bp, Artificial
  probe
  misc_feature (1)..(25): SEQ ID NO: 5783; WAN024FFM_at; Start 92; Stop 116
cttacatccccatagctagcttgca

SEQ ID NO: 204368 - DNA, 25 bp, Artificial
  probe
  misc_feature (1)..(25): SEQ ID NO: 5783; WAN024FFM_at; Start 113; Stop 137
tgcatcaaactcgtcataggaacca

SEQ ID NO: 204369 - DNA, 25 bp, Artificial
  probe
  misc_feature (1)..(25): SEQ ID NO: 5783; WAN024FFM_at; Start 194; Stop 218
taggtgattgccgaacgagtcacat

SEQ ID NO: 204370 - DNA, 25 bp, Artificial
  probe
  misc_feature (1)..(25): SEQ ID NO: 5783; WAN024FFM_at; Start 79; Stop 103
gagtttcatcaaacttacatcccca

SEQ ID NO: 204371 - DNA, 25 bp, Artificial
  probe
  misc_feature (1)..(25): SEQ ID NO: 5783; WAN024FFM_at; Start 118; Stop 142
caaactcgtcataggaaccatatag

SEQ ID NO: 204372 - DNA, 25 bp, Artificial
  probe
  misc_feature (1)..(25): SEQ ID NO: 5783; WAN024FFM_at; Start 196; Stop 220
ggtgattgccgaacgagtcacattc

SEQ ID NO: 204373 - DNA, 25 bp, Artificial
  probe
  misc_feature (1)..(25): SEQ ID NO: 5783; WAN024FFM_at; Start 123; Stop 147
tcgtcataggaaccatatagtaagg

SEQ ID NO: 204374 - DNA, 25 bp, Artificial
  probe
  misc_feature (1)..(25): SEQ ID NO: 5783; WAN024FFM_at; Start 115; Stop 139
catcaaactcgtcataggaaccata

SEQ ID NO: 204375 - DNA, 25 bp, Artificial
  probe
  misc_feature (1)..(25): SEQ ID NO: 5783; WAN024FFM_at; Start 161; Stop 185
agcagcatagaaccaagccaaagaa

SEQ ID NO: 204376 - DNA, 25 bp, Artificial
  probe
  misc_feature (1)..(25): SEQ ID NO: 5783; WAN024FFM_at; Start 187; Stop 211
catcaaataggtgattgccgaacga

SEQ ID NO: 204377 - DNA, 25 bp, Artificial
  probe
  misc_feature (1)..(25): SEQ ID NO: 5783; WAN024FFM_at; Start 87; Stop 111
tcaaacttacatccccatagctagc

SEQ ID NO: 204378 - DNA, 25 bp, Artificial
  probe
  misc_feature (1)..(25): SEQ ID NO: 5783; WAN024FFM_at; Start 129; Stop 153
taggaaccatatagtaaggcaaggc

SEQ ID NO: 204379 - DNA, 25 bp, Artificial
  probe
  misc_feature (1)..(25): SEQ ID NO: 5783; WAN024FFM_at; Start 101; Stop 125
ccatagctagcttgcatcaaactcg

SEQ ID NO: 204380 - DNA, 25 bp, Artificial
  probe
  misc_feature (1)..(25): SEQ ID NO: 5783; WAN024FFM_at; Start 126; Stop 150
tcataggaaccatatagtaaggcaa

SEQ ID NO: 204381 - DNA, 25 bp, Artificial
  probe
  misc_feature (1)..(25): SEQ ID NO: 5783; WAN024FFM_at; Start 219; Stop 243
tccccacataatcaactatttgtaa

SEQ ID NO: 204382 - DNA, 25 bp, Artificial
  probe
  misc_feature (1)..(25): SEQ ID NO: 5783; WAN024FFM_at; Start 177; Stop 201
gccaaagaaacatcaaataggtgat

SEQ ID NO: 204383 - DNA, 25 bp, Artificial
  probe
  misc_feature (1)..(25): SEQ ID NO: 5783; WAN024FFM_at; Start 110; Stop 134
gcttgcatcaaactcgtcataggaa

SEQ ID NO: 204384 - DNA, 25 bp, Artificial
  probe
  misc_feature (1)..(25): SEQ ID NO: 5783; WAN024FFM_at; Start 62; Stop 86
aggatataaggagtaaagagtttca

SEQ ID NO: 204385 - DNA, 25 bp, Artificial
  probe
  misc_feature (1)..(25): SEQ ID NO: 5783; WAN024FFM_at; Start 21; Stop 45
tatcttcatatttttcaagcaccat

SEQ ID NO: 204386 - DNA, 25 bp, Artificial
  probe
  misc_feature (1)..(25): SEQ ID NO: 5783; WAN024FFM_at; Start 212; Stop 236
gtcacattccccacataatcaacta

SEQ ID NO: 204387 - DNA, 25 bp, Artificial
  probe
  misc_feature (1)..(25): SEQ ID NO: 5783; WAN024FFM_at; Start 173; Stop 197
ccaagccaaagaaacatcaaatagg

SEQ ID NO: 204388 - DNA, 25 bp, Artificial
  probe
  misc_feature (1)..(25): SEQ ID NO: 5783; WAN024FFM_at; Start 96; Stop 120
catccccatagctagcttgcatcaa

SEQ ID NO: 204389 - DNA, 25 bp, Artificial
  probe
  misc_feature (1)..(25): SEQ ID NO: 5783; WAN024FFM_at; Start 191; Stop 215
aaataggtgattgccgaacgagtca

SEQ ID NO: 204390 - DNA, 25 bp, Artificial
  probe
  misc_feature (1)..(25): SEQ ID NO: 5783; WAN024FFM_at; Start 134; Stop 158
accatatagtaaggcaaggcactat

SEQ ID NO: 204391 - DNA, 25 bp, Artificial
  probe
  misc_feature (1)..(25): SEQ ID NO: 5783; WAN024FFM_at; Start 108; Stop 132
tagcttgcatcaaactcgtcatagg

SEQ ID NO: 204392 - DNA, 25 bp, Artificial
  probe
  misc_feature (1)..(25): SEQ ID NO: 5783; WAN024FFM_at; Start 206; Stop 230
gaacgagtcacattccccacataat

SEQ ID NO: 204393 - DNA, 25 bp, Artificial
  probe
  misc_feature (1)..(25): SEQ ID NO: 5783; WAN024FFM_at; Start 72; Stop 96
gagtaaagagtttcatcaaacttac

SEQ ID NO: 204394 - DNA, 25 bp, Artificial
  probe
  misc_feature (1)..(25): SEQ ID NO: 5783; WAN024FFM_at; Start 104; Stop 128
tagctagcttgcatcaaactcgtca

SEQ ID NO: 204395 - DNA, 25 bp, Artificial
  probe
  misc_feature (1)..(25): SEQ ID NO: 5783; WAN024FFM_at; Start 183; Stop 207
gaaacatcaaataggtgattgccga

SEQ ID NO: 204396 - DNA, 25 bp, Artificial
  probe
  misc_feature (1)..(25): SEQ ID NO: 5783; WAN024FFM_at; Start 190; Stop 214
caaataggtgattgccgaacgagtc

SEQ ID NO: 204397 - DNA, 25 bp, Artificial
  probe
  misc_feature (1)..(25): SEQ ID NO: 5149; WAN024FFN_at; Start 279; Stop 303
catcattgttttgctaggttttcaa

SEQ ID NO: 204398 - DNA, 25 bp, Artificial
  probe
  misc_feature (1)..(25): SEQ ID NO: 5149; WAN024FFN_at; Start 228; Stop 252
tcgtattctccagttcaatctaggt

SEQ ID NO: 204399 - DNA, 25 bp, Artificial
  probe
  misc_feature (1)..(25): SEQ ID NO: 5149; WAN024FFN_at; Start 460; Stop 484
gggactttttctcctcttggatgga

SEQ ID NO: 204400 - DNA, 25 bp, Artificial
  probe
  misc_feature (1)..(25): SEQ ID NO: 5149; WAN024FFN_at; Start 507; Stop 531
tggtttacaaagactcctagatgga

SEQ ID NO: 204401 - DNA, 25 bp, Artificial
  probe
  misc_feature (1)..(25): SEQ ID NO: 5149; WAN024FFN_at; Start 758; Stop 782
tgaaactctttactccttatatcct

SEQ ID NO: 204402 - DNA, 25 bp, Artificial
  probe
  misc_feature (1)..(25): SEQ ID NO: 5149; WAN024FFN_at; Start 374; Stop 398
gaaagttgactttgcaagttgcaag

SEQ ID NO: 204403 - DNA, 25 bp, Artificial
  probe
  misc_feature (1)..(25): SEQ ID NO: 5149; WAN024FFN_at; Start 469; Stop 493
tctcctcttggatggaattctctat

SEQ ID NO: 204404 - DNA, 25 bp, Artificial
  probe
  misc_feature (1)..(25): SEQ ID NO: 5149; WAN024FFN_at; Start 201; Stop 225
tgacttattaaaatcagcattagat

SEQ ID NO: 204405 - DNA, 25 bp, Artificial
  probe
  misc_feature (1)..(25): SEQ ID NO: 5149; WAN024FFN_at; Start 237; Stop 261
ccagttcaatctaggtttttatcaa

SEQ ID NO: 204406 - DNA, 25 bp, Artificial
  probe
  misc_feature (1)..(25): SEQ ID NO: 5149; WAN024FFN_at; Start 688; Stop 712
agtgccttgccttactatatggttc

SEQ ID NO: 204407 - DNA, 25 bp, Artificial
  probe
  misc_feature (1)..(25): SEQ ID NO: 5149; WAN024FFN_at; Start 719; Stop 743
cgagtttgatgcaagctagctatgg

SEQ ID NO: 204408 - DNA, 25 bp, Artificial
  probe
  misc_feature (1)..(25): SEQ ID NO: 5149; WAN024FFN_at; Start 143; Stop 167
tcttttttgatattcatgcgcccga

SEQ ID NO: 204409 - DNA, 25 bp, Artificial
  probe
  misc_feature (1)..(25): SEQ ID NO: 5149; WAN024FFN_at; Start 166; Stop 190
gatctagctaaattcgatggacaag

SEQ ID NO: 204410 - DNA, 25 bp, Artificial
  probe
  misc_feature (1)..(25): SEQ ID NO: 5149; WAN024FFN_at; Start 743; Stop 767
gggatgtaagtttgatgaaactctt

SEQ ID NO: 204411 - DNA, 25 bp, Artificial
  probe
  misc_feature (1)..(25): SEQ ID NO: 5149; WAN024FFN_at; Start 157; Stop 181
catgcgcccgatctagctaaattcg

SEQ ID NO: 204412 - DNA, 25 bp, Artificial
  probe
  misc_feature (1)..(25): SEQ ID NO: 5149; WAN024FFN_at; Start 406; Stop 430
tgtttgatatatttagtgactgtgc

SEQ ID NO: 204413 - DNA, 25 bp, Artificial
  probe
  misc_feature (1)..(25): SEQ ID NO: 5149; WAN024FFN_at; Start 215; Stop 239
cagcattagattttcgtattctcca

SEQ ID NO: 204414 - DNA, 25 bp, Artificial
  probe
  misc_feature (1)..(25): SEQ ID NO: 5149; WAN024FFN_at; Start 582; Stop 606
catcaatgcaatctattttttacaa

SEQ ID NO: 204415 - DNA, 25 bp, Artificial
  probe
  misc_feature (1)..(25): SEQ ID NO: 5149; WAN024FFN_at; Start 622; Stop 646
gggaatgtgactcgttcggcaatca

SEQ ID NO: 204416 - DNA, 25 bp, Artificial
  probe
  misc_feature (1)..(25): SEQ ID NO: 5149; WAN024FFN_at; Start 329; Stop 353
tacgattgagtattggaagagaagt

SEQ ID NO: 204417 - DNA, 25 bp, Artificial
  probe
  misc_feature (1)..(25): SEQ ID NO: 5149; WAN024FFN_at; Start 644; Stop 668
tcacctatttgatgtttctttggct

SEQ ID NO: 204418 - DNA, 25 bp, Artificial
  probe
  misc_feature (1)..(25): SEQ ID NO: 5149; WAN024FFN_at; Start 630; Stop 654
gactcgttcggcaatcacctatttg

SEQ ID NO: 204419 - DNA, 25 bp, Artificial
  probe
  misc_feature (1)..(25): SEQ ID NO: 5149; WAN024FFN_at; Start 542; Stop 566
gctatttgttctttacttgtgtcct

SEQ ID NO: 204420 - DNA, 25 bp, Artificial
  probe
  misc_feature (1)..(25): SEQ ID NO: 5149; WAN024FFN_at; Start 482; Stop 506
ggaattctctattttctgatggaag

SEQ ID NO: 204421 - DNA, 25 bp, Artificial
  probe
  misc_feature (1)..(25): SEQ ID NO: 5149; WAN024FFN_at; Start 711; Stop 735
tcctatgacgagtttgatgcaagct

SEQ ID NO: 204422 - DNA, 25 bp, Artificial
  probe
  misc_feature (1)..(25): SEQ ID NO: 5149; WAN024FFN_at; Start 180; Stop 204
cgatggacaagcaattaaaaatgac

SEQ ID NO: 204423 - DNA, 25 bp, Artificial
  probe
  misc_feature (1)..(25): SEQ ID NO: 5149; WAN024FFN_at; Start 291; Stop 315
gctaggttttcaatatattgagctg

SEQ ID NO: 204424 - DNA, 25 bp, Artificial
  probe
  misc_feature (1)..(25): SEQ ID NO: 5149; WAN024FFN_at; Start 388; Stop 412
caagttgcaagtatcccttgtttga

SEQ ID NO: 204425 - DNA, 25 bp, Artificial
  probe
  misc_feature (1)..(25): SEQ ID NO: 5149; WAN024FFN_at; Start 568; Stop 592
ctaatcggtattttcatcaatgcaa

SEQ ID NO: 204426 - DNA, 25 bp, Artificial
  probe
  misc_feature (1)..(25): SEQ ID NO: 5149; WAN024FFN_at; Start 521; Stop 545
tcctagatggagagataaaaagcta

SEQ ID NO: 204427 - DNA, 25 bp, Artificial
  probe
  misc_feature (1)..(25): SEQ ID NO: 5149; WAN024FFN_at; Start 100; Stop 124
ctttttcttgctttggtttatcgtg

SEQ ID NO: 204428 - DNA, 25 bp, Artificial
  probe
  misc_feature (1)..(25): SEQ ID NO: 5149; WAN024FFN_at; Start 659; Stop 683
ttctttggcttggttctatgctgct

SEQ ID NO: 204429 - DNA, 25 bp, Artificial
  probe
  misc_feature (1)..(25): SEQ ID NO: 5149; WAN024FFN_at; Start 696; Stop 720
gccttactatatggttcctatgacg

SEQ ID NO: 204430 - DNA, 25 bp, Artificial
  probe
  misc_feature (1)..(25): SEQ ID NO: 5149; WAN024FFN_at; Start 499; Stop 523
gatggaagtggtttacaaagactcc

SEQ ID NO: 204431 - DNA, 25 bp, Artificial
  probe
  misc_feature (1)..(25): SEQ ID NO: 5719; WAN024FFO_at; Start 438; Stop 462
tcatttcaaaacagtcgcacttttc

SEQ ID NO: 204432 - DNA, 25 bp, Artificial
  probe
  misc_feature (1)..(25): SEQ ID NO: 5719; WAN024FFO_at; Start 511; Stop 535
atagcactgattagtgcgggcgctg

SEQ ID NO: 204433 - DNA, 25 bp, Artificial
  probe
  misc_feature (1)..(25): SEQ ID NO: 5719; WAN024FFO_at; Start 127; Stop 151
ttgtcaacagcggttcaaaagcagg

SEQ ID NO: 204434 - DNA, 25 bp, Artificial
  probe
  misc_feature (1)..(25): SEQ ID NO: 5719; WAN024FFO_at; Start 148; Stop 172
caggatgctgttatctttttcaaga

SEQ ID NO: 204435 - DNA, 25 bp, Artificial
  probe
  misc_feature (1)..(25): SEQ ID NO: 5719; WAN024FFO_at; Start 569; Stop 593
tgggacaagaatggatgatggatca

SEQ ID NO: 204436 - DNA, 25 bp, Artificial
  probe
  misc_feature (1)..(25): SEQ ID NO: 5719; WAN024FFO_at; Start 91; Stop 115
cgtatagttctgatgatgattttga

SEQ ID NO: 204437 - DNA, 25 bp, Artificial
  probe
  misc_feature (1)..(25): SEQ ID NO: 5719; WAN024FFO_at; Start 244; Stop 268
aacctttcgcttttcatggtaggat

SEQ ID NO: 204438 - DNA, 25 bp, Artificial
  probe
  misc_feature (1)..(25): SEQ ID NO: 5719; WAN024FFO_at; Start 131; Stop 155
caacagcggttcaaaagcaggatgc

SEQ ID NO: 204439 - DNA, 25 bp, Artificial
  probe
  misc_feature (1)..(25): SEQ ID NO: 5719; WAN024FFO_at; Start 352; Stop 376
tatacaaggaaacgattggttgtca

SEQ ID NO: 204440 - DNA, 25 bp, Artificial
  probe
  misc_feature (1)..(25): SEQ ID NO: 5719; WAN024FFO_at; Start 162; Stop 186
ctttttcaagagagaattgatttca

SEQ ID NO: 204441 - DNA, 25 bp, Artificial
  probe
  misc_feature (1)..(25): SEQ ID NO: 5719; WAN024FFO_at; Start 304; Stop 328
gaccattaccatcacttgattcgct

SEQ ID NO: 204442 - DNA, 25 bp, Artificial
  probe
  misc_feature (1)..(25): SEQ ID NO: 5719; WAN024FFO_at; Start 479; Stop 503
taatgatgttgtacttactactgtc

SEQ ID NO: 204443 - DNA, 25 bp, Artificial
  probe
  misc_feature (1)..(25): SEQ ID NO: 5719; WAN024FFO_at; Start 257; Stop 281
tcatggtaggatggctctctgtcat

SEQ ID NO: 204444 - DNA, 25 bp, Artificial
  probe
  misc_feature (1)..(25): SEQ ID NO: 5719; WAN024FFO_at; Start 208; Stop 232
tctgaagcgaatttagaaatcccca

SEQ ID NO: 204445 - DNA, 25 bp, Artificial
  probe
  misc_feature (1)..(25): SEQ ID NO: 5719; WAN024FFO_at; Start 360; Stop 384
gaaacgattggttgtcatttctaaa

SEQ ID NO: 204446 - DNA, 25 bp, Artificial
  probe
  misc_feature (1)..(25): SEQ ID NO: 5719; WAN024FFO_at; Start 290; Stop 314
aaagtgatttggcagaccattacca

SEQ ID NO: 204447 - DNA, 25 bp, Artificial
  probe
  misc_feature (1)..(25): SEQ ID NO: 5719; WAN024FFO_at; Start 123; Stop 147
tctattgtcaacagcggttcaaaag

SEQ ID NO: 204448 - DNA, 25 bp, Artificial
  probe
  misc_feature (1)..(25): SEQ ID NO: 5719; WAN024FFO_at; Start 584; Stop 608
tgatggatcatattgtaacagtgta

SEQ ID NO: 204449 - DNA, 25 bp, Artificial
  probe
  misc_feature (1)..(25): SEQ ID NO: 5719; WAN024FFO_at; Start 269; Stop 293
ggctctctgtcattttacttgaaag

SEQ ID NO: 204450 - DNA, 25 bp, Artificial
  probe
  misc_feature (1)..(25): SEQ ID NO: 5719; WAN024FFO_at; Start 251; Stop 275
cgcttttcatggtaggatggctctc

SEQ ID NO: 204451 - DNA, 25 bp, Artificial
  probe
  misc_feature (1)..(25): SEQ ID NO: 5719; WAN024FFO_at; Start 194; Stop 218
cctataatgactattctgaagcgaa

SEQ ID NO: 204452 - DNA, 25 bp, Artificial
  probe
  misc_feature (1)..(25): SEQ ID NO: 5719; WAN024FFO_at; Start 300; Stop 324
ggcagaccattaccatcacttgatt

SEQ ID NO: 204453 - DNA, 25 bp, Artificial
  probe
  misc_feature (1)..(25): SEQ ID NO: 5719; WAN024FFO_at; Start 321; Stop 345
gattcgctatcaatcaagctccttt

SEQ ID NO: 204454 - DNA, 25 bp, Artificial
  probe
  misc_feature (1)..(25): SEQ ID NO: 5719; WAN024FFO_at; Start 645; Stop 669
tagtcgcttggaagagaaatttaag

SEQ ID NO: 204455 - DNA, 25 bp, Artificial
  probe
  misc_feature (1)..(25): SEQ ID NO: 5719; WAN024FFO_at; Start 335; Stop 359
caagctcctttttcgattatacaag

SEQ ID NO: 204456 - DNA, 25 bp, Artificial
  probe
  misc_feature (1)..(25): SEQ ID NO: 5719; WAN024FFO_at; Start 136; Stop 160
gcggttcaaaagcaggatgctgtta

SEQ ID NO: 204457 - DNA, 25 bp, Artificial
  probe
  misc_feature (1)..(25): SEQ ID NO: 5719; WAN024FFO_at; Start 79; Stop 103
gttttactacttcgtatagttctga

SEQ ID NO: 204458 - DNA, 25 bp, Artificial
  probe
  misc_feature (1)..(25): SEQ ID NO: 5719; WAN024FFO_at; Start 284; Stop 308
tacttgaaagtgatttggcagacca

SEQ ID NO: 204459 - DNA, 25 bp, Artificial
  probe
  misc_feature (1)..(25): SEQ ID NO: 5719; WAN024FFO_at; Start 348; Stop 372
cgattatacaaggaaacgattggtt

SEQ ID NO: 204460 - DNA, 25 bp, Artificial
  probe
  misc_feature (1)..(25): SEQ ID NO: 5719; WAN024FFO_at; Start 493; Stop 517
ttactactgtcttatctgatagcac

SEQ ID NO: 204461 - DNA, 25 bp, Artificial
  probe
  misc_feature (1)..(25): SEQ ID NO: 5719; WAN024FFO_at; Start 507; Stop 531
tctgatagcactgattagtgcgggc

SEQ ID NO: 204462 - DNA, 25 bp, Artificial
  probe
  misc_feature (1)..(25): SEQ ID NO: 5719; WAN024FFO_at; Start 266; Stop 290
gatggctctctgtcattttacttga

SEQ ID NO: 204463 - DNA, 25 bp, Artificial
  probe
  misc_feature (1)..(25): SEQ ID NO: 5719; WAN024FFO_at; Start 431; Stop 455
taggaattcatttcaaaacagtcgc

SEQ ID NO: 204464 - DNA, 25 bp, Artificial
  probe
  misc_feature (1)..(25): SEQ ID NO: 5719; WAN024FFO_at; Start 468; Stop 492
acttgctcagttaatgatgttgtac

SEQ ID NO: 204465 - DNA, 25 bp, Artificial
  probe
  misc_feature (1)..(25): SEQ ID NO: 7557; WAN024FFP_at; Start 126; Stop 150
gccaaaaactagcaagactttctgt

SEQ ID NO: 204466 - DNA, 25 bp, Artificial
  probe
  misc_feature (1)..(25): SEQ ID NO: 7557; WAN024FFP_at; Start 113; Stop 137
aaatggacagaatgccaaaaactag

SEQ ID NO: 204467 - DNA, 25 bp, Artificial
  probe
  misc_feature (1)..(25): SEQ ID NO: 7557; WAN024FFP_at; Start 111; Stop 135
caaaatggacagaatgccaaaaact

SEQ ID NO: 204468 - DNA, 25 bp, Artificial
  probe
  misc_feature (1)..(25): SEQ ID NO: 7557; WAN024FFP_at; Start 123; Stop 147
aatgccaaaaactagcaagactttc

SEQ ID NO: 204469 - DNA, 25 bp, Artificial
  probe
  misc_feature (1)..(25): SEQ ID NO: 7557; WAN024FFP_at; Start 5; Stop 29
caagaatcggcaaaatagcaaatag

SEQ ID NO: 204470 - DNA, 25 bp, Artificial
  probe
  misc_feature (1)..(25): SEQ ID NO: 7557; WAN024FFP_at; Start 104; Stop 128
aggccatcaaaatggacagaatgcc

SEQ ID NO: 204471 - DNA, 25 bp, Artificial
  probe
  misc_feature (1)..(25): SEQ ID NO: 7557; WAN024FFP_at; Start 119; Stop 143
acagaatgccaaaaactagcaagac

SEQ ID NO: 204472 - DNA, 25 bp, Artificial
  probe
  misc_feature (1)..(25): SEQ ID NO: 7557; WAN024FFP_at; Start 13; Stop 37
ggcaaaatagcaaataggataaata

SEQ ID NO: 204473 - DNA, 25 bp, Artificial
  probe
  misc_feature (1)..(25): SEQ ID NO: 7557; WAN024FFP_at; Start 4; Stop 28
ccaagaatcggcaaaatagcaaata

SEQ ID NO: 204474 - DNA, 25 bp, Artificial
  probe
  misc_feature (1)..(25): SEQ ID NO: 7557; WAN024FFP_at; Start 8; Stop 32
gaatcggcaaaatagcaaataggat

SEQ ID NO: 204475 - DNA, 25 bp, Artificial
  probe
  misc_feature (1)..(25): SEQ ID NO: 7557; WAN024FFP_at; Start 153; Stop 177
gatgaagaggtcaatcttccccccc

SEQ ID NO: 204476 - DNA, 25 bp, Artificial
  probe
  misc_feature (1)..(25): SEQ ID NO: 7557; WAN024FFP_at; Start 105; Stop 129
ggccatcaaaatggacagaatgcca

SEQ ID NO: 204477 - DNA, 25 bp, Artificial
  probe
  misc_feature (1)..(25): SEQ ID NO: 7557; WAN024FFP_at; Start 107; Stop 131
ccatcaaaatggacagaatgccaaa

SEQ ID NO: 204478 - DNA, 25 bp, Artificial
  probe
  misc_feature (1)..(25): SEQ ID NO: 7557; WAN024FFP_at; Start 3; Stop 27
gccaagaatcggcaaaatagcaaat

SEQ ID NO: 204479 - DNA, 25 bp, Artificial
  probe
  misc_feature (1)..(25): SEQ ID NO: 7557; WAN024FFP_at; Start 177; Stop 201
cccagaatcggactgccccaaggaa

SEQ ID NO: 204480 - DNA, 25 bp, Artificial
  probe
  misc_feature (1)..(25): SEQ ID NO: 7557; WAN024FFP_at; Start 148; Stop 172
tgtatgatgaagaggtcaatcttcc

SEQ ID NO: 204481 - DNA, 25 bp, Artificial
  probe
  misc_feature (1)..(25): SEQ ID NO: 7557; WAN024FFP_at; Start 125; Stop 149
tgccaaaaactagcaagactttctg

SEQ ID NO: 204482 - DNA, 25 bp, Artificial
  probe
  misc_feature (1)..(25): SEQ ID NO: 7557; WAN024FFP_at; Start 150; Stop 174
tatgatgaagaggtcaatcttcccc

SEQ ID NO: 204483 - DNA, 25 bp, Artificial
  probe
  misc_feature (1)..(25): SEQ ID NO: 7557; WAN024FFP_at; Start 178; Stop 202
ccagaatcggactgccccaaggaag

SEQ ID NO: 204484 - DNA, 25 bp, Artificial
  probe
  misc_feature (1)..(25): SEQ ID NO: 7557; WAN024FFP_at; Start 183; Stop 207
atcggactgccccaaggaagaaaga

SEQ ID NO: 204485 - DNA, 25 bp, Artificial
  probe
  misc_feature (1)..(25): SEQ ID NO: 7557; WAN024FFP_at; Start 120; Stop 144
cagaatgccaaaaactagcaagact

SEQ ID NO: 204486 - DNA, 25 bp, Artificial
  probe
  misc_feature (1)..(25): SEQ ID NO: 7557; WAN024FFP_at; Start 12; Stop 36
cggcaaaatagcaaataggataaat

SEQ ID NO: 204487 - DNA, 25 bp, Artificial
  probe
  misc_feature (1)..(25): SEQ ID NO: 7557; WAN024FFP_at; Start 6; Stop 30
aagaatcggcaaaatagcaaatagg

SEQ ID NO: 204488 - DNA, 25 bp, Artificial
  probe
  misc_feature (1)..(25): SEQ ID NO: 7557; WAN024FFP_at; Start 20; Stop 44
tagcaaataggataaataagttaat

SEQ ID NO: 204489 - DNA, 25 bp, Artificial
  probe
  misc_feature (1)..(25): SEQ ID NO: 7557; WAN024FFP_at; Start 186; Stop 210
ggactgccccaaggaagaaagaaga

SEQ ID NO: 204490 - DNA, 25 bp, Artificial
  probe
  misc_feature (1)..(25): SEQ ID NO: 7557; WAN024FFP_at; Start 122; Stop 146
gaatgccaaaaactagcaagacttt

SEQ ID NO: 204491 - DNA, 25 bp, Artificial
  probe
  misc_feature (1)..(25): SEQ ID NO: 7557; WAN024FFP_at; Start 15; Stop 39
caaaatagcaaataggataaataag

SEQ ID NO: 204492 - DNA, 25 bp, Artificial
  probe
  misc_feature (1)..(25): SEQ ID NO: 7557; WAN024FFP_at; Start 184; Stop 208
tcggactgccccaaggaagaaagaa

SEQ ID NO: 204493 - DNA, 25 bp, Artificial
  probe
  misc_feature (1)..(25): SEQ ID NO: 7557; WAN024FFP_at; Start 110; Stop 134
tcaaaatggacagaatgccaaaaac

SEQ ID NO: 204494 - DNA, 25 bp, Artificial
  probe
  misc_feature (1)..(25): SEQ ID NO: 7557; WAN024FFP_at; Start 187; Stop 211
gactgccccaaggaagaaagaagaa

SEQ ID NO: 204495 - DNA, 25 bp, Artificial
  probe
  misc_feature (1)..(25): SEQ ID NO: 7557; WAN024FFP_at; Start 108; Stop 132
catcaaaatggacagaatgccaaaa

SEQ ID NO: 204496 - DNA, 25 bp, Artificial
  probe
  misc_feature (1)..(25): SEQ ID NO: 7557; WAN024FFP_at; Start 11; Stop 35
tcggcaaaatagcaaataggataaa

SEQ ID NO: 204497 - DNA, 25 bp, Artificial
  probe
  misc_feature (1)..(25): SEQ ID NO: 7557; WAN024FFP_at; Start 106; Stop 130
gccatcaaaatggacagaatgccaa

SEQ ID NO: 204498 - DNA, 25 bp, Artificial
  probe
  misc_feature (1)..(25): SEQ ID NO: 7557; WAN024FFP_at; Start 185; Stop 209
cggactgccccaaggaagaaagaag

SEQ ID NO: 204499 - DNA, 25 bp, Artificial
  probe
  misc_feature (1)..(25): SEQ ID NO: 7642; WAN024FFQ_at; Start 167; Stop 191
tcctatttgctattttgccgattct

SEQ ID NO: 204500 - DNA, 25 bp, Artificial
  probe
  misc_feature (1)..(25): SEQ ID NO: 7642; WAN024FFQ_at; Start 129; Stop 153
attgatctgctgtctttctctttgg

SEQ ID NO: 204501 - DNA, 25 bp, Artificial
  probe
  misc_feature (1)..(25): SEQ ID NO: 7642; WAN024FFQ_at; Start 163; Stop 187
tttatcctatttgctattttgccga

SEQ ID NO: 204502 - DNA, 25 bp, Artificial
  probe
  misc_feature (1)..(25): SEQ ID NO: 7642; WAN024FFQ_at; Start 51; Stop 75
gaaagtcttgctagtttttggcatt

SEQ ID NO: 204503 - DNA, 25 bp, Artificial
  probe
  misc_feature (1)..(25): SEQ ID NO: 7642; WAN024FFQ_at; Start 132; Stop 156
gatctgctgtctttctctttggatt

SEQ ID NO: 204504 - DNA, 25 bp, Artificial
  probe
  misc_feature (1)..(25): SEQ ID NO: 7642; WAN024FFQ_at; Start 48; Stop 72
acagaaagtcttgctagtttttggc

SEQ ID NO: 204505 - DNA, 25 bp, Artificial
  probe
  misc_feature (1)..(25): SEQ ID NO: 7642; WAN024FFQ_at; Start 125; Stop 149
ttggattgatctgctgtctttctct

SEQ ID NO: 204506 - DNA, 25 bp, Artificial
  probe
  misc_feature (1)..(25): SEQ ID NO: 7642; WAN024FFQ_at; Start 122; Stop 146
tttttggattgatctgctgtctttc

SEQ ID NO: 204507 - DNA, 25 bp, Artificial
  probe
  misc_feature (1)..(25): SEQ ID NO: 7642; WAN024FFQ_at; Start 128; Stop 152
gattgatctgctgtctttctctttg

SEQ ID NO: 204508 - DNA, 25 bp, Artificial
  probe
  misc_feature (1)..(25): SEQ ID NO: 7642; WAN024FFQ_at; Start 69; Stop 93
tggcattctgtccattttgatggcc

SEQ ID NO: 204509 - DNA, 25 bp, Artificial
  probe
  misc_feature (1)..(25): SEQ ID NO: 7642; WAN024FFQ_at; Start 126; Stop 150
tggattgatctgctgtctttctctt

SEQ ID NO: 204510 - DNA, 25 bp, Artificial
  probe
  misc_feature (1)..(25): SEQ ID NO: 7642; WAN024FFQ_at; Start 54; Stop 78
agtcttgctagtttttggcattctg

SEQ ID NO: 204511 - DNA, 25 bp, Artificial
  probe
  misc_feature (1)..(25): SEQ ID NO: 7642; WAN024FFQ_at; Start 55; Stop 79
gtcttgctagtttttggcattctgt

SEQ ID NO: 204512 - DNA, 25 bp, Artificial
  probe
  misc_feature (1)..(25): SEQ ID NO: 7642; WAN024FFQ_at; Start 118; Stop 142
tttgtttttggattgatctgctgtc

SEQ ID NO: 204513 - DNA, 25 bp, Artificial
  probe
  misc_feature (1)..(25): SEQ ID NO: 7642; WAN024FFQ_at; Start 25; Stop 49
gggaagattgacctcttcatcatac

SEQ ID NO: 204514 - DNA, 25 bp, Artificial
  probe
  misc_feature (1)..(25): SEQ ID NO: 7642; WAN024FFQ_at; Start 49; Stop 73
cagaaagtcttgctagtttttggca

SEQ ID NO: 204515 - DNA, 25 bp, Artificial
  probe
  misc_feature (1)..(25): SEQ ID NO: 7642; WAN024FFQ_at; Start 161; Stop 185
tatttatcctatttgctattttgcc

SEQ ID NO: 204516 - DNA, 25 bp, Artificial
  probe
  misc_feature (1)..(25): SEQ ID NO: 7642; WAN024FFQ_at; Start 134; Stop 158
tctgctgtctttctctttggattaa

SEQ ID NO: 204517 - DNA, 25 bp, Artificial
  probe
  misc_feature (1)..(25): SEQ ID NO: 7642; WAN024FFQ_at; Start 67; Stop 91
tttggcattctgtccattttgatgg

SEQ ID NO: 204518 - DNA, 25 bp, Artificial
  probe
  misc_feature (1)..(25): SEQ ID NO: 7642; WAN024FFQ_at; Start 27; Stop 51
gaagattgacctcttcatcatacag

SEQ ID NO: 204519 - DNA, 25 bp, Artificial
  probe
  misc_feature (1)..(25): SEQ ID NO: 7642; WAN024FFQ_at; Start 130; Stop 154
ttgatctgctgtctttctctttgga

SEQ ID NO: 204520 - DNA, 25 bp, Artificial
  probe
  misc_feature (1)..(25): SEQ ID NO: 7642; WAN024FFQ_at; Start 135; Stop 159
ctgctgtctttctctttggattaac

SEQ ID NO: 204521 - DNA, 25 bp, Artificial
  probe
  misc_feature (1)..(25): SEQ ID NO: 7642; WAN024FFQ_at; Start 170; Stop 194
tatttgctattttgccgattcttgg

SEQ ID NO: 204522 - DNA, 25 bp, Artificial
  probe
  misc_feature (1)..(25): SEQ ID NO: 7642; WAN024FFQ_at; Start 124; Stop 148
tttggattgatctgctgtctttctc

SEQ ID NO: 204523 - DNA, 25 bp, Artificial
  probe
  misc_feature (1)..(25): SEQ ID NO: 7642; WAN024FFQ_at; Start 61; Stop 85
ctagtttttggcattctgtccattt

SEQ ID NO: 204524 - DNA, 25 bp, Artificial
  probe
  misc_feature (1)..(25): SEQ ID NO: 7642; WAN024FFQ_at; Start 70; Stop 94
ggcattctgtccattttgatggcct

SEQ ID NO: 204525 - DNA, 25 bp, Artificial
  probe
  misc_feature (1)..(25): SEQ ID NO: 7642; WAN024FFQ_at; Start 52; Stop 76
aaagtcttgctagtttttggcattc

SEQ ID NO: 204526 - DNA, 25 bp, Artificial
  probe
  misc_feature (1)..(25): SEQ ID NO: 7642; WAN024FFQ_at; Start 165; Stop 189
tatcctatttgctattttgccgatt

SEQ ID NO: 204527 - DNA, 25 bp, Artificial
  probe
  misc_feature (1)..(25): SEQ ID NO: 7642; WAN024FFQ_at; Start 64; Stop 88
gtttttggcattctgtccattttga

SEQ ID NO: 204528 - DNA, 25 bp, Artificial
  probe
  misc_feature (1)..(25): SEQ ID NO: 7642; WAN024FFQ_at; Start 53; Stop 77
aagtcttgctagtttttggcattct

SEQ ID NO: 204529 - DNA, 25 bp, Artificial
  probe
  misc_feature (1)..(25): SEQ ID NO: 7642; WAN024FFQ_at; Start 26; Stop 50
ggaagattgacctcttcatcataca

SEQ ID NO: 204530 - DNA, 25 bp, Artificial
  probe
  misc_feature (1)..(25): SEQ ID NO: 7642; WAN024FFQ_at; Start 131; Stop 155
tgatctgctgtctttctctttggat

SEQ ID NO: 204531 - DNA, 25 bp, Artificial
  probe
  misc_feature (1)..(25): SEQ ID NO: 7642; WAN024FFQ_at; Start 68; Stop 92
ttggcattctgtccattttgatggc

SEQ ID NO: 204532 - DNA, 25 bp, Artificial
  probe
  misc_feature (1)..(25): SEQ ID NO: 7642; WAN024FFQ_at; Start 120; Stop 144
tgtttttggattgatctgctgtctt

SEQ ID NO: 204533 - DNA, 25 bp, Artificial
  probe
  misc_feature (1)..(25): SEQ ID NO: 2397; WAN024FFR_at; Start 193; Stop 217
gacagccagatcagcagaactaaac

SEQ ID NO: 204534 - DNA, 25 bp, Artificial
  probe
  misc_feature (1)..(25): SEQ ID NO: 2397; WAN024FFR_at; Start 107; Stop 131
ttccaaaagctagcaagattttctg

SEQ ID NO: 204535 - DNA, 25 bp, Artificial
  probe
  misc_feature (1)..(25): SEQ ID NO: 2397; WAN024FFR_at; Start 86; Stop 110
aggccatgagaatggacagaattcc

SEQ ID NO: 204536 - DNA, 25 bp, Artificial
  probe
  misc_feature (1)..(25): SEQ ID NO: 2397; WAN024FFR_at; Start 172; Stop 196
tcccaagggataaagaagaaagaca

SEQ ID NO: 204537 - DNA, 25 bp, Artificial
  probe
  misc_feature (1)..(25): SEQ ID NO: 2397; WAN024FFR_at; Start 173; Stop 197
cccaagggataaagaagaaagacag

SEQ ID NO: 204538 - DNA, 25 bp, Artificial
  probe
  misc_feature (1)..(25): SEQ ID NO: 2397; WAN024FFR_at; Start 189; Stop 213
gaaagacagccagatcagcagaact

SEQ ID NO: 204539 - DNA, 25 bp, Artificial
  probe
  misc_feature (1)..(25): SEQ ID NO: 2397; WAN024FFR_at; Start 130; Stop 154
tgtatgatgaagatgtcaatcctta

SEQ ID NO: 204540 - DNA, 25 bp, Artificial
  probe
  misc_feature (1)..(25): SEQ ID NO: 2397; WAN024FFR_at; Start 190; Stop 214
aaagacagccagatcagcagaacta

SEQ ID NO: 204541 - DNA, 25 bp, Artificial
  probe
  misc_feature (1)..(25): SEQ ID NO: 2397; WAN024FFR_at; Start 185; Stop 209
agaagaaagacagccagatcagcag

SEQ ID NO: 204542 - DNA, 25 bp, Artificial
  probe
  misc_feature (1)..(25): SEQ ID NO: 2397; WAN024FFR_at; Start 101; Stop 125
acagaattccaaaagctagcaagat

SEQ ID NO: 204543 - DNA, 25 bp, Artificial
  probe
  misc_feature (1)..(25): SEQ ID NO: 2397; WAN024FFR_at; Start 174; Stop 198
ccaagggataaagaagaaagacagc

SEQ ID NO: 204544 - DNA, 25 bp, Artificial
  probe
  misc_feature (1)..(25): SEQ ID NO: 2397; WAN024FFR_at; Start 129; Stop 153
ctgtatgatgaagatgtcaatcctt

SEQ ID NO: 204545 - DNA, 25 bp, Artificial
  probe
  misc_feature (1)..(25): SEQ ID NO: 2397; WAN024FFR_at; Start 93; Stop 117
gagaatggacagaattccaaaagct

SEQ ID NO: 204546 - DNA, 25 bp, Artificial
  probe
  misc_feature (1)..(25): SEQ ID NO: 2397; WAN024FFR_at; Start 187; Stop 211
aagaaagacagccagatcagcagaa

SEQ ID NO: 204547 - DNA, 25 bp, Artificial
  probe
  misc_feature (1)..(25): SEQ ID NO: 2397; WAN024FFR_at; Start 95; Stop 119
gaatggacagaattccaaaagctag

SEQ ID NO: 204548 - DNA, 25 bp, Artificial
  probe
  misc_feature (1)..(25): SEQ ID NO: 2397; WAN024FFR_at; Start 176; Stop 200
aagggataaagaagaaagacagcca

SEQ ID NO: 204549 - DNA, 25 bp, Artificial
  probe
  misc_feature (1)..(25): SEQ ID NO: 2397; WAN024FFR_at; Start 180; Stop 204
gataaagaagaaagacagccagatc

SEQ ID NO: 204550 - DNA, 25 bp, Artificial
  probe
  misc_feature (1)..(25): SEQ ID NO: 2397; WAN024FFR_at; Start 183; Stop 207
aaagaagaaagacagccagatcagc

SEQ ID NO: 204551 - DNA, 25 bp, Artificial
  probe
  misc_feature (1)..(25): SEQ ID NO: 2397; WAN024FFR_at; Start 104; Stop 128
gaattccaaaagctagcaagatttt

SEQ ID NO: 204552 - DNA, 25 bp, Artificial
  probe
  misc_feature (1)..(25): SEQ ID NO: 2397; WAN024FFR_at; Start 170; Stop 194
tatcccaagggataaagaagaaaga

SEQ ID NO: 204553 - DNA, 25 bp, Artificial
  probe
  misc_feature (1)..(25): SEQ ID NO: 2397; WAN024FFR_at; Start 87; Stop 111
ggccatgagaatggacagaattcca

SEQ ID NO: 204554 - DNA, 25 bp, Artificial
  probe
  misc_feature (1)..(25): SEQ ID NO: 2397; WAN024FFR_at; Start 108; Stop 132
tccaaaagctagcaagattttctgt

SEQ ID NO: 204555 - DNA, 25 bp, Artificial
  probe
  misc_feature (1)..(25): SEQ ID NO: 2397; WAN024FFR_at; Start 2; Stop 26
tggcaaatgtgataaataagttaat

SEQ ID NO: 204556 - DNA, 25 bp, Artificial
  probe
  misc_feature (1)..(25): SEQ ID NO: 2397; WAN024FFR_at; Start 182; Stop 206
taaagaagaaagacagccagatcag

SEQ ID NO: 204557 - DNA, 25 bp, Artificial
  probe
  misc_feature (1)..(25): SEQ ID NO: 2397; WAN024FFR_at; Start 92; Stop 116
tgagaatggacagaattccaaaagc

SEQ ID NO: 204558 - DNA, 25 bp, Artificial
  probe
  misc_feature (1)..(25): SEQ ID NO: 2397; WAN024FFR_at; Start 179; Stop 203
ggataaagaagaaagacagccagat

SEQ ID NO: 204559 - DNA, 25 bp, Artificial
  probe
  misc_feature (1)..(25): SEQ ID NO: 2397; WAN024FFR_at; Start 188; Stop 212
agaaagacagccagatcagcagaac

SEQ ID NO: 204560 - DNA, 25 bp, Artificial
  probe
  misc_feature (1)..(25): SEQ ID NO: 2397; WAN024FFR_at; Start 191; Stop 215
aagacagccagatcagcagaactaa

SEQ ID NO: 204561 - DNA, 25 bp, Artificial
  probe
  misc_feature (1)..(25): SEQ ID NO: 2397; WAN024FFR_at; Start 175; Stop 199
caagggataaagaagaaagacagcc

SEQ ID NO: 204562 - DNA, 25 bp, Artificial
  probe
  misc_feature (1)..(25): SEQ ID NO: 2397; WAN024FFR_at; Start 178; Stop 202
gggataaagaagaaagacagccaga

SEQ ID NO: 204563 - DNA, 25 bp, Artificial
  probe
  misc_feature (1)..(25): SEQ ID NO: 2397; WAN024FFR_at; Start 184; Stop 208
aagaagaaagacagccagatcagca

SEQ ID NO: 204564 - DNA, 25 bp, Artificial
  probe
  misc_feature (1)..(25): SEQ ID NO: 2397; WAN024FFR_at; Start 89; Stop 113
ccatgagaatggacagaattccaaa

SEQ ID NO: 204565 - DNA, 25 bp, Artificial
  probe
  misc_feature (1)..(25): SEQ ID NO: 2397; WAN024FFR_at; Start 88; Stop 112
gccatgagaatggacagaattccaa

SEQ ID NO: 204566 - DNA, 25 bp, Artificial
  probe
  misc_feature (1)..(25): SEQ ID NO: 2397; WAN024FFR_at; Start 102; Stop 126
cagaattccaaaagctagcaagatt

SEQ ID NO: 204567 - DNA, 25 bp, Artificial
  probe
  misc_feature (1)..(25): SEQ ID NO: 2417; WAN024FFS_at; Start 69; Stop 93
gctgtctttcttctttatcccttgg

SEQ ID NO: 204568 - DNA, 25 bp, Artificial
  probe
  misc_feature (1)..(25): SEQ ID NO: 2417; WAN024FFS_at; Start 51; Stop 75
tttagttctgctgatctggctgtct

SEQ ID NO: 204569 - DNA, 25 bp, Artificial
  probe
  misc_feature (1)..(25): SEQ ID NO: 2417; WAN024FFS_at; Start 63; Stop 87
gatctggctgtctttcttctttatc

SEQ ID NO: 204570 - DNA, 25 bp, Artificial
  probe
  misc_feature (1)..(25): SEQ ID NO: 2417; WAN024FFS_at; Start 58; Stop 82
ctgctgatctggctgtctttcttct

SEQ ID NO: 204571 - DNA, 25 bp, Artificial
  probe
  misc_feature (1)..(25): SEQ ID NO: 2417; WAN024FFS_at; Start 59; Stop 83
tgctgatctggctgtctttcttctt

SEQ ID NO: 204572 - DNA, 25 bp, Artificial
  probe
  misc_feature (1)..(25): SEQ ID NO: 2417; WAN024FFS_at; Start 60; Stop 84
gctgatctggctgtctttcttcttt

SEQ ID NO: 204573 - DNA, 25 bp, Artificial
  probe
  misc_feature (1)..(25): SEQ ID NO: 2417; WAN024FFS_at; Start 56; Stop 80
ttctgctgatctggctgtctttctt

SEQ ID NO: 204574 - DNA, 25 bp, Artificial
  probe
  misc_feature (1)..(25): SEQ ID NO: 2417; WAN024FFS_at; Start 254; Stop 278
tcacatttgccattttgccgatttt

SEQ ID NO: 204575 - DNA, 25 bp, Artificial
  probe
  misc_feature (1)..(25): SEQ ID NO: 2417; WAN024FFS_at; Start 114; Stop 138
aaggattgacatcttcatcatacag

SEQ ID NO: 204576 - DNA, 25 bp, Artificial
  probe
  misc_feature (1)..(25): SEQ ID NO: 2417; WAN024FFS_at; Start 248; Stop 272
tatttatcacatttgccattttgcc

SEQ ID NO: 204577 - DNA, 25 bp, Artificial
  probe
  misc_feature (1)..(25): SEQ ID NO: 2417; WAN024FFS_at; Start 70; Stop 94
ctgtctttcttctttatcccttggg

SEQ ID NO: 204578 - DNA, 25 bp, Artificial
  probe
  misc_feature (1)..(25): SEQ ID NO: 2417; WAN024FFS_at; Start 241; Stop 265
attaacttatttatcacatttgcca

SEQ ID NO: 204579 - DNA, 25 bp, Artificial
  probe
  misc_feature (1)..(25): SEQ ID NO: 2417; WAN024FFS_at; Start 52; Stop 76
ttagttctgctgatctggctgtctt

SEQ ID NO: 204580 - DNA, 25 bp, Artificial
  probe
  misc_feature (1)..(25): SEQ ID NO: 2417; WAN024FFS_at; Start 65; Stop 89
tctggctgtctttcttctttatccc

SEQ ID NO: 204581 - DNA, 25 bp, Artificial
  probe
  misc_feature (1)..(25): SEQ ID NO: 2417; WAN024FFS_at; Start 270; Stop 294
gccgatttttggcaatctaactaat

SEQ ID NO: 204582 - DNA, 25 bp, Artificial
  probe
  misc_feature (1)..(25): SEQ ID NO: 2417; WAN024FFS_at; Start 53; Stop 77
tagttctgctgatctggctgtcttt

SEQ ID NO: 204583 - DNA, 25 bp, Artificial
  probe
  misc_feature (1)..(25): SEQ ID NO: 2417; WAN024FFS_at; Start 73; Stop 97
tctttcttctttatcccttgggata

SEQ ID NO: 204584 - DNA, 25 bp, Artificial
  probe
  misc_feature (1)..(25): SEQ ID NO: 2417; WAN024FFS_at; Start 255; Stop 279
cacatttgccattttgccgattttt

SEQ ID NO: 204585 - DNA, 25 bp, Artificial
  probe
  misc_feature (1)..(25): SEQ ID NO: 2417; WAN024FFS_at; Start 66; Stop 90
ctggctgtctttcttctttatccct

SEQ ID NO: 204586 - DNA, 25 bp, Artificial
  probe
  misc_feature (1)..(25): SEQ ID NO: 2417; WAN024FFS_at; Start 71; Stop 95
tgtctttcttctttatcccttggga

SEQ ID NO: 204587 - DNA, 25 bp, Artificial
  probe
  misc_feature (1)..(25): SEQ ID NO: 2417; WAN024FFS_at; Start 243; Stop 267
taacttatttatcacatttgccatt

SEQ ID NO: 204588 - DNA, 25 bp, Artificial
  probe
  misc_feature (1)..(25): SEQ ID NO: 2417; WAN024FFS_at; Start 252; Stop 276
tatcacatttgccattttgccgatt

SEQ ID NO: 204589 - DNA, 25 bp, Artificial
  probe
  misc_feature (1)..(25): SEQ ID NO: 2417; WAN024FFS_at; Start 50; Stop 74
gtttagttctgctgatctggctgtc

SEQ ID NO: 204590 - DNA, 25 bp, Artificial
  probe
  misc_feature (1)..(25): SEQ ID NO: 2417; WAN024FFS_at; Start 257; Stop 281
catttgccattttgccgatttttgg

SEQ ID NO: 204591 - DNA, 25 bp, Artificial
  probe
  misc_feature (1)..(25): SEQ ID NO: 2417; WAN024FFS_at; Start 68; Stop 92
ggctgtctttcttctttatcccttg

SEQ ID NO: 204592 - DNA, 25 bp, Artificial
  probe
  misc_feature (1)..(25): SEQ ID NO: 2417; WAN024FFS_at; Start 54; Stop 78
agttctgctgatctggctgtctttc

SEQ ID NO: 204593 - DNA, 25 bp, Artificial
  probe
  misc_feature (1)..(25): SEQ ID NO: 2417; WAN024FFS_at; Start 256; Stop 280
acatttgccattttgccgatttttg

SEQ ID NO: 204594 - DNA, 25 bp, Artificial
  probe
  misc_feature (1)..(25): SEQ ID NO: 2417; WAN024FFS_at; Start 61; Stop 85
ctgatctggctgtctttcttcttta

SEQ ID NO: 204595 - DNA, 25 bp, Artificial
  probe
  misc_feature (1)..(25): SEQ ID NO: 2417; WAN024FFS_at; Start 250; Stop 274
tttatcacatttgccattttgccga

SEQ ID NO: 204596 - DNA, 25 bp, Artificial
  probe
  misc_feature (1)..(25): SEQ ID NO: 2417; WAN024FFS_at; Start 55; Stop 79
gttctgctgatctggctgtctttct

SEQ ID NO: 204597 - DNA, 25 bp, Artificial
  probe
  misc_feature (1)..(25): SEQ ID NO: 2417; WAN024FFS_at; Start 266; Stop 290
ttttgccgatttttggcaatctaac

SEQ ID NO: 204598 - DNA, 25 bp, Artificial
  probe
  misc_feature (1)..(25): SEQ ID NO: 2417; WAN024FFS_at; Start 268; Stop 292
ttgccgatttttggcaatctaacta

SEQ ID NO: 204599 - DNA, 25 bp, Artificial
  probe
  misc_feature (1)..(25): SEQ ID NO: 2417; WAN024FFS_at; Start 249; Stop 273
atttatcacatttgccattttgccg

SEQ ID NO: 204600 - DNA, 25 bp, Artificial
  probe
  misc_feature (1)..(25): SEQ ID NO: 2417; WAN024FFS_at; Start 113; Stop 137
taaggattgacatcttcatcataca

SEQ ID NO: 204601 - DNA, 25 bp, Artificial
  probe
  misc_feature (1)..(25): SEQ ID NO: 1428; WAN024FFT_at; Start 56; Stop 80
agcttgatgtcggtaccacgacccg

SEQ ID NO: 204602 - DNA, 25 bp, Artificial
  probe
  misc_feature (1)..(25): SEQ ID NO: 1428; WAN024FFT_at; Start 103; Stop 127
ggcaccacgttgaccagcattcatg

SEQ ID NO: 204603 - DNA, 25 bp, Artificial
  probe
  misc_feature (1)..(25): SEQ ID NO: 1428; WAN024FFT_at; Start 62; Stop 86
atgtcggtaccacgacccgccatgt

SEQ ID NO: 204604 - DNA, 25 bp, Artificial
  probe
  misc_feature (1)..(25): SEQ ID NO: 1428; WAN024FFT_at; Start 127; Stop 151
gatgatttgggcttctctatagtgg

SEQ ID NO: 204605 - DNA, 25 bp, Artificial
  probe
  misc_feature (1)..(25): SEQ ID NO: 1428; WAN024FFT_at; Start 44; Stop 68
acaccttcaccaagcttgatgtcgg

SEQ ID NO: 204606 - DNA, 25 bp, Artificial
  probe
  misc_feature (1)..(25): SEQ ID NO: 1428; WAN024FFT_at; Start 174; Stop 198
gaggaacaccagctgcaaccaattt

SEQ ID NO: 204607 - DNA, 25 bp, Artificial
  probe
  misc_feature (1)..(25): SEQ ID NO: 1428; WAN024FFT_at; Start 3; Stop 27
gacgttctgtaccaataacacaaag

SEQ ID NO: 204608 - DNA, 25 bp, Artificial
  probe
  misc_feature (1)..(25): SEQ ID NO: 1428; WAN024FFT_at; Start 108; Stop 132
cacgttgaccagcattcatgatgat

SEQ ID NO: 204609 - DNA, 25 bp, Artificial
  probe
  misc_feature (1)..(25): SEQ ID NO: 1428; WAN024FFT_at; Start 237; Stop 261
caaccaagacaggttgacccttttg

SEQ ID NO: 204610 - DNA, 25 bp, Artificial
  probe
  misc_feature (1)..(25): SEQ ID NO: 1428; WAN024FFT_at; Start 162; Stop 186
tcaagacttcgtgaggaacaccagc

SEQ ID NO: 204611 - DNA, 25 bp, Artificial
  probe
  misc_feature (1)..(25): SEQ ID NO: 1428; WAN024FFT_at; Start 182; Stop 206
ccagctgcaaccaatttcttagaaa

SEQ ID NO: 204612 - DNA, 25 bp, Artificial
  probe
  misc_feature (1)..(25): SEQ ID NO: 1428; WAN024FFT_at; Start 260; Stop 284
tggtaacgagccttaacgtcttcga

SEQ ID NO: 204613 - DNA, 25 bp, Artificial
  probe
  misc_feature (1)..(25): SEQ ID NO: 1428; WAN024FFT_at; Start 82; Stop 106
catgttggttgcgatggtaacggca

SEQ ID NO: 204614 - DNA, 25 bp, Artificial
  probe
  misc_feature (1)..(25): SEQ ID NO: 1428; WAN024FFT_at; Start 119; Stop 143
gcattcatgatgatttgggcttctc

SEQ ID NO: 204615 - DNA, 25 bp, Artificial
  probe
  misc_feature (1)..(25): SEQ ID NO: 1428; WAN024FFT_at; Start 18; Stop 42
taacacaaagtcctccaagttcacg

SEQ ID NO: 204616 - DNA, 25 bp, Artificial
  probe
  misc_feature (1)..(25): SEQ ID NO: 1428; WAN024FFT_at; Start 87; Stop 111
tggttgcgatggtaacggcaccacg

SEQ ID NO: 204617 - DNA, 25 bp, Artificial
  probe
  misc_feature (1)..(25): SEQ ID NO: 1428; WAN024FFT_at; Start 220; Stop 244
ttcaaccgctactgtaccaaccaag

SEQ ID NO: 204618 - DNA, 25 bp, Artificial
  probe
  misc_feature (1)..(25): SEQ ID NO: 1428; WAN024FFT_at; Start 136; Stop 160
ggcttctctatagtggtttttggca

SEQ ID NO: 204619 - DNA, 25 bp, Artificial
  probe
  misc_feature (1)..(25): SEQ ID NO: 1428; WAN024FFT_at; Start 300; Stop 324
tagattcgatacttgcataaagaag

SEQ ID NO: 204620 - DNA, 25 bp, Artificial
  probe
  misc_feature (1)..(25): SEQ ID NO: 1428; WAN024FFT_at; Start 51; Stop 75
caccaagcttgatgtcggtaccacg

SEQ ID NO: 204621 - DNA, 25 bp, Artificial
  probe
  misc_feature (1)..(25): SEQ ID NO: 1428; WAN024FFT_at; Start 227; Stop 251
gctactgtaccaaccaagacaggtt

SEQ ID NO: 204622 - DNA, 25 bp, Artificial
  probe
  misc_feature (1)..(25): SEQ ID NO: 1428; WAN024FFT_at; Start 72; Stop 96
cacgacccgccatgttggttgcgat

SEQ ID NO: 204623 - DNA, 25 bp, Artificial
  probe
  misc_feature (1)..(25): SEQ ID NO: 1428; WAN024FFT_at; Start 306; Stop 330
cgatacttgcataaagaaggtctga

SEQ ID NO: 204624 - DNA, 25 bp, Artificial
  probe
  misc_feature (1)..(25): SEQ ID NO: 1428; WAN024FFT_at; Start 94; Stop 118
gatggtaacggcaccacgttgacca

SEQ ID NO: 204625 - DNA, 25 bp, Artificial
  probe
  misc_feature (1)..(25): SEQ ID NO: 1428; WAN024FFT_at; Start 23; Stop 47
caaagtcctccaagttcacgaacac

SEQ ID NO: 204626 - DNA, 25 bp, Artificial
  probe
  misc_feature (1)..(25): SEQ ID NO: 1428; WAN024FFT_at; Start 144; Stop 168
tatagtggtttttggcattcaagac

SEQ ID NO: 204627 - DNA, 25 bp, Artificial
  probe
  misc_feature (1)..(25): SEQ ID NO: 1428; WAN024FFT_at; Start 209; Stop 233
tagtcactagtttcaaccgctactg

SEQ ID NO: 204628 - DNA, 25 bp, Artificial
  probe
  misc_feature (1)..(25): SEQ ID NO: 1428; WAN024FFT_at; Start 156; Stop 180
tggcattcaagacttcgtgaggaac

SEQ ID NO: 204629 - DNA, 25 bp, Artificial
  probe
  misc_feature (1)..(25): SEQ ID NO: 1428; WAN024FFT_at; Start 10; Stop 34
tgtaccaataacacaaagtcctcca

SEQ ID NO: 204630 - DNA, 25 bp, Artificial
  probe
  misc_feature (1)..(25): SEQ ID NO: 1428; WAN024FFT_at; Start 285; Stop 309
caaccgctttaaacttagattcgat

SEQ ID NO: 204631 - DNA, 25 bp, Artificial
  probe
  misc_feature (1)..(25): SEQ ID NO: 1428; WAN024FFT_at; Start 33; Stop 57
caagttcacgaacaccttcaccaag

SEQ ID NO: 204632 - DNA, 25 bp, Artificial
  probe
  misc_feature (1)..(25): SEQ ID NO: 1428; WAN024FFT_at; Start 203; Stop 227
gaaatgtagtcactagtttcaaccg

SEQ ID NO: 204633 - DNA, 25 bp, Artificial
  probe
  misc_feature (1)..(25): SEQ ID NO: 1428; WAN024FFT_at; Start 267; Stop 291
gagccttaacgtcttcgacaaccgc

SEQ ID NO: 204634 - DNA, 25 bp, Artificial
  probe
  misc_feature (1)..(25): SEQ ID NO: 1428; WAN024FFT_at; Start 166; Stop 190
gacttcgtgaggaacaccagctgca

SEQ ID NO: 204635 - DNA, 25 bp, Artificial
  probe
  misc_feature (1)..(25): SEQ ID NO: 5865; WAN024FFU_at; Start 73; Stop 97
caagtcacgatctgcagtgatgaca

SEQ ID NO: 204636 - DNA, 25 bp, Artificial
  probe
  misc_feature (1)..(25): SEQ ID NO: 5865; WAN024FFU_at; Start 209; Stop 233
tcaacctgacgcgtcaacatgcgag

SEQ ID NO: 204637 - DNA, 25 bp, Artificial
  probe
  misc_feature (1)..(25): SEQ ID NO: 5865; WAN024FFU_at; Start 197; Stop 221
ttctgagctgcttcaacctgacgcg

SEQ ID NO: 204638 - DNA, 25 bp, Artificial
  probe
  misc_feature (1)..(25): SEQ ID NO: 5865; WAN024FFU_at; Start 184; Stop 208
tccttcgacacgtttctgagctgct

SEQ ID NO: 204639 - DNA, 25 bp, Artificial
  probe
  misc_feature (1)..(25): SEQ ID NO: 5865; WAN024FFU_at; Start 189; Stop 213
cgacacgtttctgagctgcttcaac

SEQ ID NO: 204640 - DNA, 25 bp, Artificial
  probe
  misc_feature (1)..(25): SEQ ID NO: 5865; WAN024FFU_at; Start 21; Stop 45
catcaacgacacgttcaatcgtgcg

SEQ ID NO: 204641 - DNA, 25 bp, Artificial
  probe
  misc_feature (1)..(25): SEQ ID NO: 5865; WAN024FFU_at; Start 111; Stop 135
catagataatctcacgttgttcacg

SEQ ID NO: 204642 - DNA, 25 bp, Artificial
  probe
  misc_feature (1)..(25): SEQ ID NO: 5865; WAN024FFU_at; Start 222; Stop 246
tcaacatgcgagactcaatggcctc

SEQ ID NO: 204643 - DNA, 25 bp, Artificial
  probe
  misc_feature (1)..(25): SEQ ID NO: 5865; WAN024FFU_at; Start 267; Stop 291
caaagattcccttcaagcgttcaga

SEQ ID NO: 204644 - DNA, 25 bp, Artificial
  probe
  misc_feature (1)..(25): SEQ ID NO: 5865; WAN024FFU_at; Start 65; Stop 89
tcaggtgccaagtcacgatctgcag

SEQ ID NO: 204645 - DNA, 25 bp, Artificial
  probe
  misc_feature (1)..(25): SEQ ID NO: 5865; WAN024FFU_at; Start 233; Stop 257
gactcaatggcctcttcagacatgt

SEQ ID NO: 204646 - DNA, 25 bp, Artificial
  probe
  misc_feature (1)..(25): SEQ ID NO: 5865; WAN024FFU_at; Start 87; Stop 111
cagtgatgacatcgtaacgttgagc

SEQ ID NO: 204647 - DNA, 25 bp, Artificial
  probe
  misc_feature (1)..(25): SEQ ID NO: 5865; WAN024FFU_at; Start 144; Stop 168
catcgtattgaaggacttgtttacg

SEQ ID NO: 204648 - DNA, 25 bp, Artificial
  probe
  misc_feature (1)..(25): SEQ ID NO: 5865; WAN024FFU_at; Start 91; Stop 115
gatgacatcgtaacgttgagcatag

SEQ ID NO: 204649 - DNA, 25 bp, Artificial
  probe
  misc_feature (1)..(25): SEQ ID NO: 5865; WAN024FFU_at; Start 4; Stop 28
tttggcacgcgcatgaccatcaacg

SEQ ID NO: 204650 - DNA, 25 bp, Artificial
  probe
  misc_feature (1)..(25): SEQ ID NO: 5865; WAN024FFU_at; Start 263; Stop 287
cgttcaaagattcccttcaagcgtt

SEQ ID NO: 204651 - DNA, 25 bp, Artificial
  probe
  misc_feature (1)..(25): SEQ ID NO: 5865; WAN024FFU_at; Start 299; Stop 323
cgtttcatcaaatcatcttcaagag

SEQ ID NO: 204652 - DNA, 25 bp, Artificial
  probe
  misc_feature (1)..(25): SEQ ID NO: 5865; WAN024FFU_at; Start 122; Stop 146
tcacgttgttcacgcatgacatcat

SEQ ID NO: 204653 - DNA, 25 bp, Artificial
  probe
  misc_feature (1)..(25): SEQ ID NO: 5865; WAN024FFU_at; Start 216; Stop 240
gacgcgtcaacatgcgagactcaat

SEQ ID NO: 204654 - DNA, 25 bp, Artificial
  probe
  misc_feature (1)..(25): SEQ ID NO: 5865; WAN024FFU_at; Start 136; Stop 160
catgacatcatcgtattgaaggact

SEQ ID NO: 204655 - DNA, 25 bp, Artificial
  probe
  misc_feature (1)..(25): SEQ ID NO: 5865; WAN024FFU_at; Start 303; Stop 327
tcatcaaatcatcttcaagagatag

SEQ ID NO: 204656 - DNA, 25 bp, Artificial
  probe
  misc_feature (1)..(25): SEQ ID NO: 5865; WAN024FFU_at; Start 59; Stop 83
tgaatttcaggtgccaagtcacgat

SEQ ID NO: 204657 - DNA, 25 bp, Artificial
  probe
  misc_feature (1)..(25): SEQ ID NO: 5865; WAN024FFU_at; Start 13; Stop 37
cgcatgaccatcaacgacacgttca

SEQ ID NO: 204658 - DNA, 25 bp, Artificial
  probe
  misc_feature (1)..(25): SEQ ID NO: 5865; WAN024FFU_at; Start 201; Stop 225
gagctgcttcaacctgacgcgtcaa

SEQ ID NO: 204659 - DNA, 25 bp, Artificial
  probe
  misc_feature (1)..(25): SEQ ID NO: 5865; WAN024FFU_at; Start 68; Stop 92
ggtgccaagtcacgatctgcagtga

SEQ ID NO: 204660 - DNA, 25 bp, Artificial
  probe
  misc_feature (1)..(25): SEQ ID NO: 5865; WAN024FFU_at; Start 178; Stop 202
gttatttccttcgacacgtttctga

SEQ ID NO: 204661 - DNA, 25 bp, Artificial
  probe
  misc_feature (1)..(25): SEQ ID NO: 5865; WAN024FFU_at; Start 98; Stop 122
tcgtaacgttgagcatagataatct

SEQ ID NO: 204662 - DNA, 25 bp, Artificial
  probe
  misc_feature (1)..(25): SEQ ID NO: 5865; WAN024FFU_at; Start 271; Stop 295
gattcccttcaagcgttcagaacca

SEQ ID NO: 204663 - DNA, 25 bp, Artificial
  probe
  misc_feature (1)..(25): SEQ ID NO: 5865; WAN024FFU_at; Start 81; Stop 105
gatctgcagtgatgacatcgtaacg

SEQ ID NO: 204664 - DNA, 25 bp, Artificial
  probe
  misc_feature (1)..(25): SEQ ID NO: 5865; WAN024FFU_at; Start 126; Stop 150
gttgttcacgcatgacatcatcgta

SEQ ID NO: 204665 - DNA, 25 bp, Artificial
  probe
  misc_feature (1)..(25): SEQ ID NO: 5865; WAN024FFU_at; Start 226; Stop 250
catgcgagactcaatggcctcttca

SEQ ID NO: 204666 - DNA, 25 bp, Artificial
  probe
  misc_feature (1)..(25): SEQ ID NO: 5865; WAN024FFU_at; Start 30; Stop 54
cacgttcaatcgtgcgtttgatcat

SEQ ID NO: 204667 - DNA, 25 bp, Artificial
  probe
  misc_feature (1)..(25): SEQ ID NO: 5865; WAN024FFU_at; Start 283; Stop 307
gcgttcagaaccaaaacgtttcatc

SEQ ID NO: 204668 - DNA, 25 bp, Artificial
  probe
  misc_feature (1)..(25): SEQ ID NO: 5865; WAN024FFU_at; Start 115; Stop 139
gataatctcacgttgttcacgcatg

SEQ ID NO: 204669 - DNA, 25 bp, Artificial
  probe
  misc_feature (1)..(25): SEQ ID NO: 5755; WAN024FFV_at; Start 152; Stop 176
gcctgtggtctttcttgttcatgaa

SEQ ID NO: 204670 - DNA, 25 bp, Artificial
  probe
  misc_feature (1)..(25): SEQ ID NO: 5755; WAN024FFV_at; Start 94; Stop 118
catacttgcttggtgagcagcgata

SEQ ID NO: 204671 - DNA, 25 bp, Artificial
  probe
  misc_feature (1)..(25): SEQ ID NO: 5755; WAN024FFV_at; Start 253; Stop 277
tgcctgatactcaacaacagggttg

SEQ ID NO: 204672 - DNA, 25 bp, Artificial
  probe
  misc_feature (1)..(25): SEQ ID NO: 5755; WAN024FFV_at; Start 242; Stop 266
cggaaaccttctgcctgatactcaa

SEQ ID NO: 204673 - DNA, 25 bp, Artificial
  probe
  misc_feature (1)..(25): SEQ ID NO: 5755; WAN024FFV_at; Start 88; Stop 112
ttctggcatacttgcttggtgagca

SEQ ID NO: 204674 - DNA, 25 bp, Artificial
  probe
  misc_feature (1)..(25): SEQ ID NO: 5755; WAN024FFV_at; Start 75; Stop 99
tcaaatccaaatcttctggcatact

SEQ ID NO: 204675 - DNA, 25 bp, Artificial
  probe
  misc_feature (1)..(25): SEQ ID NO: 5755; WAN024FFV_at; Start 139; Stop 163
gatatgacgttctgcctgtggtctt

SEQ ID NO: 204676 - DNA, 25 bp, Artificial
  probe
  misc_feature (1)..(25): SEQ ID NO: 5755; WAN024FFV_at; Start 273; Stop 297
ggttgttctgagcatagccacgaag

SEQ ID NO: 204677 - DNA, 25 bp, Artificial
  probe
  misc_feature (1)..(25): SEQ ID NO: 5755; WAN024FFV_at; Start 123; Stop 147
gagtcgctgttgtactgatatgacg

SEQ ID NO: 204678 - DNA, 25 bp, Artificial
  probe
  misc_feature (1)..(25): SEQ ID NO: 5755; WAN024FFV_at; Start 309; Stop 333
tacgcaattgatcaagggcatcgat

SEQ ID NO: 204679 - DNA, 25 bp, Artificial
  probe
  misc_feature (1)..(25): SEQ ID NO: 5755; WAN024FFV_at; Start 221; Stop 245
ccaatcatatcattaaacatacgga

SEQ ID NO: 204680 - DNA, 25 bp, Artificial
  probe
  misc_feature (1)..(25): SEQ ID NO: 5755; WAN024FFV_at; Start 25; Stop 49
aaatttcttaccagaaccacatggg

SEQ ID NO: 204681 - DNA, 25 bp, Artificial
  probe
  misc_feature (1)..(25): SEQ ID NO: 5755; WAN024FFV_at; Start 335; Stop 359
tgatctgtccacttgttatccacca

SEQ ID NO: 204682 - DNA, 25 bp, Artificial
  probe
  misc_feature (1)..(25): SEQ ID NO: 5755; WAN024FFV_at; Start 206; Stop 230
tcaaactcaatcgaaccaatcatat

SEQ ID NO: 204683 - DNA, 25 bp, Artificial
  probe
  misc_feature (1)..(25): SEQ ID NO: 5755; WAN024FFV_at; Start 42; Stop 66
cacatgggcaaagttcattgcgtcc

SEQ ID NO: 204684 - DNA, 25 bp, Artificial
  probe
  misc_feature (1)..(25): SEQ ID NO: 5755; WAN024FFV_at; Start 174; Stop 198
gaatttgtgctttcatcatcaagcg

SEQ ID NO: 204685 - DNA, 25 bp, Artificial
  probe
  misc_feature (1)..(25): SEQ ID NO: 5755; WAN024FFV_at; Start 279; Stop 303
tctgagcatagccacgaagtccaac

SEQ ID NO: 204686 - DNA, 25 bp, Artificial
  probe
  misc_feature (1)..(25): SEQ ID NO: 5755; WAN024FFV_at; Start 304; Stop 328
cgcgttacgcaattgatcaagggca

SEQ ID NO: 204687 - DNA, 25 bp, Artificial
  probe
  misc_feature (1)..(25): SEQ ID NO: 5755; WAN024FFV_at; Start 184; Stop 208
tttcatcatcaagcgtgtcacatca

SEQ ID NO: 204688 - DNA, 25 bp, Artificial
  probe
  misc_feature (1)..(25): SEQ ID NO: 5755; WAN024FFV_at; Start 325; Stop 349
ggcatcgatatgatctgtccacttg

SEQ ID NO: 204689 - DNA, 25 bp, Artificial
  probe
  misc_feature (1)..(25): SEQ ID NO: 5755; WAN024FFV_at; Start 291; Stop 315
cacgaagtccaaccgcgttacgcaa

SEQ ID NO: 204690 - DNA, 25 bp, Artificial
  probe
  misc_feature (1)..(25): SEQ ID NO: 5755; WAN024FFV_at; Start 33; Stop 57
taccagaaccacatgggcaaagttc

SEQ ID NO: 204691 - DNA, 25 bp, Artificial
  probe
  misc_feature (1)..(25): SEQ ID NO: 5755; WAN024FFV_at; Start 234; Stop 258
taaacatacggaaaccttctgcctg

SEQ ID NO: 204692 - DNA, 25 bp, Artificial
  probe
  misc_feature (1)..(25): SEQ ID NO: 5755; WAN024FFV_at; Start 135; Stop 159
tactgatatgacgttctgcctgtgg

SEQ ID NO: 204693 - DNA, 25 bp, Artificial
  probe
  misc_feature (1)..(25): SEQ ID NO: 5755; WAN024FFV_at; Start 114; Stop 138
cgatattgcgagtcgctgttgtact

SEQ ID NO: 204694 - DNA, 25 bp, Artificial
  probe
  misc_feature (1)..(25): SEQ ID NO: 5755; WAN024FFV_at; Start 342; Stop 366
tccacttgttatccaccactcgtag

SEQ ID NO: 204695 - DNA, 25 bp, Artificial
  probe
  misc_feature (1)..(25): SEQ ID NO: 5755; WAN024FFV_at; Start 49; Stop 73
gcaaagttcattgcgtccaatctgg

SEQ ID NO: 204696 - DNA, 25 bp, Artificial
  probe
  misc_feature (1)..(25): SEQ ID NO: 5755; WAN024FFV_at; Start 103; Stop 127
ttggtgagcagcgatattgcgagtc

SEQ ID NO: 204697 - DNA, 25 bp, Artificial
  probe
  misc_feature (1)..(25): SEQ ID NO: 5755; WAN024FFV_at; Start 320; Stop 344
tcaagggcatcgatatgatctgtcc

SEQ ID NO: 204698 - DNA, 25 bp, Artificial
  probe
  misc_feature (1)..(25): SEQ ID NO: 5755; WAN024FFV_at; Start 82; Stop 106
caaatcttctggcatacttgcttgg

SEQ ID NO: 204699 - DNA, 25 bp, Artificial
  probe
  misc_feature (1)..(25): SEQ ID NO: 5755; WAN024FFV_at; Start 159; Stop 183
gtctttcttgttcatgaatttgtgc

SEQ ID NO: 204700 - DNA, 25 bp, Artificial
  probe
  misc_feature (1)..(25): SEQ ID NO: 5755; WAN024FFV_at; Start 196; Stop 220
gcgtgtcacatcaaactcaatcgaa

SEQ ID NO: 204701 - DNA, 25 bp, Artificial
  probe
  misc_feature (1)..(25): SEQ ID NO: 5755; WAN024FFV_at; Start 286; Stop 310
atagccacgaagtccaaccgcgtta

SEQ ID NO: 204702 - DNA, 25 bp, Artificial
  probe
  misc_feature (1)..(25): SEQ ID NO: 5755; WAN024FFV_at; Start 267; Stop 291
caacagggttgttctgagcatagcc

SEQ ID NO: 204703 - DNA, 25 bp, Artificial
  probe
  misc_feature (1)..(25): SEQ ID NO: 2489; WAN024FFW_at; Start 275; Stop 299
ttcaccatggtgacgtgccagagat

SEQ ID NO: 204704 - DNA, 25 bp, Artificial
  probe
  misc_feature (1)..(25): SEQ ID NO: 2489; WAN024FFW_at; Start 2222; Stop 2246
gctatgctcagaacaaccctgttgt

SEQ ID NO: 204705 - DNA, 25 bp, Artificial
  probe
  misc_feature (1)..(25): SEQ ID NO: 2489; WAN024FFW_at; Start 2442; Stop 2466
gattggacgcaatgaactttgccca

SEQ ID NO: 204706 - DNA, 25 bp, Artificial
  probe
  misc_feature (1)..(25): SEQ ID NO: 2489; WAN024FFW_at; Start 1455; Stop 1479
caacatggcgggtcgtggtaccgac

SEQ ID NO: 204707 - DNA, 25 bp, Artificial
  probe
  misc_feature (1)..(25): SEQ ID NO: 2489; WAN024FFW_at; Start 960; Stop 984
tacaggtcgtaccatggaaggtcgt

SEQ ID NO: 204708 - DNA, 25 bp, Artificial
  probe
  misc_feature (1)..(25): SEQ ID NO: 2489; WAN024FFW_at; Start 795; Stop 819
gattgacagggctgaaagctacttc

SEQ ID NO: 204709 - DNA, 25 bp, Artificial
  probe
  misc_feature (1)..(25): SEQ ID NO: 2489; WAN024FFW_at; Start 631; Stop 655
tctatcttgattgacgaggctcgta

SEQ ID NO: 204710 - DNA, 25 bp, Artificial
  probe
  misc_feature (1)..(25): SEQ ID NO: 2489; WAN024FFW_at; Start 696; Stop 720
tcagttgtatcacatggcagaccac

SEQ ID NO: 204711 - DNA, 25 bp, Artificial
  probe
  misc_feature (1)..(25): SEQ ID NO: 2489; WAN024FFW_at; Start 2336; Stop 2360
ttcatgaacaagaaagaccacaggc

SEQ ID NO: 204712 - DNA, 25 bp, Artificial
  probe
  misc_feature (1)..(25): SEQ ID NO: 2489; WAN024FFW_at; Start 1010; Stop 1034
ctattgaagccaaagaaggtgtgcc

SEQ ID NO: 204713 - DNA, 25 bp, Artificial
  probe
  misc_feature (1)..(25): SEQ ID NO: 2489; WAN024FFW_at; Start 1416; Stop 1440
catgaatgctggtcaacgtggtgcc

SEQ ID NO: 204714 - DNA, 25 bp, Artificial
  probe
  misc_feature (1)..(25): SEQ ID NO: 2489; WAN024FFW_at; Start 994; Stop 1018
gatggattgcaccaagctattgaag

SEQ ID NO: 204715 - DNA, 25 bp, Artificial
  probe
  misc_feature (1)..(25): SEQ ID NO: 2489; WAN024FFW_at; Start 1357; Stop 1381
gctggtgttcctcacgaagtcttga

SEQ ID NO: 204716 - DNA, 25 bp, Artificial
  probe
  misc_feature (1)..(25): SEQ ID NO: 2489; WAN024FFW_at; Start 1577; Stop 1601
gttcaggtcgtcaaggagatccagg

SEQ ID NO: 204717 - DNA, 25 bp, Artificial
  probe
  misc_feature (1)..(25): SEQ ID NO: 2489; WAN024FFW_at; Start 2293; Stop 2317
tcgattgagtttgatgtgacacgct

SEQ ID NO: 204718 - DNA, 25 bp, Artificial
  probe
  misc_feature (1)..(25): SEQ ID NO: 2489; WAN024FFW_at; Start 2400; Stop 2424
tgctcaccaagcaagtatgccagaa

SEQ ID NO: 204719 - DNA, 25 bp, Artificial
  probe
  misc_feature (1)..(25): SEQ ID NO: 2489; WAN024FFW_at; Start 537; Stop 561
aatcggatttgactaccttcgtgac

SEQ ID NO: 204720 - DNA, 25 bp, Artificial
  probe
  misc_feature (1)..(25): SEQ ID NO: 2489; WAN024FFW_at; Start 1543; Stop 1567
gaaagtcgtcgtatcgataaccagc

SEQ ID NO: 204721 - DNA, 25 bp, Artificial
  probe
  misc_feature (1)..(25): SEQ ID NO: 2489; WAN024FFW_at; Start 1558; Stop 1582
gataaccagcttcgtggacgttcag

SEQ ID NO: 204722 - DNA, 25 bp, Artificial
  probe
  misc_feature (1)..(25): SEQ ID NO: 2489; WAN024FFW_at; Start 2145; Stop 2169
tctacgagtggtggataacaagtgg

SEQ ID NO: 204723 - DNA, 25 bp, Artificial
  probe
  misc_feature (1)..(25): SEQ ID NO: 2489; WAN024FFW_at; Start 2207; Stop 2231
cggttggacttcgtggctatgctca

SEQ ID NO: 204724 - DNA, 25 bp, Artificial
  probe
  misc_feature (1)..(25): SEQ ID NO: 2489; WAN024FFW_at; Start 1024; Stop 1048
gaaggtgtgccaatccaggatgaaa

SEQ ID NO: 204725 - DNA, 25 bp, Artificial
  probe
  misc_feature (1)..(25): SEQ ID NO: 2489; WAN024FFW_at; Start 2004; Stop 2028
tattacgatggaagacttgtcaggc

SEQ ID NO: 204726 - DNA, 25 bp, Artificial
  probe
  misc_feature (1)..(25): SEQ ID NO: 2489; WAN024FFW_at; Start 1708; Stop 1732
gagtctcgcatgttgacgcgtcagg

SEQ ID NO: 204727 - DNA, 25 bp, Artificial
  probe
  misc_feature (1)..(25): SEQ ID NO: 2489; WAN024FFW_at; Start 214; Stop 238
ggtgccaaacgtgtcctaggtctct

SEQ ID NO: 204728 - DNA, 25 bp, Artificial
  probe
  misc_feature (1)..(25): SEQ ID NO: 2489; WAN024FFW_at; Start 2095; Stop 2119
tcaaaactacgcgatgaagaagcag

SEQ ID NO: 204729 - DNA, 25 bp, Artificial
  probe
  misc_feature (1)..(25): SEQ ID NO: 2489; WAN024FFW_at; Start 2351; Stop 2375
gaccacaggcagaacgtcatatcag

SEQ ID NO: 204730 - DNA, 25 bp, Artificial
  probe
  misc_feature (1)..(25): SEQ ID NO: 2489; WAN024FFW_at; Start 2367; Stop 2391
tcatatcagtacaacagcgactcgc

SEQ ID NO: 204731 - DNA, 25 bp, Artificial
  probe
  misc_feature (1)..(25): SEQ ID NO: 2489; WAN024FFW_at; Start 831; Stop 855
cctctatgacatcgaaaacgtggct

SEQ ID NO: 204732 - DNA, 25 bp, Artificial
  probe
  misc_feature (1)..(25): SEQ ID NO: 2489; WAN024FFW_at; Start 478; Stop 502
tctccaatggagaaaaaagaagcct

SEQ ID NO: 204733 - DNA, 25 bp, Artificial
  probe
  misc_feature (1)..(25): SEQ ID NO: 2489; WAN024FFW_at; Start 2163; Stop 2187
caagtggacagatcatatcgatgcc

SEQ ID NO: 204734 - DNA, 25 bp, Artificial
  probe
  misc_feature (1)..(25): SEQ ID NO: 2489; WAN024FFW_at; Start 2247; Stop 2271
tgagtatcaggcagaaggtttccgt

SEQ ID NO: 204735 - DNA, 25 bp, Artificial
  probe
  misc_feature (1)..(25): SEQ ID NO: 2489; WAN024FFW_at; Start 44; Stop 68
aaatccgtcgtctggaaaagatggc

SEQ ID NO: 204736 - DNA, 25 bp, Artificial
  probe
  misc_feature (1)..(25): SEQ ID NO: 2489; WAN024FFW_at; Start 668; Stop 692
tatcaggtgccaatgcggttgaaac

SEQ ID NO: 204737 - DNA, 25 bp, Artificial
  probe
  misc_feature (1)..(25): SEQ ID NO: 5583; WAN024FFX_at; Start 212; Stop 236
caacgggacatgagtttgtatttgt

SEQ ID NO: 204738 - DNA, 25 bp, Artificial
  probe
  misc_feature (1)..(25): SEQ ID NO: 5583; WAN024FFX_at; Start 154; Stop 178
aagagcctgcttgtattctgccaaa

SEQ ID NO: 204739 - DNA, 25 bp, Artificial
  probe
  misc_feature (1)..(25): SEQ ID NO: 5583; WAN024FFX_at; Start 47; Stop 71
tcctgagaccaattcagaaccagac

SEQ ID NO: 204740 - DNA, 25 bp, Artificial
  probe
  misc_feature (1)..(25): SEQ ID NO: 5583; WAN024FFX_at; Start 216; Stop 240
gggacatgagtttgtatttgtctag

SEQ ID NO: 204741 - DNA, 25 bp, Artificial
  probe
  misc_feature (1)..(25): SEQ ID NO: 5583; WAN024FFX_at; Start 207; Stop 231
cctgacaacgggacatgagtttgta

SEQ ID NO: 204742 - DNA, 25 bp, Artificial
  probe
  misc_feature (1)..(25): SEQ ID NO: 5583; WAN024FFX_at; Start 72; Stop 96
cacttccctgaactctattttcaga

SEQ ID NO: 204743 - DNA, 25 bp, Artificial
  probe
  misc_feature (1)..(25): SEQ ID NO: 5583; WAN024FFX_at; Start 45; Stop 69
tttcctgagaccaattcagaaccag

SEQ ID NO: 204744 - DNA, 25 bp, Artificial
  probe
  misc_feature (1)..(25): SEQ ID NO: 5583; WAN024FFX_at; Start 32; Stop 56
actgctgtcactttttcctgagacc

SEQ ID NO: 204745 - DNA, 25 bp, Artificial
  probe
  misc_feature (1)..(25): SEQ ID NO: 5583; WAN024FFX_at; Start 146; Stop 170
atacggcgaagagcctgcttgtatt

SEQ ID NO: 204746 - DNA, 25 bp, Artificial
  probe
  misc_feature (1)..(25): SEQ ID NO: 5583; WAN024FFX_at; Start 153; Stop 177
gaagagcctgcttgtattctgccaa

SEQ ID NO: 204747 - DNA, 25 bp, Artificial
  probe
  misc_feature (1)..(25): SEQ ID NO: 5583; WAN024FFX_at; Start 148; Stop 172
acggcgaagagcctgcttgtattct

SEQ ID NO: 204748 - DNA, 25 bp, Artificial
  probe
  misc_feature (1)..(25): SEQ ID NO: 5583; WAN024FFX_at; Start 77; Stop 101
ccctgaactctattttcagacttga

SEQ ID NO: 204749 - DNA, 25 bp, Artificial
  probe
  misc_feature (1)..(25): SEQ ID NO: 5583; WAN024FFX_at; Start 150; Stop 174
ggcgaagagcctgcttgtattctgc

SEQ ID NO: 204750 - DNA, 25 bp, Artificial
  probe
  misc_feature (1)..(25): SEQ ID NO: 5583; WAN024FFX_at; Start 27; Stop 51
ctttaactgctgtcactttttcctg

SEQ ID NO: 204751 - DNA, 25 bp, Artificial
  probe
  misc_feature (1)..(25): SEQ ID NO: 5583; WAN024FFX_at; Start 202; Stop 226
gactgcctgacaacgggacatgagt

SEQ ID NO: 204752 - DNA, 25 bp, Artificial
  probe
  misc_feature (1)..(25): SEQ ID NO: 5583; WAN024FFX_at; Start 152; Stop 176
cgaagagcctgcttgtattctgcca

SEQ ID NO: 204753 - DNA, 25 bp, Artificial
  probe
  misc_feature (1)..(25): SEQ ID NO: 5583; WAN024FFX_at; Start 31; Stop 55
aactgctgtcactttttcctgagac

SEQ ID NO: 204754 - DNA, 25 bp, Artificial
  probe
  misc_feature (1)..(25): SEQ ID NO: 5583; WAN024FFX_at; Start 53; Stop 77
gaccaattcagaaccagaccacttc

SEQ ID NO: 204755 - DNA, 25 bp, Artificial
  probe
  misc_feature (1)..(25): SEQ ID NO: 5583; WAN024FFX_at; Start 79; Stop 103
ctgaactctattttcagacttgagc

SEQ ID NO: 204756 - DNA, 25 bp, Artificial
  probe
  misc_feature (1)..(25): SEQ ID NO: 5583; WAN024FFX_at; Start 34; Stop 58
tgctgtcactttttcctgagaccaa

SEQ ID NO: 204757 - DNA, 25 bp, Artificial
  probe
  misc_feature (1)..(25): SEQ ID NO: 5583; WAN024FFX_at; Start 112; Stop 136
ctgcatttggaaataaaagagttcc

SEQ ID NO: 204758 - DNA, 25 bp, Artificial
  probe
  misc_feature (1)..(25): SEQ ID NO: 5583; WAN024FFX_at; Start 38; Stop 62
gtcactttttcctgagaccaattca

SEQ ID NO: 204759 - DNA, 25 bp, Artificial
  probe
  misc_feature (1)..(25): SEQ ID NO: 5583; WAN024FFX_at; Start 35; Stop 59
gctgtcactttttcctgagaccaat

SEQ ID NO: 204760 - DNA, 25 bp, Artificial
  probe
  misc_feature (1)..(25): SEQ ID NO: 5583; WAN024FFX_at; Start 51; Stop 75
gagaccaattcagaaccagaccact

SEQ ID NO: 204761 - DNA, 25 bp, Artificial
  probe
  misc_feature (1)..(25): SEQ ID NO: 5583; WAN024FFX_at; Start 43; Stop 67
tttttcctgagaccaattcagaacc

SEQ ID NO: 204762 - DNA, 25 bp, Artificial
  probe
  misc_feature (1)..(25): SEQ ID NO: 5583; WAN024FFX_at; Start 208; Stop 232
ctgacaacgggacatgagtttgtat

SEQ ID NO: 204763 - DNA, 25 bp, Artificial
  probe
  misc_feature (1)..(25): SEQ ID NO: 5583; WAN024FFX_at; Start 200; Stop 224
cggactgcctgacaacgggacatga

SEQ ID NO: 204764 - DNA, 25 bp, Artificial
  probe
  misc_feature (1)..(25): SEQ ID NO: 5583; WAN024FFX_at; Start 30; Stop 54
taactgctgtcactttttcctgaga

SEQ ID NO: 204765 - DNA, 25 bp, Artificial
  probe
  misc_feature (1)..(25): SEQ ID NO: 5583; WAN024FFX_at; Start 210; Stop 234
gacaacgggacatgagtttgtattt

SEQ ID NO: 204766 - DNA, 25 bp, Artificial
  probe
  misc_feature (1)..(25): SEQ ID NO: 5583; WAN024FFX_at; Start 50; Stop 74
tgagaccaattcagaaccagaccac

SEQ ID NO: 204767 - DNA, 25 bp, Artificial
  probe
  misc_feature (1)..(25): SEQ ID NO: 5583; WAN024FFX_at; Start 67; Stop 91
cagaccacttccctgaactctattt

SEQ ID NO: 204768 - DNA, 25 bp, Artificial
  probe
  misc_feature (1)..(25): SEQ ID NO: 5583; WAN024FFX_at; Start 40; Stop 64
cactttttcctgagaccaattcaga

SEQ ID NO: 204769 - DNA, 25 bp, Artificial
  probe
  misc_feature (1)..(25): SEQ ID NO: 5583; WAN024FFX_at; Start 155; Stop 179
agagcctgcttgtattctgccaaat

SEQ ID NO: 204770 - DNA, 25 bp, Artificial
  probe
  misc_feature (1)..(25): SEQ ID NO: 5583; WAN024FFX_at; Start 206; Stop 230
gcctgacaacgggacatgagtttgt

SEQ ID NO: 204771 - DNA, 25 bp, Artificial
  probe
  misc_feature (1)..(25): SEQ ID NO: 5197; WAN024FFY_at; Start 161; Stop 185
tttgccctacaccaaaacggtgctg

SEQ ID NO: 204772 - DNA, 25 bp, Artificial
  probe
  misc_feature (1)..(25): SEQ ID NO: 5197; WAN024FFY_at; Start 192; Stop 216
gataataatcaaaccaagacgagca

SEQ ID NO: 204773 - DNA, 25 bp, Artificial
  probe
  misc_feature (1)..(25): SEQ ID NO: 5197; WAN024FFY_at; Start 109; Stop 133
gccgtcatcatgaggacatctggat

SEQ ID NO: 204774 - DNA, 25 bp, Artificial
  probe
  misc_feature (1)..(25): SEQ ID NO: 5197; WAN024FFY_at; Start 39; Stop 63
catctggtcgataatggaaacatcc

SEQ ID NO: 204775 - DNA, 25 bp, Artificial
  probe
  misc_feature (1)..(25): SEQ ID NO: 5197; WAN024FFY_at; Start 92; Stop 116
tccgtggaatgggagtcgccgtcat

SEQ ID NO: 204776 - DNA, 25 bp, Artificial
  probe
  misc_feature (1)..(25): SEQ ID NO: 5197; WAN024FFY_at; Start 120; Stop 144
gaggacatctggattgtcacctttt

SEQ ID NO: 204777 - DNA, 25 bp, Artificial
  probe
  misc_feature (1)..(25): SEQ ID NO: 5197; WAN024FFY_at; Start 18; Stop 42
aataggcttccgacctgctggcatc

SEQ ID NO: 204778 - DNA, 25 bp, Artificial
  probe
  misc_feature (1)..(25): SEQ ID NO: 5197; WAN024FFY_at; Start 175; Stop 199
aaacggtgctgctcatcgataataa

SEQ ID NO: 204779 - DNA, 25 bp, Artificial
  probe
  misc_feature (1)..(25): SEQ ID NO: 5197; WAN024FFY_at; Start 179; Stop 203
ggtgctgctcatcgataataatcaa

SEQ ID NO: 204780 - DNA, 25 bp, Artificial
  probe
  misc_feature (1)..(25): SEQ ID NO: 5197; WAN024FFY_at; Start 104; Stop 128
gagtcgccgtcatcatgaggacatc

SEQ ID NO: 204781 - DNA, 25 bp, Artificial
  probe
  misc_feature (1)..(25): SEQ ID NO: 5197; WAN024FFY_at; Start 71; Stop 95
caaaggctgtgatggcaagcgtccg

SEQ ID NO: 204782 - DNA, 25 bp, Artificial
  probe
  misc_feature (1)..(25): SEQ ID NO: 5197; WAN024FFY_at; Start 95; Stop 119
gtggaatgggagtcgccgtcatcat

SEQ ID NO: 204783 - DNA, 25 bp, Artificial
  probe
  misc_feature (1)..(25): SEQ ID NO: 5197; WAN024FFY_at; Start 14; Stop 38
tcacaataggcttccgacctgctgg

SEQ ID NO: 204784 - DNA, 25 bp, Artificial
  probe
  misc_feature (1)..(25): SEQ ID NO: 5197; WAN024FFY_at; Start 217; Stop 241
tactccaccccatcttgtatcagag

SEQ ID NO: 204785 - DNA, 25 bp, Artificial
  probe
  misc_feature (1)..(25): SEQ ID NO: 5197; WAN024FFY_at; Start 9; Stop 33
gcgcgtcacaataggcttccgacct

SEQ ID NO: 204786 - DNA, 25 bp, Artificial
  probe
  misc_feature (1)..(25): SEQ ID NO: 5197; WAN024FFY_at; Start 101; Stop 125
tgggagtcgccgtcatcatgaggac

SEQ ID NO: 204787 - DNA, 25 bp, Artificial
  probe
  misc_feature (1)..(25): SEQ ID NO: 5197; WAN024FFY_at; Start 34; Stop 58
gctggcatctggtcgataatggaaa

SEQ ID NO: 204788 - DNA, 25 bp, Artificial
  probe
  misc_feature (1)..(25): SEQ ID NO: 5197; WAN024FFY_at; Start 29; Stop 53
gacctgctggcatctggtcgataat

SEQ ID NO: 204789 - DNA, 25 bp, Artificial
  probe
  misc_feature (1)..(25): SEQ ID NO: 5197; WAN024FFY_at; Start 172; Stop 196
ccaaaacggtgctgctcatcgataa

SEQ ID NO: 204790 - DNA, 25 bp, Artificial
  probe
  misc_feature (1)..(25): SEQ ID NO: 5197; WAN024FFY_at; Start 116; Stop 140
tcatgaggacatctggattgtcacc

SEQ ID NO: 204791 - DNA, 25 bp, Artificial
  probe
  misc_feature (1)..(25): SEQ ID NO: 5197; WAN024FFY_at; Start 197; Stop 221
taatcaaaccaagacgagcatactc

SEQ ID NO: 204792 - DNA, 25 bp, Artificial
  probe
  misc_feature (1)..(25): SEQ ID NO: 5197; WAN024FFY_at; Start 41; Stop 65
tctggtcgataatggaaacatccat

SEQ ID NO: 204793 - DNA, 25 bp, Artificial
  probe
  misc_feature (1)..(25): SEQ ID NO: 5197; WAN024FFY_at; Start 5; Stop 29
tccagcgcgtcacaataggcttccg

SEQ ID NO: 204794 - DNA, 25 bp, Artificial
  probe
  misc_feature (1)..(25): SEQ ID NO: 5197; WAN024FFY_at; Start 63; Stop 87
catatctccaaaggctgtgatggca

SEQ ID NO: 204795 - DNA, 25 bp, Artificial
  probe
  misc_feature (1)..(25): SEQ ID NO: 5197; WAN024FFY_at; Start 77; Stop 101
ctgtgatggcaagcgtccgtggaat

SEQ ID NO: 204796 - DNA, 25 bp, Artificial
  probe
  misc_feature (1)..(25): SEQ ID NO: 5197; WAN024FFY_at; Start 222; Stop 246
caccccatcttgtatcagagcgtga

SEQ ID NO: 204797 - DNA, 25 bp, Artificial
  probe
  misc_feature (1)..(25): SEQ ID NO: 5197; WAN024FFY_at; Start 55; Stop 79
gaaacatccatatctccaaaggctg

SEQ ID NO: 204798 - DNA, 25 bp, Artificial
  probe
  misc_feature (1)..(25): SEQ ID NO: 5197; WAN024FFY_at; Start 168; Stop 192
tacaccaaaacggtgctgctcatcg

SEQ ID NO: 204799 - DNA, 25 bp, Artificial
  probe
  misc_feature (1)..(25): SEQ ID NO: 5197; WAN024FFY_at; Start 127; Stop 151
tctggattgtcacctttttcccgta

SEQ ID NO: 204800 - DNA, 25 bp, Artificial
  probe
  misc_feature (1)..(25): SEQ ID NO: 5197; WAN024FFY_at; Start 22; Stop 46
ggcttccgacctgctggcatctggt

SEQ ID NO: 204801 - DNA, 25 bp, Artificial
  probe
  misc_feature (1)..(25): SEQ ID NO: 5197; WAN024FFY_at; Start 212; Stop 236
gagcatactccaccccatcttgtat

SEQ ID NO: 204802 - DNA, 25 bp, Artificial
  probe
  misc_feature (1)..(25): SEQ ID NO: 5197; WAN024FFY_at; Start 69; Stop 93
tccaaaggctgtgatggcaagcgtc

SEQ ID NO: 204803 - DNA, 25 bp, Artificial
  probe
  misc_feature (1)..(25): SEQ ID NO: 5197; WAN024FFY_at; Start 1; Stop 25
ttgatccagcgcgtcacaataggct

SEQ ID NO: 204804 - DNA, 25 bp, Artificial
  probe
  misc_feature (1)..(25): SEQ ID NO: 5197; WAN024FFY_at; Start 150; Stop 174
taaaatacgcctttgccctacacca

SEQ ID NO: 204805 - DNA, 25 bp, Artificial
  probe
  misc_feature (1)..(25): SEQ ID NO: 1237; WAN024FFZ_at; Start 228; Stop 252
caatcgcctgcgttttagtctcaag

SEQ ID NO: 204806 - DNA, 25 bp, Artificial
  probe
  misc_feature (1)..(25): SEQ ID NO: 1237; WAN024FFZ_at; Start 335; Stop 359
tctttggaaaatgggaccgcgctaa

SEQ ID NO: 204807 - DNA, 25 bp, Artificial
  probe
  misc_feature (1)..(25): SEQ ID NO: 1237; WAN024FFZ_at; Start 1463; Stop 1487
tgacgactcattttgcaggcaaggc

SEQ ID NO: 204808 - DNA, 25 bp, Artificial
  probe
  misc_feature (1)..(25): SEQ ID NO: 1237; WAN024FFZ_at; Start 1076; Stop 1100
gaactcacgctctgatacaagatgg

SEQ ID NO: 204809 - DNA, 25 bp, Artificial
  probe
  misc_feature (1)..(25): SEQ ID NO: 1237; WAN024FFZ_at; Start 794; Stop 818
taactgatatgaagtccgaccacca

SEQ ID NO: 204810 - DNA, 25 bp, Artificial
  probe
  misc_feature (1)..(25): SEQ ID NO: 1237; WAN024FFZ_at; Start 854; Stop 878
gaaaaacggtagtcgctggcttggc

SEQ ID NO: 204811 - DNA, 25 bp, Artificial
  probe
  misc_feature (1)..(25): SEQ ID NO: 1237; WAN024FFZ_at; Start 124; Stop 148
gacttcaaaaccaagcaggtgctgg

SEQ ID NO: 204812 - DNA, 25 bp, Artificial
  probe
  misc_feature (1)..(25): SEQ ID NO: 1237; WAN024FFZ_at; Start 22; Stop 46
catgtcttgcctggtgtgggaccaa

SEQ ID NO: 204813 - DNA, 25 bp, Artificial
  probe
  misc_feature (1)..(25): SEQ ID NO: 1237; WAN024FFZ_at; Start 1194; Stop 1218
tccagatgtcctcatgatgacggcg

SEQ ID NO: 204814 - DNA, 25 bp, Artificial
  probe
  misc_feature (1)..(25): SEQ ID NO: 1237; WAN024FFZ_at; Start 468; Stop 492
gacggcttttgatcagggactggac

SEQ ID NO: 204815 - DNA, 25 bp, Artificial
  probe
  misc_feature (1)..(25): SEQ ID NO: 1237; WAN024FFZ_at; Start 1667; Stop 1691
ttcaccagcttagaggtcgtgtcgg

SEQ ID NO: 204816 - DNA, 25 bp, Artificial
  probe
  misc_feature (1)..(25): SEQ ID NO: 1237; WAN024FFZ_at; Start 428; Stop 452
ctcagggaatcagtcaggccagtct

SEQ ID NO: 204817 - DNA, 25 bp, Artificial
  probe
  misc_feature (1)..(25): SEQ ID NO: 1237; WAN024FFZ_at; Start 320; Stop 344
gagcaacccttgctgtctttggaaa

SEQ ID NO: 204818 - DNA, 25 bp, Artificial
  probe
  misc_feature (1)..(25): SEQ ID NO: 1237; WAN024FFZ_at; Start 1233; Stop 1257
gacgcttgccatcacagcctttgga

SEQ ID NO: 204819 - DNA, 25 bp, Artificial
  probe
  misc_feature (1)..(25): SEQ ID NO: 1237; WAN024FFZ_at; Start 211; Stop 235
tattatggtttcaagcgcaatcgcc

SEQ ID NO: 204820 - DNA, 25 bp, Artificial
  probe
  misc_feature (1)..(25): SEQ ID NO: 1237; WAN024FFZ_at; Start 1311; Stop 1335
gacgcgctggatcaaacatgagcaa

SEQ ID NO: 204821 - DNA, 25 bp, Artificial
  probe
  misc_feature (1)..(25): SEQ ID NO: 1237; WAN024FFZ_at; Start 935; Stop 959
tcctcgcagagcaacactttgagag

SEQ ID NO: 204822 - DNA, 25 bp, Artificial
  probe
  misc_feature (1)..(25): SEQ ID NO: 1237; WAN024FFZ_at; Start 1443; Stop 1467
cattgccttatcagaggagttgacg

SEQ ID NO: 204823 - DNA, 25 bp, Artificial
  probe
  misc_feature (1)..(25): SEQ ID NO: 1237; WAN024FFZ_at; Start 1563; Stop 1587
gacggatattctggtttcgacgacg

SEQ ID NO: 204824 - DNA, 25 bp, Artificial
  probe
  misc_feature (1)..(25): SEQ ID NO: 1237; WAN024FFZ_at; Start 1487; Stop 1511
cagaggtggctcttctacatggtag

SEQ ID NO: 204825 - DNA, 25 bp, Artificial
  probe
  misc_feature (1)..(25): SEQ ID NO: 1237; WAN024FFZ_at; Start 186; Stop 210
ggtagtgactcctgctagtgtccag

SEQ ID NO: 204826 - DNA, 25 bp, Artificial
  probe
  misc_feature (1)..(25): SEQ ID NO: 1237; WAN024FFZ_at; Start 588; Stop 612
tttggcagaatacaagcaggctctt

SEQ ID NO: 204827 - DNA, 25 bp, Artificial
  probe
  misc_feature (1)..(25): SEQ ID NO: 1237; WAN024FFZ_at; Start 879; Stop 903
catgtttgcggcagtgacagcaggt

SEQ ID NO: 204828 - DNA, 25 bp, Artificial
  probe
  misc_feature (1)..(25): SEQ ID NO: 1237; WAN024FFZ_at; Start 494; Stop 518
tcttgatagaagaaaatctgcccca

SEQ ID NO: 204829 - DNA, 25 bp, Artificial
  probe
  misc_feature (1)..(25): SEQ ID NO: 1237; WAN024FFZ_at; Start 1835; Stop 1859
tttttggaaccagacagtcaggact

SEQ ID NO: 204830 - DNA, 25 bp, Artificial
  probe
  misc_feature (1)..(25): SEQ ID NO: 1237; WAN024FFZ_at; Start 1272; Stop 1296
cattatcgaccagatgccagcaggt

SEQ ID NO: 204831 - DNA, 25 bp, Artificial
  probe
  misc_feature (1)..(25): SEQ ID NO: 1237; WAN024FFZ_at; Start 542; Stop 566
tcatgtcccgttgtcaggcagtccg

SEQ ID NO: 204832 - DNA, 25 bp, Artificial
  probe
  misc_feature (1)..(25): SEQ ID NO: 1237; WAN024FFZ_at; Start 1733; Stop 1757
ccaagacggattctgggaaagaccg

SEQ ID NO: 204833 - DNA, 25 bp, Artificial
  probe
  misc_feature (1)..(25): SEQ ID NO: 1237; WAN024FFZ_at; Start 1856; Stop 1880
gacttccagagttccaagtggctga

SEQ ID NO: 204834 - DNA, 25 bp, Artificial
  probe
  misc_feature (1)..(25): SEQ ID NO: 1237; WAN024FFZ_at; Start 894; Stop 918
gacagcaggttatcaggctgcccta

SEQ ID NO: 204835 - DNA, 25 bp, Artificial
  probe
  misc_feature (1)..(25): SEQ ID NO: 1237; WAN024FFZ_at; Start 1950; Stop 1974
ttggcaagaagatccagagtggcgc

SEQ ID NO: 204836 - DNA, 25 bp, Artificial
  probe
  misc_feature (1)..(25): SEQ ID NO: 1237; WAN024FFZ_at; Start 917; Stop 941
taatggtaccaacagaaatcctcgc

SEQ ID NO: 204837 - DNA, 25 bp, Artificial
  probe
  misc_feature (1)..(25): SEQ ID NO: 1237; WAN024FFZ_at; Start 1125; Stop 1149
gattattatcgatgagcagcaccgt

SEQ ID NO: 204838 - DNA, 25 bp, Artificial
  probe
  misc_feature (1)..(25): SEQ ID NO: 1237; WAN024FFZ_at; Start 1296; Stop 1320
tcggaagcctattgtgacgcgctgg

SEQ ID NO: 204839 - DNA, 25 bp, Artificial
  probe
  misc_feature (1)..(25): SEQ ID NO: 5619; WAN024FG2_at; Start 188; Stop 212
gcaagggtcgccatgatttcctcct

SEQ ID NO: 204840 - DNA, 25 bp, Artificial
  probe
  misc_feature (1)..(25): SEQ ID NO: 5619; WAN024FG2_at; Start 260; Stop 284
tcgtaagcctcgctagtattaccaa

SEQ ID NO: 204841 - DNA, 25 bp, Artificial
  probe
  misc_feature (1)..(25): SEQ ID NO: 5619; WAN024FG2_at; Start 16; Stop 40
tacattcatggcttcgtgagcatac

SEQ ID NO: 204842 - DNA, 25 bp, Artificial
  probe
  misc_feature (1)..(25): SEQ ID NO: 5619; WAN024FG2_at; Start 3; Stop 27
ggtcattaacaaatacattcatggc

SEQ ID NO: 204843 - DNA, 25 bp, Artificial
  probe
  misc_feature (1)..(25): SEQ ID NO: 5619; WAN024FG2_at; Start 154; Stop 178
gatacgatgggcaagatttttgaca

SEQ ID NO: 204844 - DNA, 25 bp, Artificial
  probe
  misc_feature (1)..(25): SEQ ID NO: 5619; WAN024FG2_at; Start 179; Stop 203
tcgatataggcaagggtcgccatga

SEQ ID NO: 204845 - DNA, 25 bp, Artificial
  probe
  misc_feature (1)..(25): SEQ ID NO: 5619; WAN024FG2_at; Start 165; Stop 189
caagatttttgacatcgatataggc

SEQ ID NO: 204846 - DNA, 25 bp, Artificial
  probe
  misc_feature (1)..(25): SEQ ID NO: 5619; WAN024FG2_at; Start 58; Stop 82
ggttttatcgcaggtcagacgatta

SEQ ID NO: 204847 - DNA, 25 bp, Artificial
  probe
  misc_feature (1)..(25): SEQ ID NO: 5619; WAN024FG2_at; Start 172; Stop 196
tttgacatcgatataggcaagggtc

SEQ ID NO: 204848 - DNA, 25 bp, Artificial
  probe
  misc_feature (1)..(25): SEQ ID NO: 5619; WAN024FG2_at; Start 99; Stop 123
taatgggatagcaaacatcgtcgtc

SEQ ID NO: 204849 - DNA, 25 bp, Artificial
  probe
  misc_feature (1)..(25): SEQ ID NO: 5619; WAN024FG2_at; Start 192; Stop 216
gggtcgccatgatttcctcctctgt

SEQ ID NO: 204850 - DNA, 25 bp, Artificial
  probe
  misc_feature (1)..(25): SEQ ID NO: 5619; WAN024FG2_at; Start 27; Stop 51
cttcgtgagcatactcaggcatgat

SEQ ID NO: 204851 - DNA, 25 bp, Artificial
  probe
  misc_feature (1)..(25): SEQ ID NO: 5619; WAN024FG2_at; Start 204; Stop 228
tttcctcctctgtttcatggaaggg

SEQ ID NO: 204852 - DNA, 25 bp, Artificial
  probe
  misc_feature (1)..(25): SEQ ID NO: 5619; WAN024FG2_at; Start 146; Stop 170
tcaccttggatacgatgggcaagat

SEQ ID NO: 204853 - DNA, 25 bp, Artificial
  probe
  misc_feature (1)..(25): SEQ ID NO: 5619; WAN024FG2_at; Start 266; Stop 290
gcctcgctagtattaccaatctcaa

SEQ ID NO: 204854 - DNA, 25 bp, Artificial
  probe
  misc_feature (1)..(25): SEQ ID NO: 5619; WAN024FG2_at; Start 114; Stop 138
catcgtcgtccaagcccgtaatcat

SEQ ID NO: 204855 - DNA, 25 bp, Artificial
  probe
  misc_feature (1)..(25): SEQ ID NO: 5619; WAN024FG2_at; Start 66; Stop 90
cgcaggtcagacgattataaatcgc

SEQ ID NO: 204856 - DNA, 25 bp, Artificial
  probe
  misc_feature (1)..(25): SEQ ID NO: 5619; WAN024FG2_at; Start 250; Stop 274
gaaaagttcgtcgtaagcctcgcta

SEQ ID NO: 204857 - DNA, 25 bp, Artificial
  probe
  misc_feature (1)..(25): SEQ ID NO: 5619; WAN024FG2_at; Start 87; Stop 111
tcgcaaactgggtaatgggatagca

SEQ ID NO: 204858 - DNA, 25 bp, Artificial
  probe
  misc_feature (1)..(25): SEQ ID NO: 5619; WAN024FG2_at; Start 273; Stop 297
tagtattaccaatctcaatcacccg

SEQ ID NO: 204859 - DNA, 25 bp, Artificial
  probe
  misc_feature (1)..(25): SEQ ID NO: 5619; WAN024FG2_at; Start 22; Stop 46
catggcttcgtgagcatactcaggc

SEQ ID NO: 204860 - DNA, 25 bp, Artificial
  probe
  misc_feature (1)..(25): SEQ ID NO: 5619; WAN024FG2_at; Start 130; Stop 154
cgtaatcatcttaacctcaccttgg

SEQ ID NO: 204861 - DNA, 25 bp, Artificial
  probe
  misc_feature (1)..(25): SEQ ID NO: 5619; WAN024FG2_at; Start 285; Stop 309
tctcaatcacccgtctgaagtctga

SEQ ID NO: 204862 - DNA, 25 bp, Artificial
  probe
  misc_feature (1)..(25): SEQ ID NO: 5619; WAN024FG2_at; Start 183; Stop 207
tataggcaagggtcgccatgatttc

SEQ ID NO: 204863 - DNA, 25 bp, Artificial
  probe
  misc_feature (1)..(25): SEQ ID NO: 5619; WAN024FG2_at; Start 81; Stop 105
tataaatcgcaaactgggtaatggg

SEQ ID NO: 204864 - DNA, 25 bp, Artificial
  probe
  misc_feature (1)..(25): SEQ ID NO: 5619; WAN024FG2_at; Start 105; Stop 129
gatagcaaacatcgtcgtccaagcc

SEQ ID NO: 204865 - DNA, 25 bp, Artificial
  probe
  misc_feature (1)..(25): SEQ ID NO: 5619; WAN024FG2_at; Start 111; Stop 135
aaacatcgtcgtccaagcccgtaat

SEQ ID NO: 204866 - DNA, 25 bp, Artificial
  probe
  misc_feature (1)..(25): SEQ ID NO: 5619; WAN024FG2_at; Start 119; Stop 143
tcgtccaagcccgtaatcatcttaa

SEQ ID NO: 204867 - DNA, 25 bp, Artificial
  probe
  misc_feature (1)..(25): SEQ ID NO: 5619; WAN024FG2_at; Start 54; Stop 78
gataggttttatcgcaggtcagacg

SEQ ID NO: 204868 - DNA, 25 bp, Artificial
  probe
  misc_feature (1)..(25): SEQ ID NO: 5619; WAN024FG2_at; Start 175; Stop 199
gacatcgatataggcaagggtcgcc

SEQ ID NO: 204869 - DNA, 25 bp, Artificial
  probe
  misc_feature (1)..(25): SEQ ID NO: 5619; WAN024FG2_at; Start 253; Stop 277
aagttcgtcgtaagcctcgctagta

SEQ ID NO: 204870 - DNA, 25 bp, Artificial
  probe
  misc_feature (1)..(25): SEQ ID NO: 5619; WAN024FG2_at; Start 12; Stop 36
caaatacattcatggcttcgtgagc

SEQ ID NO: 204871 - DNA, 25 bp, Artificial
  probe
  misc_feature (1)..(25): SEQ ID NO: 5619; WAN024FG2_at; Start 90; Stop 114
caaactgggtaatgggatagcaaac

SEQ ID NO: 204872 - DNA, 25 bp, Artificial
  probe
  misc_feature (1)..(25): SEQ ID NO: 5619; WAN024FG2_at; Start 141; Stop 165
taacctcaccttggatacgatgggc

SEQ ID NO: 204873 - DNA, 25 bp, Artificial
  probe
  misc_feature (1)..(25): SEQ ID NO: 692; WAN024FG3_at; Start 820; Stop 844
tgctatcccattacccagtttgcga

SEQ ID NO: 204874 - DNA, 25 bp, Artificial
  probe
  misc_feature (1)..(25): SEQ ID NO: 692; WAN024FG3_at; Start 928; Stop 952
caagtctacaactggctctgtggaa

SEQ ID NO: 204875 - DNA, 25 bp, Artificial
  probe
  misc_feature (1)..(25): SEQ ID NO: 692; WAN024FG3_at; Start 209; Stop 233
gcattgttcttccaaagagtgagga

SEQ ID NO: 204876 - DNA, 25 bp, Artificial
  probe
  misc_feature (1)..(25): SEQ ID NO: 692; WAN024FG3_at; Start 617; Stop 641
tcttgtcagacttcagacgggtgat

SEQ ID NO: 204877 - DNA, 25 bp, Artificial
  probe
  misc_feature (1)..(25): SEQ ID NO: 692; WAN024FG3_at; Start 367; Stop 391
gacggcttgcgttctcctttaggaa

SEQ ID NO: 204878 - DNA, 25 bp, Artificial
  probe
  misc_feature (1)..(25): SEQ ID NO: 692; WAN024FG3_at; Start 2; Stop 26
tgaaaaatccagctttgctagaaga

SEQ ID NO: 204879 - DNA, 25 bp, Artificial
  probe
  misc_feature (1)..(25): SEQ ID NO: 692; WAN024FG3_at; Start 853; Stop 877
cgtctgacctgcgataaaacctatc

SEQ ID NO: 204880 - DNA, 25 bp, Artificial
  probe
  misc_feature (1)..(25): SEQ ID NO: 692; WAN024FG3_at; Start 745; Stop 769
tatatcgatgtcaaaaatcttgccc

SEQ ID NO: 204881 - DNA, 25 bp, Artificial
  probe
  misc_feature (1)..(25): SEQ ID NO: 692; WAN024FG3_at; Start 642; Stop 666
tgagattggtaatactagcgaggct

SEQ ID NO: 204882 - DNA, 25 bp, Artificial
  probe
  misc_feature (1)..(25): SEQ ID NO: 692; WAN024FG3_at; Start 352; Stop 376
tcaggttactcacaagacggcttgc

SEQ ID NO: 204883 - DNA, 25 bp, Artificial
  probe
  misc_feature (1)..(25): SEQ ID NO: 692; WAN024FG3_at; Start 713; Stop 737
aaacagaggaggaaatcatggcgac

SEQ ID NO: 204884 - DNA, 25 bp, Artificial
  probe
  misc_feature (1)..(25): SEQ ID NO: 692; WAN024FG3_at; Start 526; Stop 550
tctagctatggtgcctcacaaggag

SEQ ID NO: 204885 - DNA, 25 bp, Artificial
  probe
  misc_feature (1)..(25): SEQ ID NO: 692; WAN024FG3_at; Start 762; Stop 786
tcttgcccatcgtatccaaggtgag

SEQ ID NO: 204886 - DNA, 25 bp, Artificial
  probe
  misc_feature (1)..(25): SEQ ID NO: 692; WAN024FG3_at; Start 186; Stop 210
caaggaaggaaaggtctatgcacgc

SEQ ID NO: 204887 - DNA, 25 bp, Artificial
  probe
  misc_feature (1)..(25): SEQ ID NO: 692; WAN024FG3_at; Start 881; Stop 905
tcatgcctgagtatgctcacgaagc

SEQ ID NO: 204888 - DNA, 25 bp, Artificial
  probe
  misc_feature (1)..(25): SEQ ID NO: 692; WAN024FG3_at; Start 728; Stop 752
tcatggcgacccttgcctatatcga

SEQ ID NO: 204889 - DNA, 25 bp, Artificial
  probe
  misc_feature (1)..(25): SEQ ID NO: 692; WAN024FG3_at; Start 170; Stop 194
taacatttgaaggaagcaaggaagg

SEQ ID NO: 204890 - DNA, 25 bp, Artificial
  probe
  misc_feature (1)..(25): SEQ ID NO: 692; WAN024FG3_at; Start 35; Stop 59
cctatagaggaagggatgaggttcc

SEQ ID NO: 204891 - DNA, 25 bp, Artificial
  probe
  misc_feature (1)..(25): SEQ ID NO: 692; WAN024FG3_at; Start 794; Stop 818
tgattacgggcttggacgacgatgt

SEQ ID NO: 204892 - DNA, 25 bp, Artificial
  probe
  misc_feature (1)..(25): SEQ ID NO: 692; WAN024FG3_at; Start 582; Stop 606
tcctcgaattcagaaaacagttgcc

SEQ ID NO: 204893 - DNA, 25 bp, Artificial
  probe
  misc_feature (1)..(25): SEQ ID NO: 692; WAN024FG3_at; Start 433; Stop 457
cgggaccacctcttttataaggatg

SEQ ID NO: 204894 - DNA, 25 bp, Artificial
  probe
  misc_feature (1)..(25): SEQ ID NO: 692; WAN024FG3_at; Start 842; Stop 866
cgatttataatcgtctgacctgcga

SEQ ID NO: 204895 - DNA, 25 bp, Artificial
  probe
  misc_feature (1)..(25): SEQ ID NO: 692; WAN024FG3_at; Start 319; Stop 343
tacggtgttgtttccatggatgtgc

SEQ ID NO: 204896 - DNA, 25 bp, Artificial
  probe
  misc_feature (1)..(25): SEQ ID NO: 692; WAN024FG3_at; Start 49; Stop 73
gatgaggttccggaagactttgatg

SEQ ID NO: 204897 - DNA, 25 bp, Artificial
  probe
  misc_feature (1)..(25): SEQ ID NO: 692; WAN024FG3_at; Start 777; Stop 801
ccaaggtgaggttaagatgattacg

SEQ ID NO: 204898 - DNA, 25 bp, Artificial
  probe
  misc_feature (1)..(25): SEQ ID NO: 692; WAN024FG3_at; Start 601; Stop 625
gttgccatttatcccttcttgtcag

SEQ ID NO: 204899 - DNA, 25 bp, Artificial
  probe
  misc_feature (1)..(25): SEQ ID NO: 692; WAN024FG3_at; Start 484; Stop 508
gaaattgttgctagtctgtctcagg

SEQ ID NO: 204900 - DNA, 25 bp, Artificial
  probe
  misc_feature (1)..(25): SEQ ID NO: 692; WAN024FG3_at; Start 808; Stop 832
gacgacgatgtttgctatcccatta

SEQ ID NO: 204901 - DNA, 25 bp, Artificial
  probe
  misc_feature (1)..(25): SEQ ID NO: 692; WAN024FG3_at; Start 567; Stop 591
tgcagcagcgctcaatcctcgaatt

SEQ ID NO: 204902 - DNA, 25 bp, Artificial
  probe
  misc_feature (1)..(25): SEQ ID NO: 692; WAN024FG3_at; Start 657; Stop 681
tagcgaggcttacgacgaacttttc

SEQ ID NO: 204903 - DNA, 25 bp, Artificial
  probe
  misc_feature (1)..(25): SEQ ID NO: 692; WAN024FG3_at; Start 255; Stop 279
ttttcatggttatatgggacgtggc

SEQ ID NO: 204904 - DNA, 25 bp, Artificial
  probe
  misc_feature (1)..(25): SEQ ID NO: 692; WAN024FG3_at; Start 503; Stop 527
ctcaggttgatgagaagcgtctttc

SEQ ID NO: 204905 - DNA, 25 bp, Artificial
  probe
  misc_feature (1)..(25): SEQ ID NO: 692; WAN024FG3_at; Start 118; Stop 142
taccacttggaggaaagagatttcc

SEQ ID NO: 204906 - DNA, 25 bp, Artificial
  probe
  misc_feature (1)..(25): SEQ ID NO: 692; WAN024FG3_at; Start 150; Stop 174
tcaagtcaagtgctatgagttaaca

SEQ ID NO: 204907 - DNA, 25 bp, Artificial
  probe
  misc_feature (1)..(25): SEQ ID NO: 1809; WAN024FG4_at; Start 64; Stop 88
actagaatcatggttagttttcttg

SEQ ID NO: 204908 - DNA, 25 bp, Artificial
  probe
  misc_feature (1)..(25): SEQ ID NO: 1809; WAN024FG4_at; Start 52; Stop 76
gatttttttttcactagaatcatgg

SEQ ID NO: 204909 - DNA, 25 bp, Artificial
  probe
  misc_feature (1)..(25): SEQ ID NO: 1809; WAN024FG4_at; Start 5; Stop 29
ttattatagcatgtttaaaacaaga

SEQ ID NO: 204910 - DNA, 25 bp, Artificial
  probe
  misc_feature (1)..(25): SEQ ID NO: 1809; WAN024FG4_at; Start 99; Stop 123
tttgataataattaagcaaaactac

SEQ ID NO: 204911 - DNA, 25 bp, Artificial
  probe
  misc_feature (1)..(25): SEQ ID NO: 1809; WAN024FG4_at; Start 63; Stop 87
cactagaatcatggttagttttctt

SEQ ID NO: 204912 - DNA, 25 bp, Artificial
  probe
  misc_feature (1)..(25): SEQ ID NO: 1809; WAN024FG4_at; Start 69; Stop 93
aatcatggttagttttcttggtaga

SEQ ID NO: 204913 - DNA, 25 bp, Artificial
  probe
  misc_feature (1)..(25): SEQ ID NO: 1809; WAN024FG4_at; Start 56; Stop 80
tttttttcactagaatcatggttag

SEQ ID NO: 204914 - DNA, 25 bp, Artificial
  probe
  misc_feature (1)..(25): SEQ ID NO: 1809; WAN024FG4_at; Start 10; Stop 34
atagcatgtttaaaacaagaaagta

SEQ ID NO: 204915 - DNA, 25 bp, Artificial
  probe
  misc_feature (1)..(25): SEQ ID NO: 1809; WAN024FG4_at; Start 49; Stop 73
gaagatttttttttcactagaatca

SEQ ID NO: 204916 - DNA, 25 bp, Artificial
  probe
  misc_feature (1)..(25): SEQ ID NO: 1809; WAN024FG4_at; Start 53; Stop 77
atttttttttcactagaatcatggt

SEQ ID NO: 204917 - DNA, 25 bp, Artificial
  probe
  misc_feature (1)..(25): SEQ ID NO: 1809; WAN024FG4_at; Start 11; Stop 35
tagcatgtttaaaacaagaaagtaa

SEQ ID NO: 204918 - DNA, 25 bp, Artificial
  probe
  misc_feature (1)..(25): SEQ ID NO: 1809; WAN024FG4_at; Start 66; Stop 90
tagaatcatggttagttttcttggt

SEQ ID NO: 204919 - DNA, 25 bp, Artificial
  probe
  misc_feature (1)..(25): SEQ ID NO: 1809; WAN024FG4_at; Start 71; Stop 95
tcatggttagttttcttggtagaaa

SEQ ID NO: 204920 - DNA, 25 bp, Artificial
  probe
  misc_feature (1)..(25): SEQ ID NO: 1809; WAN024FG4_at; Start 6; Stop 30
tattatagcatgtttaaaacaagaa

SEQ ID NO: 204921 - DNA, 25 bp, Artificial
  probe
  misc_feature (1)..(25): SEQ ID NO: 1809; WAN024FG4_at; Start 70; Stop 94
atcatggttagttttcttggtagaa

SEQ ID NO: 204922 - DNA, 25 bp, Artificial
  probe
  misc_feature (1)..(25): SEQ ID NO: 1809; WAN024FG4_at; Start 2; Stop 26
tgattattatagcatgtttaaaaca

SEQ ID NO: 204923 - DNA, 25 bp, Artificial
  probe
  misc_feature (1)..(25): SEQ ID NO: 1809; WAN024FG4_at; Start 3; Stop 27
gattattatagcatgtttaaaacaa

SEQ ID NO: 204924 - DNA, 25 bp, Artificial
  probe
  misc_feature (1)..(25): SEQ ID NO: 1809; WAN024FG4_at; Start 83; Stop 107
ttcttggtagaaatattttgataat

SEQ ID NO: 204925 - DNA, 25 bp, Artificial
  probe
  misc_feature (1)..(25): SEQ ID NO: 1809; WAN024FG4_at; Start 61; Stop 85
ttcactagaatcatggttagttttc

SEQ ID NO: 204926 - DNA, 25 bp, Artificial
  probe
  misc_feature (1)..(25): SEQ ID NO: 1809; WAN024FG4_at; Start 4; Stop 28
attattatagcatgtttaaaacaag

SEQ ID NO: 204927 - DNA, 25 bp, Artificial
  probe
  misc_feature (1)..(25): SEQ ID NO: 1809; WAN024FG4_at; Start 65; Stop 89
ctagaatcatggttagttttcttgg

SEQ ID NO: 204928 - DNA, 25 bp, Artificial
  probe
  misc_feature (1)..(25): SEQ ID NO: 1809; WAN024FG4_at; Start 7; Stop 31
attatagcatgtttaaaacaagaaa

SEQ ID NO: 204929 - DNA, 25 bp, Artificial
  probe
  misc_feature (1)..(25): SEQ ID NO: 1809; WAN024FG4_at; Start 67; Stop 91
agaatcatggttagttttcttggta

SEQ ID NO: 204930 - DNA, 25 bp, Artificial
  probe
  misc_feature (1)..(25): SEQ ID NO: 1809; WAN024FG4_at; Start 9; Stop 33
tatagcatgtttaaaacaagaaagt

SEQ ID NO: 204931 - DNA, 25 bp, Artificial
  probe
  misc_feature (1)..(25): SEQ ID NO: 1809; WAN024FG4_at; Start 59; Stop 83
ttttcactagaatcatggttagttt

SEQ ID NO: 204932 - DNA, 25 bp, Artificial
  probe
  misc_feature (1)..(25): SEQ ID NO: 1809; WAN024FG4_at; Start 51; Stop 75
agatttttttttcactagaatcatg

SEQ ID NO: 204933 - DNA, 25 bp, Artificial
  probe
  misc_feature (1)..(25): SEQ ID NO: 1809; WAN024FG4_at; Start 68; Stop 92
gaatcatggttagttttcttggtag

SEQ ID NO: 204934 - DNA, 25 bp, Artificial
  probe
  misc_feature (1)..(25): SEQ ID NO: 1809; WAN024FG4_at; Start 72; Stop 96
catggttagttttcttggtagaaat

SEQ ID NO: 204935 - DNA, 25 bp, Artificial
  probe
  misc_feature (1)..(25): SEQ ID NO: 1809; WAN024FG4_at; Start 50; Stop 74
aagatttttttttcactagaatcat

SEQ ID NO: 204936 - DNA, 25 bp, Artificial
  probe
  misc_feature (1)..(25): SEQ ID NO: 1809; WAN024FG4_at; Start 58; Stop 82
tttttcactagaatcatggttagtt

SEQ ID NO: 204937 - DNA, 25 bp, Artificial
  probe
  misc_feature (1)..(25): SEQ ID NO: 1809; WAN024FG4_at; Start 62; Stop 86
tcactagaatcatggttagttttct

SEQ ID NO: 204938 - DNA, 25 bp, Artificial
  probe
  misc_feature (1)..(25): SEQ ID NO: 1809; WAN024FG4_at; Start 57; Stop 81
ttttttcactagaatcatggttagt

SEQ ID NO: 204939 - DNA, 25 bp, Artificial
  probe
  misc_feature (1)..(25): SEQ ID NO: 1809; WAN024FG4_at; Start 8; Stop 32
ttatagcatgtttaaaacaagaaag

SEQ ID NO: 204940 - DNA, 25 bp, Artificial
  probe
  misc_feature (1)..(25): SEQ ID NO: 1809; WAN024FG4_at; Start 60; Stop 84
tttcactagaatcatggttagtttt

SEQ ID NO: 204941 - DNA, 25 bp, Artificial
  probe
  misc_feature (1)..(25): SEQ ID NO: 5465; WAN024FG5_at; Start 239; Stop 263
ccgtctttacttgtagcaacctgaa

SEQ ID NO: 204942 - DNA, 25 bp, Artificial
  probe
  misc_feature (1)..(25): SEQ ID NO: 5465; WAN024FG5_at; Start 133; Stop 157
gatgatgtattcttttccttcgtgc

SEQ ID NO: 204943 - DNA, 25 bp, Artificial
  probe
  misc_feature (1)..(25): SEQ ID NO: 5465; WAN024FG5_at; Start 32; Stop 56
tgaattggattgtgtttgagccaag

SEQ ID NO: 204944 - DNA, 25 bp, Artificial
  probe
  misc_feature (1)..(25): SEQ ID NO: 5465; WAN024FG5_at; Start 230; Stop 254
gtcactcctccgtctttacttgtag

SEQ ID NO: 204945 - DNA, 25 bp, Artificial
  probe
  misc_feature (1)..(25): SEQ ID NO: 5465; WAN024FG5_at; Start 148; Stop 172
tccttcgtgcatcgtatggatagca

SEQ ID NO: 204946 - DNA, 25 bp, Artificial
  probe
  misc_feature (1)..(25): SEQ ID NO: 5465; WAN024FG5_at; Start 73; Stop 97
ttcgacacgtgccaagtggaccatc

SEQ ID NO: 204947 - DNA, 25 bp, Artificial
  probe
  misc_feature (1)..(25): SEQ ID NO: 5465; WAN024FG5_at; Start 64; Stop 88
accattttcttcgacacgtgccaag

SEQ ID NO: 204948 - DNA, 25 bp, Artificial
  probe
  misc_feature (1)..(25): SEQ ID NO: 5465; WAN024FG5_at; Start 45; Stop 69
gtttgagccaagtcaactcaccatt

SEQ ID NO: 204949 - DNA, 25 bp, Artificial
  probe
  misc_feature (1)..(25): SEQ ID NO: 5465; WAN024FG5_at; Start 211; Stop 235
tttgatatccttctcccaagtcact

SEQ ID NO: 204950 - DNA, 25 bp, Artificial
  probe
  misc_feature (1)..(25): SEQ ID NO: 5465; WAN024FG5_at; Start 279; Stop 303
cacgcataaagagtttaacatctcc

SEQ ID NO: 204951 - DNA, 25 bp, Artificial
  probe
  misc_feature (1)..(25): SEQ ID NO: 5465; WAN024FG5_at; Start 59; Stop 83
aactcaccattttcttcgacacgtg

SEQ ID NO: 204952 - DNA, 25 bp, Artificial
  probe
  misc_feature (1)..(25): SEQ ID NO: 5465; WAN024FG5_at; Start 195; Stop 219
taacctgtggataacgtttgatatc

SEQ ID NO: 204953 - DNA, 25 bp, Artificial
  probe
  misc_feature (1)..(25): SEQ ID NO: 5465; WAN024FG5_at; Start 4; Stop 28
gagcgaattataggcaaactctcct

SEQ ID NO: 204954 - DNA, 25 bp, Artificial
  probe
  misc_feature (1)..(25): SEQ ID NO: 5465; WAN024FG5_at; Start 159; Stop 183
tcgtatggatagcagacatttgaac

SEQ ID NO: 204955 - DNA, 25 bp, Artificial
  probe
  misc_feature (1)..(25): SEQ ID NO: 5465; WAN024FG5_at; Start 99; Stop 123
cattttcacgtttcggtccacctgc

SEQ ID NO: 204956 - DNA, 25 bp, Artificial
  probe
  misc_feature (1)..(25): SEQ ID NO: 5465; WAN024FG5_at; Start 69; Stop 93
tttcttcgacacgtgccaagtggac

SEQ ID NO: 204957 - DNA, 25 bp, Artificial
  probe
  misc_feature (1)..(25): SEQ ID NO: 5465; WAN024FG5_at; Start 89; Stop 113
tggaccatcccattttcacgtttcg

SEQ ID NO: 204958 - DNA, 25 bp, Artificial
  probe
  misc_feature (1)..(25): SEQ ID NO: 5465; WAN024FG5_at; Start 39; Stop 63
gattgtgtttgagccaagtcaactc

SEQ ID NO: 204959 - DNA, 25 bp, Artificial
  probe
  misc_feature (1)..(25): SEQ ID NO: 5465; WAN024FG5_at; Start 261; Stop 285
gaagatctccagtcaaaccacgcat

SEQ ID NO: 204960 - DNA, 25 bp, Artificial
  probe
  misc_feature (1)..(25): SEQ ID NO: 5465; WAN024FG5_at; Start 268; Stop 292
tccagtcaaaccacgcataaagagt

SEQ ID NO: 204961 - DNA, 25 bp, Artificial
  probe
  misc_feature (1)..(25): SEQ ID NO: 5465; WAN024FG5_at; Start 109; Stop 133
tttcggtccacctgcattactgagg

SEQ ID NO: 204962 - DNA, 25 bp, Artificial
  probe
  misc_feature (1)..(25): SEQ ID NO: 5465; WAN024FG5_at; Start 153; Stop 177
cgtgcatcgtatggatagcagacat

SEQ ID NO: 204963 - DNA, 25 bp, Artificial
  probe
  misc_feature (1)..(25): SEQ ID NO: 5465; WAN024FG5_at; Start 1; Stop 25
ttggagcgaattataggcaaactct

SEQ ID NO: 204964 - DNA, 25 bp, Artificial
  probe
  misc_feature (1)..(25): SEQ ID NO: 5465; WAN024FG5_at; Start 187; Stop 211
gacatctttaacctgtggataacgt

SEQ ID NO: 204965 - DNA, 25 bp, Artificial
  probe
  misc_feature (1)..(25): SEQ ID NO: 5465; WAN024FG5_at; Start 250; Stop 274
tgtagcaacctgaagatctccagtc

SEQ ID NO: 204966 - DNA, 25 bp, Artificial
  probe
  misc_feature (1)..(25): SEQ ID NO: 5465; WAN024FG5_at; Start 16; Stop 40
ggcaaactctcctttttgaattgga

SEQ ID NO: 204967 - DNA, 25 bp, Artificial
  probe
  misc_feature (1)..(25): SEQ ID NO: 5465; WAN024FG5_at; Start 288; Stop 312
agagtttaacatctccattgtttag

SEQ ID NO: 204968 - DNA, 25 bp, Artificial
  probe
  misc_feature (1)..(25): SEQ ID NO: 5465; WAN024FG5_at; Start 166; Stop 190
gatagcagacatttgaacatagaca

SEQ ID NO: 204969 - DNA, 25 bp, Artificial
  probe
  misc_feature (1)..(25): SEQ ID NO: 5465; WAN024FG5_at; Start 126; Stop 150
tactgaggatgatgtattcttttcc

SEQ ID NO: 204970 - DNA, 25 bp, Artificial
  probe
  misc_feature (1)..(25): SEQ ID NO: 5465; WAN024FG5_at; Start 80; Stop 104
cgtgccaagtggaccatcccatttt

SEQ ID NO: 204971 - DNA, 25 bp, Artificial
  probe
  misc_feature (1)..(25): SEQ ID NO: 5465; WAN024FG5_at; Start 180; Stop 204
gaacatagacatctttaacctgtgg

SEQ ID NO: 204972 - DNA, 25 bp, Artificial
  probe
  misc_feature (1)..(25): SEQ ID NO: 5465; WAN024FG5_at; Start 206; Stop 230
taacgtttgatatccttctcccaag

SEQ ID NO: 204973 - DNA, 25 bp, Artificial
  probe
  misc_feature (1)..(25): SEQ ID NO: 5465; WAN024FG5_at; Start 117; Stop 141
cacctgcattactgaggatgatgta

SEQ ID NO: 204974 - DNA, 25 bp, Artificial
  probe
  misc_feature (1)..(25): SEQ ID NO: 5465; WAN024FG5_at; Start 246; Stop 270
tacttgtagcaacctgaagatctcc

SEQ ID NO: 204975 - DNA, 25 bp, Artificial
  probe
  misc_feature (1)..(25): SEQ ID NO: 5374; WAN024FG6_at; Start 164; Stop 188
cctttcttgttcttgcttattgcca

SEQ ID NO: 204976 - DNA, 25 bp, Artificial
  probe
  misc_feature (1)..(25): SEQ ID NO: 5374; WAN024FG6_at; Start 194; Stop 218
ttcagtctctgaagaaggctggctc

SEQ ID NO: 204977 - DNA, 25 bp, Artificial
  probe
  misc_feature (1)..(25): SEQ ID NO: 5374; WAN024FG6_at; Start 308; Stop 332
aggagacgttccaaataccactgct

SEQ ID NO: 204978 - DNA, 25 bp, Artificial
  probe
  misc_feature (1)..(25): SEQ ID NO: 5374; WAN024FG6_at; Start 261; Stop 285
gtttcatttgccagaggttgctcac

SEQ ID NO: 204979 - DNA, 25 bp, Artificial
  probe
  misc_feature (1)..(25): SEQ ID NO: 5374; WAN024FG6_at; Start 16; Stop 40
tctttagtttatctagttcacttga

SEQ ID NO: 204980 - DNA, 25 bp, Artificial
  probe
  misc_feature (1)..(25): SEQ ID NO: 5374; WAN024FG6_at; Start 269; Stop 293
tgccagaggttgctcacttgcccct

SEQ ID NO: 204981 - DNA, 25 bp, Artificial
  probe
  misc_feature (1)..(25): SEQ ID NO: 5374; WAN024FG6_at; Start 213; Stop 237
tggctcttttctgtatcagttaggg

SEQ ID NO: 204982 - DNA, 25 bp, Artificial
  probe
  misc_feature (1)..(25): SEQ ID NO: 5374; WAN024FG6_at; Start 92; Stop 116
tatcactgtttcgacattttccaaa

SEQ ID NO: 204983 - DNA, 25 bp, Artificial
  probe
  misc_feature (1)..(25): SEQ ID NO: 5374; WAN024FG6_at; Start 187; Stop 211
cagaaagttcagtctctgaagaagg

SEQ ID NO: 204984 - DNA, 25 bp, Artificial
  probe
  misc_feature (1)..(25): SEQ ID NO: 5374; WAN024FG6_at; Start 48; Stop 72
actctctgaccatttgaagcattgg

SEQ ID NO: 204985 - DNA, 25 bp, Artificial
  probe
  misc_feature (1)..(25): SEQ ID NO: 5374; WAN024FG6_at; Start 249; Stop 273
cccgaaagttgagtttcatttgcca

SEQ ID NO: 204986 - DNA, 25 bp, Artificial
  probe
  misc_feature (1)..(25): SEQ ID NO: 5374; WAN024FG6_at; Start 39; Stop 63
gataaatcaactctctgaccatttg

SEQ ID NO: 204987 - DNA, 25 bp, Artificial
  probe
  misc_feature (1)..(25): SEQ ID NO: 5374; WAN024FG6_at; Start 274; Stop 298
gaggttgctcacttgccccttcttg

SEQ ID NO: 204988 - DNA, 25 bp, Artificial
  probe
  misc_feature (1)..(25): SEQ ID NO: 5374; WAN024FG6_at; Start 207; Stop 231
gaaggctggctcttttctgtatcag

SEQ ID NO: 204989 - DNA, 25 bp, Artificial
  probe
  misc_feature (1)..(25): SEQ ID NO: 5374; WAN024FG6_at; Start 31; Stop 55
gttcacttgataaatcaactctctg

SEQ ID NO: 204990 - DNA, 25 bp, Artificial
  probe
  misc_feature (1)..(25): SEQ ID NO: 5374; WAN024FG6_at; Start 109; Stop 133
tttccaaatctcgtgcatagtaatc

SEQ ID NO: 204991 - DNA, 25 bp, Artificial
  probe
  misc_feature (1)..(25): SEQ ID NO: 5374; WAN024FG6_at; Start 197; Stop 221
agtctctgaagaaggctggctcttt

SEQ ID NO: 204992 - DNA, 25 bp, Artificial
  probe
  misc_feature (1)..(25): SEQ ID NO: 5374; WAN024FG6_at; Start 291; Stop 315
ccttcttgagctaaaacaggagacg

SEQ ID NO: 204993 - DNA, 25 bp, Artificial
  probe
  misc_feature (1)..(25): SEQ ID NO: 5374; WAN024FG6_at; Start 63; Stop 87
gaagcattggtttcaacatcttctt

SEQ ID NO: 204994 - DNA, 25 bp, Artificial
  probe
  misc_feature (1)..(25): SEQ ID NO: 5374; WAN024FG6_at; Start 115; Stop 139
aatctcgtgcatagtaatctcttgg

SEQ ID NO: 204995 - DNA, 25 bp, Artificial
  probe
  misc_feature (1)..(25): SEQ ID NO: 5374; WAN024FG6_at; Start 131; Stop 155
atctcttggaattttttcttcttgc

SEQ ID NO: 204996 - DNA, 25 bp, Artificial
  probe
  misc_feature (1)..(25): SEQ ID NO: 5374; WAN024FG6_at; Start 226; Stop 250
tatcagttagggttgagctctcccc

SEQ ID NO: 204997 - DNA, 25 bp, Artificial
  probe
  misc_feature (1)..(25): SEQ ID NO: 5374; WAN024FG6_at; Start 286; Stop 310
ttgccccttcttgagctaaaacagg

SEQ ID NO: 204998 - DNA, 25 bp, Artificial
  probe
  misc_feature (1)..(25): SEQ ID NO: 5374; WAN024FG6_at; Start 120; Stop 144
cgtgcatagtaatctcttggaattt

SEQ ID NO: 204999 - DNA, 25 bp, Artificial
  probe
  misc_feature (1)..(25): SEQ ID NO: 5374; WAN024FG6_at; Start 265; Stop 289
catttgccagaggttgctcacttgc

SEQ ID NO: 205000 - DNA, 25 bp, Artificial
  probe
  misc_feature (1)..(25): SEQ ID NO: 5374; WAN024FG6_at; Start 55; Stop 79
gaccatttgaagcattggtttcaac

SEQ ID NO: 205001 - DNA, 25 bp, Artificial
  probe
  misc_feature (1)..(25): SEQ ID NO: 5374; WAN024FG6_at; Start 321; Stop 345
aataccactgctcctacaatcatag

SEQ ID NO: 205002 - DNA, 25 bp, Artificial
  probe
  misc_feature (1)..(25): SEQ ID NO: 5374; WAN024FG6_at; Start 253; Stop 277
aaagttgagtttcatttgccagagg

SEQ ID NO: 205003 - DNA, 25 bp, Artificial
  probe
  misc_feature (1)..(25): SEQ ID NO: 5374; WAN024FG6_at; Start 154; Stop 178
gcttatctttcctttcttgttcttg

SEQ ID NO: 205004 - DNA, 25 bp, Artificial
  probe
  misc_feature (1)..(25): SEQ ID NO: 5374; WAN024FG6_at; Start 75; Stop 99
tcaacatcttctttttctatcactg

SEQ ID NO: 205005 - DNA, 25 bp, Artificial
  probe
  misc_feature (1)..(25): SEQ ID NO: 5374; WAN024FG6_at; Start 312; Stop 336
gacgttccaaataccactgctccta

SEQ ID NO: 205006 - DNA, 25 bp, Artificial
  probe
  misc_feature (1)..(25): SEQ ID NO: 5374; WAN024FG6_at; Start 294; Stop 318
tcttgagctaaaacaggagacgttc

SEQ ID NO: 205007 - DNA, 25 bp, Artificial
  probe
  misc_feature (1)..(25): SEQ ID NO: 5374; WAN024FG6_at; Start 298; Stop 322
gagctaaaacaggagacgttccaaa

SEQ ID NO: 205008 - DNA, 25 bp, Artificial
  probe
  misc_feature (1)..(25): SEQ ID NO: 5374; WAN024FG6_at; Start 178; Stop 202
gcttattgccagaaagttcagtctc

SEQ ID NO: 205009 - DNA, 25 bp, Artificial
  probe
  misc_feature (1)..(25): SEQ ID NO: 2941; WAN024FG7_at; Start 224; Stop 248
taactgatacagaaaagagccagcc

SEQ ID NO: 205010 - DNA, 25 bp, Artificial
  probe
  misc_feature (1)..(25): SEQ ID NO: 2941; WAN024FG7_at; Start 1218; Stop 1242
tgacccatcgatcggttcaccagtg

SEQ ID NO: 205011 - DNA, 25 bp, Artificial
  probe
  misc_feature (1)..(25): SEQ ID NO: 2941; WAN024FG7_at; Start 463; Stop 487
cacatggagtttaagccagatgcca

SEQ ID NO: 205012 - DNA, 25 bp, Artificial
  probe
  misc_feature (1)..(25): SEQ ID NO: 2941; WAN024FG7_at; Start 240; Stop 264
gagccagccttcttcagagactgaa

SEQ ID NO: 205013 - DNA, 25 bp, Artificial
  probe
  misc_feature (1)..(25): SEQ ID NO: 2941; WAN024FG7_at; Start 1616; Stop 1640
cctacagtgatgacgacgggaagac

SEQ ID NO: 205014 - DNA, 25 bp, Artificial
  probe
  misc_feature (1)..(25): SEQ ID NO: 2941; WAN024FG7_at; Start 1825; Stop 1849
tcagatgatcatggaaaaacttggc

SEQ ID NO: 205015 - DNA, 25 bp, Artificial
  probe
  misc_feature (1)..(25): SEQ ID NO: 2941; WAN024FG7_at; Start 209; Stop 233
gggagagctcaaccctaactgatac

SEQ ID NO: 205016 - DNA, 25 bp, Artificial
  probe
  misc_feature (1)..(25): SEQ ID NO: 2941; WAN024FG7_at; Start 2468; Stop 2492
cagaagtattggtcaacaaggctcc

SEQ ID NO: 205017 - DNA, 25 bp, Artificial
  probe
  misc_feature (1)..(25): SEQ ID NO: 2941; WAN024FG7_at; Start 1659; Stop 1683
tattactccgatggtcaaagccgat

SEQ ID NO: 205018 - DNA, 25 bp, Artificial
  probe
  misc_feature (1)..(25): SEQ ID NO: 2941; WAN024FG7_at; Start 816; Stop 840
caagcgtgccaacaatacggtttgg

SEQ ID NO: 205019 - DNA, 25 bp, Artificial
  probe
  misc_feature (1)..(25): SEQ ID NO: 2941; WAN024FG7_at; Start 169; Stop 193
gcaagtgagcaacctctggcaaatg

SEQ ID NO: 205020 - DNA, 25 bp, Artificial
  probe
  misc_feature (1)..(25): SEQ ID NO: 2941; WAN024FG7_at; Start 1734; Stop 1758
tgggcctcacaagggacggattttg

SEQ ID NO: 205021 - DNA, 25 bp, Artificial
  probe
  misc_feature (1)..(25): SEQ ID NO: 2941; WAN024FG7_at; Start 880; Stop 904
cgtgctttaacaccagaagaggtac

SEQ ID NO: 205022 - DNA, 25 bp, Artificial
  probe
  misc_feature (1)..(25): SEQ ID NO: 2941; WAN024FG7_at; Start 84; Stop 108
cattaggaaactatcggtaggagcg

SEQ ID NO: 205023 - DNA, 25 bp, Artificial
  probe
  misc_feature (1)..(25): SEQ ID NO: 2941; WAN024FG7_at; Start 1881; Stop 1905
ggtagacggtcaaaagatccactct

SEQ ID NO: 205024 - DNA, 25 bp, Artificial
  probe
  misc_feature (1)..(25): SEQ ID NO: 2941; WAN024FG7_at; Start 1943; Stop 1967
caacggtggtacaactaaacaatgg

SEQ ID NO: 205025 - DNA, 25 bp, Artificial
  probe
  misc_feature (1)..(25): SEQ ID NO: 2941; WAN024FG7_at; Start 140; Stop 164
gaacgtctcctgttttagctcaaga

SEQ ID NO: 205026 - DNA, 25 bp, Artificial
  probe
  misc_feature (1)..(25): SEQ ID NO: 2941; WAN024FG7_at; Start 982; Stop 1006
gacatattcgaaagcgggcgtaacg

SEQ ID NO: 205027 - DNA, 25 bp, Artificial
  probe
  misc_feature (1)..(25): SEQ ID NO: 2941; WAN024FG7_at; Start 1843; Stop 1867
acttggcatgctggagaagcggtca

SEQ ID NO: 205028 - DNA, 25 bp, Artificial
  probe
  misc_feature (1)..(25): SEQ ID NO: 2941; WAN024FG7_at; Start 1293; Stop 1317
tatctatgacatgttcccagaaggg

SEQ ID NO: 205029 - DNA, 25 bp, Artificial
  probe
  misc_feature (1)..(25): SEQ ID NO: 2941; WAN024FG7_at; Start 2181; Stop 2205
cttggcacgtgtcgaagaaaatggt

SEQ ID NO: 205030 - DNA, 25 bp, Artificial
  probe
  misc_feature (1)..(25): SEQ ID NO: 2941; WAN024FG7_at; Start 1689; Stop 1713
gaaattcttgggtgtaggtcctgga

SEQ ID NO: 205031 - DNA, 25 bp, Artificial
  probe
  misc_feature (1)..(25): SEQ ID NO: 2941; WAN024FG7_at; Start 1065; Stop 1089
taaaggaactttgatcgcaggtgca

SEQ ID NO: 205032 - DNA, 25 bp, Artificial
  probe
  misc_feature (1)..(25): SEQ ID NO: 2941; WAN024FG7_at; Start 1448; Stop 1472
caccagatggtaaggcgacagacta

SEQ ID NO: 205033 - DNA, 25 bp, Artificial
  probe
  misc_feature (1)..(25): SEQ ID NO: 2941; WAN024FG7_at; Start 2499; Stop 2523
tcaattggcaaatggtaaaacagcg

SEQ ID NO: 205034 - DNA, 25 bp, Artificial
  probe
  misc_feature (1)..(25): SEQ ID NO: 2941; WAN024FG7_at; Start 447; Stop 471
tgaaaacgcaacagttcacatggag

SEQ ID NO: 205035 - DNA, 25 bp, Artificial
  probe
  misc_feature (1)..(25): SEQ ID NO: 2941; WAN024FG7_at; Start 2165; Stop 2189
aaaatgggatggtccacttggcacg

SEQ ID NO: 205036 - DNA, 25 bp, Artificial
  probe
  misc_feature (1)..(25): SEQ ID NO: 2941; WAN024FG7_at; Start 1719; Stop 1743
aattgtacttcggaatgggcctcac

SEQ ID NO: 205037 - DNA, 25 bp, Artificial
  probe
  misc_feature (1)..(25): SEQ ID NO: 2941; WAN024FG7_at; Start 1995; Stop 2019
gactggagatcttcaggttgctaca

SEQ ID NO: 205038 - DNA, 25 bp, Artificial
  probe
  misc_feature (1)..(25): SEQ ID NO: 2941; WAN024FG7_at; Start 1493; Stop 1517
ttaaaccagcctatagcgacaaggg

SEQ ID NO: 205039 - DNA, 25 bp, Artificial
  probe
  misc_feature (1)..(25): SEQ ID NO: 2941; WAN024FG7_at; Start 2245; Stop 2269
gagtttgcctataattcgctccaag

SEQ ID NO: 205040 - DNA, 25 bp, Artificial
  probe
  misc_feature (1)..(25): SEQ ID NO: 2941; WAN024FG7_at; Start 2015; Stop 2039
ctacaagtaaagacggaggagtgac

SEQ ID NO: 205041 - DNA, 25 bp, Artificial
  probe
  misc_feature (1)..(25): SEQ ID NO: 2941; WAN024FG7_at; Start 1092; Stop 1116
tgaacgccgtctccattcgagtgac

SEQ ID NO: 205042 - DNA, 25 bp, Artificial
  probe
  misc_feature (1)..(25): SEQ ID NO: 2941; WAN024FG7_at; Start 1858; Stop 1882
gaagcggtcaacgataaccgtcagg

SEQ ID NO: 205043 - DNA, 25 bp, Artificial
  probe
  misc_feature (1)..(25): SEQ ID NO: 5881; WAN024FG8_at; Start 222; Stop 246
cgctaatccccttaatagttggcaa

SEQ ID NO: 205044 - DNA, 25 bp, Artificial
  probe
  misc_feature (1)..(25): SEQ ID NO: 5881; WAN024FG8_at; Start 20; Stop 44
gctgctttcataggatctgttccat

SEQ ID NO: 205045 - DNA, 25 bp, Artificial
  probe
  misc_feature (1)..(25): SEQ ID NO: 5881; WAN024FG8_at; Start 203; Stop 227
tctttataggctgcagaatcgctaa

SEQ ID NO: 205046 - DNA, 25 bp, Artificial
  probe
  misc_feature (1)..(25): SEQ ID NO: 5881; WAN024FG8_at; Start 8; Stop 32
tctgcttcttttgctgctttcatag

SEQ ID NO: 205047 - DNA, 25 bp, Artificial
  probe
  misc_feature (1)..(25): SEQ ID NO: 5881; WAN024FG8_at; Start 209; Stop 233
taggctgcagaatcgctaatcccct

SEQ ID NO: 205048 - DNA, 25 bp, Artificial
  probe
  misc_feature (1)..(25): SEQ ID NO: 5881; WAN024FG8_at; Start 207; Stop 231
tataggctgcagaatcgctaatccc

SEQ ID NO: 205049 - DNA, 25 bp, Artificial
  probe
  misc_feature (1)..(25): SEQ ID NO: 5881; WAN024FG8_at; Start 159; Stop 183
taattacttcttcagcatgtttaaa

SEQ ID NO: 205050 - DNA, 25 bp, Artificial
  probe
  misc_feature (1)..(25): SEQ ID NO: 5881; WAN024FG8_at; Start 212; Stop 236
gctgcagaatcgctaatccccttaa

SEQ ID NO: 205051 - DNA, 25 bp, Artificial
  probe
  misc_feature (1)..(25): SEQ ID NO: 5881; WAN024FG8_at; Start 71; Stop 95
tcaataatgtgttggttagtcaaca

SEQ ID NO: 205052 - DNA, 25 bp, Artificial
  probe
  misc_feature (1)..(25): SEQ ID NO: 5881; WAN024FG8_at; Start 189; Stop 213
tacgagtttcattttctttataggc

SEQ ID NO: 205053 - DNA, 25 bp, Artificial
  probe
  misc_feature (1)..(25): SEQ ID NO: 5881; WAN024FG8_at; Start 14; Stop 38
tcttttgctgctttcataggatctg

SEQ ID NO: 205054 - DNA, 25 bp, Artificial
  probe
  misc_feature (1)..(25): SEQ ID NO: 5881; WAN024FG8_at; Start 129; Stop 153
caatagcagtaccttttttaacagc

SEQ ID NO: 205055 - DNA, 25 bp, Artificial
  probe
  misc_feature (1)..(25): SEQ ID NO: 5881; WAN024FG8_at; Start 240; Stop 264
ttggcaacatacctactggagttga

SEQ ID NO: 205056 - DNA, 25 bp, Artificial
  probe
  misc_feature (1)..(25): SEQ ID NO: 5881; WAN024FG8_at; Start 194; Stop 218
gtttcattttctttataggctgcag

SEQ ID NO: 205057 - DNA, 25 bp, Artificial
  probe
  misc_feature (1)..(25): SEQ ID NO: 5881; WAN024FG8_at; Start 78; Stop 102
tgtgttggttagtcaacataccagc

SEQ ID NO: 205058 - DNA, 25 bp, Artificial
  probe
  misc_feature (1)..(25): SEQ ID NO: 5881; WAN024FG8_at; Start 81; Stop 105
gttggttagtcaacataccagcttg

SEQ ID NO: 205059 - DNA, 25 bp, Artificial
  probe
  misc_feature (1)..(25): SEQ ID NO: 5881; WAN024FG8_at; Start 225; Stop 249
taatccccttaatagttggcaacat

SEQ ID NO: 205060 - DNA, 25 bp, Artificial
  probe
  misc_feature (1)..(25): SEQ ID NO: 5881; WAN024FG8_at; Start 28; Stop 52
cataggatctgttccatttgtaatg

SEQ ID NO: 205061 - DNA, 25 bp, Artificial
  probe
  misc_feature (1)..(25): SEQ ID NO: 5881; WAN024FG8_at; Start 49; Stop 73
aatgatatcttggaacatttgttca

SEQ ID NO: 205062 - DNA, 25 bp, Artificial
  probe
  misc_feature (1)..(25): SEQ ID NO: 5881; WAN024FG8_at; Start 120; Stop 144
tttcataaccaatagcagtaccttt

SEQ ID NO: 205063 - DNA, 25 bp, Artificial
  probe
  misc_feature (1)..(25): SEQ ID NO: 5881; WAN024FG8_at; Start 117; Stop 141
cattttcataaccaatagcagtacc

SEQ ID NO: 205064 - DNA, 25 bp, Artificial
  probe
  misc_feature (1)..(25): SEQ ID NO: 5881; WAN024FG8_at; Start 144; Stop 168
ttttaacagcttcagtaattacttc

SEQ ID NO: 205065 - DNA, 25 bp, Artificial
  probe
  misc_feature (1)..(25): SEQ ID NO: 5881; WAN024FG8_at; Start 228; Stop 252
tccccttaatagttggcaacatacc

SEQ ID NO: 205066 - DNA, 25 bp, Artificial
  probe
  misc_feature (1)..(25): SEQ ID NO: 5881; WAN024FG8_at; Start 84; Stop 108
ggttagtcaacataccagcttgtac

SEQ ID NO: 205067 - DNA, 25 bp, Artificial
  probe
  misc_feature (1)..(25): SEQ ID NO: 5881; WAN024FG8_at; Start 155; Stop 179
tcagtaattacttcttcagcatgtt

SEQ ID NO: 205068 - DNA, 25 bp, Artificial
  probe
  misc_feature (1)..(25): SEQ ID NO: 5881; WAN024FG8_at; Start 23; Stop 47
gctttcataggatctgttccatttg

SEQ ID NO: 205069 - DNA, 25 bp, Artificial
  probe
  misc_feature (1)..(25): SEQ ID NO: 5881; WAN024FG8_at; Start 41; Stop 65
ccatttgtaatgatatcttggaaca

SEQ ID NO: 205070 - DNA, 25 bp, Artificial
  probe
  misc_feature (1)..(25): SEQ ID NO: 5881; WAN024FG8_at; Start 134; Stop 158
gcagtaccttttttaacagcttcag

SEQ ID NO: 205071 - DNA, 25 bp, Artificial
  probe
  misc_feature (1)..(25): SEQ ID NO: 5881; WAN024FG8_at; Start 61; Stop 85
gaacatttgttcaataatgtgttgg

SEQ ID NO: 205072 - DNA, 25 bp, Artificial
  probe
  misc_feature (1)..(25): SEQ ID NO: 5881; WAN024FG8_at; Start 90; Stop 114
tcaacataccagcttgtacacttgg

SEQ ID NO: 205073 - DNA, 25 bp, Artificial
  probe
  misc_feature (1)..(25): SEQ ID NO: 5881; WAN024FG8_at; Start 150; Stop 174
cagcttcagtaattacttcttcagc

SEQ ID NO: 205074 - DNA, 25 bp, Artificial
  probe
  misc_feature (1)..(25): SEQ ID NO: 5881; WAN024FG8_at; Start 215; Stop 239
gcagaatcgctaatccccttaatag

SEQ ID NO: 205075 - DNA, 25 bp, Artificial
  probe
  misc_feature (1)..(25): SEQ ID NO: 5881; WAN024FG8_at; Start 237; Stop 261
tagttggcaacatacctactggagt

SEQ ID NO: 205076 - DNA, 25 bp, Artificial
  probe
  misc_feature (1)..(25): SEQ ID NO: 5881; WAN024FG8_at; Start 235; Stop 259
aatagttggcaacatacctactgga

SEQ ID NO: 205077 - DNA, 25 bp, Artificial
  probe
  misc_feature (1)..(25): SEQ ID NO: 623; WAN024FG9_at; Start 269; Stop 293
caggtttagcaaatggaaatgtgcc

SEQ ID NO: 205078 - DNA, 25 bp, Artificial
  probe
  misc_feature (1)..(25): SEQ ID NO: 623; WAN024FG9_at; Start 1196; Stop 1220
caagtgtacaagctggtatgttgac

SEQ ID NO: 205079 - DNA, 25 bp, Artificial
  probe
  misc_feature (1)..(25): SEQ ID NO: 623; WAN024FG9_at; Start 1266; Stop 1290
tggaacagatcctatgaaagcagca

SEQ ID NO: 205080 - DNA, 25 bp, Artificial
  probe
  misc_feature (1)..(25): SEQ ID NO: 623; WAN024FG9_at; Start 892; Stop 916
cctattccaaaaatcaaagagtctg

SEQ ID NO: 205081 - DNA, 25 bp, Artificial
  probe
  misc_feature (1)..(25): SEQ ID NO: 623; WAN024FG9_at; Start 1094; Stop 1118
cagcctataaagaaaatgaaactcg

SEQ ID NO: 205082 - DNA, 25 bp, Artificial
  probe
  misc_feature (1)..(25): SEQ ID NO: 623; WAN024FG9_at; Start 596; Stop 620
gaacaaatgacttaatggcaacacg

SEQ ID NO: 205083 - DNA, 25 bp, Artificial
  probe
  misc_feature (1)..(25): SEQ ID NO: 623; WAN024FG9_at; Start 686; Stop 710
tgacaagccaacttgctcaagatgg

SEQ ID NO: 205084 - DNA, 25 bp, Artificial
  probe
  misc_feature (1)..(25): SEQ ID NO: 623; WAN024FG9_at; Start 299; Stop 323
tcagtacagctcttcctaaccaagt

SEQ ID NO: 205085 - DNA, 25 bp, Artificial
  probe
  misc_feature (1)..(25): SEQ ID NO: 623; WAN024FG9_at; Start 670; Stop 694
gatcttaaagcagacttgacaagcc

SEQ ID NO: 205086 - DNA, 25 bp, Artificial
  probe
  misc_feature (1)..(25): SEQ ID NO: 623; WAN024FG9_at; Start 247; Stop 271
gacttctatactaaatggactacag

SEQ ID NO: 205087 - DNA, 25 bp, Artificial
  probe
  misc_feature (1)..(25): SEQ ID NO: 623; WAN024FG9_at; Start 363; Stop 387
tgattctatcaagcgtattggacaa

SEQ ID NO: 205088 - DNA, 25 bp, Artificial
  probe
  misc_feature (1)..(25): SEQ ID NO: 623; WAN024FG9_at; Start 971; Stop 995
caaaacatccagaagttgctaaagc

SEQ ID NO: 205089 - DNA, 25 bp, Artificial
  probe
  misc_feature (1)..(25): SEQ ID NO: 623; WAN024FG9_at; Start 19; Stop 43
tttttatgtctagctggaattgcgc

SEQ ID NO: 205090 - DNA, 25 bp, Artificial
  probe
  misc_feature (1)..(25): SEQ ID NO: 623; WAN024FG9_at; Start 768; Stop 792
taatgtccttcaacaagctaccttg

SEQ ID NO: 205091 - DNA, 25 bp, Artificial
  probe
  misc_feature (1)..(25): SEQ ID NO: 623; WAN024FG9_at; Start 918; Stop 942
taaagaccaaggaattgaaacctca

SEQ ID NO: 205092 - DNA, 25 bp, Artificial
  probe
  misc_feature (1)..(25): SEQ ID NO: 623; WAN024FG9_at; Start 1078; Stop 1102
gggattagcgattctgcagcctata

SEQ ID NO: 205093 - DNA, 25 bp, Artificial
  probe
  misc_feature (1)..(25): SEQ ID NO: 623; WAN024FG9_at; Start 1156; Stop 1180
gctgttaaaaaaggtactgctattg

SEQ ID NO: 205094 - DNA, 25 bp, Artificial
  probe
  misc_feature (1)..(25): SEQ ID NO: 623; WAN024FG9_at; Start 425; Stop 449
tcggagatgattactactctgttcc

SEQ ID NO: 205095 - DNA, 25 bp, Artificial
  probe
  misc_feature (1)..(25): SEQ ID NO: 623; WAN024FG9_at; Start 649; Stop 673
ggaggaagcctcttaacaaaagatc

SEQ ID NO: 205096 - DNA, 25 bp, Artificial
  probe
  misc_feature (1)..(25): SEQ ID NO: 623; WAN024FG9_at; Start 464; Stop 488
cacaagtcatgtgggttagaacaga

SEQ ID NO: 205097 - DNA, 25 bp, Artificial
  probe
  misc_feature (1)..(25): SEQ ID NO: 623; WAN024FG9_at; Start 284; Stop 308
gaaatgtgccagatatcagtacagc

SEQ ID NO: 205098 - DNA, 25 bp, Artificial
  probe
  misc_feature (1)..(25): SEQ ID NO: 623; WAN024FG9_at; Start 98; Stop 122
ctgaaccaccaacagaattatctgg

SEQ ID NO: 205099 - DNA, 25 bp, Artificial
  probe
  misc_feature (1)..(25): SEQ ID NO: 623; WAN024FG9_at; Start 34; Stop 58
ggaattgcgctagcggctgttgcct

SEQ ID NO: 205100 - DNA, 25 bp, Artificial
  probe
  misc_feature (1)..(25): SEQ ID NO: 623; WAN024FG9_at; Start 574; Stop 598
tatggcttgtctgttccgtttggaa

SEQ ID NO: 205101 - DNA, 25 bp, Artificial
  probe
  misc_feature (1)..(25): SEQ ID NO: 623; WAN024FG9_at; Start 822; Stop 846
taactctggcttccatatcggagga

SEQ ID NO: 205102 - DNA, 25 bp, Artificial
  probe
  misc_feature (1)..(25): SEQ ID NO: 623; WAN024FG9_at; Start 839; Stop 863
tcggaggaattaatgccaacagtcc

SEQ ID NO: 205103 - DNA, 25 bp, Artificial
  probe
  misc_feature (1)..(25): SEQ ID NO: 623; WAN024FG9_at; Start 116; Stop 140
tatctggtgagattacaatgtggca

SEQ ID NO: 205104 - DNA, 25 bp, Artificial
  probe
  misc_feature (1)..(25): SEQ ID NO: 623; WAN024FG9_at; Start 131; Stop 155
caatgtggcactcctttactcaagg

SEQ ID NO: 205105 - DNA, 25 bp, Artificial
  probe
  misc_feature (1)..(25): SEQ ID NO: 623; WAN024FG9_at; Start 55; Stop 79
gccttggtagcttgttcaggaaaaa

SEQ ID NO: 205106 - DNA, 25 bp, Artificial
  probe
  misc_feature (1)..(25): SEQ ID NO: 623; WAN024FG9_at; Start 1047; Stop 1071
aactccagtaggtatgttgccaact

SEQ ID NO: 205107 - DNA, 25 bp, Artificial
  probe
  misc_feature (1)..(25): SEQ ID NO: 623; WAN024FG9_at; Start 181; Stop 205
tcagcagatgctttcatgcaaaagc

SEQ ID NO: 205108 - DNA, 25 bp, Artificial
  probe
  misc_feature (1)..(25): SEQ ID NO: 623; WAN024FG9_at; Start 82; Stop 106
gaagctacaactagtactgaaccac

SEQ ID NO: 205109 - DNA, 25 bp, Artificial
  probe
  misc_feature (1)..(25): SEQ ID NO: 623; WAN024FG9_at; Start 323; Stop 347
taatggaaatggtcaactcagatgc

SEQ ID NO: 205110 - DNA, 25 bp, Artificial
  probe
  misc_feature (1)..(25): SEQ ID NO: 623; WAN024FG9_at; Start 527; Stop 551
gggatcaactctatgaagcttctaa

SEQ ID NO: 205111 - DNA, 25 bp, Artificial
  probe
  misc_feature (1)..(25): SEQ ID NO: 2826; WAN024FGA_at; Start 167; Stop 191
cattaaccataatcattggtgctcc

SEQ ID NO: 205112 - DNA, 25 bp, Artificial
  probe
  misc_feature (1)..(25): SEQ ID NO: 2826; WAN024FGA_at; Start 204; Stop 228
gataaacaccaaacataggaatgcc

SEQ ID NO: 205113 - DNA, 25 bp, Artificial
  probe
  misc_feature (1)..(25): SEQ ID NO: 2826; WAN024FGA_at; Start 191; Stop 215
caaaccaaatgttgataaacaccaa

SEQ ID NO: 205114 - DNA, 25 bp, Artificial
  probe
  misc_feature (1)..(25): SEQ ID NO: 2826; WAN024FGA_at; Start 102; Stop 126
tgaagcaccatctatcttagcagcc

SEQ ID NO: 205115 - DNA, 25 bp, Artificial
  probe
  misc_feature (1)..(25): SEQ ID NO: 2826; WAN024FGA_at; Start 56; Stop 80
ccactttaatatgtggaaagacgat

SEQ ID NO: 205116 - DNA, 25 bp, Artificial
  probe
  misc_feature (1)..(25): SEQ ID NO: 2826; WAN024FGA_at; Start 247; Stop 271
aatgcaggtgtatgttccattaaac

SEQ ID NO: 205117 - DNA, 25 bp, Artificial
  probe
  misc_feature (1)..(25): SEQ ID NO: 2826; WAN024FGA_at; Start 136; Stop 160
tcttctggtactgtttgcaaagctg

SEQ ID NO: 205118 - DNA, 25 bp, Artificial
  probe
  misc_feature (1)..(25): SEQ ID NO: 2826; WAN024FGA_at; Start 36; Stop 60
aacaactagaagtcctacaaccact

SEQ ID NO: 205119 - DNA, 25 bp, Artificial
  probe
  misc_feature (1)..(25): SEQ ID NO: 2826; WAN024FGA_at; Start 222; Stop 246
gaatgcccatgtactatctgtcaaa

SEQ ID NO: 205120 - DNA, 25 bp, Artificial
  probe
  misc_feature (1)..(25): SEQ ID NO: 2826; WAN024FGA_at; Start 82; Stop 106
aacttgaacacctgccaacttgaag

SEQ ID NO: 205121 - DNA, 25 bp, Artificial
  probe
  misc_feature (1)..(25): SEQ ID NO: 2826; WAN024FGA_at; Start 69; Stop 93
tggaaagacgataaacttgaacacc

SEQ ID NO: 205122 - DNA, 25 bp, Artificial
  probe
  misc_feature (1)..(25): SEQ ID NO: 2826; WAN024FGA_at; Start 14; Stop 38
taaagatccatacagttctcaaaac

SEQ ID NO: 205123 - DNA, 25 bp, Artificial
  probe
  misc_feature (1)..(25): SEQ ID NO: 2826; WAN024FGA_at; Start 144; Stop 168
tactgtttgcaaagctgaaagcaca

SEQ ID NO: 205124 - DNA, 25 bp, Artificial
  probe
  misc_feature (1)..(25): SEQ ID NO: 2826; WAN024FGA_at; Start 2; Stop 26
tgtcaaagttattaaagatccatac

SEQ ID NO: 205125 - DNA, 25 bp, Artificial
  probe
  misc_feature (1)..(25): SEQ ID NO: 2826; WAN024FGA_at; Start 174; Stop 198
cataatcattggtgctccaaaccaa

SEQ ID NO: 205126 - DNA, 25 bp, Artificial
  probe
  misc_feature (1)..(25): SEQ ID NO: 2826; WAN024FGA_at; Start 87; Stop 111
gaacacctgccaacttgaagcacca

SEQ ID NO: 205127 - DNA, 25 bp, Artificial
  probe
  misc_feature (1)..(25): SEQ ID NO: 2826; WAN024FGA_at; Start 114; Stop 138
tatcttagcagcctcaaattgttct

SEQ ID NO: 205128 - DNA, 25 bp, Artificial
  probe
  misc_feature (1)..(25): SEQ ID NO: 2826; WAN024FGA_at; Start 119; Stop 143
tagcagcctcaaattgttcttctgg

SEQ ID NO: 205129 - DNA, 25 bp, Artificial
  probe
  misc_feature (1)..(25): SEQ ID NO: 2826; WAN024FGA_at; Start 232; Stop 256
gtactatctgtcaaaaatgcaggtg

SEQ ID NO: 205130 - DNA, 25 bp, Artificial
  probe
  misc_feature (1)..(25): SEQ ID NO: 2826; WAN024FGA_at; Start 26; Stop 50
cagttctcaaaacaactagaagtcc

SEQ ID NO: 205131 - DNA, 25 bp, Artificial
  probe
  misc_feature (1)..(25): SEQ ID NO: 2826; WAN024FGA_at; Start 152; Stop 176
gcaaagctgaaagcacattaaccat

SEQ ID NO: 205132 - DNA, 25 bp, Artificial
  probe
  misc_feature (1)..(25): SEQ ID NO: 2826; WAN024FGA_at; Start 47; Stop 71
gtcctacaaccactttaatatgtgg

SEQ ID NO: 205133 - DNA, 25 bp, Artificial
  probe
  misc_feature (1)..(25): SEQ ID NO: 2826; WAN024FGA_at; Start 240; Stop 264
tgtcaaaaatgcaggtgtatgttcc

SEQ ID NO: 205134 - DNA, 25 bp, Artificial
  probe
  misc_feature (1)..(25): SEQ ID NO: 2826; WAN024FGA_at; Start 94; Stop 118
tgccaacttgaagcaccatctatct

SEQ ID NO: 205135 - DNA, 25 bp, Artificial
  probe
  misc_feature (1)..(25): SEQ ID NO: 2826; WAN024FGA_at; Start 157; Stop 181
gctgaaagcacattaaccataatca

SEQ ID NO: 205136 - DNA, 25 bp, Artificial
  probe
  misc_feature (1)..(25): SEQ ID NO: 2826; WAN024FGA_at; Start 184; Stop 208
ggtgctccaaaccaaatgttgataa

SEQ ID NO: 205137 - DNA, 25 bp, Artificial
  probe
  misc_feature (1)..(25): SEQ ID NO: 2826; WAN024FGA_at; Start 106; Stop 130
gcaccatctatcttagcagcctcaa

SEQ ID NO: 205138 - DNA, 25 bp, Artificial
  probe
  misc_feature (1)..(25): SEQ ID NO: 2826; WAN024FGA_at; Start 208; Stop 232
aacaccaaacataggaatgcccatg

SEQ ID NO: 205139 - DNA, 25 bp, Artificial
  probe
  misc_feature (1)..(25): SEQ ID NO: 2826; WAN024FGA_at; Start 219; Stop 243
taggaatgcccatgtactatctgtc

SEQ ID NO: 205140 - DNA, 25 bp, Artificial
  probe
  misc_feature (1)..(25): SEQ ID NO: 2826; WAN024FGA_at; Start 251; Stop 275
caggtgtatgttccattaaacctaa

SEQ ID NO: 205141 - DNA, 25 bp, Artificial
  probe
  misc_feature (1)..(25): SEQ ID NO: 2826; WAN024FGA_at; Start 124; Stop 148
gcctcaaattgttcttctggtactg

SEQ ID NO: 205142 - DNA, 25 bp, Artificial
  probe
  misc_feature (1)..(25): SEQ ID NO: 2826; WAN024FGA_at; Start 180; Stop 204
cattggtgctccaaaccaaatgttg

SEQ ID NO: 205143 - DNA, 25 bp, Artificial
  probe
  misc_feature (1)..(25): SEQ ID NO: 2826; WAN024FGA_at; Start 75; Stop 99
gacgataaacttgaacacctgccaa

SEQ ID NO: 205144 - DNA, 25 bp, Artificial
  probe
  misc_feature (1)..(25): SEQ ID NO: 2826; WAN024FGA_at; Start 141; Stop 165
tggtactgtttgcaaagctgaaagc

SEQ ID NO: 205145 - DNA, 25 bp, Artificial
  probe
  misc_feature (1)..(25): SEQ ID NO: 2690; WAN024FGB_at; Start 248; Stop 272
tagtagggtttgtattggctttagc

SEQ ID NO: 205146 - DNA, 25 bp, Artificial
  probe
  misc_feature (1)..(25): SEQ ID NO: 2690; WAN024FGB_at; Start 279; Stop 303
cagagtacgccacttcaagaaatta

SEQ ID NO: 205147 - DNA, 25 bp, Artificial
  probe
  misc_feature (1)..(25): SEQ ID NO: 2690; WAN024FGB_at; Start 458; Stop 482
catgggcattcctatgtttggtgtt

SEQ ID NO: 205148 - DNA, 25 bp, Artificial
  probe
  misc_feature (1)..(25): SEQ ID NO: 2690; WAN024FGB_at; Start 657; Stop 681
gagaactgtatggatctttaataac

SEQ ID NO: 205149 - DNA, 25 bp, Artificial
  probe
  misc_feature (1)..(25): SEQ ID NO: 2690; WAN024FGB_at; Start 810; Stop 834
ctttatcttcttggtggcgatttgc

SEQ ID NO: 205150 - DNA, 25 bp, Artificial
  probe
  misc_feature (1)..(25): SEQ ID NO: 2690; WAN024FGB_at; Start 21; Stop 45
aactcgctggatatttgttttgcca

SEQ ID NO: 205151 - DNA, 25 bp, Artificial
  probe
  misc_feature (1)..(25): SEQ ID NO: 2690; WAN024FGB_at; Start 545; Stop 569
taccagaagaacaatttgaggctgc

SEQ ID NO: 205152 - DNA, 25 bp, Artificial
  probe
  misc_feature (1)..(25): SEQ ID NO: 2690; WAN024FGB_at; Start 175; Stop 199
tcagatcccaacttctttaatgcgt

SEQ ID NO: 205153 - DNA, 25 bp, Artificial
  probe
  misc_feature (1)..(25): SEQ ID NO: 2690; WAN024FGB_at; Start 694; Stop 718
tacctcattactggtggtggaccag

SEQ ID NO: 205154 - DNA, 25 bp, Artificial
  probe
  misc_feature (1)..(25): SEQ ID NO: 2690; WAN024FGB_at; Start 510; Stop 534
gattatggttaatgtgctttcagct

SEQ ID NO: 205155 - DNA, 25 bp, Artificial
  probe
  misc_feature (1)..(25): SEQ ID NO: 2690; WAN024FGB_at; Start 849; Stop 873
tatcatcagtaagtgggaaaaggag

SEQ ID NO: 205156 - DNA, 25 bp, Artificial
  probe
  misc_feature (1)..(25): SEQ ID NO: 2690; WAN024FGB_at; Start 494; Stop 518
ggtttggagcaccaatgattatggt

SEQ ID NO: 205157 - DNA, 25 bp, Artificial
  probe
  misc_feature (1)..(25): SEQ ID NO: 2690; WAN024FGB_at; Start 771; Stop 795
taaattgttgggtcgtgcttcagca

SEQ ID NO: 205158 - DNA, 25 bp, Artificial
  probe
  misc_feature (1)..(25): SEQ ID NO: 2690; WAN024FGB_at; Start 573; Stop 597
gatagatggtgcttcaagttggcag

SEQ ID NO: 205159 - DNA, 25 bp, Artificial
  probe
  misc_feature (1)..(25): SEQ ID NO: 2690; WAN024FGB_at; Start 418; Stop 442
ggtttaatggaacatacacctgcat

SEQ ID NO: 205160 - DNA, 25 bp, Artificial
  probe
  misc_feature (1)..(25): SEQ ID NO: 2690; WAN024FGB_at; Start 780; Stop 804
gggtcgtgcttcagcagttacagta

SEQ ID NO: 205161 - DNA, 25 bp, Artificial
  probe
  misc_feature (1)..(25): SEQ ID NO: 2690; WAN024FGB_at; Start 724; Stop 748
gctacaacgacgcttccaatttttg

SEQ ID NO: 205162 - DNA, 25 bp, Artificial
  probe
  misc_feature (1)..(25): SEQ ID NO: 2690; WAN024FGB_at; Start 483; Stop 507
tatcaacatttggtttggagcacca

SEQ ID NO: 205163 - DNA, 25 bp, Artificial
  probe
  misc_feature (1)..(25): SEQ ID NO: 2690; WAN024FGB_at; Start 263; Stop 287
tggctttagctcttcacagagtacg

SEQ ID NO: 205164 - DNA, 25 bp, Artificial
  probe
  misc_feature (1)..(25): SEQ ID NO: 2690; WAN024FGB_at; Start 529; Stop 553
tcagctttgcaaacagtaccagaag

SEQ ID NO: 205165 - DNA, 25 bp, Artificial
  probe
  misc_feature (1)..(25): SEQ ID NO: 2690; WAN024FGB_at; Start 638; Stop 662
taggacttctagttgttttgagaac

SEQ ID NO: 205166 - DNA, 25 bp, Artificial
  probe
  misc_feature (1)..(25): SEQ ID NO: 2690; WAN024FGB_at; Start 592; Stop 616
tggcaggtgttcaagtttatcgtct

SEQ ID NO: 205167 - DNA, 25 bp, Artificial
  probe
  misc_feature (1)..(25): SEQ ID NO: 2690; WAN024FGB_at; Start 230; Stop 254
cattagttggtcaagttttagtagg

SEQ ID NO: 205168 - DNA, 25 bp, Artificial
  probe
  misc_feature (1)..(25): SEQ ID NO: 2690; WAN024FGB_at; Start 322; Stop 346
gttccttgggcatttcctaccatcg

SEQ ID NO: 205169 - DNA, 25 bp, Artificial
  probe
  misc_feature (1)..(25): SEQ ID NO: 2690; WAN024FGB_at; Start 619; Stop 643
ccacatattaaagtggttgtaggac

SEQ ID NO: 205170 - DNA, 25 bp, Artificial
  probe
  misc_feature (1)..(25): SEQ ID NO: 2690; WAN024FGB_at; Start 385; Stop 409
tatggctacttacctaatctaatcg

SEQ ID NO: 205171 - DNA, 25 bp, Artificial
  probe
  misc_feature (1)..(25): SEQ ID NO: 2690; WAN024FGB_at; Start 709; Stop 733
ggtggaccagccaatgctacaacga

SEQ ID NO: 205172 - DNA, 25 bp, Artificial
  probe
  misc_feature (1)..(25): SEQ ID NO: 2690; WAN024FGB_at; Start 110; Stop 134
ccaataagcatttgattatgcctaa

SEQ ID NO: 205173 - DNA, 25 bp, Artificial
  probe
  misc_feature (1)..(25): SEQ ID NO: 2690; WAN024FGB_at; Start 833; Stop 857
gctttatctactttgctatcatcag

SEQ ID NO: 205174 - DNA, 25 bp, Artificial
  probe
  misc_feature (1)..(25): SEQ ID NO: 2690; WAN024FGB_at; Start 560; Stop 584
ttgaggctgctaagatagatggtgc

SEQ ID NO: 205175 - DNA, 25 bp, Artificial
  probe
  misc_feature (1)..(25): SEQ ID NO: 2690; WAN024FGB_at; Start 445; Stop 469
ttgacagatagtacatgggcattcc

SEQ ID NO: 205176 - DNA, 25 bp, Artificial
  probe
  misc_feature (1)..(25): SEQ ID NO: 2690; WAN024FGB_at; Start 430; Stop 454
catacacctgcatttttgacagata

SEQ ID NO: 205177 - DNA, 25 bp, Artificial
  probe
  misc_feature (1)..(25): SEQ ID NO: 2690; WAN024FGB_at; Start 43; Stop 67
ccagctatgattatcgtaggattac

SEQ ID NO: 205178 - DNA, 25 bp, Artificial
  probe
  misc_feature (1)..(25): SEQ ID NO: 2690; WAN024FGB_at; Start 10; Stop 34
gaacgtaatttaactcgctggatat

SEQ ID NO: 205179 - DNA, 25 bp, Artificial
  probe
  misc_feature (1)..(25): SEQ ID NO: 1075; WAN024FGC_at; Start 77; Stop 101
tcccattggtatggattatcatatc

SEQ ID NO: 205180 - DNA, 25 bp, Artificial
  probe
  misc_feature (1)..(25): SEQ ID NO: 1075; WAN024FGC_at; Start 442; Stop 466
ctatcttttagtgttccatatgcag

SEQ ID NO: 205181 - DNA, 25 bp, Artificial
  probe
  misc_feature (1)..(25): SEQ ID NO: 1075; WAN024FGC_at; Start 688; Stop 712
gcccttcgttcacttaatggttcag

SEQ ID NO: 205182 - DNA, 25 bp, Artificial
  probe
  misc_feature (1)..(25): SEQ ID NO: 1075; WAN024FGC_at; Start 660; Stop 684
caatacaggaaagatgacagtagca

SEQ ID NO: 205183 - DNA, 25 bp, Artificial
  probe
  misc_feature (1)..(25): SEQ ID NO: 1075; WAN024FGC_at; Start 96; Stop 120
catatcttctgtcaaagggaaaggg

SEQ ID NO: 205184 - DNA, 25 bp, Artificial
  probe
  misc_feature (1)..(25): SEQ ID NO: 1075; WAN024FGC_at; Start 40; Stop 64
catgtacttttagttggtgcgacca

SEQ ID NO: 205185 - DNA, 25 bp, Artificial
  probe
  misc_feature (1)..(25): SEQ ID NO: 1075; WAN024FGC_at; Start 458; Stop 482
catatgcagtttggctcttagttgg

SEQ ID NO: 205186 - DNA, 25 bp, Artificial
  probe
  misc_feature (1)..(25): SEQ ID NO: 1075; WAN024FGC_at; Start 580; Stop 604
gcaccaggtattgtagcaacagcta

SEQ ID NO: 205187 - DNA, 25 bp, Artificial
  probe
  misc_feature (1)..(25): SEQ ID NO: 1075; WAN024FGC_at; Start 119; Stop 143
gggaattaactcagtatccaacacg

SEQ ID NO: 205188 - DNA, 25 bp, Artificial
  probe
  misc_feature (1)..(25): SEQ ID NO: 1075; WAN024FGC_at; Start 785; Stop 809
tcatccaaaataagattgcaagtgg

SEQ ID NO: 205189 - DNA, 25 bp, Artificial
  probe
  misc_feature (1)..(25): SEQ ID NO: 1075; WAN024FGC_at; Start 28; Stop 52
gatattctctcacatgtacttttag

SEQ ID NO: 205190 - DNA, 25 bp, Artificial
  probe
  misc_feature (1)..(25): SEQ ID NO: 1075; WAN024FGC_at; Start 801; Stop 825
tgcaagtggattatcagaaggatct

SEQ ID NO: 205191 - DNA, 25 bp, Artificial
  probe
  misc_feature (1)..(25): SEQ ID NO: 1075; WAN024FGC_at; Start 256; Stop 280
gcgattattatttctgctatggcag

SEQ ID NO: 205192 - DNA, 25 bp, Artificial
  probe
  misc_feature (1)..(25): SEQ ID NO: 1075; WAN024FGC_at; Start 387; Stop 411
tgccattgctaaagttgggttaaca

SEQ ID NO: 205193 - DNA, 25 bp, Artificial
  probe
  misc_feature (1)..(25): SEQ ID NO: 1075; WAN024FGC_at; Start 311; Stop 335
tgggagcaatcatgtcgagactact

SEQ ID NO: 205194 - DNA, 25 bp, Artificial
  probe
  misc_feature (1)..(25): SEQ ID NO: 1075; WAN024FGC_at; Start 740; Stop 764
cagcgtctgttattgtagttcttcc

SEQ ID NO: 205195 - DNA, 25 bp, Artificial
  probe
  misc_feature (1)..(25): SEQ ID NO: 1075; WAN024FGC_at; Start 327; Stop 351
gagactactcgtcattacctacatt

SEQ ID NO: 205196 - DNA, 25 bp, Artificial
  probe
  misc_feature (1)..(25): SEQ ID NO: 1075; WAN024FGC_at; Start 293; Stop 317
ttcgattctttcctaaattgggagc

SEQ ID NO: 205197 - DNA, 25 bp, Artificial
  probe
  misc_feature (1)..(25): SEQ ID NO: 1075; WAN024FGC_at; Start 227; Stop 251
taatcattgccttggctacaaccct

SEQ ID NO: 205198 - DNA, 25 bp, Artificial
  probe
  misc_feature (1)..(25): SEQ ID NO: 1075; WAN024FGC_at; Start 218; Stop 242
gaaacagtttaatcattgccttggc

SEQ ID NO: 205199 - DNA, 25 bp, Artificial
  probe
  misc_feature (1)..(25): SEQ ID NO: 1075; WAN024FGC_at; Start 551; Stop 575
cgttttataaagttgtgctaccgat

SEQ ID NO: 205200 - DNA, 25 bp, Artificial
  probe
  misc_feature (1)..(25): SEQ ID NO: 1075; WAN024FGC_at; Start 48; Stop 72
tttagttggtgcgaccatcgttgca

SEQ ID NO: 205201 - DNA, 25 bp, Artificial
  probe
  misc_feature (1)..(25): SEQ ID NO: 1075; WAN024FGC_at; Start 135; Stop 159
tccaacacgattttggcctgaacag

SEQ ID NO: 205202 - DNA, 25 bp, Artificial
  probe
  misc_feature (1)..(25): SEQ ID NO: 1075; WAN024FGC_at; Start 273; Stop 297
tatggcagcctatggtattgttcga

SEQ ID NO: 205203 - DNA, 25 bp, Artificial
  probe
  misc_feature (1)..(25): SEQ ID NO: 1075; WAN024FGC_at; Start 675; Stop 699
gacagtagcagtagcccttcgttca

SEQ ID NO: 205204 - DNA, 25 bp, Artificial
  probe
  misc_feature (1)..(25): SEQ ID NO: 1075; WAN024FGC_at; Start 169; Stop 193
gattatttcactcatgttatcaacg

SEQ ID NO: 205205 - DNA, 25 bp, Artificial
  probe
  misc_feature (1)..(25): SEQ ID NO: 1075; WAN024FGC_at; Start 703; Stop 727
aatggttcagaaatactagactggg

SEQ ID NO: 205206 - DNA, 25 bp, Artificial
  probe
  misc_feature (1)..(25): SEQ ID NO: 1075; WAN024FGC_at; Start 515; Stop 539
aagcggctagaattgatggtgcaaa

SEQ ID NO: 205207 - DNA, 25 bp, Artificial
  probe
  misc_feature (1)..(25): SEQ ID NO: 1075; WAN024FGC_at; Start 499; Stop 523
ccaattggaattgaagaagcggcta

SEQ ID NO: 205208 - DNA, 25 bp, Artificial
  probe
  misc_feature (1)..(25): SEQ ID NO: 1075; WAN024FGC_at; Start 348; Stop 372
cattttcccaccaattttgttagca

SEQ ID NO: 205209 - DNA, 25 bp, Artificial
  probe
  misc_feature (1)..(25): SEQ ID NO: 1075; WAN024FGC_at; Start 566; Stop 590
tgctaccgattgtagcaccaggtat

SEQ ID NO: 205210 - DNA, 25 bp, Artificial
  probe
  misc_feature (1)..(25): SEQ ID NO: 1075; WAN024FGC_at; Start 728; Stop 752
gagatatgatggcagcgtctgttat

SEQ ID NO: 205211 - DNA, 25 bp, Artificial
  probe
  misc_feature (1)..(25): SEQ ID NO: 1075; WAN024FGC_at; Start 184; Stop 208
gttatcaacgatttgcacttcattg

SEQ ID NO: 205212 - DNA, 25 bp, Artificial
  probe
  misc_feature (1)..(25): SEQ ID NO: 1075; WAN024FGC_at; Start 149; Stop 173
ggcctgaacagtttacattagatta

SEQ ID NO: 205213 - DNA, 25 bp, Artificial
  probe
  misc_feature (1)..(25): SEQ ID NO: 5739; WAN024FGD_at; Start 101; Stop 125
taccgtattggatgatacgtcctgg

SEQ ID NO: 205214 - DNA, 25 bp, Artificial
  probe
  misc_feature (1)..(25): SEQ ID NO: 5739; WAN024FGD_at; Start 242; Stop 266
caaacgcttcgatgattgatttttc

SEQ ID NO: 205215 - DNA, 25 bp, Artificial
  probe
  misc_feature (1)..(25): SEQ ID NO: 5739; WAN024FGD_at; Start 7; Stop 31
ccagctttacttgcttgtacgatgt

SEQ ID NO: 205216 - DNA, 25 bp, Artificial
  probe
  misc_feature (1)..(25): SEQ ID NO: 5739; WAN024FGD_at; Start 181; Stop 205
tcaggacctgacttgaagtcgatgg

SEQ ID NO: 205217 - DNA, 25 bp, Artificial
  probe
  misc_feature (1)..(25): SEQ ID NO: 5739; WAN024FGD_at; Start 135; Stop 159
gagtacgtctggagctgttcctgct

SEQ ID NO: 205218 - DNA, 25 bp, Artificial
  probe
  misc_feature (1)..(25): SEQ ID NO: 5739; WAN024FGD_at; Start 128; Stop 152
catcaaagagtacgtctggagctgt

SEQ ID NO: 205219 - DNA, 25 bp, Artificial
  probe
  misc_feature (1)..(25): SEQ ID NO: 5739; WAN024FGD_at; Start 142; Stop 166
tctggagctgttcctgcttcgatgg

SEQ ID NO: 205220 - DNA, 25 bp, Artificial
  probe
  misc_feature (1)..(25): SEQ ID NO: 5739; WAN024FGD_at; Start 178; Stop 202
ttttcaggacctgacttgaagtcga

SEQ ID NO: 205221 - DNA, 25 bp, Artificial
  probe
  misc_feature (1)..(25): SEQ ID NO: 5739; WAN024FGD_at; Start 114; Stop 138
gatacgtcctggtgcatcaaagagt

SEQ ID NO: 205222 - DNA, 25 bp, Artificial
  probe
  misc_feature (1)..(25): SEQ ID NO: 5739; WAN024FGD_at; Start 168; Stop 192
tgttgtgattttttcaggacctgac

SEQ ID NO: 205223 - DNA, 25 bp, Artificial
  probe
  misc_feature (1)..(25): SEQ ID NO: 5739; WAN024FGD_at; Start 126; Stop 150
tgcatcaaagagtacgtctggagct

SEQ ID NO: 205224 - DNA, 25 bp, Artificial
  probe
  misc_feature (1)..(25): SEQ ID NO: 5739; WAN024FGD_at; Start 212; Stop 236
atttcacttttatatctgggtttgc

SEQ ID NO: 205225 - DNA, 25 bp, Artificial
  probe
  misc_feature (1)..(25): SEQ ID NO: 5739; WAN024FGD_at; Start 23; Stop 47
gtacgatgttttcattgttgacatc

SEQ ID NO: 205226 - DNA, 25 bp, Artificial
  probe
  misc_feature (1)..(25): SEQ ID NO: 5739; WAN024FGD_at; Start 35; Stop 59
cattgttgacatctttaacaaattc

SEQ ID NO: 205227 - DNA, 25 bp, Artificial
  probe
  misc_feature (1)..(25): SEQ ID NO: 5739; WAN024FGD_at; Start 174; Stop 198
gattttttcaggacctgacttgaag

SEQ ID NO: 205228 - DNA, 25 bp, Artificial
  probe
  misc_feature (1)..(25): SEQ ID NO: 5739; WAN024FGD_at; Start 246; Stop 270
cgcttcgatgattgatttttcataa

SEQ ID NO: 205229 - DNA, 25 bp, Artificial
  probe
  misc_feature (1)..(25): SEQ ID NO: 5739; WAN024FGD_at; Start 224; Stop 248
tatctgggtttgctttttcaaacgc

SEQ ID NO: 205230 - DNA, 25 bp, Artificial
  probe
  misc_feature (1)..(25): SEQ ID NO: 5739; WAN024FGD_at; Start 121; Stop 145
cctggtgcatcaaagagtacgtctg

SEQ ID NO: 205231 - DNA, 25 bp, Artificial
  probe
  misc_feature (1)..(25): SEQ ID NO: 5739; WAN024FGD_at; Start 116; Stop 140
tacgtcctggtgcatcaaagagtac

SEQ ID NO: 205232 - DNA, 25 bp, Artificial
  probe
  misc_feature (1)..(25): SEQ ID NO: 5739; WAN024FGD_at; Start 145; Stop 169
ggagctgttcctgcttcgatggctg

SEQ ID NO: 205233 - DNA, 25 bp, Artificial
  probe
  misc_feature (1)..(25): SEQ ID NO: 5739; WAN024FGD_at; Start 1; Stop 25
ttgtctccagctttacttgcttgta

SEQ ID NO: 205234 - DNA, 25 bp, Artificial
  probe
  misc_feature (1)..(25): SEQ ID NO: 5739; WAN024FGD_at; Start 234; Stop 258
tgctttttcaaacgcttcgatgatt

SEQ ID NO: 205235 - DNA, 25 bp, Artificial
  probe
  misc_feature (1)..(25): SEQ ID NO: 5739; WAN024FGD_at; Start 95; Stop 119
cgtttttaccgtattggatgatacg

SEQ ID NO: 205236 - DNA, 25 bp, Artificial
  probe
  misc_feature (1)..(25): SEQ ID NO: 5739; WAN024FGD_at; Start 109; Stop 133
tggatgatacgtcctggtgcatcaa

SEQ ID NO: 205237 - DNA, 25 bp, Artificial
  probe
  misc_feature (1)..(25): SEQ ID NO: 5739; WAN024FGD_at; Start 106; Stop 130
tattggatgatacgtcctggtgcat

SEQ ID NO: 205238 - DNA, 25 bp, Artificial
  probe
  misc_feature (1)..(25): SEQ ID NO: 5739; WAN024FGD_at; Start 119; Stop 143
gtcctggtgcatcaaagagtacgtc

SEQ ID NO: 205239 - DNA, 25 bp, Artificial
  probe
  misc_feature (1)..(25): SEQ ID NO: 5739; WAN024FGD_at; Start 131; Stop 155
caaagagtacgtctggagctgttcc

SEQ ID NO: 205240 - DNA, 25 bp, Artificial
  probe
  misc_feature (1)..(25): SEQ ID NO: 5739; WAN024FGD_at; Start 164; Stop 188
tggctgttgtgattttttcaggacc

SEQ ID NO: 205241 - DNA, 25 bp, Artificial
  probe
  misc_feature (1)..(25): SEQ ID NO: 5739; WAN024FGD_at; Start 158; Stop 182
cttcgatggctgttgtgattttttc

SEQ ID NO: 205242 - DNA, 25 bp, Artificial
  probe
  misc_feature (1)..(25): SEQ ID NO: 5739; WAN024FGD_at; Start 123; Stop 147
tggtgcatcaaagagtacgtctgga

SEQ ID NO: 205243 - DNA, 25 bp, Artificial
  probe
  misc_feature (1)..(25): SEQ ID NO: 5739; WAN024FGD_at; Start 185; Stop 209
gacctgacttgaagtcgatggtttc

SEQ ID NO: 205244 - DNA, 25 bp, Artificial
  probe
  misc_feature (1)..(25): SEQ ID NO: 5739; WAN024FGD_at; Start 138; Stop 162
tacgtctggagctgttcctgcttcg

SEQ ID NO: 205245 - DNA, 25 bp, Artificial
  probe
  misc_feature (1)..(25): SEQ ID NO: 5739; WAN024FGD_at; Start 15; Stop 39
acttgcttgtacgatgttttcattg

SEQ ID NO: 205246 - DNA, 25 bp, Artificial
  probe
  misc_feature (1)..(25): SEQ ID NO: 5739; WAN024FGD_at; Start 111; Stop 135
gatgatacgtcctggtgcatcaaag

SEQ ID NO: 205247 - DNA, 25 bp, Artificial
  probe
  misc_feature (1)..(25): SEQ ID NO: 986; WAN024FGE_at; Start 735; Stop 759
cgtcaaaggtcttgaaaaagcaact

SEQ ID NO: 205248 - DNA, 25 bp, Artificial
  probe
  misc_feature (1)..(25): SEQ ID NO: 986; WAN024FGE_at; Start 417; Stop 441
caatgaaaacatcgtacaagcaagt

SEQ ID NO: 205249 - DNA, 25 bp, Artificial
  probe
  misc_feature (1)..(25): SEQ ID NO: 986; WAN024FGE_at; Start 58; Stop 82
gctgcttgtggcaattctggcggaa

SEQ ID NO: 205250 - DNA, 25 bp, Artificial
  probe
  misc_feature (1)..(25): SEQ ID NO: 986; WAN024FGE_at; Start 578; Stop 602
tattgaaagcacttaaagacaaggg

SEQ ID NO: 205251 - DNA, 25 bp, Artificial
  probe
  misc_feature (1)..(25): SEQ ID NO: 986; WAN024FGE_at; Start 1220; Stop 1244
ggttcccaatgttgcaatctgtatc

SEQ ID NO: 205252 - DNA, 25 bp, Artificial
  probe
  misc_feature (1)..(25): SEQ ID NO: 986; WAN024FGE_at; Start 96; Stop 120
caaatcaggtggtgacggtgccaaa

SEQ ID NO: 205253 - DNA, 25 bp, Artificial
  probe
  misc_feature (1)..(25): SEQ ID NO: 986; WAN024FGE_at; Start 862; Stop 886
gcaccagctcaaaatggtatccaag

SEQ ID NO: 205254 - DNA, 25 bp, Artificial
  probe
  misc_feature (1)..(25): SEQ ID NO: 986; WAN024FGE_at; Start 265; Stop 289
tcaggtcctgaaaaaatcacaacag

SEQ ID NO: 205255 - DNA, 25 bp, Artificial
  probe
  misc_feature (1)..(25): SEQ ID NO: 986; WAN024FGE_at; Start 829; Stop 853
gccaacggtcaaacatcttacacaa

SEQ ID NO: 205256 - DNA, 25 bp, Artificial
  probe
  misc_feature (1)..(25): SEQ ID NO: 986; WAN024FGE_at; Start 611; Stop 635
caggttcattgttcagttctggtca

SEQ ID NO: 205257 - DNA, 25 bp, Artificial
  probe
  misc_feature (1)..(25): SEQ ID NO: 986; WAN024FGE_at; Start 437; Stop 461
caagtaaagctggagacaaggctta

SEQ ID NO: 205258 - DNA, 25 bp, Artificial
  probe
  misc_feature (1)..(25): SEQ ID NO: 986; WAN024FGE_at; Start 786; Stop 810
taatggttcacaatttgacggtggg

SEQ ID NO: 205259 - DNA, 25 bp, Artificial
  probe
  misc_feature (1)..(25): SEQ ID NO: 986; WAN024FGE_at; Start 716; Stop 740
caactgatgatcctaaattcgtcaa

SEQ ID NO: 205260 - DNA, 25 bp, Artificial
  probe
  misc_feature (1)..(25): SEQ ID NO: 986; WAN024FGE_at; Start 157; Stop 181
caagaaaaaactggtgacggtgttg

SEQ ID NO: 205261 - DNA, 25 bp, Artificial
  probe
  misc_feature (1)..(25): SEQ ID NO: 986; WAN024FGE_at; Start 920; Stop 944
tagaagtaccattcccatcagacga

SEQ ID NO: 205262 - DNA, 25 bp, Artificial
  probe
  misc_feature (1)..(25): SEQ ID NO: 986; WAN024FGE_at; Start 109; Stop 133
gacggtgccaaaacagaaatcactt

SEQ ID NO: 205263 - DNA, 25 bp, Artificial
  probe
  misc_feature (1)..(25): SEQ ID NO: 986; WAN024FGE_at; Start 174; Stop 198
cggtgttggaacttatgaaaaatca

SEQ ID NO: 205264 - DNA, 25 bp, Artificial
  probe
  misc_feature (1)..(25): SEQ ID NO: 986; WAN024FGE_at; Start 1241; Stop 1265
tatcaaatggtgacgaaaaaccagc

SEQ ID NO: 205265 - DNA, 25 bp, Artificial
  probe
  misc_feature (1)..(25): SEQ ID NO: 986; WAN024FGE_at; Start 190; Stop 214
gaaaaatcaatcatcgaagcgtttg

SEQ ID NO: 205266 - DNA, 25 bp, Artificial
  probe
  misc_feature (1)..(25): SEQ ID NO: 986; WAN024FGE_at; Start 313; Stop 337
gacgtactctttgatgcaccaggac

SEQ ID NO: 205267 - DNA, 25 bp, Artificial
  probe
  misc_feature (1)..(25): SEQ ID NO: 986; WAN024FGE_at; Start 69; Stop 93
caattctggcggaagtaaagatgct

SEQ ID NO: 205268 - DNA, 25 bp, Artificial
  probe
  misc_feature (1)..(25): SEQ ID NO: 986; WAN024FGE_at; Start 327; Stop 351
tgcaccaggacgtatcatccaatac

SEQ ID NO: 205269 - DNA, 25 bp, Artificial
  probe
  misc_feature (1)..(25): SEQ ID NO: 986; WAN024FGE_at; Start 640; Stop 664
ggagaccaaggaacacgtgccttta

SEQ ID NO: 205270 - DNA, 25 bp, Artificial
  probe
  misc_feature (1)..(25): SEQ ID NO: 986; WAN024FGE_at; Start 124; Stop 148
gaaatcacttggtgggcattcccag

SEQ ID NO: 205271 - DNA, 25 bp, Artificial
  probe
  misc_feature (1)..(25): SEQ ID NO: 986; WAN024FGE_at; Start 814; Stop 838
gatatccaaaactttgccaacggtc

SEQ ID NO: 205272 - DNA, 25 bp, Artificial
  probe
  misc_feature (1)..(25): SEQ ID NO: 986; WAN024FGE_at; Start 672; Stop 696
cctttatagcggttctgtaacagat

SEQ ID NO: 205273 - DNA, 25 bp, Artificial
  probe
  misc_feature (1)..(25): SEQ ID NO: 986; WAN024FGE_at; Start 595; Stop 619
gacaagggttacacaccaggttcat

SEQ ID NO: 205274 - DNA, 25 bp, Artificial
  probe
  misc_feature (1)..(25): SEQ ID NO: 986; WAN024FGE_at; Start 11; Stop 35
gaaaattagcttgtacagtacttgc

SEQ ID NO: 205275 - DNA, 25 bp, Artificial
  probe
  misc_feature (1)..(25): SEQ ID NO: 986; WAN024FGE_at; Start 847; Stop 871
tacacaatcctttgggcaccagctc

SEQ ID NO: 205276 - DNA, 25 bp, Artificial
  probe
  misc_feature (1)..(25): SEQ ID NO: 986; WAN024FGE_at; Start 39; Stop 63
tgctgcggttcttggtcttgctgct

SEQ ID NO: 205277 - DNA, 25 bp, Artificial
  probe
  misc_feature (1)..(25): SEQ ID NO: 986; WAN024FGE_at; Start 252; Stop 276
catcgacttcaagtcaggtcctgaa

SEQ ID NO: 205278 - DNA, 25 bp, Artificial
  probe
  misc_feature (1)..(25): SEQ ID NO: 986; WAN024FGE_at; Start 301; Stop 325
ggaacagctccagacgtactctttg

SEQ ID NO: 205279 - DNA, 25 bp, Artificial
  probe
  misc_feature (1)..(25): SEQ ID NO: 986; WAN024FGE_at; Start 138; Stop 162
ggcattcccagtatttacccaagaa

SEQ ID NO: 205280 - DNA, 25 bp, Artificial
  probe
  misc_feature (1)..(25): SEQ ID NO: 986; WAN024FGE_at; Start 474; Stop 498
tagttctgccccattctacatggca

SEQ ID NO: 205281 - DNA, 25 bp, Artificial
  probe
  misc_feature (1)..(25): SEQ ID NO: 3909; WAN024FGF_at; Start 847; Stop 871
tacgaaaaagccttccaattgacag

SEQ ID NO: 205282 - DNA, 25 bp, Artificial
  probe
  misc_feature (1)..(25): SEQ ID NO: 3909; WAN024FGF_at; Start 947; Stop 971
tacttggaaacgacgtagaatacta

SEQ ID NO: 205283 - DNA, 25 bp, Artificial
  probe
  misc_feature (1)..(25): SEQ ID NO: 3909; WAN024FGF_at; Start 874; Stop 898
tacggctatgccaacacaattggtg

SEQ ID NO: 205284 - DNA, 25 bp, Artificial
  probe
  misc_feature (1)..(25): SEQ ID NO: 3909; WAN024FGF_at; Start 568; Stop 592
gcgattatgattattctcttgacca

SEQ ID NO: 205285 - DNA, 25 bp, Artificial
  probe
  misc_feature (1)..(25): SEQ ID NO: 3909; WAN024FGF_at; Start 820; Stop 844
tcaacaagtaccttgatgtactacc

SEQ ID NO: 205286 - DNA, 25 bp, Artificial
  probe
  misc_feature (1)..(25): SEQ ID NO: 3909; WAN024FGF_at; Start 710; Stop 734
aatggccaagccttcttccaacaac

SEQ ID NO: 205287 - DNA, 25 bp, Artificial
  probe
  misc_feature (1)..(25): SEQ ID NO: 3909; WAN024FGF_at; Start 300; Stop 324
cacagttattttggttattggatct

SEQ ID NO: 205288 - DNA, 25 bp, Artificial
  probe
  misc_feature (1)..(25): SEQ ID NO: 3909; WAN024FGF_at; Start 542; Stop 566
tgggagataaaaactgggcattgat

SEQ ID NO: 205289 - DNA, 25 bp, Artificial
  probe
  misc_feature (1)..(25): SEQ ID NO: 3909; WAN024FGF_at; Start 731; Stop 755
caactctttatattgcaatcatcac

SEQ ID NO: 205290 - DNA, 25 bp, Artificial
  probe
  misc_feature (1)..(25): SEQ ID NO: 3909; WAN024FGF_at; Start 478; Stop 502
ctatcagggattctaaactttgtcc

SEQ ID NO: 205291 - DNA, 25 bp, Artificial
  probe
  misc_feature (1)..(25): SEQ ID NO: 3909; WAN024FGF_at; Start 789; Stop 813
tcagcttttgacatctggtggtcca

SEQ ID NO: 205292 - DNA, 25 bp, Artificial
  probe
  misc_feature (1)..(25): SEQ ID NO: 3909; WAN024FGF_at; Start 611; Stop 635
tcatcctttatatcgctgccatggg

SEQ ID NO: 205293 - DNA, 25 bp, Artificial
  probe
  misc_feature (1)..(25): SEQ ID NO: 3909; WAN024FGF_at; Start 885; Stop 909
caacacaattggtgtcttcttggca

SEQ ID NO: 205294 - DNA, 25 bp, Artificial
  probe
  misc_feature (1)..(25): SEQ ID NO: 3909; WAN024FGF_at; Start 255; Stop 279
tatccgtatgtttaaagatcctgtc

SEQ ID NO: 205295 - DNA, 25 bp, Artificial
  probe
  misc_feature (1)..(25): SEQ ID NO: 3909; WAN024FGF_at; Start 87; Stop 111
gaaagtcaataaaatccgtatgcgg

SEQ ID NO: 205296 - DNA, 25 bp, Artificial
  probe
  misc_feature (1)..(25): SEQ ID NO: 3909; WAN024FGF_at; Start 578; Stop 602
ttattctcttgaccacttcagttgg

SEQ ID NO: 205297 - DNA, 25 bp, Artificial
  probe
  misc_feature (1)..(25): SEQ ID NO: 3909; WAN024FGF_at; Start 648; Stop 672
ttcactggttgaagcggcgcgtgtt

SEQ ID NO: 205298 - DNA, 25 bp, Artificial
  probe
  misc_feature (1)..(25): SEQ ID NO: 3909; WAN024FGF_at; Start 591; Stop 615
cacttcagttggtcagcccatcatc

SEQ ID NO: 205299 - DNA, 25 bp, Artificial
  probe
  misc_feature (1)..(25): SEQ ID NO: 3909; WAN024FGF_at; Start 862; Stop 886
caattgacagaatacggctatgcca

SEQ ID NO: 205300 - DNA, 25 bp, Artificial
  probe
  misc_feature (1)..(25): SEQ ID NO: 3909; WAN024FGF_at; Start 514; Stop 538
cacatcatcagccaaaacatttctt

SEQ ID NO: 205301 - DNA, 25 bp, Artificial
  probe
  misc_feature (1)..(25): SEQ ID NO: 3909; WAN024FGF_at; Start 669; Stop 693
tgttgatggtgcaactgagtttcaa

SEQ ID NO: 205302 - DNA, 25 bp, Artificial
  probe
  misc_feature (1)..(25): SEQ ID NO: 3909; WAN024FGF_at; Start 526; Stop 550
caaaacatttcttggttgggagata

SEQ ID NO: 205303 - DNA, 25 bp, Artificial
  probe
  misc_feature (1)..(25): SEQ ID NO: 3909; WAN024FGF_at; Start 73; Stop 97
gaggtgccgactgtgaaagtcaata

SEQ ID NO: 205304 - DNA, 25 bp, Artificial
  probe
  misc_feature (1)..(25): SEQ ID NO: 3909; WAN024FGF_at; Start 700; Stop 724
tggaagattaaatggccaagccttc

SEQ ID NO: 205305 - DNA, 25 bp, Artificial
  probe
  misc_feature (1)..(25): SEQ ID NO: 3909; WAN024FGF_at; Start 781; Stop 805
gccttgattcagcttttgacatctg

SEQ ID NO: 205306 - DNA, 25 bp, Artificial
  probe
  misc_feature (1)..(25): SEQ ID NO: 3909; WAN024FGF_at; Start 59; Stop 83
ttctatttgaaagagaggtgccgac

SEQ ID NO: 205307 - DNA, 25 bp, Artificial
  probe
  misc_feature (1)..(25): SEQ ID NO: 3909; WAN024FGF_at; Start 833; Stop 857
tgatgtactacctttacgaaaaagc

SEQ ID NO: 205308 - DNA, 25 bp, Artificial
  probe
  misc_feature (1)..(25): SEQ ID NO: 3909; WAN024FGF_at; Start 752; Stop 776
tcacaacaattaactcattccagtg

SEQ ID NO: 205309 - DNA, 25 bp, Artificial
  probe
  misc_feature (1)..(25): SEQ ID NO: 3909; WAN024FGF_at; Start 553; Stop 577
aactgggcattgatggcgattatga

SEQ ID NO: 205310 - DNA, 25 bp, Artificial
  probe
  misc_feature (1)..(25): SEQ ID NO: 3909; WAN024FGF_at; Start 915; Stop 939
gattgctatcgtaagctttgttcaa

SEQ ID NO: 205311 - DNA, 25 bp, Artificial
  probe
  misc_feature (1)..(25): SEQ ID NO: 3909; WAN024FGF_at; Start 102; Stop 126
ccgtatgcgggaaacagtgatttcc

SEQ ID NO: 205312 - DNA, 25 bp, Artificial
  probe
  misc_feature (1)..(25): SEQ ID NO: 3909; WAN024FGF_at; Start 601; Stop 625
ggtcagcccatcatcctttatatcg

SEQ ID NO: 205313 - DNA, 25 bp, Artificial
  probe
  misc_feature (1)..(25): SEQ ID NO: 3909; WAN024FGF_at; Start 642; Stop 666
tgacaattcactggttgaagcggcg

SEQ ID NO: 205314 - DNA, 25 bp, Artificial
  probe
  misc_feature (1)..(25): SEQ ID NO: 3909; WAN024FGF_at; Start 35; Stop 59
cagttcaagaaagtcaaaaaattat

SEQ ID NO: 205315 - DNA, 25 bp, Artificial
  probe
  misc_feature (1)..(25): SEQ ID NO: 5210; WAN024FGG_at; Start 47; Stop 71
tcgggaaggctacactccagaaggt

SEQ ID NO: 205316 - DNA, 25 bp, Artificial
  probe
  misc_feature (1)..(25): SEQ ID NO: 5210; WAN024FGG_at; Start 255; Stop 279
ttttggaagcgccatagcagcgata

SEQ ID NO: 205317 - DNA, 25 bp, Artificial
  probe
  misc_feature (1)..(25): SEQ ID NO: 5210; WAN024FGG_at; Start 98; Stop 122
tagctgattcaagcaactctgtagg

SEQ ID NO: 205318 - DNA, 25 bp, Artificial
  probe
  misc_feature (1)..(25): SEQ ID NO: 5210; WAN024FGG_at; Start 88; Stop 112
ccgtcgattttagctgattcaagca

SEQ ID NO: 205319 - DNA, 25 bp, Artificial
  probe
  misc_feature (1)..(25): SEQ ID NO: 5210; WAN024FGG_at; Start 2; Stop 26
tgatgaaggtaaagattgcaagggc

SEQ ID NO: 205320 - DNA, 25 bp, Artificial
  probe
  misc_feature (1)..(25): SEQ ID NO: 5210; WAN024FGG_at; Start 150; Stop 174
gaagacaccgaatggccatccaatc

SEQ ID NO: 205321 - DNA, 25 bp, Artificial
  probe
  misc_feature (1)..(25): SEQ ID NO: 5210; WAN024FGG_at; Start 71; Stop 95
tacgaatctcaccacaaccgtcgat

SEQ ID NO: 205322 - DNA, 25 bp, Artificial
  probe
  misc_feature (1)..(25): SEQ ID NO: 5210; WAN024FGG_at; Start 5; Stop 29
tgaaggtaaagattgcaagggctgc

SEQ ID NO: 205323 - DNA, 25 bp, Artificial
  probe
  misc_feature (1)..(25): SEQ ID NO: 5210; WAN024FGG_at; Start 15; Stop 39
gattgcaagggctgcaaaccctggt

SEQ ID NO: 205324 - DNA, 25 bp, Artificial
  probe
  misc_feature (1)..(25): SEQ ID NO: 5210; WAN024FGG_at; Start 142; Stop 166
ttcatgaggaagacaccgaatggcc

SEQ ID NO: 205325 - DNA, 25 bp, Artificial
  probe
  misc_feature (1)..(25): SEQ ID NO: 5210; WAN024FGG_at; Start 42; Stop 66
cacaatcgggaaggctacactccag

SEQ ID NO: 205326 - DNA, 25 bp, Artificial
  probe
  misc_feature (1)..(25): SEQ ID NO: 5210; WAN024FGG_at; Start 11; Stop 35
taaagattgcaagggctgcaaaccc

SEQ ID NO: 205327 - DNA, 25 bp, Artificial
  probe
  misc_feature (1)..(25): SEQ ID NO: 5210; WAN024FGG_at; Start 242; Stop 266
caaggacaacttgttttggaagcgc

SEQ ID NO: 205328 - DNA, 25 bp, Artificial
  probe
  misc_feature (1)..(25): SEQ ID NO: 5210; WAN024FGG_at; Start 39; Stop 63
tttcacaatcgggaaggctacactc

SEQ ID NO: 205329 - DNA, 25 bp, Artificial
  probe
  misc_feature (1)..(25): SEQ ID NO: 5210; WAN024FGG_at; Start 269; Stop 293
tagcagcgataaagatagcaaatag

SEQ ID NO: 205330 - DNA, 25 bp, Artificial
  probe
  misc_feature (1)..(25): SEQ ID NO: 5210; WAN024FGG_at; Start 229; Stop 253
cgtaccaatggtacaaggacaactt

SEQ ID NO: 205331 - DNA, 25 bp, Artificial
  probe
  misc_feature (1)..(25): SEQ ID NO: 5210; WAN024FGG_at; Start 19; Stop 43
gcaagggctgcaaaccctggtttca

SEQ ID NO: 205332 - DNA, 25 bp, Artificial
  probe
  misc_feature (1)..(25): SEQ ID NO: 5210; WAN024FGG_at; Start 83; Stop 107
cacaaccgtcgattttagctgattc

SEQ ID NO: 205333 - DNA, 25 bp, Artificial
  probe
  misc_feature (1)..(25): SEQ ID NO: 5210; WAN024FGG_at; Start 265; Stop 289
gccatagcagcgataaagatagcaa

SEQ ID NO: 205334 - DNA, 25 bp, Artificial
  probe
  misc_feature (1)..(25): SEQ ID NO: 5210; WAN024FGG_at; Start 163; Stop 187
ggccatccaatcaaaggcaagataa

SEQ ID NO: 205335 - DNA, 25 bp, Artificial
  probe
  misc_feature (1)..(25): SEQ ID NO: 5210; WAN024FGG_at; Start 251; Stop 275
cttgttttggaagcgccatagcagc

SEQ ID NO: 205336 - DNA, 25 bp, Artificial
  probe
  misc_feature (1)..(25): SEQ ID NO: 5210; WAN024FGG_at; Start 178; Stop 202
ggcaagataactgcccagagagtat

SEQ ID NO: 205337 - DNA, 25 bp, Artificial
  probe
  misc_feature (1)..(25): SEQ ID NO: 5210; WAN024FGG_at; Start 159; Stop 183
gaatggccatccaatcaaaggcaag

SEQ ID NO: 205338 - DNA, 25 bp, Artificial
  probe
  misc_feature (1)..(25): SEQ ID NO: 5210; WAN024FGG_at; Start 170; Stop 194
caatcaaaggcaagataactgccca

SEQ ID NO: 205339 - DNA, 25 bp, Artificial
  probe
  misc_feature (1)..(25): SEQ ID NO: 5210; WAN024FGG_at; Start 28; Stop 52
gcaaaccctggtttcacaatcggga

SEQ ID NO: 205340 - DNA, 25 bp, Artificial
  probe
  misc_feature (1)..(25): SEQ ID NO: 5210; WAN024FGG_at; Start 147; Stop 171
gaggaagacaccgaatggccatcca

SEQ ID NO: 205341 - DNA, 25 bp, Artificial
  probe
  misc_feature (1)..(25): SEQ ID NO: 5210; WAN024FGG_at; Start 51; Stop 75
gaaggctacactccagaaggtacga

SEQ ID NO: 205342 - DNA, 25 bp, Artificial
  probe
  misc_feature (1)..(25): SEQ ID NO: 5210; WAN024FGG_at; Start 57; Stop 81
tacactccagaaggtacgaatctca

SEQ ID NO: 205343 - DNA, 25 bp, Artificial
  probe
  misc_feature (1)..(25): SEQ ID NO: 5210; WAN024FGG_at; Start 66; Stop 90
gaaggtacgaatctcaccacaaccg

SEQ ID NO: 205344 - DNA, 25 bp, Artificial
  probe
  misc_feature (1)..(25): SEQ ID NO: 5210; WAN024FGG_at; Start 259; Stop 283
ggaagcgccatagcagcgataaaga

SEQ ID NO: 205345 - DNA, 25 bp, Artificial
  probe
  misc_feature (1)..(25): SEQ ID NO: 5210; WAN024FGG_at; Start 34; Stop 58
cctggtttcacaatcgggaaggcta

SEQ ID NO: 205346 - DNA, 25 bp, Artificial
  probe
  misc_feature (1)..(25): SEQ ID NO: 5210; WAN024FGG_at; Start 135; Stop 159
gaactgtttcatgaggaagacaccg

SEQ ID NO: 205347 - DNA, 25 bp, Artificial
  probe
  misc_feature (1)..(25): SEQ ID NO: 5210; WAN024FGG_at; Start 246; Stop 270
gacaacttgttttggaagcgccata

SEQ ID NO: 205348 - DNA, 25 bp, Artificial
  probe
  misc_feature (1)..(25): SEQ ID NO: 5210; WAN024FGG_at; Start 131; Stop 155
cactgaactgtttcatgaggaagac

SEQ ID NO: 205349 - DNA, 25 bp, Artificial
  probe
  misc_feature (1)..(25): SEQ ID NO: 1928; WAN024FGH_at; Start 458; Stop 482
ggccattcggtgtcttcctcatgaa

SEQ ID NO: 205350 - DNA, 25 bp, Artificial
  probe
  misc_feature (1)..(25): SEQ ID NO: 1928; WAN024FGH_at; Start 531; Stop 555
cgacggttgtggtgagattcgtacc

SEQ ID NO: 205351 - DNA, 25 bp, Artificial
  probe
  misc_feature (1)..(25): SEQ ID NO: 1928; WAN024FGH_at; Start 788; Stop 812
tcttccaaaaatccttcacacaggg

SEQ ID NO: 205352 - DNA, 25 bp, Artificial
  probe
  misc_feature (1)..(25): SEQ ID NO: 1928; WAN024FGH_at; Start 195; Stop 219
catggtgcagaaccctgccttgcaa

SEQ ID NO: 205353 - DNA, 25 bp, Artificial
  probe
  misc_feature (1)..(25): SEQ ID NO: 1928; WAN024FGH_at; Start 646; Stop 670
caattggtaatgttgacttcacgta

SEQ ID NO: 205354 - DNA, 25 bp, Artificial
  probe
  misc_feature (1)..(25): SEQ ID NO: 1928; WAN024FGH_at; Start 370; Stop 394
caagttgtccttgtaccattggtac

SEQ ID NO: 205355 - DNA, 25 bp, Artificial
  probe
  misc_feature (1)..(25): SEQ ID NO: 1928; WAN024FGH_at; Start 211; Stop 235
gccttgcaatggatgtggaactcag

SEQ ID NO: 205356 - DNA, 25 bp, Artificial
  probe
  misc_feature (1)..(25): SEQ ID NO: 1928; WAN024FGH_at; Start 132; Stop 156
tacaattgttattcctcctcagtgg

SEQ ID NO: 205357 - DNA, 25 bp, Artificial
  probe
  misc_feature (1)..(25): SEQ ID NO: 1928; WAN024FGH_at; Start 60; Stop 84
gctcttgttgactgtgctgttcatc

SEQ ID NO: 205358 - DNA, 25 bp, Artificial
  probe
  misc_feature (1)..(25): SEQ ID NO: 1928; WAN024FGH_at; Start 226; Stop 250
tggaactcagtatttatctcattgg

SEQ ID NO: 205359 - DNA, 25 bp, Artificial
  probe
  misc_feature (1)..(25): SEQ ID NO: 1928; WAN024FGH_at; Start 147; Stop 171
tcctcagtggttccctaaaatgcca

SEQ ID NO: 205360 - DNA, 25 bp, Artificial
  probe
  misc_feature (1)..(25): SEQ ID NO: 1928; WAN024FGH_at; Start 819; Stop 843
tatgggagcggtcaaaggataacta

SEQ ID NO: 205361 - DNA, 25 bp, Artificial
  probe
  misc_feature (1)..(25): SEQ ID NO: 1928; WAN024FGH_at; Start 354; Stop 378
tatggcgcttccaaaacaagttgtc

SEQ ID NO: 205362 - DNA, 25 bp, Artificial
  probe
  misc_feature (1)..(25): SEQ ID NO: 1928; WAN024FGH_at; Start 517; Stop 541
gaatcagctaaaatcgacggttgtg

SEQ ID NO: 205363 - DNA, 25 bp, Artificial
  probe
  misc_feature (1)..(25): SEQ ID NO: 1928; WAN024FGH_at; Start 162; Stop 186
taaaatgccaaccatggaaaacttc

SEQ ID NO: 205364 - DNA, 25 bp, Artificial
  probe
  misc_feature (1)..(25): SEQ ID NO: 1928; WAN024FGH_at; Start 693; Stop 717
ggttgcgaccatgcaggctgaaatg

SEQ ID NO: 205365 - DNA, 25 bp, Artificial
  probe
  misc_feature (1)..(25): SEQ ID NO: 1928; WAN024FGH_at; Start 87; Stop 111
tccattctactggattttgacaggg

SEQ ID NO: 205366 - DNA, 25 bp, Artificial
  probe
  misc_feature (1)..(25): SEQ ID NO: 1928; WAN024FGH_at; Start 582; Stop 606
gaaaccagggtttgcagcccttgca

SEQ ID NO: 205367 - DNA, 25 bp, Artificial
  probe
  misc_feature (1)..(25): SEQ ID NO: 1928; WAN024FGH_at; Start 630; Stop 654
gaatgactacttcatgcaattggta

SEQ ID NO: 205368 - DNA, 25 bp, Artificial
  probe
  misc_feature (1)..(25): SEQ ID NO: 1928; WAN024FGH_at; Start 745; Stop 769
ggagctgcccttgctgctgttccaa

SEQ ID NO: 205369 - DNA, 25 bp, Artificial
  probe
  misc_feature (1)..(25): SEQ ID NO: 1928; WAN024FGH_at; Start 804; Stop 828
cacacagggtattactatgggagcg

SEQ ID NO: 205370 - DNA, 25 bp, Artificial
  probe
  misc_feature (1)..(25): SEQ ID NO: 1928; WAN024FGH_at; Start 723; Stop 747
caactatggtttgattatggcagga

SEQ ID NO: 205371 - DNA, 25 bp, Artificial
  probe
  misc_feature (1)..(25): SEQ ID NO: 1928; WAN024FGH_at; Start 552; Stop 576
taccttctggagtgtagccttcccg

SEQ ID NO: 205372 - DNA, 25 bp, Artificial
  probe
  misc_feature (1)..(25): SEQ ID NO: 1928; WAN024FGH_at; Start 110; Stop 134
gggcattcaaatcacaacctgatac

SEQ ID NO: 205373 - DNA, 25 bp, Artificial
  probe
  misc_feature (1)..(25): SEQ ID NO: 1928; WAN024FGH_at; Start 438; Stop 462
tatcttgcctttgattggatggcca

SEQ ID NO: 205374 - DNA, 25 bp, Artificial
  probe
  misc_feature (1)..(25): SEQ ID NO: 1928; WAN024FGH_at; Start 708; Stop 732
ggctgaaatggcaaccaactatggt

SEQ ID NO: 205375 - DNA, 25 bp, Artificial
  probe
  misc_feature (1)..(25): SEQ ID NO: 1928; WAN024FGH_at; Start 305; Stop 329
aaaaacgtttctatggtcaacgcat

SEQ ID NO: 205376 - DNA, 25 bp, Artificial
  probe
  misc_feature (1)..(25): SEQ ID NO: 1928; WAN024FGH_at; Start 566; Stop 590
tagccttcccgattgtgaaaccagg

SEQ ID NO: 205377 - DNA, 25 bp, Artificial
  probe
  misc_feature (1)..(25): SEQ ID NO: 1928; WAN024FGH_at; Start 669; Stop 693
taacaatttgaccatctcacttggg

SEQ ID NO: 205378 - DNA, 25 bp, Artificial
  probe
  misc_feature (1)..(25): SEQ ID NO: 1928; WAN024FGH_at; Start 595; Stop 619
gcagcccttgcaatctttaccttca

SEQ ID NO: 205379 - DNA, 25 bp, Artificial
  probe
  misc_feature (1)..(25): SEQ ID NO: 1928; WAN024FGH_at; Start 502; Stop 526
cctacagagttgcttgaatcagcta

SEQ ID NO: 205380 - DNA, 25 bp, Artificial
  probe
  misc_feature (1)..(25): SEQ ID NO: 1928; WAN024FGH_at; Start 335; Stop 359
ttgctatctttatcgctgctatggc

SEQ ID NO: 205381 - DNA, 25 bp, Artificial
  probe
  misc_feature (1)..(25): SEQ ID NO: 1928; WAN024FGH_at; Start 423; Stop 447
tactctctgggcagttatcttgcct

SEQ ID NO: 205382 - DNA, 25 bp, Artificial
  probe
  misc_feature (1)..(25): SEQ ID NO: 1928; WAN024FGH_at; Start 177; Stop 201
ggaaaacttccaacaactcatggtg

SEQ ID NO: 205383 - DNA, 25 bp, Artificial
  probe
  misc_feature (1)..(25): SEQ ID NO: 2414; WAN024FGI_at; Start 23; Stop 47
ttatcaaggcagcatttgatacaga

SEQ ID NO: 205384 - DNA, 25 bp, Artificial
  probe
  misc_feature (1)..(25): SEQ ID NO: 2414; WAN024FGI_at; Start 501; Stop 525
cattcttgtcctcattgtgatggtt

SEQ ID NO: 205385 - DNA, 25 bp, Artificial
  probe
  misc_feature (1)..(25): SEQ ID NO: 2414; WAN024FGI_at; Start 227; Stop 251
tcaagcaaaatctgaaactaggtct

SEQ ID NO: 205386 - DNA, 25 bp, Artificial
  probe
  misc_feature (1)..(25): SEQ ID NO: 2414; WAN024FGI_at; Start 541; Stop 565
ttcagtctactcttaggtggctcag

SEQ ID NO: 205387 - DNA, 25 bp, Artificial
  probe
  misc_feature (1)..(25): SEQ ID NO: 2414; WAN024FGI_at; Start 198; Stop 222
gcctgtttttaaaatctatctaaga

SEQ ID NO: 205388 - DNA, 25 bp, Artificial
  probe
  misc_feature (1)..(25): SEQ ID NO: 2414; WAN024FGI_at; Start 533; Stop 557
tgtccgccttcagtctactcttagg

SEQ ID NO: 205389 - DNA, 25 bp, Artificial
  probe
  misc_feature (1)..(25): SEQ ID NO: 2414; WAN024FGI_at; Start 135; Stop 159
gattggagtggctaaaatcagcctc

SEQ ID NO: 205390 - DNA, 25 bp, Artificial
  probe
  misc_feature (1)..(25): SEQ ID NO: 2414; WAN024FGI_at; Start 471; Stop 495
taactttccttggttcttcctcatg

SEQ ID NO: 205391 - DNA, 25 bp, Artificial
  probe
  misc_feature (1)..(25): SEQ ID NO: 2414; WAN024FGI_at; Start 11; Stop 35
aaggagtaagccttatcaaggcagc

SEQ ID NO: 205392 - DNA, 25 bp, Artificial
  probe
  misc_feature (1)..(25): SEQ ID NO: 2414; WAN024FGI_at; Start 95; Stop 119
ccaatcttctttttgtcgtctcttg

SEQ ID NO: 205393 - DNA, 25 bp, Artificial
  probe
  misc_feature (1)..(25): SEQ ID NO: 2414; WAN024FGI_at; Start 77; Stop 101
tcttggacatcgtgacagccaatct

SEQ ID NO: 205394 - DNA, 25 bp, Artificial
  probe
  misc_feature (1)..(25): SEQ ID NO: 2414; WAN024FGI_at; Start 149; Stop 173
aaatcagcctctacgagaccatgtt

SEQ ID NO: 205395 - DNA, 25 bp, Artificial
  probe
  misc_feature (1)..(25): SEQ ID NO: 2414; WAN024FGI_at; Start 608; Stop 632
ctggattgatggagaaaattttcgc

SEQ ID NO: 205396 - DNA, 25 bp, Artificial
  probe
  misc_feature (1)..(25): SEQ ID NO: 2414; WAN024FGI_at; Start 579; Stop 603
tgggtttggactattggtctttatc

SEQ ID NO: 205397 - DNA, 25 bp, Artificial
  probe
  misc_feature (1)..(25): SEQ ID NO: 2414; WAN024FGI_at; Start 140; Stop 164
gagtggctaaaatcagcctctacga

SEQ ID NO: 205398 - DNA, 25 bp, Artificial
  probe
  misc_feature (1)..(25): SEQ ID NO: 2414; WAN024FGI_at; Start 179; Stop 203
ttaagaagagcagacgggtgcctgt

SEQ ID NO: 205399 - DNA, 25 bp, Artificial
  probe
  misc_feature (1)..(25): SEQ ID NO: 2414; WAN024FGI_at; Start 147; Stop 171
taaaatcagcctctacgagaccatg

SEQ ID NO: 205400 - DNA, 25 bp, Artificial
  probe
  misc_feature (1)..(25): SEQ ID NO: 2414; WAN024FGI_at; Start 587; Stop 611
gactattggtctttatccagactgg

SEQ ID NO: 205401 - DNA, 25 bp, Artificial
  probe
  misc_feature (1)..(25): SEQ ID NO: 2414; WAN024FGI_at; Start 17; Stop 41
taagccttatcaaggcagcatttga

SEQ ID NO: 205402 - DNA, 25 bp, Artificial
  probe
  misc_feature (1)..(25): SEQ ID NO: 2414; WAN024FGI_at; Start 2; Stop 26
tggcacaaaaaggagtaagccttat

SEQ ID NO: 205403 - DNA, 25 bp, Artificial
  probe
  misc_feature (1)..(25): SEQ ID NO: 2414; WAN024FGI_at; Start 126; Stop 150
catcgtgacgattggagtggctaaa

SEQ ID NO: 205404 - DNA, 25 bp, Artificial
  probe
  misc_feature (1)..(25): SEQ ID NO: 2414; WAN024FGI_at; Start 482; Stop 506
ggttcttcctcatgttagccattct

SEQ ID NO: 205405 - DNA, 25 bp, Artificial
  probe
  misc_feature (1)..(25): SEQ ID NO: 2414; WAN024FGI_at; Start 600; Stop 624
tatccagactggattgatggagaaa

SEQ ID NO: 205406 - DNA, 25 bp, Artificial
  probe
  misc_feature (1)..(25): SEQ ID NO: 2414; WAN024FGI_at; Start 81; Stop 105
ggacatcgtgacagccaatcttctt

SEQ ID NO: 205407 - DNA, 25 bp, Artificial
  probe
  misc_feature (1)..(25): SEQ ID NO: 2414; WAN024FGI_at; Start 90; Stop 114
gacagccaatcttctttttgtcgtc

SEQ ID NO: 205408 - DNA, 25 bp, Artificial
  probe
  misc_feature (1)..(25): SEQ ID NO: 2414; WAN024FGI_at; Start 124; Stop 148
cccatcgtgacgattggagtggcta

SEQ ID NO: 205409 - DNA, 25 bp, Artificial
  probe
  misc_feature (1)..(25): SEQ ID NO: 2414; WAN024FGI_at; Start 214; Stop 238
tatctaagatctttcaagcaaaatc

SEQ ID NO: 205410 - DNA, 25 bp, Artificial
  probe
  misc_feature (1)..(25): SEQ ID NO: 2414; WAN024FGI_at; Start 546; Stop 570
tctactcttaggtggctcagtcttc

SEQ ID NO: 205411 - DNA, 25 bp, Artificial
  probe
  misc_feature (1)..(25): SEQ ID NO: 2414; WAN024FGI_at; Start 617; Stop 641
tggagaaaattttcgcaaaatacca

SEQ ID NO: 205412 - DNA, 25 bp, Artificial
  probe
  misc_feature (1)..(25): SEQ ID NO: 2414; WAN024FGI_at; Start 516; Stop 540
tgtgatggttctttatctgtccgcc

SEQ ID NO: 205413 - DNA, 25 bp, Artificial
  probe
  misc_feature (1)..(25): SEQ ID NO: 2414; WAN024FGI_at; Start 477; Stop 501
tccttggttcttcctcatgttagcc

SEQ ID NO: 205414 - DNA, 25 bp, Artificial
  probe
  misc_feature (1)..(25): SEQ ID NO: 2414; WAN024FGI_at; Start 186; Stop 210
gagcagacgggtgcctgtttttaaa

SEQ ID NO: 205415 - DNA, 25 bp, Artificial
  probe
  misc_feature (1)..(25): SEQ ID NO: 2414; WAN024FGI_at; Start 495; Stop 519
gttagccattcttgtcctcattgtg

SEQ ID NO: 205416 - DNA, 25 bp, Artificial
  probe
  misc_feature (1)..(25): SEQ ID NO: 2414; WAN024FGI_at; Start 522; Stop 546
ggttctttatctgtccgccttcagt

SEQ ID NO: 205417 - DNA, 25 bp, Artificial
  probe
  misc_feature (1)..(25): SEQ ID NO: 499; WAN024FGJ_at; Start 946; Stop 970
gaaaatcctcaaattgcagttgcag

SEQ ID NO: 205418 - DNA, 25 bp, Artificial
  probe
  misc_feature (1)..(25): SEQ ID NO: 499; WAN024FGJ_at; Start 243; Stop 267
gaccttgacagaccaaccgattgtt

SEQ ID NO: 205419 - DNA, 25 bp, Artificial
  probe
  misc_feature (1)..(25): SEQ ID NO: 499; WAN024FGJ_at; Start 525; Stop 549
tggatttgttcccaaagagtatagc

SEQ ID NO: 205420 - DNA, 25 bp, Artificial
  probe
  misc_feature (1)..(25): SEQ ID NO: 499; WAN024FGJ_at; Start 364; Stop 388
tacatggtccaaatcgccttaggtc

SEQ ID NO: 205421 - DNA, 25 bp, Artificial
  probe
  misc_feature (1)..(25): SEQ ID NO: 499; WAN024FGJ_at; Start 777; Stop 801
gcaccaaggattttaccaagtatcg

SEQ ID NO: 205422 - DNA, 25 bp, Artificial
  probe
  misc_feature (1)..(25): SEQ ID NO: 499; WAN024FGJ_at; Start 333; Stop 357
tgtggtagctgaggagtattcatcc

SEQ ID NO: 205423 - DNA, 25 bp, Artificial
  probe
  misc_feature (1)..(25): SEQ ID NO: 499; WAN024FGJ_at; Start 156; Stop 180
tgtgaccaatgtctttgtacccggt

SEQ ID NO: 205424 - DNA, 25 bp, Artificial
  probe
  misc_feature (1)..(25): SEQ ID NO: 499; WAN024FGJ_at; Start 870; Stop 894
gaccggtacaggtgaaagctatgta

SEQ ID NO: 205425 - DNA, 25 bp, Artificial
  probe
  misc_feature (1)..(25): SEQ ID NO: 499; WAN024FGJ_at; Start 123; Stop 147
cacgggagagttaacacaggattcc

SEQ ID NO: 205426 - DNA, 25 bp, Artificial
  probe
  misc_feature (1)..(25): SEQ ID NO: 499; WAN024FGJ_at; Start 995; Stop 1019
taaccaaaaatgttgggccagcaat

SEQ ID NO: 205427 - DNA, 25 bp, Artificial
  probe
  misc_feature (1)..(25): SEQ ID NO: 499; WAN024FGJ_at; Start 1012; Stop 1036
ccagcaattgctcgcgacattatca

SEQ ID NO: 205428 - DNA, 25 bp, Artificial
  probe
  misc_feature (1)..(25): SEQ ID NO: 499; WAN024FGJ_at; Start 597; Stop 621
gccgatgcagttggctcagtatgta

SEQ ID NO: 205429 - DNA, 25 bp, Artificial
  probe
  misc_feature (1)..(25): SEQ ID NO: 499; WAN024FGJ_at; Start 839; Stop 863
cagatggcgccactgtttctatcag

SEQ ID NO: 205430 - DNA, 25 bp, Artificial
  probe
  misc_feature (1)..(25): SEQ ID NO: 499; WAN024FGJ_at; Start 489; Stop 513
tactgcgacaggaattgacctacca

SEQ ID NO: 205431 - DNA, 25 bp, Artificial
  probe
  misc_feature (1)..(25): SEQ ID NO: 499; WAN024FGJ_at; Start 43; Stop 67
tctgagggtgtgtatgcagttgctc

SEQ ID NO: 205432 - DNA, 25 bp, Artificial
  probe
  misc_feature (1)..(25): SEQ ID NO: 499; WAN024FGJ_at; Start 792; Stop 816
ccaagtatcgcatggaactagtccc

SEQ ID NO: 205433 - DNA, 25 bp, Artificial
  probe
  misc_feature (1)..(25): SEQ ID NO: 499; WAN024FGJ_at; Start 108; Stop 132
caaacatgacctgaacacgggagag

SEQ ID NO: 205434 - DNA, 25 bp, Artificial
  probe
  misc_feature (1)..(25): SEQ ID NO: 499; WAN024FGJ_at; Start 907; Stop 931
gaagctaataataccaatgccgtgg

SEQ ID NO: 205435 - DNA, 25 bp, Artificial
  probe
  misc_feature (1)..(25): SEQ ID NO: 499; WAN024FGJ_at; Start 558; Stop 582
ttacattactaatgcctttgggcag

SEQ ID NO: 205436 - DNA, 25 bp, Artificial
  probe
  misc_feature (1)..(25): SEQ ID NO: 499; WAN024FGJ_at; Start 187; Stop 211
gttaaggccgctaccatcagctcag

SEQ ID NO: 205437 - DNA, 25 bp, Artificial
  probe
  misc_feature (1)..(25): SEQ ID NO: 499; WAN024FGJ_at; Start 886; Stop 910
agctatgtagctggtggtcaagaag

SEQ ID NO: 205438 - DNA, 25 bp, Artificial
  probe
  misc_feature (1)..(25): SEQ ID NO: 499; WAN024FGJ_at; Start 856; Stop 880
tctatcagtggtaagaccggtacag

SEQ ID NO: 205439 - DNA, 25 bp, Artificial
  probe
  misc_feature (1)..(25): SEQ ID NO: 499; WAN024FGJ_at; Start 219; Stop 243
gaatggagtcttatcaggaaatcag

SEQ ID NO: 205440 - DNA, 25 bp, Artificial
  probe
  misc_feature (1)..(25): SEQ ID NO: 499; WAN024FGJ_at; Start 349; Stop 373
tattcatccaatgcttacatggtcc

SEQ ID NO: 205441 - DNA, 25 bp, Artificial
  probe
  misc_feature (1)..(25): SEQ ID NO: 499; WAN024FGJ_at; Start 313; Stop 337
ggatcttttcctattacagctgtgg

SEQ ID NO: 205442 - DNA, 25 bp, Artificial
  probe
  misc_feature (1)..(25): SEQ ID NO: 499; WAN024FGJ_at; Start 270; Stop 294
ccaaggttcagctccaatttattct

SEQ ID NO: 205443 - DNA, 25 bp, Artificial
  probe
  misc_feature (1)..(25): SEQ ID NO: 499; WAN024FGJ_at; Start 80; Stop 104
caggtccgtgtttatccatgtcagg

SEQ ID NO: 205444 - DNA, 25 bp, Artificial
  probe
  misc_feature (1)..(25): SEQ ID NO: 499; WAN024FGJ_at; Start 582; Stop 606
gtttgataactatacgccgatgcag

SEQ ID NO: 205445 - DNA, 25 bp, Artificial
  probe
  misc_feature (1)..(25): SEQ ID NO: 499; WAN024FGJ_at; Start 922; Stop 946
aatgccgtggcctatgctccaacag

SEQ ID NO: 205446 - DNA, 25 bp, Artificial
  probe
  misc_feature (1)..(25): SEQ ID NO: 499; WAN024FGJ_at; Start 1040; Stop 1064
tatataaccaacaccatccaatgaa

SEQ ID NO: 205447 - DNA, 25 bp, Artificial
  probe
  misc_feature (1)..(25): SEQ ID NO: 499; WAN024FGJ_at; Start 802; Stop 826
catggaactagtccccttacgacag

SEQ ID NO: 205448 - DNA, 25 bp, Artificial
  probe
  misc_feature (1)..(25): SEQ ID NO: 499; WAN024FGJ_at; Start 57; Stop 81
tgcagttgctctaaatccaaaaaca

SEQ ID NO: 205449 - DNA, 25 bp, Artificial
  probe
  misc_feature (1)..(25): SEQ ID NO: 499; WAN024FGJ_at; Start 961; Stop 985
gcagttgcagtagtctttcctcata

SEQ ID NO: 205450 - DNA, 25 bp, Artificial
  probe
  misc_feature (1)..(25): SEQ ID NO: 499; WAN024FGJ_at; Start 138; Stop 162
acaggattccttgggaactgtgacc

SEQ ID NO: 205451 - DNA, 25 bp, Artificial
  probe
  misc_feature (1)..(25): SEQ ID NO: 5231; WAN024FGK_at; Start 58; Stop 82
gacaagactccattttcccaacctg

SEQ ID NO: 205452 - DNA, 25 bp, Artificial
  probe
  misc_feature (1)..(25): SEQ ID NO: 5231; WAN024FGK_at; Start 35; Stop 59
ggtctgtcaaggtctggtttcctga

SEQ ID NO: 205453 - DNA, 25 bp, Artificial
  probe
  misc_feature (1)..(25): SEQ ID NO: 5231; WAN024FGK_at; Start 97; Stop 121
gccttgacaaccgaacctggaacaa

SEQ ID NO: 205454 - DNA, 25 bp, Artificial
  probe
  misc_feature (1)..(25): SEQ ID NO: 5231; WAN024FGK_at; Start 81; Stop 105
tgagctgatggtcgccgccttgaca

SEQ ID NO: 205455 - DNA, 25 bp, Artificial
  probe
  misc_feature (1)..(25): SEQ ID NO: 5231; WAN024FGK_at; Start 212; Stop 236
tttttgggttaagggcgactgcata

SEQ ID NO: 205456 - DNA, 25 bp, Artificial
  probe
  misc_feature (1)..(25): SEQ ID NO: 5231; WAN024FGK_at; Start 155; Stop 179
tcaactctcccgttttcaagtcatg

SEQ ID NO: 205457 - DNA, 25 bp, Artificial
  probe
  misc_feature (1)..(25): SEQ ID NO: 5231; WAN024FGK_at; Start 190; Stop 214
gacatagacaaaaccgcacctgttt

SEQ ID NO: 205458 - DNA, 25 bp, Artificial
  probe
  misc_feature (1)..(25): SEQ ID NO: 5231; WAN024FGK_at; Start 21; Stop 45
gaagacaatggactggtctgtcaag

SEQ ID NO: 205459 - DNA, 25 bp, Artificial
  probe
  misc_feature (1)..(25): SEQ ID NO: 5231; WAN024FGK_at; Start 32; Stop 56
actggtctgtcaaggtctggtttcc

SEQ ID NO: 205460 - DNA, 25 bp, Artificial
  probe
  misc_feature (1)..(25): SEQ ID NO: 5231; WAN024FGK_at; Start 145; Stop 169
gaatcaggcgtcaactctcccgttt

SEQ ID NO: 205461 - DNA, 25 bp, Artificial
  probe
  misc_feature (1)..(25): SEQ ID NO: 5231; WAN024FGK_at; Start 182; Stop 206
taatccctgacatagacaaaaccgc

SEQ ID NO: 205462 - DNA, 25 bp, Artificial
  probe
  misc_feature (1)..(25): SEQ ID NO: 5231; WAN024FGK_at; Start 68; Stop 92
cattttcccaacctgagctgatggt

SEQ ID NO: 205463 - DNA, 25 bp, Artificial
  probe
  misc_feature (1)..(25): SEQ ID NO: 5231; WAN024FGK_at; Start 45; Stop 69
ggtctggtttcctgacaagactcca

SEQ ID NO: 205464 - DNA, 25 bp, Artificial
  probe
  misc_feature (1)..(25): SEQ ID NO: 5231; WAN024FGK_at; Start 166; Stop 190
gttttcaagtcatgtttaatccctg

SEQ ID NO: 205465 - DNA, 25 bp, Artificial
  probe
  misc_feature (1)..(25): SEQ ID NO: 5231; WAN024FGK_at; Start 87; Stop 111
gatggtcgccgccttgacaaccgaa

SEQ ID NO: 205466 - DNA, 25 bp, Artificial
  probe
  misc_feature (1)..(25): SEQ ID NO: 5231; WAN024FGK_at; Start 12; Stop 36
tgaaccttggaagacaatggactgg

SEQ ID NO: 205467 - DNA, 25 bp, Artificial
  probe
  misc_feature (1)..(25): SEQ ID NO: 5231; WAN024FGK_at; Start 150; Stop 174
aggcgtcaactctcccgttttcaag

SEQ ID NO: 205468 - DNA, 25 bp, Artificial
  probe
  misc_feature (1)..(25): SEQ ID NO: 5231; WAN024FGK_at; Start 73; Stop 97
tcccaacctgagctgatggtcgccg

SEQ ID NO: 205469 - DNA, 25 bp, Artificial
  probe
  misc_feature (1)..(25): SEQ ID NO: 5231; WAN024FGK_at; Start 26; Stop 50
caatggactggtctgtcaaggtctg

SEQ ID NO: 205470 - DNA, 25 bp, Artificial
  probe
  misc_feature (1)..(25): SEQ ID NO: 5231; WAN024FGK_at; Start 187; Stop 211
cctgacatagacaaaaccgcacctg

SEQ ID NO: 205471 - DNA, 25 bp, Artificial
  probe
  misc_feature (1)..(25): SEQ ID NO: 5231; WAN024FGK_at; Start 172; Stop 196
aagtcatgtttaatccctgacatag

SEQ ID NO: 205472 - DNA, 25 bp, Artificial
  probe
  misc_feature (1)..(25): SEQ ID NO: 5231; WAN024FGK_at; Start 112; Stop 136
cctggaacaaagacattggttaccg

SEQ ID NO: 205473 - DNA, 25 bp, Artificial
  probe
  misc_feature (1)..(25): SEQ ID NO: 5231; WAN024FGK_at; Start 138; Stop 162
tcccaaggaatcaggcgtcaactct

SEQ ID NO: 205474 - DNA, 25 bp, Artificial
  probe
  misc_feature (1)..(25): SEQ ID NO: 5231; WAN024FGK_at; Start 16; Stop 40
ccttggaagacaatggactggtctg

SEQ ID NO: 205475 - DNA, 25 bp, Artificial
  probe
  misc_feature (1)..(25): SEQ ID NO: 5231; WAN024FGK_at; Start 50; Stop 74
ggtttcctgacaagactccattttc

SEQ ID NO: 205476 - DNA, 25 bp, Artificial
  probe
  misc_feature (1)..(25): SEQ ID NO: 5231; WAN024FGK_at; Start 132; Stop 156
taccgttcccaaggaatcaggcgtc

SEQ ID NO: 205477 - DNA, 25 bp, Artificial
  probe
  misc_feature (1)..(25): SEQ ID NO: 5231; WAN024FGK_at; Start 210; Stop 234
tgtttttgggttaagggcgactgca

SEQ ID NO: 205478 - DNA, 25 bp, Artificial
  probe
  misc_feature (1)..(25): SEQ ID NO: 5231; WAN024FGK_at; Start 77; Stop 101
aacctgagctgatggtcgccgcctt

SEQ ID NO: 205479 - DNA, 25 bp, Artificial
  probe
  misc_feature (1)..(25): SEQ ID NO: 5231; WAN024FGK_at; Start 8; Stop 32
gagctgaaccttggaagacaatgga

SEQ ID NO: 205480 - DNA, 25 bp, Artificial
  probe
  misc_feature (1)..(25): SEQ ID NO: 5231; WAN024FGK_at; Start 101; Stop 125
tgacaaccgaacctggaacaaagac

SEQ ID NO: 205481 - DNA, 25 bp, Artificial
  probe
  misc_feature (1)..(25): SEQ ID NO: 5231; WAN024FGK_at; Start 142; Stop 166
aaggaatcaggcgtcaactctcccg

SEQ ID NO: 205482 - DNA, 25 bp, Artificial
  probe
  misc_feature (1)..(25): SEQ ID NO: 5231; WAN024FGK_at; Start 2; Stop 26
tgatgggagctgaaccttggaagac

SEQ ID NO: 205483 - DNA, 25 bp, Artificial
  probe
  misc_feature (1)..(25): SEQ ID NO: 5231; WAN024FGK_at; Start 106; Stop 130
accgaacctggaacaaagacattgg

SEQ ID NO: 205484 - DNA, 25 bp, Artificial
  probe
  misc_feature (1)..(25): SEQ ID NO: 5231; WAN024FGK_at; Start 41; Stop 65
tcaaggtctggtttcctgacaagac

SEQ ID NO: 205485 - DNA, 25 bp, Artificial
  probe
  misc_feature (1)..(25): SEQ ID NO: 2567; WAN024FGL_at; Start 149; Stop 173
ggagccacacgaacaccattatttg

SEQ ID NO: 205486 - DNA, 25 bp, Artificial
  probe
  misc_feature (1)..(25): SEQ ID NO: 2567; WAN024FGL_at; Start 28; Stop 52
caagatgctcatatcggagtcggat

SEQ ID NO: 205487 - DNA, 25 bp, Artificial
  probe
  misc_feature (1)..(25): SEQ ID NO: 2567; WAN024FGL_at; Start 223; Stop 247
ctgcccaaaggcattagtaatgtaa

SEQ ID NO: 205488 - DNA, 25 bp, Artificial
  probe
  misc_feature (1)..(25): SEQ ID NO: 2567; WAN024FGL_at; Start 258; Stop 282
tatactctttgggaacaaatccagt

SEQ ID NO: 205489 - DNA, 25 bp, Artificial
  probe
  misc_feature (1)..(25): SEQ ID NO: 2567; WAN024FGL_at; Start 206; Stop 230
ggcgtatagttatcaaactgcccaa

SEQ ID NO: 205490 - DNA, 25 bp, Artificial
  probe
  misc_feature (1)..(25): SEQ ID NO: 2567; WAN024FGL_at; Start 212; Stop 236
tagttatcaaactgcccaaaggcat

SEQ ID NO: 205491 - DNA, 25 bp, Artificial
  probe
  misc_feature (1)..(25): SEQ ID NO: 2567; WAN024FGL_at; Start 86; Stop 110
tgctgaatcaagtcacccagtcctc

SEQ ID NO: 205492 - DNA, 25 bp, Artificial
  probe
  misc_feature (1)..(25): SEQ ID NO: 2567; WAN024FGL_at; Start 114; Stop 138
tatcattattaccataaatgccttc

SEQ ID NO: 205493 - DNA, 25 bp, Artificial
  probe
  misc_feature (1)..(25): SEQ ID NO: 2567; WAN024FGL_at; Start 159; Stop 183
gaacaccattatttgcaatagttgc

SEQ ID NO: 205494 - DNA, 25 bp, Artificial
  probe
  misc_feature (1)..(25): SEQ ID NO: 2567; WAN024FGL_at; Start 1; Stop 25
atgggcaacctgataaaaaccttgg

SEQ ID NO: 205495 - DNA, 25 bp, Artificial
  probe
  misc_feature (1)..(25): SEQ ID NO: 2567; WAN024FGL_at; Start 67; Stop 91
catctctgtcggttgcagttgctga

SEQ ID NO: 205496 - DNA, 25 bp, Artificial
  probe
  misc_feature (1)..(25): SEQ ID NO: 2567; WAN024FGL_at; Start 81; Stop 105
gcagttgctgaatcaagtcacccag

SEQ ID NO: 205497 - DNA, 25 bp, Artificial
  probe
  misc_feature (1)..(25): SEQ ID NO: 2567; WAN024FGL_at; Start 173; Stop 197
gcaatagttgctacatactgagcca

SEQ ID NO: 205498 - DNA, 25 bp, Artificial
  probe
  misc_feature (1)..(25): SEQ ID NO: 2567; WAN024FGL_at; Start 71; Stop 95
tctgtcggttgcagttgctgaatca

SEQ ID NO: 205499 - DNA, 25 bp, Artificial
  probe
  misc_feature (1)..(25): SEQ ID NO: 2567; WAN024FGL_at; Start 133; Stop 157
gccttcaacaatacgaggagccaca

SEQ ID NO: 205500 - DNA, 25 bp, Artificial
  probe
  misc_feature (1)..(25): SEQ ID NO: 2567; WAN024FGL_at; Start 14; Stop 38
taaaaaccttggtgcaagatgctca

SEQ ID NO: 205501 - DNA, 25 bp, Artificial
  probe
  misc_feature (1)..(25): SEQ ID NO: 2567; WAN024FGL_at; Start 249; Stop 273
tagcaaagctatactctttgggaac

SEQ ID NO: 205502 - DNA, 25 bp, Artificial
  probe
  misc_feature (1)..(25): SEQ ID NO: 2567; WAN024FGL_at; Start 60; Stop 84
ccttattcatctctgtcggttgcag

SEQ ID NO: 205503 - DNA, 25 bp, Artificial
  probe
  misc_feature (1)..(25): SEQ ID NO: 2567; WAN024FGL_at; Start 5; Stop 29
gcaacctgataaaaaccttggtgca

SEQ ID NO: 205504 - DNA, 25 bp, Artificial
  probe
  misc_feature (1)..(25): SEQ ID NO: 2567; WAN024FGL_at; Start 146; Stop 170
cgaggagccacacgaacaccattat

SEQ ID NO: 205505 - DNA, 25 bp, Artificial
  probe
  misc_feature (1)..(25): SEQ ID NO: 2567; WAN024FGL_at; Start 54; Stop 78
tattgaccttattcatctctgtcgg

SEQ ID NO: 205506 - DNA, 25 bp, Artificial
  probe
  misc_feature (1)..(25): SEQ ID NO: 2567; WAN024FGL_at; Start 39; Stop 63
tatcggagtcggatatattgacctt

SEQ ID NO: 205507 - DNA, 25 bp, Artificial
  probe
  misc_feature (1)..(25): SEQ ID NO: 2567; WAN024FGL_at; Start 182; Stop 206
gctacatactgagccaactgcatcg

SEQ ID NO: 205508 - DNA, 25 bp, Artificial
  probe
  misc_feature (1)..(25): SEQ ID NO: 2567; WAN024FGL_at; Start 191; Stop 215
tgagccaactgcatcggcgtatagt

SEQ ID NO: 205509 - DNA, 25 bp, Artificial
  probe
  misc_feature (1)..(25): SEQ ID NO: 2567; WAN024FGL_at; Start 186; Stop 210
catactgagccaactgcatcggcgt

SEQ ID NO: 205510 - DNA, 25 bp, Artificial
  probe
  misc_feature (1)..(25): SEQ ID NO: 2567; WAN024FGL_at; Start 103; Stop 127
cagtcctcccttatcattattacca

SEQ ID NO: 205511 - DNA, 25 bp, Artificial
  probe
  misc_feature (1)..(25): SEQ ID NO: 2567; WAN024FGL_at; Start 200; Stop 224
tgcatcggcgtatagttatcaaact

SEQ ID NO: 205512 - DNA, 25 bp, Artificial
  probe
  misc_feature (1)..(25): SEQ ID NO: 2567; WAN024FGL_at; Start 128; Stop 152
taaatgccttcaacaatacgaggag

SEQ ID NO: 205513 - DNA, 25 bp, Artificial
  probe
  misc_feature (1)..(25): SEQ ID NO: 2567; WAN024FGL_at; Start 22; Stop 46
ttggtgcaagatgctcatatcggag

SEQ ID NO: 205514 - DNA, 25 bp, Artificial
  probe
  misc_feature (1)..(25): SEQ ID NO: 2567; WAN024FGL_at; Start 76; Stop 100
cggttgcagttgctgaatcaagtca

SEQ ID NO: 205515 - DNA, 25 bp, Artificial
  probe
  misc_feature (1)..(25): SEQ ID NO: 2567; WAN024FGL_at; Start 273; Stop 297
caaatccagtagattcatctggtag

SEQ ID NO: 205516 - DNA, 25 bp, Artificial
  probe
  misc_feature (1)..(25): SEQ ID NO: 2567; WAN024FGL_at; Start 230; Stop 254
aaggcattagtaatgtaattagcaa

SEQ ID NO: 205517 - DNA, 25 bp, Artificial
  probe
  misc_feature (1)..(25): SEQ ID NO: 2567; WAN024FGL_at; Start 269; Stop 293
ggaacaaatccagtagattcatctg

SEQ ID NO: 205518 - DNA, 25 bp, Artificial
  probe
  misc_feature (1)..(25): SEQ ID NO: 2567; WAN024FGL_at; Start 137; Stop 161
tcaacaatacgaggagccacacgaa

SEQ ID NO: 205519 - DNA, 25 bp, Artificial
  probe
  misc_feature (1)..(25): SEQ ID NO: 3687; WAN024FGM_at; Start 43; Stop 67
gatcgaaaggttctagagacttctc

SEQ ID NO: 205520 - DNA, 25 bp, Artificial
  probe
  misc_feature (1)..(25): SEQ ID NO: 3687; WAN024FGM_at; Start 978; Stop 1002
aactattgccaacaacggtgttcgg

SEQ ID NO: 205521 - DNA, 25 bp, Artificial
  probe
  misc_feature (1)..(25): SEQ ID NO: 3687; WAN024FGM_at; Start 997; Stop 1021
gttcggattgcacctcacattgttg

SEQ ID NO: 205522 - DNA, 25 bp, Artificial
  probe
  misc_feature (1)..(25): SEQ ID NO: 3687; WAN024FGM_at; Start 24; Stop 48
cagtatttcaacttcgtgggatcga

SEQ ID NO: 205523 - DNA, 25 bp, Artificial
  probe
  misc_feature (1)..(25): SEQ ID NO: 3687; WAN024FGM_at; Start 1185; Stop 1209
tgccttttcaaatggcgcagcagta

SEQ ID NO: 205524 - DNA, 25 bp, Artificial
  probe
  misc_feature (1)..(25): SEQ ID NO: 3687; WAN024FGM_at; Start 335; Stop 359
gcgtagacaatctgcttaagagtta

SEQ ID NO: 205525 - DNA, 25 bp, Artificial
  probe
  misc_feature (1)..(25): SEQ ID NO: 3687; WAN024FGM_at; Start 71; Stop 95
cgtctatagtaggaagtgtatccag

SEQ ID NO: 205526 - DNA, 25 bp, Artificial
  probe
  misc_feature (1)..(25): SEQ ID NO: 3687; WAN024FGM_at; Start 837; Stop 861
tcttggagcctcaacaggcattgac

SEQ ID NO: 205527 - DNA, 25 bp, Artificial
  probe
  misc_feature (1)..(25): SEQ ID NO: 3687; WAN024FGM_at; Start 1212; Stop 1236
cattagtggaaaaacaggtactgcc

SEQ ID NO: 205528 - DNA, 25 bp, Artificial
  probe
  misc_feature (1)..(25): SEQ ID NO: 3687; WAN024FGM_at; Start 931; Stop 955
ggtcagtttgataactacaccccaa

SEQ ID NO: 205529 - DNA, 25 bp, Artificial
  probe
  misc_feature (1)..(25): SEQ ID NO: 3687; WAN024FGM_at; Start 157; Stop 181
aacgatcgtgttgggacttcttatc

SEQ ID NO: 205530 - DNA, 25 bp, Artificial
  probe
  misc_feature (1)..(25): SEQ ID NO: 3687; WAN024FGM_at; Start 1300; Stop 1324
gataatcctcaaatcgctgtagctg

SEQ ID NO: 205531 - DNA, 25 bp, Artificial
  probe
  misc_feature (1)..(25): SEQ ID NO: 3687; WAN024FGM_at; Start 1250; Stop 1274
gaggtggtcaaaaagctaacaatac

SEQ ID NO: 205532 - DNA, 25 bp, Artificial
  probe
  misc_feature (1)..(25): SEQ ID NO: 3687; WAN024FGM_at; Start 1; Stop 25
gcctctaagaatttacctggtatca

SEQ ID NO: 205533 - DNA, 25 bp, Artificial
  probe
  misc_feature (1)..(25): SEQ ID NO: 3687; WAN024FGM_at; Start 1146; Stop 1170
tcaggtttcagatggtggaagtgct

SEQ ID NO: 205534 - DNA, 25 bp, Artificial
  probe
  misc_feature (1)..(25): SEQ ID NO: 3687; WAN024FGM_at; Start 1163; Stop 1187
gaagtgctttgacaaccggtcgtgc

SEQ ID NO: 205535 - DNA, 25 bp, Artificial
  probe
  misc_feature (1)..(25): SEQ ID NO: 3687; WAN024FGM_at; Start 1272; Stop 1296
tactaatgctgtggcctatgcacca

SEQ ID NO: 205536 - DNA, 25 bp, Artificial
  probe
  misc_feature (1)..(25): SEQ ID NO: 3687; WAN024FGM_at; Start 1116; Stop 1140
tgatgtttccatcctgcaacaagga

SEQ ID NO: 205537 - DNA, 25 bp, Artificial
  probe
  misc_feature (1)..(25): SEQ ID NO: 3687; WAN024FGM_at; Start 1344; Stop 1368
caaccttacaaatggtgtcggacct

SEQ ID NO: 205538 - DNA, 25 bp, Artificial
  probe
  misc_feature (1)..(25): SEQ ID NO: 3687; WAN024FGM_at; Start 1063; Stop 1087
ttaatccaatctgttgaaaccaagg

SEQ ID NO: 205539 - DNA, 25 bp, Artificial
  probe
  misc_feature (1)..(25): SEQ ID NO: 3687; WAN024FGM_at; Start 1315; Stop 1339
gctgtagctgttgtcttccctcata

SEQ ID NO: 205540 - DNA, 25 bp, Artificial
  probe
  misc_feature (1)..(25): SEQ ID NO: 3687; WAN024FGM_at; Start 320; Stop 344
tggcctttcaagatagcgtagacaa

SEQ ID NO: 205541 - DNA, 25 bp, Artificial
  probe
  misc_feature (1)..(25): SEQ ID NO: 3687; WAN024FGM_at; Start 142; Stop 166
aagggttattctctaaacgatcgtg

SEQ ID NO: 205542 - DNA, 25 bp, Artificial
  probe
  misc_feature (1)..(25): SEQ ID NO: 3687; WAN024FGM_at; Start 195; Stop 219
tgaagaaaccttgcaaggaaaacgc

SEQ ID NO: 205543 - DNA, 25 bp, Artificial
  probe
  misc_feature (1)..(25): SEQ ID NO: 3687; WAN024FGM_at; Start 215; Stop 239
aacgctcggttaaggaaatccatct

SEQ ID NO: 205544 - DNA, 25 bp, Artificial
  probe
  misc_feature (1)..(25): SEQ ID NO: 3687; WAN024FGM_at; Start 273; Stop 297
tatcgaagatggtaccaaagggaat

SEQ ID NO: 205545 - DNA, 25 bp, Artificial
  probe
  misc_feature (1)..(25): SEQ ID NO: 3687; WAN024FGM_at; Start 1029; Stop 1053
ttatggaaacaatgaacaaggtggt

SEQ ID NO: 205546 - DNA, 25 bp, Artificial
  probe
  misc_feature (1)..(25): SEQ ID NO: 3687; WAN024FGM_at; Start 1369; Stop 1393
tccattgcgcgcgatattatcaacc

SEQ ID NO: 205547 - DNA, 25 bp, Artificial
  probe
  misc_feature (1)..(25): SEQ ID NO: 3687; WAN024FGM_at; Start 243; Stop 267
caagtatggcaacatggaaagtgtc

SEQ ID NO: 205548 - DNA, 25 bp, Artificial
  probe
  misc_feature (1)..(25): SEQ ID NO: 3687; WAN024FGM_at; Start 821; Stop 845
catttgcggaatatggtcttggagc

SEQ ID NO: 205549 - DNA, 25 bp, Artificial
  probe
  misc_feature (1)..(25): SEQ ID NO: 3687; WAN024FGM_at; Start 1235; Stop 1259
ccgaaagttatgttagaggtggtca

SEQ ID NO: 205550 - DNA, 25 bp, Artificial
  probe
  misc_feature (1)..(25): SEQ ID NO: 3687; WAN024FGM_at; Start 958; Stop 982
caattggcccagtacgttggaacta

SEQ ID NO: 205551 - DNA, 25 bp, Artificial
  probe
  misc_feature (1)..(25): SEQ ID NO: 3687; WAN024FGM_at; Start 1198; Stop 1222
ggcgcagcagtatccattagtggaa

SEQ ID NO: 205552 - DNA, 25 bp, Artificial
  probe
  misc_feature (1)..(25): SEQ ID NO: 3687; WAN024FGM_at; Start 105; Stop 129
tggtctaccagctgaagaagcagat

SEQ ID NO: 205553 - DNA, 25 bp, Artificial
  probe
  misc_feature (1)..(25): SEQ ID NO: 3641; WAN024FGN_at; Start 220; Stop 244
ctagaaaagcaatacgaggaaacct

SEQ ID NO: 205554 - DNA, 25 bp, Artificial
  probe
  misc_feature (1)..(25): SEQ ID NO: 3641; WAN024FGN_at; Start 224; Stop 248
aaaagcaatacgaggaaaccttgca

SEQ ID NO: 205555 - DNA, 25 bp, Artificial
  probe
  misc_feature (1)..(25): SEQ ID NO: 3641; WAN024FGN_at; Start 162; Stop 186
agcagatgcttatcttaaaaaaggt

SEQ ID NO: 205556 - DNA, 25 bp, Artificial
  probe
  misc_feature (1)..(25): SEQ ID NO: 3641; WAN024FGN_at; Start 1372; Stop 1396
cctcataataccaatctaacaaatg

SEQ ID NO: 205557 - DNA, 25 bp, Artificial
  probe
  misc_feature (1)..(25): SEQ ID NO: 3641; WAN024FGN_at; Start 225; Stop 249
aaagcaatacgaggaaaccttgcaa

SEQ ID NO: 205558 - DNA, 25 bp, Artificial
  probe
  misc_feature (1)..(25): SEQ ID NO: 3641; WAN024FGN_at; Start 1265; Stop 1289
cgggtacagccgaaagttatgtggc

SEQ ID NO: 205559 - DNA, 25 bp, Artificial
  probe
  misc_feature (1)..(25): SEQ ID NO: 3641; WAN024FGN_at; Start 222; Stop 246
agaaaagcaatacgaggaaaccttg

SEQ ID NO: 205560 - DNA, 25 bp, Artificial
  probe
  misc_feature (1)..(25): SEQ ID NO: 3641; WAN024FGN_at; Start 1270; Stop 1294
acagccgaaagttatgtggcagatg

SEQ ID NO: 205561 - DNA, 25 bp, Artificial
  probe
  misc_feature (1)..(25): SEQ ID NO: 3641; WAN024FGN_at; Start 191; Stop 215
ctctaaatgaccgtgttgggacctc

SEQ ID NO: 205562 - DNA, 25 bp, Artificial
  probe
  misc_feature (1)..(25): SEQ ID NO: 3641; WAN024FGN_at; Start 164; Stop 188
cagatgcttatcttaaaaaaggtta

SEQ ID NO: 205563 - DNA, 25 bp, Artificial
  probe
  misc_feature (1)..(25): SEQ ID NO: 3641; WAN024FGN_at; Start 285; Stop 309
gtacggtaatatggaaagtgtcgaa

SEQ ID NO: 205564 - DNA, 25 bp, Artificial
  probe
  misc_feature (1)..(25): SEQ ID NO: 3641; WAN024FGN_at; Start 1242; Stop 1266
cttggtatccattagcggaaaaacg

SEQ ID NO: 205565 - DNA, 25 bp, Artificial
  probe
  misc_feature (1)..(25): SEQ ID NO: 3641; WAN024FGN_at; Start 192; Stop 216
tctaaatgaccgtgttgggacctct

SEQ ID NO: 205566 - DNA, 25 bp, Artificial
  probe
  misc_feature (1)..(25): SEQ ID NO: 3641; WAN024FGN_at; Start 190; Stop 214
tctctaaatgaccgtgttgggacct

SEQ ID NO: 205567 - DNA, 25 bp, Artificial
  probe
  misc_feature (1)..(25): SEQ ID NO: 3641; WAN024FGN_at; Start 1269; Stop 1293
tacagccgaaagttatgtggcagat

SEQ ID NO: 205568 - DNA, 25 bp, Artificial
  probe
  misc_feature (1)..(25): SEQ ID NO: 3641; WAN024FGN_at; Start 193; Stop 217
ctaaatgaccgtgttgggacctctt

SEQ ID NO: 205569 - DNA, 25 bp, Artificial
  probe
  misc_feature (1)..(25): SEQ ID NO: 3641; WAN024FGN_at; Start 1268; Stop 1292
gtacagccgaaagttatgtggcaga

SEQ ID NO: 205570 - DNA, 25 bp, Artificial
  probe
  misc_feature (1)..(25): SEQ ID NO: 3641; WAN024FGN_at; Start 163; Stop 187
gcagatgcttatcttaaaaaaggtt

SEQ ID NO: 205571 - DNA, 25 bp, Artificial
  probe
  misc_feature (1)..(25): SEQ ID NO: 3641; WAN024FGN_at; Start 1408; Stop 1432
tccattgcgcgtgacattatcaatc

SEQ ID NO: 205572 - DNA, 25 bp, Artificial
  probe
  misc_feature (1)..(25): SEQ ID NO: 3641; WAN024FGN_at; Start 226; Stop 250
aagcaatacgaggaaaccttgcaag

SEQ ID NO: 205573 - DNA, 25 bp, Artificial
  probe
  misc_feature (1)..(25): SEQ ID NO: 3641; WAN024FGN_at; Start 1409; Stop 1433
ccattgcgcgtgacattatcaatct

SEQ ID NO: 205574 - DNA, 25 bp, Artificial
  probe
  misc_feature (1)..(25): SEQ ID NO: 3641; WAN024FGN_at; Start 1264; Stop 1288
acgggtacagccgaaagttatgtgg

SEQ ID NO: 205575 - DNA, 25 bp, Artificial
  probe
  misc_feature (1)..(25): SEQ ID NO: 3641; WAN024FGN_at; Start 227; Stop 251
agcaatacgaggaaaccttgcaagg

SEQ ID NO: 205576 - DNA, 25 bp, Artificial
  probe
  misc_feature (1)..(25): SEQ ID NO: 3641; WAN024FGN_at; Start 223; Stop 247
gaaaagcaatacgaggaaaccttgc

SEQ ID NO: 205577 - DNA, 25 bp, Artificial
  probe
  misc_feature (1)..(25): SEQ ID NO: 3641; WAN024FGN_at; Start 1240; Stop 1264
gccttggtatccattagcggaaaaa

SEQ ID NO: 205578 - DNA, 25 bp, Artificial
  probe
  misc_feature (1)..(25): SEQ ID NO: 3641; WAN024FGN_at; Start 284; Stop 308
agtacggtaatatggaaagtgtcga

SEQ ID NO: 205579 - DNA, 25 bp, Artificial
  probe
  misc_feature (1)..(25): SEQ ID NO: 3641; WAN024FGN_at; Start 1271; Stop 1295
cagccgaaagttatgtggcagatgg

SEQ ID NO: 205580 - DNA, 25 bp, Artificial
  probe
  misc_feature (1)..(25): SEQ ID NO: 3641; WAN024FGN_at; Start 194; Stop 218
taaatgaccgtgttgggacctctta

SEQ ID NO: 205581 - DNA, 25 bp, Artificial
  probe
  misc_feature (1)..(25): SEQ ID NO: 3641; WAN024FGN_at; Start 1266; Stop 1290
gggtacagccgaaagttatgtggca

SEQ ID NO: 205582 - DNA, 25 bp, Artificial
  probe
  misc_feature (1)..(25): SEQ ID NO: 3641; WAN024FGN_at; Start 1263; Stop 1287
aacgggtacagccgaaagttatgtg

SEQ ID NO: 205583 - DNA, 25 bp, Artificial
  probe
  misc_feature (1)..(25): SEQ ID NO: 3641; WAN024FGN_at; Start 1267; Stop 1291
ggtacagccgaaagttatgtggcag

SEQ ID NO: 205584 - DNA, 25 bp, Artificial
  probe
  misc_feature (1)..(25): SEQ ID NO: 3641; WAN024FGN_at; Start 283; Stop 307
aagtacggtaatatggaaagtgtcg

SEQ ID NO: 205585 - DNA, 25 bp, Artificial
  probe
  misc_feature (1)..(25): SEQ ID NO: 3641; WAN024FGN_at; Start 1373; Stop 1397
ctcataataccaatctaacaaatgg

SEQ ID NO: 205586 - DNA, 25 bp, Artificial
  probe
  misc_feature (1)..(25): SEQ ID NO: 3499; WAN024FGO_at; Start 218; Stop 242
tacatggtccaaacggctttgggca

SEQ ID NO: 205587 - DNA, 25 bp, Artificial
  probe
  misc_feature (1)..(25): SEQ ID NO: 3499; WAN024FGO_at; Start 158; Stop 182
caggcctacggttcattccctatca

SEQ ID NO: 205588 - DNA, 25 bp, Artificial
  probe
  misc_feature (1)..(25): SEQ ID NO: 3499; WAN024FGO_at; Start 154; Stop 178
tactcaggcctacggttcattccct

SEQ ID NO: 205589 - DNA, 25 bp, Artificial
  probe
  misc_feature (1)..(25): SEQ ID NO: 3499; WAN024FGO_at; Start 170; Stop 194
tcattccctatcacagcggtggaag

SEQ ID NO: 205590 - DNA, 25 bp, Artificial
  probe
  misc_feature (1)..(25): SEQ ID NO: 3499; WAN024FGO_at; Start 165; Stop 189
acggttcattccctatcacagcggt

SEQ ID NO: 205591 - DNA, 25 bp, Artificial
  probe
  misc_feature (1)..(25): SEQ ID NO: 3499; WAN024FGO_at; Start 132; Stop 156
cagctcccatcaattcttggtatac

SEQ ID NO: 205592 - DNA, 25 bp, Artificial
  probe
  misc_feature (1)..(25): SEQ ID NO: 3499; WAN024FGO_at; Start 168; Stop 192
gttcattccctatcacagcggtgga

SEQ ID NO: 205593 - DNA, 25 bp, Artificial
  probe
  misc_feature (1)..(25): SEQ ID NO: 3499; WAN024FGO_at; Start 205; Stop 229
ttcttcgaatgcctacatggtccaa

SEQ ID NO: 205594 - DNA, 25 bp, Artificial
  probe
  misc_feature (1)..(25): SEQ ID NO: 3499; WAN024FGO_at; Start 146; Stop 170
tcttggtatactcaggcctacggtt

SEQ ID NO: 205595 - DNA, 25 bp, Artificial
  probe
  misc_feature (1)..(25): SEQ ID NO: 3499; WAN024FGO_at; Start 178; Stop 202
tatcacagcggtggaagccttggag

SEQ ID NO: 205596 - DNA, 25 bp, Artificial
  probe
  misc_feature (1)..(25): SEQ ID NO: 3499; WAN024FGO_at; Start 225; Stop 249
tccaaacggctttgggcattatggg

SEQ ID NO: 205597 - DNA, 25 bp, Artificial
  probe
  misc_feature (1)..(25): SEQ ID NO: 3499; WAN024FGO_at; Start 208; Stop 232
ttcgaatgcctacatggtccaaacg

SEQ ID NO: 205598 - DNA, 25 bp, Artificial
  probe
  misc_feature (1)..(25): SEQ ID NO: 3499; WAN024FGO_at; Start 291; Stop 315
tagagtctgctatggggaaattcgg

SEQ ID NO: 205599 - DNA, 25 bp, Artificial
  probe
  misc_feature (1)..(25): SEQ ID NO: 3499; WAN024FGO_at; Start 173; Stop 197
ttccctatcacagcggtggaagcct

SEQ ID NO: 205600 - DNA, 25 bp, Artificial
  probe
  misc_feature (1)..(25): SEQ ID NO: 3499; WAN024FGO_at; Start 171; Stop 195
cattccctatcacagcggtggaagc

SEQ ID NO: 205601 - DNA, 25 bp, Artificial
  probe
  misc_feature (1)..(25): SEQ ID NO: 3499; WAN024FGO_at; Start 203; Stop 227
tattcttcgaatgcctacatggtcc

SEQ ID NO: 205602 - DNA, 25 bp, Artificial
  probe
  misc_feature (1)..(25): SEQ ID NO: 3499; WAN024FGO_at; Start 209; Stop 233
tcgaatgcctacatggtccaaacgg

SEQ ID NO: 205603 - DNA, 25 bp, Artificial
  probe
  misc_feature (1)..(25): SEQ ID NO: 3499; WAN024FGO_at; Start 152; Stop 176
tatactcaggcctacggttcattcc

SEQ ID NO: 205604 - DNA, 25 bp, Artificial
  probe
  misc_feature (1)..(25): SEQ ID NO: 3499; WAN024FGO_at; Start 148; Stop 172
ttggtatactcaggcctacggttca

SEQ ID NO: 205605 - DNA, 25 bp, Artificial
  probe
  misc_feature (1)..(25): SEQ ID NO: 3499; WAN024FGO_at; Start 206; Stop 230
tcttcgaatgcctacatggtccaaa

SEQ ID NO: 205606 - DNA, 25 bp, Artificial
  probe
  misc_feature (1)..(25): SEQ ID NO: 3499; WAN024FGO_at; Start 176; Stop 200
cctatcacagcggtggaagccttgg

SEQ ID NO: 205607 - DNA, 25 bp, Artificial
  probe
  misc_feature (1)..(25): SEQ ID NO: 3499; WAN024FGO_at; Start 216; Stop 240
cctacatggtccaaacggctttggg

SEQ ID NO: 205608 - DNA, 25 bp, Artificial
  probe
  misc_feature (1)..(25): SEQ ID NO: 3499; WAN024FGO_at; Start 177; Stop 201
ctatcacagcggtggaagccttgga

SEQ ID NO: 205609 - DNA, 25 bp, Artificial
  probe
  misc_feature (1)..(25): SEQ ID NO: 3499; WAN024FGO_at; Start 145; Stop 169
ttcttggtatactcaggcctacggt

SEQ ID NO: 205610 - DNA, 25 bp, Artificial
  probe
  misc_feature (1)..(25): SEQ ID NO: 3499; WAN024FGO_at; Start 211; Stop 235
gaatgcctacatggtccaaacggct

SEQ ID NO: 205611 - DNA, 25 bp, Artificial
  probe
  misc_feature (1)..(25): SEQ ID NO: 3499; WAN024FGO_at; Start 130; Stop 154
ttcagctcccatcaattcttggtat

SEQ ID NO: 205612 - DNA, 25 bp, Artificial
  probe
  misc_feature (1)..(25): SEQ ID NO: 3499; WAN024FGO_at; Start 167; Stop 191
ggttcattccctatcacagcggtgg

SEQ ID NO: 205613 - DNA, 25 bp, Artificial
  probe
  misc_feature (1)..(25): SEQ ID NO: 3499; WAN024FGO_at; Start 214; Stop 238
tgcctacatggtccaaacggctttg

SEQ ID NO: 205614 - DNA, 25 bp, Artificial
  probe
  misc_feature (1)..(25): SEQ ID NO: 3499; WAN024FGO_at; Start 298; Stop 322
tgctatggggaaattcggttcaacc

SEQ ID NO: 205615 - DNA, 25 bp, Artificial
  probe
  misc_feature (1)..(25): SEQ ID NO: 3499; WAN024FGO_at; Start 235; Stop 259
tttgggcattatggggcagacctac

SEQ ID NO: 205616 - DNA, 25 bp, Artificial
  probe
  misc_feature (1)..(25): SEQ ID NO: 3499; WAN024FGO_at; Start 161; Stop 185
gcctacggttcattccctatcacag

SEQ ID NO: 205617 - DNA, 25 bp, Artificial
  probe
  misc_feature (1)..(25): SEQ ID NO: 3499; WAN024FGO_at; Start 223; Stop 247
ggtccaaacggctttgggcattatg

SEQ ID NO: 205618 - DNA, 25 bp, Artificial
  probe
  misc_feature (1)..(25): SEQ ID NO: 3499; WAN024FGO_at; Start 43; Stop 67
caaggcggcgaccatcagctcaggt

SEQ ID NO: 205619 - DNA, 25 bp, Artificial
  probe
  misc_feature (1)..(25): SEQ ID NO: 3499; WAN024FGO_at; Start 163; Stop 187
ctacggttcattccctatcacagcg

SEQ ID NO: 205620 - DNA, 25 bp, Artificial
  probe
  misc_feature (1)..(25): SEQ ID NO: 1533; WAN024FGP_at; Start 825; Stop 849
gcaatatgaagagaccttacaagga

SEQ ID NO: 205621 - DNA, 25 bp, Artificial
  probe
  misc_feature (1)..(25): SEQ ID NO: 1533; WAN024FGP_at; Start 282; Stop 306
ggctacagacttaaaagaaacagct

SEQ ID NO: 205622 - DNA, 25 bp, Artificial
  probe
  misc_feature (1)..(25): SEQ ID NO: 1533; WAN024FGP_at; Start 472; Stop 496
tataacaatgcggtcgatagtgtac

SEQ ID NO: 205623 - DNA, 25 bp, Artificial
  probe
  misc_feature (1)..(25): SEQ ID NO: 1533; WAN024FGP_at; Start 871; Stop 895
catctggataaatatggcaatatgg

SEQ ID NO: 205624 - DNA, 25 bp, Artificial
  probe
  misc_feature (1)..(25): SEQ ID NO: 1533; WAN024FGP_at; Start 326; Stop 350
tgagcatcagttctccaaatttgac

SEQ ID NO: 205625 - DNA, 25 bp, Artificial
  probe
  misc_feature (1)..(25): SEQ ID NO: 1533; WAN024FGP_at; Start 485; Stop 509
tcgatagtgtacaaacgagtcaact

SEQ ID NO: 205626 - DNA, 25 bp, Artificial
  probe
  misc_feature (1)..(25): SEQ ID NO: 1533; WAN024FGP_at; Start 274; Stop 298
aaaatgacggctacagacttaaaag

SEQ ID NO: 205627 - DNA, 25 bp, Artificial
  probe
  misc_feature (1)..(25): SEQ ID NO: 1533; WAN024FGP_at; Start 330; Stop 354
catcagttctccaaatttgacagaa

SEQ ID NO: 205628 - DNA, 25 bp, Artificial
  probe
  misc_feature (1)..(25): SEQ ID NO: 1533; WAN024FGP_at; Start 500; Stop 524
cgagtcaactaaactatacagagga

SEQ ID NO: 205629 - DNA, 25 bp, Artificial
  probe
  misc_feature (1)..(25): SEQ ID NO: 1533; WAN024FGP_at; Start 318; Stop 342
gacttatgtgagcatcagttctcca

SEQ ID NO: 205630 - DNA, 25 bp, Artificial
  probe
  misc_feature (1)..(25): SEQ ID NO: 1533; WAN024FGP_at; Start 803; Stop 827
taggaacctcctatttggaaaagca

SEQ ID NO: 205631 - DNA, 25 bp, Artificial
  probe
  misc_feature (1)..(25): SEQ ID NO: 1533; WAN024FGP_at; Start 482; Stop 506
cggtcgatagtgtacaaacgagtca

SEQ ID NO: 205632 - DNA, 25 bp, Artificial
  probe
  misc_feature (1)..(25): SEQ ID NO: 1533; WAN024FGP_at; Start 895; Stop 919
gaaagcgtggatacaattgaggaag

SEQ ID NO: 205633 - DNA, 25 bp, Artificial
  probe
  misc_feature (1)..(25): SEQ ID NO: 1533; WAN024FGP_at; Start 817; Stop 841
ttggaaaagcaatatgaagagacct

SEQ ID NO: 205634 - DNA, 25 bp, Artificial
  probe
  misc_feature (1)..(25): SEQ ID NO: 1533; WAN024FGP_at; Start 399; Stop 423
aaaaacagtggaagctctcccaagc

SEQ ID NO: 205635 - DNA, 25 bp, Artificial
  probe
  misc_feature (1)..(25): SEQ ID NO: 1533; WAN024FGP_at; Start 900; Stop 924
cgtggatacaattgaggaaggtagt

SEQ ID NO: 205636 - DNA, 25 bp, Artificial
  probe
  misc_feature (1)..(25): SEQ ID NO: 1533; WAN024FGP_at; Start 491; Stop 515
gtgtacaaacgagtcaactaaacta

SEQ ID NO: 205637 - DNA, 25 bp, Artificial
  probe
  misc_feature (1)..(25): SEQ ID NO: 1533; WAN024FGP_at; Start 809; Stop 833
cctcctatttggaaaagcaatatga

SEQ ID NO: 205638 - DNA, 25 bp, Artificial
  probe
  misc_feature (1)..(25): SEQ ID NO: 1533; WAN024FGP_at; Start 278; Stop 302
tgacggctacagacttaaaagaaac

SEQ ID NO: 205639 - DNA, 25 bp, Artificial
  probe
  misc_feature (1)..(25): SEQ ID NO: 1533; WAN024FGP_at; Start 409; Stop 433
gaagctctcccaagcgagaaacgct

SEQ ID NO: 205640 - DNA, 25 bp, Artificial
  probe
  misc_feature (1)..(25): SEQ ID NO: 1533; WAN024FGP_at; Start 879; Stop 903
taaatatggcaatatggaaagcgtg

SEQ ID NO: 205641 - DNA, 25 bp, Artificial
  probe
  misc_feature (1)..(25): SEQ ID NO: 1533; WAN024FGP_at; Start 297; Stop 321
agaaacagctaaaaagttactgact

SEQ ID NO: 205642 - DNA, 25 bp, Artificial
  probe
  misc_feature (1)..(25): SEQ ID NO: 1533; WAN024FGP_at; Start 310; Stop 334
aagttactgacttatgtgagcatca

SEQ ID NO: 205643 - DNA, 25 bp, Artificial
  probe
  misc_feature (1)..(25): SEQ ID NO: 1533; WAN024FGP_at; Start 891; Stop 915
tatggaaagcgtggatacaattgag

SEQ ID NO: 205644 - DNA, 25 bp, Artificial
  probe
  misc_feature (1)..(25): SEQ ID NO: 1533; WAN024FGP_at; Start 188; Stop 212
cagcccgtggggaaatttatgatgc

SEQ ID NO: 205645 - DNA, 25 bp, Artificial
  probe
  misc_feature (1)..(25): SEQ ID NO: 1533; WAN024FGP_at; Start 886; Stop 910
ggcaatatggaaagcgtggatacaa

SEQ ID NO: 205646 - DNA, 25 bp, Artificial
  probe
  misc_feature (1)..(25): SEQ ID NO: 1533; WAN024FGP_at; Start 418; Stop 442
ccaagcgagaaacgcttggattcag

SEQ ID NO: 205647 - DNA, 25 bp, Artificial
  probe
  misc_feature (1)..(25): SEQ ID NO: 1533; WAN024FGP_at; Start 168; Stop 192
gaccaagattacaagcagttcagcc

SEQ ID NO: 205648 - DNA, 25 bp, Artificial
  probe
  misc_feature (1)..(25): SEQ ID NO: 1533; WAN024FGP_at; Start 263; Stop 287
cgcgtagcaataaaatgacggctac

SEQ ID NO: 205649 - DNA, 25 bp, Artificial
  probe
  misc_feature (1)..(25): SEQ ID NO: 1533; WAN024FGP_at; Start 174; Stop 198
gattacaagcagttcagcccgtggg

SEQ ID NO: 205650 - DNA, 25 bp, Artificial
  probe
  misc_feature (1)..(25): SEQ ID NO: 1533; WAN024FGP_at; Start 404; Stop 428
cagtggaagctctcccaagcgagaa

SEQ ID NO: 205651 - DNA, 25 bp, Artificial
  probe
  misc_feature (1)..(25): SEQ ID NO: 1533; WAN024FGP_at; Start 171; Stop 195
caagattacaagcagttcagcccgt

SEQ ID NO: 205652 - DNA, 25 bp, Artificial
  probe
  misc_feature (1)..(25): SEQ ID NO: 1533; WAN024FGP_at; Start 477; Stop 501
caatgcggtcgatagtgtacaaacg

SEQ ID NO: 205653 - DNA, 25 bp, Artificial
  probe
  misc_feature (1)..(25): SEQ ID NO: 1533; WAN024FGP_at; Start 269; Stop 293
gcaataaaatgacggctacagactt

SEQ ID NO: 205654 - DNA, 25 bp, Artificial
  probe
  misc_feature (1)..(25): SEQ ID NO: 3634; WAN024FGQ_s_at; Start 50; Stop 74
agatgcctggcattagtatttctac

SEQ ID NO: 205655 - DNA, 25 bp, Artificial
  probe
  misc_feature (1)..(25): SEQ ID NO: 3634; WAN024FGQ_s_at; Start 40; Stop 64
atttcaaaggagatgcctggcatta

SEQ ID NO: 205656 - DNA, 25 bp, Artificial
  probe
  misc_feature (1)..(25): SEQ ID NO: 3634; WAN024FGQ_s_at; Start 42; Stop 66
ttcaaaggagatgcctggcattagt

SEQ ID NO: 205657 - DNA, 25 bp, Artificial
  probe
  misc_feature (1)..(25): SEQ ID NO: 3634; WAN024FGQ_s_at; Start 41; Stop 65
tttcaaaggagatgcctggcattag

SEQ ID NO: 205658 - DNA, 25 bp, Artificial
  probe
  misc_feature (1)..(25): SEQ ID NO: 3634; WAN024FGQ_s_at; Start 33; Stop 57
tgcctctatttcaaaggagatgcct

SEQ ID NO: 205659 - DNA, 25 bp, Artificial
  probe
  misc_feature (1)..(25): SEQ ID NO: 3634; WAN024FGQ_s_at; Start 55; Stop 79
cctggcattagtatttctacttctt

SEQ ID NO: 205660 - DNA, 25 bp, Artificial
  probe
  misc_feature (1)..(25): SEQ ID NO: 3634; WAN024FGQ_s_at; Start 45; Stop 69
aaaggagatgcctggcattagtatt

SEQ ID NO: 205661 - DNA, 25 bp, Artificial
  probe
  misc_feature (1)..(25): SEQ ID NO: 3634; WAN024FGQ_s_at; Start 31; Stop 55
attgcctctatttcaaaggagatgc

SEQ ID NO: 205662 - DNA, 25 bp, Artificial
  probe
  misc_feature (1)..(25): SEQ ID NO: 3634; WAN024FGQ_s_at; Start 47; Stop 71
aggagatgcctggcattagtatttc

SEQ ID NO: 205663 - DNA, 25 bp, Artificial
  probe
  misc_feature (1)..(25): SEQ ID NO: 3634; WAN024FGQ_s_at; Start 49; Stop 73
gagatgcctggcattagtatttcta

SEQ ID NO: 205664 - DNA, 25 bp, Artificial
  probe
  misc_feature (1)..(25): SEQ ID NO: 3634; WAN024FGQ_s_at; Start 44; Stop 68
caaaggagatgcctggcattagtat

SEQ ID NO: 205665 - DNA, 25 bp, Artificial
  probe
  misc_feature (1)..(25): SEQ ID NO: 3634; WAN024FGQ_s_at; Start 43; Stop 67
tcaaaggagatgcctggcattagta

SEQ ID NO: 205666 - DNA, 25 bp, Artificial
  probe
  misc_feature (1)..(25): SEQ ID NO: 3634; WAN024FGQ_s_at; Start 59; Stop 83
gcattagtatttctacttcttggga

SEQ ID NO: 205667 - DNA, 25 bp, Artificial
  probe
  misc_feature (1)..(25): SEQ ID NO: 3634; WAN024FGQ_s_at; Start 51; Stop 75
gatgcctggcattagtatttctact

SEQ ID NO: 205668 - DNA, 25 bp, Artificial
  probe
  misc_feature (1)..(25): SEQ ID NO: 3634; WAN024FGQ_s_at; Start 58; Stop 82
ggcattagtatttctacttcttggg

SEQ ID NO: 205669 - DNA, 25 bp, Artificial
  probe
  misc_feature (1)..(25): SEQ ID NO: 3634; WAN024FGQ_s_at; Start 36; Stop 60
ctctatttcaaaggagatgcctggc

SEQ ID NO: 205670 - DNA, 25 bp, Artificial
  probe
  misc_feature (1)..(25): SEQ ID NO: 3634; WAN024FGQ_s_at; Start 60; Stop 84
cattagtatttctacttcttgggat

SEQ ID NO: 205671 - DNA, 25 bp, Artificial
  probe
  misc_feature (1)..(25): SEQ ID NO: 3634; WAN024FGQ_s_at; Start 48; Stop 72
ggagatgcctggcattagtatttct

SEQ ID NO: 205672 - DNA, 25 bp, Artificial
  probe
  misc_feature (1)..(25): SEQ ID NO: 3634; WAN024FGQ_s_at; Start 39; Stop 63
tatttcaaaggagatgcctggcatt

SEQ ID NO: 205673 - DNA, 25 bp, Artificial
  probe
  misc_feature (1)..(25): SEQ ID NO: 3634; WAN024FGQ_s_at; Start 34; Stop 58
gcctctatttcaaaggagatgcctg

SEQ ID NO: 205674 - DNA, 25 bp, Artificial
  probe
  misc_feature (1)..(25): SEQ ID NO: 3634; WAN024FGQ_s_at; Start 52; Stop 76
atgcctggcattagtatttctactt

SEQ ID NO: 205675 - DNA, 25 bp, Artificial
  probe
  misc_feature (1)..(25): SEQ ID NO: 3634; WAN024FGQ_s_at; Start 171; Stop 195
ctatcttaaaaaaggctattctcta

SEQ ID NO: 205676 - DNA, 25 bp, Artificial
  probe
  misc_feature (1)..(25): SEQ ID NO: 3634; WAN024FGQ_s_at; Start 46; Stop 70
aaggagatgcctggcattagtattt

SEQ ID NO: 205677 - DNA, 25 bp, Artificial
  probe
  misc_feature (1)..(25): SEQ ID NO: 3634; WAN024FGQ_s_at; Start 56; Stop 80
ctggcattagtatttctacttcttg

SEQ ID NO: 205678 - DNA, 25 bp, Artificial
  probe
  misc_feature (1)..(25): SEQ ID NO: 3634; WAN024FGQ_s_at; Start 32; Stop 56
ttgcctctatttcaaaggagatgcc

SEQ ID NO: 205679 - DNA, 25 bp, Artificial
  probe
  misc_feature (1)..(25): SEQ ID NO: 3634; WAN024FGQ_s_at; Start 54; Stop 78
gcctggcattagtatttctacttct

SEQ ID NO: 205680 - DNA, 25 bp, Artificial
  probe
  misc_feature (1)..(25): SEQ ID NO: 3634; WAN024FGQ_s_at; Start 35; Stop 59
cctctatttcaaaggagatgcctgg

SEQ ID NO: 205681 - DNA, 25 bp, Artificial
  probe
  misc_feature (1)..(25): SEQ ID NO: 3634; WAN024FGQ_s_at; Start 53; Stop 77
tgcctggcattagtatttctacttc

SEQ ID NO: 205682 - DNA, 25 bp, Artificial
  probe
  misc_feature (1)..(25): SEQ ID NO: 3634; WAN024FGQ_s_at; Start 57; Stop 81
tggcattagtatttctacttcttgg

SEQ ID NO: 205683 - DNA, 25 bp, Artificial
  probe
  misc_feature (1)..(25): SEQ ID NO: 1532; WAN024FGR_s_at; Start 103; Stop 127
cgtttgttgtatatgcaggttttga

SEQ ID NO: 205684 - DNA, 25 bp, Artificial
  probe
  misc_feature (1)..(25): SEQ ID NO: 1532; WAN024FGR_s_at; Start 378; Stop 402
ggctgatcctgaaatctataaaaaa

SEQ ID NO: 205685 - DNA, 25 bp, Artificial
  probe
  misc_feature (1)..(25): SEQ ID NO: 1532; WAN024FGR_s_at; Start 27; Stop 51
taacagccattcgattccgattcgg

SEQ ID NO: 205686 - DNA, 25 bp, Artificial
  probe
  misc_feature (1)..(25): SEQ ID NO: 1532; WAN024FGR_s_at; Start 205; Stop 229
tatgatgctagtggaaaacctttgg

SEQ ID NO: 205687 - DNA, 25 bp, Artificial
  probe
  misc_feature (1)..(25): SEQ ID NO: 1532; WAN024FGR_s_at; Start 40; Stop 64
attccgattcggcttaatttattgt

SEQ ID NO: 205688 - DNA, 25 bp, Artificial
  probe
  misc_feature (1)..(25): SEQ ID NO: 1532; WAN024FGR_s_at; Start 22; Stop 46
aaatttaacagccattcgattccga

SEQ ID NO: 205689 - DNA, 25 bp, Artificial
  probe
  misc_feature (1)..(25): SEQ ID NO: 1532; WAN024FGR_s_at; Start 564; Stop 588
tgttggaaactttgcgacaggaacc

SEQ ID NO: 205690 - DNA, 25 bp, Artificial
  probe
  misc_feature (1)..(25): SEQ ID NO: 1532; WAN024FGR_s_at; Start 110; Stop 134
tgtatatgcaggttttgaacaagga

SEQ ID NO: 205691 - DNA, 25 bp, Artificial
  probe
  misc_feature (1)..(25): SEQ ID NO: 1532; WAN024FGR_s_at; Start 457; Stop 481
tccgaatcagaactgtataacaatg

SEQ ID NO: 205692 - DNA, 25 bp, Artificial
  probe
  misc_feature (1)..(25): SEQ ID NO: 1532; WAN024FGR_s_at; Start 454; Stop 478
ctatccgaatcagaactgtataaca

SEQ ID NO: 205693 - DNA, 25 bp, Artificial
  probe
  misc_feature (1)..(25): SEQ ID NO: 1532; WAN024FGR_s_at; Start 208; Stop 232
gatgctagtggaaaacctttggtag

SEQ ID NO: 205694 - DNA, 25 bp, Artificial
  probe
  misc_feature (1)..(25): SEQ ID NO: 1532; WAN024FGR_s_at; Start 516; Stop 540
tacagaggatgaaaagaaagaaatc

SEQ ID NO: 205695 - DNA, 25 bp, Artificial
  probe
  misc_feature (1)..(25): SEQ ID NO: 1532; WAN024FGR_s_at; Start 49; Stop 73
cggcttaatttattgttttcaatcg

SEQ ID NO: 205696 - DNA, 25 bp, Artificial
  probe
  misc_feature (1)..(25): SEQ ID NO: 1532; WAN024FGR_s_at; Start 369; Stop 393
ttactatttggctgatcctgaaatc

SEQ ID NO: 205697 - DNA, 25 bp, Artificial
  probe
  misc_feature (1)..(25): SEQ ID NO: 1532; WAN024FGR_s_at; Start 520; Stop 544
gaggatgaaaagaaagaaatctatc

SEQ ID NO: 205698 - DNA, 25 bp, Artificial
  probe
  misc_feature (1)..(25): SEQ ID NO: 1532; WAN024FGR_s_at; Start 549; Stop 573
tagtcagttaaatgctgttggaaac

SEQ ID NO: 205699 - DNA, 25 bp, Artificial
  probe
  misc_feature (1)..(25): SEQ ID NO: 1532; WAN024FGR_s_at; Start 373; Stop 397
tatttggctgatcctgaaatctata

SEQ ID NO: 205700 - DNA, 25 bp, Artificial
  probe
  misc_feature (1)..(25): SEQ ID NO: 1532; WAN024FGR_s_at; Start 340; Stop 364
ccaaatttgacagaacgccagctgg

SEQ ID NO: 205701 - DNA, 25 bp, Artificial
  probe
  misc_feature (1)..(25): SEQ ID NO: 1532; WAN024FGR_s_at; Start 34; Stop 58
cattcgattccgattcggcttaatt

SEQ ID NO: 205702 - DNA, 25 bp, Artificial
  probe
  misc_feature (1)..(25): SEQ ID NO: 1532; WAN024FGR_s_at; Start 559; Stop 583
aatgctgttggaaactttgcgacag

SEQ ID NO: 205703 - DNA, 25 bp, Artificial
  probe
  misc_feature (1)..(25): SEQ ID NO: 1532; WAN024FGR_s_at; Start 15; Stop 39
tatgagaaaatttaacagccattcg

SEQ ID NO: 205704 - DNA, 25 bp, Artificial
  probe
  misc_feature (1)..(25): SEQ ID NO: 1532; WAN024FGR_s_at; Start 96; Stop 120
tattggtcgtttgttgtatatgcag

SEQ ID NO: 205705 - DNA, 25 bp, Artificial
  probe
  misc_feature (1)..(25): SEQ ID NO: 1532; WAN024FGR_s_at; Start 20; Stop 44
gaaaatttaacagccattcgattcc

SEQ ID NO: 205706 - DNA, 25 bp, Artificial
  probe
  misc_feature (1)..(25): SEQ ID NO: 1532; WAN024FGR_s_at; Start 916; Stop 940
gaaggtagtaagggaaacaatatca

SEQ ID NO: 205707 - DNA, 25 bp, Artificial
  probe
  misc_feature (1)..(25): SEQ ID NO: 1532; WAN024FGR_s_at; Start 568; Stop 592
ggaaactttgcgacaggaaccattg

SEQ ID NO: 205708 - DNA, 25 bp, Artificial
  probe
  misc_feature (1)..(25): SEQ ID NO: 1532; WAN024FGR_s_at; Start 210; Stop 234
tgctagtggaaaacctttggtagaa

SEQ ID NO: 205709 - DNA, 25 bp, Artificial
  probe
  misc_feature (1)..(25): SEQ ID NO: 1532; WAN024FGR_s_at; Start 341; Stop 365
caaatttgacagaacgccagctggc

SEQ ID NO: 205710 - DNA, 25 bp, Artificial
  probe
  misc_feature (1)..(25): SEQ ID NO: 1532; WAN024FGR_s_at; Start 557; Stop 581
taaatgctgttggaaactttgcgac

SEQ ID NO: 205711 - DNA, 25 bp, Artificial
  probe
  misc_feature (1)..(25): SEQ ID NO: 1532; WAN024FGR_s_at; Start 565; Stop 589
gttggaaactttgcgacaggaacca

SEQ ID NO: 205712 - DNA, 25 bp, Artificial
  probe
  misc_feature (1)..(25): SEQ ID NO: 1532; WAN024FGR_s_at; Start 116; Stop 140
tgcaggttttgaacaaggattttta

SEQ ID NO: 205713 - DNA, 25 bp, Artificial
  probe
  misc_feature (1)..(25): SEQ ID NO: 1532; WAN024FGR_s_at; Start 66; Stop 90
ttcaatcgtcattttactctttatg

SEQ ID NO: 205714 - DNA, 25 bp, Artificial
  probe
  misc_feature (1)..(25): SEQ ID NO: 1532; WAN024FGR_s_at; Start 92; Stop 116
ccattattggtcgtttgttgtatat

SEQ ID NO: 205715 - DNA, 25 bp, Artificial
  probe
  misc_feature (1)..(25): SEQ ID NO: 1532; WAN024FGR_s_at; Start 1; Stop 25
atgagactgatttgtatgagaaaat

SEQ ID NO: 205716 - DNA, 25 bp, Artificial
  probe
  misc_feature (1)..(25): SEQ ID NO: 1532; WAN024FGR_s_at; Start 30; Stop 54
cagccattcgattccgattcggctt

SEQ ID NO: 205717 - DNA, 25 bp, Artificial
  probe
  misc_feature (1)..(25): SEQ ID NO: 1252; WAN024FGS_at; Start 270; Stop 294
cggactgataccattcataggagaa

SEQ ID NO: 205718 - DNA, 25 bp, Artificial
  probe
  misc_feature (1)..(25): SEQ ID NO: 1252; WAN024FGS_at; Start 72; Stop 96
ttcgtccgcatactcaatgtccgct

SEQ ID NO: 205719 - DNA, 25 bp, Artificial
  probe
  misc_feature (1)..(25): SEQ ID NO: 1252; WAN024FGS_at; Start 8; Stop 32
gagttcgtaaatttgcctacactta

SEQ ID NO: 205720 - DNA, 25 bp, Artificial
  probe
  misc_feature (1)..(25): SEQ ID NO: 1252; WAN024FGS_at; Start 152; Stop 176
aacgtgaaagatacatggaagtcgc

SEQ ID NO: 205721 - DNA, 25 bp, Artificial
  probe
  misc_feature (1)..(25): SEQ ID NO: 1252; WAN024FGS_at; Start 33; Stop 57
caactctgtccgattttcaatggct

SEQ ID NO: 205722 - DNA, 25 bp, Artificial
  probe
  misc_feature (1)..(25): SEQ ID NO: 1252; WAN024FGS_at; Start 41; Stop 65
tccgattttcaatggctcgtaagag

SEQ ID NO: 205723 - DNA, 25 bp, Artificial
  probe
  misc_feature (1)..(25): SEQ ID NO: 1252; WAN024FGS_at; Start 157; Stop 181
gaaagatacatggaagtcgcttcac

SEQ ID NO: 205724 - DNA, 25 bp, Artificial
  probe
  misc_feature (1)..(25): SEQ ID NO: 1252; WAN024FGS_at; Start 204; Stop 228
cacaatcacttctgaaacctcacta

SEQ ID NO: 205725 - DNA, 25 bp, Artificial
  probe
  misc_feature (1)..(25): SEQ ID NO: 1252; WAN024FGS_at; Start 132; Stop 156
gataccagccggcttgagcaaacgt

SEQ ID NO: 205726 - DNA, 25 bp, Artificial
  probe
  misc_feature (1)..(25): SEQ ID NO: 1252; WAN024FGS_at; Start 178; Stop 202
tcaccatccgctgtagcattagtcg

SEQ ID NO: 205727 - DNA, 25 bp, Artificial
  probe
  misc_feature (1)..(25): SEQ ID NO: 1252; WAN024FGS_at; Start 103; Stop 127
gcgagacctcgtgctagacgcgtaa

SEQ ID NO: 205728 - DNA, 25 bp, Artificial
  probe
  misc_feature (1)..(25): SEQ ID NO: 1252; WAN024FGS_at; Start 65; Stop 89
gtgtcacttcgtccgcatactcaat

SEQ ID NO: 205729 - DNA, 25 bp, Artificial
  probe
  misc_feature (1)..(25): SEQ ID NO: 1252; WAN024FGS_at; Start 184; Stop 208
tccgctgtagcattagtcgccacaa

SEQ ID NO: 205730 - DNA, 25 bp, Artificial
  probe
  misc_feature (1)..(25): SEQ ID NO: 1252; WAN024FGS_at; Start 217; Stop 241
gaaacctcactatccataagacgag

SEQ ID NO: 205731 - DNA, 25 bp, Artificial
  probe
  misc_feature (1)..(25): SEQ ID NO: 1252; WAN024FGS_at; Start 229; Stop 253
tccataagacgagtcataaggctct

SEQ ID NO: 205732 - DNA, 25 bp, Artificial
  probe
  misc_feature (1)..(25): SEQ ID NO: 1252; WAN024FGS_at; Start 197; Stop 221
tagtcgccacaatcacttctgaaac

SEQ ID NO: 205733 - DNA, 25 bp, Artificial
  probe
  misc_feature (1)..(25): SEQ ID NO: 1252; WAN024FGS_at; Start 168; Stop 192
ggaagtcgcttcaccatccgctgta

SEQ ID NO: 205734 - DNA, 25 bp, Artificial
  probe
  misc_feature (1)..(25): SEQ ID NO: 1252; WAN024FGS_at; Start 193; Stop 217
gcattagtcgccacaatcacttctg

SEQ ID NO: 205735 - DNA, 25 bp, Artificial
  probe
  misc_feature (1)..(25): SEQ ID NO: 1252; WAN024FGS_at; Start 109; Stop 133
cctcgtgctagacgcgtaaccttga

SEQ ID NO: 205736 - DNA, 25 bp, Artificial
  probe
  misc_feature (1)..(25): SEQ ID NO: 1252; WAN024FGS_at; Start 50; Stop 74
caatggctcgtaagagtgtcacttc

SEQ ID NO: 205737 - DNA, 25 bp, Artificial
  probe
  misc_feature (1)..(25): SEQ ID NO: 1252; WAN024FGS_at; Start 254; Stop 278
tgagattgatatcgtccggactgat

SEQ ID NO: 205738 - DNA, 25 bp, Artificial
  probe
  misc_feature (1)..(25): SEQ ID NO: 1252; WAN024FGS_at; Start 145; Stop 169
ttgagcaaacgtgaaagatacatgg

SEQ ID NO: 205739 - DNA, 25 bp, Artificial
  probe
  misc_feature (1)..(25): SEQ ID NO: 1252; WAN024FGS_at; Start 278; Stop 302
taccattcataggagaaatgaggcc

SEQ ID NO: 205740 - DNA, 25 bp, Artificial
  probe
  misc_feature (1)..(25): SEQ ID NO: 1252; WAN024FGS_at; Start 265; Stop 289
tcgtccggactgataccattcatag

SEQ ID NO: 205741 - DNA, 25 bp, Artificial
  probe
  misc_feature (1)..(25): SEQ ID NO: 1252; WAN024FGS_at; Start 119; Stop 143
gacgcgtaaccttgataccagccgg

SEQ ID NO: 205742 - DNA, 25 bp, Artificial
  probe
  misc_feature (1)..(25): SEQ ID NO: 1252; WAN024FGS_at; Start 21; Stop 45
tgcctacacttacaactctgtccga

SEQ ID NO: 205743 - DNA, 25 bp, Artificial
  probe
  misc_feature (1)..(25): SEQ ID NO: 1252; WAN024FGS_at; Start 245; Stop 269
taaggctcttgagattgatatcgtc

SEQ ID NO: 205744 - DNA, 25 bp, Artificial
  probe
  misc_feature (1)..(25): SEQ ID NO: 1252; WAN024FGS_at; Start 233; Stop 257
taagacgagtcataaggctcttgag

SEQ ID NO: 205745 - DNA, 25 bp, Artificial
  probe
  misc_feature (1)..(25): SEQ ID NO: 1252; WAN024FGS_at; Start 281; Stop 305
cattcataggagaaatgaggccatg

SEQ ID NO: 205746 - DNA, 25 bp, Artificial
  probe
  misc_feature (1)..(25): SEQ ID NO: 1252; WAN024FGS_at; Start 125; Stop 149
taaccttgataccagccggcttgag

SEQ ID NO: 205747 - DNA, 25 bp, Artificial
  probe
  misc_feature (1)..(25): SEQ ID NO: 1252; WAN024FGS_at; Start 139; Stop 163
gccggcttgagcaaacgtgaaagat

SEQ ID NO: 205748 - DNA, 25 bp, Artificial
  probe
  misc_feature (1)..(25): SEQ ID NO: 1252; WAN024FGS_at; Start 60; Stop 84
taagagtgtcacttcgtccgcatac

SEQ ID NO: 205749 - DNA, 25 bp, Artificial
  probe
  misc_feature (1)..(25): SEQ ID NO: 1252; WAN024FGS_at; Start 96; Stop 120
tcccacagcgagacctcgtgctaga

SEQ ID NO: 205750 - DNA, 25 bp, Artificial
  probe
  misc_feature (1)..(25): SEQ ID NO: 1252; WAN024FGS_at; Start 3; Stop 27
gaatggagttcgtaaatttgcctac

SEQ ID NO: 205751 - DNA, 25 bp, Artificial
  probe
  misc_feature (1)..(25): SEQ ID NO: 2125; WAN024FGT_at; Start 72; Stop 96
ggctacgcgtctggccttttatacg

SEQ ID NO: 205752 - DNA, 25 bp, Artificial
  probe
  misc_feature (1)..(25): SEQ ID NO: 2125; WAN024FGT_at; Start 83; Stop 107
tggccttttatacgattgggatgtc

SEQ ID NO: 205753 - DNA, 25 bp, Artificial
  probe
  misc_feature (1)..(25): SEQ ID NO: 2125; WAN024FGT_at; Start 88; Stop 112
ttttatacgattgggatgtctgatg

SEQ ID NO: 205754 - DNA, 25 bp, Artificial
  probe
  misc_feature (1)..(25): SEQ ID NO: 2125; WAN024FGT_at; Start 436; Stop 460
acagcagatggggaagcgacttcca

SEQ ID NO: 205755 - DNA, 25 bp, Artificial
  probe
  misc_feature (1)..(25): SEQ ID NO: 2125; WAN024FGT_at; Start 410; Stop 434
cagaagtaatcgtagcaaccaatgc

SEQ ID NO: 205756 - DNA, 25 bp, Artificial
  probe
  misc_feature (1)..(25): SEQ ID NO: 2125; WAN024FGT_at; Start 423; Stop 447
agcaaccaatgccacagcagatggg

SEQ ID NO: 205757 - DNA, 25 bp, Artificial
  probe
  misc_feature (1)..(25): SEQ ID NO: 2125; WAN024FGT_at; Start 378; Stop 402
tctcatgactcgtctgatggatagt

SEQ ID NO: 205758 - DNA, 25 bp, Artificial
  probe
  misc_feature (1)..(25): SEQ ID NO: 2125; WAN024FGT_at; Start 86; Stop 110
ccttttatacgattgggatgtctga

SEQ ID NO: 205759 - DNA, 25 bp, Artificial
  probe
  misc_feature (1)..(25): SEQ ID NO: 2125; WAN024FGT_at; Start 406; Stop 430
gtttcagaagtaatcgtagcaacca

SEQ ID NO: 205760 - DNA, 25 bp, Artificial
  probe
  misc_feature (1)..(25): SEQ ID NO: 2125; WAN024FGT_at; Start 25; Stop 49
aagctgattgacagttattccaagt

SEQ ID NO: 205761 - DNA, 25 bp, Artificial
  probe
  misc_feature (1)..(25): SEQ ID NO: 2125; WAN024FGT_at; Start 453; Stop 477
gacttccatgtatctttcccgctta

SEQ ID NO: 205762 - DNA, 25 bp, Artificial
  probe
  misc_feature (1)..(25): SEQ ID NO: 2125; WAN024FGT_at; Start 81; Stop 105
tctggccttttatacgattgggatg

SEQ ID NO: 205763 - DNA, 25 bp, Artificial
  probe
  misc_feature (1)..(25): SEQ ID NO: 2125; WAN024FGT_at; Start 488; Stop 512
ctgggatcaaggttacgcgcctggc

SEQ ID NO: 205764 - DNA, 25 bp, Artificial
  probe
  misc_feature (1)..(25): SEQ ID NO: 2125; WAN024FGT_at; Start 490; Stop 514
gggatcaaggttacgcgcctggcac

SEQ ID NO: 205765 - DNA, 25 bp, Artificial
  probe
  misc_feature (1)..(25): SEQ ID NO: 2125; WAN024FGT_at; Start 416; Stop 440
taatcgtagcaaccaatgccacagc

SEQ ID NO: 205766 - DNA, 25 bp, Artificial
  probe
  misc_feature (1)..(25): SEQ ID NO: 2125; WAN024FGT_at; Start 485; Stop 509
cagctgggatcaaggttacgcgcct

SEQ ID NO: 205767 - DNA, 25 bp, Artificial
  probe
  misc_feature (1)..(25): SEQ ID NO: 2125; WAN024FGT_at; Start 415; Stop 439
gtaatcgtagcaaccaatgccacag

SEQ ID NO: 205768 - DNA, 25 bp, Artificial
  probe
  misc_feature (1)..(25): SEQ ID NO: 2125; WAN024FGT_at; Start 75; Stop 99
tacgcgtctggccttttatacgatt

SEQ ID NO: 205769 - DNA, 25 bp, Artificial
  probe
  misc_feature (1)..(25): SEQ ID NO: 2125; WAN024FGT_at; Start 429; Stop 453
caatgccacagcagatggggaagcg

SEQ ID NO: 205770 - DNA, 25 bp, Artificial
  probe
  misc_feature (1)..(25): SEQ ID NO: 2125; WAN024FGT_at; Start 419; Stop 443
tcgtagcaaccaatgccacagcaga

SEQ ID NO: 205771 - DNA, 25 bp, Artificial
  probe
  misc_feature (1)..(25): SEQ ID NO: 2125; WAN024FGT_at; Start 486; Stop 510
agctgggatcaaggttacgcgcctg

SEQ ID NO: 205772 - DNA, 25 bp, Artificial
  probe
  misc_feature (1)..(25): SEQ ID NO: 2125; WAN024FGT_at; Start 412; Stop 436
gaagtaatcgtagcaaccaatgcca

SEQ ID NO: 205773 - DNA, 25 bp, Artificial
  probe
  misc_feature (1)..(25): SEQ ID NO: 2125; WAN024FGT_at; Start 451; Stop 475
gcgacttccatgtatctttcccgct

SEQ ID NO: 205774 - DNA, 25 bp, Artificial
  probe
  misc_feature (1)..(25): SEQ ID NO: 2125; WAN024FGT_at; Start 68; Stop 92
agacggctacgcgtctggcctttta

SEQ ID NO: 205775 - DNA, 25 bp, Artificial
  probe
  misc_feature (1)..(25): SEQ ID NO: 2125; WAN024FGT_at; Start 413; Stop 437
aagtaatcgtagcaaccaatgccac

SEQ ID NO: 205776 - DNA, 25 bp, Artificial
  probe
  misc_feature (1)..(25): SEQ ID NO: 2125; WAN024FGT_at; Start 455; Stop 479
cttccatgtatctttcccgcttact

SEQ ID NO: 205777 - DNA, 25 bp, Artificial
  probe
  misc_feature (1)..(25): SEQ ID NO: 2125; WAN024FGT_at; Start 484; Stop 508
ccagctgggatcaaggttacgcgcc

SEQ ID NO: 205778 - DNA, 25 bp, Artificial
  probe
  misc_feature (1)..(25): SEQ ID NO: 2125; WAN024FGT_at; Start 28; Stop 52
ctgattgacagttattccaagttac

SEQ ID NO: 205779 - DNA, 25 bp, Artificial
  probe
  misc_feature (1)..(25): SEQ ID NO: 2125; WAN024FGT_at; Start 409; Stop 433
tcagaagtaatcgtagcaaccaatg

SEQ ID NO: 205780 - DNA, 25 bp, Artificial
  probe
  misc_feature (1)..(25): SEQ ID NO: 2125; WAN024FGT_at; Start 78; Stop 102
gcgtctggccttttatacgattggg

SEQ ID NO: 205781 - DNA, 25 bp, Artificial
  probe
  misc_feature (1)..(25): SEQ ID NO: 2125; WAN024FGT_at; Start 421; Stop 445
gtagcaaccaatgccacagcagatg

SEQ ID NO: 205782 - DNA, 25 bp, Artificial
  probe
  misc_feature (1)..(25): SEQ ID NO: 2125; WAN024FGT_at; Start 79; Stop 103
cgtctggccttttatacgattggga

SEQ ID NO: 205783 - DNA, 25 bp, Artificial
  probe
  misc_feature (1)..(25): SEQ ID NO: 2125; WAN024FGT_at; Start 489; Stop 513
tgggatcaaggttacgcgcctggca

SEQ ID NO: 205784 - DNA, 25 bp, Artificial
  probe
  misc_feature (1)..(25): SEQ ID NO: 2125; WAN024FGT_at; Start 70; Stop 94
acggctacgcgtctggccttttata

SEQ ID NO: 205785 - DNA, 25 bp, Artificial
  probe
  misc_feature (1)..(25): SEQ ID NO: 2124; WAN024FGU_at; Start 547; Stop 571
gcggacgaagtgacactcttacgag

SEQ ID NO: 205786 - DNA, 25 bp, Artificial
  probe
  misc_feature (1)..(25): SEQ ID NO: 2124; WAN024FGU_at; Start 496; Stop 520
aaggttacgcgtctagcacgaggtc

SEQ ID NO: 205787 - DNA, 25 bp, Artificial
  probe
  misc_feature (1)..(25): SEQ ID NO: 2124; WAN024FGU_at; Start 491; Stop 515
gtatcaaggttacgcgtctagcacg

SEQ ID NO: 205788 - DNA, 25 bp, Artificial
  probe
  misc_feature (1)..(25): SEQ ID NO: 2124; WAN024FGU_at; Start 545; Stop 569
atgcggacgaagtgacactcttacg

SEQ ID NO: 205789 - DNA, 25 bp, Artificial
  probe
  misc_feature (1)..(25): SEQ ID NO: 2124; WAN024FGU_at; Start 541; Stop 565
gagtatgcggacgaagtgacactct

SEQ ID NO: 205790 - DNA, 25 bp, Artificial
  probe
  misc_feature (1)..(25): SEQ ID NO: 2124; WAN024FGU_at; Start 498; Stop 522
ggttacgcgtctagcacgaggtctc

SEQ ID NO: 205791 - DNA, 25 bp, Artificial
  probe
  misc_feature (1)..(25): SEQ ID NO: 2124; WAN024FGU_at; Start 535; Stop 559
gacattgagtatgcggacgaagtga

SEQ ID NO: 205792 - DNA, 25 bp, Artificial
  probe
  misc_feature (1)..(25): SEQ ID NO: 2124; WAN024FGU_at; Start 500; Stop 524
ttacgcgtctagcacgaggtctcgc

SEQ ID NO: 205793 - DNA, 25 bp, Artificial
  probe
  misc_feature (1)..(25): SEQ ID NO: 2124; WAN024FGU_at; Start 544; Stop 568
tatgcggacgaagtgacactcttac

SEQ ID NO: 205794 - DNA, 25 bp, Artificial
  probe
  misc_feature (1)..(25): SEQ ID NO: 2124; WAN024FGU_at; Start 499; Stop 523
gttacgcgtctagcacgaggtctcg

SEQ ID NO: 205795 - DNA, 25 bp, Artificial
  probe
  misc_feature (1)..(25): SEQ ID NO: 2124; WAN024FGU_at; Start 546; Stop 570
tgcggacgaagtgacactcttacga

SEQ ID NO: 205796 - DNA, 25 bp, Artificial
  probe
  misc_feature (1)..(25): SEQ ID NO: 2124; WAN024FGU_at; Start 501; Stop 525
tacgcgtctagcacgaggtctcgct

SEQ ID NO: 205797 - DNA, 25 bp, Artificial
  probe
  misc_feature (1)..(25): SEQ ID NO: 2124; WAN024FGU_at; Start 495; Stop 519
caaggttacgcgtctagcacgaggt

SEQ ID NO: 205798 - DNA, 25 bp, Artificial
  probe
  misc_feature (1)..(25): SEQ ID NO: 2124; WAN024FGU_at; Start 537; Stop 561
cattgagtatgcggacgaagtgaca

SEQ ID NO: 205799 - DNA, 25 bp, Artificial
  probe
  misc_feature (1)..(25): SEQ ID NO: 2124; WAN024FGU_at; Start 487; Stop 511
gctggtatcaaggttacgcgtctag

SEQ ID NO: 205800 - DNA, 25 bp, Artificial
  probe
  misc_feature (1)..(25): SEQ ID NO: 2124; WAN024FGU_at; Start 488; Stop 512
ctggtatcaaggttacgcgtctagc

SEQ ID NO: 205801 - DNA, 25 bp, Artificial
  probe
  misc_feature (1)..(25): SEQ ID NO: 2124; WAN024FGU_at; Start 490; Stop 514
ggtatcaaggttacgcgtctagcac

SEQ ID NO: 205802 - DNA, 25 bp, Artificial
  probe
  misc_feature (1)..(25): SEQ ID NO: 2124; WAN024FGU_at; Start 497; Stop 521
aggttacgcgtctagcacgaggtct

SEQ ID NO: 205803 - DNA, 25 bp, Artificial
  probe
  misc_feature (1)..(25): SEQ ID NO: 2124; WAN024FGU_at; Start 494; Stop 518
tcaaggttacgcgtctagcacgagg

SEQ ID NO: 205804 - DNA, 25 bp, Artificial
  probe
  misc_feature (1)..(25): SEQ ID NO: 2124; WAN024FGU_at; Start 539; Stop 563
ttgagtatgcggacgaagtgacact

SEQ ID NO: 205805 - DNA, 25 bp, Artificial
  probe
  misc_feature (1)..(25): SEQ ID NO: 2124; WAN024FGU_at; Start 542; Stop 566
agtatgcggacgaagtgacactctt

SEQ ID NO: 205806 - DNA, 25 bp, Artificial
  probe
  misc_feature (1)..(25): SEQ ID NO: 2124; WAN024FGU_at; Start 493; Stop 517
atcaaggttacgcgtctagcacgag

SEQ ID NO: 205807 - DNA, 25 bp, Artificial
  probe
  misc_feature (1)..(25): SEQ ID NO: 2124; WAN024FGU_at; Start 503; Stop 527
cgcgtctagcacgaggtctcgctgt

SEQ ID NO: 205808 - DNA, 25 bp, Artificial
  probe
  misc_feature (1)..(25): SEQ ID NO: 2124; WAN024FGU_at; Start 543; Stop 567
gtatgcggacgaagtgacactctta

SEQ ID NO: 205809 - DNA, 25 bp, Artificial
  probe
  misc_feature (1)..(25): SEQ ID NO: 2124; WAN024FGU_at; Start 492; Stop 516
tatcaaggttacgcgtctagcacga

SEQ ID NO: 205810 - DNA, 25 bp, Artificial
  probe
  misc_feature (1)..(25): SEQ ID NO: 2124; WAN024FGU_at; Start 502; Stop 526
acgcgtctagcacgaggtctcgctg

SEQ ID NO: 205811 - DNA, 25 bp, Artificial
  probe
  misc_feature (1)..(25): SEQ ID NO: 2124; WAN024FGU_at; Start 536; Stop 560
acattgagtatgcggacgaagtgac

SEQ ID NO: 205812 - DNA, 25 bp, Artificial
  probe
  misc_feature (1)..(25): SEQ ID NO: 2124; WAN024FGU_at; Start 489; Stop 513
tggtatcaaggttacgcgtctagca

SEQ ID NO: 205813 - DNA, 25 bp, Artificial
  probe
  misc_feature (1)..(25): SEQ ID NO: 2124; WAN024FGU_at; Start 548; Stop 572
cggacgaagtgacactcttacgagc

SEQ ID NO: 205814 - DNA, 25 bp, Artificial
  probe
  misc_feature (1)..(25): SEQ ID NO: 2124; WAN024FGU_at; Start 534; Stop 558
ggacattgagtatgcggacgaagtg

SEQ ID NO: 205815 - DNA, 25 bp, Artificial
  probe
  misc_feature (1)..(25): SEQ ID NO: 2124; WAN024FGU_at; Start 540; Stop 564
tgagtatgcggacgaagtgacactc

SEQ ID NO: 205816 - DNA, 25 bp, Artificial
  probe
  misc_feature (1)..(25): SEQ ID NO: 2124; WAN024FGU_at; Start 538; Stop 562
attgagtatgcggacgaagtgacac

SEQ ID NO: 205817 - DNA, 25 bp, Artificial
  probe
  misc_feature (1)..(25): SEQ ID NO: 2018; WAN024FGV_at; Start 10; Stop 34
ttttcttccgcttgggaaatggctg

SEQ ID NO: 205818 - DNA, 25 bp, Artificial
  probe
  misc_feature (1)..(25): SEQ ID NO: 2018; WAN024FGV_at; Start 178; Stop 202
tctagacctgtaaaaaagccttctc

SEQ ID NO: 205819 - DNA, 25 bp, Artificial
  probe
  misc_feature (1)..(25): SEQ ID NO: 2018; WAN024FGV_at; Start 188; Stop 212
taaaaaagccttctctagccattac

SEQ ID NO: 205820 - DNA, 25 bp, Artificial
  probe
  misc_feature (1)..(25): SEQ ID NO: 2018; WAN024FGV_at; Start 173; Stop 197
caatatctagacctgtaaaaaagcc

SEQ ID NO: 205821 - DNA, 25 bp, Artificial
  probe
  misc_feature (1)..(25): SEQ ID NO: 2018; WAN024FGV_at; Start 108; Stop 132
cacgccaattacatttaattcacca

SEQ ID NO: 205822 - DNA, 25 bp, Artificial
  probe
  misc_feature (1)..(25): SEQ ID NO: 2018; WAN024FGV_at; Start 122; Stop 146
ttaattcaccatttctctgctcggc

SEQ ID NO: 205823 - DNA, 25 bp, Artificial
  probe
  misc_feature (1)..(25): SEQ ID NO: 2018; WAN024FGV_at; Start 236; Stop 260
gtttcgcacttcgtattattccata

SEQ ID NO: 205824 - DNA, 25 bp, Artificial
  probe
  misc_feature (1)..(25): SEQ ID NO: 2018; WAN024FGV_at; Start 18; Stop 42
cgcttgggaaatggctgacttgata

SEQ ID NO: 205825 - DNA, 25 bp, Artificial
  probe
  misc_feature (1)..(25): SEQ ID NO: 2018; WAN024FGV_at; Start 226; Stop 250
tatcttccaagtttcgcacttcgta

SEQ ID NO: 205826 - DNA, 25 bp, Artificial
  probe
  misc_feature (1)..(25): SEQ ID NO: 2018; WAN024FGV_at; Start 1; Stop 25
atgcctgccttttcttccgcttggg

SEQ ID NO: 205827 - DNA, 25 bp, Artificial
  probe
  misc_feature (1)..(25): SEQ ID NO: 2018; WAN024FGV_at; Start 39; Stop 63
gatagcagttgctgctgcatcaata

SEQ ID NO: 205828 - DNA, 25 bp, Artificial
  probe
  misc_feature (1)..(25): SEQ ID NO: 2018; WAN024FGV_at; Start 13; Stop 37
tcttccgcttgggaaatggctgact

SEQ ID NO: 205829 - DNA, 25 bp, Artificial
  probe
  misc_feature (1)..(25): SEQ ID NO: 2018; WAN024FGV_at; Start 165; Stop 189
gcttgttccaatatctagacctgta

SEQ ID NO: 205830 - DNA, 25 bp, Artificial
  probe
  misc_feature (1)..(25): SEQ ID NO: 2018; WAN024FGV_at; Start 101; Stop 125
cattactcacgccaattacatttaa

SEQ ID NO: 205831 - DNA, 25 bp, Artificial
  probe
  misc_feature (1)..(25): SEQ ID NO: 2018; WAN024FGV_at; Start 44; Stop 68
cagttgctgctgcatcaatatcaac

SEQ ID NO: 205832 - DNA, 25 bp, Artificial
  probe
  misc_feature (1)..(25): SEQ ID NO: 2018; WAN024FGV_at; Start 85; Stop 109
acacctttacttttggcattactca

SEQ ID NO: 205833 - DNA, 25 bp, Artificial
  probe
  misc_feature (1)..(25): SEQ ID NO: 2018; WAN024FGV_at; Start 192; Stop 216
aaagccttctctagccattacatcg

SEQ ID NO: 205834 - DNA, 25 bp, Artificial
  probe
  misc_feature (1)..(25): SEQ ID NO: 2018; WAN024FGV_at; Start 68; Stop 92
caataattccatcctttacaccttt

SEQ ID NO: 205835 - DNA, 25 bp, Artificial
  probe
  misc_feature (1)..(25): SEQ ID NO: 2018; WAN024FGV_at; Start 159; Stop 183
gacagagcttgttccaatatctaga

SEQ ID NO: 205836 - DNA, 25 bp, Artificial
  probe
  misc_feature (1)..(25): SEQ ID NO: 2018; WAN024FGV_at; Start 124; Stop 148
aattcaccatttctctgctcggcca

SEQ ID NO: 205837 - DNA, 25 bp, Artificial
  probe
  misc_feature (1)..(25): SEQ ID NO: 2018; WAN024FGV_at; Start 182; Stop 206
gacctgtaaaaaagccttctctagc

SEQ ID NO: 205838 - DNA, 25 bp, Artificial
  probe
  misc_feature (1)..(25): SEQ ID NO: 2018; WAN024FGV_at; Start 29; Stop 53
tggctgacttgatagcagttgctgc

SEQ ID NO: 205839 - DNA, 25 bp, Artificial
  probe
  misc_feature (1)..(25): SEQ ID NO: 2018; WAN024FGV_at; Start 16; Stop 40
tccgcttgggaaatggctgacttga

SEQ ID NO: 205840 - DNA, 25 bp, Artificial
  probe
  misc_feature (1)..(25): SEQ ID NO: 2018; WAN024FGV_at; Start 214; Stop 238
tcgcttcctctctatcttccaagtt

SEQ ID NO: 205841 - DNA, 25 bp, Artificial
  probe
  misc_feature (1)..(25): SEQ ID NO: 2018; WAN024FGV_at; Start 33; Stop 57
tgacttgatagcagttgctgctgca

SEQ ID NO: 205842 - DNA, 25 bp, Artificial
  probe
  misc_feature (1)..(25): SEQ ID NO: 2018; WAN024FGV_at; Start 144; Stop 168
ggccacaagcaccttgacagagctt

SEQ ID NO: 205843 - DNA, 25 bp, Artificial
  probe
  misc_feature (1)..(25): SEQ ID NO: 2018; WAN024FGV_at; Start 3; Stop 27
gcctgccttttcttccgcttgggaa

SEQ ID NO: 205844 - DNA, 25 bp, Artificial
  probe
  misc_feature (1)..(25): SEQ ID NO: 2018; WAN024FGV_at; Start 22; Stop 46
tgggaaatggctgacttgatagcag

SEQ ID NO: 205845 - DNA, 25 bp, Artificial
  probe
  misc_feature (1)..(25): SEQ ID NO: 2018; WAN024FGV_at; Start 49; Stop 73
gctgctgcatcaatatcaacaataa

SEQ ID NO: 205846 - DNA, 25 bp, Artificial
  probe
  misc_feature (1)..(25): SEQ ID NO: 2018; WAN024FGV_at; Start 58; Stop 82
tcaatatcaacaataattccatcct

SEQ ID NO: 205847 - DNA, 25 bp, Artificial
  probe
  misc_feature (1)..(25): SEQ ID NO: 2018; WAN024FGV_at; Start 203; Stop 227
tagccattacatcgcttcctctcta

SEQ ID NO: 205848 - DNA, 25 bp, Artificial
  probe
  misc_feature (1)..(25): SEQ ID NO: 2018; WAN024FGV_at; Start 90; Stop 114
tttacttttggcattactcacgcca

SEQ ID NO: 205849 - DNA, 25 bp, Artificial
  probe
  misc_feature (1)..(25): SEQ ID NO: 2018; WAN024FGV_at; Start 139; Stop 163
tgctcggccacaagcaccttgacag

SEQ ID NO: 205850 - DNA, 25 bp, Artificial
  probe
  misc_feature (1)..(25): SEQ ID NO: 2018; WAN024FGV_at; Start 151; Stop 175
agcaccttgacagagcttgttccaa

SEQ ID NO: 205851 - DNA, 25 bp, Artificial
  probe
  misc_feature (1)..(25): SEQ ID NO: 2493; WAN024FGW_at; Start 802; Stop 826
agcaaagaaaccttccaagtagagg

SEQ ID NO: 205852 - DNA, 25 bp, Artificial
  probe
  misc_feature (1)..(25): SEQ ID NO: 2493; WAN024FGW_at; Start 960; Stop 984
tattgtcttaatcggtgggaatgcc

SEQ ID NO: 205853 - DNA, 25 bp, Artificial
  probe
  misc_feature (1)..(25): SEQ ID NO: 2493; WAN024FGW_at; Start 841; Stop 865
gaagcagtcgaagtgacggaagcct

SEQ ID NO: 205854 - DNA, 25 bp, Artificial
  probe
  misc_feature (1)..(25): SEQ ID NO: 2493; WAN024FGW_at; Start 185; Stop 209
cccaagcggaagaaaaggcaggcat

SEQ ID NO: 205855 - DNA, 25 bp, Artificial
  probe
  misc_feature (1)..(25): SEQ ID NO: 2493; WAN024FGW_at; Start 344; Stop 368
tgacaaagagtatgacacctgaccg

SEQ ID NO: 205856 - DNA, 25 bp, Artificial
  probe
  misc_feature (1)..(25): SEQ ID NO: 2493; WAN024FGW_at; Start 651; Stop 675
tacaatccgtaatcaagaactccag

SEQ ID NO: 205857 - DNA, 25 bp, Artificial
  probe
  misc_feature (1)..(25): SEQ ID NO: 2493; WAN024FGW_at; Start 595; Stop 619
gaacgtgaatttggtgctacagtga

SEQ ID NO: 205858 - DNA, 25 bp, Artificial
  probe
  misc_feature (1)..(25): SEQ ID NO: 2493; WAN024FGW_at; Start 1248; Stop 1272
tcctgctccagaagtagagccggtg

SEQ ID NO: 205859 - DNA, 25 bp, Artificial
  probe
  misc_feature (1)..(25): SEQ ID NO: 2493; WAN024FGW_at; Start 990; Stop 1014
accaggtatggttgagcttgctcag

SEQ ID NO: 205860 - DNA, 25 bp, Artificial
  probe
  misc_feature (1)..(25): SEQ ID NO: 2493; WAN024FGW_at; Start 1322; Stop 1346
cgaaattagcagatcgtttccgtgg

SEQ ID NO: 205861 - DNA, 25 bp, Artificial
  probe
  misc_feature (1)..(25): SEQ ID NO: 2493; WAN024FGW_at; Start 412; Stop 436
ttccaagggattcgtgacccacgtg

SEQ ID NO: 205862 - DNA, 25 bp, Artificial
  probe
  misc_feature (1)..(25): SEQ ID NO: 2493; WAN024FGW_at; Start 21; Stop 45
tacaggtctagatattggaacaagc

SEQ ID NO: 205863 - DNA, 25 bp, Artificial
  probe
  misc_feature (1)..(25): SEQ ID NO: 2493; WAN024FGW_at; Start 499; Stop 523
cacaatttgcgtaagacggttgagc

SEQ ID NO: 205864 - DNA, 25 bp, Artificial
  probe
  misc_feature (1)..(25): SEQ ID NO: 2493; WAN024FGW_at; Start 883; Stop 907
tctgcacgaatcaagcacatccttg

SEQ ID NO: 205865 - DNA, 25 bp, Artificial
  probe
  misc_feature (1)..(25): SEQ ID NO: 2493; WAN024FGW_at; Start 855; Stop 879
gacggaagcctacttgtcagaaatt

SEQ ID NO: 205866 - DNA, 25 bp, Artificial
  probe
  misc_feature (1)..(25): SEQ ID NO: 2493; WAN024FGW_at; Start 1124; Stop 1148
aagttaatcttttggctcagggagc

SEQ ID NO: 205867 - DNA, 25 bp, Artificial
  probe
  misc_feature (1)..(25): SEQ ID NO: 2493; WAN024FGW_at; Start 248; Stop 272
ttttgcaggtagaaccaactcaggg

SEQ ID NO: 205868 - DNA, 25 bp, Artificial
  probe
  misc_feature (1)..(25): SEQ ID NO: 2493; WAN024FGW_at; Start 47; Stop 71
ctgtcaaggtgcttgtggccgagca

SEQ ID NO: 205869 - DNA, 25 bp, Artificial
  probe
  misc_feature (1)..(25): SEQ ID NO: 2493; WAN024FGW_at; Start 1059; Stop 1083
tggtatccgtaatccagcctttgcg

SEQ ID NO: 205870 - DNA, 25 bp, Artificial
  probe
  misc_feature (1)..(25): SEQ ID NO: 2493; WAN024FGW_at; Start 784; Stop 808
gcctatccgcctcttgcaagcaaag

SEQ ID NO: 205871 - DNA, 25 bp, Artificial
  probe
  misc_feature (1)..(25): SEQ ID NO: 2493; WAN024FGW_at; Start 932; Stop 956
gaaggcgtctattggacctccctgg

SEQ ID NO: 205872 - DNA, 25 bp, Artificial
  probe
  misc_feature (1)..(25): SEQ ID NO: 2493; WAN024FGW_at; Start 629; Stop 653
gggcaggtcaaacgactgtcgctac

SEQ ID NO: 205873 - DNA, 25 bp, Artificial
  probe
  misc_feature (1)..(25): SEQ ID NO: 2493; WAN024FGW_at; Start 1290; Stop 1314
ggcggatttccaacaagcttcacaa

SEQ ID NO: 205874 - DNA, 25 bp, Artificial
  probe
  misc_feature (1)..(25): SEQ ID NO: 2493; WAN024FGW_at; Start 677; Stop 701
tcacacatattctccaagaaggtgg

SEQ ID NO: 205875 - DNA, 25 bp, Artificial
  probe
  misc_feature (1)..(25): SEQ ID NO: 2493; WAN024FGW_at; Start 1181; Stop 1205
caattagttttggtgggatgctgca

SEQ ID NO: 205876 - DNA, 25 bp, Artificial
  probe
  misc_feature (1)..(25): SEQ ID NO: 2493; WAN024FGW_at; Start 1015; Stop 1039
gaagtctttggcgtccgtgtcaagc

SEQ ID NO: 205877 - DNA, 25 bp, Artificial
  probe
  misc_feature (1)..(25): SEQ ID NO: 2493; WAN024FGW_at; Start 63; Stop 87
ggccgagcagagaaatggtgaatta

SEQ ID NO: 205878 - DNA, 25 bp, Artificial
  probe
  misc_feature (1)..(25): SEQ ID NO: 2493; WAN024FGW_at; Start 479; Stop 503
caggacctcgtactatcttgcacaa

SEQ ID NO: 205879 - DNA, 25 bp, Artificial
  probe
  misc_feature (1)..(25): SEQ ID NO: 2493; WAN024FGW_at; Start 733; Stop 757
ttgaaaacctctcgcaaattagcgg

SEQ ID NO: 205880 - DNA, 25 bp, Artificial
  probe
  misc_feature (1)..(25): SEQ ID NO: 2493; WAN024FGW_at; Start 1268; Stop 1292
cggtggcgcctacagaaccaatggc

SEQ ID NO: 205881 - DNA, 25 bp, Artificial
  probe
  misc_feature (1)..(25): SEQ ID NO: 2493; WAN024FGW_at; Start 170; Stop 194
tcaagtcagccatttcccaagcgga

SEQ ID NO: 205882 - DNA, 25 bp, Artificial
  probe
  misc_feature (1)..(25): SEQ ID NO: 2493; WAN024FGW_at; Start 1213; Stop 1237
gctcagtttgtacaatcaacgcctg

SEQ ID NO: 205883 - DNA, 25 bp, Artificial
  probe
  misc_feature (1)..(25): SEQ ID NO: 2493; WAN024FGW_at; Start 1195; Stop 1219
gggatgctgcaaaaaacagctcagt

SEQ ID NO: 205884 - DNA, 25 bp, Artificial
  probe
  misc_feature (1)..(25): SEQ ID NO: 2493; WAN024FGW_at; Start 975; Stop 999
tgggaatgccattttaccaggtatg

SEQ ID NO: 205885 - DNA, 25 bp, Artificial
  probe
  misc_feature (1)..(25): SEQ ID NO: 5245; WAN024FGX_at; Start 111; Stop 135
aggagcagctccagttccagagcct

SEQ ID NO: 205886 - DNA, 25 bp, Artificial
  probe
  misc_feature (1)..(25): SEQ ID NO: 5245; WAN024FGX_at; Start 6; Stop 30
tccttctacagcaaattgtccacgc

SEQ ID NO: 205887 - DNA, 25 bp, Artificial
  probe
  misc_feature (1)..(25): SEQ ID NO: 5245; WAN024FGX_at; Start 140; Stop 164
ccataccagcagtgatgaagaccat

SEQ ID NO: 205888 - DNA, 25 bp, Artificial
  probe
  misc_feature (1)..(25): SEQ ID NO: 5245; WAN024FGX_at; Start 210; Stop 234
agcggctttacgaccaacctcaggt

SEQ ID NO: 205889 - DNA, 25 bp, Artificial
  probe
  misc_feature (1)..(25): SEQ ID NO: 5245; WAN024FGX_at; Start 16; Stop 40
gcaaattgtccacgcttacttcctt

SEQ ID NO: 205890 - DNA, 25 bp, Artificial
  probe
  misc_feature (1)..(25): SEQ ID NO: 5245; WAN024FGX_at; Start 143; Stop 167
taccagcagtgatgaagaccatatc

SEQ ID NO: 205891 - DNA, 25 bp, Artificial
  probe
  misc_feature (1)..(25): SEQ ID NO: 5245; WAN024FGX_at; Start 107; Stop 131
taacaggagcagctccagttccaga

SEQ ID NO: 205892 - DNA, 25 bp, Artificial
  probe
  misc_feature (1)..(25): SEQ ID NO: 5245; WAN024FGX_at; Start 22; Stop 46
tgtccacgcttacttccttcaaaac

SEQ ID NO: 205893 - DNA, 25 bp, Artificial
  probe
  misc_feature (1)..(25): SEQ ID NO: 5245; WAN024FGX_at; Start 72; Stop 96
tgtaagcgcacctaaatctttggcg

SEQ ID NO: 205894 - DNA, 25 bp, Artificial
  probe
  misc_feature (1)..(25): SEQ ID NO: 5245; WAN024FGX_at; Start 177; Stop 201
aatagcttccgtcagtgtttcttcg

SEQ ID NO: 205895 - DNA, 25 bp, Artificial
  probe
  misc_feature (1)..(25): SEQ ID NO: 5245; WAN024FGX_at; Start 162; Stop 186
catatcggcaccactaatagcttcc

SEQ ID NO: 205896 - DNA, 25 bp, Artificial
  probe
  misc_feature (1)..(25): SEQ ID NO: 5245; WAN024FGX_at; Start 101; Stop 125
gagcaataacaggagcagctccagt

SEQ ID NO: 205897 - DNA, 25 bp, Artificial
  probe
  misc_feature (1)..(25): SEQ ID NO: 5245; WAN024FGX_at; Start 168; Stop 192
ggcaccactaatagcttccgtcagt

SEQ ID NO: 205898 - DNA, 25 bp, Artificial
  probe
  misc_feature (1)..(25): SEQ ID NO: 5245; WAN024FGX_at; Start 205; Stop 229
tcttcagcggctttacgaccaacct

SEQ ID NO: 205899 - DNA, 25 bp, Artificial
  probe
  misc_feature (1)..(25): SEQ ID NO: 5245; WAN024FGX_at; Start 10; Stop 34
tctacagcaaattgtccacgcttac

SEQ ID NO: 205900 - DNA, 25 bp, Artificial
  probe
  misc_feature (1)..(25): SEQ ID NO: 5245; WAN024FGX_at; Start 159; Stop 183
gaccatatcggcaccactaatagct

SEQ ID NO: 205901 - DNA, 25 bp, Artificial
  probe
  misc_feature (1)..(25): SEQ ID NO: 5245; WAN024FGX_at; Start 135; Stop 159
tcctcccataccagcagtgatgaag

SEQ ID NO: 205902 - DNA, 25 bp, Artificial
  probe
  misc_feature (1)..(25): SEQ ID NO: 5245; WAN024FGX_at; Start 55; Stop 79
cgtgttacaacaccaactgtaagcg

SEQ ID NO: 205903 - DNA, 25 bp, Artificial
  probe
  misc_feature (1)..(25): SEQ ID NO: 5245; WAN024FGX_at; Start 98; Stop 122
tacgagcaataacaggagcagctcc

SEQ ID NO: 205904 - DNA, 25 bp, Artificial
  probe
  misc_feature (1)..(25): SEQ ID NO: 5245; WAN024FGX_at; Start 79; Stop 103
gcacctaaatctttggcgatacgag

SEQ ID NO: 205905 - DNA, 25 bp, Artificial
  probe
  misc_feature (1)..(25): SEQ ID NO: 5245; WAN024FGX_at; Start 213; Stop 237
ggctttacgaccaacctcaggttga

SEQ ID NO: 205906 - DNA, 25 bp, Artificial
  probe
  misc_feature (1)..(25): SEQ ID NO: 5245; WAN024FGX_at; Start 184; Stop 208
tccgtcagtgtttcttcgctttctt

SEQ ID NO: 205907 - DNA, 25 bp, Artificial
  probe
  misc_feature (1)..(25): SEQ ID NO: 5245; WAN024FGX_at; Start 92; Stop 116
tggcgatacgagcaataacaggagc

SEQ ID NO: 205908 - DNA, 25 bp, Artificial
  probe
  misc_feature (1)..(25): SEQ ID NO: 5245; WAN024FGX_at; Start 149; Stop 173
cagtgatgaagaccatatcggcacc

SEQ ID NO: 205909 - DNA, 25 bp, Artificial
  probe
  misc_feature (1)..(25): SEQ ID NO: 5245; WAN024FGX_at; Start 88; Stop 112
tctttggcgatacgagcaataacag

SEQ ID NO: 205910 - DNA, 25 bp, Artificial
  probe
  misc_feature (1)..(25): SEQ ID NO: 5245; WAN024FGX_at; Start 49; Stop 73
aagggacgtgttacaacaccaactg

SEQ ID NO: 205911 - DNA, 25 bp, Artificial
  probe
  misc_feature (1)..(25): SEQ ID NO: 5245; WAN024FGX_at; Start 155; Stop 179
tgaagaccatatcggcaccactaat

SEQ ID NO: 205912 - DNA, 25 bp, Artificial
  probe
  misc_feature (1)..(25): SEQ ID NO: 5245; WAN024FGX_at; Start 152; Stop 176
tgatgaagaccatatcggcaccact

SEQ ID NO: 205913 - DNA, 25 bp, Artificial
  probe
  misc_feature (1)..(25): SEQ ID NO: 5245; WAN024FGX_at; Start 81; Stop 105
acctaaatctttggcgatacgagca

SEQ ID NO: 205914 - DNA, 25 bp, Artificial
  probe
  misc_feature (1)..(25): SEQ ID NO: 5245; WAN024FGX_at; Start 2; Stop 26
tgattccttctacagcaaattgtcc

SEQ ID NO: 205915 - DNA, 25 bp, Artificial
  probe
  misc_feature (1)..(25): SEQ ID NO: 5245; WAN024FGX_at; Start 198; Stop 222
ttcgctttcttcagcggctttacga

SEQ ID NO: 205916 - DNA, 25 bp, Artificial
  probe
  misc_feature (1)..(25): SEQ ID NO: 5245; WAN024FGX_at; Start 64; Stop 88
acaccaactgtaagcgcacctaaat

SEQ ID NO: 205917 - DNA, 25 bp, Artificial
  probe
  misc_feature (1)..(25): SEQ ID NO: 5245; WAN024FGX_at; Start 95; Stop 119
cgatacgagcaataacaggagcagc

SEQ ID NO: 205918 - DNA, 25 bp, Artificial
  probe
  misc_feature (1)..(25): SEQ ID NO: 5245; WAN024FGX_at; Start 60; Stop 84
tacaacaccaactgtaagcgcacct

SEQ ID NO: 205919 - DNA, 25 bp, Artificial
  probe
  misc_feature (1)..(25): SEQ ID NO: 2295; WAN024FGY_at; Start 190; Stop 214
caaaatgacgatcaaagccatgtga

SEQ ID NO: 205920 - DNA, 25 bp, Artificial
  probe
  misc_feature (1)..(25): SEQ ID NO: 2295; WAN024FGY_at; Start 159; Stop 183
tgttttggcaattcaactgtttctg

SEQ ID NO: 205921 - DNA, 25 bp, Artificial
  probe
  misc_feature (1)..(25): SEQ ID NO: 2295; WAN024FGY_at; Start 54; Stop 78
tcgactggagaaacgactgaatctg

SEQ ID NO: 205922 - DNA, 25 bp, Artificial
  probe
  misc_feature (1)..(25): SEQ ID NO: 2295; WAN024FGY_at; Start 111; Stop 135
caatcaccaaaagcagatgcctgag

SEQ ID NO: 205923 - DNA, 25 bp, Artificial
  probe
  misc_feature (1)..(25): SEQ ID NO: 2295; WAN024FGY_at; Start 87; Stop 111
acaatcgattcacggcgaagatccc

SEQ ID NO: 205924 - DNA, 25 bp, Artificial
  probe
  misc_feature (1)..(25): SEQ ID NO: 2295; WAN024FGY_at; Start 82; Stop 106
tacgaacaatcgattcacggcgaag

SEQ ID NO: 205925 - DNA, 25 bp, Artificial
  probe
  misc_feature (1)..(25): SEQ ID NO: 2295; WAN024FGY_at; Start 91; Stop 115
tcgattcacggcgaagatcccaatc

SEQ ID NO: 205926 - DNA, 25 bp, Artificial
  probe
  misc_feature (1)..(25): SEQ ID NO: 2295; WAN024FGY_at; Start 65; Stop 89
aacgactgaatctgttgtacgaaca

SEQ ID NO: 205927 - DNA, 25 bp, Artificial
  probe
  misc_feature (1)..(25): SEQ ID NO: 2295; WAN024FGY_at; Start 218; Stop 242
agctggtttcactgtctcacggtag

SEQ ID NO: 205928 - DNA, 25 bp, Artificial
  probe
  misc_feature (1)..(25): SEQ ID NO: 2295; WAN024FGY_at; Start 114; Stop 138
tcaccaaaagcagatgcctgagttg

SEQ ID NO: 205929 - DNA, 25 bp, Artificial
  probe
  misc_feature (1)..(25): SEQ ID NO: 2295; WAN024FGY_at; Start 168; Stop 192
aattcaactgtttctgccatatcaa

SEQ ID NO: 205930 - DNA, 25 bp, Artificial
  probe
  misc_feature (1)..(25): SEQ ID NO: 2295; WAN024FGY_at; Start 3; Stop 27
ggaggtgtatccaattcatcttcat

SEQ ID NO: 205931 - DNA, 25 bp, Artificial
  probe
  misc_feature (1)..(25): SEQ ID NO: 2295; WAN024FGY_at; Start 176; Stop 200
tgtttctgccatatcaaaatgacga

SEQ ID NO: 205932 - DNA, 25 bp, Artificial
  probe
  misc_feature (1)..(25): SEQ ID NO: 2295; WAN024FGY_at; Start 79; Stop 103
ttgtacgaacaatcgattcacggcg

SEQ ID NO: 205933 - DNA, 25 bp, Artificial
  probe
  misc_feature (1)..(25): SEQ ID NO: 2295; WAN024FGY_at; Start 214; Stop 238
aatgagctggtttcactgtctcacg

SEQ ID NO: 205934 - DNA, 25 bp, Artificial
  probe
  misc_feature (1)..(25): SEQ ID NO: 2295; WAN024FGY_at; Start 222; Stop 246
ggtttcactgtctcacggtagttag

SEQ ID NO: 205935 - DNA, 25 bp, Artificial
  probe
  misc_feature (1)..(25): SEQ ID NO: 2295; WAN024FGY_at; Start 146; Stop 170
acgacgtggattttgttttggcaat

SEQ ID NO: 205936 - DNA, 25 bp, Artificial
  probe
  misc_feature (1)..(25): SEQ ID NO: 2295; WAN024FGY_at; Start 17; Stop 41
ttcatcttcatcttgtgaaattggg

SEQ ID NO: 205937 - DNA, 25 bp, Artificial
  probe
  misc_feature (1)..(25): SEQ ID NO: 2295; WAN024FGY_at; Start 196; Stop 220
gacgatcaaagccatgtgaatgagc

SEQ ID NO: 205938 - DNA, 25 bp, Artificial
  probe
  misc_feature (1)..(25): SEQ ID NO: 2295; WAN024FGY_at; Start 106; Stop 130
gatcccaatcaccaaaagcagatgc

SEQ ID NO: 205939 - DNA, 25 bp, Artificial
  probe
  misc_feature (1)..(25): SEQ ID NO: 2295; WAN024FGY_at; Start 9; Stop 33
gtatccaattcatcttcatcttgtg

SEQ ID NO: 205940 - DNA, 25 bp, Artificial
  probe
  misc_feature (1)..(25): SEQ ID NO: 2295; WAN024FGY_at; Start 45; Stop 69
tcaaagcgctcgactggagaaacga

SEQ ID NO: 205941 - DNA, 25 bp, Artificial
  probe
  misc_feature (1)..(25): SEQ ID NO: 2295; WAN024FGY_at; Start 61; Stop 85
gagaaacgactgaatctgttgtacg

SEQ ID NO: 205942 - DNA, 25 bp, Artificial
  probe
  misc_feature (1)..(25): SEQ ID NO: 2295; WAN024FGY_at; Start 123; Stop 147
gcagatgcctgagttggttccaaac

SEQ ID NO: 205943 - DNA, 25 bp, Artificial
  probe
  misc_feature (1)..(25): SEQ ID NO: 2295; WAN024FGY_at; Start 128; Stop 152
tgcctgagttggttccaaacgacgt

SEQ ID NO: 205944 - DNA, 25 bp, Artificial
  probe
  misc_feature (1)..(25): SEQ ID NO: 2295; WAN024FGY_at; Start 187; Stop 211
tatcaaaatgacgatcaaagccatg

SEQ ID NO: 205945 - DNA, 25 bp, Artificial
  probe
  misc_feature (1)..(25): SEQ ID NO: 2295; WAN024FGY_at; Start 204; Stop 228
aagccatgtgaatgagctggtttca

SEQ ID NO: 205946 - DNA, 25 bp, Artificial
  probe
  misc_feature (1)..(25): SEQ ID NO: 2295; WAN024FGY_at; Start 103; Stop 127
gaagatcccaatcaccaaaagcaga

SEQ ID NO: 205947 - DNA, 25 bp, Artificial
  probe
  misc_feature (1)..(25): SEQ ID NO: 2295; WAN024FGY_at; Start 95; Stop 119
ttcacggcgaagatcccaatcacca

SEQ ID NO: 205948 - DNA, 25 bp, Artificial
  probe
  misc_feature (1)..(25): SEQ ID NO: 2295; WAN024FGY_at; Start 132; Stop 156
tgagttggttccaaacgacgtggat

SEQ ID NO: 205949 - DNA, 25 bp, Artificial
  probe
  misc_feature (1)..(25): SEQ ID NO: 2295; WAN024FGY_at; Start 199; Stop 223
gatcaaagccatgtgaatgagctgg

SEQ ID NO: 205950 - DNA, 25 bp, Artificial
  probe
  misc_feature (1)..(25): SEQ ID NO: 2295; WAN024FGY_at; Start 119; Stop 143
aaaagcagatgcctgagttggttcc

SEQ ID NO: 205951 - DNA, 25 bp, Artificial
  probe
  misc_feature (1)..(25): SEQ ID NO: 2295; WAN024FGY_at; Start 50; Stop 74
gcgctcgactggagaaacgactgaa

SEQ ID NO: 205952 - DNA, 25 bp, Artificial
  probe
  misc_feature (1)..(25): SEQ ID NO: 2295; WAN024FGY_at; Start 41; Stop 65
ggcttcaaagcgctcgactggagaa

SEQ ID NO: 205953 - DNA, 25 bp, Artificial
  probe
  misc_feature (1)..(25): SEQ ID NO: 1390; WAN024FGZ_at; Start 869; Stop 893
gagtgaacatctggctcggtacttc

SEQ ID NO: 205954 - DNA, 25 bp, Artificial
  probe
  misc_feature (1)..(25): SEQ ID NO: 1390; WAN024FGZ_at; Start 1167; Stop 1191
agattcagtcgtttctccagtcgag

SEQ ID NO: 205955 - DNA, 25 bp, Artificial
  probe
  misc_feature (1)..(25): SEQ ID NO: 1390; WAN024FGZ_at; Start 384; Stop 408
tacagttggtgttgtaacacgtccc

SEQ ID NO: 205956 - DNA, 25 bp, Artificial
  probe
  misc_feature (1)..(25): SEQ ID NO: 1390; WAN024FGZ_at; Start 938; Stop 962
caacgggtgttcgtcaagaccgcgt

SEQ ID NO: 205957 - DNA, 25 bp, Artificial
  probe
  misc_feature (1)..(25): SEQ ID NO: 1390; WAN024FGZ_at; Start 149; Stop 173
cattgagtagtacaaaagctgagac

SEQ ID NO: 205958 - DNA, 25 bp, Artificial
  probe
  misc_feature (1)..(25): SEQ ID NO: 1390; WAN024FGZ_at; Start 118; Stop 142
gaatttatcgcagcaaacacagatg

SEQ ID NO: 205959 - DNA, 25 bp, Artificial
  probe
  misc_feature (1)..(25): SEQ ID NO: 1390; WAN024FGZ_at; Start 7; Stop 31
ttttcatttgatacagctgctgctc

SEQ ID NO: 205960 - DNA, 25 bp, Artificial
  probe
  misc_feature (1)..(25): SEQ ID NO: 1390; WAN024FGZ_at; Start 456; Stop 480
caatcaacttcgtgagcatgtagac

SEQ ID NO: 205961 - DNA, 25 bp, Artificial
  probe
  misc_feature (1)..(25): SEQ ID NO: 1390; WAN024FGZ_at; Start 621; Stop 645
gattaaccttgactttgccgatgtg

SEQ ID NO: 205962 - DNA, 25 bp, Artificial
  probe
  misc_feature (1)..(25): SEQ ID NO: 1390; WAN024FGZ_at; Start 999; Stop 1023
taactaccgtgagacagtgaaacca

SEQ ID NO: 205963 - DNA, 25 bp, Artificial
  probe
  misc_feature (1)..(25): SEQ ID NO: 1390; WAN024FGZ_at; Start 257; Stop 281
gcgaagaaacactgacggaagctat

SEQ ID NO: 205964 - DNA, 25 bp, Artificial
  probe
  misc_feature (1)..(25): SEQ ID NO: 1390; WAN024FGZ_at; Start 292; Stop 316
gatatggtcttcatcactgctggta

SEQ ID NO: 205965 - DNA, 25 bp, Artificial
  probe
  misc_feature (1)..(25): SEQ ID NO: 1390; WAN024FGZ_at; Start 838; Stop 862
tcacaaattgtgaaccaggcagcag

SEQ ID NO: 205966 - DNA, 25 bp, Artificial
  probe
  misc_feature (1)..(25): SEQ ID NO: 1390; WAN024FGZ_at; Start 1129; Stop 1153
gattgggatcttcgccgtgaatcga

SEQ ID NO: 205967 - DNA, 25 bp, Artificial
  probe
  misc_feature (1)..(25): SEQ ID NO: 1390; WAN024FGZ_at; Start 567; Stop 591
cgttcttcgtcaaggtgttcaaggg

SEQ ID NO: 205968 - DNA, 25 bp, Artificial
  probe
  misc_feature (1)..(25): SEQ ID NO: 1390; WAN024FGZ_at; Start 789; Stop 813
caacgttactggtggtcttgactta

SEQ ID NO: 205969 - DNA, 25 bp, Artificial
  probe
  misc_feature (1)..(25): SEQ ID NO: 1390; WAN024FGZ_at; Start 812; Stop 836
taaccttgattgaggcagaagaggc

SEQ ID NO: 205970 - DNA, 25 bp, Artificial
  probe
  misc_feature (1)..(25): SEQ ID NO: 1390; WAN024FGZ_at; Start 71; Stop 95
gtggcaatgccatcaaccgtatggt

SEQ ID NO: 205971 - DNA, 25 bp, Artificial
  probe
  misc_feature (1)..(25): SEQ ID NO: 1390; WAN024FGZ_at; Start 957; Stop 981
ccgcgtagaaaaggttgtggctcca

SEQ ID NO: 205972 - DNA, 25 bp, Artificial
  probe
  misc_feature (1)..(25): SEQ ID NO: 1390; WAN024FGZ_at; Start 1198; Stop 1222
gaagccccaatttcacaagatgaag

SEQ ID NO: 205973 - DNA, 25 bp, Artificial
  probe
  misc_feature (1)..(25): SEQ ID NO: 1390; WAN024FGZ_at; Start 413; Stop 437
gttttgaaggaagtaagcgtggaca

SEQ ID NO: 205974 - DNA, 25 bp, Artificial
  probe
  misc_feature (1)..(25): SEQ ID NO: 1390; WAN024FGZ_at; Start 530; Stop 554
aaacaccgcttttggaggctcttag

SEQ ID NO: 205975 - DNA, 25 bp, Artificial
  probe
  misc_feature (1)..(25): SEQ ID NO: 1390; WAN024FGZ_at; Start 714; Stop 738
ggtagaagcggcacgtaaggcaatc

SEQ ID NO: 205976 - DNA, 25 bp, Artificial
  probe
  misc_feature (1)..(25): SEQ ID NO: 1390; WAN024FGZ_at; Start 852; Stop 876
ccaggcagcaggtcaaggagtgaac

SEQ ID NO: 205977 - DNA, 25 bp, Artificial
  probe
  misc_feature (1)..(25): SEQ ID NO: 1390; WAN024FGZ_at; Start 1183; Stop 1207
ccagtcgagcgctttgaagccccaa

SEQ ID NO: 205978 - DNA, 25 bp, Artificial
  probe
  misc_feature (1)..(25): SEQ ID NO: 1390; WAN024FGZ_at; Start 754; Stop 778
gaaacaactattgacggtgctgagg

SEQ ID NO: 205979 - DNA, 25 bp, Artificial
  probe
  misc_feature (1)..(25): SEQ ID NO: 1390; WAN024FGZ_at; Start 90; Stop 114
tatggtcgacgaaggtgttacaggc

SEQ ID NO: 205980 - DNA, 25 bp, Artificial
  probe
  misc_feature (1)..(25): SEQ ID NO: 1390; WAN024FGZ_at; Start 181; Stop 205
cagttgggacctaaattgactcgtg

SEQ ID NO: 205981 - DNA, 25 bp, Artificial
  probe
  misc_feature (1)..(25): SEQ ID NO: 1390; WAN024FGZ_at; Start 586; Stop 610
caagggattaccgatttgattacca

SEQ ID NO: 205982 - DNA, 25 bp, Artificial
  probe
  misc_feature (1)..(25): SEQ ID NO: 1390; WAN024FGZ_at; Start 364; Stop 388
gccaaagatttaggtgcgcttacag

SEQ ID NO: 205983 - DNA, 25 bp, Artificial
  probe
  misc_feature (1)..(25): SEQ ID NO: 1390; WAN024FGZ_at; Start 223; Stop 247
caacctgaggttggtcgtaaagccg

SEQ ID NO: 205984 - DNA, 25 bp, Artificial
  probe
  misc_feature (1)..(25): SEQ ID NO: 1390; WAN024FGZ_at; Start 238; Stop 262
cgtaaagccgctgaagaaagcgaag

SEQ ID NO: 205985 - DNA, 25 bp, Artificial
  probe
  misc_feature (1)..(25): SEQ ID NO: 1390; WAN024FGZ_at; Start 653; Stop 677
taatggcaaacaaagggaatgctct

SEQ ID NO: 205986 - DNA, 25 bp, Artificial
  probe
  misc_feature (1)..(25): SEQ ID NO: 1390; WAN024FGZ_at; Start 1097; Stop 1121
gtttggaaccaactcaggcatctgc

SEQ ID NO: 205987 - DNA, 25 bp, Artificial
  probe
  misc_feature (1)..(25): SEQ ID NO: 1173; WAN024FH2_at; Start 457; Stop 481
cgtatacctgtttcgctggaggaac

SEQ ID NO: 205988 - DNA, 25 bp, Artificial
  probe
  misc_feature (1)..(25): SEQ ID NO: 1173; WAN024FH2_at; Start 640; Stop 664
catgtggtagacaaatcagattaca

SEQ ID NO: 205989 - DNA, 25 bp, Artificial
  probe
  misc_feature (1)..(25): SEQ ID NO: 1173; WAN024FH2_at; Start 517; Stop 541
tatcgagaactggatttatctgtgt

SEQ ID NO: 205990 - DNA, 25 bp, Artificial
  probe
  misc_feature (1)..(25): SEQ ID NO: 1173; WAN024FH2_at; Start 584; Stop 608
tatctaggaatcaagcaaaccagtt

SEQ ID NO: 205991 - DNA, 25 bp, Artificial
  probe
  misc_feature (1)..(25): SEQ ID NO: 1173; WAN024FH2_at; Start 336; Stop 360
caatcaattagggattgaacggaaa

SEQ ID NO: 205992 - DNA, 25 bp, Artificial
  probe
  misc_feature (1)..(25): SEQ ID NO: 1173; WAN024FH2_at; Start 223; Stop 247
tacccagattatttccaaccagagt

SEQ ID NO: 205993 - DNA, 25 bp, Artificial
  probe
  misc_feature (1)..(25): SEQ ID NO: 1173; WAN024FH2_at; Start 502; Stop 526
gataagctagaacagtatcgagaac

SEQ ID NO: 205994 - DNA, 25 bp, Artificial
  probe
  misc_feature (1)..(25): SEQ ID NO: 1173; WAN024FH2_at; Start 54; Stop 78
caagggaatggaatggataaagaag

SEQ ID NO: 205995 - DNA, 25 bp, Artificial
  probe
  misc_feature (1)..(25): SEQ ID NO: 1173; WAN024FH2_at; Start 205; Stop 229
tatgttcgagttttattatacccag

SEQ ID NO: 205996 - DNA, 25 bp, Artificial
  probe
  misc_feature (1)..(25): SEQ ID NO: 1173; WAN024FH2_at; Start 323; Stop 347
tagggacagtcatcaatcaattagg

SEQ ID NO: 205997 - DNA, 25 bp, Artificial
  probe
  misc_feature (1)..(25): SEQ ID NO: 1173; WAN024FH2_at; Start 305; Stop 329
taacgcatgctaagattttagggac

SEQ ID NO: 205998 - DNA, 25 bp, Artificial
  probe
  misc_feature (1)..(25): SEQ ID NO: 1173; WAN024FH2_at; Start 6; Stop 30
taaagggatttatcagcatttctcc

SEQ ID NO: 205999 - DNA, 25 bp, Artificial
  probe
  misc_feature (1)..(25): SEQ ID NO: 1173; WAN024FH2_at; Start 710; Stop 734
tgagattacttcaagataagggaca

SEQ ID NO: 206000 - DNA, 25 bp, Artificial
  probe
  misc_feature (1)..(25): SEQ ID NO: 1173; WAN024FH2_at; Start 604; Stop 628
cagttgattgaaaagaaacttgtcc

SEQ ID NO: 206001 - DNA, 25 bp, Artificial
  probe
  misc_feature (1)..(25): SEQ ID NO: 1173; WAN024FH2_at; Start 423; Stop 447
tcttctctttcaagatggactaaag

SEQ ID NO: 206002 - DNA, 25 bp, Artificial
  probe
  misc_feature (1)..(25): SEQ ID NO: 1173; WAN024FH2_at; Start 39; Stop 63
tcgtccatttcttgacaagggaatg

SEQ ID NO: 206003 - DNA, 25 bp, Artificial
  probe
  misc_feature (1)..(25): SEQ ID NO: 1173; WAN024FH2_at; Start 388; Stop 412
gaacgggcgcagattatgattaatc

SEQ ID NO: 206004 - DNA, 25 bp, Artificial
  probe
  misc_feature (1)..(25): SEQ ID NO: 1173; WAN024FH2_at; Start 188; Stop 212
aattcgtctcgagtgagtatgttcg

SEQ ID NO: 206005 - DNA, 25 bp, Artificial
  probe
  misc_feature (1)..(25): SEQ ID NO: 1173; WAN024FH2_at; Start 658; Stop 682
gattacactgttcaagttggagact

SEQ ID NO: 206006 - DNA, 25 bp, Artificial
  probe
  misc_feature (1)..(25): SEQ ID NO: 1173; WAN024FH2_at; Start 21; Stop 45
gcatttctccatagaagatcgtcca

SEQ ID NO: 206007 - DNA, 25 bp, Artificial
  probe
  misc_feature (1)..(25): SEQ ID NO: 1173; WAN024FH2_at; Start 675; Stop 699
tggagacttgattagtgtgagaaaa

SEQ ID NO: 206008 - DNA, 25 bp, Artificial
  probe
  misc_feature (1)..(25): SEQ ID NO: 1173; WAN024FH2_at; Start 487; Stop 511
ttcaccgagaaaatagataagctag

SEQ ID NO: 206009 - DNA, 25 bp, Artificial
  probe
  misc_feature (1)..(25): SEQ ID NO: 1173; WAN024FH2_at; Start 628; Stop 652
caagtaaattatcatgtggtagaca

SEQ ID NO: 206010 - DNA, 25 bp, Artificial
  probe
  misc_feature (1)..(25): SEQ ID NO: 1173; WAN024FH2_at; Start 237; Stop 261
ccaaccagagttttcagattttgaa

SEQ ID NO: 206011 - DNA, 25 bp, Artificial
  probe
  misc_feature (1)..(25): SEQ ID NO: 1173; WAN024FH2_at; Start 355; Stop 379
cggaaactttttggagatatcctag

SEQ ID NO: 206012 - DNA, 25 bp, Artificial
  probe
  misc_feature (1)..(25): SEQ ID NO: 1173; WAN024FH2_at; Start 442; Stop 466
ctaaagaaaattggtcgtatacctg

SEQ ID NO: 206013 - DNA, 25 bp, Artificial
  probe
  misc_feature (1)..(25): SEQ ID NO: 1173; WAN024FH2_at; Start 155; Stop 179
aaacctatggtcttgcttgtagcag

SEQ ID NO: 206014 - DNA, 25 bp, Artificial
  probe
  misc_feature (1)..(25): SEQ ID NO: 1173; WAN024FH2_at; Start 374; Stop 398
tcctagtagatgaagaacgggcgca

SEQ ID NO: 206015 - DNA, 25 bp, Artificial
  probe
  misc_feature (1)..(25): SEQ ID NO: 1173; WAN024FH2_at; Start 74; Stop 98
agaaggtagaagatagctatgctcc

SEQ ID NO: 206016 - DNA, 25 bp, Artificial
  probe
  misc_feature (1)..(25): SEQ ID NO: 1173; WAN024FH2_at; Start 85; Stop 109
gatagctatgctccttttttaactc

SEQ ID NO: 206017 - DNA, 25 bp, Artificial
  probe
  misc_feature (1)..(25): SEQ ID NO: 1173; WAN024FH2_at; Start 122; Stop 146
ctcatcaggagaagctattaaagat

SEQ ID NO: 206018 - DNA, 25 bp, Artificial
  probe
  misc_feature (1)..(25): SEQ ID NO: 1173; WAN024FH2_at; Start 473; Stop 497
tggaggaacgtcctttcaccgagaa

SEQ ID NO: 206019 - DNA, 25 bp, Artificial
  probe
  misc_feature (1)..(25): SEQ ID NO: 1173; WAN024FH2_at; Start 146; Stop 170
ttttggccaaaacctatggtcttgc

SEQ ID NO: 206020 - DNA, 25 bp, Artificial
  probe
  misc_feature (1)..(25): SEQ ID NO: 1173; WAN024FH2_at; Start 109; Stop 133
ccttttatcaatcctcatcaggaga

SEQ ID NO: 206021 - DNA, 25 bp, Artificial
  probe
  misc_feature (1)..(25): SEQ ID NO: 4082; WAN024FH3_at; Start 6; Stop 30
tattgattcaatcgcatcgtctgtt

SEQ ID NO: 206022 - DNA, 25 bp, Artificial
  probe
  misc_feature (1)..(25): SEQ ID NO: 4082; WAN024FH3_at; Start 189; Stop 213
tgttcttttcatgctaaaatacctt

SEQ ID NO: 206023 - DNA, 25 bp, Artificial
  probe
  misc_feature (1)..(25): SEQ ID NO: 4082; WAN024FH3_at; Start 2; Stop 26
tgcgtattgattcaatcgcatcgtc

SEQ ID NO: 206024 - DNA, 25 bp, Artificial
  probe
  misc_feature (1)..(25): SEQ ID NO: 4082; WAN024FH3_at; Start 35; Stop 59
ccggtgtatcgaaagtgattgtttc

SEQ ID NO: 206025 - DNA, 25 bp, Artificial
  probe
  misc_feature (1)..(25): SEQ ID NO: 4082; WAN024FH3_at; Start 148; Stop 172
gaaagagataatagagctactccta

SEQ ID NO: 206026 - DNA, 25 bp, Artificial
  probe
  misc_feature (1)..(25): SEQ ID NO: 4082; WAN024FH3_at; Start 20; Stop 44
catcgtctgttacaaccggtgtatc

SEQ ID NO: 206027 - DNA, 25 bp, Artificial
  probe
  misc_feature (1)..(25): SEQ ID NO: 4082; WAN024FH3_at; Start 32; Stop 56
caaccggtgtatcgaaagtgattgt

SEQ ID NO: 206028 - DNA, 25 bp, Artificial
  probe
  misc_feature (1)..(25): SEQ ID NO: 4082; WAN024FH3_at; Start 30; Stop 54
tacaaccggtgtatcgaaagtgatt

SEQ ID NO: 206029 - DNA, 25 bp, Artificial
  probe
  misc_feature (1)..(25): SEQ ID NO: 4082; WAN024FH3_at; Start 66; Stop 90
actattggatgttgctactgtcttc

SEQ ID NO: 206030 - DNA, 25 bp, Artificial
  probe
  misc_feature (1)..(25): SEQ ID NO: 4082; WAN024FH3_at; Start 23; Stop 47
cgtctgttacaaccggtgtatcgaa

SEQ ID NO: 206031 - DNA, 25 bp, Artificial
  probe
  misc_feature (1)..(25): SEQ ID NO: 4082; WAN024FH3_at; Start 161; Stop 185
gagctactcctataccgataaactt

SEQ ID NO: 206032 - DNA, 25 bp, Artificial
  probe
  misc_feature (1)..(25): SEQ ID NO: 4082; WAN024FH3_at; Start 75; Stop 99
tgttgctactgtcttctcatcatta

SEQ ID NO: 206033 - DNA, 25 bp, Artificial
  probe
  misc_feature (1)..(25): SEQ ID NO: 4082; WAN024FH3_at; Start 18; Stop 42
cgcatcgtctgttacaaccggtgta

SEQ ID NO: 206034 - DNA, 25 bp, Artificial
  probe
  misc_feature (1)..(25): SEQ ID NO: 4082; WAN024FH3_at; Start 118; Stop 142
gaactttatgttccacatgcaacta

SEQ ID NO: 206035 - DNA, 25 bp, Artificial
  probe
  misc_feature (1)..(25): SEQ ID NO: 4082; WAN024FH3_at; Start 63; Stop 87
tgaactattggatgttgctactgtc

SEQ ID NO: 206036 - DNA, 25 bp, Artificial
  probe
  misc_feature (1)..(25): SEQ ID NO: 4082; WAN024FH3_at; Start 79; Stop 103
gctactgtcttctcatcattacttg

SEQ ID NO: 206037 - DNA, 25 bp, Artificial
  probe
  misc_feature (1)..(25): SEQ ID NO: 4082; WAN024FH3_at; Start 135; Stop 159
tgcaactagaagagaaagagataat

SEQ ID NO: 206038 - DNA, 25 bp, Artificial
  probe
  misc_feature (1)..(25): SEQ ID NO: 4082; WAN024FH3_at; Start 154; Stop 178
gataatagagctactcctataccga

SEQ ID NO: 206039 - DNA, 25 bp, Artificial
  probe
  misc_feature (1)..(25): SEQ ID NO: 4082; WAN024FH3_at; Start 98; Stop 122
tacttgttgaagtattctttgaact

SEQ ID NO: 206040 - DNA, 25 bp, Artificial
  probe
  misc_feature (1)..(25): SEQ ID NO: 4082; WAN024FH3_at; Start 84; Stop 108
tgtcttctcatcattacttgttgaa

SEQ ID NO: 206041 - DNA, 25 bp, Artificial
  probe
  misc_feature (1)..(25): SEQ ID NO: 4082; WAN024FH3_at; Start 156; Stop 180
taatagagctactcctataccgata

SEQ ID NO: 206042 - DNA, 25 bp, Artificial
  probe
  misc_feature (1)..(25): SEQ ID NO: 4082; WAN024FH3_at; Start 113; Stop 137
tctttgaactttatgttccacatgc

SEQ ID NO: 206043 - DNA, 25 bp, Artificial
  probe
  misc_feature (1)..(25): SEQ ID NO: 4082; WAN024FH3_at; Start 44; Stop 68
cgaaagtgattgtttcttttgaact

SEQ ID NO: 206044 - DNA, 25 bp, Artificial
  probe
  misc_feature (1)..(25): SEQ ID NO: 4082; WAN024FH3_at; Start 27; Stop 51
tgttacaaccggtgtatcgaaagtg

SEQ ID NO: 206045 - DNA, 25 bp, Artificial
  probe
  misc_feature (1)..(25): SEQ ID NO: 4082; WAN024FH3_at; Start 201; Stop 225
gctaaaataccttttattcttctga

SEQ ID NO: 206046 - DNA, 25 bp, Artificial
  probe
  misc_feature (1)..(25): SEQ ID NO: 4082; WAN024FH3_at; Start 68; Stop 92
tattggatgttgctactgtcttctc

SEQ ID NO: 206047 - DNA, 25 bp, Artificial
  probe
  misc_feature (1)..(25): SEQ ID NO: 4082; WAN024FH3_at; Start 16; Stop 40
atcgcatcgtctgttacaaccggtg

SEQ ID NO: 206048 - DNA, 25 bp, Artificial
  probe
  misc_feature (1)..(25): SEQ ID NO: 4082; WAN024FH3_at; Start 123; Stop 147
ttatgttccacatgcaactagaaga

SEQ ID NO: 206049 - DNA, 25 bp, Artificial
  probe
  misc_feature (1)..(25): SEQ ID NO: 4082; WAN024FH3_at; Start 159; Stop 183
tagagctactcctataccgataaac

SEQ ID NO: 206050 - DNA, 25 bp, Artificial
  probe
  misc_feature (1)..(25): SEQ ID NO: 4082; WAN024FH3_at; Start 143; Stop 167
gaagagaaagagataatagagctac

SEQ ID NO: 206051 - DNA, 25 bp, Artificial
  probe
  misc_feature (1)..(25): SEQ ID NO: 4082; WAN024FH3_at; Start 59; Stop 83
cttttgaactattggatgttgctac

SEQ ID NO: 206052 - DNA, 25 bp, Artificial
  probe
  misc_feature (1)..(25): SEQ ID NO: 4082; WAN024FH3_at; Start 10; Stop 34
gattcaatcgcatcgtctgttacaa

SEQ ID NO: 206053 - DNA, 25 bp, Artificial
  probe
  misc_feature (1)..(25): SEQ ID NO: 4082; WAN024FH3_at; Start 14; Stop 38
caatcgcatcgtctgttacaaccgg

SEQ ID NO: 206054 - DNA, 25 bp, Artificial
  probe
  misc_feature (1)..(25): SEQ ID NO: 4082; WAN024FH3_at; Start 72; Stop 96
ggatgttgctactgtcttctcatca

SEQ ID NO: 206055 - DNA, 25 bp, Artificial
  probe
  misc_feature (1)..(25): SEQ ID NO: 712; WAN024FH4_at; Start 50; Stop 74
tttctcttctagttgcatgtggaac

SEQ ID NO: 206056 - DNA, 25 bp, Artificial
  probe
  misc_feature (1)..(25): SEQ ID NO: 712; WAN024FH4_at; Start 27; Stop 51
tataggagtagctctattatctctt

SEQ ID NO: 206057 - DNA, 25 bp, Artificial
  probe
  misc_feature (1)..(25): SEQ ID NO: 712; WAN024FH4_at; Start 41; Stop 65
tattatctctttctcttctagttgc

SEQ ID NO: 206058 - DNA, 25 bp, Artificial
  probe
  misc_feature (1)..(25): SEQ ID NO: 712; WAN024FH4_at; Start 45; Stop 69
atctctttctcttctagttgcatgt

SEQ ID NO: 206059 - DNA, 25 bp, Artificial
  probe
  misc_feature (1)..(25): SEQ ID NO: 712; WAN024FH4_at; Start 35; Stop 59
tagctctattatctctttctcttct

SEQ ID NO: 206060 - DNA, 25 bp, Artificial
  probe
  misc_feature (1)..(25): SEQ ID NO: 712; WAN024FH4_at; Start 34; Stop 58
gtagctctattatctctttctcttc

SEQ ID NO: 206061 - DNA, 25 bp, Artificial
  probe
  misc_feature (1)..(25): SEQ ID NO: 712; WAN024FH4_at; Start 25; Stop 49
ggtataggagtagctctattatctc

SEQ ID NO: 206062 - DNA, 25 bp, Artificial
  probe
  misc_feature (1)..(25): SEQ ID NO: 712; WAN024FH4_at; Start 36; Stop 60
agctctattatctctttctcttcta

SEQ ID NO: 206063 - DNA, 25 bp, Artificial
  probe
  misc_feature (1)..(25): SEQ ID NO: 712; WAN024FH4_at; Start 31; Stop 55
ggagtagctctattatctctttctc

SEQ ID NO: 206064 - DNA, 25 bp, Artificial
  probe
  misc_feature (1)..(25): SEQ ID NO: 712; WAN024FH4_at; Start 16; Stop 40
aagtttatcggtataggagtagctc

SEQ ID NO: 206065 - DNA, 25 bp, Artificial
  probe
  misc_feature (1)..(25): SEQ ID NO: 712; WAN024FH4_at; Start 17; Stop 41
agtttatcggtataggagtagctct

SEQ ID NO: 206066 - DNA, 25 bp, Artificial
  probe
  misc_feature (1)..(25): SEQ ID NO: 712; WAN024FH4_at; Start 44; Stop 68
tatctctttctcttctagttgcatg

SEQ ID NO: 206067 - DNA, 25 bp, Artificial
  probe
  misc_feature (1)..(25): SEQ ID NO: 712; WAN024FH4_at; Start 43; Stop 67
ttatctctttctcttctagttgcat

SEQ ID NO: 206068 - DNA, 25 bp, Artificial
  probe
  misc_feature (1)..(25): SEQ ID NO: 712; WAN024FH4_at; Start 21; Stop 45
tatcggtataggagtagctctatta

SEQ ID NO: 206069 - DNA, 25 bp, Artificial
  probe
  misc_feature (1)..(25): SEQ ID NO: 712; WAN024FH4_at; Start 49; Stop 73
ctttctcttctagttgcatgtggaa

SEQ ID NO: 206070 - DNA, 25 bp, Artificial
  probe
  misc_feature (1)..(25): SEQ ID NO: 712; WAN024FH4_at; Start 51; Stop 75
ttctcttctagttgcatgtggaaca

SEQ ID NO: 206071 - DNA, 25 bp, Artificial
  probe
  misc_feature (1)..(25): SEQ ID NO: 712; WAN024FH4_at; Start 19; Stop 43
tttatcggtataggagtagctctat

SEQ ID NO: 206072 - DNA, 25 bp, Artificial
  probe
  misc_feature (1)..(25): SEQ ID NO: 712; WAN024FH4_at; Start 33; Stop 57
agtagctctattatctctttctctt

SEQ ID NO: 206073 - DNA, 25 bp, Artificial
  probe
  misc_feature (1)..(25): SEQ ID NO: 712; WAN024FH4_at; Start 47; Stop 71
ctctttctcttctagttgcatgtgg

SEQ ID NO: 206074 - DNA, 25 bp, Artificial
  probe
  misc_feature (1)..(25): SEQ ID NO: 712; WAN024FH4_at; Start 15; Stop 39
aaagtttatcggtataggagtagct

SEQ ID NO: 206075 - DNA, 25 bp, Artificial
  probe
  misc_feature (1)..(25): SEQ ID NO: 712; WAN024FH4_at; Start 24; Stop 48
cggtataggagtagctctattatct

SEQ ID NO: 206076 - DNA, 25 bp, Artificial
  probe
  misc_feature (1)..(25): SEQ ID NO: 712; WAN024FH4_at; Start 42; Stop 66
attatctctttctcttctagttgca

SEQ ID NO: 206077 - DNA, 25 bp, Artificial
  probe
  misc_feature (1)..(25): SEQ ID NO: 712; WAN024FH4_at; Start 48; Stop 72
tctttctcttctagttgcatgtgga

SEQ ID NO: 206078 - DNA, 25 bp, Artificial
  probe
  misc_feature (1)..(25): SEQ ID NO: 712; WAN024FH4_at; Start 18; Stop 42
gtttatcggtataggagtagctcta

SEQ ID NO: 206079 - DNA, 25 bp, Artificial
  probe
  misc_feature (1)..(25): SEQ ID NO: 712; WAN024FH4_at; Start 26; Stop 50
gtataggagtagctctattatctct

SEQ ID NO: 206080 - DNA, 25 bp, Artificial
  probe
  misc_feature (1)..(25): SEQ ID NO: 712; WAN024FH4_at; Start 29; Stop 53
taggagtagctctattatctctttc

SEQ ID NO: 206081 - DNA, 25 bp, Artificial
  probe
  misc_feature (1)..(25): SEQ ID NO: 712; WAN024FH4_at; Start 22; Stop 46
atcggtataggagtagctctattat

SEQ ID NO: 206082 - DNA, 25 bp, Artificial
  probe
  misc_feature (1)..(25): SEQ ID NO: 712; WAN024FH4_at; Start 30; Stop 54
aggagtagctctattatctctttct

SEQ ID NO: 206083 - DNA, 25 bp, Artificial
  probe
  misc_feature (1)..(25): SEQ ID NO: 712; WAN024FH4_at; Start 32; Stop 56
gagtagctctattatctctttctct

SEQ ID NO: 206084 - DNA, 25 bp, Artificial
  probe
  misc_feature (1)..(25): SEQ ID NO: 712; WAN024FH4_at; Start 28; Stop 52
ataggagtagctctattatctcttt

SEQ ID NO: 206085 - DNA, 25 bp, Artificial
  probe
  misc_feature (1)..(25): SEQ ID NO: 712; WAN024FH4_at; Start 37; Stop 61
gctctattatctctttctcttctag

SEQ ID NO: 206086 - DNA, 25 bp, Artificial
  probe
  misc_feature (1)..(25): SEQ ID NO: 712; WAN024FH4_at; Start 23; Stop 47
tcggtataggagtagctctattatc

SEQ ID NO: 206087 - DNA, 25 bp, Artificial
  probe
  misc_feature (1)..(25): SEQ ID NO: 712; WAN024FH4_at; Start 20; Stop 44
ttatcggtataggagtagctctatt

SEQ ID NO: 206088 - DNA, 25 bp, Artificial
  probe
  misc_feature (1)..(25): SEQ ID NO: 712; WAN024FH4_at; Start 46; Stop 70
tctctttctcttctagttgcatgtg

SEQ ID NO: 206089 - DNA, 25 bp, Artificial
  probe
  misc_feature (1)..(25): SEQ ID NO: 2209; WAN024FH5_at; Start 152; Stop 176
gtgaacttgctcatcaccaaattgt

SEQ ID NO: 206090 - DNA, 25 bp, Artificial
  probe
  misc_feature (1)..(25): SEQ ID NO: 2209; WAN024FH5_at; Start 235; Stop 259
gccatgatttttcaactggaaccca

SEQ ID NO: 206091 - DNA, 25 bp, Artificial
  probe
  misc_feature (1)..(25): SEQ ID NO: 2209; WAN024FH5_at; Start 203; Stop 227
agtcaaaccaccgtagtgacgttcg

SEQ ID NO: 206092 - DNA, 25 bp, Artificial
  probe
  misc_feature (1)..(25): SEQ ID NO: 2209; WAN024FH5_at; Start 117; Stop 141
tttggaggcaatacatcgtatgaac

SEQ ID NO: 206093 - DNA, 25 bp, Artificial
  probe
  misc_feature (1)..(25): SEQ ID NO: 2209; WAN024FH5_at; Start 147; Stop 171
cagatgtgaacttgctcatcaccaa

SEQ ID NO: 206094 - DNA, 25 bp, Artificial
  probe
  misc_feature (1)..(25): SEQ ID NO: 2209; WAN024FH5_at; Start 225; Stop 249
tcgttcaagcgccatgatttttcaa

SEQ ID NO: 206095 - DNA, 25 bp, Artificial
  probe
  misc_feature (1)..(25): SEQ ID NO: 2209; WAN024FH5_at; Start 90; Stop 114
gctgagtgctcatcatcacggtcca

SEQ ID NO: 206096 - DNA, 25 bp, Artificial
  probe
  misc_feature (1)..(25): SEQ ID NO: 2209; WAN024FH5_at; Start 46; Stop 70
ggattactgagtcgtcaagtgaagc

SEQ ID NO: 206097 - DNA, 25 bp, Artificial
  probe
  misc_feature (1)..(25): SEQ ID NO: 2209; WAN024FH5_at; Start 138; Stop 162
gaacgacgccagatgtgaacttgct

SEQ ID NO: 206098 - DNA, 25 bp, Artificial
  probe
  misc_feature (1)..(25): SEQ ID NO: 2209; WAN024FH5_at; Start 7; Stop 31
gagcacgttccaaagtcactttcaa

SEQ ID NO: 206099 - DNA, 25 bp, Artificial
  probe
  misc_feature (1)..(25): SEQ ID NO: 2209; WAN024FH5_at; Start 217; Stop 241
agtgacgttcgttcaagcgccatga

SEQ ID NO: 206100 - DNA, 25 bp, Artificial
  probe
  misc_feature (1)..(25): SEQ ID NO: 2209; WAN024FH5_at; Start 209; Stop 233
accaccgtagtgacgttcgttcaag

SEQ ID NO: 206101 - DNA, 25 bp, Artificial
  probe
  misc_feature (1)..(25): SEQ ID NO: 2209; WAN024FH5_at; Start 135; Stop 159
tatgaacgacgccagatgtgaactt

SEQ ID NO: 206102 - DNA, 25 bp, Artificial
  probe
  misc_feature (1)..(25): SEQ ID NO: 2209; WAN024FH5_at; Start 72; Stop 96
taacgacggtctgtgtgagctgagt

SEQ ID NO: 206103 - DNA, 25 bp, Artificial
  probe
  misc_feature (1)..(25): SEQ ID NO: 2209; WAN024FH5_at; Start 165; Stop 189
tcaccaaattgttcagcagcttcag

SEQ ID NO: 206104 - DNA, 25 bp, Artificial
  probe
  misc_feature (1)..(25): SEQ ID NO: 2209; WAN024FH5_at; Start 2; Stop 26
tggaagagcacgttccaaagtcact

SEQ ID NO: 206105 - DNA, 25 bp, Artificial
  probe
  misc_feature (1)..(25): SEQ ID NO: 2209; WAN024FH5_at; Start 230; Stop 254
caagcgccatgatttttcaactgga

SEQ ID NO: 206106 - DNA, 25 bp, Artificial
  probe
  misc_feature (1)..(25): SEQ ID NO: 2209; WAN024FH5_at; Start 132; Stop 156
tcgtatgaacgacgccagatgtgaa

SEQ ID NO: 206107 - DNA, 25 bp, Artificial
  probe
  misc_feature (1)..(25): SEQ ID NO: 2209; WAN024FH5_at; Start 220; Stop 244
gacgttcgttcaagcgccatgattt

SEQ ID NO: 206108 - DNA, 25 bp, Artificial
  probe
  misc_feature (1)..(25): SEQ ID NO: 2209; WAN024FH5_at; Start 180; Stop 204
gcagcttcagctttgtttttaccag

SEQ ID NO: 206109 - DNA, 25 bp, Artificial
  probe
  misc_feature (1)..(25): SEQ ID NO: 2209; WAN024FH5_at; Start 23; Stop 47
cactttcaagttttcagcatctggg

SEQ ID NO: 206110 - DNA, 25 bp, Artificial
  probe
  misc_feature (1)..(25): SEQ ID NO: 2209; WAN024FH5_at; Start 261; Stop 285
aattggtcagaagcttcaagagcca

SEQ ID NO: 206111 - DNA, 25 bp, Artificial
  probe
  misc_feature (1)..(25): SEQ ID NO: 2209; WAN024FH5_at; Start 37; Stop 61
cagcatctgggattactgagtcgtc

SEQ ID NO: 206112 - DNA, 25 bp, Artificial
  probe
  misc_feature (1)..(25): SEQ ID NO: 2209; WAN024FH5_at; Start 124; Stop 148
gcaatacatcgtatgaacgacgcca

SEQ ID NO: 206113 - DNA, 25 bp, Artificial
  probe
  misc_feature (1)..(25): SEQ ID NO: 2209; WAN024FH5_at; Start 77; Stop 101
acggtctgtgtgagctgagtgctca

SEQ ID NO: 206114 - DNA, 25 bp, Artificial
  probe
  misc_feature (1)..(25): SEQ ID NO: 2209; WAN024FH5_at; Start 267; Stop 291
tcagaagcttcaagagccaagttag

SEQ ID NO: 206115 - DNA, 25 bp, Artificial
  probe
  misc_feature (1)..(25): SEQ ID NO: 2209; WAN024FH5_at; Start 28; Stop 52
tcaagttttcagcatctgggattac

SEQ ID NO: 206116 - DNA, 25 bp, Artificial
  probe
  misc_feature (1)..(25): SEQ ID NO: 2209; WAN024FH5_at; Start 141; Stop 165
cgacgccagatgtgaacttgctcat

SEQ ID NO: 206117 - DNA, 25 bp, Artificial
  probe
  misc_feature (1)..(25): SEQ ID NO: 2209; WAN024FH5_at; Start 183; Stop 207
gcttcagctttgtttttaccagtca

SEQ ID NO: 206118 - DNA, 25 bp, Artificial
  probe
  misc_feature (1)..(25): SEQ ID NO: 2209; WAN024FH5_at; Start 197; Stop 221
tttaccagtcaaaccaccgtagtga

SEQ ID NO: 206119 - DNA, 25 bp, Artificial
  probe
  misc_feature (1)..(25): SEQ ID NO: 2209; WAN024FH5_at; Start 214; Stop 238
cgtagtgacgttcgttcaagcgcca

SEQ ID NO: 206120 - DNA, 25 bp, Artificial
  probe
  misc_feature (1)..(25): SEQ ID NO: 2209; WAN024FH5_at; Start 170; Stop 194
aaattgttcagcagcttcagctttg

SEQ ID NO: 206121 - DNA, 25 bp, Artificial
  probe
  misc_feature (1)..(25): SEQ ID NO: 2209; WAN024FH5_at; Start 40; Stop 64
catctgggattactgagtcgtcaag

SEQ ID NO: 206122 - DNA, 25 bp, Artificial
  probe
  misc_feature (1)..(25): SEQ ID NO: 2209; WAN024FH5_at; Start 128; Stop 152
tacatcgtatgaacgacgccagatg

SEQ ID NO: 206123 - DNA, 25 bp, Artificial
  probe
  misc_feature (1)..(25): SEQ ID NO: 2619; WAN024FH6_at; Start 150; Stop 174
tgaccaagcttacacttcagtattg

SEQ ID NO: 206124 - DNA, 25 bp, Artificial
  probe
  misc_feature (1)..(25): SEQ ID NO: 2619; WAN024FH6_at; Start 626; Stop 650
tcccaccattggtattcgaattcga

SEQ ID NO: 206125 - DNA, 25 bp, Artificial
  probe
  misc_feature (1)..(25): SEQ ID NO: 2619; WAN024FH6_at; Start 241; Stop 265
aaatcatggcgcttgaacgaacgtc

SEQ ID NO: 206126 - DNA, 25 bp, Artificial
  probe
  misc_feature (1)..(25): SEQ ID NO: 2619; WAN024FH6_at; Start 116; Stop 140
ctggtaaattgatcaaagaagctgg

SEQ ID NO: 206127 - DNA, 25 bp, Artificial
  probe
  misc_feature (1)..(25): SEQ ID NO: 2619; WAN024FH6_at; Start 330; Stop 354
tcacatctggcgtcgttcatacgat

SEQ ID NO: 206128 - DNA, 25 bp, Artificial
  probe
  misc_feature (1)..(25): SEQ ID NO: 2619; WAN024FH6_at; Start 55; Stop 79
cttttcactggttgggctgatgttg

SEQ ID NO: 206129 - DNA, 25 bp, Artificial
  probe
  misc_feature (1)..(25): SEQ ID NO: 2619; WAN024FH6_at; Start 452; Stop 476
acttgaaagtgactttggaacgtgc

SEQ ID NO: 206130 - DNA, 25 bp, Artificial
  probe
  misc_feature (1)..(25): SEQ ID NO: 2619; WAN024FH6_at; Start 83; Stop 107
tgtctgaaaaaggtacacaacaagc

SEQ ID NO: 206131 - DNA, 25 bp, Artificial
  probe
  misc_feature (1)..(25): SEQ ID NO: 2619; WAN024FH6_at; Start 295; Stop 319
gctgaagctgctgaacaatttggtg

SEQ ID NO: 206132 - DNA, 25 bp, Artificial
  probe
  misc_feature (1)..(25): SEQ ID NO: 2619; WAN024FH6_at; Start 384; Stop 408
tgagcactcagctcacacagaccgt

SEQ ID NO: 206133 - DNA, 25 bp, Artificial
  probe
  misc_feature (1)..(25): SEQ ID NO: 2619; WAN024FH6_at; Start 88; Stop 112
gaaaaaggtacacaacaagcgattg

SEQ ID NO: 206134 - DNA, 25 bp, Artificial
  probe
  misc_feature (1)..(25): SEQ ID NO: 2619; WAN024FH6_at; Start 162; Stop 186
cacttcagtattgaaacgtgctatc

SEQ ID NO: 206135 - DNA, 25 bp, Artificial
  probe
  misc_feature (1)..(25): SEQ ID NO: 2619; WAN024FH6_at; Start 21; Stop 45
tcgccacggtgagtctgaatggaac

SEQ ID NO: 206136 - DNA, 25 bp, Artificial
  probe
  misc_feature (1)..(25): SEQ ID NO: 2619; WAN024FH6_at; Start 621; Stop 645
taacttcccaccattggtattcgaa

SEQ ID NO: 206137 - DNA, 25 bp, Artificial
  probe
  misc_feature (1)..(25): SEQ ID NO: 2619; WAN024FH6_at; Start 371; Stop 395
tggaccgtgatgatgagcactcagc

SEQ ID NO: 206138 - DNA, 25 bp, Artificial
  probe
  misc_feature (1)..(25): SEQ ID NO: 2619; WAN024FH6_at; Start 67; Stop 91
tgggctgatgttgatttgtctgaaa

SEQ ID NO: 206139 - DNA, 25 bp, Artificial
  probe
  misc_feature (1)..(25): SEQ ID NO: 2619; WAN024FH6_at; Start 321; Stop 345
tgagcaagttcacatctggcgtcgt

SEQ ID NO: 206140 - DNA, 25 bp, Artificial
  probe
  misc_feature (1)..(25): SEQ ID NO: 2619; WAN024FH6_at; Start 189; Stop 213
aacaactaacttggctcttgaagct

SEQ ID NO: 206141 - DNA, 25 bp, Artificial
  probe
  misc_feature (1)..(25): SEQ ID NO: 2619; WAN024FH6_at; Start 27; Stop 51
cggtgagtctgaatggaacaaagct

SEQ ID NO: 206142 - DNA, 25 bp, Artificial
  probe
  misc_feature (1)..(25): SEQ ID NO: 2619; WAN024FH6_at; Start 226; Stop 250
tgggttccagttgaaaaatcatggc

SEQ ID NO: 206143 - DNA, 25 bp, Artificial
  probe
  misc_feature (1)..(25): SEQ ID NO: 2619; WAN024FH6_at; Start 178; Stop 202
cgtgctatcaaaacaactaacttgg

SEQ ID NO: 206144 - DNA, 25 bp, Artificial
  probe
  misc_feature (1)..(25): SEQ ID NO: 2619; WAN024FH6_at; Start 603; Stop 627
catggacgtggaaatccctaacttc

SEQ ID NO: 206145 - DNA, 25 bp, Artificial
  probe
  misc_feature (1)..(25): SEQ ID NO: 2619; WAN024FH6_at; Start 506; Stop 530
cagctcttaaagatggtaaaaacgt

SEQ ID NO: 206146 - DNA, 25 bp, Artificial
  probe
  misc_feature (1)..(25): SEQ ID NO: 2619; WAN024FH6_at; Start 264; Stop 288
tcactacggtggtttgactggtaaa

SEQ ID NO: 206147 - DNA, 25 bp, Artificial
  probe
  misc_feature (1)..(25): SEQ ID NO: 2619; WAN024FH6_at; Start 524; Stop 548
aaaacgtattcgtaggagctcacgg

SEQ ID NO: 206148 - DNA, 25 bp, Artificial
  probe
  misc_feature (1)..(25): SEQ ID NO: 2619; WAN024FH6_at; Start 343; Stop 367
cgttcatacgatgtattgcctccaa

SEQ ID NO: 206149 - DNA, 25 bp, Artificial
  probe
  misc_feature (1)..(25): SEQ ID NO: 2619; WAN024FH6_at; Start 437; Stop 461
tcccagatgctgaaaacttgaaagt

SEQ ID NO: 206150 - DNA, 25 bp, Artificial
  probe
  misc_feature (1)..(25): SEQ ID NO: 2619; WAN024FH6_at; Start 310; Stop 334
caatttggtgatgagcaagttcaca

SEQ ID NO: 206151 - DNA, 25 bp, Artificial
  probe
  misc_feature (1)..(25): SEQ ID NO: 2619; WAN024FH6_at; Start 120; Stop 144
taaattgatcaaagaagctggtatc

SEQ ID NO: 206152 - DNA, 25 bp, Artificial
  probe
  misc_feature (1)..(25): SEQ ID NO: 2619; WAN024FH6_at; Start 7; Stop 31
aaattggtttttgctcgccacggtg

SEQ ID NO: 206153 - DNA, 25 bp, Artificial
  probe
  misc_feature (1)..(25): SEQ ID NO: 2619; WAN024FH6_at; Start 251; Stop 275
gcttgaacgaacgtcactacggtgg

SEQ ID NO: 206154 - DNA, 25 bp, Artificial
  probe
  misc_feature (1)..(25): SEQ ID NO: 2619; WAN024FH6_at; Start 200; Stop 224
tggctcttgaagcttctgaccaatt

SEQ ID NO: 206155 - DNA, 25 bp, Artificial
  probe
  misc_feature (1)..(25): SEQ ID NO: 2619; WAN024FH6_at; Start 670; Stop 694
tctgaatactaccttggaaaataac

SEQ ID NO: 206156 - DNA, 25 bp, Artificial
  probe
  misc_feature (1)..(25): SEQ ID NO: 2619; WAN024FH6_at; Start 389; Stop 413
actcagctcacacagaccgtcgtta

SEQ ID NO: 206157 - DNA, 25 bp, Artificial
  probe
  misc_feature (1)..(25): SEQ ID NO: 5797; WAN024FH7_at; Start 62; Stop 86
cagcaggcatgctatctgtagtacc

SEQ ID NO: 206158 - DNA, 25 bp, Artificial
  probe
  misc_feature (1)..(25): SEQ ID NO: 5797; WAN024FH7_at; Start 46; Stop 70
gaacttgtcatggtgtcagcaggca

SEQ ID NO: 206159 - DNA, 25 bp, Artificial
  probe
  misc_feature (1)..(25): SEQ ID NO: 5797; WAN024FH7_at; Start 53; Stop 77
tcatggtgtcagcaggcatgctatc

SEQ ID NO: 206160 - DNA, 25 bp, Artificial
  probe
  misc_feature (1)..(25): SEQ ID NO: 5797; WAN024FH7_at; Start 47; Stop 71
aacttgtcatggtgtcagcaggcat

SEQ ID NO: 206161 - DNA, 25 bp, Artificial
  probe
  misc_feature (1)..(25): SEQ ID NO: 5797; WAN024FH7_at; Start 45; Stop 69
agaacttgtcatggtgtcagcaggc

SEQ ID NO: 206162 - DNA, 25 bp, Artificial
  probe
  misc_feature (1)..(25): SEQ ID NO: 5797; WAN024FH7_at; Start 69; Stop 93
catgctatctgtagtacctgtagca

SEQ ID NO: 206163 - DNA, 25 bp, Artificial
  probe
  misc_feature (1)..(25): SEQ ID NO: 5797; WAN024FH7_at; Start 13; Stop 37
gcagccatgttttcacctgccatcg

SEQ ID NO: 206164 - DNA, 25 bp, Artificial
  probe
  misc_feature (1)..(25): SEQ ID NO: 5797; WAN024FH7_at; Start 23; Stop 47
tttcacctgccatcgtgttggtaga

SEQ ID NO: 206165 - DNA, 25 bp, Artificial
  probe
  misc_feature (1)..(25): SEQ ID NO: 5797; WAN024FH7_at; Start 64; Stop 88
gcaggcatgctatctgtagtacctg

SEQ ID NO: 206166 - DNA, 25 bp, Artificial
  probe
  misc_feature (1)..(25): SEQ ID NO: 5797; WAN024FH7_at; Start 35; Stop 59
tcgtgttggtagaacttgtcatggt

SEQ ID NO: 206167 - DNA, 25 bp, Artificial
  probe
  misc_feature (1)..(25): SEQ ID NO: 5797; WAN024FH7_at; Start 1; Stop 25
ttgttagcagaagcagccatgtttt

SEQ ID NO: 206168 - DNA, 25 bp, Artificial
  probe
  misc_feature (1)..(25): SEQ ID NO: 5797; WAN024FH7_at; Start 41; Stop 65
tggtagaacttgtcatggtgtcagc

SEQ ID NO: 206169 - DNA, 25 bp, Artificial
  probe
  misc_feature (1)..(25): SEQ ID NO: 5797; WAN024FH7_at; Start 49; Stop 73
cttgtcatggtgtcagcaggcatgc

SEQ ID NO: 206170 - DNA, 25 bp, Artificial
  probe
  misc_feature (1)..(25): SEQ ID NO: 5797; WAN024FH7_at; Start 42; Stop 66
ggtagaacttgtcatggtgtcagca

SEQ ID NO: 206171 - DNA, 25 bp, Artificial
  probe
  misc_feature (1)..(25): SEQ ID NO: 5797; WAN024FH7_at; Start 28; Stop 52
cctgccatcgtgttggtagaacttg

SEQ ID NO: 206172 - DNA, 25 bp, Artificial
  probe
  misc_feature (1)..(25): SEQ ID NO: 5797; WAN024FH7_at; Start 57; Stop 81
ggtgtcagcaggcatgctatctgta

SEQ ID NO: 206173 - DNA, 25 bp, Artificial
  probe
  misc_feature (1)..(25): SEQ ID NO: 5797; WAN024FH7_at; Start 2; Stop 26
tgttagcagaagcagccatgttttc

SEQ ID NO: 206174 - DNA, 25 bp, Artificial
  probe
  misc_feature (1)..(25): SEQ ID NO: 5797; WAN024FH7_at; Start 51; Stop 75
tgtcatggtgtcagcaggcatgcta

SEQ ID NO: 206175 - DNA, 25 bp, Artificial
  probe
  misc_feature (1)..(25): SEQ ID NO: 5797; WAN024FH7_at; Start 26; Stop 50
cacctgccatcgtgttggtagaact

SEQ ID NO: 206176 - DNA, 25 bp, Artificial
  probe
  misc_feature (1)..(25): SEQ ID NO: 5797; WAN024FH7_at; Start 19; Stop 43
atgttttcacctgccatcgtgttgg

SEQ ID NO: 206177 - DNA, 25 bp, Artificial
  probe
  misc_feature (1)..(25): SEQ ID NO: 5797; WAN024FH7_at; Start 44; Stop 68
tagaacttgtcatggtgtcagcagg

SEQ ID NO: 206178 - DNA, 25 bp, Artificial
  probe
  misc_feature (1)..(25): SEQ ID NO: 5797; WAN024FH7_at; Start 18; Stop 42
catgttttcacctgccatcgtgttg

SEQ ID NO: 206179 - DNA, 25 bp, Artificial
  probe
  misc_feature (1)..(25): SEQ ID NO: 5797; WAN024FH7_at; Start 7; Stop 31
gcagaagcagccatgttttcacctg

SEQ ID NO: 206180 - DNA, 25 bp, Artificial
  probe
  misc_feature (1)..(25): SEQ ID NO: 5797; WAN024FH7_at; Start 54; Stop 78
catggtgtcagcaggcatgctatct

SEQ ID NO: 206181 - DNA, 25 bp, Artificial
  probe
  misc_feature (1)..(25): SEQ ID NO: 5797; WAN024FH7_at; Start 59; Stop 83
tgtcagcaggcatgctatctgtagt

SEQ ID NO: 206182 - DNA, 25 bp, Artificial
  probe
  misc_feature (1)..(25): SEQ ID NO: 5797; WAN024FH7_at; Start 21; Stop 45
gttttcacctgccatcgtgttggta

SEQ ID NO: 206183 - DNA, 25 bp, Artificial
  probe
  misc_feature (1)..(25): SEQ ID NO: 5797; WAN024FH7_at; Start 10; Stop 34
gaagcagccatgttttcacctgcca

SEQ ID NO: 206184 - DNA, 25 bp, Artificial
  probe
  misc_feature (1)..(25): SEQ ID NO: 5797; WAN024FH7_at; Start 4; Stop 28
ttagcagaagcagccatgttttcac

SEQ ID NO: 206185 - DNA, 25 bp, Artificial
  probe
  misc_feature (1)..(25): SEQ ID NO: 5797; WAN024FH7_at; Start 67; Stop 91
ggcatgctatctgtagtacctgtag

SEQ ID NO: 206186 - DNA, 25 bp, Artificial
  probe
  misc_feature (1)..(25): SEQ ID NO: 5797; WAN024FH7_at; Start 15; Stop 39
agccatgttttcacctgccatcgtg

SEQ ID NO: 206187 - DNA, 25 bp, Artificial
  probe
  misc_feature (1)..(25): SEQ ID NO: 5797; WAN024FH7_at; Start 33; Stop 57
catcgtgttggtagaacttgtcatg

SEQ ID NO: 206188 - DNA, 25 bp, Artificial
  probe
  misc_feature (1)..(25): SEQ ID NO: 5797; WAN024FH7_at; Start 38; Stop 62
tgttggtagaacttgtcatggtgtc

SEQ ID NO: 206189 - DNA, 25 bp, Artificial
  probe
  misc_feature (1)..(25): SEQ ID NO: 5797; WAN024FH7_at; Start 31; Stop 55
gccatcgtgttggtagaacttgtca

SEQ ID NO: 206190 - DNA, 25 bp, Artificial
  probe
  misc_feature (1)..(25): SEQ ID NO: 5797; WAN024FH7_at; Start 25; Stop 49
tcacctgccatcgtgttggtagaac

SEQ ID NO: 206191 - DNA, 25 bp, Artificial
  probe
  misc_feature (1)..(25): SEQ ID NO: 289; WAN024FH8_at; Start 52; Stop 76
tctggttctggcgtgactccgatga

SEQ ID NO: 206192 - DNA, 25 bp, Artificial
  probe
  misc_feature (1)..(25): SEQ ID NO: 289; WAN024FH8_at; Start 270; Stop 294
gcttgcgcttgcaggtttactcggt

SEQ ID NO: 206193 - DNA, 25 bp, Artificial
  probe
  misc_feature (1)..(25): SEQ ID NO: 289; WAN024FH8_at; Start 163; Stop 187
gctgcttctgctaacaagatgtctg

SEQ ID NO: 206194 - DNA, 25 bp, Artificial
  probe
  misc_feature (1)..(25): SEQ ID NO: 289; WAN024FH8_at; Start 38; Stop 62
tatcaccttctaactctggttctgg

SEQ ID NO: 206195 - DNA, 25 bp, Artificial
  probe
  misc_feature (1)..(25): SEQ ID NO: 289; WAN024FH8_at; Start 58; Stop 82
tctggcgtgactccgatgaatcaca

SEQ ID NO: 206196 - DNA, 25 bp, Artificial
  probe
  misc_feature (1)..(25): SEQ ID NO: 289; WAN024FH8_at; Start 253; Stop 277
agtattggtttccttgggcttgcgc

SEQ ID NO: 206197 - DNA, 25 bp, Artificial
  probe
  misc_feature (1)..(25): SEQ ID NO: 289; WAN024FH8_at; Start 94; Stop 118
ggtactacagatagcatgcctgctg

SEQ ID NO: 206198 - DNA, 25 bp, Artificial
  probe
  misc_feature (1)..(25): SEQ ID NO: 289; WAN024FH8_at; Start 103; Stop 127
gatagcatgcctgctgacaccatga

SEQ ID NO: 206199 - DNA, 25 bp, Artificial
  probe
  misc_feature (1)..(25): SEQ ID NO: 289; WAN024FH8_at; Start 155; Stop 179
aaaacatggctgcttctgctaacaa

SEQ ID NO: 206200 - DNA, 25 bp, Artificial
  probe
  misc_feature (1)..(25): SEQ ID NO: 289; WAN024FH8_at; Start 177; Stop 201
caagatgtctgatacgatgatgtca

SEQ ID NO: 206201 - DNA, 25 bp, Artificial
  probe
  misc_feature (1)..(25): SEQ ID NO: 289; WAN024FH8_at; Start 195; Stop 219
gatgtcagaggataaagctatgcta

SEQ ID NO: 206202 - DNA, 25 bp, Artificial
  probe
  misc_feature (1)..(25): SEQ ID NO: 289; WAN024FH8_at; Start 10; Stop 34
gaaacatcagacacagcaaatggtt

SEQ ID NO: 206203 - DNA, 25 bp, Artificial
  probe
  misc_feature (1)..(25): SEQ ID NO: 289; WAN024FH8_at; Start 66; Stop 90
gactccgatgaatcacaatcatgct

SEQ ID NO: 206204 - DNA, 25 bp, Artificial
  probe
  misc_feature (1)..(25): SEQ ID NO: 289; WAN024FH8_at; Start 75; Stop 99
gaatcacaatcatgctacaggtact

SEQ ID NO: 206205 - DNA, 25 bp, Artificial
  probe
  misc_feature (1)..(25): SEQ ID NO: 289; WAN024FH8_at; Start 118; Stop 142
gacaccatgacaagttctaccaaca

SEQ ID NO: 206206 - DNA, 25 bp, Artificial
  probe
  misc_feature (1)..(25): SEQ ID NO: 289; WAN024FH8_at; Start 242; Stop 266
catcaatggcaagtattggtttcct

SEQ ID NO: 206207 - DNA, 25 bp, Artificial
  probe
  misc_feature (1)..(25): SEQ ID NO: 289; WAN024FH8_at; Start 274; Stop 298
gcgcttgcaggtttactcggtggtc

SEQ ID NO: 206208 - DNA, 25 bp, Artificial
  probe
  misc_feature (1)..(25): SEQ ID NO: 289; WAN024FH8_at; Start 48; Stop 72
taactctggttctggcgtgactccg

SEQ ID NO: 206209 - DNA, 25 bp, Artificial
  probe
  misc_feature (1)..(25): SEQ ID NO: 289; WAN024FH8_at; Start 3; Stop 27
tgttaaagaaacatcagacacagca

SEQ ID NO: 206210 - DNA, 25 bp, Artificial
  probe
  misc_feature (1)..(25): SEQ ID NO: 289; WAN024FH8_at; Start 149; Stop 173
caggtgaaaacatggctgcttctgc

SEQ ID NO: 206211 - DNA, 25 bp, Artificial
  probe
  misc_feature (1)..(25): SEQ ID NO: 289; WAN024FH8_at; Start 79; Stop 103
cacaatcatgctacaggtactacag

SEQ ID NO: 206212 - DNA, 25 bp, Artificial
  probe
  misc_feature (1)..(25): SEQ ID NO: 289; WAN024FH8_at; Start 189; Stop 213
tacgatgatgtcagaggataaagct

SEQ ID NO: 206213 - DNA, 25 bp, Artificial
  probe
  misc_feature (1)..(25): SEQ ID NO: 289; WAN024FH8_at; Start 141; Stop 165
cacgatggcaggtgaaaacatggct

SEQ ID NO: 206214 - DNA, 25 bp, Artificial
  probe
  misc_feature (1)..(25): SEQ ID NO: 289; WAN024FH8_at; Start 19; Stop 43
gacacagcaaatggttcattatcac

SEQ ID NO: 206215 - DNA, 25 bp, Artificial
  probe
  misc_feature (1)..(25): SEQ ID NO: 289; WAN024FH8_at; Start 172; Stop 196
gctaacaagatgtctgatacgatga

SEQ ID NO: 206216 - DNA, 25 bp, Artificial
  probe
  misc_feature (1)..(25): SEQ ID NO: 289; WAN024FH8_at; Start 278; Stop 302
ttgcaggtttactcggtggtctagg

SEQ ID NO: 206217 - DNA, 25 bp, Artificial
  probe
  misc_feature (1)..(25): SEQ ID NO: 289; WAN024FH8_at; Start 89; Stop 113
ctacaggtactacagatagcatgcc

SEQ ID NO: 206218 - DNA, 25 bp, Artificial
  probe
  misc_feature (1)..(25): SEQ ID NO: 289; WAN024FH8_at; Start 133; Stop 157
tctaccaacacgatggcaggtgaaa

SEQ ID NO: 206219 - DNA, 25 bp, Artificial
  probe
  misc_feature (1)..(25): SEQ ID NO: 289; WAN024FH8_at; Start 32; Stop 56
gttcattatcaccttctaactctgg

SEQ ID NO: 206220 - DNA, 25 bp, Artificial
  probe
  misc_feature (1)..(25): SEQ ID NO: 289; WAN024FH8_at; Start 265; Stop 289
cttgggcttgcgcttgcaggtttac

SEQ ID NO: 206221 - DNA, 25 bp, Artificial
  probe
  misc_feature (1)..(25): SEQ ID NO: 289; WAN024FH8_at; Start 232; Stop 256
gagactcaaacatcaatggcaagta

SEQ ID NO: 206222 - DNA, 25 bp, Artificial
  probe
  misc_feature (1)..(25): SEQ ID NO: 289; WAN024FH8_at; Start 128; Stop 152
caagttctaccaacacgatggcagg

SEQ ID NO: 206223 - DNA, 25 bp, Artificial
  probe
  misc_feature (1)..(25): SEQ ID NO: 289; WAN024FH8_at; Start 227; Stop 251
ctggtgagactcaaacatcaatggc

SEQ ID NO: 206224 - DNA, 25 bp, Artificial
  probe
  misc_feature (1)..(25): SEQ ID NO: 289; WAN024FH8_at; Start 110; Stop 134
tgcctgctgacaccatgacaagttc

SEQ ID NO: 206225 - DNA, 25 bp, Artificial
  probe
  misc_feature (1)..(25): SEQ ID NO: 5196; WAN024FH9_at; Start 170; Stop 194
agaattttcaaaacctgcttgcccg

SEQ ID NO: 206226 - DNA, 25 bp, Artificial
  probe
  misc_feature (1)..(25): SEQ ID NO: 5196; WAN024FH9_at; Start 324; Stop 348
gagccagacctacatctgtcaaggc

SEQ ID NO: 206227 - DNA, 25 bp, Artificial
  probe
  misc_feature (1)..(25): SEQ ID NO: 5196; WAN024FH9_at; Start 287; Stop 311
cctccagaaagctgggctggaaagt

SEQ ID NO: 206228 - DNA, 25 bp, Artificial
  probe
  misc_feature (1)..(25): SEQ ID NO: 5196; WAN024FH9_at; Start 278; Stop 302
tgttgctcccctccagaaagctggg

SEQ ID NO: 206229 - DNA, 25 bp, Artificial
  probe
  misc_feature (1)..(25): SEQ ID NO: 5196; WAN024FH9_at; Start 219; Stop 243
gttcatcacaaaggagaattttagg

SEQ ID NO: 206230 - DNA, 25 bp, Artificial
  probe
  misc_feature (1)..(25): SEQ ID NO: 5196; WAN024FH9_at; Start 334; Stop 358
tacatctgtcaaggcctgatcagga

SEQ ID NO: 206231 - DNA, 25 bp, Artificial
  probe
  misc_feature (1)..(25): SEQ ID NO: 5196; WAN024FH9_at; Start 240; Stop 264
taggatttttggctaccgcgcgtgc

SEQ ID NO: 206232 - DNA, 25 bp, Artificial
  probe
  misc_feature (1)..(25): SEQ ID NO: 5196; WAN024FH9_at; Start 154; Stop 178
acgagacatgtcttggagaattttc

SEQ ID NO: 206233 - DNA, 25 bp, Artificial
  probe
  misc_feature (1)..(25): SEQ ID NO: 5196; WAN024FH9_at; Start 30; Stop 54
tatcctgaggatgctggttgagcac

SEQ ID NO: 206234 - DNA, 25 bp, Artificial
  probe
  misc_feature (1)..(25): SEQ ID NO: 5196; WAN024FH9_at; Start 195; Stop 219
tctgataatccaaggctccagtcgg

SEQ ID NO: 206235 - DNA, 25 bp, Artificial
  probe
  misc_feature (1)..(25): SEQ ID NO: 5196; WAN024FH9_at; Start 91; Stop 115
gcgatcagcaatgggcgccaaagct

SEQ ID NO: 206236 - DNA, 25 bp, Artificial
  probe
  misc_feature (1)..(25): SEQ ID NO: 5196; WAN024FH9_at; Start 265; Stop 289
aatggagactcgctgttgctcccct

SEQ ID NO: 206237 - DNA, 25 bp, Artificial
  probe
  misc_feature (1)..(25): SEQ ID NO: 5196; WAN024FH9_at; Start 120; Stop 144
tatgagtcacgatgatcaccgtcgc

SEQ ID NO: 206238 - DNA, 25 bp, Artificial
  probe
  misc_feature (1)..(25): SEQ ID NO: 5196; WAN024FH9_at; Start 253; Stop 277
taccgcgcgtgcaatggagactcgc

SEQ ID NO: 206239 - DNA, 25 bp, Artificial
  probe
  misc_feature (1)..(25): SEQ ID NO: 5196; WAN024FH9_at; Start 390; Stop 414
gttccacattttccttagctgtcag

SEQ ID NO: 206240 - DNA, 25 bp, Artificial
  probe
  misc_feature (1)..(25): SEQ ID NO: 5196; WAN024FH9_at; Start 178; Stop 202
caaaacctgcttgcccgtctgataa

SEQ ID NO: 206241 - DNA, 25 bp, Artificial
  probe
  misc_feature (1)..(25): SEQ ID NO: 5196; WAN024FH9_at; Start 57; Stop 81
catccttgacactggcatcgtgcat

SEQ ID NO: 206242 - DNA, 25 bp, Artificial
  probe
  misc_feature (1)..(25): SEQ ID NO: 5196; WAN024FH9_at; Start 402; Stop 426
ccttagctgtcagattagaaactag

SEQ ID NO: 206243 - DNA, 25 bp, Artificial
  probe
  misc_feature (1)..(25): SEQ ID NO: 5196; WAN024FH9_at; Start 82; Stop 106
ttgaatcacgcgatcagcaatgggc

SEQ ID NO: 206244 - DNA, 25 bp, Artificial
  probe
  misc_feature (1)..(25): SEQ ID NO: 5196; WAN024FH9_at; Start 2; Stop 26
tgatcatgctagtactccaaactgt

SEQ ID NO: 206245 - DNA, 25 bp, Artificial
  probe
  misc_feature (1)..(25): SEQ ID NO: 5196; WAN024FH9_at; Start 45; Stop 69
ggttgagcaccacatccttgacact

SEQ ID NO: 206246 - DNA, 25 bp, Artificial
  probe
  misc_feature (1)..(25): SEQ ID NO: 5196; WAN024FH9_at; Start 140; Stop 164
gtcgctcccttttgacgagacatgt

SEQ ID NO: 206247 - DNA, 25 bp, Artificial
  probe
  misc_feature (1)..(25): SEQ ID NO: 5196; WAN024FH9_at; Start 70; Stop 94
ggcatcgtgcatttgaatcacgcga

SEQ ID NO: 206248 - DNA, 25 bp, Artificial
  probe
  misc_feature (1)..(25): SEQ ID NO: 5196; WAN024FH9_at; Start 383; Stop 407
gaagccagttccacattttccttag

SEQ ID NO: 206249 - DNA, 25 bp, Artificial
  probe
  misc_feature (1)..(25): SEQ ID NO: 5196; WAN024FH9_at; Start 370; Stop 394
tgtcacaatttcagaagccagttcc

SEQ ID NO: 206250 - DNA, 25 bp, Artificial
  probe
  misc_feature (1)..(25): SEQ ID NO: 5196; WAN024FH9_at; Start 356; Stop 380
ggattcaaggcatctgtcacaattt

SEQ ID NO: 206251 - DNA, 25 bp, Artificial
  probe
  misc_feature (1)..(25): SEQ ID NO: 5196; WAN024FH9_at; Start 348; Stop 372
cctgatcaggattcaaggcatctgt

SEQ ID NO: 206252 - DNA, 25 bp, Artificial
  probe
  misc_feature (1)..(25): SEQ ID NO: 5196; WAN024FH9_at; Start 185; Stop 209
tgcttgcccgtctgataatccaagg

SEQ ID NO: 206253 - DNA, 25 bp, Artificial
  probe
  misc_feature (1)..(25): SEQ ID NO: 5196; WAN024FH9_at; Start 208; Stop 232
ggctccagtcggttcatcacaaagg

SEQ ID NO: 206254 - DNA, 25 bp, Artificial
  probe
  misc_feature (1)..(25): SEQ ID NO: 5196; WAN024FH9_at; Start 130; Stop 154
gatgatcaccgtcgctcccttttga

SEQ ID NO: 206255 - DNA, 25 bp, Artificial
  probe
  misc_feature (1)..(25): SEQ ID NO: 5196; WAN024FH9_at; Start 102; Stop 126
tgggcgccaaagctccattatgagt

SEQ ID NO: 206256 - DNA, 25 bp, Artificial
  probe
  misc_feature (1)..(25): SEQ ID NO: 5196; WAN024FH9_at; Start 317; Stop 341
agacgatgagccagacctacatctg

SEQ ID NO: 206257 - DNA, 25 bp, Artificial
  probe
  misc_feature (1)..(25): SEQ ID NO: 5196; WAN024FH9_at; Start 107; Stop 131
gccaaagctccattatgagtcacga

SEQ ID NO: 206258 - DNA, 25 bp, Artificial
  probe
  misc_feature (1)..(25): SEQ ID NO: 5196; WAN024FH9_at; Start 19; Stop 43
caaactgtcaatatcctgaggatgc

SEQ ID NO: 206259 - DNA, 25 bp, Artificial
  probe
  misc_feature (1)..(25): SEQ ID NO: 4191; WAN024FHA_at; Start 238; Stop 262
caccagcgcaccaattaccgtagaa

SEQ ID NO: 206260 - DNA, 25 bp, Artificial
  probe
  misc_feature (1)..(25): SEQ ID NO: 4191; WAN024FHA_at; Start 224; Stop 248
cggattatagttcccaccagcgcac

SEQ ID NO: 206261 - DNA, 25 bp, Artificial
  probe
  misc_feature (1)..(25): SEQ ID NO: 4191; WAN024FHA_at; Start 122; Stop 146
tccttggtgcttcaggtgcaggcaa

SEQ ID NO: 206262 - DNA, 25 bp, Artificial
  probe
  misc_feature (1)..(25): SEQ ID NO: 4191; WAN024FHA_at; Start 291; Stop 315
taatctagtttctaatctgacagct

SEQ ID NO: 206263 - DNA, 25 bp, Artificial
  probe
  misc_feature (1)..(25): SEQ ID NO: 4191; WAN024FHA_at; Start 444; Stop 468
gcgagtctccattgcacgcgcggta

SEQ ID NO: 206264 - DNA, 25 bp, Artificial
  probe
  misc_feature (1)..(25): SEQ ID NO: 4191; WAN024FHA_at; Start 217; Stop 241
aatattgcggattatagttcccacc

SEQ ID NO: 206265 - DNA, 25 bp, Artificial
  probe
  misc_feature (1)..(25): SEQ ID NO: 4191; WAN024FHA_at; Start 512; Stop 536
ccttggattatcagacgggcaagca

SEQ ID NO: 206266 - DNA, 25 bp, Artificial
  probe
  misc_feature (1)..(25): SEQ ID NO: 4191; WAN024FHA_at; Start 594; Stop 618
gactcataatggagctttggcgccc

SEQ ID NO: 206267 - DNA, 25 bp, Artificial
  probe
  misc_feature (1)..(25): SEQ ID NO: 4191; WAN024FHA_at; Start 455; Stop 479
ttgcacgcgcggtagccaaaaatcc

SEQ ID NO: 206268 - DNA, 25 bp, Artificial
  probe
  misc_feature (1)..(25): SEQ ID NO: 4191; WAN024FHA_at; Start 200; Stop 224
tctggattgatggtgttaatattgc

SEQ ID NO: 206269 - DNA, 25 bp, Artificial
  probe
  misc_feature (1)..(25): SEQ ID NO: 4191; WAN024FHA_at; Start 560; Stop 584
tgtctcgtcaaaagggagcgacggt

SEQ ID NO: 206270 - DNA, 25 bp, Artificial
  probe
  misc_feature (1)..(25): SEQ ID NO: 4191; WAN024FHA_at; Start 435; Stop 459
ggagcaacagcgagtctccattgca

SEQ ID NO: 206271 - DNA, 25 bp, Artificial
  probe
  misc_feature (1)..(25): SEQ ID NO: 4191; WAN024FHA_at; Start 377; Stop 401
tgacagatgtaggtctggctcatcg

SEQ ID NO: 206272 - DNA, 25 bp, Artificial
  probe
  misc_feature (1)..(25): SEQ ID NO: 4191; WAN024FHA_at; Start 21; Stop 45
tgagatgaaacactgttacaagcgt

SEQ ID NO: 206273 - DNA, 25 bp, Artificial
  probe
  misc_feature (1)..(25): SEQ ID NO: 4191; WAN024FHA_at; Start 327; Stop 351
ggaactggcttctgaaattgtgaca

SEQ ID NO: 206274 - DNA, 25 bp, Artificial
  probe
  misc_feature (1)..(25): SEQ ID NO: 4191; WAN024FHA_at; Start 33; Stop 57
ctgttacaagcgttatcaggttggg

SEQ ID NO: 206275 - DNA, 25 bp, Artificial
  probe
  misc_feature (1)..(25): SEQ ID NO: 4191; WAN024FHA_at; Start 619; Stop 643
attgctgatcgcgtgattcaaatgc

SEQ ID NO: 206276 - DNA, 25 bp, Artificial
  probe
  misc_feature (1)..(25): SEQ ID NO: 4191; WAN024FHA_at; Start 339; Stop 363
tgaaattgtgacagatgccttgaat

SEQ ID NO: 206277 - DNA, 25 bp, Artificial
  probe
  misc_feature (1)..(25): SEQ ID NO: 4191; WAN024FHA_at; Start 505; Stop 529
actggagccttggattatcagacgg

SEQ ID NO: 206278 - DNA, 25 bp, Artificial
  probe
  misc_feature (1)..(25): SEQ ID NO: 4191; WAN024FHA_at; Start 529; Stop 553
ggcaagcaggttttgaaaattctcc

SEQ ID NO: 206279 - DNA, 25 bp, Artificial
  probe
  misc_feature (1)..(25): SEQ ID NO: 4191; WAN024FHA_at; Start 609; Stop 633
tttggcgcccattgctgatcgcgtg

SEQ ID NO: 206280 - DNA, 25 bp, Artificial
  probe
  misc_feature (1)..(25): SEQ ID NO: 4191; WAN024FHA_at; Start 134; Stop 158
caggtgcaggcaagtcaacagttct

SEQ ID NO: 206281 - DNA, 25 bp, Artificial
  probe
  misc_feature (1)..(25): SEQ ID NO: 4191; WAN024FHA_at; Start 406; Stop 430
aataactttccagcccagctttctg

SEQ ID NO: 206282 - DNA, 25 bp, Artificial
  probe
  misc_feature (1)..(25): SEQ ID NO: 4191; WAN024FHA_at; Start 7; Stop 31
ctgatggcttatattgagatgaaac

SEQ ID NO: 206283 - DNA, 25 bp, Artificial
  probe
  misc_feature (1)..(25): SEQ ID NO: 4191; WAN024FHA_at; Start 146; Stop 170
agtcaacagttcttaaccttcttgg

SEQ ID NO: 206284 - DNA, 25 bp, Artificial
  probe
  misc_feature (1)..(25): SEQ ID NO: 4191; WAN024FHA_at; Start 411; Stop 435
ctttccagcccagctttctggaggg

SEQ ID NO: 206285 - DNA, 25 bp, Artificial
  probe
  misc_feature (1)..(25): SEQ ID NO: 4191; WAN024FHA_at; Start 303; Stop 327
taatctgacagctaaggaaaatgtg

SEQ ID NO: 206286 - DNA, 25 bp, Artificial
  probe
  misc_feature (1)..(25): SEQ ID NO: 4191; WAN024FHA_at; Start 520; Stop 544
tatcagacgggcaagcaggttttga

SEQ ID NO: 206287 - DNA, 25 bp, Artificial
  probe
  misc_feature (1)..(25): SEQ ID NO: 4191; WAN024FHA_at; Start 248; Stop 272
ccaattaccgtagaaatgatgtggg

SEQ ID NO: 206288 - DNA, 25 bp, Artificial
  probe
  misc_feature (1)..(25): SEQ ID NO: 4191; WAN024FHA_at; Start 578; Stop 602
cgacggtgatcatcgtgactcataa

SEQ ID NO: 206289 - DNA, 25 bp, Artificial
  probe
  misc_feature (1)..(25): SEQ ID NO: 4191; WAN024FHA_at; Start 82; Stop 106
gatgtgaattttgagattgaaaagg

SEQ ID NO: 206290 - DNA, 25 bp, Artificial
  probe
  misc_feature (1)..(25): SEQ ID NO: 4191; WAN024FHA_at; Start 117; Stop 141
tattatccttggtgcttcaggtgca

SEQ ID NO: 206291 - DNA, 25 bp, Artificial
  probe
  misc_feature (1)..(25): SEQ ID NO: 4191; WAN024FHA_at; Start 314; Stop 338
ctaaggaaaatgtggaactggcttc

SEQ ID NO: 206292 - DNA, 25 bp, Artificial
  probe
  misc_feature (1)..(25): SEQ ID NO: 4191; WAN024FHA_at; Start 567; Stop 591
tcaaaagggagcgacggtgatcatc

SEQ ID NO: 206293 - DNA, 25 bp, Artificial
  probe
  misc_feature (1)..(25): SEQ ID NO: 3402; WAN024FHB_at; Start 34; Stop 58
caaatcttccttctctatcatcata

SEQ ID NO: 206294 - DNA, 25 bp, Artificial
  probe
  misc_feature (1)..(25): SEQ ID NO: 3402; WAN024FHB_at; Start 11; Stop 35
tgttgaagatggataaagggagtca

SEQ ID NO: 206295 - DNA, 25 bp, Artificial
  probe
  misc_feature (1)..(25): SEQ ID NO: 3402; WAN024FHB_at; Start 66; Stop 90
tgttttgaagaccagctttgccttt

SEQ ID NO: 206296 - DNA, 25 bp, Artificial
  probe
  misc_feature (1)..(25): SEQ ID NO: 3402; WAN024FHB_at; Start 48; Stop 72
ctatcatcataagagtaatgttttg

SEQ ID NO: 206297 - DNA, 25 bp, Artificial
  probe
  misc_feature (1)..(25): SEQ ID NO: 3402; WAN024FHB_at; Start 75; Stop 99
gaccagctttgcctttgaaatcctt

SEQ ID NO: 206298 - DNA, 25 bp, Artificial
  probe
  misc_feature (1)..(25): SEQ ID NO: 3402; WAN024FHB_at; Start 38; Stop 62
tcttccttctctatcatcataagag

SEQ ID NO: 206299 - DNA, 25 bp, Artificial
  probe
  misc_feature (1)..(25): SEQ ID NO: 3402; WAN024FHB_at; Start 78; Stop 102
cagctttgcctttgaaatccttgta

SEQ ID NO: 206300 - DNA, 25 bp, Artificial
  probe
  misc_feature (1)..(25): SEQ ID NO: 3402; WAN024FHB_at; Start 22; Stop 46
gataaagggagtcaaatcttccttc

SEQ ID NO: 206301 - DNA, 25 bp, Artificial
  probe
  misc_feature (1)..(25): SEQ ID NO: 3402; WAN024FHB_at; Start 3; Stop 27
gctgatgatgttgaagatggataaa

SEQ ID NO: 206302 - DNA, 25 bp, Artificial
  probe
  misc_feature (1)..(25): SEQ ID NO: 3402; WAN024FHB_at; Start 55; Stop 79
cataagagtaatgttttgaagacca

SEQ ID NO: 206303 - DNA, 25 bp, Artificial
  probe
  misc_feature (1)..(25): SEQ ID NO: 3402; WAN024FHB_at; Start 63; Stop 87
taatgttttgaagaccagctttgcc

SEQ ID NO: 206304 - DNA, 25 bp, Artificial
  probe
  misc_feature (1)..(25): SEQ ID NO: 3402; WAN024FHB_at; Start 72; Stop 96
gaagaccagctttgcctttgaaatc

SEQ ID NO: 206305 - DNA, 25 bp, Artificial
  probe
  misc_feature (1)..(25): SEQ ID NO: 3402; WAN024FHB_at; Start 41; Stop 65
tccttctctatcatcataagagtaa

SEQ ID NO: 206306 - DNA, 25 bp, Artificial
  probe
  misc_feature (1)..(25): SEQ ID NO: 3402; WAN024FHB_at; Start 1; Stop 25
ctgctgatgatgttgaagatggata

SEQ ID NO: 206307 - DNA, 25 bp, Artificial
  probe
  misc_feature (1)..(25): SEQ ID NO: 3402; WAN024FHB_at; Start 57; Stop 81
taagagtaatgttttgaagaccagc

SEQ ID NO: 206308 - DNA, 25 bp, Artificial
  probe
  misc_feature (1)..(25): SEQ ID NO: 3402; WAN024FHB_at; Start 73; Stop 97
aagaccagctttgcctttgaaatcc

SEQ ID NO: 206309 - DNA, 25 bp, Artificial
  probe
  misc_feature (1)..(25): SEQ ID NO: 3402; WAN024FHB_at; Start 70; Stop 94
ttgaagaccagctttgcctttgaaa

SEQ ID NO: 206310 - DNA, 25 bp, Artificial
  probe
  misc_feature (1)..(25): SEQ ID NO: 3402; WAN024FHB_at; Start 20; Stop 44
tggataaagggagtcaaatcttcct

SEQ ID NO: 206311 - DNA, 25 bp, Artificial
  probe
  misc_feature (1)..(25): SEQ ID NO: 3402; WAN024FHB_at; Start 76; Stop 100
accagctttgcctttgaaatccttg

SEQ ID NO: 206312 - DNA, 25 bp, Artificial
  probe
  misc_feature (1)..(25): SEQ ID NO: 3402; WAN024FHB_at; Start 71; Stop 95
tgaagaccagctttgcctttgaaat

SEQ ID NO: 206313 - DNA, 25 bp, Artificial
  probe
  misc_feature (1)..(25): SEQ ID NO: 3402; WAN024FHB_at; Start 15; Stop 39
gaagatggataaagggagtcaaatc

SEQ ID NO: 206314 - DNA, 25 bp, Artificial
  probe
  misc_feature (1)..(25): SEQ ID NO: 3402; WAN024FHB_at; Start 29; Stop 53
ggagtcaaatcttccttctctatca

SEQ ID NO: 206315 - DNA, 25 bp, Artificial
  probe
  misc_feature (1)..(25): SEQ ID NO: 3402; WAN024FHB_at; Start 60; Stop 84
gagtaatgttttgaagaccagcttt

SEQ ID NO: 206316 - DNA, 25 bp, Artificial
  probe
  misc_feature (1)..(25): SEQ ID NO: 3402; WAN024FHB_at; Start 18; Stop 42
gatggataaagggagtcaaatcttc

SEQ ID NO: 206317 - DNA, 25 bp, Artificial
  probe
  misc_feature (1)..(25): SEQ ID NO: 3402; WAN024FHB_at; Start 26; Stop 50
aagggagtcaaatcttccttctcta

SEQ ID NO: 206318 - DNA, 25 bp, Artificial
  probe
  misc_feature (1)..(25): SEQ ID NO: 3402; WAN024FHB_at; Start 54; Stop 78
tcataagagtaatgttttgaagacc

SEQ ID NO: 206319 - DNA, 25 bp, Artificial
  probe
  misc_feature (1)..(25): SEQ ID NO: 3402; WAN024FHB_at; Start 32; Stop 56
gtcaaatcttccttctctatcatca

SEQ ID NO: 206320 - DNA, 25 bp, Artificial
  probe
  misc_feature (1)..(25): SEQ ID NO: 3402; WAN024FHB_at; Start 28; Stop 52
gggagtcaaatcttccttctctatc

SEQ ID NO: 206321 - DNA, 25 bp, Artificial
  probe
  misc_feature (1)..(25): SEQ ID NO: 3402; WAN024FHB_at; Start 24; Stop 48
taaagggagtcaaatcttccttctc

SEQ ID NO: 206322 - DNA, 25 bp, Artificial
  probe
  misc_feature (1)..(25): SEQ ID NO: 3402; WAN024FHB_at; Start 69; Stop 93
tttgaagaccagctttgcctttgaa

SEQ ID NO: 206323 - DNA, 25 bp, Artificial
  probe
  misc_feature (1)..(25): SEQ ID NO: 3402; WAN024FHB_at; Start 58; Stop 82
aagagtaatgttttgaagaccagct

SEQ ID NO: 206324 - DNA, 25 bp, Artificial
  probe
  misc_feature (1)..(25): SEQ ID NO: 3402; WAN024FHB_at; Start 64; Stop 88
aatgttttgaagaccagctttgcct

SEQ ID NO: 206325 - DNA, 25 bp, Artificial
  probe
  misc_feature (1)..(25): SEQ ID NO: 3402; WAN024FHB_at; Start 67; Stop 91
gttttgaagaccagctttgcctttg

SEQ ID NO: 206326 - DNA, 25 bp, Artificial
  probe
  misc_feature (1)..(25): SEQ ID NO: 3402; WAN024FHB_at; Start 68; Stop 92
ttttgaagaccagctttgcctttga

SEQ ID NO: 206327 - DNA, 25 bp, Artificial
  probe
  misc_feature (1)..(25): SEQ ID NO: 1718; WAN024FHC_at; Start 1596; Stop 1620
tactcataaggtaacagcccgcaac

SEQ ID NO: 206328 - DNA, 25 bp, Artificial
  probe
  misc_feature (1)..(25): SEQ ID NO: 1718; WAN024FHC_at; Start 1697; Stop 1721
tgggaatccaatcttctgtagcagg

SEQ ID NO: 206329 - DNA, 25 bp, Artificial
  probe
  misc_feature (1)..(25): SEQ ID NO: 1718; WAN024FHC_at; Start 1284; Stop 1308
cctttatggactagtagctgggact

SEQ ID NO: 206330 - DNA, 25 bp, Artificial
  probe
  misc_feature (1)..(25): SEQ ID NO: 1718; WAN024FHC_at; Start 2130; Stop 2154
tagctatgagcaactttacggacag

SEQ ID NO: 206331 - DNA, 25 bp, Artificial
  probe
  misc_feature (1)..(25): SEQ ID NO: 1718; WAN024FHC_at; Start 2593; Stop 2617
gaagtctatgtaatcccagtggcag

SEQ ID NO: 206332 - DNA, 25 bp, Artificial
  probe
  misc_feature (1)..(25): SEQ ID NO: 1718; WAN024FHC_at; Start 2382; Stop 2406
tatcaacgtagctgagagaatccgt

SEQ ID NO: 206333 - DNA, 25 bp, Artificial
  probe
  misc_feature (1)..(25): SEQ ID NO: 1718; WAN024FHC_at; Start 282; Stop 306
gactatggataatgggcaggatgcc

SEQ ID NO: 206334 - DNA, 25 bp, Artificial
  probe
  misc_feature (1)..(25): SEQ ID NO: 1718; WAN024FHC_at; Start 514; Stop 538
gaaatcctctcccagcgagatatgg

SEQ ID NO: 206335 - DNA, 25 bp, Artificial
  probe
  misc_feature (1)..(25): SEQ ID NO: 1718; WAN024FHC_at; Start 1118; Stop 1142
catccagtattcgagcagtgggcaa

SEQ ID NO: 206336 - DNA, 25 bp, Artificial
  probe
  misc_feature (1)..(25): SEQ ID NO: 1718; WAN024FHC_at; Start 1202; Stop 1226
gctttgtagacgaagagcgaactca

SEQ ID NO: 206337 - DNA, 25 bp, Artificial
  probe
  misc_feature (1)..(25): SEQ ID NO: 1718; WAN024FHC_at; Start 2485; Stop 2509
tcccttgtgggaatcgtacttggtc

SEQ ID NO: 206338 - DNA, 25 bp, Artificial
  probe
  misc_feature (1)..(25): SEQ ID NO: 1718; WAN024FHC_at; Start 2606; Stop 2630
tcccagtggcagcagtaagcatcat

SEQ ID NO: 206339 - DNA, 25 bp, Artificial
  probe
  misc_feature (1)..(25): SEQ ID NO: 1718; WAN024FHC_at; Start 2010; Stop 2034
taaactcgcccagctggcaggtgtc

SEQ ID NO: 206340 - DNA, 25 bp, Artificial
  probe
  misc_feature (1)..(25): SEQ ID NO: 1718; WAN024FHC_at; Start 1682; Stop 1706
tgctctttgcaggtttgggaatcca

SEQ ID NO: 206341 - DNA, 25 bp, Artificial
  probe
  misc_feature (1)..(25): SEQ ID NO: 1718; WAN024FHC_at; Start 229; Stop 253
gaactaaaacagacggagggcgcag

SEQ ID NO: 206342 - DNA, 25 bp, Artificial
  probe
  misc_feature (1)..(25): SEQ ID NO: 1718; WAN024FHC_at; Start 1474; Stop 1498
tatctggtggcttggagggaacttc

SEQ ID NO: 206343 - DNA, 25 bp, Artificial
  probe
  misc_feature (1)..(25): SEQ ID NO: 1718; WAN024FHC_at; Start 402; Stop 426
tttgcaaggccaatacagcgtggga

SEQ ID NO: 206344 - DNA, 25 bp, Artificial
  probe
  misc_feature (1)..(25): SEQ ID NO: 1718; WAN024FHC_at; Start 813; Stop 837
taatttgcaggaaggcaagcgtcgt

SEQ ID NO: 206345 - DNA, 25 bp, Artificial
  probe
  misc_feature (1)..(25): SEQ ID NO: 1718; WAN024FHC_at; Start 1956; Stop 1980
tcttcaacatcatcagcaggagctg

SEQ ID NO: 206346 - DNA, 25 bp, Artificial
  probe
  misc_feature (1)..(25): SEQ ID NO: 1718; WAN024FHC_at; Start 856; Stop 880
cgtatacaggctcaagaaagtcaac

SEQ ID NO: 206347 - DNA, 25 bp, Artificial
  probe
  misc_feature (1)..(25): SEQ ID NO: 1718; WAN024FHC_at; Start 355; Stop 379
aagggacgacttcctcagtcagaca

SEQ ID NO: 206348 - DNA, 25 bp, Artificial
  probe
  misc_feature (1)..(25): SEQ ID NO: 1718; WAN024FHC_at; Start 1162; Stop 1186
tatgccgtagcagccatggtgacct

SEQ ID NO: 206349 - DNA, 25 bp, Artificial
  probe
  misc_feature (1)..(25): SEQ ID NO: 1718; WAN024FHC_at; Start 2575; Stop 2599
tatccgcaggtaggctgggaagtct

SEQ ID NO: 206350 - DNA, 25 bp, Artificial
  probe
  misc_feature (1)..(25): SEQ ID NO: 1718; WAN024FHC_at; Start 2202; Stop 2226
aactagtatcgaaagtcaggcgggc

SEQ ID NO: 206351 - DNA, 25 bp, Artificial
  probe
  misc_feature (1)..(25): SEQ ID NO: 1718; WAN024FHC_at; Start 1063; Stop 1087
tataatcgtcagaccatgccaggtg

SEQ ID NO: 206352 - DNA, 25 bp, Artificial
  probe
  misc_feature (1)..(25): SEQ ID NO: 1718; WAN024FHC_at; Start 921; Stop 945
tcaacttacccaagccaagcaggaa

SEQ ID NO: 206353 - DNA, 25 bp, Artificial
  probe
  misc_feature (1)..(25): SEQ ID NO: 1718; WAN024FHC_at; Start 129; Stop 153
tcccaacatggaggcgacagctaat

SEQ ID NO: 206354 - DNA, 25 bp, Artificial
  probe
  misc_feature (1)..(25): SEQ ID NO: 1718; WAN024FHC_at; Start 1764; Stop 1788
gcttgtctctgaaaatcctagtgcg

SEQ ID NO: 206355 - DNA, 25 bp, Artificial
  probe
  misc_feature (1)..(25): SEQ ID NO: 1718; WAN024FHC_at; Start 1718; Stop 1742
caggagttccgtctaaacagtttca

SEQ ID NO: 206356 - DNA, 25 bp, Artificial
  probe
  misc_feature (1)..(25): SEQ ID NO: 1718; WAN024FHC_at; Start 1179; Stop 1203
ggtgacctttacgaccatgactcgc

SEQ ID NO: 206357 - DNA, 25 bp, Artificial
  probe
  misc_feature (1)..(25): SEQ ID NO: 1718; WAN024FHC_at; Start 828; Stop 852
caagcgtcgtttagcagctgctcaa

SEQ ID NO: 206358 - DNA, 25 bp, Artificial
  probe
  misc_feature (1)..(25): SEQ ID NO: 1718; WAN024FHC_at; Start 1221; Stop 1245
aactcatgcagggatttttaaggcc

SEQ ID NO: 206359 - DNA, 25 bp, Artificial
  probe
  misc_feature (1)..(25): SEQ ID NO: 1718; WAN024FHC_at; Start 107; Stop 131
tagtaggcctcaaagtaaccagtcc

SEQ ID NO: 206360 - DNA, 25 bp, Artificial
  probe
  misc_feature (1)..(25): SEQ ID NO: 1718; WAN024FHC_at; Start 2180; Stop 2204
tctcattaagggataccagtgcaac

SEQ ID NO: 206361 - DNA, 25 bp, Artificial
  probe
  misc_feature (1)..(25): SEQ ID NO: 6302; WAN024FHD_at; Start 337; Stop 361
aacaaggactatttcgctgccagcg

SEQ ID NO: 206362 - DNA, 25 bp, Artificial
  probe
  misc_feature (1)..(25): SEQ ID NO: 6302; WAN024FHD_at; Start 702; Stop 726
tgaacaaatcaaaacgctgctagag

SEQ ID NO: 206363 - DNA, 25 bp, Artificial
  probe
  misc_feature (1)..(25): SEQ ID NO: 6302; WAN024FHD_at; Start 795; Stop 819
tgtgtctaaggatagcaatatccct

SEQ ID NO: 206364 - DNA, 25 bp, Artificial
  probe
  misc_feature (1)..(25): SEQ ID NO: 6302; WAN024FHD_at; Start 851; Stop 875
ccaaagaaggcgaagaaggcgacag

SEQ ID NO: 206365 - DNA, 25 bp, Artificial
  probe
  misc_feature (1)..(25): SEQ ID NO: 6302; WAN024FHD_at; Start 5; Stop 29
aaaaaatcgcttctgtcctcgccct

SEQ ID NO: 206366 - DNA, 25 bp, Artificial
  probe
  misc_feature (1)..(25): SEQ ID NO: 6302; WAN024FHD_at; Start 262; Stop 286
tacaatgggatcaacctcgaaacgg

SEQ ID NO: 206367 - DNA, 25 bp, Artificial
  probe
  misc_feature (1)..(25): SEQ ID NO: 6302; WAN024FHD_at; Start 778; Stop 802
gagcgtcctatgaaaactgtgtcta

SEQ ID NO: 206368 - DNA, 25 bp, Artificial
  probe
  misc_feature (1)..(25): SEQ ID NO: 6302; WAN024FHD_at; Start 397; Stop 421
caagctggaaaagaagaccctcacg

SEQ ID NO: 206369 - DNA, 25 bp, Artificial
  probe
  misc_feature (1)..(25): SEQ ID NO: 6302; WAN024FHD_at; Start 571; Stop 595
gcattcaataacatcccagcagaga

SEQ ID NO: 206370 - DNA, 25 bp, Artificial
  probe
  misc_feature (1)..(25): SEQ ID NO: 6302; WAN024FHD_at; Start 658; Stop 682
tctgcctatatctgggaaatcaaca

SEQ ID NO: 206371 - DNA, 25 bp, Artificial
  probe
  misc_feature (1)..(25): SEQ ID NO: 6302; WAN024FHD_at; Start 521; Stop 545
tagcagcctacactgaaaaactcag

SEQ ID NO: 206372 - DNA, 25 bp, Artificial
  probe
  misc_feature (1)..(25): SEQ ID NO: 6302; WAN024FHD_at; Start 29; Stop 53
tctttgtggcgctcttgttcggcct

SEQ ID NO: 206373 - DNA, 25 bp, Artificial
  probe
  misc_feature (1)..(25): SEQ ID NO: 6302; WAN024FHD_at; Start 678; Stop 702
caacactgaagtagaagggacacct

SEQ ID NO: 206374 - DNA, 25 bp, Artificial
  probe
  misc_feature (1)..(25): SEQ ID NO: 6302; WAN024FHD_at; Start 444; Stop 468
gattatctacgctaaaaacattgcc

SEQ ID NO: 206375 - DNA, 25 bp, Artificial
  probe
  misc_feature (1)..(25): SEQ ID NO: 6302; WAN024FHD_at; Start 628; Stop 652
aagtacttctccaaagcctacggcg

SEQ ID NO: 206376 - DNA, 25 bp, Artificial
  probe
  misc_feature (1)..(25): SEQ ID NO: 6302; WAN024FHD_at; Start 45; Stop 69
gttcggcctgttggcctgcagcaaa

SEQ ID NO: 206377 - DNA, 25 bp, Artificial
  probe
  misc_feature (1)..(25): SEQ ID NO: 6302; WAN024FHD_at; Start 85; Stop 109
tcctcatccgataaattgaaggtgg

SEQ ID NO: 206378 - DNA, 25 bp, Artificial
  probe
  misc_feature (1)..(25): SEQ ID NO: 6302; WAN024FHD_at; Start 421; Stop 445
gcttggctcaatctcgaaaacggga

SEQ ID NO: 206379 - DNA, 25 bp, Artificial
  probe
  misc_feature (1)..(25): SEQ ID NO: 6302; WAN024FHD_at; Start 172; Stop 196
cacagtattgtacctgtcggtcaag

SEQ ID NO: 206380 - DNA, 25 bp, Artificial
  probe
  misc_feature (1)..(25): SEQ ID NO: 6302; WAN024FHD_at; Start 247; Stop 271
gcagacctgatcttctacaatggga

SEQ ID NO: 206381 - DNA, 25 bp, Artificial
  probe
  misc_feature (1)..(25): SEQ ID NO: 6302; WAN024FHD_at; Start 837; Stop 861
tactgactcgattgccaaagaaggc

SEQ ID NO: 206382 - DNA, 25 bp, Artificial
  probe
  misc_feature (1)..(25): SEQ ID NO: 6302; WAN024FHD_at; Start 584; Stop 608
tcccagcagagaagaagatgatcgt

SEQ ID NO: 206383 - DNA, 25 bp, Artificial
  probe
  misc_feature (1)..(25): SEQ ID NO: 6302; WAN024FHD_at; Start 763; Stop 787
gaatccagtgtcgatgagcgtccta

SEQ ID NO: 206384 - DNA, 25 bp, Artificial
  probe
  misc_feature (1)..(25): SEQ ID NO: 6302; WAN024FHD_at; Start 187; Stop 211
gtcggtcaagatccccacgagtacg

SEQ ID NO: 206385 - DNA, 25 bp, Artificial
  probe
  misc_feature (1)..(25): SEQ ID NO: 6302; WAN024FHD_at; Start 379; Stop 403
tacctggaaggccaaaaccaagctg

SEQ ID NO: 206386 - DNA, 25 bp, Artificial
  probe
  misc_feature (1)..(25): SEQ ID NO: 6302; WAN024FHD_at; Start 132; Stop 156
cgatatcaccaaaaatatcgctggg

SEQ ID NO: 206387 - DNA, 25 bp, Artificial
  probe
  misc_feature (1)..(25): SEQ ID NO: 6302; WAN024FHD_at; Start 61; Stop 85
tgcagcaaaggcacttcttccaagt

SEQ ID NO: 206388 - DNA, 25 bp, Artificial
  probe
  misc_feature (1)..(25): SEQ ID NO: 6302; WAN024FHD_at; Start 746; Stop 770
taccgtccctctttgtcgaatccag

SEQ ID NO: 206389 - DNA, 25 bp, Artificial
  probe
  misc_feature (1)..(25): SEQ ID NO: 6302; WAN024FHD_at; Start 206; Stop 230
agtacgaaccgctcccagaagatgt

SEQ ID NO: 206390 - DNA, 25 bp, Artificial
  probe
  misc_feature (1)..(25): SEQ ID NO: 6302; WAN024FHD_at; Start 542; Stop 566
tcagcaagctagaccaagaagccaa

SEQ ID NO: 206391 - DNA, 25 bp, Artificial
  probe
  misc_feature (1)..(25): SEQ ID NO: 6302; WAN024FHD_at; Start 356; Stop 380
ccagcgatggcgtagaggtcatcta

SEQ ID NO: 206392 - DNA, 25 bp, Artificial
  probe
  misc_feature (1)..(25): SEQ ID NO: 6302; WAN024FHD_at; Start 157; Stop 181
gataaaatcgagctccacagtattg

SEQ ID NO: 206393 - DNA, 25 bp, Artificial
  probe
  misc_feature (1)..(25): SEQ ID NO: 6302; WAN024FHD_at; Start 717; Stop 741
gctgctagagaaattgcgtcaaacc

SEQ ID NO: 206394 - DNA, 25 bp, Artificial
  probe
  misc_feature (1)..(25): SEQ ID NO: 6302; WAN024FHD_at; Start 904; Stop 928
gagaaaatcgcagaaggtttgaaca

SEQ ID NO: 206395 - DNA, 25 bp, Artificial
  probe
  misc_feature (1)..(25): SEQ ID NO: 6588; WAN024FHE_at; Start 10; Stop 34
cgttttttctatgcccatatttccg

SEQ ID NO: 206396 - DNA, 25 bp, Artificial
  probe
  misc_feature (1)..(25): SEQ ID NO: 6588; WAN024FHE_at; Start 47; Stop 71
gaaaattccgactgtttcagctaaa

SEQ ID NO: 206397 - DNA, 25 bp, Artificial
  probe
  misc_feature (1)..(25): SEQ ID NO: 6588; WAN024FHE_at; Start 33; Stop 57
cggtcaaatcattggaaaattccga

SEQ ID NO: 206398 - DNA, 25 bp, Artificial
  probe
  misc_feature (1)..(25): SEQ ID NO: 6588; WAN024FHE_at; Start 31; Stop 55
tccggtcaaatcattggaaaattcc

SEQ ID NO: 206399 - DNA, 25 bp, Artificial
  probe
  misc_feature (1)..(25): SEQ ID NO: 6588; WAN024FHE_at; Start 23; Stop 47
cccatatttccggtcaaatcattgg

SEQ ID NO: 206400 - DNA, 25 bp, Artificial
  probe
  misc_feature (1)..(25): SEQ ID NO: 6588; WAN024FHE_at; Start 8; Stop 32
ggcgttttttctatgcccatatttc

SEQ ID NO: 206401 - DNA, 25 bp, Artificial
  probe
  misc_feature (1)..(25): SEQ ID NO: 6588; WAN024FHE_at; Start 34; Stop 58
ggtcaaatcattggaaaattccgac

SEQ ID NO: 206402 - DNA, 25 bp, Artificial
  probe
  misc_feature (1)..(25): SEQ ID NO: 6588; WAN024FHE_at; Start 44; Stop 68
ttggaaaattccgactgtttcagct

SEQ ID NO: 206403 - DNA, 25 bp, Artificial
  probe
  misc_feature (1)..(25): SEQ ID NO: 6588; WAN024FHE_at; Start 1; Stop 25
atgagctggcgttttttctatgccc

SEQ ID NO: 206404 - DNA, 25 bp, Artificial
  probe
  misc_feature (1)..(25): SEQ ID NO: 6588; WAN024FHE_at; Start 52; Stop 76
ttccgactgtttcagctaaaatgga

SEQ ID NO: 206405 - DNA, 25 bp, Artificial
  probe
  misc_feature (1)..(25): SEQ ID NO: 6588; WAN024FHE_at; Start 56; Stop 80
gactgtttcagctaaaatggaagaa

SEQ ID NO: 206406 - DNA, 25 bp, Artificial
  probe
  misc_feature (1)..(25): SEQ ID NO: 6588; WAN024FHE_at; Start 14; Stop 38
ttttctatgcccatatttccggtca

SEQ ID NO: 206407 - DNA, 25 bp, Artificial
  probe
  misc_feature (1)..(25): SEQ ID NO: 6588; WAN024FHE_at; Start 42; Stop 66
cattggaaaattccgactgtttcag

SEQ ID NO: 206408 - DNA, 25 bp, Artificial
  probe
  misc_feature (1)..(25): SEQ ID NO: 6588; WAN024FHE_at; Start 32; Stop 56
ccggtcaaatcattggaaaattccg

SEQ ID NO: 206409 - DNA, 25 bp, Artificial
  probe
  misc_feature (1)..(25): SEQ ID NO: 6588; WAN024FHE_at; Start 3; Stop 27
gagctggcgttttttctatgcccat

SEQ ID NO: 206410 - DNA, 25 bp, Artificial
  probe
  misc_feature (1)..(25): SEQ ID NO: 6588; WAN024FHE_at; Start 58; Stop 82
ctgtttcagctaaaatggaagaaaa

SEQ ID NO: 206411 - DNA, 25 bp, Artificial
  probe
  misc_feature (1)..(25): SEQ ID NO: 6588; WAN024FHE_at; Start 41; Stop 65
tcattggaaaattccgactgtttca

SEQ ID NO: 206412 - DNA, 25 bp, Artificial
  probe
  misc_feature (1)..(25): SEQ ID NO: 6588; WAN024FHE_at; Start 62; Stop 86
ttcagctaaaatggaagaaaaaaga

SEQ ID NO: 206413 - DNA, 25 bp, Artificial
  probe
  misc_feature (1)..(25): SEQ ID NO: 6588; WAN024FHE_at; Start 36; Stop 60
tcaaatcattggaaaattccgactg

SEQ ID NO: 206414 - DNA, 25 bp, Artificial
  probe
  misc_feature (1)..(25): SEQ ID NO: 6588; WAN024FHE_at; Start 5; Stop 29
gctggcgttttttctatgcccatat

SEQ ID NO: 206415 - DNA, 25 bp, Artificial
  probe
  misc_feature (1)..(25): SEQ ID NO: 6588; WAN024FHE_at; Start 2; Stop 26
tgagctggcgttttttctatgccca

SEQ ID NO: 206416 - DNA, 25 bp, Artificial
  probe
  misc_feature (1)..(25): SEQ ID NO: 6588; WAN024FHE_at; Start 17; Stop 41
tctatgcccatatttccggtcaaat

SEQ ID NO: 206417 - DNA, 25 bp, Artificial
  probe
  misc_feature (1)..(25): SEQ ID NO: 6588; WAN024FHE_at; Start 37; Stop 61
caaatcattggaaaattccgactgt

SEQ ID NO: 206418 - DNA, 25 bp, Artificial
  probe
  misc_feature (1)..(25): SEQ ID NO: 6588; WAN024FHE_at; Start 16; Stop 40
ttctatgcccatatttccggtcaaa

SEQ ID NO: 206419 - DNA, 25 bp, Artificial
  probe
  misc_feature (1)..(25): SEQ ID NO: 6588; WAN024FHE_at; Start 4; Stop 28
agctggcgttttttctatgcccata

SEQ ID NO: 206420 - DNA, 25 bp, Artificial
  probe
  misc_feature (1)..(25): SEQ ID NO: 6588; WAN024FHE_at; Start 50; Stop 74
aattccgactgtttcagctaaaatg

SEQ ID NO: 206421 - DNA, 25 bp, Artificial
  probe
  misc_feature (1)..(25): SEQ ID NO: 6588; WAN024FHE_at; Start 19; Stop 43
tatgcccatatttccggtcaaatca

SEQ ID NO: 206422 - DNA, 25 bp, Artificial
  probe
  misc_feature (1)..(25): SEQ ID NO: 6588; WAN024FHE_at; Start 53; Stop 77
tccgactgtttcagctaaaatggaa

SEQ ID NO: 206423 - DNA, 25 bp, Artificial
  probe
  misc_feature (1)..(25): SEQ ID NO: 6588; WAN024FHE_at; Start 46; Stop 70
ggaaaattccgactgtttcagctaa

SEQ ID NO: 206424 - DNA, 25 bp, Artificial
  probe
  misc_feature (1)..(25): SEQ ID NO: 6588; WAN024FHE_at; Start 54; Stop 78
ccgactgtttcagctaaaatggaag

SEQ ID NO: 206425 - DNA, 25 bp, Artificial
  probe
  misc_feature (1)..(25): SEQ ID NO: 6588; WAN024FHE_at; Start 24; Stop 48
ccatatttccggtcaaatcattgga

SEQ ID NO: 206426 - DNA, 25 bp, Artificial
  probe
  misc_feature (1)..(25): SEQ ID NO: 6588; WAN024FHE_at; Start 25; Stop 49
catatttccggtcaaatcattggaa

SEQ ID NO: 206427 - DNA, 25 bp, Artificial
  probe
  misc_feature (1)..(25): SEQ ID NO: 6588; WAN024FHE_at; Start 27; Stop 51
tatttccggtcaaatcattggaaaa

SEQ ID NO: 206428 - DNA, 25 bp, Artificial
  probe
  misc_feature (1)..(25): SEQ ID NO: 6588; WAN024FHE_at; Start 55; Stop 79
cgactgtttcagctaaaatggaaga

SEQ ID NO: 206429 - DNA, 25 bp, Artificial
  probe
  misc_feature (1)..(25): SEQ ID NO: 5684; WAN024FHF_at; Start 145; Stop 169
gctgtagtagctgtcgccttcttta

SEQ ID NO: 206430 - DNA, 25 bp, Artificial
  probe
  misc_feature (1)..(25): SEQ ID NO: 5684; WAN024FHF_at; Start 240; Stop 264
tcattggacggtcatccacacttga

SEQ ID NO: 206431 - DNA, 25 bp, Artificial
  probe
  misc_feature (1)..(25): SEQ ID NO: 5684; WAN024FHF_at; Start 153; Stop 177
agctgtcgccttctttaccttgttc

SEQ ID NO: 206432 - DNA, 25 bp, Artificial
  probe
  misc_feature (1)..(25): SEQ ID NO: 5684; WAN024FHF_at; Start 19; Stop 43
gaattttccaatgatttgaccggaa

SEQ ID NO: 206433 - DNA, 25 bp, Artificial
  probe
  misc_feature (1)..(25): SEQ ID NO: 5684; WAN024FHF_at; Start 173; Stop 197
tgttctgcgatagagtcagtaaaga

SEQ ID NO: 206434 - DNA, 25 bp, Artificial
  probe
  misc_feature (1)..(25): SEQ ID NO: 5684; WAN024FHF_at; Start 3; Stop 27
gtatctgaaacagtcagaattttcc

SEQ ID NO: 206435 - DNA, 25 bp, Artificial
  probe
  misc_feature (1)..(25): SEQ ID NO: 5684; WAN024FHF_at; Start 110; Stop 134
ccttcagcaatcttgtcaaggttgt

SEQ ID NO: 206436 - DNA, 25 bp, Artificial
  probe
  misc_feature (1)..(25): SEQ ID NO: 5684; WAN024FHF_at; Start 160; Stop 184
gccttctttaccttgttctgcgata

SEQ ID NO: 206437 - DNA, 25 bp, Artificial
  probe
  misc_feature (1)..(25): SEQ ID NO: 5684; WAN024FHF_at; Start 218; Stop 242
tttgtgtcttgagaaacagttttca

SEQ ID NO: 206438 - DNA, 25 bp, Artificial
  probe
  misc_feature (1)..(25): SEQ ID NO: 5684; WAN024FHF_at; Start 203; Stop 227
gcgtagattgggatgtttgtgtctt

SEQ ID NO: 206439 - DNA, 25 bp, Artificial
  probe
  misc_feature (1)..(25): SEQ ID NO: 5684; WAN024FHF_at; Start 98; Stop 122
tattttgccaatccttcagcaatct

SEQ ID NO: 206440 - DNA, 25 bp, Artificial
  probe
  misc_feature (1)..(25): SEQ ID NO: 5684; WAN024FHF_at; Start 228; Stop 252
gagaaacagttttcattggacggtc

SEQ ID NO: 206441 - DNA, 25 bp, Artificial
  probe
  misc_feature (1)..(25): SEQ ID NO: 5684; WAN024FHF_at; Start 138; Stop 162
tcatcatgctgtagtagctgtcgcc

SEQ ID NO: 206442 - DNA, 25 bp, Artificial
  probe
  misc_feature (1)..(25): SEQ ID NO: 5684; WAN024FHF_at; Start 106; Stop 130
caatccttcagcaatcttgtcaagg

SEQ ID NO: 206443 - DNA, 25 bp, Artificial
  probe
  misc_feature (1)..(25): SEQ ID NO: 5684; WAN024FHF_at; Start 177; Stop 201
ctgcgatagagtcagtaaagatttg

SEQ ID NO: 206444 - DNA, 25 bp, Artificial
  probe
  misc_feature (1)..(25): SEQ ID NO: 5684; WAN024FHF_at; Start 126; Stop 150
caaggttgtatttcatcatgctgta

SEQ ID NO: 206445 - DNA, 25 bp, Artificial
  probe
  misc_feature (1)..(25): SEQ ID NO: 5684; WAN024FHF_at; Start 142; Stop 166
catgctgtagtagctgtcgccttct

SEQ ID NO: 206446 - DNA, 25 bp, Artificial
  probe
  misc_feature (1)..(25): SEQ ID NO: 5684; WAN024FHF_at; Start 170; Stop 194
ccttgttctgcgatagagtcagtaa

SEQ ID NO: 206447 - DNA, 25 bp, Artificial
  probe
  misc_feature (1)..(25): SEQ ID NO: 5684; WAN024FHF_at; Start 232; Stop 256
aacagttttcattggacggtcatcc

SEQ ID NO: 206448 - DNA, 25 bp, Artificial
  probe
  misc_feature (1)..(25): SEQ ID NO: 5684; WAN024FHF_at; Start 17; Stop 41
cagaattttccaatgatttgaccgg

SEQ ID NO: 206449 - DNA, 25 bp, Artificial
  probe
  misc_feature (1)..(25): SEQ ID NO: 5684; WAN024FHF_at; Start 117; Stop 141
caatcttgtcaaggttgtatttcat

SEQ ID NO: 206450 - DNA, 25 bp, Artificial
  probe
  misc_feature (1)..(25): SEQ ID NO: 5684; WAN024FHF_at; Start 147; Stop 171
tgtagtagctgtcgccttctttacc

SEQ ID NO: 206451 - DNA, 25 bp, Artificial
  probe
  misc_feature (1)..(25): SEQ ID NO: 5684; WAN024FHF_at; Start 104; Stop 128
gccaatccttcagcaatcttgtcaa

SEQ ID NO: 206452 - DNA, 25 bp, Artificial
  probe
  misc_feature (1)..(25): SEQ ID NO: 5684; WAN024FHF_at; Start 150; Stop 174
agtagctgtcgccttctttaccttg

SEQ ID NO: 206453 - DNA, 25 bp, Artificial
  probe
  misc_feature (1)..(25): SEQ ID NO: 5684; WAN024FHF_at; Start 208; Stop 232
gattgggatgtttgtgtcttgagaa

SEQ ID NO: 206454 - DNA, 25 bp, Artificial
  probe
  misc_feature (1)..(25): SEQ ID NO: 5684; WAN024FHF_at; Start 234; Stop 258
cagttttcattggacggtcatccac

SEQ ID NO: 206455 - DNA, 25 bp, Artificial
  probe
  misc_feature (1)..(25): SEQ ID NO: 5684; WAN024FHF_at; Start 164; Stop 188
tctttaccttgttctgcgatagagt

SEQ ID NO: 206456 - DNA, 25 bp, Artificial
  probe
  misc_feature (1)..(25): SEQ ID NO: 5684; WAN024FHF_at; Start 236; Stop 260
gttttcattggacggtcatccacac

SEQ ID NO: 206457 - DNA, 25 bp, Artificial
  probe
  misc_feature (1)..(25): SEQ ID NO: 5684; WAN024FHF_at; Start 141; Stop 165
tcatgctgtagtagctgtcgccttc

SEQ ID NO: 206458 - DNA, 25 bp, Artificial
  probe
  misc_feature (1)..(25): SEQ ID NO: 5684; WAN024FHF_at; Start 230; Stop 254
gaaacagttttcattggacggtcat

SEQ ID NO: 206459 - DNA, 25 bp, Artificial
  probe
  misc_feature (1)..(25): SEQ ID NO: 5684; WAN024FHF_at; Start 167; Stop 191
ttaccttgttctgcgatagagtcag

SEQ ID NO: 206460 - DNA, 25 bp, Artificial
  probe
  misc_feature (1)..(25): SEQ ID NO: 5684; WAN024FHF_at; Start 132; Stop 156
tgtatttcatcatgctgtagtagct

SEQ ID NO: 206461 - DNA, 25 bp, Artificial
  probe
  misc_feature (1)..(25): SEQ ID NO: 5684; WAN024FHF_at; Start 122; Stop 146
ttgtcaaggttgtatttcatcatgc

SEQ ID NO: 206462 - DNA, 25 bp, Artificial
  probe
  misc_feature (1)..(25): SEQ ID NO: 5684; WAN024FHF_at; Start 47; Stop 71
tgggcatagaaaaaacgccagctca

SEQ ID NO: 206463 - DNA, 25 bp, Artificial
  probe
  misc_feature (1)..(25): SEQ ID NO: 2019; WAN024FHG_at; Start 167; Stop 191
ccataggatactccaatcttttttc

SEQ ID NO: 206464 - DNA, 25 bp, Artificial
  probe
  misc_feature (1)..(25): SEQ ID NO: 2019; WAN024FHG_at; Start 56; Stop 80
cagccagagattttttagaaagatc

SEQ ID NO: 206465 - DNA, 25 bp, Artificial
  probe
  misc_feature (1)..(25): SEQ ID NO: 2019; WAN024FHG_at; Start 114; Stop 138
gccgacttgtagttgtttacctgta

SEQ ID NO: 206466 - DNA, 25 bp, Artificial
  probe
  misc_feature (1)..(25): SEQ ID NO: 2019; WAN024FHG_at; Start 96; Stop 120
aaaatcaagcgccttgtcgccgact

SEQ ID NO: 206467 - DNA, 25 bp, Artificial
  probe
  misc_feature (1)..(25): SEQ ID NO: 2019; WAN024FHG_at; Start 137; Stop 161
taaagctcacaggatttccgagaaa

SEQ ID NO: 206468 - DNA, 25 bp, Artificial
  probe
  misc_feature (1)..(25): SEQ ID NO: 2019; WAN024FHG_at; Start 146; Stop 170
caggatttccgagaaaagttaccat

SEQ ID NO: 206469 - DNA, 25 bp, Artificial
  probe
  misc_feature (1)..(25): SEQ ID NO: 2019; WAN024FHG_at; Start 24; Stop 48
gacactcaagacttttttcttgcca

SEQ ID NO: 206470 - DNA, 25 bp, Artificial
  probe
  misc_feature (1)..(25): SEQ ID NO: 2019; WAN024FHG_at; Start 110; Stop 134
tgtcgccgacttgtagttgtttacc

SEQ ID NO: 206471 - DNA, 25 bp, Artificial
  probe
  misc_feature (1)..(25): SEQ ID NO: 2019; WAN024FHG_at; Start 127; Stop 151
tgtttacctgtaaagctcacaggat

SEQ ID NO: 206472 - DNA, 25 bp, Artificial
  probe
  misc_feature (1)..(25): SEQ ID NO: 2019; WAN024FHG_at; Start 154; Stop 178
ccgagaaaagttaccataggatact

SEQ ID NO: 206473 - DNA, 25 bp, Artificial
  probe
  misc_feature (1)..(25): SEQ ID NO: 2019; WAN024FHG_at; Start 15; Stop 39
agaaggaacgacactcaagactttt

SEQ ID NO: 206474 - DNA, 25 bp, Artificial
  probe
  misc_feature (1)..(25): SEQ ID NO: 2019; WAN024FHG_at; Start 4; Stop 28
cctgtatcgatagaaggaacgacac

SEQ ID NO: 206475 - DNA, 25 bp, Artificial
  probe
  misc_feature (1)..(25): SEQ ID NO: 2019; WAN024FHG_at; Start 89; Stop 113
taagagaaaaatcaagcgccttgtc

SEQ ID NO: 206476 - DNA, 25 bp, Artificial
  probe
  misc_feature (1)..(25): SEQ ID NO: 2019; WAN024FHG_at; Start 161; Stop 185
aagttaccataggatactccaatct

SEQ ID NO: 206477 - DNA, 25 bp, Artificial
  probe
  misc_feature (1)..(25): SEQ ID NO: 2019; WAN024FHG_at; Start 2; Stop 26
tgcctgtatcgatagaaggaacgac

SEQ ID NO: 206478 - DNA, 25 bp, Artificial
  probe
  misc_feature (1)..(25): SEQ ID NO: 2019; WAN024FHG_at; Start 41; Stop 65
tcttgccatcaaaatcagccagaga

SEQ ID NO: 206479 - DNA, 25 bp, Artificial
  probe
  misc_feature (1)..(25): SEQ ID NO: 2019; WAN024FHG_at; Start 135; Stop 159
tgtaaagctcacaggatttccgaga

SEQ ID NO: 206480 - DNA, 25 bp, Artificial
  probe
  misc_feature (1)..(25): SEQ ID NO: 2019; WAN024FHG_at; Start 105; Stop 129
cgccttgtcgccgacttgtagttgt

SEQ ID NO: 206481 - DNA, 25 bp, Artificial
  probe
  misc_feature (1)..(25): SEQ ID NO: 2019; WAN024FHG_at; Start 6; Stop 30
tgtatcgatagaaggaacgacactc

SEQ ID NO: 206482 - DNA, 25 bp, Artificial
  probe
  misc_feature (1)..(25): SEQ ID NO: 2019; WAN024FHG_at; Start 101; Stop 125
caagcgccttgtcgccgacttgtag

SEQ ID NO: 206483 - DNA, 25 bp, Artificial
  probe
  misc_feature (1)..(25): SEQ ID NO: 2019; WAN024FHG_at; Start 44; Stop 68
tgccatcaaaatcagccagagattt

SEQ ID NO: 206484 - DNA, 25 bp, Artificial
  probe
  misc_feature (1)..(25): SEQ ID NO: 2019; WAN024FHG_at; Start 124; Stop 148
agttgtttacctgtaaagctcacag

SEQ ID NO: 206485 - DNA, 25 bp, Artificial
  probe
  misc_feature (1)..(25): SEQ ID NO: 2019; WAN024FHG_at; Start 92; Stop 116
gagaaaaatcaagcgccttgtcgcc

SEQ ID NO: 206486 - DNA, 25 bp, Artificial
  probe
  misc_feature (1)..(25): SEQ ID NO: 2019; WAN024FHG_at; Start 131; Stop 155
tacctgtaaagctcacaggatttcc

SEQ ID NO: 206487 - DNA, 25 bp, Artificial
  probe
  misc_feature (1)..(25): SEQ ID NO: 2019; WAN024FHG_at; Start 158; Stop 182
gaaaagttaccataggatactccaa

SEQ ID NO: 206488 - DNA, 25 bp, Artificial
  probe
  misc_feature (1)..(25): SEQ ID NO: 2019; WAN024FHG_at; Start 84; Stop 108
tgtagtaagagaaaaatcaagcgcc

SEQ ID NO: 206489 - DNA, 25 bp, Artificial
  probe
  misc_feature (1)..(25): SEQ ID NO: 2019; WAN024FHG_at; Start 38; Stop 62
ttttcttgccatcaaaatcagccag

SEQ ID NO: 206490 - DNA, 25 bp, Artificial
  probe
  misc_feature (1)..(25): SEQ ID NO: 2019; WAN024FHG_at; Start 86; Stop 110
tagtaagagaaaaatcaagcgcctt

SEQ ID NO: 206491 - DNA, 25 bp, Artificial
  probe
  misc_feature (1)..(25): SEQ ID NO: 2019; WAN024FHG_at; Start 98; Stop 122
aatcaagcgccttgtcgccgacttg

SEQ ID NO: 206492 - DNA, 25 bp, Artificial
  probe
  misc_feature (1)..(25): SEQ ID NO: 2019; WAN024FHG_at; Start 8; Stop 32
tatcgatagaaggaacgacactcaa

SEQ ID NO: 206493 - DNA, 25 bp, Artificial
  probe
  misc_feature (1)..(25): SEQ ID NO: 2019; WAN024FHG_at; Start 173; Stop 197
gatactccaatcttttttcttccat

SEQ ID NO: 206494 - DNA, 25 bp, Artificial
  probe
  misc_feature (1)..(25): SEQ ID NO: 2019; WAN024FHG_at; Start 141; Stop 165
gctcacaggatttccgagaaaagtt

SEQ ID NO: 206495 - DNA, 25 bp, Artificial
  probe
  misc_feature (1)..(25): SEQ ID NO: 2019; WAN024FHG_at; Start 12; Stop 36
gatagaaggaacgacactcaagact

SEQ ID NO: 206496 - DNA, 25 bp, Artificial
  probe
  misc_feature (1)..(25): SEQ ID NO: 2019; WAN024FHG_at; Start 71; Stop 95
tagaaagatctgttgtagtaagaga

SEQ ID NO: 206497 - DNA, 25 bp, Artificial
  probe
  misc_feature (1)..(25): SEQ ID NO: 2199; WAN024FHH_at; Start 60; Stop 84
tacaggtaaacaactacaagtcggc

SEQ ID NO: 206498 - DNA, 25 bp, Artificial
  probe
  misc_feature (1)..(25): SEQ ID NO: 2199; WAN024FHH_at; Start 44; Stop 68
gaaatcctgtgagctttacaggtaa

SEQ ID NO: 206499 - DNA, 25 bp, Artificial
  probe
  misc_feature (1)..(25): SEQ ID NO: 2199; WAN024FHH_at; Start 257; Stop 281
tattgactgtttcaatggacctacc

SEQ ID NO: 206500 - DNA, 25 bp, Artificial
  probe
  misc_feature (1)..(25): SEQ ID NO: 2199; WAN024FHH_at; Start 409; Stop 433
gcagtctttgtcctcgatactgaca

SEQ ID NO: 206501 - DNA, 25 bp, Artificial
  probe
  misc_feature (1)..(25): SEQ ID NO: 2199; WAN024FHH_at; Start 289; Stop 313
caaaaacgttggtgcggtgctgaag

SEQ ID NO: 206502 - DNA, 25 bp, Artificial
  probe
  misc_feature (1)..(25): SEQ ID NO: 2199; WAN024FHH_at; Start 494; Stop 518
caattgcagctgctaaagccctata

SEQ ID NO: 206503 - DNA, 25 bp, Artificial
  probe
  misc_feature (1)..(25): SEQ ID NO: 2199; WAN024FHH_at; Start 370; Stop 394
tatgccctcttgatcaacgaatggc

SEQ ID NO: 206504 - DNA, 25 bp, Artificial
  probe
  misc_feature (1)..(25): SEQ ID NO: 2199; WAN024FHH_at; Start 32; Stop 56
taacttttctcggaaatcctgtgag

SEQ ID NO: 206505 - DNA, 25 bp, Artificial
  probe
  misc_feature (1)..(25): SEQ ID NO: 2199; WAN024FHH_at; Start 183; Stop 207
tatcgatacaggcatctgctcaact

SEQ ID NO: 206506 - DNA, 25 bp, Artificial
  probe
  misc_feature (1)..(25): SEQ ID NO: 2199; WAN024FHH_at; Start 168; Stop 192
gagtgtcgttccttctatcgataca

SEQ ID NO: 206507 - DNA, 25 bp, Artificial
  probe
  misc_feature (1)..(25): SEQ ID NO: 2199; WAN024FHH_at; Start 281; Stop 305
cttttgctcaaaaacgttggtgcgg

SEQ ID NO: 206508 - DNA, 25 bp, Artificial
  probe
  misc_feature (1)..(25): SEQ ID NO: 2199; WAN024FHH_at; Start 338; Stop 362
cagactactttgaccattctttcgg

SEQ ID NO: 206509 - DNA, 25 bp, Artificial
  probe
  misc_feature (1)..(25): SEQ ID NO: 2199; WAN024FHH_at; Start 242; Stop 266
tggacaacacggtcgtattgactgt

SEQ ID NO: 206510 - DNA, 25 bp, Artificial
  probe
  misc_feature (1)..(25): SEQ ID NO: 2199; WAN024FHH_at; Start 269; Stop 293
caatggacctaccttttgctcaaaa

SEQ ID NO: 206511 - DNA, 25 bp, Artificial
  probe
  misc_feature (1)..(25): SEQ ID NO: 2199; WAN024FHH_at; Start 398; Stop 422
tattagcacgcgcagtctttgtcct

SEQ ID NO: 206512 - DNA, 25 bp, Artificial
  probe
  misc_feature (1)..(25): SEQ ID NO: 2199; WAN024FHH_at; Start 365; Stop 389
gcgattatgccctcttgatcaacga

SEQ ID NO: 206513 - DNA, 25 bp, Artificial
  probe
  misc_feature (1)..(25): SEQ ID NO: 2199; WAN024FHH_at; Start 325; Stop 349
gccattatgctttcagactactttg

SEQ ID NO: 206514 - DNA, 25 bp, Artificial
  probe
  misc_feature (1)..(25): SEQ ID NO: 2199; WAN024FHH_at; Start 152; Stop 176
gcaagaaaaaagtcttgagtgtcgt

SEQ ID NO: 206515 - DNA, 25 bp, Artificial
  probe
  misc_feature (1)..(25): SEQ ID NO: 2199; WAN024FHH_at; Start 437; Stop 461
cgattcgctacgttgaatacgtgga

SEQ ID NO: 206516 - DNA, 25 bp, Artificial
  probe
  misc_feature (1)..(25): SEQ ID NO: 2199; WAN024FHH_at; Start 310; Stop 334
gaaggccttgacaatgccattatgc

SEQ ID NO: 206517 - DNA, 25 bp, Artificial
  probe
  misc_feature (1)..(25): SEQ ID NO: 2199; WAN024FHH_at; Start 301; Stop 325
tgcggtgctgaaggccttgacaatg

SEQ ID NO: 206518 - DNA, 25 bp, Artificial
  probe
  misc_feature (1)..(25): SEQ ID NO: 2199; WAN024FHH_at; Start 208; Stop 232
caaacacgtcgttttaatgaagaat

SEQ ID NO: 206519 - DNA, 25 bp, Artificial
  probe
  misc_feature (1)..(25): SEQ ID NO: 2199; WAN024FHH_at; Start 118; Stop 142
gatctttctaaaaaatctctggctg

SEQ ID NO: 206520 - DNA, 25 bp, Artificial
  probe
  misc_feature (1)..(25): SEQ ID NO: 2199; WAN024FHH_at; Start 66; Stop 90
taaacaactacaagtcggcgacaag

SEQ ID NO: 206521 - DNA, 25 bp, Artificial
  probe
  misc_feature (1)..(25): SEQ ID NO: 2199; WAN024FHH_at; Start 194; Stop 218
gcatctgctcaactcaaacacgtcg

SEQ ID NO: 206522 - DNA, 25 bp, Artificial
  probe
  misc_feature (1)..(25): SEQ ID NO: 2199; WAN024FHH_at; Start 235; Stop 259
gctggactggacaacacggtcgtat

SEQ ID NO: 206523 - DNA, 25 bp, Artificial
  probe
  misc_feature (1)..(25): SEQ ID NO: 2199; WAN024FHH_at; Start 19; Stop 43
gagtatcctatggtaacttttctcg

SEQ ID NO: 206524 - DNA, 25 bp, Artificial
  probe
  misc_feature (1)..(25): SEQ ID NO: 2199; WAN024FHH_at; Start 456; Stop 480
cgtggataatatcaattctgagcca

SEQ ID NO: 206525 - DNA, 25 bp, Artificial
  probe
  misc_feature (1)..(25): SEQ ID NO: 2199; WAN024FHH_at; Start 483; Stop 507
cttcgaagccgcaattgcagctgct

SEQ ID NO: 206526 - DNA, 25 bp, Artificial
  probe
  misc_feature (1)..(25): SEQ ID NO: 2199; WAN024FHH_at; Start 103; Stop 127
tctcttactacaacagatctttcta

SEQ ID NO: 206527 - DNA, 25 bp, Artificial
  probe
  misc_feature (1)..(25): SEQ ID NO: 2199; WAN024FHH_at; Start 90; Stop 114
ggcgcttgatttttctcttactaca

SEQ ID NO: 206528 - DNA, 25 bp, Artificial
  probe
  misc_feature (1)..(25): SEQ ID NO: 2199; WAN024FHH_at; Start 76; Stop 100
caagtcggcgacaaggcgcttgatt

SEQ ID NO: 206529 - DNA, 25 bp, Artificial
  probe
  misc_feature (1)..(25): SEQ ID NO: 2199; WAN024FHH_at; Start 469; Stop 493
aattctgagccaaacttcgaagccg

SEQ ID NO: 206530 - DNA, 25 bp, Artificial
  probe
  misc_feature (1)..(25): SEQ ID NO: 2199; WAN024FHH_at; Start 424; Stop 448
gatactgacaatacgattcgctacg

SEQ ID NO: 206531 - DNA, 25 bp, Artificial
  probe
  misc_feature (1)..(25): SEQ ID NO: 4279; WAN024FHI_at; Start 212; Stop 236
tattcgtgtgggtcttgcccaatcg

SEQ ID NO: 206532 - DNA, 25 bp, Artificial
  probe
  misc_feature (1)..(25): SEQ ID NO: 4279; WAN024FHI_at; Start 192; Stop 216
cgtcttcaggaagtggttcgtattc

SEQ ID NO: 206533 - DNA, 25 bp, Artificial
  probe
  misc_feature (1)..(25): SEQ ID NO: 4279; WAN024FHI_at; Start 103; Stop 127
ttctaccaattttgtaaaccaagca

SEQ ID NO: 206534 - DNA, 25 bp, Artificial
  probe
  misc_feature (1)..(25): SEQ ID NO: 4279; WAN024FHI_at; Start 76; Stop 100
gtctttgttttcagttttcttggca

SEQ ID NO: 206535 - DNA, 25 bp, Artificial
  probe
  misc_feature (1)..(25): SEQ ID NO: 4279; WAN024FHI_at; Start 35; Stop 59
tcaaggtagataacatcaacgccgt

SEQ ID NO: 206536 - DNA, 25 bp, Artificial
  probe
  misc_feature (1)..(25): SEQ ID NO: 4279; WAN024FHI_at; Start 225; Stop 249
cttgcccaatcggaacgatactatg

SEQ ID NO: 206537 - DNA, 25 bp, Artificial
  probe
  misc_feature (1)..(25): SEQ ID NO: 4279; WAN024FHI_at; Start 261; Stop 285
tgtcaccagcaatatttttagtaat

SEQ ID NO: 206538 - DNA, 25 bp, Artificial
  probe
  misc_feature (1)..(25): SEQ ID NO: 4279; WAN024FHI_at; Start 252; Stop 276
ggtcaattttgtcaccagcaatatt

SEQ ID NO: 206539 - DNA, 25 bp, Artificial
  probe
  misc_feature (1)..(25): SEQ ID NO: 4279; WAN024FHI_at; Start 140; Stop 164
tcaaggttgataccgttatagaaaa

SEQ ID NO: 206540 - DNA, 25 bp, Artificial
  probe
  misc_feature (1)..(25): SEQ ID NO: 4279; WAN024FHI_at; Start 186; Stop 210
tcttaacgtcttcaggaagtggttc

SEQ ID NO: 206541 - DNA, 25 bp, Artificial
  probe
  misc_feature (1)..(25): SEQ ID NO: 4279; WAN024FHI_at; Start 144; Stop 168
ggttgataccgttatagaaaatcaa

SEQ ID NO: 206542 - DNA, 25 bp, Artificial
  probe
  misc_feature (1)..(25): SEQ ID NO: 4279; WAN024FHI_at; Start 20; Stop 44
ttttcattttgaccttcaaggtaga

SEQ ID NO: 206543 - DNA, 25 bp, Artificial
  probe
  misc_feature (1)..(25): SEQ ID NO: 4279; WAN024FHI_at; Start 56; Stop 80
ccgtcgctgactgcgaagtagtctt

SEQ ID NO: 206544 - DNA, 25 bp, Artificial
  probe
  misc_feature (1)..(25): SEQ ID NO: 4279; WAN024FHI_at; Start 234; Stop 258
tcggaacgatactatgaaggtcaat

SEQ ID NO: 206545 - DNA, 25 bp, Artificial
  probe
  misc_feature (1)..(25): SEQ ID NO: 4279; WAN024FHI_at; Start 172; Stop 196
agcctcagaagttttcttaacgtct

SEQ ID NO: 206546 - DNA, 25 bp, Artificial
  probe
  misc_feature (1)..(25): SEQ ID NO: 4279; WAN024FHI_at; Start 125; Stop 149
gcattgccacctgtttcaaggttga

SEQ ID NO: 206547 - DNA, 25 bp, Artificial
  probe
  misc_feature (1)..(25): SEQ ID NO: 4279; WAN024FHI_at; Start 64; Stop 88
gactgcgaagtagtctttgttttca

SEQ ID NO: 206548 - DNA, 25 bp, Artificial
  probe
  misc_feature (1)..(25): SEQ ID NO: 4279; WAN024FHI_at; Start 130; Stop 154
gccacctgtttcaaggttgataccg

SEQ ID NO: 206549 - DNA, 25 bp, Artificial
  probe
  misc_feature (1)..(25): SEQ ID NO: 4279; WAN024FHI_at; Start 249; Stop 273
gaaggtcaattttgtcaccagcaat

SEQ ID NO: 206550 - DNA, 25 bp, Artificial
  probe
  misc_feature (1)..(25): SEQ ID NO: 4279; WAN024FHI_at; Start 40; Stop 64
gtagataacatcaacgccgtcgctg

SEQ ID NO: 206551 - DNA, 25 bp, Artificial
  probe
  misc_feature (1)..(25): SEQ ID NO: 4279; WAN024FHI_at; Start 220; Stop 244
tgggtcttgcccaatcggaacgata

SEQ ID NO: 206552 - DNA, 25 bp, Artificial
  probe
  misc_feature (1)..(25): SEQ ID NO: 4279; WAN024FHI_at; Start 113; Stop 137
tttgtaaaccaagcattgccacctg

SEQ ID NO: 206553 - DNA, 25 bp, Artificial
  probe
  misc_feature (1)..(25): SEQ ID NO: 4279; WAN024FHI_at; Start 121; Stop 145
ccaagcattgccacctgtttcaagg

SEQ ID NO: 206554 - DNA, 25 bp, Artificial
  probe
  misc_feature (1)..(25): SEQ ID NO: 4279; WAN024FHI_at; Start 197; Stop 221
tcaggaagtggttcgtattcgtgtg

SEQ ID NO: 206555 - DNA, 25 bp, Artificial
  probe
  misc_feature (1)..(25): SEQ ID NO: 4279; WAN024FHI_at; Start 207; Stop 231
gttcgtattcgtgtgggtcttgccc

SEQ ID NO: 206556 - DNA, 25 bp, Artificial
  probe
  misc_feature (1)..(25): SEQ ID NO: 4279; WAN024FHI_at; Start 177; Stop 201
cagaagttttcttaacgtcttcagg

SEQ ID NO: 206557 - DNA, 25 bp, Artificial
  probe
  misc_feature (1)..(25): SEQ ID NO: 4279; WAN024FHI_at; Start 59; Stop 83
tcgctgactgcgaagtagtctttgt

SEQ ID NO: 206558 - DNA, 25 bp, Artificial
  probe
  misc_feature (1)..(25): SEQ ID NO: 4279; WAN024FHI_at; Start 231; Stop 255
caatcggaacgatactatgaaggtc

SEQ ID NO: 206559 - DNA, 25 bp, Artificial
  probe
  misc_feature (1)..(25): SEQ ID NO: 4279; WAN024FHI_at; Start 276; Stop 300
ttttagtaatatcagcgatgattga

SEQ ID NO: 206560 - DNA, 25 bp, Artificial
  probe
  misc_feature (1)..(25): SEQ ID NO: 4279; WAN024FHI_at; Start 51; Stop 75
caacgccgtcgctgactgcgaagta

SEQ ID NO: 206561 - DNA, 25 bp, Artificial
  probe
  misc_feature (1)..(25): SEQ ID NO: 4279; WAN024FHI_at; Start 47; Stop 71
acatcaacgccgtcgctgactgcga

SEQ ID NO: 206562 - DNA, 25 bp, Artificial
  probe
  misc_feature (1)..(25): SEQ ID NO: 4279; WAN024FHI_at; Start 246; Stop 270
tatgaaggtcaattttgtcaccagc

SEQ ID NO: 206563 - DNA, 25 bp, Artificial
  probe
  misc_feature (1)..(25): SEQ ID NO: 4279; WAN024FHI_at; Start 30; Stop 54
gaccttcaaggtagataacatcaac

SEQ ID NO: 206564 - DNA, 25 bp, Artificial
  probe
  misc_feature (1)..(25): SEQ ID NO: 4279; WAN024FHI_at; Start 85; Stop 109
ttcagttttcttggcattttctacc

SEQ ID NO: 206565 - DNA, 25 bp, Artificial
  probe
  misc_feature (1)..(25): SEQ ID NO: 4102; WAN024FHJ_at; Start 225; Stop 249
gacaaagttttccaagatagcatcc

SEQ ID NO: 206566 - DNA, 25 bp, Artificial
  probe
  misc_feature (1)..(25): SEQ ID NO: 4102; WAN024FHJ_at; Start 197; Stop 221
caaaatcacgaactaggcggtggta

SEQ ID NO: 206567 - DNA, 25 bp, Artificial
  probe
  misc_feature (1)..(25): SEQ ID NO: 4102; WAN024FHJ_at; Start 235; Stop 259
tccaagatagcatcctcaggcactt

SEQ ID NO: 206568 - DNA, 25 bp, Artificial
  probe
  misc_feature (1)..(25): SEQ ID NO: 4102; WAN024FHJ_at; Start 169; Stop 193
ggtgtgataccgtcagcttctctct

SEQ ID NO: 206569 - DNA, 25 bp, Artificial
  probe
  misc_feature (1)..(25): SEQ ID NO: 4102; WAN024FHJ_at; Start 313; Stop 337
tggtctaaatcaacaaaacctcctg

SEQ ID NO: 206570 - DNA, 25 bp, Artificial
  probe
  misc_feature (1)..(25): SEQ ID NO: 4102; WAN024FHJ_at; Start 134; Stop 158
ccaattcttggaattctttaaggag

SEQ ID NO: 206571 - DNA, 25 bp, Artificial
  probe
  misc_feature (1)..(25): SEQ ID NO: 4102; WAN024FHJ_at; Start 51; Stop 75
tggcgatacaccaaaaggaaggaag

SEQ ID NO: 206572 - DNA, 25 bp, Artificial
  probe
  misc_feature (1)..(25): SEQ ID NO: 4102; WAN024FHJ_at; Start 10; Stop 34
gcgctagcccatagaacattgattc

SEQ ID NO: 206573 - DNA, 25 bp, Artificial
  probe
  misc_feature (1)..(25): SEQ ID NO: 4102; WAN024FHJ_at; Start 304; Stop 328
tcaatttcctggtctaaatcaacaa

SEQ ID NO: 206574 - DNA, 25 bp, Artificial
  probe
  misc_feature (1)..(25): SEQ ID NO: 4102; WAN024FHJ_at; Start 23; Stop 47
gaacattgattctagcatccataaa

SEQ ID NO: 206575 - DNA, 25 bp, Artificial
  probe
  misc_feature (1)..(25): SEQ ID NO: 4102; WAN024FHJ_at; Start 294; Stop 318
catcaggtcttcaatttcctggtct

SEQ ID NO: 206576 - DNA, 25 bp, Artificial
  probe
  misc_feature (1)..(25): SEQ ID NO: 4102; WAN024FHJ_at; Start 44; Stop 68
taaagtctggcgatacaccaaaagg

SEQ ID NO: 206577 - DNA, 25 bp, Artificial
  probe
  misc_feature (1)..(25): SEQ ID NO: 4102; WAN024FHJ_at; Start 35; Stop 59
tagcatccataaagtctggcgatac

SEQ ID NO: 206578 - DNA, 25 bp, Artificial
  probe
  misc_feature (1)..(25): SEQ ID NO: 4102; WAN024FHJ_at; Start 84; Stop 108
tcctgcaagctcaaactctgctagt

SEQ ID NO: 206579 - DNA, 25 bp, Artificial
  probe
  misc_feature (1)..(25): SEQ ID NO: 4102; WAN024FHJ_at; Start 240; Stop 264
gatagcatcctcaggcacttcttca

SEQ ID NO: 206580 - DNA, 25 bp, Artificial
  probe
  misc_feature (1)..(25): SEQ ID NO: 4102; WAN024FHJ_at; Start 30; Stop 54
gattctagcatccataaagtctggc

SEQ ID NO: 206581 - DNA, 25 bp, Artificial
  probe
  misc_feature (1)..(25): SEQ ID NO: 4102; WAN024FHJ_at; Start 191; Stop 215
tcttgtcaaaatcacgaactaggcg

SEQ ID NO: 206582 - DNA, 25 bp, Artificial
  probe
  misc_feature (1)..(25): SEQ ID NO: 4102; WAN024FHJ_at; Start 103; Stop 127
gctagtttagctgtaaaatccgcaa

SEQ ID NO: 206583 - DNA, 25 bp, Artificial
  probe
  misc_feature (1)..(25): SEQ ID NO: 4102; WAN024FHJ_at; Start 205; Stop 229
cgaactaggcggtggtatttgacaa

SEQ ID NO: 206584 - DNA, 25 bp, Artificial
  probe
  misc_feature (1)..(25): SEQ ID NO: 4102; WAN024FHJ_at; Start 7; Stop 31
ggagcgctagcccatagaacattga

SEQ ID NO: 206585 - DNA, 25 bp, Artificial
  probe
  misc_feature (1)..(25): SEQ ID NO: 4102; WAN024FHJ_at; Start 209; Stop 233
ctaggcggtggtatttgacaaagtt

SEQ ID NO: 206586 - DNA, 25 bp, Artificial
  probe
  misc_feature (1)..(25): SEQ ID NO: 4102; WAN024FHJ_at; Start 95; Stop 119
caaactctgctagtttagctgtaaa

SEQ ID NO: 206587 - DNA, 25 bp, Artificial
  probe
  misc_feature (1)..(25): SEQ ID NO: 4102; WAN024FHJ_at; Start 106; Stop 130
agtttagctgtaaaatccgcaaaag

SEQ ID NO: 206588 - DNA, 25 bp, Artificial
  probe
  misc_feature (1)..(25): SEQ ID NO: 4102; WAN024FHJ_at; Start 230; Stop 254
agttttccaagatagcatcctcagg

SEQ ID NO: 206589 - DNA, 25 bp, Artificial
  probe
  misc_feature (1)..(25): SEQ ID NO: 4102; WAN024FHJ_at; Start 318; Stop 342
taaatcaacaaaacctcctgtttga

SEQ ID NO: 206590 - DNA, 25 bp, Artificial
  probe
  misc_feature (1)..(25): SEQ ID NO: 4102; WAN024FHJ_at; Start 148; Stop 172
tctttaaggagtggtaagacaggtg

SEQ ID NO: 206591 - DNA, 25 bp, Artificial
  probe
  misc_feature (1)..(25): SEQ ID NO: 4102; WAN024FHJ_at; Start 72; Stop 96
gaagtttggttttcctgcaagctca

SEQ ID NO: 206592 - DNA, 25 bp, Artificial
  probe
  misc_feature (1)..(25): SEQ ID NO: 4102; WAN024FHJ_at; Start 268; Stop 292
gctaaccacttgtctgttgtcgcca

SEQ ID NO: 206593 - DNA, 25 bp, Artificial
  probe
  misc_feature (1)..(25): SEQ ID NO: 4102; WAN024FHJ_at; Start 176; Stop 200
taccgtcagcttctctcttgtcaaa

SEQ ID NO: 206594 - DNA, 25 bp, Artificial
  probe
  misc_feature (1)..(25): SEQ ID NO: 4102; WAN024FHJ_at; Start 79; Stop 103
ggttttcctgcaagctcaaactctg

SEQ ID NO: 206595 - DNA, 25 bp, Artificial
  probe
  misc_feature (1)..(25): SEQ ID NO: 4102; WAN024FHJ_at; Start 259; Stop 283
tcttcacctgctaaccacttgtctg

SEQ ID NO: 206596 - DNA, 25 bp, Artificial
  probe
  misc_feature (1)..(25): SEQ ID NO: 4102; WAN024FHJ_at; Start 49; Stop 73
tctggcgatacaccaaaaggaagga

SEQ ID NO: 206597 - DNA, 25 bp, Artificial
  probe
  misc_feature (1)..(25): SEQ ID NO: 4102; WAN024FHJ_at; Start 162; Stop 186
taagacaggtgtgataccgtcagct

SEQ ID NO: 206598 - DNA, 25 bp, Artificial
  probe
  misc_feature (1)..(25): SEQ ID NO: 4102; WAN024FHJ_at; Start 2; Stop 26
tgcttggagcgctagcccatagaac

SEQ ID NO: 206599 - DNA, 25 bp, Artificial
  probe
  misc_feature (1)..(25): SEQ ID NO: 5323; WAN024FHK_at; Start 1273; Stop 1297
gctctagcctttgcgcgtgtggaaa

SEQ ID NO: 206600 - DNA, 25 bp, Artificial
  probe
  misc_feature (1)..(25): SEQ ID NO: 5323; WAN024FHK_at; Start 1623; Stop 1647
tggacaggattcttatggagcaacc

SEQ ID NO: 206601 - DNA, 25 bp, Artificial
  probe
  misc_feature (1)..(25): SEQ ID NO: 5323; WAN024FHK_at; Start 1392; Stop 1416
gaacctgattgtctttccagcggcc

SEQ ID NO: 206602 - DNA, 25 bp, Artificial
  probe
  misc_feature (1)..(25): SEQ ID NO: 5323; WAN024FHK_at; Start 1217; Stop 1241
tgcctgcacgttacaaggataaggt

SEQ ID NO: 206603 - DNA, 25 bp, Artificial
  probe
  misc_feature (1)..(25): SEQ ID NO: 5323; WAN024FHK_at; Start 1673; Stop 1697
aaaacgtggctgacttgggaggaat

SEQ ID NO: 206604 - DNA, 25 bp, Artificial
  probe
  misc_feature (1)..(25): SEQ ID NO: 5323; WAN024FHK_at; Start 553; Stop 577
gaaagcagcgcaaatctcctcaagg

SEQ ID NO: 206605 - DNA, 25 bp, Artificial
  probe
  misc_feature (1)..(25): SEQ ID NO: 5323; WAN024FHK_at; Start 1557; Stop 1581
ttggtggacagagagcgactatgct

SEQ ID NO: 206606 - DNA, 25 bp, Artificial
  probe
  misc_feature (1)..(25): SEQ ID NO: 5323; WAN024FHK_at; Start 619; Stop 643
aaaagacttgaattggaccgccgag

SEQ ID NO: 206607 - DNA, 25 bp, Artificial
  probe
  misc_feature (1)..(25): SEQ ID NO: 5323; WAN024FHK_at; Start 505; Stop 529
tatgcagaagaacatcctcagcgcg

SEQ ID NO: 206608 - DNA, 25 bp, Artificial
  probe
  misc_feature (1)..(25): SEQ ID NO: 5323; WAN024FHK_at; Start 1693; Stop 1717
ggaatcgcagcagcgcttgaagcag

SEQ ID NO: 206609 - DNA, 25 bp, Artificial
  probe
  misc_feature (1)..(25): SEQ ID NO: 5323; WAN024FHK_at; Start 1805; Stop 1829
aacttttggctagcgtcgatgtgca

SEQ ID NO: 206610 - DNA, 25 bp, Artificial
  probe
  misc_feature (1)..(25): SEQ ID NO: 5323; WAN024FHK_at; Start 1303; Stop 1327
cacagttggagtaagtggaaccagc

SEQ ID NO: 206611 - DNA, 25 bp, Artificial
  probe
  misc_feature (1)..(25): SEQ ID NO: 5323; WAN024FHK_at; Start 1570; Stop 1594
agcgactatgctgccttcaaggaga

SEQ ID NO: 206612 - DNA, 25 bp, Artificial
  probe
  misc_feature (1)..(25): SEQ ID NO: 5323; WAN024FHK_at; Start 715; Stop 739
gatttcaagaaattcgcgcctgccc

SEQ ID NO: 206613 - DNA, 25 bp, Artificial
  probe
  misc_feature (1)..(25): SEQ ID NO: 5323; WAN024FHK_at; Start 489; Stop 513
gccagatacgacctactatgcagaa

SEQ ID NO: 206614 - DNA, 25 bp, Artificial
  probe
  misc_feature (1)..(25): SEQ ID NO: 5323; WAN024FHK_at; Start 1050; Stop 1074
gaagttctctccagaagccaaggcg

SEQ ID NO: 206615 - DNA, 25 bp, Artificial
  probe
  misc_feature (1)..(25): SEQ ID NO: 5323; WAN024FHK_at; Start 1202; Stop 1226
gctatccagaagaattgcctgcacg

SEQ ID NO: 206616 - DNA, 25 bp, Artificial
  probe
  misc_feature (1)..(25): SEQ ID NO: 5323; WAN024FHK_at; Start 191; Stop 215
tggcgacaacagacaagtggttagc

SEQ ID NO: 206617 - DNA, 25 bp, Artificial
  probe
  misc_feature (1)..(25): SEQ ID NO: 5323; WAN024FHK_at; Start 801; Stop 825
cgaggaacgtttctggcaagcagca

SEQ ID NO: 206618 - DNA, 25 bp, Artificial
  probe
  misc_feature (1)..(25): SEQ ID NO: 5323; WAN024FHK_at; Start 1451; Stop 1475
catcttctgctaactacggtggtat

SEQ ID NO: 206619 - DNA, 25 bp, Artificial
  probe
  misc_feature (1)..(25): SEQ ID NO: 5323; WAN024FHK_at; Start 452; Stop 476
tcaatgttctatgggctagcgctcc

SEQ ID NO: 206620 - DNA, 25 bp, Artificial
  probe
  misc_feature (1)..(25): SEQ ID NO: 5323; WAN024FHK_at; Start 1122; Stop 1146
tctgcttaagaatgactggctcact

SEQ ID NO: 206621 - DNA, 25 bp, Artificial
  probe
  misc_feature (1)..(25): SEQ ID NO: 5323; WAN024FHK_at; Start 1837; Stop 1861
gccaaactccgtgtcaatgtgcaag

SEQ ID NO: 206622 - DNA, 25 bp, Artificial
  probe
  misc_feature (1)..(25): SEQ ID NO: 5323; WAN024FHK_at; Start 95; Stop 119
tcaatggagaatggcaacagacagc

SEQ ID NO: 206623 - DNA, 25 bp, Artificial
  probe
  misc_feature (1)..(25): SEQ ID NO: 5323; WAN024FHK_at; Start 293; Stop 317
gagaagctgacggtatcacacctgt

SEQ ID NO: 206624 - DNA, 25 bp, Artificial
  probe
  misc_feature (1)..(25): SEQ ID NO: 5323; WAN024FHK_at; Start 1756; Stop 1780
tacaacttcggtcgcatctggcgca

SEQ ID NO: 206625 - DNA, 25 bp, Artificial
  probe
  misc_feature (1)..(25): SEQ ID NO: 5323; WAN024FHK_at; Start 1347; Stop 1371
gggcatgcctgctcatatggtcaat

SEQ ID NO: 206626 - DNA, 25 bp, Artificial
  probe
  misc_feature (1)..(25): SEQ ID NO: 5323; WAN024FHK_at; Start 1034; Stop 1058
tttggtacgcccgtgagaagttctc

SEQ ID NO: 206627 - DNA, 25 bp, Artificial
  probe
  misc_feature (1)..(25): SEQ ID NO: 5323; WAN024FHK_at; Start 1528; Stop 1552
tcctttgacgaaaatggtagcctca

SEQ ID NO: 206628 - DNA, 25 bp, Artificial
  probe
  misc_feature (1)..(25): SEQ ID NO: 5323; WAN024FHK_at; Start 1914; Stop 1938
aatgtggcgttcaccagaggagcgc

SEQ ID NO: 206629 - DNA, 25 bp, Artificial
  probe
  misc_feature (1)..(25): SEQ ID NO: 5323; WAN024FHK_at; Start 942; Stop 966
cagccgtgccctttctggagttcca

SEQ ID NO: 206630 - DNA, 25 bp, Artificial
  probe
  misc_feature (1)..(25): SEQ ID NO: 5323; WAN024FHK_at; Start 255; Stop 279
tgtcaaataccaccgcctagttcgt

SEQ ID NO: 206631 - DNA, 25 bp, Artificial
  probe
  misc_feature (1)..(25): SEQ ID NO: 5323; WAN024FHK_at; Start 1481; Stop 1505
cagtgattgcccatgaaatttccca

SEQ ID NO: 206632 - DNA, 25 bp, Artificial
  probe
  misc_feature (1)..(25): SEQ ID NO: 5323; WAN024FHK_at; Start 387; Stop 411
tgagcttgcaggaaaaccaaacttc

SEQ ID NO: 206633 - DNA, 25 bp, Artificial
  probe
  misc_feature (1)..(25): SEQ ID NO: 7675; WAN024FHL_at; Start 46; Stop 70
cctcattgccaatgcattcaaagca

SEQ ID NO: 206634 - DNA, 25 bp, Artificial
  probe
  misc_feature (1)..(25): SEQ ID NO: 7675; WAN024FHL_at; Start 124; Stop 148
catcttgccctcatatccgatatag

SEQ ID NO: 206635 - DNA, 25 bp, Artificial
  probe
  misc_feature (1)..(25): SEQ ID NO: 7675; WAN024FHL_at; Start 19; Stop 43
tgtaaatcaaccaaaagccccactg

SEQ ID NO: 206636 - DNA, 25 bp, Artificial
  probe
  misc_feature (1)..(25): SEQ ID NO: 7675; WAN024FHL_at; Start 273; Stop 297
tataaatgaggaaggtgacgggata

SEQ ID NO: 206637 - DNA, 25 bp, Artificial
  probe
  misc_feature (1)..(25): SEQ ID NO: 7675; WAN024FHL_at; Start 321; Stop 345
caaggatataatcaatagcaccgga

SEQ ID NO: 206638 - DNA, 25 bp, Artificial
  probe
  misc_feature (1)..(25): SEQ ID NO: 7675; WAN024FHL_at; Start 306; Stop 330
tggccgccttatttccaaggatata

SEQ ID NO: 206639 - DNA, 25 bp, Artificial
  probe
  misc_feature (1)..(25): SEQ ID NO: 7675; WAN024FHL_at; Start 60; Stop 84
cattcaaagcattggcaatgaggga

SEQ ID NO: 206640 - DNA, 25 bp, Artificial
  probe
  misc_feature (1)..(25): SEQ ID NO: 7675; WAN024FHL_at; Start 217; Stop 241
gctcatttggttgggtctgccttct

SEQ ID NO: 206641 - DNA, 25 bp, Artificial
  probe
  misc_feature (1)..(25): SEQ ID NO: 7675; WAN024FHL_at; Start 21; Stop 45
taaatcaaccaaaagccccactgtc

SEQ ID NO: 206642 - DNA, 25 bp, Artificial
  probe
  misc_feature (1)..(25): SEQ ID NO: 7675; WAN024FHL_at; Start 329; Stop 353
taatcaatagcaccggacaaaatgg

SEQ ID NO: 206643 - DNA, 25 bp, Artificial
  probe
  misc_feature (1)..(25): SEQ ID NO: 7675; WAN024FHL_at; Start 231; Stop 255
gtctgccttcttgcgaagctttcca

SEQ ID NO: 206644 - DNA, 25 bp, Artificial
  probe
  misc_feature (1)..(25): SEQ ID NO: 7675; WAN024FHL_at; Start 245; Stop 269
gaagctttccatttctttatagcaa

SEQ ID NO: 206645 - DNA, 25 bp, Artificial
  probe
  misc_feature (1)..(25): SEQ ID NO: 7675; WAN024FHL_at; Start 223; Stop 247
ttggttgggtctgccttcttgcgaa

SEQ ID NO: 206646 - DNA, 25 bp, Artificial
  probe
  misc_feature (1)..(25): SEQ ID NO: 7675; WAN024FHL_at; Start 90; Stop 114
caaaggcaatagttgttacgtaggc

SEQ ID NO: 206647 - DNA, 25 bp, Artificial
  probe
  misc_feature (1)..(25): SEQ ID NO: 7675; WAN024FHL_at; Start 207; Stop 231
cctgtttttggctcatttggttggg

SEQ ID NO: 206648 - DNA, 25 bp, Artificial
  probe
  misc_feature (1)..(25): SEQ ID NO: 7675; WAN024FHL_at; Start 178; Stop 202
gatggaaatgatgatggccgccaat

SEQ ID NO: 206649 - DNA, 25 bp, Artificial
  probe
  misc_feature (1)..(25): SEQ ID NO: 7675; WAN024FHL_at; Start 174; Stop 198
cgatgatggaaatgatgatggccgc

SEQ ID NO: 206650 - DNA, 25 bp, Artificial
  probe
  misc_feature (1)..(25): SEQ ID NO: 7675; WAN024FHL_at; Start 189; Stop 213
tgatggccgccaattttacctgttt

SEQ ID NO: 206651 - DNA, 25 bp, Artificial
  probe
  misc_feature (1)..(25): SEQ ID NO: 7675; WAN024FHL_at; Start 338; Stop 362
gcaccggacaaaatggtattaacaa

SEQ ID NO: 206652 - DNA, 25 bp, Artificial
  probe
  misc_feature (1)..(25): SEQ ID NO: 7675; WAN024FHL_at; Start 156; Stop 180
caaaggcaaagaggaaggcgatgat

SEQ ID NO: 206653 - DNA, 25 bp, Artificial
  probe
  misc_feature (1)..(25): SEQ ID NO: 7675; WAN024FHL_at; Start 2; Stop 26
tgtcagctgaacgaaattgtaaatc

SEQ ID NO: 206654 - DNA, 25 bp, Artificial
  probe
  misc_feature (1)..(25): SEQ ID NO: 7675; WAN024FHL_at; Start 135; Stop 159
catatccgatatagttggtcacaaa

SEQ ID NO: 206655 - DNA, 25 bp, Artificial
  probe
  misc_feature (1)..(25): SEQ ID NO: 7675; WAN024FHL_at; Start 141; Stop 165
cgatatagttggtcacaaaggcaaa

SEQ ID NO: 206656 - DNA, 25 bp, Artificial
  probe
  misc_feature (1)..(25): SEQ ID NO: 7675; WAN024FHL_at; Start 75; Stop 99
caatgagggacagtgcaaaggcaat

SEQ ID NO: 206657 - DNA, 25 bp, Artificial
  probe
  misc_feature (1)..(25): SEQ ID NO: 7675; WAN024FHL_at; Start 81; Stop 105
gggacagtgcaaaggcaatagttgt

SEQ ID NO: 206658 - DNA, 25 bp, Artificial
  probe
  misc_feature (1)..(25): SEQ ID NO: 7675; WAN024FHL_at; Start 291; Stop 315
cgggataggtaatgatggccgcctt

SEQ ID NO: 206659 - DNA, 25 bp, Artificial
  probe
  misc_feature (1)..(25): SEQ ID NO: 7675; WAN024FHL_at; Start 301; Stop 325
aatgatggccgccttatttccaagg

SEQ ID NO: 206660 - DNA, 25 bp, Artificial
  probe
  misc_feature (1)..(25): SEQ ID NO: 7675; WAN024FHL_at; Start 95; Stop 119
gcaatagttgttacgtaggcaagga

SEQ ID NO: 206661 - DNA, 25 bp, Artificial
  probe
  misc_feature (1)..(25): SEQ ID NO: 7675; WAN024FHL_at; Start 333; Stop 357
caatagcaccggacaaaatggtatt

SEQ ID NO: 206662 - DNA, 25 bp, Artificial
  probe
  misc_feature (1)..(25): SEQ ID NO: 7675; WAN024FHL_at; Start 118; Stop 142
gagattcatcttgccctcatatccg

SEQ ID NO: 206663 - DNA, 25 bp, Artificial
  probe
  misc_feature (1)..(25): SEQ ID NO: 7675; WAN024FHL_at; Start 103; Stop 127
tgttacgtaggcaaggagattcatc

SEQ ID NO: 206664 - DNA, 25 bp, Artificial
  probe
  misc_feature (1)..(25): SEQ ID NO: 7675; WAN024FHL_at; Start 106; Stop 130
tacgtaggcaaggagattcatcttg

SEQ ID NO: 206665 - DNA, 25 bp, Artificial
  probe
  misc_feature (1)..(25): SEQ ID NO: 7675; WAN024FHL_at; Start 69; Stop 93
cattggcaatgagggacagtgcaaa

SEQ ID NO: 206666 - DNA, 25 bp, Artificial
  probe
  misc_feature (1)..(25): SEQ ID NO: 7675; WAN024FHL_at; Start 253; Stop 277
ccatttctttatagcaaaggtataa

SEQ ID NO: 206667 - DNA, 25 bp, Artificial
  probe
  misc_feature (1)..(25): SEQ ID NO: 3066; WAN024FHM_at; Start 76; Stop 100
ggtgctattgattatatccttggaa

SEQ ID NO: 206668 - DNA, 25 bp, Artificial
  probe
  misc_feature (1)..(25): SEQ ID NO: 3066; WAN024FHM_at; Start 294; Stop 318
gaatctccttgcctacgtaacaact

SEQ ID NO: 206669 - DNA, 25 bp, Artificial
  probe
  misc_feature (1)..(25): SEQ ID NO: 3066; WAN024FHM_at; Start 336; Stop 360
cctcattgccaatgctttgaatgca

SEQ ID NO: 206670 - DNA, 25 bp, Artificial
  probe
  misc_feature (1)..(25): SEQ ID NO: 3066; WAN024FHM_at; Start 434; Stop 458
gaaacttcgccaatatcggtaaata

SEQ ID NO: 206671 - DNA, 25 bp, Artificial
  probe
  misc_feature (1)..(25): SEQ ID NO: 3066; WAN024FHM_at; Start 291; Stop 315
gatgaatctccttgcctacgtaaca

SEQ ID NO: 206672 - DNA, 25 bp, Artificial
  probe
  misc_feature (1)..(25): SEQ ID NO: 3066; WAN024FHM_at; Start 440; Stop 464
tcgccaatatcggtaaatacatctt

SEQ ID NO: 206673 - DNA, 25 bp, Artificial
  probe
  misc_feature (1)..(25): SEQ ID NO: 3066; WAN024FHM_at; Start 376; Stop 400
cagtggggcttttggttgatttaca

SEQ ID NO: 206674 - DNA, 25 bp, Artificial
  probe
  misc_feature (1)..(25): SEQ ID NO: 3066; WAN024FHM_at; Start 429; Stop 453
tcaaggaaacttcgccaatatcggt

SEQ ID NO: 206675 - DNA, 25 bp, Artificial
  probe
  misc_feature (1)..(25): SEQ ID NO: 3066; WAN024FHM_at; Start 402; Stop 426
tttcgttcagctgacaaaagctggt

SEQ ID NO: 206676 - DNA, 25 bp, Artificial
  probe
  misc_feature (1)..(25): SEQ ID NO: 3066; WAN024FHM_at; Start 468; Stop 492
tatcctcaatgcaatcggagcttta

SEQ ID NO: 206677 - DNA, 25 bp, Artificial
  probe
  misc_feature (1)..(25): SEQ ID NO: 3066; WAN024FHM_at; Start 411; Stop 435
gctgacaaaagctggtattcaagga

SEQ ID NO: 206678 - DNA, 25 bp, Artificial
  probe
  misc_feature (1)..(25): SEQ ID NO: 3066; WAN024FHM_at; Start 57; Stop 81
tgttaataccattttgtccggtgct

SEQ ID NO: 206679 - DNA, 25 bp, Artificial
  probe
  misc_feature (1)..(25): SEQ ID NO: 3066; WAN024FHM_at; Start 307; Stop 331
tacgtaacaactattgcctttgcac

SEQ ID NO: 206680 - DNA, 25 bp, Artificial
  probe
  misc_feature (1)..(25): SEQ ID NO: 3066; WAN024FHM_at; Start 239; Stop 263
tcatcgccttcctctttgcctttgt

SEQ ID NO: 206681 - DNA, 25 bp, Artificial
  probe
  misc_feature (1)..(25): SEQ ID NO: 3066; WAN024FHM_at; Start 393; Stop 417
gatttacaatttcgttcagctgaca

SEQ ID NO: 206682 - DNA, 25 bp, Artificial
  probe
  misc_feature (1)..(25): SEQ ID NO: 3066; WAN024FHM_at; Start 451; Stop 475
ggtaaatacatcttttatatcctca

SEQ ID NO: 206683 - DNA, 25 bp, Artificial
  probe
  misc_feature (1)..(25): SEQ ID NO: 3066; WAN024FHM_at; Start 137; Stop 161
tcatttatacctttgctataaagaa

SEQ ID NO: 206684 - DNA, 25 bp, Artificial
  probe
  misc_feature (1)..(25): SEQ ID NO: 3066; WAN024FHM_at; Start 167; Stop 191
aagcttcgcaagaaggcagacccaa

SEQ ID NO: 206685 - DNA, 25 bp, Artificial
  probe
  misc_feature (1)..(25): SEQ ID NO: 3066; WAN024FHM_at; Start 288; Stop 312
caagatgaatctccttgcctacgta

SEQ ID NO: 206686 - DNA, 25 bp, Artificial
  probe
  misc_feature (1)..(25): SEQ ID NO: 3066; WAN024FHM_at; Start 225; Stop 249
catcatcatttccatcatcgccttc

SEQ ID NO: 206687 - DNA, 25 bp, Artificial
  probe
  misc_feature (1)..(25): SEQ ID NO: 3066; WAN024FHM_at; Start 474; Stop 498
caatgcaatcggagctttatttgtc

SEQ ID NO: 206688 - DNA, 25 bp, Artificial
  probe
  misc_feature (1)..(25): SEQ ID NO: 3066; WAN024FHM_at; Start 479; Stop 503
caatcggagctttatttgtctggaa

SEQ ID NO: 206689 - DNA, 25 bp, Artificial
  probe
  misc_feature (1)..(25): SEQ ID NO: 3066; WAN024FHM_at; Start 84; Stop 108
tgattatatccttggaaataaggcg

SEQ ID NO: 206690 - DNA, 25 bp, Artificial
  probe
  misc_feature (1)..(25): SEQ ID NO: 3066; WAN024FHM_at; Start 485; Stop 509
gagctttatttgtctggaatgatga

SEQ ID NO: 206691 - DNA, 25 bp, Artificial
  probe
  misc_feature (1)..(25): SEQ ID NO: 3066; WAN024FHM_at; Start 414; Stop 438
gacaaaagctggtattcaaggaaac

SEQ ID NO: 206692 - DNA, 25 bp, Artificial
  probe
  misc_feature (1)..(25): SEQ ID NO: 3066; WAN024FHM_at; Start 497; Stop 521
tctggaatgatgaagaagttagata

SEQ ID NO: 206693 - DNA, 25 bp, Artificial
  probe
  misc_feature (1)..(25): SEQ ID NO: 3066; WAN024FHM_at; Start 2; Stop 26
tgttgtccactcgtttcacggggaa

SEQ ID NO: 206694 - DNA, 25 bp, Artificial
  probe
  misc_feature (1)..(25): SEQ ID NO: 3066; WAN024FHM_at; Start 421; Stop 445
gctggtattcaaggaaacttcgcca

SEQ ID NO: 206695 - DNA, 25 bp, Artificial
  probe
  misc_feature (1)..(25): SEQ ID NO: 3066; WAN024FHM_at; Start 397; Stop 421
tacaatttcgttcagctgacaaaag

SEQ ID NO: 206696 - DNA, 25 bp, Artificial
  probe
  misc_feature (1)..(25): SEQ ID NO: 3066; WAN024FHM_at; Start 464; Stop 488
tttatatcctcaatgcaatcggagc

SEQ ID NO: 206697 - DNA, 25 bp, Artificial
  probe
  misc_feature (1)..(25): SEQ ID NO: 3066; WAN024FHM_at; Start 173; Stop 197
cgcaagaaggcagacccaaccaaat

SEQ ID NO: 206698 - DNA, 25 bp, Artificial
  probe
  misc_feature (1)..(25): SEQ ID NO: 3066; WAN024FHM_at; Start 299; Stop 323
tccttgcctacgtaacaactattgc

SEQ ID NO: 206699 - DNA, 25 bp, Artificial
  probe
  misc_feature (1)..(25): SEQ ID NO: 3066; WAN024FHM_at; Start 71; Stop 95
tgtccggtgctattgattatatcct

SEQ ID NO: 206700 - DNA, 25 bp, Artificial
  probe
  misc_feature (1)..(25): SEQ ID NO: 3066; WAN024FHM_at; Start 65; Stop 89
ccattttgtccggtgctattgatta

SEQ ID NO: 206701 - DNA, 25 bp, Artificial
  probe
  misc_feature (1)..(25): SEQ ID NO: 7607; WAN024FHN_at; Start 131; Stop 155
gcaaccctctttctgagccaattct

SEQ ID NO: 206702 - DNA, 25 bp, Artificial
  probe
  misc_feature (1)..(25): SEQ ID NO: 7607; WAN024FHN_at; Start 105; Stop 129
ttcaaccagtcgtctaactcccgat

SEQ ID NO: 206703 - DNA, 25 bp, Artificial
  probe
  misc_feature (1)..(25): SEQ ID NO: 7607; WAN024FHN_at; Start 100; Stop 124
cacttttcaaccagtcgtctaactc

SEQ ID NO: 206704 - DNA, 25 bp, Artificial
  probe
  misc_feature (1)..(25): SEQ ID NO: 7607; WAN024FHN_at; Start 149; Stop 173
caattctctcaaaaattcctgatga

SEQ ID NO: 206705 - DNA, 25 bp, Artificial
  probe
  misc_feature (1)..(25): SEQ ID NO: 7607; WAN024FHN_at; Start 67; Stop 91
tataccctttttagttgtaatgtca

SEQ ID NO: 206706 - DNA, 25 bp, Artificial
  probe
  misc_feature (1)..(25): SEQ ID NO: 7607; WAN024FHN_at; Start 87; Stop 111
tgtcaatcgttaccacttttcaacc

SEQ ID NO: 206707 - DNA, 25 bp, Artificial
  probe
  misc_feature (1)..(25): SEQ ID NO: 7607; WAN024FHN_at; Start 78; Stop 102
tagttgtaatgtcaatcgttaccac

SEQ ID NO: 206708 - DNA, 25 bp, Artificial
  probe
  misc_feature (1)..(25): SEQ ID NO: 7607; WAN024FHN_at; Start 97; Stop 121
taccacttttcaaccagtcgtctaa

SEQ ID NO: 206709 - DNA, 25 bp, Artificial
  probe
  misc_feature (1)..(25): SEQ ID NO: 7607; WAN024FHN_at; Start 171; Stop 195
tgatgagtatggtggatcccattga

SEQ ID NO: 206710 - DNA, 25 bp, Artificial
  probe
  misc_feature (1)..(25): SEQ ID NO: 7607; WAN024FHN_at; Start 169; Stop 193
gatgatgagtatggtggatcccatt

SEQ ID NO: 206711 - DNA, 25 bp, Artificial
  probe
  misc_feature (1)..(25): SEQ ID NO: 7607; WAN024FHN_at; Start 10; Stop 34
gcatcctcttctcctttttacgagg

SEQ ID NO: 206712 - DNA, 25 bp, Artificial
  probe
  misc_feature (1)..(25): SEQ ID NO: 7607; WAN024FHN_at; Start 41; Stop 65
tgcctctactcttctttttctatta

SEQ ID NO: 206713 - DNA, 25 bp, Artificial
  probe
  misc_feature (1)..(25): SEQ ID NO: 7607; WAN024FHN_at; Start 7; Stop 31
tttgcatcctcttctcctttttacg

SEQ ID NO: 206714 - DNA, 25 bp, Artificial
  probe
  misc_feature (1)..(25): SEQ ID NO: 7607; WAN024FHN_at; Start 158; Stop 182
caaaaattcctgatgatgagtatgg

SEQ ID NO: 206715 - DNA, 25 bp, Artificial
  probe
  misc_feature (1)..(25): SEQ ID NO: 7607; WAN024FHN_at; Start 165; Stop 189
tcctgatgatgagtatggtggatcc

SEQ ID NO: 206716 - DNA, 25 bp, Artificial
  probe
  misc_feature (1)..(25): SEQ ID NO: 7607; WAN024FHN_at; Start 129; Stop 153
tcgcaaccctctttctgagccaatt

SEQ ID NO: 206717 - DNA, 25 bp, Artificial
  probe
  misc_feature (1)..(25): SEQ ID NO: 7607; WAN024FHN_at; Start 90; Stop 114
caatcgttaccacttttcaaccagt

SEQ ID NO: 206718 - DNA, 25 bp, Artificial
  probe
  misc_feature (1)..(25): SEQ ID NO: 7607; WAN024FHN_at; Start 112; Stop 136
agtcgtctaactcccgatcgcaacc

SEQ ID NO: 206719 - DNA, 25 bp, Artificial
  probe
  misc_feature (1)..(25): SEQ ID NO: 7607; WAN024FHN_at; Start 1; Stop 25
ttggaatttgcatcctcttctcctt

SEQ ID NO: 206720 - DNA, 25 bp, Artificial
  probe
  misc_feature (1)..(25): SEQ ID NO: 7607; WAN024FHN_at; Start 145; Stop 169
gagccaattctctcaaaaattcctg

SEQ ID NO: 206721 - DNA, 25 bp, Artificial
  probe
  misc_feature (1)..(25): SEQ ID NO: 7607; WAN024FHN_at; Start 80; Stop 104
gttgtaatgtcaatcgttaccactt

SEQ ID NO: 206722 - DNA, 25 bp, Artificial
  probe
  misc_feature (1)..(25): SEQ ID NO: 7607; WAN024FHN_at; Start 166; Stop 190
cctgatgatgagtatggtggatccc

SEQ ID NO: 206723 - DNA, 25 bp, Artificial
  probe
  misc_feature (1)..(25): SEQ ID NO: 7607; WAN024FHN_at; Start 161; Stop 185
aaattcctgatgatgagtatggtgg

SEQ ID NO: 206724 - DNA, 25 bp, Artificial
  probe
  misc_feature (1)..(25): SEQ ID NO: 7607; WAN024FHN_at; Start 127; Stop 151
gatcgcaaccctctttctgagccaa

SEQ ID NO: 206725 - DNA, 25 bp, Artificial
  probe
  misc_feature (1)..(25): SEQ ID NO: 7607; WAN024FHN_at; Start 147; Stop 171
gccaattctctcaaaaattcctgat

SEQ ID NO: 206726 - DNA, 25 bp, Artificial
  probe
  misc_feature (1)..(25): SEQ ID NO: 7607; WAN024FHN_at; Start 71; Stop 95
ccctttttagttgtaatgtcaatcg

SEQ ID NO: 206727 - DNA, 25 bp, Artificial
  probe
  misc_feature (1)..(25): SEQ ID NO: 7607; WAN024FHN_at; Start 92; Stop 116
atcgttaccacttttcaaccagtcg

SEQ ID NO: 206728 - DNA, 25 bp, Artificial
  probe
  misc_feature (1)..(25): SEQ ID NO: 7607; WAN024FHN_at; Start 24; Stop 48
tttttacgaggctaccctgcctcta

SEQ ID NO: 206729 - DNA, 25 bp, Artificial
  probe
  misc_feature (1)..(25): SEQ ID NO: 7607; WAN024FHN_at; Start 153; Stop 177
tctctcaaaaattcctgatgatgag

SEQ ID NO: 206730 - DNA, 25 bp, Artificial
  probe
  misc_feature (1)..(25): SEQ ID NO: 7607; WAN024FHN_at; Start 26; Stop 50
tttacgaggctaccctgcctctact

SEQ ID NO: 206731 - DNA, 25 bp, Artificial
  probe
  misc_feature (1)..(25): SEQ ID NO: 7607; WAN024FHN_at; Start 167; Stop 191
ctgatgatgagtatggtggatccca

SEQ ID NO: 206732 - DNA, 25 bp, Artificial
  probe
  misc_feature (1)..(25): SEQ ID NO: 7607; WAN024FHN_at; Start 13; Stop 37
tcctcttctcctttttacgaggcta

SEQ ID NO: 206733 - DNA, 25 bp, Artificial
  probe
  misc_feature (1)..(25): SEQ ID NO: 7607; WAN024FHN_at; Start 138; Stop 162
tctttctgagccaattctctcaaaa

SEQ ID NO: 206734 - DNA, 25 bp, Artificial
  probe
  misc_feature (1)..(25): SEQ ID NO: 7607; WAN024FHN_at; Start 84; Stop 108
taatgtcaatcgttaccacttttca

SEQ ID NO: 206735 - DNA, 25 bp, Artificial
  probe
  misc_feature (1)..(25): SEQ ID NO: 5519; WAN024FHO_at; Start 98; Stop 122
ggatgagtcaccaagcggtcaaact

SEQ ID NO: 206736 - DNA, 25 bp, Artificial
  probe
  misc_feature (1)..(25): SEQ ID NO: 5519; WAN024FHO_at; Start 178; Stop 202
atggctaattcccaccgtcaaatcc

SEQ ID NO: 206737 - DNA, 25 bp, Artificial
  probe
  misc_feature (1)..(25): SEQ ID NO: 5519; WAN024FHO_at; Start 30; Stop 54
attgcccaccagtcccgtaacgaag

SEQ ID NO: 206738 - DNA, 25 bp, Artificial
  probe
  misc_feature (1)..(25): SEQ ID NO: 5519; WAN024FHO_at; Start 11; Stop 35
gaacccggattgacaatcaattgcc

SEQ ID NO: 206739 - DNA, 25 bp, Artificial
  probe
  misc_feature (1)..(25): SEQ ID NO: 5519; WAN024FHO_at; Start 51; Stop 75
gaagcaactgctggtgaatatgtcc

SEQ ID NO: 206740 - DNA, 25 bp, Artificial
  probe
  misc_feature (1)..(25): SEQ ID NO: 5519; WAN024FHO_at; Start 132; Stop 156
tgccagtatgaatcaactctcgccc

SEQ ID NO: 206741 - DNA, 25 bp, Artificial
  probe
  misc_feature (1)..(25): SEQ ID NO: 5519; WAN024FHO_at; Start 223; Stop 247
aagaggttgattgtggagcacttca

SEQ ID NO: 206742 - DNA, 25 bp, Artificial
  probe
  misc_feature (1)..(25): SEQ ID NO: 5519; WAN024FHO_at; Start 195; Stop 219
tcaaatccccaaactgacgatgaat

SEQ ID NO: 206743 - DNA, 25 bp, Artificial
  probe
  misc_feature (1)..(25): SEQ ID NO: 5519; WAN024FHO_at; Start 158; Stop 182
cagttcttatcaggcagatgatggc

SEQ ID NO: 206744 - DNA, 25 bp, Artificial
  probe
  misc_feature (1)..(25): SEQ ID NO: 5519; WAN024FHO_at; Start 165; Stop 189
tatcaggcagatgatggctaattcc

SEQ ID NO: 206745 - DNA, 25 bp, Artificial
  probe
  misc_feature (1)..(25): SEQ ID NO: 5519; WAN024FHO_at; Start 25; Stop 49
aatcaattgcccaccagtcccgtaa

SEQ ID NO: 206746 - DNA, 25 bp, Artificial
  probe
  misc_feature (1)..(25): SEQ ID NO: 5519; WAN024FHO_at; Start 77; Stop 101
taaacagcaatatcacagggaggat

SEQ ID NO: 206747 - DNA, 25 bp, Artificial
  probe
  misc_feature (1)..(25): SEQ ID NO: 5519; WAN024FHO_at; Start 40; Stop 64
agtcccgtaacgaagcaactgctgg

SEQ ID NO: 206748 - DNA, 25 bp, Artificial
  probe
  misc_feature (1)..(25): SEQ ID NO: 5519; WAN024FHO_at; Start 138; Stop 162
tatgaatcaactctcgcccccagtt

SEQ ID NO: 206749 - DNA, 25 bp, Artificial
  probe
  misc_feature (1)..(25): SEQ ID NO: 5519; WAN024FHO_at; Start 110; Stop 134
aagcggtcaaactcctcttgtttgc

SEQ ID NO: 206750 - DNA, 25 bp, Artificial
  probe
  misc_feature (1)..(25): SEQ ID NO: 5519; WAN024FHO_at; Start 119; Stop 143
aactcctcttgtttgccagtatgaa

SEQ ID NO: 206751 - DNA, 25 bp, Artificial
  probe
  misc_feature (1)..(25): SEQ ID NO: 5519; WAN024FHO_at; Start 129; Stop 153
gtttgccagtatgaatcaactctcg

SEQ ID NO: 206752 - DNA, 25 bp, Artificial
  probe
  misc_feature (1)..(25): SEQ ID NO: 5519; WAN024FHO_at; Start 95; Stop 119
ggaggatgagtcaccaagcggtcaa

SEQ ID NO: 206753 - DNA, 25 bp, Artificial
  probe
  misc_feature (1)..(25): SEQ ID NO: 5519; WAN024FHO_at; Start 18; Stop 42
gattgacaatcaattgcccaccagt

SEQ ID NO: 206754 - DNA, 25 bp, Artificial
  probe
  misc_feature (1)..(25): SEQ ID NO: 5519; WAN024FHO_at; Start 170; Stop 194
ggcagatgatggctaattcccaccg

SEQ ID NO: 206755 - DNA, 25 bp, Artificial
  probe
  misc_feature (1)..(25): SEQ ID NO: 5519; WAN024FHO_at; Start 61; Stop 85
ctggtgaatatgtccataaacagca

SEQ ID NO: 206756 - DNA, 25 bp, Artificial
  probe
  misc_feature (1)..(25): SEQ ID NO: 5519; WAN024FHO_at; Start 72; Stop 96
gtccataaacagcaatatcacaggg

SEQ ID NO: 206757 - DNA, 25 bp, Artificial
  probe
  misc_feature (1)..(25): SEQ ID NO: 5519; WAN024FHO_at; Start 1; Stop 25
ttggccaatcgaacccggattgaca

SEQ ID NO: 206758 - DNA, 25 bp, Artificial
  probe
  misc_feature (1)..(25): SEQ ID NO: 5519; WAN024FHO_at; Start 84; Stop 108
caatatcacagggaggatgagtcac

SEQ ID NO: 206759 - DNA, 25 bp, Artificial
  probe
  misc_feature (1)..(25): SEQ ID NO: 5519; WAN024FHO_at; Start 234; Stop 258
tgtggagcacttcaatttcttctag

SEQ ID NO: 206760 - DNA, 25 bp, Artificial
  probe
  misc_feature (1)..(25): SEQ ID NO: 5519; WAN024FHO_at; Start 208; Stop 232
ctgacgatgaatttgaagaggttga

SEQ ID NO: 206761 - DNA, 25 bp, Artificial
  probe
  misc_feature (1)..(25): SEQ ID NO: 5519; WAN024FHO_at; Start 155; Stop 179
ccccagttcttatcaggcagatgat

SEQ ID NO: 206762 - DNA, 25 bp, Artificial
  probe
  misc_feature (1)..(25): SEQ ID NO: 5519; WAN024FHO_at; Start 44; Stop 68
ccgtaacgaagcaactgctggtgaa

SEQ ID NO: 206763 - DNA, 25 bp, Artificial
  probe
  misc_feature (1)..(25): SEQ ID NO: 5519; WAN024FHO_at; Start 104; Stop 128
gtcaccaagcggtcaaactcctctt

SEQ ID NO: 206764 - DNA, 25 bp, Artificial
  probe
  misc_feature (1)..(25): SEQ ID NO: 5519; WAN024FHO_at; Start 89; Stop 113
tcacagggaggatgagtcaccaagc

SEQ ID NO: 206765 - DNA, 25 bp, Artificial
  probe
  misc_feature (1)..(25): SEQ ID NO: 5519; WAN024FHO_at; Start 203; Stop 227
ccaaactgacgatgaatttgaagag

SEQ ID NO: 206766 - DNA, 25 bp, Artificial
  probe
  misc_feature (1)..(25): SEQ ID NO: 5519; WAN024FHO_at; Start 219; Stop 243
tttgaagaggttgattgtggagcac

SEQ ID NO: 206767 - DNA, 25 bp, Artificial
  probe
  misc_feature (1)..(25): SEQ ID NO: 5519; WAN024FHO_at; Start 55; Stop 79
caactgctggtgaatatgtccataa

SEQ ID NO: 206768 - DNA, 25 bp, Artificial
  probe
  misc_feature (1)..(25): SEQ ID NO: 5519; WAN024FHO_at; Start 174; Stop 198
gatgatggctaattcccaccgtcaa

SEQ ID NO: 206769 - DNA, 25 bp, Artificial
  probe
  misc_feature (1)..(25): SEQ ID NO: 2340; WAN024FHP_at; Start 822; Stop 846
cgactggttgaaaagtggtaacgat

SEQ ID NO: 206770 - DNA, 25 bp, Artificial
  probe
  misc_feature (1)..(25): SEQ ID NO: 2340; WAN024FHP_at; Start 382; Stop 406
catcatctgcctgataagaactggg

SEQ ID NO: 206771 - DNA, 25 bp, Artificial
  probe
  misc_feature (1)..(25): SEQ ID NO: 2340; WAN024FHP_at; Start 158; Stop 182
tgttggatcaactaccgattacggc

SEQ ID NO: 206772 - DNA, 25 bp, Artificial
  probe
  misc_feature (1)..(25): SEQ ID NO: 2340; WAN024FHP_at; Start 484; Stop 508
tatggacatattcaccagcagttgc

SEQ ID NO: 206773 - DNA, 25 bp, Artificial
  probe
  misc_feature (1)..(25): SEQ ID NO: 2340; WAN024FHP_at; Start 315; Stop 339
tgaagtgctccacaatcaacctctt

SEQ ID NO: 206774 - DNA, 25 bp, Artificial
  probe
  misc_feature (1)..(25): SEQ ID NO: 2340; WAN024FHP_at; Start 330; Stop 354
tcaacctcttcaaattcatcgtcag

SEQ ID NO: 206775 - DNA, 25 bp, Artificial
  probe
  misc_feature (1)..(25): SEQ ID NO: 2340; WAN024FHP_at; Start 301; Stop 325
tccctagaagaaattgaagtgctcc

SEQ ID NO: 206776 - DNA, 25 bp, Artificial
  probe
  misc_feature (1)..(25): SEQ ID NO: 2340; WAN024FHP_at; Start 733; Stop 757
gaaagtctggtcaatgggatccacc

SEQ ID NO: 206777 - DNA, 25 bp, Artificial
  probe
  misc_feature (1)..(25): SEQ ID NO: 2340; WAN024FHP_at; Start 113; Stop 137
gagatattctcatgccagggacagg

SEQ ID NO: 206778 - DNA, 25 bp, Artificial
  probe
  misc_feature (1)..(25): SEQ ID NO: 2340; WAN024FHP_at; Start 269; Stop 293
tgcgccagtgccagtatgttttaga

SEQ ID NO: 206779 - DNA, 25 bp, Artificial
  probe
  misc_feature (1)..(25): SEQ ID NO: 2340; WAN024FHP_at; Start 594; Stop 618
cttgcgggcccagtatatgattttg

SEQ ID NO: 206780 - DNA, 25 bp, Artificial
  probe
  misc_feature (1)..(25): SEQ ID NO: 2340; WAN024FHP_at; Start 254; Stop 278
gtcaacgctatctcttgcgccagtg

SEQ ID NO: 206781 - DNA, 25 bp, Artificial
  probe
  misc_feature (1)..(25): SEQ ID NO: 2340; WAN024FHP_at; Start 559; Stop 583
caacctttctttttggacgctcagc

SEQ ID NO: 206782 - DNA, 25 bp, Artificial
  probe
  misc_feature (1)..(25): SEQ ID NO: 2340; WAN024FHP_at; Start 2; Stop 26
tggatatgacgaaaatagctcttct

SEQ ID NO: 206783 - DNA, 25 bp, Artificial
  probe
  misc_feature (1)..(25): SEQ ID NO: 2340; WAN024FHP_at; Start 635; Stop 659
gcctggtagatatggacttccgacg

SEQ ID NO: 206784 - DNA, 25 bp, Artificial
  probe
  misc_feature (1)..(25): SEQ ID NO: 2340; WAN024FHP_at; Start 525; Stop 549
tgggcaattgattgtcaatccgggt

SEQ ID NO: 206785 - DNA, 25 bp, Artificial
  probe
  misc_feature (1)..(25): SEQ ID NO: 2340; WAN024FHP_at; Start 53; Stop 77
ccttggaggctgttttggcagatgc

SEQ ID NO: 206786 - DNA, 25 bp, Artificial
  probe
  misc_feature (1)..(25): SEQ ID NO: 2340; WAN024FHP_at; Start 366; Stop 390
gacggtgggaattagccatcatctg

SEQ ID NO: 206787 - DNA, 25 bp, Artificial
  probe
  misc_feature (1)..(25): SEQ ID NO: 2340; WAN024FHP_at; Start 540; Stop 564
caatccgggttcgattggccaacct

SEQ ID NO: 206788 - DNA, 25 bp, Artificial
  probe
  misc_feature (1)..(25): SEQ ID NO: 2340; WAN024FHP_at; Start 37; Stop 61
catggaaataccaccgccttggagg

SEQ ID NO: 206789 - DNA, 25 bp, Artificial
  probe
  misc_feature (1)..(25): SEQ ID NO: 2340; WAN024FHP_at; Start 809; Stop 833
atcgggagttagacgactggttgaa

SEQ ID NO: 206790 - DNA, 25 bp, Artificial
  probe
  misc_feature (1)..(25): SEQ ID NO: 2340; WAN024FHP_at; Start 210; Stop 234
tctttggcatggtgtccgtaaggaa

SEQ ID NO: 206791 - DNA, 25 bp, Artificial
  probe
  misc_feature (1)..(25): SEQ ID NO: 2340; WAN024FHP_at; Start 428; Stop 452
gcaaacaagaggagtttgaccgctt

SEQ ID NO: 206792 - DNA, 25 bp, Artificial
  probe
  misc_feature (1)..(25): SEQ ID NO: 2340; WAN024FHP_at; Start 466; Stop 490
ccctgtgatattgctgtttatggac

SEQ ID NO: 206793 - DNA, 25 bp, Artificial
  probe
  misc_feature (1)..(25): SEQ ID NO: 2340; WAN024FHP_at; Start 194; Stop 218
gaaactgggaagacagtctttggca

SEQ ID NO: 206794 - DNA, 25 bp, Artificial
  probe
  misc_feature (1)..(25): SEQ ID NO: 2340; WAN024FHP_at; Start 449; Stop 473
gcttggtgactcatcctccctgtga

SEQ ID NO: 206795 - DNA, 25 bp, Artificial
  probe
  misc_feature (1)..(25): SEQ ID NO: 2340; WAN024FHP_at; Start 17; Stop 41
tagctcttctttcagatattcatgg

SEQ ID NO: 206796 - DNA, 25 bp, Artificial
  probe
  misc_feature (1)..(25): SEQ ID NO: 2340; WAN024FHP_at; Start 94; Stop 118
gatgaatactggcttttgggagata

SEQ ID NO: 206797 - DNA, 25 bp, Artificial
  probe
  misc_feature (1)..(25): SEQ ID NO: 2340; WAN024FHP_at; Start 769; Stop 793
caggaatttttgagagaattggctc

SEQ ID NO: 206798 - DNA, 25 bp, Artificial
  probe
  misc_feature (1)..(25): SEQ ID NO: 2340; WAN024FHP_at; Start 508; Stop 532
cttcgttacgggactggtgggcaat

SEQ ID NO: 206799 - DNA, 25 bp, Artificial
  probe
  misc_feature (1)..(25): SEQ ID NO: 2340; WAN024FHP_at; Start 574; Stop 598
gacgctcagctacggaaggacttgc

SEQ ID NO: 206800 - DNA, 25 bp, Artificial
  probe
  misc_feature (1)..(25): SEQ ID NO: 2340; WAN024FHP_at; Start 748; Stop 772
gggatccaccatactcatcatcagg

SEQ ID NO: 206801 - DNA, 25 bp, Artificial
  probe
  misc_feature (1)..(25): SEQ ID NO: 2340; WAN024FHP_at; Start 683; Stop 707
aattgcagctggctaaagacctgag

SEQ ID NO: 206802 - DNA, 25 bp, Artificial
  probe
  misc_feature (1)..(25): SEQ ID NO: 2340; WAN024FHP_at; Start 720; Stop 744
tgaggtttactatgaaagtctggtc

SEQ ID NO: 206803 - DNA, 25 bp, Artificial
  probe
  misc_feature (1)..(25): SEQ ID NO: 4103; WAN024FHQ_at; Start 160; Stop 184
acccgcagtctgtgtcaattcttga

SEQ ID NO: 206804 - DNA, 25 bp, Artificial
  probe
  misc_feature (1)..(25): SEQ ID NO: 4103; WAN024FHQ_at; Start 83; Stop 107
gcaggaatttccagcatcataccga

SEQ ID NO: 206805 - DNA, 25 bp, Artificial
  probe
  misc_feature (1)..(25): SEQ ID NO: 4103; WAN024FHQ_at; Start 270; Stop 294
gatttcctcccttggaatgcccagc

SEQ ID NO: 206806 - DNA, 25 bp, Artificial
  probe
  misc_feature (1)..(25): SEQ ID NO: 4103; WAN024FHQ_at; Start 185; Stop 209
tggagaccaggtgcatcaaatgtat

SEQ ID NO: 206807 - DNA, 25 bp, Artificial
  probe
  misc_feature (1)..(25): SEQ ID NO: 4103; WAN024FHQ_at; Start 252; Stop 276
tagcagcatagatagcgagatttcc

SEQ ID NO: 206808 - DNA, 25 bp, Artificial
  probe
  misc_feature (1)..(25): SEQ ID NO: 4103; WAN024FHQ_at; Start 308; Stop 332
tgcttaggatgatgggcaaaaaagt

SEQ ID NO: 206809 - DNA, 25 bp, Artificial
  probe
  misc_feature (1)..(25): SEQ ID NO: 4103; WAN024FHQ_at; Start 20; Stop 44
caactaaaggtatcgtgctgggcga

SEQ ID NO: 206810 - DNA, 25 bp, Artificial
  probe
  misc_feature (1)..(25): SEQ ID NO: 4103; WAN024FHQ_at; Start 209; Stop 233
taaactgctgtgatctgattttgca

SEQ ID NO: 206811 - DNA, 25 bp, Artificial
  probe
  misc_feature (1)..(25): SEQ ID NO: 4103; WAN024FHQ_at; Start 201; Stop 225
caaatgtataaactgctgtgatctg

SEQ ID NO: 206812 - DNA, 25 bp, Artificial
  probe
  misc_feature (1)..(25): SEQ ID NO: 4103; WAN024FHQ_at; Start 1; Stop 25
gtgcttgtcctcaatctgccaacta

SEQ ID NO: 206813 - DNA, 25 bp, Artificial
  probe
  misc_feature (1)..(25): SEQ ID NO: 4103; WAN024FHQ_at; Start 13; Stop 37
aatctgccaactaaaggtatcgtgc

SEQ ID NO: 206814 - DNA, 25 bp, Artificial
  probe
  misc_feature (1)..(25): SEQ ID NO: 4103; WAN024FHQ_at; Start 73; Stop 97
gatttggtgagcaggaatttccagc

SEQ ID NO: 206815 - DNA, 25 bp, Artificial
  probe
  misc_feature (1)..(25): SEQ ID NO: 4103; WAN024FHQ_at; Start 65; Stop 89
tgaacgatgatttggtgagcaggaa

SEQ ID NO: 206816 - DNA, 25 bp, Artificial
  probe
  misc_feature (1)..(25): SEQ ID NO: 4103; WAN024FHQ_at; Start 175; Stop 199
caattcttgatggagaccaggtgca

SEQ ID NO: 206817 - DNA, 25 bp, Artificial
  probe
  misc_feature (1)..(25): SEQ ID NO: 4103; WAN024FHQ_at; Start 133; Stop 157
cttgcttctatccattatcctttga

SEQ ID NO: 206818 - DNA, 25 bp, Artificial
  probe
  misc_feature (1)..(25): SEQ ID NO: 4103; WAN024FHQ_at; Start 217; Stop 241
tgtgatctgattttgcaaactttgc

SEQ ID NO: 206819 - DNA, 25 bp, Artificial
  probe
  misc_feature (1)..(25): SEQ ID NO: 4103; WAN024FHQ_at; Start 57; Stop 81
cagtactctgaacgatgatttggtg

SEQ ID NO: 206820 - DNA, 25 bp, Artificial
  probe
  misc_feature (1)..(25): SEQ ID NO: 4103; WAN024FHQ_at; Start 123; Stop 147
gaatgaatatcttgcttctatccat

SEQ ID NO: 206821 - DNA, 25 bp, Artificial
  probe
  misc_feature (1)..(25): SEQ ID NO: 4103; WAN024FHQ_at; Start 113; Stop 137
gaaccttgtggaatgaatatcttgc

SEQ ID NO: 206822 - DNA, 25 bp, Artificial
  probe
  misc_feature (1)..(25): SEQ ID NO: 4103; WAN024FHQ_at; Start 86; Stop 110
ggaatttccagcatcataccgataa

SEQ ID NO: 206823 - DNA, 25 bp, Artificial
  probe
  misc_feature (1)..(25): SEQ ID NO: 4103; WAN024FHQ_at; Start 300; Stop 324
taaccttttgcttaggatgatgggc

SEQ ID NO: 206824 - DNA, 25 bp, Artificial
  probe
  misc_feature (1)..(25): SEQ ID NO: 4103; WAN024FHQ_at; Start 148; Stop 172
tatcctttgataacccgcagtctgt

SEQ ID NO: 206825 - DNA, 25 bp, Artificial
  probe
  misc_feature (1)..(25): SEQ ID NO: 4103; WAN024FHQ_at; Start 155; Stop 179
tgataacccgcagtctgtgtcaatt

SEQ ID NO: 206826 - DNA, 25 bp, Artificial
  probe
  misc_feature (1)..(25): SEQ ID NO: 4103; WAN024FHQ_at; Start 104; Stop 128
ccgataatggaaccttgtggaatga

SEQ ID NO: 206827 - DNA, 25 bp, Artificial
  probe
  misc_feature (1)..(25): SEQ ID NO: 4103; WAN024FHQ_at; Start 314; Stop 338
ggatgatgggcaaaaaagttcttta

SEQ ID NO: 206828 - DNA, 25 bp, Artificial
  probe
  misc_feature (1)..(25): SEQ ID NO: 4103; WAN024FHQ_at; Start 260; Stop 284
tagatagcgagatttcctcccttgg

SEQ ID NO: 206829 - DNA, 25 bp, Artificial
  probe
  misc_feature (1)..(25): SEQ ID NO: 4103; WAN024FHQ_at; Start 50; Stop 74
cccagggcagtactctgaacgatga

SEQ ID NO: 206830 - DNA, 25 bp, Artificial
  probe
  misc_feature (1)..(25): SEQ ID NO: 4103; WAN024FHQ_at; Start 41; Stop 65
gcgatgccacccagggcagtactct

SEQ ID NO: 206831 - DNA, 25 bp, Artificial
  probe
  misc_feature (1)..(25): SEQ ID NO: 4103; WAN024FHQ_at; Start 232; Stop 256
caaactttgctcaatttggctagca

SEQ ID NO: 206832 - DNA, 25 bp, Artificial
  probe
  misc_feature (1)..(25): SEQ ID NO: 4103; WAN024FHQ_at; Start 240; Stop 264
gctcaatttggctagcagcatagat

SEQ ID NO: 206833 - DNA, 25 bp, Artificial
  probe
  misc_feature (1)..(25): SEQ ID NO: 4103; WAN024FHQ_at; Start 99; Stop 123
tcataccgataatggaaccttgtgg

SEQ ID NO: 206834 - DNA, 25 bp, Artificial
  probe
  misc_feature (1)..(25): SEQ ID NO: 4103; WAN024FHQ_at; Start 31; Stop 55
atcgtgctgggcgatgccacccagg

SEQ ID NO: 206835 - DNA, 25 bp, Artificial
  probe
  misc_feature (1)..(25): SEQ ID NO: 4103; WAN024FHQ_at; Start 194; Stop 218
ggtgcatcaaatgtataaactgctg

SEQ ID NO: 206836 - DNA, 25 bp, Artificial
  probe
  misc_feature (1)..(25): SEQ ID NO: 4103; WAN024FHQ_at; Start 26; Stop 50
aaggtatcgtgctgggcgatgccac

SEQ ID NO: 206837 - DNA, 25 bp, Artificial
  probe
  misc_feature (1)..(25): SEQ ID NO: 2452; WAN024FHR_at; Start 742; Stop 766
cagcacgatacctttagttggcaga

SEQ ID NO: 206838 - DNA, 25 bp, Artificial
  probe
  misc_feature (1)..(25): SEQ ID NO: 2452; WAN024FHR_at; Start 424; Stop 448
aagcacgcccttcgctatttaaaga

SEQ ID NO: 206839 - DNA, 25 bp, Artificial
  probe
  misc_feature (1)..(25): SEQ ID NO: 2452; WAN024FHR_at; Start 52; Stop 76
gaccttcccttgaatgagttagaca

SEQ ID NO: 206840 - DNA, 25 bp, Artificial
  probe
  misc_feature (1)..(25): SEQ ID NO: 2452; WAN024FHR_at; Start 409; Stop 433
gaaattcctgctcaaaagcacgccc

SEQ ID NO: 206841 - DNA, 25 bp, Artificial
  probe
  misc_feature (1)..(25): SEQ ID NO: 2452; WAN024FHR_at; Start 845; Stop 869
tggccacagtccctgacgaagaact

SEQ ID NO: 206842 - DNA, 25 bp, Artificial
  probe
  misc_feature (1)..(25): SEQ ID NO: 2452; WAN024FHR_at; Start 641; Stop 665
gaagcaagatattcattccacaagg

SEQ ID NO: 206843 - DNA, 25 bp, Artificial
  probe
  misc_feature (1)..(25): SEQ ID NO: 2452; WAN024FHR_at; Start 913; Stop 937
ggtattagctctatcaatgacttgg

SEQ ID NO: 206844 - DNA, 25 bp, Artificial
  probe
  misc_feature (1)..(25): SEQ ID NO: 2452; WAN024FHR_at; Start 571; Stop 595
tatacatttgatgcacctggtctcc

SEQ ID NO: 206845 - DNA, 25 bp, Artificial
  probe
  misc_feature (1)..(25): SEQ ID NO: 2452; WAN024FHR_at; Start 759; Stop 783
ttggcagattgaggacaagcacttc

SEQ ID NO: 206846 - DNA, 25 bp, Artificial
  probe
  misc_feature (1)..(25): SEQ ID NO: 2452; WAN024FHR_at; Start 316; Stop 340
cgtgtcagcctcgatacctatctga

SEQ ID NO: 206847 - DNA, 25 bp, Artificial
  probe
  misc_feature (1)..(25): SEQ ID NO: 2452; WAN024FHR_at; Start 395; Stop 419
tgacctatatgaaggaaattcctgc

SEQ ID NO: 206848 - DNA, 25 bp, Artificial
  probe
  misc_feature (1)..(25): SEQ ID NO: 2452; WAN024FHR_at; Start 928; Stop 952
aatgacttggcttccttaaaggcgc

SEQ ID NO: 206849 - DNA, 25 bp, Artificial
  probe
  misc_feature (1)..(25): SEQ ID NO: 2452; WAN024FHR_at; Start 295; Stop 319
caatttgcggctatgacttatcgtg

SEQ ID NO: 206850 - DNA, 25 bp, Artificial
  probe
  misc_feature (1)..(25): SEQ ID NO: 2452; WAN024FHR_at; Start 696; Stop 720
tgctcaccaaatcatcgttcagagt

SEQ ID NO: 206851 - DNA, 25 bp, Artificial
  probe
  misc_feature (1)..(25): SEQ ID NO: 2452; WAN024FHR_at; Start 1018; Stop 1042
ggtcgccttacccagttattgattg

SEQ ID NO: 206852 - DNA, 25 bp, Artificial
  probe
  misc_feature (1)..(25): SEQ ID NO: 2452; WAN024FHR_at; Start 182; Stop 206
tgcttactagcaaaaatcgccttca

SEQ ID NO: 206853 - DNA, 25 bp, Artificial
  probe
  misc_feature (1)..(25): SEQ ID NO: 2452; WAN024FHR_at; Start 658; Stop 682
ccacaaggttccattatcggtatga

SEQ ID NO: 206854 - DNA, 25 bp, Artificial
  probe
  misc_feature (1)..(25): SEQ ID NO: 2452; WAN024FHR_at; Start 491; Stop 515
ggcattccaagggaggaaatctcgc

SEQ ID NO: 206855 - DNA, 25 bp, Artificial
  probe
  misc_feature (1)..(25): SEQ ID NO: 2452; WAN024FHR_at; Start 214; Stop 238
gatgaattggctcaacacaagcgct

SEQ ID NO: 206856 - DNA, 25 bp, Artificial
  probe
  misc_feature (1)..(25): SEQ ID NO: 2452; WAN024FHR_at; Start 941; Stop 965
ccttaaaggcgcttgaatacattca

SEQ ID NO: 206857 - DNA, 25 bp, Artificial
  probe
  misc_feature (1)..(25): SEQ ID NO: 2452; WAN024FHR_at; Start 830; Stop 854
cctttaaagaatgggtggccacagt

SEQ ID NO: 206858 - DNA, 25 bp, Artificial
  probe
  misc_feature (1)..(25): SEQ ID NO: 2452; WAN024FHR_at; Start 540; Stop 564
gcaaagtttgcaaaatcagatcaca

SEQ ID NO: 206859 - DNA, 25 bp, Artificial
  probe
  misc_feature (1)..(25): SEQ ID NO: 2452; WAN024FHR_at; Start 711; Stop 735
cgttcagagtactgccctgggtggc

SEQ ID NO: 206860 - DNA, 25 bp, Artificial
  probe
  misc_feature (1)..(25): SEQ ID NO: 2452; WAN024FHR_at; Start 518; Stop 542
tctatgctgctagccaaattgagca

SEQ ID NO: 206861 - DNA, 25 bp, Artificial
  probe
  misc_feature (1)..(25): SEQ ID NO: 2452; WAN024FHR_at; Start 674; Stop 698
tcggtatgatgctggaaattcctgc

SEQ ID NO: 206862 - DNA, 25 bp, Artificial
  probe
  misc_feature (1)..(25): SEQ ID NO: 2452; WAN024FHR_at; Start 505; Stop 529
ggaaatctcgctatctatgctgcta

SEQ ID NO: 206863 - DNA, 25 bp, Artificial
  probe
  misc_feature (1)..(25): SEQ ID NO: 2452; WAN024FHR_at; Start 982; Stop 1006
gctcaatccctcactccagaagaaa

SEQ ID NO: 206864 - DNA, 25 bp, Artificial
  probe
  misc_feature (1)..(25): SEQ ID NO: 2452; WAN024FHR_at; Start 271; Stop 295
gacatcgaccctgaactgcaaaagc

SEQ ID NO: 206865 - DNA, 25 bp, Artificial
  probe
  misc_feature (1)..(25): SEQ ID NO: 2452; WAN024FHR_at; Start 790; Stop 814
ctggataagaccaacagtgatagcc

SEQ ID NO: 206866 - DNA, 25 bp, Artificial
  probe
  misc_feature (1)..(25): SEQ ID NO: 2452; WAN024FHR_at; Start 608; Stop 632
cacagactgcgggttatcaaaggat

SEQ ID NO: 206867 - DNA, 25 bp, Artificial
  probe
  misc_feature (1)..(25): SEQ ID NO: 2452; WAN024FHR_at; Start 360; Stop 384
tgacagtatcattggctggaaggaa

SEQ ID NO: 206868 - DNA, 25 bp, Artificial
  probe
  misc_feature (1)..(25): SEQ ID NO: 2452; WAN024FHR_at; Start 143; Stop 167
ttttagatctagcacctcaggttcc

SEQ ID NO: 206869 - DNA, 25 bp, Artificial
  probe
  misc_feature (1)..(25): SEQ ID NO: 2452; WAN024FHR_at; Start 998; Stop 1022
cagaagaaagagaaaccttgggtcg

SEQ ID NO: 206870 - DNA, 25 bp, Artificial
  probe
  misc_feature (1)..(25): SEQ ID NO: 2452; WAN024FHR_at; Start 345; Stop 369
ctttcgtgggacagatgacagtatc

SEQ ID NO: 206871 - DNA, 25 bp, Artificial
  probe
  misc_feature (1)..(25): SEQ ID NO: 1934; WAN024FHS_at; Start 466; Stop 490
gaattccagattttacgcgtgttat

SEQ ID NO: 206872 - DNA, 25 bp, Artificial
  probe
  misc_feature (1)..(25): SEQ ID NO: 1934; WAN024FHS_at; Start 87; Stop 111
cctggtagaagactttatggaagtt

SEQ ID NO: 206873 - DNA, 25 bp, Artificial
  probe
  misc_feature (1)..(25): SEQ ID NO: 1934; WAN024FHS_at; Start 594; Stop 618
tttgcgtaaaaagttggaggagcag

SEQ ID NO: 206874 - DNA, 25 bp, Artificial
  probe
  misc_feature (1)..(25): SEQ ID NO: 1934; WAN024FHS_at; Start 247; Stop 271
caggctatggatattgtcatggcaa

SEQ ID NO: 206875 - DNA, 25 bp, Artificial
  probe
  misc_feature (1)..(25): SEQ ID NO: 1934; WAN024FHS_at; Start 523; Stop 547
gacctgatgcgggaactttggaaca

SEQ ID NO: 206876 - DNA, 25 bp, Artificial
  probe
  misc_feature (1)..(25): SEQ ID NO: 1934; WAN024FHS_at; Start 542; Stop 566
ggaacagtgactttttcattgatga

SEQ ID NO: 206877 - DNA, 25 bp, Artificial
  probe
  misc_feature (1)..(25): SEQ ID NO: 1934; WAN024FHS_at; Start 333; Stop 357
ggttcagggcttgttgcgtcgttcc

SEQ ID NO: 206878 - DNA, 25 bp, Artificial
  probe
  misc_feature (1)..(25): SEQ ID NO: 1934; WAN024FHS_at; Start 355; Stop 379
tcctatgagtttgggcgtgatgaga

SEQ ID NO: 206879 - DNA, 25 bp, Artificial
  probe
  misc_feature (1)..(25): SEQ ID NO: 1934; WAN024FHS_at; Start 113; Stop 137
tgagtctatttgttcagtcggaacc

SEQ ID NO: 206880 - DNA, 25 bp, Artificial
  probe
  misc_feature (1)..(25): SEQ ID NO: 1934; WAN024FHS_at; Start 400; Stop 424
gttatcctcaataccaaatccatgg

SEQ ID NO: 206881 - DNA, 25 bp, Artificial
  probe
  misc_feature (1)..(25): SEQ ID NO: 1934; WAN024FHS_at; Start 181; Stop 205
tatcactggtgtcaggaaatccgca

SEQ ID NO: 206882 - DNA, 25 bp, Artificial
  probe
  misc_feature (1)..(25): SEQ ID NO: 1934; WAN024FHS_at; Start 133; Stop 157
gaacctcatctggtcctcatggata

SEQ ID NO: 206883 - DNA, 25 bp, Artificial
  probe
  misc_feature (1)..(25): SEQ ID NO: 1934; WAN024FHS_at; Start 495; Stop 519
gcatgcaggcaacatcgtagcacgt

SEQ ID NO: 206884 - DNA, 25 bp, Artificial
  probe
  misc_feature (1)..(25): SEQ ID NO: 1934; WAN024FHS_at; Start 481; Stop 505
cgcgtgttatttgagcatgcaggca

SEQ ID NO: 206885 - DNA, 25 bp, Artificial
  probe
  misc_feature (1)..(25): SEQ ID NO: 1934; WAN024FHS_at; Start 22; Stop 46
gaagatgatcaggtcattcgtcaac

SEQ ID NO: 206886 - DNA, 25 bp, Artificial
  probe
  misc_feature (1)..(25): SEQ ID NO: 1934; WAN024FHS_at; Start 369; Stop 393
gcgtgatgagagtttgctggaatat

SEQ ID NO: 206887 - DNA, 25 bp, Artificial
  probe
  misc_feature (1)..(25): SEQ ID NO: 1934; WAN024FHS_at; Start 384; Stop 408
gctggaatatgctggtgttatcctc

SEQ ID NO: 206888 - DNA, 25 bp, Artificial
  probe
  misc_feature (1)..(25): SEQ ID NO: 1934; WAN024FHS_at; Start 200; Stop 224
tccgcaagatttccaaggtacctat

SEQ ID NO: 206889 - DNA, 25 bp, Artificial
  probe
  misc_feature (1)..(25): SEQ ID NO: 1934; WAN024FHS_at; Start 147; Stop 171
cctcatggatattggtttgcccttg

SEQ ID NO: 206890 - DNA, 25 bp, Artificial
  probe
  misc_feature (1)..(25): SEQ ID NO: 1934; WAN024FHS_at; Start 218; Stop 242
tacctatcatgtttctttcttcgag

SEQ ID NO: 206891 - DNA, 25 bp, Artificial
  probe
  misc_feature (1)..(25): SEQ ID NO: 1934; WAN024FHS_at; Start 650; Stop 674
gaatagggtacggattgaagcatgc

SEQ ID NO: 206892 - DNA, 25 bp, Artificial
  probe
  misc_feature (1)..(25): SEQ ID NO: 1934; WAN024FHS_at; Start 165; Stop 189
gcccttgtttaatggttatcactgg

SEQ ID NO: 206893 - DNA, 25 bp, Artificial
  probe
  misc_feature (1)..(25): SEQ ID NO: 1934; WAN024FHS_at; Start 232; Stop 256
ctttcttcgagagaccaggctatgg

SEQ ID NO: 206894 - DNA, 25 bp, Artificial
  probe
  misc_feature (1)..(25): SEQ ID NO: 1934; WAN024FHS_at; Start 283; Stop 307
gcggatgactttgtgaccaagcctt

SEQ ID NO: 206895 - DNA, 25 bp, Artificial
  probe
  misc_feature (1)..(25): SEQ ID NO: 1934; WAN024FHS_at; Start 297; Stop 321
gaccaagccttttgaccagcaggtt

SEQ ID NO: 206896 - DNA, 25 bp, Artificial
  probe
  misc_feature (1)..(25): SEQ ID NO: 1934; WAN024FHS_at; Start 581; Stop 605
tcaatgtggctcgtttgcgtaaaaa

SEQ ID NO: 206897 - DNA, 25 bp, Artificial
  probe
  misc_feature (1)..(25): SEQ ID NO: 1934; WAN024FHS_at; Start 344; Stop 368
tgttgcgtcgttcctatgagtttgg

SEQ ID NO: 206898 - DNA, 25 bp, Artificial
  probe
  misc_feature (1)..(25): SEQ ID NO: 1934; WAN024FHS_at; Start 509; Stop 533
tcgtagcacgtgacgacctgatgcg

SEQ ID NO: 206899 - DNA, 25 bp, Artificial
  probe
  misc_feature (1)..(25): SEQ ID NO: 1934; WAN024FHS_at; Start 420; Stop 444
catggatttacattatcaagggcaa

SEQ ID NO: 206900 - DNA, 25 bp, Artificial
  probe
  misc_feature (1)..(25): SEQ ID NO: 1934; WAN024FHS_at; Start 450; Stop 474
gaatttgaccaagaatgaattccag

SEQ ID NO: 206901 - DNA, 25 bp, Artificial
  probe
  misc_feature (1)..(25): SEQ ID NO: 1934; WAN024FHS_at; Start 616; Stop 640
cagggattggtaggatttatcgaga

SEQ ID NO: 206902 - DNA, 25 bp, Artificial
  probe
  misc_feature (1)..(25): SEQ ID NO: 1934; WAN024FHS_at; Start 633; Stop 657
tatcgagaccaagaaaggaataggg

SEQ ID NO: 206903 - DNA, 25 bp, Artificial
  probe
  misc_feature (1)..(25): SEQ ID NO: 1934; WAN024FHS_at; Start 565; Stop 589
gataataccctctctgtcaatgtgg

SEQ ID NO: 206904 - DNA, 25 bp, Artificial
  probe
  misc_feature (1)..(25): SEQ ID NO: 1934; WAN024FHS_at; Start 74; Stop 98
gatttgaagtggtcctggtagaaga

SEQ ID NO: 206905 - DNA, 25 bp, Artificial
  probe
  misc_feature (1)..(25): SEQ ID NO: 5487; WAN024FHT_at; Start 281; Stop 305
tcttggatttgttctggagtaacga

SEQ ID NO: 206906 - DNA, 25 bp, Artificial
  probe
  misc_feature (1)..(25): SEQ ID NO: 5487; WAN024FHT_at; Start 194; Stop 218
tcacgaagagagaggcggaagcggt

SEQ ID NO: 206907 - DNA, 25 bp, Artificial
  probe
  misc_feature (1)..(25): SEQ ID NO: 5487; WAN024FHT_at; Start 122; Stop 146
gctgcacgaagcatggtttgggcat

SEQ ID NO: 206908 - DNA, 25 bp, Artificial
  probe
  misc_feature (1)..(25): SEQ ID NO: 5487; WAN024FHT_at; Start 285; Stop 309
ggatttgttctggagtaacgaatag

SEQ ID NO: 206909 - DNA, 25 bp, Artificial
  probe
  misc_feature (1)..(25): SEQ ID NO: 5487; WAN024FHT_at; Start 61; Stop 85
tggtccgtagaaggctgcttcacct

SEQ ID NO: 206910 - DNA, 25 bp, Artificial
  probe
  misc_feature (1)..(25): SEQ ID NO: 5487; WAN024FHT_at; Start 218; Stop 242
tagtcagtcaagttgaagtcttcat

SEQ ID NO: 206911 - DNA, 25 bp, Artificial
  probe
  misc_feature (1)..(25): SEQ ID NO: 5487; WAN024FHT_at; Start 209; Stop 233
cggaagcggtagtcagtcaagttga

SEQ ID NO: 206912 - DNA, 25 bp, Artificial
  probe
  misc_feature (1)..(25): SEQ ID NO: 5487; WAN024FHT_at; Start 177; Stop 201
tatgagtatcttgagggtcacgaag

SEQ ID NO: 206913 - DNA, 25 bp, Artificial
  probe
  misc_feature (1)..(25): SEQ ID NO: 5487; WAN024FHT_at; Start 42; Stop 66
taatctggatatccaattttggtcc

SEQ ID NO: 206914 - DNA, 25 bp, Artificial
  probe
  misc_feature (1)..(25): SEQ ID NO: 5487; WAN024FHT_at; Start 58; Stop 82
ttttggtccgtagaaggctgcttca

SEQ ID NO: 206915 - DNA, 25 bp, Artificial
  probe
  misc_feature (1)..(25): SEQ ID NO: 5487; WAN024FHT_at; Start 106; Stop 130
gcccatttcatcaagagctgcacga

SEQ ID NO: 206916 - DNA, 25 bp, Artificial
  probe
  misc_feature (1)..(25): SEQ ID NO: 5487; WAN024FHT_at; Start 98; Stop 122
tagtccacgcccatttcatcaagag

SEQ ID NO: 206917 - DNA, 25 bp, Artificial
  probe
  misc_feature (1)..(25): SEQ ID NO: 5487; WAN024FHT_at; Start 250; Stop 274
gataatcaactgaagggcacgttgg

SEQ ID NO: 206918 - DNA, 25 bp, Artificial
  probe
  misc_feature (1)..(25): SEQ ID NO: 5487; WAN024FHT_at; Start 256; Stop 280
caactgaagggcacgttggaattct

SEQ ID NO: 206919 - DNA, 25 bp, Artificial
  probe
  misc_feature (1)..(25): SEQ ID NO: 5487; WAN024FHT_at; Start 213; Stop 237
agcggtagtcagtcaagttgaagtc

SEQ ID NO: 206920 - DNA, 25 bp, Artificial
  probe
  misc_feature (1)..(25): SEQ ID NO: 5487; WAN024FHT_at; Start 89; Stop 113
gcttcaaagtagtccacgcccattt

SEQ ID NO: 206921 - DNA, 25 bp, Artificial
  probe
  misc_feature (1)..(25): SEQ ID NO: 5487; WAN024FHT_at; Start 275; Stop 299
aattcttcttggatttgttctggag

SEQ ID NO: 206922 - DNA, 25 bp, Artificial
  probe
  misc_feature (1)..(25): SEQ ID NO: 5487; WAN024FHT_at; Start 142; Stop 166
ggcattttcccacatctcatcgtta

SEQ ID NO: 206923 - DNA, 25 bp, Artificial
  probe
  misc_feature (1)..(25): SEQ ID NO: 5487; WAN024FHT_at; Start 80; Stop 104
tcaccttcggcttcaaagtagtcca

SEQ ID NO: 206924 - DNA, 25 bp, Artificial
  probe
  misc_feature (1)..(25): SEQ ID NO: 5487; WAN024FHT_at; Start 128; Stop 152
cgaagcatggtttgggcattttccc

SEQ ID NO: 206925 - DNA, 25 bp, Artificial
  probe
  misc_feature (1)..(25): SEQ ID NO: 5487; WAN024FHT_at; Start 182; Stop 206
gtatcttgagggtcacgaagagaga

SEQ ID NO: 206926 - DNA, 25 bp, Artificial
  probe
  misc_feature (1)..(25): SEQ ID NO: 5487; WAN024FHT_at; Start 173; Stop 197
tacttatgagtatcttgagggtcac

SEQ ID NO: 206927 - DNA, 25 bp, Artificial
  probe
  misc_feature (1)..(25): SEQ ID NO: 5487; WAN024FHT_at; Start 51; Stop 75
tatccaattttggtccgtagaaggc

SEQ ID NO: 206928 - DNA, 25 bp, Artificial
  probe
  misc_feature (1)..(25): SEQ ID NO: 5487; WAN024FHT_at; Start 232; Stop 256
gaagtcttcataaacatcgataatc

SEQ ID NO: 206929 - DNA, 25 bp, Artificial
  probe
  misc_feature (1)..(25): SEQ ID NO: 5487; WAN024FHT_at; Start 33; Stop 57
gggcagttttaatctggatatccaa

SEQ ID NO: 206930 - DNA, 25 bp, Artificial
  probe
  misc_feature (1)..(25): SEQ ID NO: 5487; WAN024FHT_at; Start 73; Stop 97
ggctgcttcaccttcggcttcaaag

SEQ ID NO: 206931 - DNA, 25 bp, Artificial
  probe
  misc_feature (1)..(25): SEQ ID NO: 5487; WAN024FHT_at; Start 113; Stop 137
tcatcaagagctgcacgaagcatgg

SEQ ID NO: 206932 - DNA, 25 bp, Artificial
  probe
  misc_feature (1)..(25): SEQ ID NO: 5487; WAN024FHT_at; Start 246; Stop 270
catcgataatcaactgaagggcacg

SEQ ID NO: 206933 - DNA, 25 bp, Artificial
  probe
  misc_feature (1)..(25): SEQ ID NO: 5487; WAN024FHT_at; Start 152; Stop 176
cacatctcatcgttatcaaagtact

SEQ ID NO: 206934 - DNA, 25 bp, Artificial
  probe
  misc_feature (1)..(25): SEQ ID NO: 5487; WAN024FHT_at; Start 26; Stop 50
tttccaagggcagttttaatctgga

SEQ ID NO: 206935 - DNA, 25 bp, Artificial
  probe
  misc_feature (1)..(25): SEQ ID NO: 5487; WAN024FHT_at; Start 159; Stop 183
catcgttatcaaagtacttatgagt

SEQ ID NO: 206936 - DNA, 25 bp, Artificial
  probe
  misc_feature (1)..(25): SEQ ID NO: 5487; WAN024FHT_at; Start 264; Stop 288
gggcacgttggaattcttcttggat

SEQ ID NO: 206937 - DNA, 25 bp, Artificial
  probe
  misc_feature (1)..(25): SEQ ID NO: 5487; WAN024FHT_at; Start 116; Stop 140
tcaagagctgcacgaagcatggttt

SEQ ID NO: 206938 - DNA, 25 bp, Artificial
  probe
  misc_feature (1)..(25): SEQ ID NO: 5487; WAN024FHT_at; Start 55; Stop 79
caattttggtccgtagaaggctgct

SEQ ID NO: 206939 - DNA, 25 bp, Artificial
  probe
  misc_feature (1)..(25): SEQ ID NO: 4305; WAN024FHU_at; Start 166; Stop 190
gtcagtatcgtagtagaaaccatct

SEQ ID NO: 206940 - DNA, 25 bp, Artificial
  probe
  misc_feature (1)..(25): SEQ ID NO: 4305; WAN024FHU_at; Start 67; Stop 91
cacttcttcacgaatagatgggaag

SEQ ID NO: 206941 - DNA, 25 bp, Artificial
  probe
  misc_feature (1)..(25): SEQ ID NO: 4305; WAN024FHU_at; Start 33; Stop 57
catttttgaagatttcacgtgcctc

SEQ ID NO: 206942 - DNA, 25 bp, Artificial
  probe
  misc_feature (1)..(25): SEQ ID NO: 4305; WAN024FHU_at; Start 137; Stop 161
tcttcgttagagatttgaccagctg

SEQ ID NO: 206943 - DNA, 25 bp, Artificial
  probe
  misc_feature (1)..(25): SEQ ID NO: 4305; WAN024FHU_at; Start 63; Stop 87
tagtcacttcttcacgaatagatgg

SEQ ID NO: 206944 - DNA, 25 bp, Artificial
  probe
  misc_feature (1)..(25): SEQ ID NO: 4305; WAN024FHU_at; Start 40; Stop 64
gaagatttcacgtgcctcgtcttta

SEQ ID NO: 206945 - DNA, 25 bp, Artificial
  probe
  misc_feature (1)..(25): SEQ ID NO: 4305; WAN024FHU_at; Start 201; Stop 225
gaccaactcccaagtgaatgtctgg

SEQ ID NO: 206946 - DNA, 25 bp, Artificial
  probe
  misc_feature (1)..(25): SEQ ID NO: 4305; WAN024FHU_at; Start 119; Stop 143
tcttcgatacgaggaaggtcttcgt

SEQ ID NO: 206947 - DNA, 25 bp, Artificial
  probe
  misc_feature (1)..(25): SEQ ID NO: 4305; WAN024FHU_at; Start 37; Stop 61
tttgaagatttcacgtgcctcgtct

SEQ ID NO: 206948 - DNA, 25 bp, Artificial
  probe
  misc_feature (1)..(25): SEQ ID NO: 4305; WAN024FHU_at; Start 48; Stop 72
cacgtgcctcgtctttagtcacttc

SEQ ID NO: 206949 - DNA, 25 bp, Artificial
  probe
  misc_feature (1)..(25): SEQ ID NO: 4305; WAN024FHU_at; Start 43; Stop 67
gatttcacgtgcctcgtctttagtc

SEQ ID NO: 206950 - DNA, 25 bp, Artificial
  probe
  misc_feature (1)..(25): SEQ ID NO: 4305; WAN024FHU_at; Start 204; Stop 228
caactcccaagtgaatgtctgggaa

SEQ ID NO: 206951 - DNA, 25 bp, Artificial
  probe
  misc_feature (1)..(25): SEQ ID NO: 4305; WAN024FHU_at; Start 230; Stop 254
agacgacgagctgcttgggcgaaca

SEQ ID NO: 206952 - DNA, 25 bp, Artificial
  probe
  misc_feature (1)..(25): SEQ ID NO: 4305; WAN024FHU_at; Start 1; Stop 25
gtgttcttcaatcaattccaacttg

SEQ ID NO: 206953 - DNA, 25 bp, Artificial
  probe
  misc_feature (1)..(25): SEQ ID NO: 4305; WAN024FHU_at; Start 17; Stop 41
tccaacttgtaagggtcatttttga

SEQ ID NO: 206954 - DNA, 25 bp, Artificial
  probe
  misc_feature (1)..(25): SEQ ID NO: 4305; WAN024FHU_at; Start 108; Stop 132
tttgcatttcttcttcgatacgagg

SEQ ID NO: 206955 - DNA, 25 bp, Artificial
  probe
  misc_feature (1)..(25): SEQ ID NO: 4305; WAN024FHU_at; Start 96; Stop 120
ctttgacgattttttgcatttcttc

SEQ ID NO: 206956 - DNA, 25 bp, Artificial
  probe
  misc_feature (1)..(25): SEQ ID NO: 4305; WAN024FHU_at; Start 233; Stop 257
cgacgagctgcttgggcgaacaagt

SEQ ID NO: 206957 - DNA, 25 bp, Artificial
  probe
  misc_feature (1)..(25): SEQ ID NO: 4305; WAN024FHU_at; Start 197; Stop 221
gctggaccaactcccaagtgaatgt

SEQ ID NO: 206958 - DNA, 25 bp, Artificial
  probe
  misc_feature (1)..(25): SEQ ID NO: 4305; WAN024FHU_at; Start 216; Stop 240
gaatgtctgggaaaagacgacgagc

SEQ ID NO: 206959 - DNA, 25 bp, Artificial
  probe
  misc_feature (1)..(25): SEQ ID NO: 4305; WAN024FHU_at; Start 74; Stop 98
tcacgaatagatgggaagttttctt

SEQ ID NO: 206960 - DNA, 25 bp, Artificial
  probe
  misc_feature (1)..(25): SEQ ID NO: 4305; WAN024FHU_at; Start 181; Stop 205
gaaaccatcttcgatggctggacca

SEQ ID NO: 206961 - DNA, 25 bp, Artificial
  probe
  misc_feature (1)..(25): SEQ ID NO: 4305; WAN024FHU_at; Start 112; Stop 136
catttcttcttcgatacgaggaagg

SEQ ID NO: 206962 - DNA, 25 bp, Artificial
  probe
  misc_feature (1)..(25): SEQ ID NO: 4305; WAN024FHU_at; Start 124; Stop 148
gatacgaggaaggtcttcgttagag

SEQ ID NO: 206963 - DNA, 25 bp, Artificial
  probe
  misc_feature (1)..(25): SEQ ID NO: 4305; WAN024FHU_at; Start 27; Stop 51
aagggtcatttttgaagatttcacg

SEQ ID NO: 206964 - DNA, 25 bp, Artificial
  probe
  misc_feature (1)..(25): SEQ ID NO: 4305; WAN024FHU_at; Start 227; Stop 251
aaaagacgacgagctgcttgggcga

SEQ ID NO: 206965 - DNA, 25 bp, Artificial
  probe
  misc_feature (1)..(25): SEQ ID NO: 4305; WAN024FHU_at; Start 81; Stop 105
tagatgggaagttttctttgacgat

SEQ ID NO: 206966 - DNA, 25 bp, Artificial
  probe
  misc_feature (1)..(25): SEQ ID NO: 4305; WAN024FHU_at; Start 195; Stop 219
tggctggaccaactcccaagtgaat

SEQ ID NO: 206967 - DNA, 25 bp, Artificial
  probe
  misc_feature (1)..(25): SEQ ID NO: 4305; WAN024FHU_at; Start 186; Stop 210
catcttcgatggctggaccaactcc

SEQ ID NO: 206968 - DNA, 25 bp, Artificial
  probe
  misc_feature (1)..(25): SEQ ID NO: 4305; WAN024FHU_at; Start 210; Stop 234
ccaagtgaatgtctgggaaaagacg

SEQ ID NO: 206969 - DNA, 25 bp, Artificial
  probe
  misc_feature (1)..(25): SEQ ID NO: 4305; WAN024FHU_at; Start 173; Stop 197
tcgtagtagaaaccatcttcgatgg

SEQ ID NO: 206970 - DNA, 25 bp, Artificial
  probe
  misc_feature (1)..(25): SEQ ID NO: 4305; WAN024FHU_at; Start 140; Stop 164
tcgttagagatttgaccagctgtgt

SEQ ID NO: 206971 - DNA, 25 bp, Artificial
  probe
  misc_feature (1)..(25): SEQ ID NO: 4305; WAN024FHU_at; Start 219; Stop 243
tgtctgggaaaagacgacgagctgc

SEQ ID NO: 206972 - DNA, 25 bp, Artificial
  probe
  misc_feature (1)..(25): SEQ ID NO: 4305; WAN024FHU_at; Start 221; Stop 245
tctgggaaaagacgacgagctgctt

SEQ ID NO: 206973 - DNA, 25 bp, Artificial
  probe
  misc_feature (1)..(25): SEQ ID NO: 4964; WAN024FHV_at; Start 118; Stop 142
cggacagttcattggacgaaggaca

SEQ ID NO: 206974 - DNA, 25 bp, Artificial
  probe
  misc_feature (1)..(25): SEQ ID NO: 4964; WAN024FHV_at; Start 53; Stop 77
tcagcgatacggattggcaattcac

SEQ ID NO: 206975 - DNA, 25 bp, Artificial
  probe
  misc_feature (1)..(25): SEQ ID NO: 4964; WAN024FHV_at; Start 298; Stop 322
caattcacgacggatagtcgcacca

SEQ ID NO: 206976 - DNA, 25 bp, Artificial
  probe
  misc_feature (1)..(25): SEQ ID NO: 4964; WAN024FHV_at; Start 209; Stop 233
gaagtcttgtaaagctcaacagaag

SEQ ID NO: 206977 - DNA, 25 bp, Artificial
  probe
  misc_feature (1)..(25): SEQ ID NO: 4964; WAN024FHV_at; Start 325; Stop 349
tggcaaccagaatggcaaaccttgt

SEQ ID NO: 206978 - DNA, 25 bp, Artificial
  probe
  misc_feature (1)..(25): SEQ ID NO: 4964; WAN024FHV_at; Start 191; Stop 215
taatgatcccagtgaccagaagtct

SEQ ID NO: 206979 - DNA, 25 bp, Artificial
  probe
  misc_feature (1)..(25): SEQ ID NO: 4964; WAN024FHV_at; Start 178; Stop 202
catgtcttcttggtaatgatcccag

SEQ ID NO: 206980 - DNA, 25 bp, Artificial
  probe
  misc_feature (1)..(25): SEQ ID NO: 4964; WAN024FHV_at; Start 99; Stop 123
tgaaaacttggatgtggtgcggaca

SEQ ID NO: 206981 - DNA, 25 bp, Artificial
  probe
  misc_feature (1)..(25): SEQ ID NO: 4964; WAN024FHV_at; Start 153; Stop 177
cgtcacccatgtccatggttgggaa

SEQ ID NO: 206982 - DNA, 25 bp, Artificial
  probe
  misc_feature (1)..(25): SEQ ID NO: 4964; WAN024FHV_at; Start 248; Stop 272
tagacgtgttggtagccagaaacca

SEQ ID NO: 206983 - DNA, 25 bp, Artificial
  probe
  misc_feature (1)..(25): SEQ ID NO: 4964; WAN024FHV_at; Start 2; Stop 26
tgaaggccagtgagggcaccagatt

SEQ ID NO: 206984 - DNA, 25 bp, Artificial
  probe
  misc_feature (1)..(25): SEQ ID NO: 4964; WAN024FHV_at; Start 312; Stop 336
tagtcgcaccatttggcaaccagaa

SEQ ID NO: 206985 - DNA, 25 bp, Artificial
  probe
  misc_feature (1)..(25): SEQ ID NO: 4964; WAN024FHV_at; Start 225; Stop 249
caacagaagcaagtggtggagtgta

SEQ ID NO: 206986 - DNA, 25 bp, Artificial
  probe
  misc_feature (1)..(25): SEQ ID NO: 4964; WAN024FHV_at; Start 165; Stop 189
ccatggttgggaacatgtcttcttg

SEQ ID NO: 206987 - DNA, 25 bp, Artificial
  probe
  misc_feature (1)..(25): SEQ ID NO: 4964; WAN024FHV_at; Start 195; Stop 219
gatcccagtgaccagaagtcttgta

SEQ ID NO: 206988 - DNA, 25 bp, Artificial
  probe
  misc_feature (1)..(25): SEQ ID NO: 4964; WAN024FHV_at; Start 306; Stop 330
gacggatagtcgcaccatttggcaa

SEQ ID NO: 206989 - DNA, 25 bp, Artificial
  probe
  misc_feature (1)..(25): SEQ ID NO: 4964; WAN024FHV_at; Start 218; Stop 242
taaagctcaacagaagcaagtggtg

SEQ ID NO: 206990 - DNA, 25 bp, Artificial
  probe
  misc_feature (1)..(25): SEQ ID NO: 4964; WAN024FHV_at; Start 127; Stop 151
cattggacgaaggacaaattcttcc

SEQ ID NO: 206991 - DNA, 25 bp, Artificial
  probe
  misc_feature (1)..(25): SEQ ID NO: 4964; WAN024FHV_at; Start 338; Stop 362
ggcaaaccttgtcccacttcttgtg

SEQ ID NO: 206992 - DNA, 25 bp, Artificial
  probe
  misc_feature (1)..(25): SEQ ID NO: 4964; WAN024FHV_at; Start 290; Stop 314
tagcgttccaattcacgacggatag

SEQ ID NO: 206993 - DNA, 25 bp, Artificial
  probe
  misc_feature (1)..(25): SEQ ID NO: 4964; WAN024FHV_at; Start 12; Stop 36
tgagggcaccagatttttcgtaacg

SEQ ID NO: 206994 - DNA, 25 bp, Artificial
  probe
  misc_feature (1)..(25): SEQ ID NO: 4964; WAN024FHV_at; Start 204; Stop 228
gaccagaagtcttgtaaagctcaac

SEQ ID NO: 206995 - DNA, 25 bp, Artificial
  probe
  misc_feature (1)..(25): SEQ ID NO: 4964; WAN024FHV_at; Start 257; Stop 281
tggtagccagaaaccaactctttgt

SEQ ID NO: 206996 - DNA, 25 bp, Artificial
  probe
  misc_feature (1)..(25): SEQ ID NO: 4964; WAN024FHV_at; Start 104; Stop 128
acttggatgtggtgcggacagttca

SEQ ID NO: 206997 - DNA, 25 bp, Artificial
  probe
  misc_feature (1)..(25): SEQ ID NO: 4964; WAN024FHV_at; Start 26; Stop 50
ttttcgtaacggtgcatcataccga

SEQ ID NO: 206998 - DNA, 25 bp, Artificial
  probe
  misc_feature (1)..(25): SEQ ID NO: 4964; WAN024FHV_at; Start 244; Stop 268
agtgtagacgtgttggtagccagaa

SEQ ID NO: 206999 - DNA, 25 bp, Artificial
  probe
  misc_feature (1)..(25): SEQ ID NO: 4964; WAN024FHV_at; Start 86; Stop 110
tgaacatggtgtttgaaaacttgga

SEQ ID NO: 207000 - DNA, 25 bp, Artificial
  probe
  misc_feature (1)..(25): SEQ ID NO: 4964; WAN024FHV_at; Start 48; Stop 72
cgatttcagcgatacggattggcaa

SEQ ID NO: 207001 - DNA, 25 bp, Artificial
  probe
  misc_feature (1)..(25): SEQ ID NO: 4964; WAN024FHV_at; Start 271; Stop 295
caactctttgtttacgatgtagcgt

SEQ ID NO: 207002 - DNA, 25 bp, Artificial
  probe
  misc_feature (1)..(25): SEQ ID NO: 4964; WAN024FHV_at; Start 75; Stop 99
cacggtaagagtgaacatggtgttt

SEQ ID NO: 207003 - DNA, 25 bp, Artificial
  probe
  misc_feature (1)..(25): SEQ ID NO: 4964; WAN024FHV_at; Start 62; Stop 86
cggattggcaattcacggtaagagt

SEQ ID NO: 207004 - DNA, 25 bp, Artificial
  probe
  misc_feature (1)..(25): SEQ ID NO: 4964; WAN024FHV_at; Start 39; Stop 63
gcatcataccgatttcagcgatacg

SEQ ID NO: 207005 - DNA, 25 bp, Artificial
  probe
  misc_feature (1)..(25): SEQ ID NO: 4964; WAN024FHV_at; Start 20; Stop 44
ccagatttttcgtaacggtgcatca

SEQ ID NO: 207006 - DNA, 25 bp, Artificial
  probe
  misc_feature (1)..(25): SEQ ID NO: 4964; WAN024FHV_at; Start 286; Stop 310
gatgtagcgttccaattcacgacgg

SEQ ID NO: 207007 - DNA, 25 bp, Artificial
  probe
  misc_feature (1)..(25): SEQ ID NO: 2109; WAN024FHW_at; Start 1360; Stop 1384
gaaaatgcccaaaccatgcttcgtg

SEQ ID NO: 207008 - DNA, 25 bp, Artificial
  probe
  misc_feature (1)..(25): SEQ ID NO: 2109; WAN024FHW_at; Start 748; Stop 772
gaagctaaggaacgtgaccaccgta

SEQ ID NO: 207009 - DNA, 25 bp, Artificial
  probe
  misc_feature (1)..(25): SEQ ID NO: 2109; WAN024FHW_at; Start 1803; Stop 1827
gatccgtgcttcacaaaccagcaag

SEQ ID NO: 207010 - DNA, 25 bp, Artificial
  probe
  misc_feature (1)..(25): SEQ ID NO: 2109; WAN024FHW_at; Start 1736; Stop 1760
ccaagaaactccgtgaccgcggtgt

SEQ ID NO: 207011 - DNA, 25 bp, Artificial
  probe
  misc_feature (1)..(25): SEQ ID NO: 2109; WAN024FHW_at; Start 142; Stop 166
gccttggctggtaaattcaacggca

SEQ ID NO: 207012 - DNA, 25 bp, Artificial
  probe
  misc_feature (1)..(25): SEQ ID NO: 2109; WAN024FHW_at; Start 532; Stop 556
gacgaaggcggtttgactatctatc

SEQ ID NO: 207013 - DNA, 25 bp, Artificial
  probe
  misc_feature (1)..(25): SEQ ID NO: 2109; WAN024FHW_at; Start 838; Stop 862
ttgccaaatggtgcgactatccgtc

SEQ ID NO: 207014 - DNA, 25 bp, Artificial
  probe
  misc_feature (1)..(25): SEQ ID NO: 2109; WAN024FHW_at; Start 1953; Stop 1977
tatcgccaacaaatcacgcgttgag

SEQ ID NO: 207015 - DNA, 25 bp, Artificial
  probe
  misc_feature (1)..(25): SEQ ID NO: 2109; WAN024FHW_at; Start 1389; Stop 1413
tcttgatgaaatgggcgtggactac

SEQ ID NO: 207016 - DNA, 25 bp, Artificial
  probe
  misc_feature (1)..(25): SEQ ID NO: 2109; WAN024FHW_at; Start 203; Stop 227
gaagcatcgaaattgtgacacctga

SEQ ID NO: 207017 - DNA, 25 bp, Artificial
  probe
  misc_feature (1)..(25): SEQ ID NO: 2109; WAN024FHW_at; Start 1135; Stop 1159
tacgaaaaatctggtgccctcactg

SEQ ID NO: 207018 - DNA, 25 bp, Artificial
  probe
  misc_feature (1)..(25): SEQ ID NO: 2109; WAN024FHW_at; Start 306; Stop 330
cattcacttgggagttggtccagcc

SEQ ID NO: 207019 - DNA, 25 bp, Artificial
  probe
  misc_feature (1)..(25): SEQ ID NO: 2109; WAN024FHW_at; Start 1708; Stop 1732
aaacacgtggactacgcttgggaag

SEQ ID NO: 207020 - DNA, 25 bp, Artificial
  probe
  misc_feature (1)..(25): SEQ ID NO: 2109; WAN024FHW_at; Start 1760; Stop 1784
tccgtgcagacgtagatgagcgcaa

SEQ ID NO: 207021 - DNA, 25 bp, Artificial
  probe
  misc_feature (1)..(25): SEQ ID NO: 2109; WAN024FHW_at; Start 806; Stop 830
cacaagaagtgggacaaggtttgcc

SEQ ID NO: 207022 - DNA, 25 bp, Artificial
  probe
  misc_feature (1)..(25): SEQ ID NO: 2109; WAN024FHW_at; Start 855; Stop 879
tatccgtcgtgaattggaacgctac

SEQ ID NO: 207023 - DNA, 25 bp, Artificial
  probe
  misc_feature (1)..(25): SEQ ID NO: 2109; WAN024FHW_at; Start 45; Stop 69
taacattactttcccagatggcgct

SEQ ID NO: 207024 - DNA, 25 bp, Artificial
  probe
  misc_feature (1)..(25): SEQ ID NO: 2109; WAN024FHW_at; Start 1404; Stop 1428
cgtggactactttgaagccgaaggt

SEQ ID NO: 207025 - DNA, 25 bp, Artificial
  probe
  misc_feature (1)..(25): SEQ ID NO: 2109; WAN024FHW_at; Start 218; Stop 242
tgacacctgatcacgaagatgccct

SEQ ID NO: 207026 - DNA, 25 bp, Artificial
  probe
  misc_feature (1)..(25): SEQ ID NO: 2109; WAN024FHW_at; Start 1177; Stop 1201
gaaatgtcactcaacgacggtcacc

SEQ ID NO: 207027 - DNA, 25 bp, Artificial
  probe
  misc_feature (1)..(25): SEQ ID NO: 2109; WAN024FHW_at; Start 820; Stop 844
caaggtttgccattctggttgccaa

SEQ ID NO: 207028 - DNA, 25 bp, Artificial
  probe
  misc_feature (1)..(25): SEQ ID NO: 2109; WAN024FHW_at; Start 1554; Stop 1578
agctgatggcgaagatcaccgtcca

SEQ ID NO: 207029 - DNA, 25 bp, Artificial
  probe
  misc_feature (1)..(25): SEQ ID NO: 2109; WAN024FHW_at; Start 1870; Stop 1894
gaaacagtcaacgttcgtcgctacg

SEQ ID NO: 207030 - DNA, 25 bp, Artificial
  probe
  misc_feature (1)..(25): SEQ ID NO: 2109; WAN024FHW_at; Start 180; Stop 204
tactcgcgctatcactgaagatgga

SEQ ID NO: 207031 - DNA, 25 bp, Artificial
  probe
  misc_feature (1)..(25): SEQ ID NO: 2109; WAN024FHW_at; Start 517; Stop 541
gaagaacactcagaagacgaaggcg

SEQ ID NO: 207032 - DNA, 25 bp, Artificial
  probe
  misc_feature (1)..(25): SEQ ID NO: 2109; WAN024FHW_at; Start 1517; Stop 1541
tcttgttgccagaacgcttcgacct

SEQ ID NO: 207033 - DNA, 25 bp, Artificial
  probe
  misc_feature (1)..(25): SEQ ID NO: 2109; WAN024FHW_at; Start 649; Stop 673
tactggcgtggaaacagcgacaacg

SEQ ID NO: 207034 - DNA, 25 bp, Artificial
  probe
  misc_feature (1)..(25): SEQ ID NO: 2109; WAN024FHW_at; Start 632; Stop 656
tccatgtagctggtgcgtactggcg

SEQ ID NO: 207035 - DNA, 25 bp, Artificial
  probe
  misc_feature (1)..(25): SEQ ID NO: 2109; WAN024FHW_at; Start 1223; Stop 1247
tccaagaagaattccaacgtgccct

SEQ ID NO: 207036 - DNA, 25 bp, Artificial
  probe
  misc_feature (1)..(25): SEQ ID NO: 2109; WAN024FHW_at; Start 1344; Stop 1368
taacgatgagatgtgggaaaatgcc

SEQ ID NO: 207037 - DNA, 25 bp, Artificial
  probe
  misc_feature (1)..(25): SEQ ID NO: 2109; WAN024FHW_at; Start 566; Stop 590
aatatgtagacctctgccgtggacc

SEQ ID NO: 207038 - DNA, 25 bp, Artificial
  probe
  misc_feature (1)..(25): SEQ ID NO: 2109; WAN024FHW_at; Start 363; Stop 387
cacagctggtcaaatctctaacgaa

SEQ ID NO: 207039 - DNA, 25 bp, Artificial
  probe
  misc_feature (1)..(25): SEQ ID NO: 2109; WAN024FHW_at; Start 1092; Stop 1116
tgaattgccaatccgtatcgctgaa

SEQ ID NO: 207040 - DNA, 25 bp, Artificial
  probe
  misc_feature (1)..(25): SEQ ID NO: 2109; WAN024FHW_at; Start 1026; Stop 1050
tgtccttcgtccaatgaactgtccg

SEQ ID NO: 207041 - DNA, 25 bp, Artificial
  probe
  misc_feature (1)..(25): SEQ ID NO: 3885; WAN024FHX_at; Start 971; Stop 995
ccagtggactaggttcatcaggcct

SEQ ID NO: 207042 - DNA, 25 bp, Artificial
  probe
  misc_feature (1)..(25): SEQ ID NO: 3885; WAN024FHX_at; Start 512; Stop 536
tggtcaaagaaaaagtgactctgac

SEQ ID NO: 207043 - DNA, 25 bp, Artificial
  probe
  misc_feature (1)..(25): SEQ ID NO: 3885; WAN024FHX_at; Start 818; Stop 842
ccttgctccaacaaatggaggaggc

SEQ ID NO: 207044 - DNA, 25 bp, Artificial
  probe
  misc_feature (1)..(25): SEQ ID NO: 3885; WAN024FHX_at; Start 284; Stop 308
ttctcttgaaaaaggatgaatccaa

SEQ ID NO: 207045 - DNA, 25 bp, Artificial
  probe
  misc_feature (1)..(25): SEQ ID NO: 3885; WAN024FHX_at; Start 437; Stop 461
tctatgcttctggtggagcgagagt

SEQ ID NO: 207046 - DNA, 25 bp, Artificial
  probe
  misc_feature (1)..(25): SEQ ID NO: 3885; WAN024FHX_at; Start 268; Stop 292
cagcgttcgggagtctttctcttga

SEQ ID NO: 207047 - DNA, 25 bp, Artificial
  probe
  misc_feature (1)..(25): SEQ ID NO: 3885; WAN024FHX_at; Start 789; Stop 813
catgggatttgatttgacggtagat

SEQ ID NO: 207048 - DNA, 25 bp, Artificial
  probe
  misc_feature (1)..(25): SEQ ID NO: 3885; WAN024FHX_at; Start 977; Stop 1001
gactaggttcatcaggcctcacaac

SEQ ID NO: 207049 - DNA, 25 bp, Artificial
  probe
  misc_feature (1)..(25): SEQ ID NO: 3885; WAN024FHX_at; Start 122; Stop 146
ccaccaaggccgcagcaggaattat

SEQ ID NO: 207050 - DNA, 25 bp, Artificial
  probe
  misc_feature (1)..(25): SEQ ID NO: 3885; WAN024FHX_at; Start 638; Stop 662
aagtggatgtccgtcctcaaaaagg

SEQ ID NO: 207051 - DNA, 25 bp, Artificial
  probe
  misc_feature (1)..(25): SEQ ID NO: 3885; WAN024FHX_at; Start 216; Stop 240
tgtggatttattagctgatttagag

SEQ ID NO: 207052 - DNA, 25 bp, Artificial
  probe
  misc_feature (1)..(25): SEQ ID NO: 3885; WAN024FHX_at; Start 696; Stop 720
ggaagattaccctgttgtcatgcca

SEQ ID NO: 207053 - DNA, 25 bp, Artificial
  probe
  misc_feature (1)..(25): SEQ ID NO: 3885; WAN024FHX_at; Start 1087; Stop 1111
tatgtcaaacgagtaaaaagcgaat

SEQ ID NO: 207054 - DNA, 25 bp, Artificial
  probe
  misc_feature (1)..(25): SEQ ID NO: 3885; WAN024FHX_at; Start 68; Stop 92
tctcgagagaaagtgacctagaggt

SEQ ID NO: 207055 - DNA, 25 bp, Artificial
  probe
  misc_feature (1)..(25): SEQ ID NO: 3885; WAN024FHX_at; Start 129; Stop 153
ggccgcagcaggaattatcagtcct

SEQ ID NO: 207056 - DNA, 25 bp, Artificial
  probe
  misc_feature (1)..(25): SEQ ID NO: 3885; WAN024FHX_at; Start 645; Stop 669
tgtccgtcctcaaaaaggacaacta

SEQ ID NO: 207057 - DNA, 25 bp, Artificial
  probe
  misc_feature (1)..(25): SEQ ID NO: 3885; WAN024FHX_at; Start 24; Stop 48
cattattggagcaggaattgtggga

SEQ ID NO: 207058 - DNA, 25 bp, Artificial
  probe
  misc_feature (1)..(25): SEQ ID NO: 3885; WAN024FHX_at; Start 1072; Stop 1096
tacccaattgaaaactatgtcaaac

SEQ ID NO: 207059 - DNA, 25 bp, Artificial
  probe
  misc_feature (1)..(25): SEQ ID NO: 3885; WAN024FHX_at; Start 673; Stop 697
gattatcagcttgcccaagacatgg

SEQ ID NO: 207060 - DNA, 25 bp, Artificial
  probe
  misc_feature (1)..(25): SEQ ID NO: 3885; WAN024FHX_at; Start 256; Stop 280
atcgacttttaccagcgttcgggag

SEQ ID NO: 207061 - DNA, 25 bp, Artificial
  probe
  misc_feature (1)..(25): SEQ ID NO: 3885; WAN024FHX_at; Start 985; Stop 1009
tcatcaggcctcacaactggtccta

SEQ ID NO: 207062 - DNA, 25 bp, Artificial
  probe
  misc_feature (1)..(25): SEQ ID NO: 3885; WAN024FHX_at; Start 177; Stop 201
agcctggtacaagatggcgcgcttg

SEQ ID NO: 207063 - DNA, 25 bp, Artificial
  probe
  misc_feature (1)..(25): SEQ ID NO: 3885; WAN024FHX_at; Start 174; Stop 198
taaagcctggtacaagatggcgcgc

SEQ ID NO: 207064 - DNA, 25 bp, Artificial
  probe
  misc_feature (1)..(25): SEQ ID NO: 3885; WAN024FHX_at; Start 625; Stop 649
cctttaggttatgaagtggatgtcc

SEQ ID NO: 207065 - DNA, 25 bp, Artificial
  probe
  misc_feature (1)..(25): SEQ ID NO: 3885; WAN024FHX_at; Start 54; Stop 78
agctgcctactacctctcgagagaa

SEQ ID NO: 207066 - DNA, 25 bp, Artificial
  probe
  misc_feature (1)..(25): SEQ ID NO: 3885; WAN024FHX_at; Start 144; Stop 168
tatcagtccttggttttccaaacgc

SEQ ID NO: 207067 - DNA, 25 bp, Artificial
  probe
  misc_feature (1)..(25): SEQ ID NO: 3885; WAN024FHX_at; Start 107; Stop 131
atgagcaaggtcaagccaccaaggc

SEQ ID NO: 207068 - DNA, 25 bp, Artificial
  probe
  misc_feature (1)..(25): SEQ ID NO: 3885; WAN024FHX_at; Start 81; Stop 105
tgacctagaggtgaccgtttttgac

SEQ ID NO: 207069 - DNA, 25 bp, Artificial
  probe
  misc_feature (1)..(25): SEQ ID NO: 3885; WAN024FHX_at; Start 702; Stop 726
ttaccctgttgtcatgccagaaggg

SEQ ID NO: 207070 - DNA, 25 bp, Artificial
  probe
  misc_feature (1)..(25): SEQ ID NO: 3885; WAN024FHX_at; Start 1030; Stop 1054
caactgatccaagacaaggagttga

SEQ ID NO: 207071 - DNA, 25 bp, Artificial
  probe
  misc_feature (1)..(25): SEQ ID NO: 3885; WAN024FHX_at; Start 165; Stop 189
acgccgtaataaagcctggtacaag

SEQ ID NO: 207072 - DNA, 25 bp, Artificial
  probe
  misc_feature (1)..(25): SEQ ID NO: 3885; WAN024FHX_at; Start 92; Stop 116
tgaccgtttttgaccatgagcaagg

SEQ ID NO: 207073 - DNA, 25 bp, Artificial
  probe
  misc_feature (1)..(25): SEQ ID NO: 3885; WAN024FHX_at; Start 684; Stop 708
tgcccaagacatggaagattaccct

SEQ ID NO: 207074 - DNA, 25 bp, Artificial
  probe
  misc_feature (1)..(25): SEQ ID NO: 3885; WAN024FHX_at; Start 38; Stop 62
gaattgtgggagcaacagctgccta

SEQ ID NO: 207075 - DNA, 25 bp, Artificial
  probe
  misc_feature (1)..(25): SEQ ID NO: 5649; WAN024FHY_at; Start 99; Stop 123
tcttaccgctggaagcaggaccatc

SEQ ID NO: 207076 - DNA, 25 bp, Artificial
  probe
  misc_feature (1)..(25): SEQ ID NO: 5649; WAN024FHY_at; Start 193; Stop 217
caagatcctgtagccatgtgcccag

SEQ ID NO: 207077 - DNA, 25 bp, Artificial
  probe
  misc_feature (1)..(25): SEQ ID NO: 5649; WAN024FHY_at; Start 71; Stop 95
tccttagcaataatctttgcgaccg

SEQ ID NO: 207078 - DNA, 25 bp, Artificial
  probe
  misc_feature (1)..(25): SEQ ID NO: 5649; WAN024FHY_at; Start 39; Stop 63
tagctcctgtatcaaggtaggtgaa

SEQ ID NO: 207079 - DNA, 25 bp, Artificial
  probe
  misc_feature (1)..(25): SEQ ID NO: 5649; WAN024FHY_at; Start 2; Stop 26
tggttcttaagagccatataggtcg

SEQ ID NO: 207080 - DNA, 25 bp, Artificial
  probe
  misc_feature (1)..(25): SEQ ID NO: 5649; WAN024FHY_at; Start 187; Stop 211
gcaaaccaagatcctgtagccatgt

SEQ ID NO: 207081 - DNA, 25 bp, Artificial
  probe
  misc_feature (1)..(25): SEQ ID NO: 5649; WAN024FHY_at; Start 102; Stop 126
taccgctggaagcaggaccatcaat

SEQ ID NO: 207082 - DNA, 25 bp, Artificial
  probe
  misc_feature (1)..(25): SEQ ID NO: 5649; WAN024FHY_at; Start 135; Stop 159
gaattgttttcatatcggctcctat

SEQ ID NO: 207083 - DNA, 25 bp, Artificial
  probe
  misc_feature (1)..(25): SEQ ID NO: 5649; WAN024FHY_at; Start 22; Stop 46
ggtcgctgcacgatacatagctcct

SEQ ID NO: 207084 - DNA, 25 bp, Artificial
  probe
  misc_feature (1)..(25): SEQ ID NO: 5649; WAN024FHY_at; Start 129; Stop 153
caatttgaattgttttcatatcggc

SEQ ID NO: 207085 - DNA, 25 bp, Artificial
  probe
  misc_feature (1)..(25): SEQ ID NO: 5649; WAN024FHY_at; Start 175; Stop 199
tcacctggattagcaaaccaagatc

SEQ ID NO: 207086 - DNA, 25 bp, Artificial
  probe
  misc_feature (1)..(25): SEQ ID NO: 5649; WAN024FHY_at; Start 35; Stop 59
tacatagctcctgtatcaaggtagg

SEQ ID NO: 207087 - DNA, 25 bp, Artificial
  probe
  misc_feature (1)..(25): SEQ ID NO: 5649; WAN024FHY_at; Start 203; Stop 227
tagccatgtgcccaggattcaaggc

SEQ ID NO: 207088 - DNA, 25 bp, Artificial
  probe
  misc_feature (1)..(25): SEQ ID NO: 5649; WAN024FHY_at; Start 86; Stop 110
tttgcgaccgtactcttaccgctgg

SEQ ID NO: 207089 - DNA, 25 bp, Artificial
  probe
  misc_feature (1)..(25): SEQ ID NO: 5649; WAN024FHY_at; Start 116; Stop 140
ggaccatcaatagcaatttgaattg

SEQ ID NO: 207090 - DNA, 25 bp, Artificial
  probe
  misc_feature (1)..(25): SEQ ID NO: 5649; WAN024FHY_at; Start 145; Stop 169
catatcggctcctattttattttta

SEQ ID NO: 207091 - DNA, 25 bp, Artificial
  probe
  misc_feature (1)..(25): SEQ ID NO: 5649; WAN024FHY_at; Start 9; Stop 33
taagagccatataggtcgctgcacg

SEQ ID NO: 207092 - DNA, 25 bp, Artificial
  probe
  misc_feature (1)..(25): SEQ ID NO: 5649; WAN024FHY_at; Start 81; Stop 105
taatctttgcgaccgtactcttacc

SEQ ID NO: 207093 - DNA, 25 bp, Artificial
  probe
  misc_feature (1)..(25): SEQ ID NO: 5649; WAN024FHY_at; Start 200; Stop 224
ctgtagccatgtgcccaggattcaa

SEQ ID NO: 207094 - DNA, 25 bp, Artificial
  probe
  misc_feature (1)..(25): SEQ ID NO: 5649; WAN024FHY_at; Start 6; Stop 30
tcttaagagccatataggtcgctgc

SEQ ID NO: 207095 - DNA, 25 bp, Artificial
  probe
  misc_feature (1)..(25): SEQ ID NO: 5649; WAN024FHY_at; Start 106; Stop 130
gctggaagcaggaccatcaatagca

SEQ ID NO: 207096 - DNA, 25 bp, Artificial
  probe
  misc_feature (1)..(25): SEQ ID NO: 5649; WAN024FHY_at; Start 75; Stop 99
tagcaataatctttgcgaccgtact

SEQ ID NO: 207097 - DNA, 25 bp, Artificial
  probe
  misc_feature (1)..(25): SEQ ID NO: 5649; WAN024FHY_at; Start 170; Stop 194
taacatcacctggattagcaaacca

SEQ ID NO: 207098 - DNA, 25 bp, Artificial
  probe
  misc_feature (1)..(25): SEQ ID NO: 5649; WAN024FHY_at; Start 182; Stop 206
gattagcaaaccaagatcctgtagc

SEQ ID NO: 207099 - DNA, 25 bp, Artificial
  probe
  misc_feature (1)..(25): SEQ ID NO: 5649; WAN024FHY_at; Start 110; Stop 134
gaagcaggaccatcaatagcaattt

SEQ ID NO: 207100 - DNA, 25 bp, Artificial
  probe
  misc_feature (1)..(25): SEQ ID NO: 5649; WAN024FHY_at; Start 164; Stop 188
tttttataacatcacctggattagc

SEQ ID NO: 207101 - DNA, 25 bp, Artificial
  probe
  misc_feature (1)..(25): SEQ ID NO: 5649; WAN024FHY_at; Start 96; Stop 120
tactcttaccgctggaagcaggacc

SEQ ID NO: 207102 - DNA, 25 bp, Artificial
  probe
  misc_feature (1)..(25): SEQ ID NO: 5649; WAN024FHY_at; Start 25; Stop 49
cgctgcacgatacatagctcctgta

SEQ ID NO: 207103 - DNA, 25 bp, Artificial
  probe
  misc_feature (1)..(25): SEQ ID NO: 5649; WAN024FHY_at; Start 18; Stop 42
tataggtcgctgcacgatacatagc

SEQ ID NO: 207104 - DNA, 25 bp, Artificial
  probe
  misc_feature (1)..(25): SEQ ID NO: 5649; WAN024FHY_at; Start 91; Stop 115
gaccgtactcttaccgctggaagca

SEQ ID NO: 207105 - DNA, 25 bp, Artificial
  probe
  misc_feature (1)..(25): SEQ ID NO: 5649; WAN024FHY_at; Start 12; Stop 36
gagccatataggtcgctgcacgata

SEQ ID NO: 207106 - DNA, 25 bp, Artificial
  probe
  misc_feature (1)..(25): SEQ ID NO: 5649; WAN024FHY_at; Start 213; Stop 237
cccaggattcaaggcctctaactga

SEQ ID NO: 207107 - DNA, 25 bp, Artificial
  probe
  misc_feature (1)..(25): SEQ ID NO: 5649; WAN024FHY_at; Start 190; Stop 214
aaccaagatcctgtagccatgtgcc

SEQ ID NO: 207108 - DNA, 25 bp, Artificial
  probe
  misc_feature (1)..(25): SEQ ID NO: 5649; WAN024FHY_at; Start 207; Stop 231
catgtgcccaggattcaaggcctct

SEQ ID NO: 207109 - DNA, 25 bp, Artificial
  probe
  misc_feature (1)..(25): SEQ ID NO: 701; WAN024FHZ_at; Start 123; Stop 147
gacctatatggctcttaagaaccaa

SEQ ID NO: 207110 - DNA, 25 bp, Artificial
  probe
  misc_feature (1)..(25): SEQ ID NO: 701; WAN024FHZ_at; Start 265; Stop 289
cctatccgtgaaaatgaagtgacca

SEQ ID NO: 207111 - DNA, 25 bp, Artificial
  probe
  misc_feature (1)..(25): SEQ ID NO: 701; WAN024FHZ_at; Start 166; Stop 190
gaagcccttctagccttgttggacc

SEQ ID NO: 207112 - DNA, 25 bp, Artificial
  probe
  misc_feature (1)..(25): SEQ ID NO: 701; WAN024FHZ_at; Start 238; Stop 262
tttgtaggagatgtggatattaccc

SEQ ID NO: 207113 - DNA, 25 bp, Artificial
  probe
  misc_feature (1)..(25): SEQ ID NO: 701; WAN024FHZ_at; Start 412; Stop 436
ccacaagcagaattgaaaattttcc

SEQ ID NO: 207114 - DNA, 25 bp, Artificial
  probe
  misc_feature (1)..(25): SEQ ID NO: 701; WAN024FHZ_at; Start 85; Stop 109
ttcacctaccttgatacaggagcta

SEQ ID NO: 207115 - DNA, 25 bp, Artificial
  probe
  misc_feature (1)..(25): SEQ ID NO: 701; WAN024FHZ_at; Start 450; Stop 474
tgatgagagagcagagcgtcgttac

SEQ ID NO: 207116 - DNA, 25 bp, Artificial
  probe
  misc_feature (1)..(25): SEQ ID NO: 701; WAN024FHZ_at; Start 576; Stop 600
caaacaagcagaggatgctgtctac

SEQ ID NO: 207117 - DNA, 25 bp, Artificial
  probe
  misc_feature (1)..(25): SEQ ID NO: 701; WAN024FHZ_at; Start 435; Stop 459
cctagtagcttctgttgatgagaga

SEQ ID NO: 207118 - DNA, 25 bp, Artificial
  probe
  misc_feature (1)..(25): SEQ ID NO: 701; WAN024FHZ_at; Start 99; Stop 123
tacaggagctatgtatcgtgcagcg

SEQ ID NO: 207119 - DNA, 25 bp, Artificial
  probe
  misc_feature (1)..(25): SEQ ID NO: 701; WAN024FHZ_at; Start 550; Stop 574
gatagtcatcgtgagacttctcctc

SEQ ID NO: 207120 - DNA, 25 bp, Artificial
  probe
  misc_feature (1)..(25): SEQ ID NO: 701; WAN024FHZ_at; Start 329; Stop 353
agaaactggtttctctccaacaaga

SEQ ID NO: 207121 - DNA, 25 bp, Artificial
  probe
  misc_feature (1)..(25): SEQ ID NO: 701; WAN024FHZ_at; Start 339; Stop 363
ttctctccaacaagaaattgcccag

SEQ ID NO: 207122 - DNA, 25 bp, Artificial
  probe
  misc_feature (1)..(25): SEQ ID NO: 701; WAN024FHZ_at; Start 252; Stop 276
ggatattacccatcctatccgtgaa

SEQ ID NO: 207123 - DNA, 25 bp, Artificial
  probe
  misc_feature (1)..(25): SEQ ID NO: 701; WAN024FHZ_at; Start 382; Stop 406
gatggtcgcgatattggaactgttg

SEQ ID NO: 207124 - DNA, 25 bp, Artificial
  probe
  misc_feature (1)..(25): SEQ ID NO: 701; WAN024FHZ_at; Start 156; Stop 180
tgaagaagtcgaagcccttctagcc

SEQ ID NO: 207125 - DNA, 25 bp, Artificial
  probe
  misc_feature (1)..(25): SEQ ID NO: 701; WAN024FHZ_at; Start 604; Stop 628
gatacaactggtttgaacattcaag

SEQ ID NO: 207126 - DNA, 25 bp, Artificial
  probe
  misc_feature (1)..(25): SEQ ID NO: 701; WAN024FHZ_at; Start 209; Stop 233
gacgttcagaaactggagaccagct

SEQ ID NO: 207127 - DNA, 25 bp, Artificial
  probe
  misc_feature (1)..(25): SEQ ID NO: 701; WAN024FHZ_at; Start 51; Stop 75
tacggtcgcaaagattattgctaag

SEQ ID NO: 207128 - DNA, 25 bp, Artificial
  probe
  misc_feature (1)..(25): SEQ ID NO: 701; WAN024FHZ_at; Start 564; Stop 588
gacttctcctctcaaacaagcagag

SEQ ID NO: 207129 - DNA, 25 bp, Artificial
  probe
  misc_feature (1)..(25): SEQ ID NO: 701; WAN024FHZ_at; Start 8; Stop 32
caattcaaattgctattgatggtcc

SEQ ID NO: 207130 - DNA, 25 bp, Artificial
  probe
  misc_feature (1)..(25): SEQ ID NO: 701; WAN024FHZ_at; Start 21; Stop 45
tattgatggtcctgcttccagcggt

SEQ ID NO: 207131 - DNA, 25 bp, Artificial
  probe
  misc_feature (1)..(25): SEQ ID NO: 701; WAN024FHZ_at; Start 36; Stop 60
ttccagcggtaagagtacggtcgca

SEQ ID NO: 207132 - DNA, 25 bp, Artificial
  probe
  misc_feature (1)..(25): SEQ ID NO: 701; WAN024FHZ_at; Start 521; Stop 545
aaaaggaaattgctgcgcgtgacta

SEQ ID NO: 207133 - DNA, 25 bp, Artificial
  probe
  misc_feature (1)..(25): SEQ ID NO: 701; WAN024FHZ_at; Start 224; Stop 248
gagaccagcttgtttttgtaggaga

SEQ ID NO: 207134 - DNA, 25 bp, Artificial
  probe
  misc_feature (1)..(25): SEQ ID NO: 701; WAN024FHZ_at; Start 649; Stop 673
gcagaagctgaaaaaagaatgtaac

SEQ ID NO: 207135 - DNA, 25 bp, Artificial
  probe
  misc_feature (1)..(25): SEQ ID NO: 701; WAN024FHZ_at; Start 280; Stop 304
gaagtgaccaatcatgtttctgcta

SEQ ID NO: 207136 - DNA, 25 bp, Artificial
  probe
  misc_feature (1)..(25): SEQ ID NO: 701; WAN024FHZ_at; Start 465; Stop 489
gcgtcgttacaaggaaaatattgcc

SEQ ID NO: 207137 - DNA, 25 bp, Artificial
  probe
  misc_feature (1)..(25): SEQ ID NO: 701; WAN024FHZ_at; Start 483; Stop 507
tattgccaagggaattgaaacagac

SEQ ID NO: 207138 - DNA, 25 bp, Artificial
  probe
  misc_feature (1)..(25): SEQ ID NO: 701; WAN024FHZ_at; Start 112; Stop 136
tatcgtgcagcgacctatatggctc

SEQ ID NO: 207139 - DNA, 25 bp, Artificial
  probe
  misc_feature (1)..(25): SEQ ID NO: 701; WAN024FHZ_at; Start 591; Stop 615
tgctgtctaccttgatacaactggt

SEQ ID NO: 207140 - DNA, 25 bp, Artificial
  probe
  misc_feature (1)..(25): SEQ ID NO: 701; WAN024FHZ_at; Start 197; Stop 221
caatcagctttggacgttcagaaac

SEQ ID NO: 207141 - DNA, 25 bp, Artificial
  probe
  misc_feature (1)..(25): SEQ ID NO: 701; WAN024FHZ_at; Start 515; Stop 539
ccctaaaaaaggaaattgctgcgcg

SEQ ID NO: 207142 - DNA, 25 bp, Artificial
  probe
  misc_feature (1)..(25): SEQ ID NO: 701; WAN024FHZ_at; Start 398; Stop 422
gaactgttgtattgccacaagcaga

SEQ ID NO: 207143 - DNA, 25 bp, Artificial
  probe
  misc_feature (1)..(25): SEQ ID NO: 5332; WAN024FI2_at; Start 158; Stop 182
gaatcgtgcgtttttacgatgaccc

SEQ ID NO: 207144 - DNA, 25 bp, Artificial
  probe
  misc_feature (1)..(25): SEQ ID NO: 5332; WAN024FI2_at; Start 249; Stop 273
tcgcgccctgattggaaaccaggaa

SEQ ID NO: 207145 - DNA, 25 bp, Artificial
  probe
  misc_feature (1)..(25): SEQ ID NO: 5332; WAN024FI2_at; Start 228; Stop 252
ggctgttaaaaattgcccaactcgc

SEQ ID NO: 207146 - DNA, 25 bp, Artificial
  probe
  misc_feature (1)..(25): SEQ ID NO: 5332; WAN024FI2_at; Start 246; Stop 270
aactcgcgccctgattggaaaccag

SEQ ID NO: 207147 - DNA, 25 bp, Artificial
  probe
  misc_feature (1)..(25): SEQ ID NO: 5332; WAN024FI2_at; Start 230; Stop 254
ctgttaaaaattgcccaactcgcgc

SEQ ID NO: 207148 - DNA, 25 bp, Artificial
  probe
  misc_feature (1)..(25): SEQ ID NO: 5332; WAN024FI2_at; Start 77; Stop 101
aaatcacacttatacctgaacgatg

SEQ ID NO: 207149 - DNA, 25 bp, Artificial
  probe
  misc_feature (1)..(25): SEQ ID NO: 5332; WAN024FI2_at; Start 62; Stop 86
taaatatgaacatgaaaatcacact

SEQ ID NO: 207150 - DNA, 25 bp, Artificial
  probe
  misc_feature (1)..(25): SEQ ID NO: 5332; WAN024FI2_at; Start 172; Stop 196
tacgatgaccctgaccaactggaaa

SEQ ID NO: 207151 - DNA, 25 bp, Artificial
  probe
  misc_feature (1)..(25): SEQ ID NO: 5332; WAN024FI2_at; Start 221; Stop 245
tcttagaggctgttaaaaattgccc

SEQ ID NO: 207152 - DNA, 25 bp, Artificial
  probe
  misc_feature (1)..(25): SEQ ID NO: 5332; WAN024FI2_at; Start 83; Stop 107
cacttatacctgaacgatgtatcgc

SEQ ID NO: 207153 - DNA, 25 bp, Artificial
  probe
  misc_feature (1)..(25): SEQ ID NO: 5332; WAN024FI2_at; Start 176; Stop 200
atgaccctgaccaactggaaaaaga

SEQ ID NO: 207154 - DNA, 25 bp, Artificial
  probe
  misc_feature (1)..(25): SEQ ID NO: 5332; WAN024FI2_at; Start 191; Stop 215
tggaaaaagaaatttctcctagtca

SEQ ID NO: 207155 - DNA, 25 bp, Artificial
  probe
  misc_feature (1)..(25): SEQ ID NO: 5332; WAN024FI2_at; Start 11; Stop 35
tcttttgccataccttactccttgt

SEQ ID NO: 207156 - DNA, 25 bp, Artificial
  probe
  misc_feature (1)..(25): SEQ ID NO: 5332; WAN024FI2_at; Start 238; Stop 262
aattgcccaactcgcgccctgattg

SEQ ID NO: 207157 - DNA, 25 bp, Artificial
  probe
  misc_feature (1)..(25): SEQ ID NO: 5332; WAN024FI2_at; Start 224; Stop 248
tagaggctgttaaaaattgcccaac

SEQ ID NO: 207158 - DNA, 25 bp, Artificial
  probe
  misc_feature (1)..(25): SEQ ID NO: 5332; WAN024FI2_at; Start 175; Stop 199
gatgaccctgaccaactggaaaaag

SEQ ID NO: 207159 - DNA, 25 bp, Artificial
  probe
  misc_feature (1)..(25): SEQ ID NO: 5332; WAN024FI2_at; Start 86; Stop 110
ttatacctgaacgatgtatcgcctg

SEQ ID NO: 207160 - DNA, 25 bp, Artificial
  probe
  misc_feature (1)..(25): SEQ ID NO: 5332; WAN024FI2_at; Start 129; Stop 153
ttctgatttatttgattaccacgat

SEQ ID NO: 207161 - DNA, 25 bp, Artificial
  probe
  misc_feature (1)..(25): SEQ ID NO: 5332; WAN024FI2_at; Start 89; Stop 113
tacctgaacgatgtatcgcctgtgg

SEQ ID NO: 207162 - DNA, 25 bp, Artificial
  probe
  misc_feature (1)..(25): SEQ ID NO: 5332; WAN024FI2_at; Start 255; Stop 279
cctgattggaaaccaggaagcctaa

SEQ ID NO: 207163 - DNA, 25 bp, Artificial
  probe
  misc_feature (1)..(25): SEQ ID NO: 5332; WAN024FI2_at; Start 162; Stop 186
cgtgcgtttttacgatgaccctgac

SEQ ID NO: 207164 - DNA, 25 bp, Artificial
  probe
  misc_feature (1)..(25): SEQ ID NO: 5332; WAN024FI2_at; Start 168; Stop 192
tttttacgatgaccctgaccaactg

SEQ ID NO: 207165 - DNA, 25 bp, Artificial
  probe
  misc_feature (1)..(25): SEQ ID NO: 5332; WAN024FI2_at; Start 5; Stop 29
cacggttcttttgccataccttact

SEQ ID NO: 207166 - DNA, 25 bp, Artificial
  probe
  misc_feature (1)..(25): SEQ ID NO: 5332; WAN024FI2_at; Start 234; Stop 258
taaaaattgcccaactcgcgccctg

SEQ ID NO: 207167 - DNA, 25 bp, Artificial
  probe
  misc_feature (1)..(25): SEQ ID NO: 5332; WAN024FI2_at; Start 1; Stop 25
ttgccacggttcttttgccatacct

SEQ ID NO: 207168 - DNA, 25 bp, Artificial
  probe
  misc_feature (1)..(25): SEQ ID NO: 5332; WAN024FI2_at; Start 258; Stop 282
gattggaaaccaggaagcctaacta

SEQ ID NO: 207169 - DNA, 25 bp, Artificial
  probe
  misc_feature (1)..(25): SEQ ID NO: 5332; WAN024FI2_at; Start 170; Stop 194
tttacgatgaccctgaccaactgga

SEQ ID NO: 207170 - DNA, 25 bp, Artificial
  probe
  misc_feature (1)..(25): SEQ ID NO: 5332; WAN024FI2_at; Start 74; Stop 98
tgaaaatcacacttatacctgaacg

SEQ ID NO: 207171 - DNA, 25 bp, Artificial
  probe
  misc_feature (1)..(25): SEQ ID NO: 5332; WAN024FI2_at; Start 245; Stop 269
caactcgcgccctgattggaaacca

SEQ ID NO: 207172 - DNA, 25 bp, Artificial
  probe
  misc_feature (1)..(25): SEQ ID NO: 5332; WAN024FI2_at; Start 251; Stop 275
gcgccctgattggaaaccaggaagc

SEQ ID NO: 207173 - DNA, 25 bp, Artificial
  probe
  misc_feature (1)..(25): SEQ ID NO: 5332; WAN024FI2_at; Start 165; Stop 189
gcgtttttacgatgaccctgaccaa

SEQ ID NO: 207174 - DNA, 25 bp, Artificial
  probe
  misc_feature (1)..(25): SEQ ID NO: 5332; WAN024FI2_at; Start 195; Stop 219
aaaagaaatttctcctagtcaggat

SEQ ID NO: 207175 - DNA, 25 bp, Artificial
  probe
  misc_feature (1)..(25): SEQ ID NO: 5332; WAN024FI2_at; Start 115; Stop 139
ctttgccaaacttattctgatttat

SEQ ID NO: 207176 - DNA, 25 bp, Artificial
  probe
  misc_feature (1)..(25): SEQ ID NO: 5332; WAN024FI2_at; Start 127; Stop 151
tattctgatttatttgattaccacg

SEQ ID NO: 207177 - DNA, 25 bp, Artificial
  probe
  misc_feature (1)..(25): SEQ ID NO: 2378; WAN024FI3_at; Start 383; Stop 407
gaatctccattgctcagttagaggc

SEQ ID NO: 207178 - DNA, 25 bp, Artificial
  probe
  misc_feature (1)..(25): SEQ ID NO: 2378; WAN024FI3_at; Start 375; Stop 399
tcgtgcaggaatctccattgctcag

SEQ ID NO: 207179 - DNA, 25 bp, Artificial
  probe
  misc_feature (1)..(25): SEQ ID NO: 2378; WAN024FI3_at; Start 230; Stop 254
gtgtagtacaaatctcatcttcaag

SEQ ID NO: 207180 - DNA, 25 bp, Artificial
  probe
  misc_feature (1)..(25): SEQ ID NO: 2378; WAN024FI3_at; Start 332; Stop 356
cgattaaagttctcgcaggagaagg

SEQ ID NO: 207181 - DNA, 25 bp, Artificial
  probe
  misc_feature (1)..(25): SEQ ID NO: 2378; WAN024FI3_at; Start 366; Stop 390
tattgccgctcgtgcaggaatctcc

SEQ ID NO: 207182 - DNA, 25 bp, Artificial
  probe
  misc_feature (1)..(25): SEQ ID NO: 2378; WAN024FI3_at; Start 410; Stop 434
tgaatcctgggcacatggctacagg

SEQ ID NO: 207183 - DNA, 25 bp, Artificial
  probe
  misc_feature (1)..(25): SEQ ID NO: 2378; WAN024FI3_at; Start 5; Stop 29
caaaagaaccgtggcaagaagatat

SEQ ID NO: 207184 - DNA, 25 bp, Artificial
  probe
  misc_feature (1)..(25): SEQ ID NO: 2378; WAN024FI3_at; Start 1; Stop 25
atggcaaaagaaccgtggcaagaag

SEQ ID NO: 207185 - DNA, 25 bp, Artificial
  probe
  misc_feature (1)..(25): SEQ ID NO: 2378; WAN024FI3_at; Start 257; Stop 281
gttctcagcctgagcagagttcaga

SEQ ID NO: 207186 - DNA, 25 bp, Artificial
  probe
  misc_feature (1)..(25): SEQ ID NO: 2378; WAN024FI3_at; Start 127; Stop 151
ttctttgtaattgtggtggtgatgg

SEQ ID NO: 207187 - DNA, 25 bp, Artificial
  probe
  misc_feature (1)..(25): SEQ ID NO: 2378; WAN024FI3_at; Start 267; Stop 291
tgagcagagttcagagccagaatct

SEQ ID NO: 207188 - DNA, 25 bp, Artificial
  probe
  misc_feature (1)..(25): SEQ ID NO: 2378; WAN024FI3_at; Start 401; Stop 425
tagaggccttgaatcctgggcacat

SEQ ID NO: 207189 - DNA, 25 bp, Artificial
  probe
  misc_feature (1)..(25): SEQ ID NO: 2378; WAN024FI3_at; Start 321; Stop 345
tcctgaaggaacgattaaagttctc

SEQ ID NO: 207190 - DNA, 25 bp, Artificial
  probe
  misc_feature (1)..(25): SEQ ID NO: 2378; WAN024FI3_at; Start 31; Stop 55
tatgatcaagaagaatcaagagcag

SEQ ID NO: 207191 - DNA, 25 bp, Artificial
  probe
  misc_feature (1)..(25): SEQ ID NO: 2378; WAN024FI3_at; Start 87; Stop 111
taggatggctaatcgtattttgacg

SEQ ID NO: 207192 - DNA, 25 bp, Artificial
  probe
  misc_feature (1)..(25): SEQ ID NO: 2378; WAN024FI3_at; Start 141; Stop 165
ggtggtgatggtcatcgttctcatc

SEQ ID NO: 207193 - DNA, 25 bp, Artificial
  probe
  misc_feature (1)..(25): SEQ ID NO: 2378; WAN024FI3_at; Start 80; Stop 104
gggctgataggatggctaatcgtat

SEQ ID NO: 207194 - DNA, 25 bp, Artificial
  probe
  misc_feature (1)..(25): SEQ ID NO: 2378; WAN024FI3_at; Start 100; Stop 124
cgtattttgacgatcctagctagta

SEQ ID NO: 207195 - DNA, 25 bp, Artificial
  probe
  misc_feature (1)..(25): SEQ ID NO: 2378; WAN024FI3_at; Start 278; Stop 302
cagagccagaatctacttctagtag

SEQ ID NO: 207196 - DNA, 25 bp, Artificial
  probe
  misc_feature (1)..(25): SEQ ID NO: 2378; WAN024FI3_at; Start 434; Stop 458
gatcttggtttgctaatccaggtga

SEQ ID NO: 207197 - DNA, 25 bp, Artificial
  probe
  misc_feature (1)..(25): SEQ ID NO: 2378; WAN024FI3_at; Start 273; Stop 297
gagttcagagccagaatctacttct

SEQ ID NO: 207198 - DNA, 25 bp, Artificial
  probe
  misc_feature (1)..(25): SEQ ID NO: 2378; WAN024FI3_at; Start 357; Stop 381
ggaagcagctattgccgctcgtgca

SEQ ID NO: 207199 - DNA, 25 bp, Artificial
  probe
  misc_feature (1)..(25): SEQ ID NO: 2378; WAN024FI3_at; Start 307; Stop 331
gaagaagctgctaatcctgaaggaa

SEQ ID NO: 207200 - DNA, 25 bp, Artificial
  probe
  misc_feature (1)..(25): SEQ ID NO: 2378; WAN024FI3_at; Start 155; Stop 179
tcgttctcatctatctatcatcggg

SEQ ID NO: 207201 - DNA, 25 bp, Artificial
  probe
  misc_feature (1)..(25): SEQ ID NO: 2378; WAN024FI3_at; Start 389; Stop 413
ccattgctcagttagaggccttgaa

SEQ ID NO: 207202 - DNA, 25 bp, Artificial
  probe
  misc_feature (1)..(25): SEQ ID NO: 2378; WAN024FI3_at; Start 111; Stop 135
gatcctagctagtattttctttgta

SEQ ID NO: 207203 - DNA, 25 bp, Artificial
  probe
  misc_feature (1)..(25): SEQ ID NO: 2378; WAN024FI3_at; Start 445; Stop 469
gctaatccaggtgatgttataaaaa

SEQ ID NO: 207204 - DNA, 25 bp, Artificial
  probe
  misc_feature (1)..(25): SEQ ID NO: 2378; WAN024FI3_at; Start 181; Stop 205
gggagtaatcgcacagcagccttaa

SEQ ID NO: 207205 - DNA, 25 bp, Artificial
  probe
  misc_feature (1)..(25): SEQ ID NO: 2378; WAN024FI3_at; Start 313; Stop 337
gctgctaatcctgaaggaacgatta

SEQ ID NO: 207206 - DNA, 25 bp, Artificial
  probe
  misc_feature (1)..(25): SEQ ID NO: 2378; WAN024FI3_at; Start 57; Stop 81
gcgtcggcatcgaaaccacggaggg

SEQ ID NO: 207207 - DNA, 25 bp, Artificial
  probe
  misc_feature (1)..(25): SEQ ID NO: 2378; WAN024FI3_at; Start 422; Stop 446
acatggctacaggatcttggtttgc

SEQ ID NO: 207208 - DNA, 25 bp, Artificial
  probe
  misc_feature (1)..(25): SEQ ID NO: 2378; WAN024FI3_at; Start 184; Stop 208
agtaatcgcacagcagccttaaaag

SEQ ID NO: 207209 - DNA, 25 bp, Artificial
  probe
  misc_feature (1)..(25): SEQ ID NO: 2378; WAN024FI3_at; Start 294; Stop 318
ttctagtagttcagaagaagctgct

SEQ ID NO: 207210 - DNA, 25 bp, Artificial
  probe
  misc_feature (1)..(25): SEQ ID NO: 2378; WAN024FI3_at; Start 417; Stop 441
tgggcacatggctacaggatcttgg

SEQ ID NO: 207211 - DNA, 25 bp, Artificial
  probe
  misc_feature (1)..(25): SEQ ID NO: 4194; WAN024FI4_at; Start 173; Stop 197
tcctcatccatctgataaggcaggt

SEQ ID NO: 207212 - DNA, 25 bp, Artificial
  probe
  misc_feature (1)..(25): SEQ ID NO: 4194; WAN024FI4_at; Start 119; Stop 143
gaaatcacatcaatatcttcaggag

SEQ ID NO: 207213 - DNA, 25 bp, Artificial
  probe
  misc_feature (1)..(25): SEQ ID NO: 4194; WAN024FI4_at; Start 95; Stop 119
aaatcatctgccacaagctcaatcg

SEQ ID NO: 207214 - DNA, 25 bp, Artificial
  probe
  misc_feature (1)..(25): SEQ ID NO: 4194; WAN024FI4_at; Start 220; Stop 244
ggcatgaaccccactatctgtccta

SEQ ID NO: 207215 - DNA, 25 bp, Artificial
  probe
  misc_feature (1)..(25): SEQ ID NO: 4194; WAN024FI4_at; Start 216; Stop 240
ccagggcatgaaccccactatctgt

SEQ ID NO: 207216 - DNA, 25 bp, Artificial
  probe
  misc_feature (1)..(25): SEQ ID NO: 4194; WAN024FI4_at; Start 212; Stop 236
tgtcccagggcatgaaccccactat

SEQ ID NO: 207217 - DNA, 25 bp, Artificial
  probe
  misc_feature (1)..(25): SEQ ID NO: 4194; WAN024FI4_at; Start 158; Stop 182
gcaaaacggagtttctcctcatcca

SEQ ID NO: 207218 - DNA, 25 bp, Artificial
  probe
  misc_feature (1)..(25): SEQ ID NO: 4194; WAN024FI4_at; Start 90; Stop 114
aatgaaaatcatctgccacaagctc

SEQ ID NO: 207219 - DNA, 25 bp, Artificial
  probe
  misc_feature (1)..(25): SEQ ID NO: 4194; WAN024FI4_at; Start 242; Stop 266
ctaccagcaccgtgaacagtaatgg

SEQ ID NO: 207220 - DNA, 25 bp, Artificial
  probe
  misc_feature (1)..(25): SEQ ID NO: 4194; WAN024FI4_at; Start 78; Stop 102
tggcataacggcaatgaaaatcatc

SEQ ID NO: 207221 - DNA, 25 bp, Artificial
  probe
  misc_feature (1)..(25): SEQ ID NO: 4194; WAN024FI4_at; Start 132; Stop 156
tatcttcaggagactgggtatccaa

SEQ ID NO: 207222 - DNA, 25 bp, Artificial
  probe
  misc_feature (1)..(25): SEQ ID NO: 4194; WAN024FI4_at; Start 27; Stop 51
gatttttgggacgtcctctatccac

SEQ ID NO: 207223 - DNA, 25 bp, Artificial
  probe
  misc_feature (1)..(25): SEQ ID NO: 4194; WAN024FI4_at; Start 183; Stop 207
tctgataaggcaggtcaaaatgaat

SEQ ID NO: 207224 - DNA, 25 bp, Artificial
  probe
  misc_feature (1)..(25): SEQ ID NO: 4194; WAN024FI4_at; Start 129; Stop 153
caatatcttcaggagactgggtatc

SEQ ID NO: 207225 - DNA, 25 bp, Artificial
  probe
  misc_feature (1)..(25): SEQ ID NO: 4194; WAN024FI4_at; Start 140; Stop 164
ggagactgggtatccaaggcaaaac

SEQ ID NO: 207226 - DNA, 25 bp, Artificial
  probe
  misc_feature (1)..(25): SEQ ID NO: 4194; WAN024FI4_at; Start 137; Stop 161
tcaggagactgggtatccaaggcaa

SEQ ID NO: 207227 - DNA, 25 bp, Artificial
  probe
  misc_feature (1)..(25): SEQ ID NO: 4194; WAN024FI4_at; Start 11; Stop 35
tagtgacggcgcatcggatttttgg

SEQ ID NO: 207228 - DNA, 25 bp, Artificial
  probe
  misc_feature (1)..(25): SEQ ID NO: 4194; WAN024FI4_at; Start 18; Stop 42
ggcgcatcggatttttgggacgtcc

SEQ ID NO: 207229 - DNA, 25 bp, Artificial
  probe
  misc_feature (1)..(25): SEQ ID NO: 4194; WAN024FI4_at; Start 179; Stop 203
tccatctgataaggcaggtcaaaat

SEQ ID NO: 207230 - DNA, 25 bp, Artificial
  probe
  misc_feature (1)..(25): SEQ ID NO: 4194; WAN024FI4_at; Start 1; Stop 25
gtgggtggcatagtgacggcgcatc

SEQ ID NO: 207231 - DNA, 25 bp, Artificial
  probe
  misc_feature (1)..(25): SEQ ID NO: 4194; WAN024FI4_at; Start 125; Stop 149
acatcaatatcttcaggagactggg

SEQ ID NO: 207232 - DNA, 25 bp, Artificial
  probe
  misc_feature (1)..(25): SEQ ID NO: 4194; WAN024FI4_at; Start 143; Stop 167
gactgggtatccaaggcaaaacgga

SEQ ID NO: 207233 - DNA, 25 bp, Artificial
  probe
  misc_feature (1)..(25): SEQ ID NO: 4194; WAN024FI4_at; Start 150; Stop 174
tatccaaggcaaaacggagtttctc

SEQ ID NO: 207234 - DNA, 25 bp, Artificial
  probe
  misc_feature (1)..(25): SEQ ID NO: 4194; WAN024FI4_at; Start 165; Stop 189
ggagtttctcctcatccatctgata

SEQ ID NO: 207235 - DNA, 25 bp, Artificial
  probe
  misc_feature (1)..(25): SEQ ID NO: 4194; WAN024FI4_at; Start 145; Stop 169
ctgggtatccaaggcaaaacggagt

SEQ ID NO: 207236 - DNA, 25 bp, Artificial
  probe
  misc_feature (1)..(25): SEQ ID NO: 4194; WAN024FI4_at; Start 22; Stop 46
catcggatttttgggacgtcctcta

SEQ ID NO: 207237 - DNA, 25 bp, Artificial
  probe
  misc_feature (1)..(25): SEQ ID NO: 4194; WAN024FI4_at; Start 108; Stop 132
caagctcaatcgaaatcacatcaat

SEQ ID NO: 207238 - DNA, 25 bp, Artificial
  probe
  misc_feature (1)..(25): SEQ ID NO: 4194; WAN024FI4_at; Start 101; Stop 125
tctgccacaagctcaatcgaaatca

SEQ ID NO: 207239 - DNA, 25 bp, Artificial
  probe
  misc_feature (1)..(25): SEQ ID NO: 4194; WAN024FI4_at; Start 238; Stop 262
tgtcctaccagcaccgtgaacagta

SEQ ID NO: 207240 - DNA, 25 bp, Artificial
  probe
  misc_feature (1)..(25): SEQ ID NO: 4194; WAN024FI4_at; Start 234; Stop 258
tatctgtcctaccagcaccgtgaac

SEQ ID NO: 207241 - DNA, 25 bp, Artificial
  probe
  misc_feature (1)..(25): SEQ ID NO: 4194; WAN024FI4_at; Start 81; Stop 105
cataacggcaatgaaaatcatctgc

SEQ ID NO: 207242 - DNA, 25 bp, Artificial
  probe
  misc_feature (1)..(25): SEQ ID NO: 4194; WAN024FI4_at; Start 154; Stop 178
caaggcaaaacggagtttctcctca

SEQ ID NO: 207243 - DNA, 25 bp, Artificial
  probe
  misc_feature (1)..(25): SEQ ID NO: 4194; WAN024FI4_at; Start 104; Stop 128
gccacaagctcaatcgaaatcacat

SEQ ID NO: 207244 - DNA, 25 bp, Artificial
  probe
  misc_feature (1)..(25): SEQ ID NO: 4194; WAN024FI4_at; Start 176; Stop 200
tcatccatctgataaggcaggtcaa

SEQ ID NO: 207245 - DNA, 25 bp, Artificial
  probe
  misc_feature (1)..(25): SEQ ID NO: 4173; WAN024FI5_at; Start 275; Stop 299
tctgcattcgttccacatcgagtgg

SEQ ID NO: 207246 - DNA, 25 bp, Artificial
  probe
  misc_feature (1)..(25): SEQ ID NO: 4173; WAN024FI5_at; Start 75; Stop 99
gattttgagaagagtccccaccata

SEQ ID NO: 207247 - DNA, 25 bp, Artificial
  probe
  misc_feature (1)..(25): SEQ ID NO: 4173; WAN024FI5_at; Start 71; Stop 95
taccgattttgagaagagtccccac

SEQ ID NO: 207248 - DNA, 25 bp, Artificial
  probe
  misc_feature (1)..(25): SEQ ID NO: 4173; WAN024FI5_at; Start 177; Stop 201
actagcttctgtgatggtgcgaacc

SEQ ID NO: 207249 - DNA, 25 bp, Artificial
  probe
  misc_feature (1)..(25): SEQ ID NO: 4173; WAN024FI5_at; Start 270; Stop 294
tgcaatctgcattcgttccacatcg

SEQ ID NO: 207250 - DNA, 25 bp, Artificial
  probe
  misc_feature (1)..(25): SEQ ID NO: 4173; WAN024FI5_at; Start 181; Stop 205
gcttctgtgatggtgcgaaccttat

SEQ ID NO: 207251 - DNA, 25 bp, Artificial
  probe
  misc_feature (1)..(25): SEQ ID NO: 4173; WAN024FI5_at; Start 114; Stop 138
atacaagaaaccatttcctgaaaag

SEQ ID NO: 207252 - DNA, 25 bp, Artificial
  probe
  misc_feature (1)..(25): SEQ ID NO: 4173; WAN024FI5_at; Start 147; Stop 171
caaaaattgtcctgtctcatcgact

SEQ ID NO: 207253 - DNA, 25 bp, Artificial
  probe
  misc_feature (1)..(25): SEQ ID NO: 4173; WAN024FI5_at; Start 68; Stop 92
tgttaccgattttgagaagagtccc

SEQ ID NO: 207254 - DNA, 25 bp, Artificial
  probe
  misc_feature (1)..(25): SEQ ID NO: 4173; WAN024FI5_at; Start 236; Stop 260
cggtaaaatcatgggttccctctag

SEQ ID NO: 207255 - DNA, 25 bp, Artificial
  probe
  misc_feature (1)..(25): SEQ ID NO: 4173; WAN024FI5_at; Start 81; Stop 105
gagaagagtccccaccatattgcga

SEQ ID NO: 207256 - DNA, 25 bp, Artificial
  probe
  misc_feature (1)..(25): SEQ ID NO: 4173; WAN024FI5_at; Start 255; Stop 279
ctctagctttttgattgcaatctgc

SEQ ID NO: 207257 - DNA, 25 bp, Artificial
  probe
  misc_feature (1)..(25): SEQ ID NO: 4173; WAN024FI5_at; Start 279; Stop 303
cattcgttccacatcgagtgggtag

SEQ ID NO: 207258 - DNA, 25 bp, Artificial
  probe
  misc_feature (1)..(25): SEQ ID NO: 4173; WAN024FI5_at; Start 189; Stop 213
gatggtgcgaaccttatcctctaca

SEQ ID NO: 207259 - DNA, 25 bp, Artificial
  probe
  misc_feature (1)..(25): SEQ ID NO: 4173; WAN024FI5_at; Start 17; Stop 41
gcctgtccttcttctccaagatgag

SEQ ID NO: 207260 - DNA, 25 bp, Artificial
  probe
  misc_feature (1)..(25): SEQ ID NO: 4173; WAN024FI5_at; Start 249; Stop 273
ggttccctctagctttttgattgca

SEQ ID NO: 207261 - DNA, 25 bp, Artificial
  probe
  misc_feature (1)..(25): SEQ ID NO: 4173; WAN024FI5_at; Start 86; Stop 110
gagtccccaccatattgcgaatctg

SEQ ID NO: 207262 - DNA, 25 bp, Artificial
  probe
  misc_feature (1)..(25): SEQ ID NO: 4173; WAN024FI5_at; Start 109; Stop 133
tgtttatacaagaaaccatttcctg

SEQ ID NO: 207263 - DNA, 25 bp, Artificial
  probe
  misc_feature (1)..(25): SEQ ID NO: 4173; WAN024FI5_at; Start 50; Stop 74
gctctactggcatgcggttgttacc

SEQ ID NO: 207264 - DNA, 25 bp, Artificial
  probe
  misc_feature (1)..(25): SEQ ID NO: 4173; WAN024FI5_at; Start 43; Stop 67
tcaatctgctctactggcatgcggt

SEQ ID NO: 207265 - DNA, 25 bp, Artificial
  probe
  misc_feature (1)..(25): SEQ ID NO: 4173; WAN024FI5_at; Start 101; Stop 125
tgcgaatctgtttatacaagaaacc

SEQ ID NO: 207266 - DNA, 25 bp, Artificial
  probe
  misc_feature (1)..(25): SEQ ID NO: 4173; WAN024FI5_at; Start 93; Stop 117
caccatattgcgaatctgtttatac

SEQ ID NO: 207267 - DNA, 25 bp, Artificial
  probe
  misc_feature (1)..(25): SEQ ID NO: 4173; WAN024FI5_at; Start 194; Stop 218
tgcgaaccttatcctctacactagt

SEQ ID NO: 207268 - DNA, 25 bp, Artificial
  probe
  misc_feature (1)..(25): SEQ ID NO: 4173; WAN024FI5_at; Start 13; Stop 37
agttgcctgtccttcttctccaaga

SEQ ID NO: 207269 - DNA, 25 bp, Artificial
  probe
  misc_feature (1)..(25): SEQ ID NO: 4173; WAN024FI5_at; Start 1; Stop 25
gtgggacctgcaagttgcctgtcct

SEQ ID NO: 207270 - DNA, 25 bp, Artificial
  probe
  misc_feature (1)..(25): SEQ ID NO: 4173; WAN024FI5_at; Start 140; Stop 164
taaaggtcaaaaattgtcctgtctc

SEQ ID NO: 207271 - DNA, 25 bp, Artificial
  probe
  misc_feature (1)..(25): SEQ ID NO: 4173; WAN024FI5_at; Start 26; Stop 50
tcttctccaagatgagatcaatctg

SEQ ID NO: 207272 - DNA, 25 bp, Artificial
  probe
  misc_feature (1)..(25): SEQ ID NO: 4173; WAN024FI5_at; Start 207; Stop 231
ctctacactagtcccagaggctgta

SEQ ID NO: 207273 - DNA, 25 bp, Artificial
  probe
  misc_feature (1)..(25): SEQ ID NO: 4173; WAN024FI5_at; Start 213; Stop 237
actagtcccagaggctgtaaaaccg

SEQ ID NO: 207274 - DNA, 25 bp, Artificial
  probe
  misc_feature (1)..(25): SEQ ID NO: 4173; WAN024FI5_at; Start 245; Stop 269
catgggttccctctagctttttgat

SEQ ID NO: 207275 - DNA, 25 bp, Artificial
  probe
  misc_feature (1)..(25): SEQ ID NO: 4173; WAN024FI5_at; Start 174; Stop 198
taaactagcttctgtgatggtgcga

SEQ ID NO: 207276 - DNA, 25 bp, Artificial
  probe
  misc_feature (1)..(25): SEQ ID NO: 4173; WAN024FI5_at; Start 36; Stop 60
gatgagatcaatctgctctactggc

SEQ ID NO: 207277 - DNA, 25 bp, Artificial
  probe
  misc_feature (1)..(25): SEQ ID NO: 4173; WAN024FI5_at; Start 54; Stop 78
tactggcatgcggttgttaccgatt

SEQ ID NO: 207278 - DNA, 25 bp, Artificial
  probe
  misc_feature (1)..(25): SEQ ID NO: 4173; WAN024FI5_at; Start 159; Stop 183
tgtctcatcgactattaaactagct

SEQ ID NO: 207279 - DNA, 25 bp, Artificial
  probe
  misc_feature (1)..(25): SEQ ID NO: 1421; WAN024FI6_at; Start 471; Stop 495
tacagcctctgggactagtgtagag

SEQ ID NO: 207280 - DNA, 25 bp, Artificial
  probe
  misc_feature (1)..(25): SEQ ID NO: 1421; WAN024FI6_at; Start 651; Stop 675
gcagattgatctcatcttggagaag

SEQ ID NO: 207281 - DNA, 25 bp, Artificial
  probe
  misc_feature (1)..(25): SEQ ID NO: 1421; WAN024FI6_at; Start 610; Stop 634
gggactcttctcaaaatcggtaaca

SEQ ID NO: 207282 - DNA, 25 bp, Artificial
  probe
  misc_feature (1)..(25): SEQ ID NO: 1421; WAN024FI6_at; Start 429; Stop 453
tgcaatcaaaaagctagagggaacc

SEQ ID NO: 207283 - DNA, 25 bp, Artificial
  probe
  misc_feature (1)..(25): SEQ ID NO: 1421; WAN024FI6_at; Start 101; Stop 125
ccttgaccagattaaataaagggca

SEQ ID NO: 207284 - DNA, 25 bp, Artificial
  probe
  misc_feature (1)..(25): SEQ ID NO: 1421; WAN024FI6_at; Start 518; Stop 542
aagctagtttaatagtcgatgagac

SEQ ID NO: 207285 - DNA, 25 bp, Artificial
  probe
  misc_feature (1)..(25): SEQ ID NO: 1421; WAN024FI6_at; Start 665; Stop 689
tcttggagaagaaggacaggcaact

SEQ ID NO: 207286 - DNA, 25 bp, Artificial
  probe
  misc_feature (1)..(25): SEQ ID NO: 1421; WAN024FI6_at; Start 534; Stop 558
cgatgagacaggacaatttttgacc

SEQ ID NO: 207287 - DNA, 25 bp, Artificial
  probe
  misc_feature (1)..(25): SEQ ID NO: 1421; WAN024FI6_at; Start 679; Stop 703
gacaggcaacttgcaggtcccactg

SEQ ID NO: 207288 - DNA, 25 bp, Artificial
  probe
  misc_feature (1)..(25): SEQ ID NO: 1421; WAN024FI6_at; Start 220; Stop 244
gagaaactccgttttgccttggata

SEQ ID NO: 207289 - DNA, 25 bp, Artificial
  probe
  misc_feature (1)..(25): SEQ ID NO: 1421; WAN024FI6_at; Start 344; Stop 368
tggatagaggacgtcccaaaaatcc

SEQ ID NO: 207290 - DNA, 25 bp, Artificial
  probe
  misc_feature (1)..(25): SEQ ID NO: 1421; WAN024FI6_at; Start 207; Stop 231
tcagatggatgaggagaaactccgt

SEQ ID NO: 207291 - DNA, 25 bp, Artificial
  probe
  misc_feature (1)..(25): SEQ ID NO: 1421; WAN024FI6_at; Start 486; Stop 510
tagtgtagaggataaggttcgcacc

SEQ ID NO: 207292 - DNA, 25 bp, Artificial
  probe
  misc_feature (1)..(25): SEQ ID NO: 1421; WAN024FI6_at; Start 247; Stop 271
cagtctcctgaagatattgatgtga

SEQ ID NO: 207293 - DNA, 25 bp, Artificial
  probe
  misc_feature (1)..(25): SEQ ID NO: 1421; WAN024FI6_at; Start 232; Stop 256
tttgccttggatacccagtctcctg

SEQ ID NO: 207294 - DNA, 25 bp, Artificial
  probe
  misc_feature (1)..(25): SEQ ID NO: 1421; WAN024FI6_at; Start 408; Stop 432
cgatgtggaacgaatgcagattgca

SEQ ID NO: 207295 - DNA, 25 bp, Artificial
  probe
  misc_feature (1)..(25): SEQ ID NO: 1421; WAN024FI6_at; Start 193; Stop 217
tttgacctgccttatcagatggatg

SEQ ID NO: 207296 - DNA, 25 bp, Artificial
  probe
  misc_feature (1)..(25): SEQ ID NO: 1421; WAN024FI6_at; Start 442; Stop 466
ctagagggaacccatgattttaccg

SEQ ID NO: 207297 - DNA, 25 bp, Artificial
  probe
  misc_feature (1)..(25): SEQ ID NO: 1421; WAN024FI6_at; Start 138; Stop 162
tcacggtgctggtaggacagatagt

SEQ ID NO: 207298 - DNA, 25 bp, Artificial
  probe
  misc_feature (1)..(25): SEQ ID NO: 1421; WAN024FI6_at; Start 128; Stop 152
ccattactgttcacggtgctggtag

SEQ ID NO: 207299 - DNA, 25 bp, Artificial
  probe
  misc_feature (1)..(25): SEQ ID NO: 1421; WAN024FI6_at; Start 627; Stop 651
cggtaacaaccgcatgccagtagag

SEQ ID NO: 207300 - DNA, 25 bp, Artificial
  probe
  misc_feature (1)..(25): SEQ ID NO: 1421; WAN024FI6_at; Start 67; Stop 91
catgcgcgtagcgttcaggaagaaa

SEQ ID NO: 207301 - DNA, 25 bp, Artificial
  probe
  misc_feature (1)..(25): SEQ ID NO: 1421; WAN024FI6_at; Start 292; Stop 316
gatgattttcattgccgttatgcca

SEQ ID NO: 207302 - DNA, 25 bp, Artificial
  probe
  misc_feature (1)..(25): SEQ ID NO: 1421; WAN024FI6_at; Start 501; Stop 525
ggttcgcaccatcacagaagctagt

SEQ ID NO: 207303 - DNA, 25 bp, Artificial
  probe
  misc_feature (1)..(25): SEQ ID NO: 1421; WAN024FI6_at; Start 639; Stop 663
catgccagtagagcagattgatctc

SEQ ID NO: 207304 - DNA, 25 bp, Artificial
  probe
  misc_feature (1)..(25): SEQ ID NO: 1421; WAN024FI6_at; Start 586; Stop 610
tataaacagattcgcaatatggtgg

SEQ ID NO: 207305 - DNA, 25 bp, Artificial
  probe
  misc_feature (1)..(25): SEQ ID NO: 1421; WAN024FI6_at; Start 703; Stop 727
gcagcaccaaatggtttgtatttaa

SEQ ID NO: 207306 - DNA, 25 bp, Artificial
  probe
  misc_feature (1)..(25): SEQ ID NO: 1421; WAN024FI6_at; Start 37; Stop 61
tatgcctttgctggctttcagcgcc

SEQ ID NO: 207307 - DNA, 25 bp, Artificial
  probe
  misc_feature (1)..(25): SEQ ID NO: 1421; WAN024FI6_at; Start 690; Stop 714
tgcaggtcccactgcagcaccaaat

SEQ ID NO: 207308 - DNA, 25 bp, Artificial
  probe
  misc_feature (1)..(25): SEQ ID NO: 1421; WAN024FI6_at; Start 569; Stop 593
caggaaatggtttcttgtataaaca

SEQ ID NO: 207309 - DNA, 25 bp, Artificial
  probe
  misc_feature (1)..(25): SEQ ID NO: 1421; WAN024FI6_at; Start 3; Stop 27
gacgagatataaagcaactatttcc

SEQ ID NO: 207310 - DNA, 25 bp, Artificial
  probe
  misc_feature (1)..(25): SEQ ID NO: 1421; WAN024FI6_at; Start 18; Stop 42
aactatttcctatgatggttatgcc

SEQ ID NO: 207311 - DNA, 25 bp, Artificial
  probe
  misc_feature (1)..(25): SEQ ID NO: 1421; WAN024FI6_at; Start 269; Stop 293
tgatttcgattgagcttgtggcaga

SEQ ID NO: 207312 - DNA, 25 bp, Artificial
  probe
  misc_feature (1)..(25): SEQ ID NO: 1421; WAN024FI6_at; Start 392; Stop 416
actttccctacccactcgatgtgga

SEQ ID NO: 207313 - DNA, 25 bp, Artificial
  probe
  misc_feature (1)..(25): SEQ ID NO: 5900; WAN024FI7_at; Start 79; Stop 103
tattatgctaaagaaattggctgca

SEQ ID NO: 207314 - DNA, 25 bp, Artificial
  probe
  misc_feature (1)..(25): SEQ ID NO: 5900; WAN024FI7_at; Start 62; Stop 86
tattgtcatttttctgctattatgc

SEQ ID NO: 207315 - DNA, 25 bp, Artificial
  probe
  misc_feature (1)..(25): SEQ ID NO: 5900; WAN024FI7_at; Start 135; Stop 159
cgagggtgctctccgcttttatcaa

SEQ ID NO: 207316 - DNA, 25 bp, Artificial
  probe
  misc_feature (1)..(25): SEQ ID NO: 5900; WAN024FI7_at; Start 30; Stop 54
tgctttcctttcaaaatatctaggg

SEQ ID NO: 207317 - DNA, 25 bp, Artificial
  probe
  misc_feature (1)..(25): SEQ ID NO: 5900; WAN024FI7_at; Start 188; Stop 212
caatggaaatgataattgattaact

SEQ ID NO: 207318 - DNA, 25 bp, Artificial
  probe
  misc_feature (1)..(25): SEQ ID NO: 5900; WAN024FI7_at; Start 85; Stop 109
gctaaagaaattggctgcaataatc

SEQ ID NO: 207319 - DNA, 25 bp, Artificial
  probe
  misc_feature (1)..(25): SEQ ID NO: 5900; WAN024FI7_at; Start 75; Stop 99
ctgctattatgctaaagaaattggc

SEQ ID NO: 207320 - DNA, 25 bp, Artificial
  probe
  misc_feature (1)..(25): SEQ ID NO: 5900; WAN024FI7_at; Start 103; Stop 127
aataatctaaccctaagtgtctgga

SEQ ID NO: 207321 - DNA, 25 bp, Artificial
  probe
  misc_feature (1)..(25): SEQ ID NO: 5900; WAN024FI7_at; Start 91; Stop 115
gaaattggctgcaataatctaaccc

SEQ ID NO: 207322 - DNA, 25 bp, Artificial
  probe
  misc_feature (1)..(25): SEQ ID NO: 5900; WAN024FI7_at; Start 170; Stop 194
tgaaaccccaagaaacaacaatgga

SEQ ID NO: 207323 - DNA, 25 bp, Artificial
  probe
  misc_feature (1)..(25): SEQ ID NO: 5900; WAN024FI7_at; Start 122; Stop 146
tctggaatgataacgagggtgctct

SEQ ID NO: 207324 - DNA, 25 bp, Artificial
  probe
  misc_feature (1)..(25): SEQ ID NO: 5900; WAN024FI7_at; Start 95; Stop 119
ttggctgcaataatctaaccctaag

SEQ ID NO: 207325 - DNA, 25 bp, Artificial
  probe
  misc_feature (1)..(25): SEQ ID NO: 5900; WAN024FI7_at; Start 157; Stop 181
caaagacaagggatgaaaccccaag

SEQ ID NO: 207326 - DNA, 25 bp, Artificial
  probe
  misc_feature (1)..(25): SEQ ID NO: 5900; WAN024FI7_at; Start 19; Stop 43
tatagcccctatgctttcctttcaa

SEQ ID NO: 207327 - DNA, 25 bp, Artificial
  probe
  misc_feature (1)..(25): SEQ ID NO: 5900; WAN024FI7_at; Start 106; Stop 130
aatctaaccctaagtgtctggaatg

SEQ ID NO: 207328 - DNA, 25 bp, Artificial
  probe
  misc_feature (1)..(25): SEQ ID NO: 5900; WAN024FI7_at; Start 116; Stop 140
taagtgtctggaatgataacgaggg

SEQ ID NO: 207329 - DNA, 25 bp, Artificial
  probe
  misc_feature (1)..(25): SEQ ID NO: 5900; WAN024FI7_at; Start 53; Stop 77
gggctattttattgtcatttttctg

SEQ ID NO: 207330 - DNA, 25 bp, Artificial
  probe
  misc_feature (1)..(25): SEQ ID NO: 5900; WAN024FI7_at; Start 176; Stop 200
cccaagaaacaacaatggaaatgat

SEQ ID NO: 207331 - DNA, 25 bp, Artificial
  probe
  misc_feature (1)..(25): SEQ ID NO: 5900; WAN024FI7_at; Start 98; Stop 122
gctgcaataatctaaccctaagtgt

SEQ ID NO: 207332 - DNA, 25 bp, Artificial
  probe
  misc_feature (1)..(25): SEQ ID NO: 5900; WAN024FI7_at; Start 113; Stop 137
ccctaagtgtctggaatgataacga

SEQ ID NO: 207333 - DNA, 25 bp, Artificial
  probe
  misc_feature (1)..(25): SEQ ID NO: 5900; WAN024FI7_at; Start 21; Stop 45
tagcccctatgctttcctttcaaaa

SEQ ID NO: 207334 - DNA, 25 bp, Artificial
  probe
  misc_feature (1)..(25): SEQ ID NO: 5900; WAN024FI7_at; Start 110; Stop 134
taaccctaagtgtctggaatgataa

SEQ ID NO: 207335 - DNA, 25 bp, Artificial
  probe
  misc_feature (1)..(25): SEQ ID NO: 5900; WAN024FI7_at; Start 3; Stop 27
tattttgattaaactatatagcccc

SEQ ID NO: 207336 - DNA, 25 bp, Artificial
  probe
  misc_feature (1)..(25): SEQ ID NO: 5900; WAN024FI7_at; Start 129; Stop 153
tgataacgagggtgctctccgcttt

SEQ ID NO: 207337 - DNA, 25 bp, Artificial
  probe
  misc_feature (1)..(25): SEQ ID NO: 5900; WAN024FI7_at; Start 101; Stop 125
gcaataatctaaccctaagtgtctg

SEQ ID NO: 207338 - DNA, 25 bp, Artificial
  probe
  misc_feature (1)..(25): SEQ ID NO: 5900; WAN024FI7_at; Start 149; Stop 173
gcttttatcaaagacaagggatgaa

SEQ ID NO: 207339 - DNA, 25 bp, Artificial
  probe
  misc_feature (1)..(25): SEQ ID NO: 5900; WAN024FI7_at; Start 144; Stop 168
tctccgcttttatcaaagacaaggg

SEQ ID NO: 207340 - DNA, 25 bp, Artificial
  probe
  misc_feature (1)..(25): SEQ ID NO: 5900; WAN024FI7_at; Start 138; Stop 162
gggtgctctccgcttttatcaaaga

SEQ ID NO: 207341 - DNA, 25 bp, Artificial
  probe
  misc_feature (1)..(25): SEQ ID NO: 5900; WAN024FI7_at; Start 132; Stop 156
taacgagggtgctctccgcttttat

SEQ ID NO: 207342 - DNA, 25 bp, Artificial
  probe
  misc_feature (1)..(25): SEQ ID NO: 5900; WAN024FI7_at; Start 154; Stop 178
tatcaaagacaagggatgaaacccc

SEQ ID NO: 207343 - DNA, 25 bp, Artificial
  probe
  misc_feature (1)..(25): SEQ ID NO: 5900; WAN024FI7_at; Start 126; Stop 150
gaatgataacgagggtgctctccgc

SEQ ID NO: 207344 - DNA, 25 bp, Artificial
  probe
  misc_feature (1)..(25): SEQ ID NO: 5900; WAN024FI7_at; Start 8; Stop 32
tgattaaactatatagcccctatgc

SEQ ID NO: 207345 - DNA, 25 bp, Artificial
  probe
  misc_feature (1)..(25): SEQ ID NO: 5900; WAN024FI7_at; Start 168; Stop 192
gatgaaaccccaagaaacaacaatg

SEQ ID NO: 207346 - DNA, 25 bp, Artificial
  probe
  misc_feature (1)..(25): SEQ ID NO: 5900; WAN024FI7_at; Start 120; Stop 144
tgtctggaatgataacgagggtgct

SEQ ID NO: 207347 - DNA, 25 bp, Artificial
  probe
  misc_feature (1)..(25): SEQ ID NO: 5485; WAN024FI8_at; Start 66; Stop 90
tggtcaagatgagattgtcaaactc

SEQ ID NO: 207348 - DNA, 25 bp, Artificial
  probe
  misc_feature (1)..(25): SEQ ID NO: 5485; WAN024FI8_at; Start 147; Stop 171
gattttcagaatcgacatagcccac

SEQ ID NO: 207349 - DNA, 25 bp, Artificial
  probe
  misc_feature (1)..(25): SEQ ID NO: 5485; WAN024FI8_at; Start 9; Stop 33
gaggagtgaggttgtcaaactcagc

SEQ ID NO: 207350 - DNA, 25 bp, Artificial
  probe
  misc_feature (1)..(25): SEQ ID NO: 5485; WAN024FI8_at; Start 73; Stop 97
gatgagattgtcaaactcaacagcg

SEQ ID NO: 207351 - DNA, 25 bp, Artificial
  probe
  misc_feature (1)..(25): SEQ ID NO: 5485; WAN024FI8_at; Start 196; Stop 220
tgcacgttctacttcaagagctggg

SEQ ID NO: 207352 - DNA, 25 bp, Artificial
  probe
  misc_feature (1)..(25): SEQ ID NO: 5485; WAN024FI8_at; Start 111; Stop 135
caagttgtggaagagcatgtttgat

SEQ ID NO: 207353 - DNA, 25 bp, Artificial
  probe
  misc_feature (1)..(25): SEQ ID NO: 5485; WAN024FI8_at; Start 16; Stop 40
gaggttgtcaaactcagcagtctca

SEQ ID NO: 207354 - DNA, 25 bp, Artificial
  probe
  misc_feature (1)..(25): SEQ ID NO: 5485; WAN024FI8_at; Start 4; Stop 28
gatacgaggagtgaggttgtcaaac

SEQ ID NO: 207355 - DNA, 25 bp, Artificial
  probe
  misc_feature (1)..(25): SEQ ID NO: 5485; WAN024FI8_at; Start 29; Stop 53
tcagcagtctcaaaaactgttttca

SEQ ID NO: 207356 - DNA, 25 bp, Artificial
  probe
  misc_feature (1)..(25): SEQ ID NO: 5485; WAN024FI8_at; Start 90; Stop 114
caacagcgacacgtttgaagtcaag

SEQ ID NO: 207357 - DNA, 25 bp, Artificial
  probe
  misc_feature (1)..(25): SEQ ID NO: 5485; WAN024FI8_at; Start 171; Stop 195
ctactgggaaggaaacggtgctact

SEQ ID NO: 207358 - DNA, 25 bp, Artificial
  probe
  misc_feature (1)..(25): SEQ ID NO: 5485; WAN024FI8_at; Start 133; Stop 157
gattttttgccatggattttcagaa

SEQ ID NO: 207359 - DNA, 25 bp, Artificial
  probe
  misc_feature (1)..(25): SEQ ID NO: 5485; WAN024FI8_at; Start 154; Stop 178
agaatcgacatagcccactactggg

SEQ ID NO: 207360 - DNA, 25 bp, Artificial
  probe
  misc_feature (1)..(25): SEQ ID NO: 5485; WAN024FI8_at; Start 120; Stop 144
gaagagcatgtttgattttttgcca

SEQ ID NO: 207361 - DNA, 25 bp, Artificial
  probe
  misc_feature (1)..(25): SEQ ID NO: 5485; WAN024FI8_at; Start 81; Stop 105
tgtcaaactcaacagcgacacgttt

SEQ ID NO: 207362 - DNA, 25 bp, Artificial
  probe
  misc_feature (1)..(25): SEQ ID NO: 5485; WAN024FI8_at; Start 205; Stop 229
tacttcaagagctgggacaaagagg

SEQ ID NO: 207363 - DNA, 25 bp, Artificial
  probe
  misc_feature (1)..(25): SEQ ID NO: 5485; WAN024FI8_at; Start 78; Stop 102
gattgtcaaactcaacagcgacacg

SEQ ID NO: 207364 - DNA, 25 bp, Artificial
  probe
  misc_feature (1)..(25): SEQ ID NO: 5485; WAN024FI8_at; Start 138; Stop 162
tttgccatggattttcagaatcgac

SEQ ID NO: 207365 - DNA, 25 bp, Artificial
  probe
  misc_feature (1)..(25): SEQ ID NO: 5485; WAN024FI8_at; Start 37; Stop 61
ctcaaaaactgttttcaaaccatgg

SEQ ID NO: 207366 - DNA, 25 bp, Artificial
  probe
  misc_feature (1)..(25): SEQ ID NO: 5485; WAN024FI8_at; Start 93; Stop 117
cagcgacacgtttgaagtcaagttg

SEQ ID NO: 207367 - DNA, 25 bp, Artificial
  probe
  misc_feature (1)..(25): SEQ ID NO: 5485; WAN024FI8_at; Start 188; Stop 212
gtgctacttgcacgttctacttcaa

SEQ ID NO: 207368 - DNA, 25 bp, Artificial
  probe
  misc_feature (1)..(25): SEQ ID NO: 5485; WAN024FI8_at; Start 200; Stop 224
cgttctacttcaagagctgggacaa

SEQ ID NO: 207369 - DNA, 25 bp, Artificial
  probe
  misc_feature (1)..(25): SEQ ID NO: 5485; WAN024FI8_at; Start 182; Stop 206
gaaacggtgctacttgcacgttcta

SEQ ID NO: 207370 - DNA, 25 bp, Artificial
  probe
  misc_feature (1)..(25): SEQ ID NO: 5485; WAN024FI8_at; Start 168; Stop 192
ccactactgggaaggaaacggtgct

SEQ ID NO: 207371 - DNA, 25 bp, Artificial
  probe
  misc_feature (1)..(25): SEQ ID NO: 5485; WAN024FI8_at; Start 24; Stop 48
caaactcagcagtctcaaaaactgt

SEQ ID NO: 207372 - DNA, 25 bp, Artificial
  probe
  misc_feature (1)..(25): SEQ ID NO: 5485; WAN024FI8_at; Start 105; Stop 129
tgaagtcaagttgtggaagagcatg

SEQ ID NO: 207373 - DNA, 25 bp, Artificial
  probe
  misc_feature (1)..(25): SEQ ID NO: 5485; WAN024FI8_at; Start 219; Stop 243
ggacaaagaggagaggttcctgatc

SEQ ID NO: 207374 - DNA, 25 bp, Artificial
  probe
  misc_feature (1)..(25): SEQ ID NO: 5485; WAN024FI8_at; Start 56; Stop 80
ccatggtatttggtcaagatgagat

SEQ ID NO: 207375 - DNA, 25 bp, Artificial
  probe
  misc_feature (1)..(25): SEQ ID NO: 5485; WAN024FI8_at; Start 162; Stop 186
catagcccactactgggaaggaaac

SEQ ID NO: 207376 - DNA, 25 bp, Artificial
  probe
  misc_feature (1)..(25): SEQ ID NO: 5485; WAN024FI8_at; Start 178; Stop 202
gaaggaaacggtgctacttgcacgt

SEQ ID NO: 207377 - DNA, 25 bp, Artificial
  probe
  misc_feature (1)..(25): SEQ ID NO: 5485; WAN024FI8_at; Start 158; Stop 182
tcgacatagcccactactgggaagg

SEQ ID NO: 207378 - DNA, 25 bp, Artificial
  probe
  misc_feature (1)..(25): SEQ ID NO: 5485; WAN024FI8_at; Start 208; Stop 232
ttcaagagctgggacaaagaggaga

SEQ ID NO: 207379 - DNA, 25 bp, Artificial
  probe
  misc_feature (1)..(25): SEQ ID NO: 5485; WAN024FI8_at; Start 52; Stop 76
caaaccatggtatttggtcaagatg

SEQ ID NO: 207380 - DNA, 25 bp, Artificial
  probe
  misc_feature (1)..(25): SEQ ID NO: 5485; WAN024FI8_at; Start 99; Stop 123
cacgtttgaagtcaagttgtggaag

SEQ ID NO: 207381 - DNA, 25 bp, Artificial
  probe
  misc_feature (1)..(25): SEQ ID NO: 2906; WAN024FI9_at; Start 583; Stop 607
gataatgctgcgaatccacacggca

SEQ ID NO: 207382 - DNA, 25 bp, Artificial
  probe
  misc_feature (1)..(25): SEQ ID NO: 2906; WAN024FI9_at; Start 178; Stop 202
gaagtagaacgtgcaagtagcaccg

SEQ ID NO: 207383 - DNA, 25 bp, Artificial
  probe
  misc_feature (1)..(25): SEQ ID NO: 2906; WAN024FI9_at; Start 572; Stop 596
tcttgactggtgataatgctgcgaa

SEQ ID NO: 207384 - DNA, 25 bp, Artificial
  probe
  misc_feature (1)..(25): SEQ ID NO: 2906; WAN024FI9_at; Start 47; Stop 71
tagacgtcgctgtcgtatctgaccc

SEQ ID NO: 207385 - DNA, 25 bp, Artificial
  probe
  misc_feature (1)..(25): SEQ ID NO: 2906; WAN024FI9_at; Start 554; Stop 578
tgagctttgataccatggtcttgac

SEQ ID NO: 207386 - DNA, 25 bp, Artificial
  probe
  misc_feature (1)..(25): SEQ ID NO: 2906; WAN024FI9_at; Start 992; Stop 1016
tcggtgttcgtattgaagactgcgg

SEQ ID NO: 207387 - DNA, 25 bp, Artificial
  probe
  misc_feature (1)..(25): SEQ ID NO: 2906; WAN024FI9_at; Start 867; Stop 891
ccgtctcgggcatggtatcggtatg

SEQ ID NO: 207388 - DNA, 25 bp, Artificial
  probe
  misc_feature (1)..(25): SEQ ID NO: 2906; WAN024FI9_at; Start 705; Stop 729
tgtcggcaaaccagaccaattcaag

SEQ ID NO: 207389 - DNA, 25 bp, Artificial
  probe
  misc_feature (1)..(25): SEQ ID NO: 2906; WAN024FI9_at; Start 33; Stop 57
tgaatcagaaaaactagacgtcgct

SEQ ID NO: 207390 - DNA, 25 bp, Artificial
  probe
  misc_feature (1)..(25): SEQ ID NO: 2906; WAN024FI9_at; Start 599; Stop 623
cacacggcattccagcagctaataa

SEQ ID NO: 207391 - DNA, 25 bp, Artificial
  probe
  misc_feature (1)..(25): SEQ ID NO: 2906; WAN024FI9_at; Start 687; Stop 711
tatgactcgtacagtcgctgtcggc

SEQ ID NO: 207392 - DNA, 25 bp, Artificial
  probe
  misc_feature (1)..(25): SEQ ID NO: 2906; WAN024FI9_at; Start 823; Stop 847
cgtgaggtcatcgaaaaagctggtt

SEQ ID NO: 207393 - DNA, 25 bp, Artificial
  probe
  misc_feature (1)..(25): SEQ ID NO: 2906; WAN024FI9_at; Start 792; Stop 816
tgtgactgctcatgaagtggaccgc

SEQ ID NO: 207394 - DNA, 25 bp, Artificial
  probe
  misc_feature (1)..(25): SEQ ID NO: 2906; WAN024FI9_at; Start 976; Stop 1000
tatatccctggtaaagtcggtgttc

SEQ ID NO: 207395 - DNA, 25 bp, Artificial
  probe
  misc_feature (1)..(25): SEQ ID NO: 2906; WAN024FI9_at; Start 907; Stop 931
ccatctatcatggaaggaaacgaca

SEQ ID NO: 207396 - DNA, 25 bp, Artificial
  probe
  misc_feature (1)..(25): SEQ ID NO: 2906; WAN024FI9_at; Start 271; Stop 295
caacttgacttcaaacgtgtcgctg

SEQ ID NO: 207397 - DNA, 25 bp, Artificial
  probe
  misc_feature (1)..(25): SEQ ID NO: 2906; WAN024FI9_at; Start 495; Stop 519
gactgagacagatatcatcgcacaa

SEQ ID NO: 207398 - DNA, 25 bp, Artificial
  probe
  misc_feature (1)..(25): SEQ ID NO: 2906; WAN024FI9_at; Start 923; Stop 947
gaaacgacatggtcatcgaagaagg

SEQ ID NO: 207399 - DNA, 25 bp, Artificial
  probe
  misc_feature (1)..(25): SEQ ID NO: 2906; WAN024FI9_at; Start 521; Stop 545
tcgactttgccatgaaacgtgaagg

SEQ ID NO: 207400 - DNA, 25 bp, Artificial
  probe
  misc_feature (1)..(25): SEQ ID NO: 2906; WAN024FI9_at; Start 1007; Stop 1031
aagactgcggtgttgttaccaagga

SEQ ID NO: 207401 - DNA, 25 bp, Artificial
  probe
  misc_feature (1)..(25): SEQ ID NO: 2906; WAN024FI9_at; Start 348; Stop 372
tgagactgctgagtttgacaacctc

SEQ ID NO: 207402 - DNA, 25 bp, Artificial
  probe
  misc_feature (1)..(25): SEQ ID NO: 2906; WAN024FI9_at; Start 753; Stop 777
tgaagcccaacaagctgctcttgac

SEQ ID NO: 207403 - DNA, 25 bp, Artificial
  probe
  misc_feature (1)..(25): SEQ ID NO: 2906; WAN024FI9_at; Start 215; Stop 239
tagtgggctatgtcgattctgaaaa

SEQ ID NO: 207404 - DNA, 25 bp, Artificial
  probe
  misc_feature (1)..(25): SEQ ID NO: 2906; WAN024FI9_at; Start 739; Stop 763
tacaacttgactcttgaagcccaac

SEQ ID NO: 207405 - DNA, 25 bp, Artificial
  probe
  misc_feature (1)..(25): SEQ ID NO: 2906; WAN024FI9_at; Start 389; Stop 413
gcatgcgcctcatcaaatcagctga

SEQ ID NO: 207406 - DNA, 25 bp, Artificial
  probe
  misc_feature (1)..(25): SEQ ID NO: 2906; WAN024FI9_at; Start 435; Stop 459
tgcaggtctttatgctgacaaggct

SEQ ID NO: 207407 - DNA, 25 bp, Artificial
  probe
  misc_feature (1)..(25): SEQ ID NO: 2906; WAN024FI9_at; Start 193; Stop 217
agtagcaccgtttccttcccagtag

SEQ ID NO: 207408 - DNA, 25 bp, Artificial
  probe
  misc_feature (1)..(25): SEQ ID NO: 2906; WAN024FI9_at; Start 1045; Stop 1069
tttacaagcaccagcaaagatttgc

SEQ ID NO: 207409 - DNA, 25 bp, Artificial
  probe
  misc_feature (1)..(25): SEQ ID NO: 2906; WAN024FI9_at; Start 634; Stop 658
gatgctcttctcctctttgacctgg

SEQ ID NO: 207410 - DNA, 25 bp, Artificial
  probe
  misc_feature (1)..(25): SEQ ID NO: 2906; WAN024FI9_at; Start 654; Stop 678
cctgggtgttctggtcaatggctat

SEQ ID NO: 207411 - DNA, 25 bp, Artificial
  probe
  misc_feature (1)..(25): SEQ ID NO: 2906; WAN024FI9_at; Start 97; Stop 121
ttttacagtgatccccatgaacgcc

SEQ ID NO: 207412 - DNA, 25 bp, Artificial
  probe
  misc_feature (1)..(25): SEQ ID NO: 2906; WAN024FI9_at; Start 669; Stop 693
caatggctatgcgtcagatatgact

SEQ ID NO: 207413 - DNA, 25 bp, Artificial
  probe
  misc_feature (1)..(25): SEQ ID NO: 2906; WAN024FI9_at; Start 773; Stop 797
ttgactttatcaagccaggtgtgac

SEQ ID NO: 207414 - DNA, 25 bp, Artificial
  probe
  misc_feature (1)..(25): SEQ ID NO: 2906; WAN024FI9_at; Start 164; Stop 188
ttgtcccagctcttgaagtagaacg

SEQ ID NO: 207415 - DNA, 25 bp, Artificial
  probe
  misc_feature (1)..(25): SEQ ID NO: 4118; WAN024FIA_at; Start 209; Stop 233
ttgagcgtgtagtgtcccatgaccc

SEQ ID NO: 207416 - DNA, 25 bp, Artificial
  probe
  misc_feature (1)..(25): SEQ ID NO: 4118; WAN024FIA_at; Start 72; Stop 96
catagacaacctgtcccagcggttt

SEQ ID NO: 207417 - DNA, 25 bp, Artificial
  probe
  misc_feature (1)..(25): SEQ ID NO: 4118; WAN024FIA_at; Start 54; Stop 78
cttcgttgtttccatttccatagac

SEQ ID NO: 207418 - DNA, 25 bp, Artificial
  probe
  misc_feature (1)..(25): SEQ ID NO: 4118; WAN024FIA_at; Start 122; Stop 146
ccttggtgattttcaaatccatagt

SEQ ID NO: 207419 - DNA, 25 bp, Artificial
  probe
  misc_feature (1)..(25): SEQ ID NO: 4118; WAN024FIA_at; Start 135; Stop 159
caaatccatagtaggtttcatcgaa

SEQ ID NO: 207420 - DNA, 25 bp, Artificial
  probe
  misc_feature (1)..(25): SEQ ID NO: 4118; WAN024FIA_at; Start 157; Stop 181
gaaatcttcattgtgaatcttgatg

SEQ ID NO: 207421 - DNA, 25 bp, Artificial
  probe
  misc_feature (1)..(25): SEQ ID NO: 4118; WAN024FIA_at; Start 24; Stop 48
tcttataatgaaccccttcaccgac

SEQ ID NO: 207422 - DNA, 25 bp, Artificial
  probe
  misc_feature (1)..(25): SEQ ID NO: 4118; WAN024FIA_at; Start 81; Stop 105
cctgtcccagcggtttttggtcatc

SEQ ID NO: 207423 - DNA, 25 bp, Artificial
  probe
  misc_feature (1)..(25): SEQ ID NO: 4118; WAN024FIA_at; Start 66; Stop 90
catttccatagacaacctgtcccag

SEQ ID NO: 207424 - DNA, 25 bp, Artificial
  probe
  misc_feature (1)..(25): SEQ ID NO: 4118; WAN024FIA_at; Start 15; Stop 39
caaagacattcttataatgaacccc

SEQ ID NO: 207425 - DNA, 25 bp, Artificial
  probe
  misc_feature (1)..(25): SEQ ID NO: 4118; WAN024FIA_at; Start 10; Stop 34
ggaaccaaagacattcttataatga

SEQ ID NO: 207426 - DNA, 25 bp, Artificial
  probe
  misc_feature (1)..(25): SEQ ID NO: 4118; WAN024FIA_at; Start 148; Stop 172
ggtttcatcgaaatcttcattgtga

SEQ ID NO: 207427 - DNA, 25 bp, Artificial
  probe
  misc_feature (1)..(25): SEQ ID NO: 4118; WAN024FIA_at; Start 178; Stop 202
gatgtcaccgataaaacggttattg

SEQ ID NO: 207428 - DNA, 25 bp, Artificial
  probe
  misc_feature (1)..(25): SEQ ID NO: 4118; WAN024FIA_at; Start 212; Stop 236
agcgtgtagtgtcccatgaccccta

SEQ ID NO: 207429 - DNA, 25 bp, Artificial
  probe
  misc_feature (1)..(25): SEQ ID NO: 4118; WAN024FIA_at; Start 4; Stop 28
gaagtaggaaccaaagacattctta

SEQ ID NO: 207430 - DNA, 25 bp, Artificial
  probe
  misc_feature (1)..(25): SEQ ID NO: 4118; WAN024FIA_at; Start 207; Stop 231
ggttgagcgtgtagtgtcccatgac

SEQ ID NO: 207431 - DNA, 25 bp, Artificial
  probe
  misc_feature (1)..(25): SEQ ID NO: 4118; WAN024FIA_at; Start 88; Stop 112
cagcggtttttggtcatcagagagg

SEQ ID NO: 207432 - DNA, 25 bp, Artificial
  probe
  misc_feature (1)..(25): SEQ ID NO: 4118; WAN024FIA_at; Start 197; Stop 221
ttattggtctggttgagcgtgtagt

SEQ ID NO: 207433 - DNA, 25 bp, Artificial
  probe
  misc_feature (1)..(25): SEQ ID NO: 4118; WAN024FIA_at; Start 86; Stop 110
cccagcggtttttggtcatcagaga

SEQ ID NO: 207434 - DNA, 25 bp, Artificial
  probe
  misc_feature (1)..(25): SEQ ID NO: 4118; WAN024FIA_at; Start 1; Stop 25
gtggaagtaggaaccaaagacattc

SEQ ID NO: 207435 - DNA, 25 bp, Artificial
  probe
  misc_feature (1)..(25): SEQ ID NO: 4118; WAN024FIA_at; Start 60; Stop 84
tgtttccatttccatagacaacctg

SEQ ID NO: 207436 - DNA, 25 bp, Artificial
  probe
  misc_feature (1)..(25): SEQ ID NO: 4118; WAN024FIA_at; Start 164; Stop 188
tcattgtgaatcttgatgtcaccga

SEQ ID NO: 207437 - DNA, 25 bp, Artificial
  probe
  misc_feature (1)..(25): SEQ ID NO: 4118; WAN024FIA_at; Start 175; Stop 199
cttgatgtcaccgataaaacggtta

SEQ ID NO: 207438 - DNA, 25 bp, Artificial
  probe
  misc_feature (1)..(25): SEQ ID NO: 4118; WAN024FIA_at; Start 137; Stop 161
aatccatagtaggtttcatcgaaat

SEQ ID NO: 207439 - DNA, 25 bp, Artificial
  probe
  misc_feature (1)..(25): SEQ ID NO: 4118; WAN024FIA_at; Start 63; Stop 87
ttccatttccatagacaacctgtcc

SEQ ID NO: 207440 - DNA, 25 bp, Artificial
  probe
  misc_feature (1)..(25): SEQ ID NO: 4118; WAN024FIA_at; Start 191; Stop 215
aaacggttattggtctggttgagcg

SEQ ID NO: 207441 - DNA, 25 bp, Artificial
  probe
  misc_feature (1)..(25): SEQ ID NO: 4118; WAN024FIA_at; Start 96; Stop 120
tttggtcatcagagaggaaggtacg

SEQ ID NO: 207442 - DNA, 25 bp, Artificial
  probe
  misc_feature (1)..(25): SEQ ID NO: 4118; WAN024FIA_at; Start 141; Stop 165
catagtaggtttcatcgaaatcttc

SEQ ID NO: 207443 - DNA, 25 bp, Artificial
  probe
  misc_feature (1)..(25): SEQ ID NO: 4118; WAN024FIA_at; Start 129; Stop 153
gattttcaaatccatagtaggtttc

SEQ ID NO: 207444 - DNA, 25 bp, Artificial
  probe
  misc_feature (1)..(25): SEQ ID NO: 4118; WAN024FIA_at; Start 171; Stop 195
gaatcttgatgtcaccgataaaacg

SEQ ID NO: 207445 - DNA, 25 bp, Artificial
  probe
  misc_feature (1)..(25): SEQ ID NO: 4118; WAN024FIA_at; Start 84; Stop 108
gtcccagcggtttttggtcatcaga

SEQ ID NO: 207446 - DNA, 25 bp, Artificial
  probe
  misc_feature (1)..(25): SEQ ID NO: 4118; WAN024FIA_at; Start 203; Stop 227
gtctggttgagcgtgtagtgtccca

SEQ ID NO: 207447 - DNA, 25 bp, Artificial
  probe
  misc_feature (1)..(25): SEQ ID NO: 4118; WAN024FIA_at; Start 70; Stop 94
tccatagacaacctgtcccagcggt

SEQ ID NO: 207448 - DNA, 25 bp, Artificial
  probe
  misc_feature (1)..(25): SEQ ID NO: 4118; WAN024FIA_at; Start 91; Stop 115
cggtttttggtcatcagagaggaag

SEQ ID NO: 207449 - DNA, 25 bp, Artificial
  probe
  misc_feature (1)..(25): SEQ ID NO: 2721; WAN024FIB_at; Start 748; Stop 772
tacagtgacgtcaaaagcaaggctg

SEQ ID NO: 207450 - DNA, 25 bp, Artificial
  probe
  misc_feature (1)..(25): SEQ ID NO: 2721; WAN024FIB_at; Start 509; Stop 533
tctctgatgaccaaaaaccgctggg

SEQ ID NO: 207451 - DNA, 25 bp, Artificial
  probe
  misc_feature (1)..(25): SEQ ID NO: 2721; WAN024FIB_at; Start 212; Stop 236
tcggtggtggtcaagactttgaaca

SEQ ID NO: 207452 - DNA, 25 bp, Artificial
  probe
  misc_feature (1)..(25): SEQ ID NO: 2721; WAN024FIB_at; Start 603; Stop 627
tggttcctacttccacgggcctatc

SEQ ID NO: 207453 - DNA, 25 bp, Artificial
  probe
  misc_feature (1)..(25): SEQ ID NO: 2721; WAN024FIB_at; Start 312; Stop 336
ggctatctgcggtggtttccaacta

SEQ ID NO: 207454 - DNA, 25 bp, Artificial
  probe
  misc_feature (1)..(25): SEQ ID NO: 2721; WAN024FIB_at; Start 294; Stop 318
aaacgacggtgtagttctggctatc

SEQ ID NO: 207455 - DNA, 25 bp, Artificial
  probe
  misc_feature (1)..(25): SEQ ID NO: 2721; WAN024FIB_at; Start 404; Stop 428
cgctcaaccagaccaataaccgttt

SEQ ID NO: 207456 - DNA, 25 bp, Artificial
  probe
  misc_feature (1)..(25): SEQ ID NO: 2721; WAN024FIB_at; Start 135; Stop 159
actgggagcccatgtgaccgttgac

SEQ ID NO: 207457 - DNA, 25 bp, Artificial
  probe
  misc_feature (1)..(25): SEQ ID NO: 2721; WAN024FIB_at; Start 351; Stop 375
tgttgaagcttcaggaaaacgtatc

SEQ ID NO: 207458 - DNA, 25 bp, Artificial
  probe
  misc_feature (1)..(25): SEQ ID NO: 2721; WAN024FIB_at; Start 733; Stop 757
gaaatcgctgaagagtacagtgacg

SEQ ID NO: 207459 - DNA, 25 bp, Artificial
  probe
  misc_feature (1)..(25): SEQ ID NO: 2721; WAN024FIB_at; Start 250; Stop 274
gacgacctacctgctaaaaaagaga

SEQ ID NO: 207460 - DNA, 25 bp, Artificial
  probe
  misc_feature (1)..(25): SEQ ID NO: 2721; WAN024FIB_at; Start 656; Stop 680
gcctagttactactgccctcaagaa

SEQ ID NO: 207461 - DNA, 25 bp, Artificial
  probe
  misc_feature (1)..(25): SEQ ID NO: 2721; WAN024FIB_at; Start 32; Stop 56
gcaattacccctatcagctcaacat

SEQ ID NO: 207462 - DNA, 25 bp, Artificial
  probe
  misc_feature (1)..(25): SEQ ID NO: 2721; WAN024FIB_at; Start 457; Stop 481
gatttcgatgaaacctactatggat

SEQ ID NO: 207463 - DNA, 25 bp, Artificial
  probe
  misc_feature (1)..(25): SEQ ID NO: 2721; WAN024FIB_at; Start 764; Stop 788
gcaaggctgacttttcttaactaat

SEQ ID NO: 207464 - DNA, 25 bp, Artificial
  probe
  misc_feature (1)..(25): SEQ ID NO: 2721; WAN024FIB_at; Start 624; Stop 648
tatcctctctcgtaatgccaatctg

SEQ ID NO: 207465 - DNA, 25 bp, Artificial
  probe
  misc_feature (1)..(25): SEQ ID NO: 2721; WAN024FIB_at; Start 669; Stop 693
tgccctcaagaagaaatatggtcag

SEQ ID NO: 207466 - DNA, 25 bp, Artificial
  probe
  misc_feature (1)..(25): SEQ ID NO: 2721; WAN024FIB_at; Start 121; Stop 145
tatgtggctgaaaaactgggagccc

SEQ ID NO: 207467 - DNA, 25 bp, Artificial
  probe
  misc_feature (1)..(25): SEQ ID NO: 2721; WAN024FIB_at; Start 264; Stop 288
taaaaaagagagcattgacaactac

SEQ ID NO: 207468 - DNA, 25 bp, Artificial
  probe
  misc_feature (1)..(25): SEQ ID NO: 2721; WAN024FIB_at; Start 420; Stop 444
taaccgttttatcggtgacatcaag

SEQ ID NO: 207469 - DNA, 25 bp, Artificial
  probe
  misc_feature (1)..(25): SEQ ID NO: 2721; WAN024FIB_at; Start 541; Stop 565
gtctatggaaatggaaacaacgaag

SEQ ID NO: 207470 - DNA, 25 bp, Artificial
  probe
  misc_feature (1)..(25): SEQ ID NO: 2721; WAN024FIB_at; Start 92; Stop 116
gggacaatggaaacatcctcatgct

SEQ ID NO: 207471 - DNA, 25 bp, Artificial
  probe
  misc_feature (1)..(25): SEQ ID NO: 2721; WAN024FIB_at; Start 69; Stop 93
cggaaatctcatgaatacctacggg

SEQ ID NO: 207472 - DNA, 25 bp, Artificial
  probe
  misc_feature (1)..(25): SEQ ID NO: 2721; WAN024FIB_at; Start 524; Stop 548
aaccgctgggacaggttgtctatgg

SEQ ID NO: 207473 - DNA, 25 bp, Artificial
  probe
  misc_feature (1)..(25): SEQ ID NO: 2721; WAN024FIB_at; Start 640; Stop 664
gccaatctggcttatcgcctagtta

SEQ ID NO: 207474 - DNA, 25 bp, Artificial
  probe
  misc_feature (1)..(25): SEQ ID NO: 2721; WAN024FIB_at; Start 184; Stop 208
gatgaaaatcactacgacatcgcct

SEQ ID NO: 207475 - DNA, 25 bp, Artificial
  probe
  misc_feature (1)..(25): SEQ ID NO: 2721; WAN024FIB_at; Start 150; Stop 174
gaccgttgacatcgtttctctccat

SEQ ID NO: 207476 - DNA, 25 bp, Artificial
  probe
  misc_feature (1)..(25): SEQ ID NO: 2721; WAN024FIB_at; Start 280; Stop 304
gacaactacatccaaaacgacggtg

SEQ ID NO: 207477 - DNA, 25 bp, Artificial
  probe
  misc_feature (1)..(25): SEQ ID NO: 2721; WAN024FIB_at; Start 50; Stop 74
tcaacattgcccacctctacggaaa

SEQ ID NO: 207478 - DNA, 25 bp, Artificial
  probe
  misc_feature (1)..(25): SEQ ID NO: 2721; WAN024FIB_at; Start 201; Stop 225
catcgcctttttcggtggtggtcaa

SEQ ID NO: 207479 - DNA, 25 bp, Artificial
  probe
  misc_feature (1)..(25): SEQ ID NO: 2721; WAN024FIB_at; Start 386; Stop 410
gggtcatgggacactacacgctcaa

SEQ ID NO: 207480 - DNA, 25 bp, Artificial
  probe
  misc_feature (1)..(25): SEQ ID NO: 2721; WAN024FIB_at; Start 235; Stop 259
caaagtatcattgcagacgacctac

SEQ ID NO: 207481 - DNA, 25 bp, Artificial
  probe
  misc_feature (1)..(25): SEQ ID NO: 2721; WAN024FIB_at; Start 362; Stop 386
caggaaaacgtatcgaagggctagg

SEQ ID NO: 207482 - DNA, 25 bp, Artificial
  probe
  misc_feature (1)..(25): SEQ ID NO: 2721; WAN024FIB_at; Start 167; Stop 191
ctctccatgatgactttgatgaaaa

SEQ ID NO: 207483 - DNA, 25 bp, Artificial
  probe
  misc_feature (1)..(25): SEQ ID NO: 2080; WAN024FIC_at; Start 226; Stop 250
gaaacggtccatctggtcacggaag

SEQ ID NO: 207484 - DNA, 25 bp, Artificial
  probe
  misc_feature (1)..(25): SEQ ID NO: 2080; WAN024FIC_at; Start 135; Stop 159
aaagtggactgtctccgttaaggag

SEQ ID NO: 207485 - DNA, 25 bp, Artificial
  probe
  misc_feature (1)..(25): SEQ ID NO: 2080; WAN024FIC_at; Start 87; Stop 111
agtcaaaaccaaaatactctatagg

SEQ ID NO: 207486 - DNA, 25 bp, Artificial
  probe
  misc_feature (1)..(25): SEQ ID NO: 2080; WAN024FIC_at; Start 25; Stop 49
gcagtcaggacagagaatcccttcg

SEQ ID NO: 207487 - DNA, 25 bp, Artificial
  probe
  misc_feature (1)..(25): SEQ ID NO: 2080; WAN024FIC_at; Start 279; Stop 303
ggatatagtcacagatacgagatag

SEQ ID NO: 207488 - DNA, 25 bp, Artificial
  probe
  misc_feature (1)..(25): SEQ ID NO: 2080; WAN024FIC_at; Start 54; Stop 78
tgtagtgagccagttgggctggtcc

SEQ ID NO: 207489 - DNA, 25 bp, Artificial
  probe
  misc_feature (1)..(25): SEQ ID NO: 2080; WAN024FIC_at; Start 267; Stop 291
aaagactaggctggatatagtcaca

SEQ ID NO: 207490 - DNA, 25 bp, Artificial
  probe
  misc_feature (1)..(25): SEQ ID NO: 2080; WAN024FIC_at; Start 217; Stop 241
gatttcaccgaaacggtccatctgg

SEQ ID NO: 207491 - DNA, 25 bp, Artificial
  probe
  misc_feature (1)..(25): SEQ ID NO: 2080; WAN024FIC_at; Start 16; Stop 40
gatgccttggcagtcaggacagaga

SEQ ID NO: 207492 - DNA, 25 bp, Artificial
  probe
  misc_feature (1)..(25): SEQ ID NO: 2080; WAN024FIC_at; Start 202; Stop 226
gttataggtagtatagatttcaccg

SEQ ID NO: 207493 - DNA, 25 bp, Artificial
  probe
  misc_feature (1)..(25): SEQ ID NO: 2080; WAN024FIC_at; Start 273; Stop 297
taggctggatatagtcacagatacg

SEQ ID NO: 207494 - DNA, 25 bp, Artificial
  probe
  misc_feature (1)..(25): SEQ ID NO: 2080; WAN024FIC_at; Start 104; Stop 128
tctatagggtttggaatagttggct

SEQ ID NO: 207495 - DNA, 25 bp, Artificial
  probe
  misc_feature (1)..(25): SEQ ID NO: 2080; WAN024FIC_at; Start 243; Stop 267
cacggaagatattagtaatgacaaa

SEQ ID NO: 207496 - DNA, 25 bp, Artificial
  probe
  misc_feature (1)..(25): SEQ ID NO: 2080; WAN024FIC_at; Start 258; Stop 282
taatgacaaaaagactaggctggat

SEQ ID NO: 207497 - DNA, 25 bp, Artificial
  probe
  misc_feature (1)..(25): SEQ ID NO: 2080; WAN024FIC_at; Start 156; Stop 180
ggagaacagtagcagttggaacttt

SEQ ID NO: 207498 - DNA, 25 bp, Artificial
  probe
  misc_feature (1)..(25): SEQ ID NO: 2080; WAN024FIC_at; Start 210; Stop 234
tagtatagatttcaccgaaacggtc

SEQ ID NO: 207499 - DNA, 25 bp, Artificial
  probe
  misc_feature (1)..(25): SEQ ID NO: 2080; WAN024FIC_at; Start 20; Stop 44
ccttggcagtcaggacagagaatcc

SEQ ID NO: 207500 - DNA, 25 bp, Artificial
  probe
  misc_feature (1)..(25): SEQ ID NO: 2080; WAN024FIC_at; Start 235; Stop 259
catctggtcacggaagatattagta

SEQ ID NO: 207501 - DNA, 25 bp, Artificial
  probe
  misc_feature (1)..(25): SEQ ID NO: 2080; WAN024FIC_at; Start 140; Stop 164
ggactgtctccgttaaggagaacag

SEQ ID NO: 207502 - DNA, 25 bp, Artificial
  probe
  misc_feature (1)..(25): SEQ ID NO: 2080; WAN024FIC_at; Start 6; Stop 30
catatttgaggatgccttggcagtc

SEQ ID NO: 207503 - DNA, 25 bp, Artificial
  probe
  misc_feature (1)..(25): SEQ ID NO: 2080; WAN024FIC_at; Start 33; Stop 57
gacagagaatcccttcggtattgta

SEQ ID NO: 207504 - DNA, 25 bp, Artificial
  probe
  misc_feature (1)..(25): SEQ ID NO: 2080; WAN024FIC_at; Start 96; Stop 120
caaaatactctatagggtttggaat

SEQ ID NO: 207505 - DNA, 25 bp, Artificial
  probe
  misc_feature (1)..(25): SEQ ID NO: 2080; WAN024FIC_at; Start 42; Stop 66
tcccttcggtattgtagtgagccag

SEQ ID NO: 207506 - DNA, 25 bp, Artificial
  probe
  misc_feature (1)..(25): SEQ ID NO: 2080; WAN024FIC_at; Start 126; Stop 150
gcttgtagaaaagtggactgtctcc

SEQ ID NO: 207507 - DNA, 25 bp, Artificial
  probe
  misc_feature (1)..(25): SEQ ID NO: 2080; WAN024FIC_at; Start 29; Stop 53
tcaggacagagaatcccttcggtat

SEQ ID NO: 207508 - DNA, 25 bp, Artificial
  probe
  misc_feature (1)..(25): SEQ ID NO: 2080; WAN024FIC_at; Start 188; Stop 212
gcatccaatatcatgttataggtag

SEQ ID NO: 207509 - DNA, 25 bp, Artificial
  probe
  misc_feature (1)..(25): SEQ ID NO: 2080; WAN024FIC_at; Start 119; Stop 143
atagttggcttgtagaaaagtggac

SEQ ID NO: 207510 - DNA, 25 bp, Artificial
  probe
  misc_feature (1)..(25): SEQ ID NO: 2080; WAN024FIC_at; Start 39; Stop 63
gaatcccttcggtattgtagtgagc

SEQ ID NO: 207511 - DNA, 25 bp, Artificial
  probe
  misc_feature (1)..(25): SEQ ID NO: 2080; WAN024FIC_at; Start 3; Stop 27
gctcatatttgaggatgccttggca

SEQ ID NO: 207512 - DNA, 25 bp, Artificial
  probe
  misc_feature (1)..(25): SEQ ID NO: 2080; WAN024FIC_at; Start 182; Stop 206
cgaatggcatccaatatcatgttat

SEQ ID NO: 207513 - DNA, 25 bp, Artificial
  probe
  misc_feature (1)..(25): SEQ ID NO: 2080; WAN024FIC_at; Start 46; Stop 70
ttcggtattgtagtgagccagttgg

SEQ ID NO: 207514 - DNA, 25 bp, Artificial
  probe
  misc_feature (1)..(25): SEQ ID NO: 2080; WAN024FIC_at; Start 230; Stop 254
cggtccatctggtcacggaagatat

SEQ ID NO: 207515 - DNA, 25 bp, Artificial
  probe
  misc_feature (1)..(25): SEQ ID NO: 2080; WAN024FIC_at; Start 153; Stop 177
taaggagaacagtagcagttggaac

SEQ ID NO: 207516 - DNA, 25 bp, Artificial
  probe
  misc_feature (1)..(25): SEQ ID NO: 2080; WAN024FIC_at; Start 12; Stop 36
tgaggatgccttggcagtcaggaca

SEQ ID NO: 207517 - DNA, 25 bp, Artificial
  probe
  misc_feature (1)..(25): SEQ ID NO: 5123; WAN024FID_at; Start 159; Stop 183
tactcgtttcagtgattttctcagc

SEQ ID NO: 207518 - DNA, 25 bp, Artificial
  probe
  misc_feature (1)..(25): SEQ ID NO: 5123; WAN024FID_at; Start 142; Stop 166
gagaacttgctccagattactcgtt

SEQ ID NO: 207519 - DNA, 25 bp, Artificial
  probe
  misc_feature (1)..(25): SEQ ID NO: 5123; WAN024FID_at; Start 57; Stop 81
tagccagcagttcacgaaattccag

SEQ ID NO: 207520 - DNA, 25 bp, Artificial
  probe
  misc_feature (1)..(25): SEQ ID NO: 5123; WAN024FID_at; Start 109; Stop 133
ggcatgcttgcagtcttgattctca

SEQ ID NO: 207521 - DNA, 25 bp, Artificial
  probe
  misc_feature (1)..(25): SEQ ID NO: 5123; WAN024FID_at; Start 230; Stop 254
acaccgccagcgttgatttcaggaa

SEQ ID NO: 207522 - DNA, 25 bp, Artificial
  probe
  misc_feature (1)..(25): SEQ ID NO: 5123; WAN024FID_at; Start 220; Stop 244
agaatgacgaacaccgccagcgttg

SEQ ID NO: 207523 - DNA, 25 bp, Artificial
  probe
  misc_feature (1)..(25): SEQ ID NO: 5123; WAN024FID_at; Start 204; Stop 228
ggcgacgagcgatttcagaatgacg

SEQ ID NO: 207524 - DNA, 25 bp, Artificial
  probe
  misc_feature (1)..(25): SEQ ID NO: 5123; WAN024FID_at; Start 258; Stop 282
ccatgtcagtgatttgttcaaagtc

SEQ ID NO: 207525 - DNA, 25 bp, Artificial
  probe
  misc_feature (1)..(25): SEQ ID NO: 5123; WAN024FID_at; Start 168; Stop 192
cagtgattttctcagctggatagcc

SEQ ID NO: 207526 - DNA, 25 bp, Artificial
  probe
  misc_feature (1)..(25): SEQ ID NO: 5123; WAN024FID_at; Start 15; Stop 39
gtataaaccattagttcatctcctt

SEQ ID NO: 207527 - DNA, 25 bp, Artificial
  probe
  misc_feature (1)..(25): SEQ ID NO: 5123; WAN024FID_at; Start 50; Stop 74
tgacgactagccagcagttcacgaa

SEQ ID NO: 207528 - DNA, 25 bp, Artificial
  probe
  misc_feature (1)..(25): SEQ ID NO: 5123; WAN024FID_at; Start 214; Stop 238
gatttcagaatgacgaacaccgcca

SEQ ID NO: 207529 - DNA, 25 bp, Artificial
  probe
  misc_feature (1)..(25): SEQ ID NO: 5123; WAN024FID_at; Start 31; Stop 55
catctcctttctaacaatctgacga

SEQ ID NO: 207530 - DNA, 25 bp, Artificial
  probe
  misc_feature (1)..(25): SEQ ID NO: 5123; WAN024FID_at; Start 69; Stop 93
cacgaaattccagcatggcagtata

SEQ ID NO: 207531 - DNA, 25 bp, Artificial
  probe
  misc_feature (1)..(25): SEQ ID NO: 5123; WAN024FID_at; Start 119; Stop 143
cagtcttgattctcaatggtcttga

SEQ ID NO: 207532 - DNA, 25 bp, Artificial
  probe
  misc_feature (1)..(25): SEQ ID NO: 5123; WAN024FID_at; Start 236; Stop 260
ccagcgttgatttcaggaatgtcca

SEQ ID NO: 207533 - DNA, 25 bp, Artificial
  probe
  misc_feature (1)..(25): SEQ ID NO: 5123; WAN024FID_at; Start 318; Stop 342
catagttggcattaaggaggacaga

SEQ ID NO: 207534 - DNA, 25 bp, Artificial
  probe
  misc_feature (1)..(25): SEQ ID NO: 5123; WAN024FID_at; Start 64; Stop 88
cagttcacgaaattccagcatggca

SEQ ID NO: 207535 - DNA, 25 bp, Artificial
  probe
  misc_feature (1)..(25): SEQ ID NO: 5123; WAN024FID_at; Start 149; Stop 173
tgctccagattactcgtttcagtga

SEQ ID NO: 207536 - DNA, 25 bp, Artificial
  probe
  misc_feature (1)..(25): SEQ ID NO: 5123; WAN024FID_at; Start 321; Stop 345
agttggcattaaggaggacagatag

SEQ ID NO: 207537 - DNA, 25 bp, Artificial
  probe
  misc_feature (1)..(25): SEQ ID NO: 5123; WAN024FID_at; Start 244; Stop 268
gatttcaggaatgtccatgtcagtg

SEQ ID NO: 207538 - DNA, 25 bp, Artificial
  probe
  misc_feature (1)..(25): SEQ ID NO: 5123; WAN024FID_at; Start 185; Stop 209
ggatagccagtcactcggaggcgac

SEQ ID NO: 207539 - DNA, 25 bp, Artificial
  probe
  misc_feature (1)..(25): SEQ ID NO: 5123; WAN024FID_at; Start 132; Stop 156
caatggtcttgagaacttgctccag

SEQ ID NO: 207540 - DNA, 25 bp, Artificial
  probe
  misc_feature (1)..(25): SEQ ID NO: 5123; WAN024FID_at; Start 42; Stop 66
taacaatctgacgactagccagcag

SEQ ID NO: 207541 - DNA, 25 bp, Artificial
  probe
  misc_feature (1)..(25): SEQ ID NO: 5123; WAN024FID_at; Start 92; Stop 116
taagttgccagaatataggcatgct

SEQ ID NO: 207542 - DNA, 25 bp, Artificial
  probe
  misc_feature (1)..(25): SEQ ID NO: 5123; WAN024FID_at; Start 99; Stop 123
ccagaatataggcatgcttgcagtc

SEQ ID NO: 207543 - DNA, 25 bp, Artificial
  probe
  misc_feature (1)..(25): SEQ ID NO: 5123; WAN024FID_at; Start 2; Stop 26
tgaggaaagtgaagtataaaccatt

SEQ ID NO: 207544 - DNA, 25 bp, Artificial
  probe
  misc_feature (1)..(25): SEQ ID NO: 5123; WAN024FID_at; Start 278; Stop 302
aagtctgcatcccagatccagctag

SEQ ID NO: 207545 - DNA, 25 bp, Artificial
  probe
  misc_feature (1)..(25): SEQ ID NO: 5123; WAN024FID_at; Start 268; Stop 292
gatttgttcaaagtctgcatcccag

SEQ ID NO: 207546 - DNA, 25 bp, Artificial
  probe
  misc_feature (1)..(25): SEQ ID NO: 5123; WAN024FID_at; Start 175; Stop 199
tttctcagctggatagccagtcact

SEQ ID NO: 207547 - DNA, 25 bp, Artificial
  probe
  misc_feature (1)..(25): SEQ ID NO: 5123; WAN024FID_at; Start 304; Stop 328
gtcaattccatctgcatagttggca

SEQ ID NO: 207548 - DNA, 25 bp, Artificial
  probe
  misc_feature (1)..(25): SEQ ID NO: 5123; WAN024FID_at; Start 290; Stop 314
cagatccagctagtgtcaattccat

SEQ ID NO: 207549 - DNA, 25 bp, Artificial
  probe
  misc_feature (1)..(25): SEQ ID NO: 5123; WAN024FID_at; Start 196; Stop 220
cactcggaggcgacgagcgatttca

SEQ ID NO: 207550 - DNA, 25 bp, Artificial
  probe
  misc_feature (1)..(25): SEQ ID NO: 5123; WAN024FID_at; Start 77; Stop 101
tccagcatggcagtataagttgcca

SEQ ID NO: 207551 - DNA, 25 bp, Artificial
  probe
  misc_feature (1)..(25): SEQ ID NO: 1048; WAN024FIE_at; Start 913; Stop 937
caagaaacctttcatatcggtgaca

SEQ ID NO: 207552 - DNA, 25 bp, Artificial
  probe
  misc_feature (1)..(25): SEQ ID NO: 1048; WAN024FIE_at; Start 763; Stop 787
gtcatagacggccaagaatacggta

SEQ ID NO: 207553 - DNA, 25 bp, Artificial
  probe
  misc_feature (1)..(25): SEQ ID NO: 1048; WAN024FIE_at; Start 792; Stop 816
aatcggcgggctctataatatctat

SEQ ID NO: 207554 - DNA, 25 bp, Artificial
  probe
  misc_feature (1)..(25): SEQ ID NO: 1048; WAN024FIE_at; Start 1128; Stop 1152
cgctggcggtgttcgtcattctgaa

SEQ ID NO: 207555 - DNA, 25 bp, Artificial
  probe
  misc_feature (1)..(25): SEQ ID NO: 1048; WAN024FIE_at; Start 812; Stop 836
tctataacgccctagctgctgtggc

SEQ ID NO: 207556 - DNA, 25 bp, Artificial
  probe
  misc_feature (1)..(25): SEQ ID NO: 1048; WAN024FIE_at; Start 130; Stop 154
ctagctaagaactacgagattgtcg

SEQ ID NO: 207557 - DNA, 25 bp, Artificial
  probe
  misc_feature (1)..(25): SEQ ID NO: 1048; WAN024FIE_at; Start 1276; Stop 1300
tatactgccatgctggaatttcgtg

SEQ ID NO: 207558 - DNA, 25 bp, Artificial
  probe
  misc_feature (1)..(25): SEQ ID NO: 1048; WAN024FIE_at; Start 477; Stop 501
aactgctactgttctccttaacgga

SEQ ID NO: 207559 - DNA, 25 bp, Artificial
  probe
  misc_feature (1)..(25): SEQ ID NO: 1048; WAN024FIE_at; Start 1236; Stop 1260
tgagaatcaagactgcaagcatgcc

SEQ ID NO: 207560 - DNA, 25 bp, Artificial
  probe
  misc_feature (1)..(25): SEQ ID NO: 1048; WAN024FIE_at; Start 502; Stop 526
gacagtccacttttctacaagccaa

SEQ ID NO: 207561 - DNA, 25 bp, Artificial
  probe
  misc_feature (1)..(25): SEQ ID NO: 1048; WAN024FIE_at; Start 1158; Stop 1182
tcgtcgcctccgagtgactggctat

SEQ ID NO: 207562 - DNA, 25 bp, Artificial
  probe
  misc_feature (1)..(25): SEQ ID NO: 1048; WAN024FIE_at; Start 648; Stop 672
taatacctatgcaaacttgggtgcc

SEQ ID NO: 207563 - DNA, 25 bp, Artificial
  probe
  misc_feature (1)..(25): SEQ ID NO: 1048; WAN024FIE_at; Start 690; Stop 714
tggatgtaaacgtcctgatctcgac

SEQ ID NO: 207564 - DNA, 25 bp, Artificial
  probe
  misc_feature (1)..(25): SEQ ID NO: 1048; WAN024FIE_at; Start 891; Stop 915
gagccgtgctgtctttggacgccaa

SEQ ID NO: 207565 - DNA, 25 bp, Artificial
  probe
  misc_feature (1)..(25): SEQ ID NO: 1048; WAN024FIE_at; Start 1043; Stop 1067
ccaactatgcagatggaattgacac

SEQ ID NO: 207566 - DNA, 25 bp, Artificial
  probe
  misc_feature (1)..(25): SEQ ID NO: 1048; WAN024FIE_at; Start 337; Stop 361
gaagccagtctatctcgtatctgtg

SEQ ID NO: 207567 - DNA, 25 bp, Artificial
  probe
  misc_feature (1)..(25): SEQ ID NO: 1048; WAN024FIE_at; Start 1143; Stop 1167
tcattctgaaatcgctcgtcgcctc

SEQ ID NO: 207568 - DNA, 25 bp, Artificial
  probe
  misc_feature (1)..(25): SEQ ID NO: 1048; WAN024FIE_at; Start 960; Stop 984
taaaaatccagtcggtgcaacccaa

SEQ ID NO: 207569 - DNA, 25 bp, Artificial
  probe
  misc_feature (1)..(25): SEQ ID NO: 1048; WAN024FIE_at; Start 1197; Stop 1221
cactgaaacgagtaatctggagcaa

SEQ ID NO: 207570 - DNA, 25 bp, Artificial
  probe
  misc_feature (1)..(25): SEQ ID NO: 1048; WAN024FIE_at; Start 1058; Stop 1082
gaattgacactagctggatctggga

SEQ ID NO: 207571 - DNA, 25 bp, Artificial
  probe
  misc_feature (1)..(25): SEQ ID NO: 1048; WAN024FIE_at; Start 586; Stop 610
gctcactacaataccgaagggattc

SEQ ID NO: 207572 - DNA, 25 bp, Artificial
  probe
  misc_feature (1)..(25): SEQ ID NO: 1048; WAN024FIE_at; Start 396; Stop 420
tatcttccgtgaccagatggaccgt

SEQ ID NO: 207573 - DNA, 25 bp, Artificial
  probe
  misc_feature (1)..(25): SEQ ID NO: 1048; WAN024FIE_at; Start 778; Stop 802
gaatacggtatccaaatcggcgggc

SEQ ID NO: 207574 - DNA, 25 bp, Artificial
  probe
  misc_feature (1)..(25): SEQ ID NO: 1048; WAN024FIE_at; Start 1291; Stop 1315
gaatttcgtgaactgctggctagtc

SEQ ID NO: 207575 - DNA, 25 bp, Artificial
  probe
  misc_feature (1)..(25): SEQ ID NO: 1048; WAN024FIE_at; Start 604; Stop 628
gggattctctgtcctgactgccaag

SEQ ID NO: 207576 - DNA, 25 bp, Artificial
  probe
  misc_feature (1)..(25): SEQ ID NO: 1048; WAN024FIE_at; Start 973; Stop 997
ggtgcaacccaagctatcgaaatga

SEQ ID NO: 207577 - DNA, 25 bp, Artificial
  probe
  misc_feature (1)..(25): SEQ ID NO: 1048; WAN024FIE_at; Start 1177; Stop 1201
ggctatccagctgagaaaatcactg

SEQ ID NO: 207578 - DNA, 25 bp, Artificial
  probe
  misc_feature (1)..(25): SEQ ID NO: 1048; WAN024FIE_at; Start 242; Stop 266
caagcggtgccaacatgattacagg

SEQ ID NO: 207579 - DNA, 25 bp, Artificial
  probe
  misc_feature (1)..(25): SEQ ID NO: 1048; WAN024FIE_at; Start 619; Stop 643
gactgccaaggcatcctcaaatatg

SEQ ID NO: 207580 - DNA, 25 bp, Artificial
  probe
  misc_feature (1)..(25): SEQ ID NO: 1048; WAN024FIE_at; Start 735; Stop 759
tgagttgaccaacaatcgctctcgc

SEQ ID NO: 207581 - DNA, 25 bp, Artificial
  probe
  misc_feature (1)..(25): SEQ ID NO: 1048; WAN024FIE_at; Start 987; Stop 1011
tatcgaaatgatcaaactagcacct

SEQ ID NO: 207582 - DNA, 25 bp, Artificial
  probe
  misc_feature (1)..(25): SEQ ID NO: 1048; WAN024FIE_at; Start 875; Stop 899
aacagggatttgacaagagccgtgc

SEQ ID NO: 207583 - DNA, 25 bp, Artificial
  probe
  misc_feature (1)..(25): SEQ ID NO: 1048; WAN024FIE_at; Start 1113; Stop 1137
cattcctgaaatcaacgctggcggt

SEQ ID NO: 207584 - DNA, 25 bp, Artificial
  probe
  misc_feature (1)..(25): SEQ ID NO: 1048; WAN024FIE_at; Start 1214; Stop 1238
tggagcaagttctcaagaccattga

SEQ ID NO: 207585 - DNA, 25 bp, Artificial
  probe
  misc_feature (1)..(25): SEQ ID NO: 2992; WAN024FIF_at; Start 69; Stop 93
tgctacggaaaagacagaaaaagat

SEQ ID NO: 207586 - DNA, 25 bp, Artificial
  probe
  misc_feature (1)..(25): SEQ ID NO: 2992; WAN024FIF_at; Start 67; Stop 91
tctgctacggaaaagacagaaaaag

SEQ ID NO: 207587 - DNA, 25 bp, Artificial
  probe
  misc_feature (1)..(25): SEQ ID NO: 2992; WAN024FIF_at; Start 70; Stop 94
gctacggaaaagacagaaaaagata

SEQ ID NO: 207588 - DNA, 25 bp, Artificial
  probe
  misc_feature (1)..(25): SEQ ID NO: 2992; WAN024FIF_at; Start 68; Stop 92
ctgctacggaaaagacagaaaaaga

SEQ ID NO: 207589 - DNA, 25 bp, Artificial
  probe
  misc_feature (1)..(25): SEQ ID NO: 2992; WAN024FIF_at; Start 66; Stop 90
ttctgctacggaaaagacagaaaaa

SEQ ID NO: 207590 - DNA, 25 bp, Artificial
  probe
  misc_feature (1)..(25): SEQ ID NO: 3965; WAN024FIG_at; Start 61; Stop 85
gttgaggcgaccagtgatcgtgttt

SEQ ID NO: 207591 - DNA, 25 bp, Artificial
  probe
  misc_feature (1)..(25): SEQ ID NO: 3965; WAN024FIG_at; Start 263; Stop 287
ccaaatccaataacaattaaatcgt

SEQ ID NO: 207592 - DNA, 25 bp, Artificial
  probe
  misc_feature (1)..(25): SEQ ID NO: 3965; WAN024FIG_at; Start 162; Stop 186
tgttgatacaagttccaccgtacat

SEQ ID NO: 207593 - DNA, 25 bp, Artificial
  probe
  misc_feature (1)..(25): SEQ ID NO: 3965; WAN024FIG_at; Start 58; Stop 82
accgttgaggcgaccagtgatcgtg

SEQ ID NO: 207594 - DNA, 25 bp, Artificial
  probe
  misc_feature (1)..(25): SEQ ID NO: 3965; WAN024FIG_at; Start 57; Stop 81
taccgttgaggcgaccagtgatcgt

SEQ ID NO: 207595 - DNA, 25 bp, Artificial
  probe
  misc_feature (1)..(25): SEQ ID NO: 3965; WAN024FIG_at; Start 30; Stop 54
cagtaccagcaacagtcgtatagtt

SEQ ID NO: 207596 - DNA, 25 bp, Artificial
  probe
  misc_feature (1)..(25): SEQ ID NO: 3965; WAN024FIG_at; Start 253; Stop 277
accagctttaccaaatccaataaca

SEQ ID NO: 207597 - DNA, 25 bp, Artificial
  probe
  misc_feature (1)..(25): SEQ ID NO: 3965; WAN024FIG_at; Start 14; Stop 38
tcaaagatatcgacgccagtaccag

SEQ ID NO: 207598 - DNA, 25 bp, Artificial
  probe
  misc_feature (1)..(25): SEQ ID NO: 3965; WAN024FIG_at; Start 276; Stop 300
caattaaatcgtatgttaacattta

SEQ ID NO: 207599 - DNA, 25 bp, Artificial
  probe
  misc_feature (1)..(25): SEQ ID NO: 3965; WAN024FIG_at; Start 210; Stop 234
caacttttttgccagctgaagccaa

SEQ ID NO: 207600 - DNA, 25 bp, Artificial
  probe
  misc_feature (1)..(25): SEQ ID NO: 3965; WAN024FIG_at; Start 35; Stop 59
ccagcaacagtcgtatagtttttac

SEQ ID NO: 207601 - DNA, 25 bp, Artificial
  probe
  misc_feature (1)..(25): SEQ ID NO: 3965; WAN024FIG_at; Start 257; Stop 281
gctttaccaaatccaataacaatta

SEQ ID NO: 207602 - DNA, 25 bp, Artificial
  probe
  misc_feature (1)..(25): SEQ ID NO: 3965; WAN024FIG_at; Start 165; Stop 189
tgatacaagttccaccgtacatagc

SEQ ID NO: 207603 - DNA, 25 bp, Artificial
  probe
  misc_feature (1)..(25): SEQ ID NO: 3965; WAN024FIG_at; Start 63; Stop 87
tgaggcgaccagtgatcgtgttttt

SEQ ID NO: 207604 - DNA, 25 bp, Artificial
  probe
  misc_feature (1)..(25): SEQ ID NO: 3965; WAN024FIG_at; Start 42; Stop 66
cagtcgtatagtttttaccgttgag

SEQ ID NO: 207605 - DNA, 25 bp, Artificial
  probe
  misc_feature (1)..(25): SEQ ID NO: 3965; WAN024FIG_at; Start 93; Stop 117
caatgacttcttcaaaagacaagtc

SEQ ID NO: 207606 - DNA, 25 bp, Artificial
  probe
  misc_feature (1)..(25): SEQ ID NO: 3965; WAN024FIG_at; Start 8; Stop 32
tcagcatcaaagatatcgacgccag

SEQ ID NO: 207607 - DNA, 25 bp, Artificial
  probe
  misc_feature (1)..(25): SEQ ID NO: 3965; WAN024FIG_at; Start 37; Stop 61
agcaacagtcgtatagtttttaccg

SEQ ID NO: 207608 - DNA, 25 bp, Artificial
  probe
  misc_feature (1)..(25): SEQ ID NO: 3965; WAN024FIG_at; Start 18; Stop 42
agatatcgacgccagtaccagcaac

SEQ ID NO: 207609 - DNA, 25 bp, Artificial
  probe
  misc_feature (1)..(25): SEQ ID NO: 3965; WAN024FIG_at; Start 201; Stop 225
caacgagggcaacttttttgccagc

SEQ ID NO: 207610 - DNA, 25 bp, Artificial
  probe
  misc_feature (1)..(25): SEQ ID NO: 3965; WAN024FIG_at; Start 20; Stop 44
atatcgacgccagtaccagcaacag

SEQ ID NO: 207611 - DNA, 25 bp, Artificial
  probe
  misc_feature (1)..(25): SEQ ID NO: 3965; WAN024FIG_at; Start 5; Stop 29
gcttcagcatcaaagatatcgacgc

SEQ ID NO: 207612 - DNA, 25 bp, Artificial
  probe
  misc_feature (1)..(25): SEQ ID NO: 3965; WAN024FIG_at; Start 25; Stop 49
gacgccagtaccagcaacagtcgta

SEQ ID NO: 207613 - DNA, 25 bp, Artificial
  probe
  misc_feature (1)..(25): SEQ ID NO: 3965; WAN024FIG_at; Start 54; Stop 78
ttttaccgttgaggcgaccagtgat

SEQ ID NO: 207614 - DNA, 25 bp, Artificial
  probe
  misc_feature (1)..(25): SEQ ID NO: 3965; WAN024FIG_at; Start 205; Stop 229
gagggcaacttttttgccagctgaa

SEQ ID NO: 207615 - DNA, 25 bp, Artificial
  probe
  misc_feature (1)..(25): SEQ ID NO: 3965; WAN024FIG_at; Start 23; Stop 47
tcgacgccagtaccagcaacagtcg

SEQ ID NO: 207616 - DNA, 25 bp, Artificial
  probe
  misc_feature (1)..(25): SEQ ID NO: 3965; WAN024FIG_at; Start 53; Stop 77
tttttaccgttgaggcgaccagtga

SEQ ID NO: 207617 - DNA, 25 bp, Artificial
  probe
  misc_feature (1)..(25): SEQ ID NO: 3965; WAN024FIG_at; Start 27; Stop 51
cgccagtaccagcaacagtcgtata

SEQ ID NO: 207618 - DNA, 25 bp, Artificial
  probe
  misc_feature (1)..(25): SEQ ID NO: 3965; WAN024FIG_at; Start 1; Stop 25
gtgagcttcagcatcaaagatatcg

SEQ ID NO: 207619 - DNA, 25 bp, Artificial
  probe
  misc_feature (1)..(25): SEQ ID NO: 3965; WAN024FIG_at; Start 15; Stop 39
caaagatatcgacgccagtaccagc

SEQ ID NO: 207620 - DNA, 25 bp, Artificial
  probe
  misc_feature (1)..(25): SEQ ID NO: 3965; WAN024FIG_at; Start 216; Stop 240
ttttgccagctgaagccaatttacc

SEQ ID NO: 207621 - DNA, 25 bp, Artificial
  probe
  misc_feature (1)..(25): SEQ ID NO: 3965; WAN024FIG_at; Start 11; Stop 35
gcatcaaagatatcgacgccagtac

SEQ ID NO: 207622 - DNA, 25 bp, Artificial
  probe
  misc_feature (1)..(25): SEQ ID NO: 3965; WAN024FIG_at; Start 89; Stop 113
gtagcaatgacttcttcaaaagaca

SEQ ID NO: 207623 - DNA, 25 bp, Artificial
  probe
  misc_feature (1)..(25): SEQ ID NO: 3965; WAN024FIG_at; Start 3; Stop 27
gagcttcagcatcaaagatatcgac

SEQ ID NO: 207624 - DNA, 25 bp, Artificial
  probe
  misc_feature (1)..(25): SEQ ID NO: 2991; WAN024FIH_at; Start 1039; Stop 1063
gcagctgatttgaaacttccatacg

SEQ ID NO: 207625 - DNA, 25 bp, Artificial
  probe
  misc_feature (1)..(25): SEQ ID NO: 2991; WAN024FIH_at; Start 739; Stop 763
tacgcaactggacgcaaaccaaatg

SEQ ID NO: 207626 - DNA, 25 bp, Artificial
  probe
  misc_feature (1)..(25): SEQ ID NO: 2991; WAN024FIH_at; Start 32; Stop 56
ttggtaaagctggtaaaacactagc

SEQ ID NO: 207627 - DNA, 25 bp, Artificial
  probe
  misc_feature (1)..(25): SEQ ID NO: 2991; WAN024FIH_at; Start 913; Stop 937
gacttccgtgttgtttacagctacc

SEQ ID NO: 207628 - DNA, 25 bp, Artificial
  probe
  misc_feature (1)..(25): SEQ ID NO: 2991; WAN024FIH_at; Start 1024; Stop 1048
ttgactgaaagccaagcagctgatt

SEQ ID NO: 207629 - DNA, 25 bp, Artificial
  probe
  misc_feature (1)..(25): SEQ ID NO: 2991; WAN024FIH_at; Start 685; Stop 709
gaccaagtgcttgtcgtaactgaag

SEQ ID NO: 207630 - DNA, 25 bp, Artificial
  probe
  misc_feature (1)..(25): SEQ ID NO: 2991; WAN024FIH_at; Start 967; Stop 991
gaccgtctcaatgtgccaaatacta

SEQ ID NO: 207631 - DNA, 25 bp, Artificial
  probe
  misc_feature (1)..(25): SEQ ID NO: 2991; WAN024FIH_at; Start 73; Stop 97
gctggcaaaaaagttgccctcgttg

SEQ ID NO: 207632 - DNA, 25 bp, Artificial
  probe
  misc_feature (1)..(25): SEQ ID NO: 2991; WAN024FIH_at; Start 1189; Stop 1213
ggttctcaagaaatcatcaacatca

SEQ ID NO: 207633 - DNA, 25 bp, Artificial
  probe
  misc_feature (1)..(25): SEQ ID NO: 2991; WAN024FIH_at; Start 846; Stop 870
cgttcctggtgtctttgcagttgga

SEQ ID NO: 207634 - DNA, 25 bp, Artificial
  probe
  misc_feature (1)..(25): SEQ ID NO: 2991; WAN024FIH_at; Start 1296; Stop 1320
gaatgacttgtttgcgatttaacta

SEQ ID NO: 207635 - DNA, 25 bp, Artificial
  probe
  misc_feature (1)..(25): SEQ ID NO: 2991; WAN024FIH_at; Start 58; Stop 82
ggtaaattggcttcagctggcaaaa

SEQ ID NO: 207636 - DNA, 25 bp, Artificial
  probe
  misc_feature (1)..(25): SEQ ID NO: 2991; WAN024FIH_at; Start 1218; Stop 1242
tgttgctatggacaacaagattcct

SEQ ID NO: 207637 - DNA, 25 bp, Artificial
  probe
  misc_feature (1)..(25): SEQ ID NO: 2991; WAN024FIH_at; Start 309; Stop 333
taaagtcatcgaaatccaagctggt

SEQ ID NO: 207638 - DNA, 25 bp, Artificial
  probe
  misc_feature (1)..(25): SEQ ID NO: 2991; WAN024FIH_at; Start 436; Stop 460
gactcaacaggtatccaaagcttgg

SEQ ID NO: 207639 - DNA, 25 bp, Artificial
  probe
  misc_feature (1)..(25): SEQ ID NO: 2991; WAN024FIH_at; Start 1100; Stop 1124
gtcacgtaaatggagaccttcgcgg

SEQ ID NO: 207640 - DNA, 25 bp, Artificial
  probe
  misc_feature (1)..(25): SEQ ID NO: 2991; WAN024FIH_at; Start 582; Stop 606
tcgtgcagaaccttccatcgcagct

SEQ ID NO: 207641 - DNA, 25 bp, Artificial
  probe
  misc_feature (1)..(25): SEQ ID NO: 2991; WAN024FIH_at; Start 995; Stop 1019
tcatcacacctgcactttcacaagt

SEQ ID NO: 207642 - DNA, 25 bp, Artificial
  probe
  misc_feature (1)..(25): SEQ ID NO: 2991; WAN024FIH_at; Start 221; Stop 245
tcactggtcgcctcaacggtaaaaa

SEQ ID NO: 207643 - DNA, 25 bp, Artificial
  probe
  misc_feature (1)..(25): SEQ ID NO: 2991; WAN024FIH_at; Start 1012; Stop 1036
tcacaagttggtttgactgaaagcc

SEQ ID NO: 207644 - DNA, 25 bp, Artificial
  probe
  misc_feature (1)..(25): SEQ ID NO: 2991; WAN024FIH_at; Start 485; Stop 509
tccttggtggcggaaatatcggtct

SEQ ID NO: 207645 - DNA, 25 bp, Artificial
  probe
  misc_feature (1)..(25): SEQ ID NO: 2991; WAN024FIH_at; Start 1278; Stop 1302
aaccttggctgagaacttgaatgac

SEQ ID NO: 207646 - DNA, 25 bp, Artificial
  probe
  misc_feature (1)..(25): SEQ ID NO: 2991; WAN024FIH_at; Start 372; Stop 396
caacactggtgctgtttcaaacgtc

SEQ ID NO: 207647 - DNA, 25 bp, Artificial
  probe
  misc_feature (1)..(25): SEQ ID NO: 2991; WAN024FIH_at; Start 566; Stop 590
tggatacattcctacctcgtgcaga

SEQ ID NO: 207648 - DNA, 25 bp, Artificial
  probe
  misc_feature (1)..(25): SEQ ID NO: 2991; WAN024FIH_at; Start 109; Stop 133
gctatgtacggtggaacttgtatca

SEQ ID NO: 207649 - DNA, 25 bp, Artificial
  probe
  misc_feature (1)..(25): SEQ ID NO: 2991; WAN024FIH_at; Start 928; Stop 952
tacagctaccttgctggagatggca

SEQ ID NO: 207650 - DNA, 25 bp, Artificial
  probe
  misc_feature (1)..(25): SEQ ID NO: 2991; WAN024FIH_at; Start 597; Stop 621
catcgcagctcttgctaaacaatac

SEQ ID NO: 207651 - DNA, 25 bp, Artificial
  probe
  misc_feature (1)..(25): SEQ ID NO: 2991; WAN024FIH_at; Start 1172; Stop 1196
caagcatcttctcagaaggttctca

SEQ ID NO: 207652 - DNA, 25 bp, Artificial
  probe
  misc_feature (1)..(25): SEQ ID NO: 2991; WAN024FIH_at; Start 211; Stop 235
aaaaacacgatcactggtcgcctca

SEQ ID NO: 207653 - DNA, 25 bp, Artificial
  probe
  misc_feature (1)..(25): SEQ ID NO: 2991; WAN024FIH_at; Start 898; Stop 922
tacatttcacttgatgacttccgtg

SEQ ID NO: 207654 - DNA, 25 bp, Artificial
  probe
  misc_feature (1)..(25): SEQ ID NO: 2991; WAN024FIH_at; Start 830; Stop 854
aacactgtcaaacaaacgttcctgg

SEQ ID NO: 207655 - DNA, 25 bp, Artificial
  probe
  misc_feature (1)..(25): SEQ ID NO: 2991; WAN024FIH_at; Start 289; Stop 313
gaagctcacttcctttcaaataaag

SEQ ID NO: 207656 - DNA, 25 bp, Artificial
  probe
  misc_feature (1)..(25): SEQ ID NO: 2991; WAN024FIH_at; Start 752; Stop 776
gcaaaccaaatgtagaaccacttca

SEQ ID NO: 207657 - DNA, 25 bp, Artificial
  probe
  misc_feature (1)..(25): SEQ ID NO: 2991; WAN024FIH_at; Start 788; Stop 812
cagatattgaactaactgaacgtgg

SEQ ID NO: 207658 - DNA, 25 bp, Artificial
  probe
  misc_feature (1)..(25): SEQ ID NO: 959; WAN024FII_at; Start 73; Stop 97
tggagtgtttatcgtaaccctatta

SEQ ID NO: 207659 - DNA, 25 bp, Artificial
  probe
  misc_feature (1)..(25): SEQ ID NO: 959; WAN024FII_at; Start 722; Stop 746
cggcatcgccaatggcacaggagat

SEQ ID NO: 207660 - DNA, 25 bp, Artificial
  probe
  misc_feature (1)..(25): SEQ ID NO: 959; WAN024FII_at; Start 1146; Stop 1170
cattttatacagtatcgccttggct

SEQ ID NO: 207661 - DNA, 25 bp, Artificial
  probe
  misc_feature (1)..(25): SEQ ID NO: 959; WAN024FII_at; Start 639; Stop 663
tcaggctctaaaaagcaatcggttt

SEQ ID NO: 207662 - DNA, 25 bp, Artificial
  probe
  misc_feature (1)..(25): SEQ ID NO: 959; WAN024FII_at; Start 1180; Stop 1204
tatctaggtcgttcaatcaaaaaag

SEQ ID NO: 207663 - DNA, 25 bp, Artificial
  probe
  misc_feature (1)..(25): SEQ ID NO: 959; WAN024FII_at; Start 707; Stop 731
taggcttaatttcagcggcatcgcc

SEQ ID NO: 207664 - DNA, 25 bp, Artificial
  probe
  misc_feature (1)..(25): SEQ ID NO: 959; WAN024FII_at; Start 739; Stop 763
caggagatggctggcttgtctacaa

SEQ ID NO: 207665 - DNA, 25 bp, Artificial
  probe
  misc_feature (1)..(25): SEQ ID NO: 959; WAN024FII_at; Start 439; Stop 463
ttattgactagtcccatagcgcaac

SEQ ID NO: 207666 - DNA, 25 bp, Artificial
  probe
  misc_feature (1)..(25): SEQ ID NO: 959; WAN024FII_at; Start 1110; Stop 1134
ggctcattcgtacacacaaaccttg

SEQ ID NO: 207667 - DNA, 25 bp, Artificial
  probe
  misc_feature (1)..(25): SEQ ID NO: 959; WAN024FII_at; Start 1060; Stop 1084
gcaatggctggtttagcgggaccta

SEQ ID NO: 207668 - DNA, 25 bp, Artificial
  probe
  misc_feature (1)..(25): SEQ ID NO: 959; WAN024FII_at; Start 1044; Stop 1068
tattttaacagcttgggcaatggct

SEQ ID NO: 207669 - DNA, 25 bp, Artificial
  probe
  misc_feature (1)..(25): SEQ ID NO: 959; WAN024FII_at; Start 1013; Stop 1037
gaaccaaggaattggccgctctgca

SEQ ID NO: 207670 - DNA, 25 bp, Artificial
  probe
  misc_feature (1)..(25): SEQ ID NO: 959; WAN024FII_at; Start 1076; Stop 1100
cgggacctattttattagcagagac

SEQ ID NO: 207671 - DNA, 25 bp, Artificial
  probe
  misc_feature (1)..(25): SEQ ID NO: 959; WAN024FII_at; Start 997; Stop 1021
ctcagtgatatttttggaaccaagg

SEQ ID NO: 207672 - DNA, 25 bp, Artificial
  probe
  misc_feature (1)..(25): SEQ ID NO: 959; WAN024FII_at; Start 241; Stop 265
tacgcaggtggaaatatcttaacag

SEQ ID NO: 207673 - DNA, 25 bp, Artificial
  probe
  misc_feature (1)..(25): SEQ ID NO: 959; WAN024FII_at; Start 263; Stop 287
caggatttgcaatagaccgtcagga

SEQ ID NO: 207674 - DNA, 25 bp, Artificial
  probe
  misc_feature (1)..(25): SEQ ID NO: 959; WAN024FII_at; Start 1091; Stop 1115
tagcagagacttataaaatggctca

SEQ ID NO: 207675 - DNA, 25 bp, Artificial
  probe
  misc_feature (1)..(25): SEQ ID NO: 959; WAN024FII_at; Start 44; Stop 68
tacacttaatgctgggttcgactta

SEQ ID NO: 207676 - DNA, 25 bp, Artificial
  probe
  misc_feature (1)..(25): SEQ ID NO: 959; WAN024FII_at; Start 1161; Stop 1185
cgccttggctttgtcttattatcta

SEQ ID NO: 207677 - DNA, 25 bp, Artificial
  probe
  misc_feature (1)..(25): SEQ ID NO: 959; WAN024FII_at; Start 333; Stop 357
tttgggagcaggctatattacccct

SEQ ID NO: 207678 - DNA, 25 bp, Artificial
  probe
  misc_feature (1)..(25): SEQ ID NO: 959; WAN024FII_at; Start 530; Stop 554
tgctcctagcttcacaattcattaa

SEQ ID NO: 207679 - DNA, 25 bp, Artificial
  probe
  misc_feature (1)..(25): SEQ ID NO: 959; WAN024FII_at; Start 757; Stop 781
tctacaagtcatgcagcagtaatgg

SEQ ID NO: 207680 - DNA, 25 bp, Artificial
  probe
  misc_feature (1)..(25): SEQ ID NO: 959; WAN024FII_at; Start 389; Stop 413
aacgtggtctcgcaacaggtttagc

SEQ ID NO: 207681 - DNA, 25 bp, Artificial
  probe
  misc_feature (1)..(25): SEQ ID NO: 959; WAN024FII_at; Start 99; Stop 123
tgaaaaaacgggatgggatcaggct

SEQ ID NO: 207682 - DNA, 25 bp, Artificial
  probe
  misc_feature (1)..(25): SEQ ID NO: 959; WAN024FII_at; Start 141; Stop 165
tagtctagcaatcttttgtttgggc

SEQ ID NO: 207683 - DNA, 25 bp, Artificial
  probe
  misc_feature (1)..(25): SEQ ID NO: 959; WAN024FII_at; Start 801; Stop 825
caatggatttggtcgcttgctctgg

SEQ ID NO: 207684 - DNA, 25 bp, Artificial
  probe
  misc_feature (1)..(25): SEQ ID NO: 959; WAN024FII_at; Start 227; Stop 251
tatctgcttttctatacgcaggtgg

SEQ ID NO: 207685 - DNA, 25 bp, Artificial
  probe
  misc_feature (1)..(25): SEQ ID NO: 959; WAN024FII_at; Start 377; Stop 401
ggtttcctgataaacgtggtctcgc

SEQ ID NO: 207686 - DNA, 25 bp, Artificial
  probe
  misc_feature (1)..(25): SEQ ID NO: 959; WAN024FII_at; Start 157; Stop 181
tgtttgggcttatcggctgcattta

SEQ ID NO: 207687 - DNA, 25 bp, Artificial
  probe
  misc_feature (1)..(25): SEQ ID NO: 959; WAN024FII_at; Start 901; Stop 925
tcactttggctctttacagattccg

SEQ ID NO: 207688 - DNA, 25 bp, Artificial
  probe
  misc_feature (1)..(25): SEQ ID NO: 959; WAN024FII_at; Start 837; Stop 861
tgactatatcggtcgccctctaacc

SEQ ID NO: 207689 - DNA, 25 bp, Artificial
  probe
  misc_feature (1)..(25): SEQ ID NO: 959; WAN024FII_at; Start 555; Stop 579
gcgtccaaatgagcaagagcttgca

SEQ ID NO: 207690 - DNA, 25 bp, Artificial
  probe
  misc_feature (1)..(25): SEQ ID NO: 959; WAN024FII_at; Start 687; Stop 711
tatcaacatagcttgtggtttaggc

SEQ ID NO: 207691 - DNA, 25 bp, Artificial
  probe
  misc_feature (1)..(25): SEQ ID NO: 959; WAN024FII_at; Start 950; Stop 974
ttttgatgacttgctatggagctgg

SEQ ID NO: 207692 - DNA, 25 bp, Artificial
  probe
  misc_feature (1)..(25): SEQ ID NO: 7567; WAN024FIJ_at; Start 53; Stop 77
ttgtcttttcacattcggtctcctt

SEQ ID NO: 207693 - DNA, 25 bp, Artificial
  probe
  misc_feature (1)..(25): SEQ ID NO: 7567; WAN024FIJ_at; Start 88; Stop 112
gcgattcattttgaaccgctttttc

SEQ ID NO: 207694 - DNA, 25 bp, Artificial
  probe
  misc_feature (1)..(25): SEQ ID NO: 7567; WAN024FIJ_at; Start 55; Stop 79
gtcttttcacattcggtctccttat

SEQ ID NO: 207695 - DNA, 25 bp, Artificial
  probe
  misc_feature (1)..(25): SEQ ID NO: 7567; WAN024FIJ_at; Start 50; Stop 74
tatttgtcttttcacattcggtctc

SEQ ID NO: 207696 - DNA, 25 bp, Artificial
  probe
  misc_feature (1)..(25): SEQ ID NO: 7567; WAN024FIJ_at; Start 89; Stop 113
cgattcattttgaaccgctttttct

SEQ ID NO: 207697 - DNA, 25 bp, Artificial
  probe
  misc_feature (1)..(25): SEQ ID NO: 7567; WAN024FIJ_at; Start 71; Stop 95
tctccttatataaaaaagcgattca

SEQ ID NO: 207698 - DNA, 25 bp, Artificial
  probe
  misc_feature (1)..(25): SEQ ID NO: 7567; WAN024FIJ_at; Start 51; Stop 75
atttgtcttttcacattcggtctcc

SEQ ID NO: 207699 - DNA, 25 bp, Artificial
  probe
  misc_feature (1)..(25): SEQ ID NO: 7567; WAN024FIJ_at; Start 54; Stop 78
tgtcttttcacattcggtctcctta

SEQ ID NO: 207700 - DNA, 25 bp, Artificial
  probe
  misc_feature (1)..(25): SEQ ID NO: 7567; WAN024FIJ_at; Start 74; Stop 98
ccttatataaaaaagcgattcattt

SEQ ID NO: 207701 - DNA, 25 bp, Artificial
  probe
  misc_feature (1)..(25): SEQ ID NO: 7567; WAN024FIJ_at; Start 60; Stop 84
ttcacattcggtctccttatataaa

SEQ ID NO: 207702 - DNA, 25 bp, Artificial
  probe
  misc_feature (1)..(25): SEQ ID NO: 7567; WAN024FIJ_at; Start 79; Stop 103
tataaaaaagcgattcattttgaac

SEQ ID NO: 207703 - DNA, 25 bp, Artificial
  probe
  misc_feature (1)..(25): SEQ ID NO: 7567; WAN024FIJ_at; Start 85; Stop 109
aaagcgattcattttgaaccgcttt

SEQ ID NO: 207704 - DNA, 25 bp, Artificial
  probe
  misc_feature (1)..(25): SEQ ID NO: 7567; WAN024FIJ_at; Start 64; Stop 88
cattcggtctccttatataaaaaag

SEQ ID NO: 207705 - DNA, 25 bp, Artificial
  probe
  misc_feature (1)..(25): SEQ ID NO: 7567; WAN024FIJ_at; Start 3; Stop 27
gcctatttttgtgtatcataatatt

SEQ ID NO: 207706 - DNA, 25 bp, Artificial
  probe
  misc_feature (1)..(25): SEQ ID NO: 7567; WAN024FIJ_at; Start 114; Stop 138
tatttatcgcctttgttacgaataa

SEQ ID NO: 207707 - DNA, 25 bp, Artificial
  probe
  misc_feature (1)..(25): SEQ ID NO: 7567; WAN024FIJ_at; Start 1; Stop 25
ttgcctatttttgtgtatcataata

SEQ ID NO: 207708 - DNA, 25 bp, Artificial
  probe
  misc_feature (1)..(25): SEQ ID NO: 7567; WAN024FIJ_at; Start 73; Stop 97
tccttatataaaaaagcgattcatt

SEQ ID NO: 207709 - DNA, 25 bp, Artificial
  probe
  misc_feature (1)..(25): SEQ ID NO: 7567; WAN024FIJ_at; Start 59; Stop 83
tttcacattcggtctccttatataa

SEQ ID NO: 207710 - DNA, 25 bp, Artificial
  probe
  misc_feature (1)..(25): SEQ ID NO: 7567; WAN024FIJ_at; Start 52; Stop 76
tttgtcttttcacattcggtctcct

SEQ ID NO: 207711 - DNA, 25 bp, Artificial
  probe
  misc_feature (1)..(25): SEQ ID NO: 7567; WAN024FIJ_at; Start 112; Stop 136
cttatttatcgcctttgttacgaat

SEQ ID NO: 207712 - DNA, 25 bp, Artificial
  probe
  misc_feature (1)..(25): SEQ ID NO: 7567; WAN024FIJ_at; Start 72; Stop 96
ctccttatataaaaaagcgattcat

SEQ ID NO: 207713 - DNA, 25 bp, Artificial
  probe
  misc_feature (1)..(25): SEQ ID NO: 7567; WAN024FIJ_at; Start 68; Stop 92
cggtctccttatataaaaaagcgat

SEQ ID NO: 207714 - DNA, 25 bp, Artificial
  probe
  misc_feature (1)..(25): SEQ ID NO: 7567; WAN024FIJ_at; Start 76; Stop 100
ttatataaaaaagcgattcattttg

SEQ ID NO: 207715 - DNA, 25 bp, Artificial
  probe
  misc_feature (1)..(25): SEQ ID NO: 7567; WAN024FIJ_at; Start 84; Stop 108
aaaagcgattcattttgaaccgctt

SEQ ID NO: 207716 - DNA, 25 bp, Artificial
  probe
  misc_feature (1)..(25): SEQ ID NO: 7567; WAN024FIJ_at; Start 61; Stop 85
tcacattcggtctccttatataaaa

SEQ ID NO: 207717 - DNA, 25 bp, Artificial
  probe
  misc_feature (1)..(25): SEQ ID NO: 7567; WAN024FIJ_at; Start 56; Stop 80
tcttttcacattcggtctccttata

SEQ ID NO: 207718 - DNA, 25 bp, Artificial
  probe
  misc_feature (1)..(25): SEQ ID NO: 7567; WAN024FIJ_at; Start 12; Stop 36
tgtgtatcataatattataaaagat

SEQ ID NO: 207719 - DNA, 25 bp, Artificial
  probe
  misc_feature (1)..(25): SEQ ID NO: 7567; WAN024FIJ_at; Start 62; Stop 86
cacattcggtctccttatataaaaa

SEQ ID NO: 207720 - DNA, 25 bp, Artificial
  probe
  misc_feature (1)..(25): SEQ ID NO: 7567; WAN024FIJ_at; Start 58; Stop 82
ttttcacattcggtctccttatata

SEQ ID NO: 207721 - DNA, 25 bp, Artificial
  probe
  misc_feature (1)..(25): SEQ ID NO: 7567; WAN024FIJ_at; Start 67; Stop 91
tcggtctccttatataaaaaagcga

SEQ ID NO: 207722 - DNA, 25 bp, Artificial
  probe
  misc_feature (1)..(25): SEQ ID NO: 7567; WAN024FIJ_at; Start 70; Stop 94
gtctccttatataaaaaagcgattc

SEQ ID NO: 207723 - DNA, 25 bp, Artificial
  probe
  misc_feature (1)..(25): SEQ ID NO: 7567; WAN024FIJ_at; Start 86; Stop 110
aagcgattcattttgaaccgctttt

SEQ ID NO: 207724 - DNA, 25 bp, Artificial
  probe
  misc_feature (1)..(25): SEQ ID NO: 7567; WAN024FIJ_at; Start 83; Stop 107
aaaaagcgattcattttgaaccgct

SEQ ID NO: 207725 - DNA, 25 bp, Artificial
  probe
  misc_feature (1)..(25): SEQ ID NO: 7567; WAN024FIJ_at; Start 48; Stop 72
tttatttgtcttttcacattcggtc

SEQ ID NO: 207726 - DNA, 25 bp, Artificial
  probe
  misc_feature (1)..(25): SEQ ID NO: 5331; WAN024FIK_at; Start 374; Stop 398
gacctttcatgcgtttcttagtcaa

SEQ ID NO: 207727 - DNA, 25 bp, Artificial
  probe
  misc_feature (1)..(25): SEQ ID NO: 5331; WAN024FIK_at; Start 323; Stop 347
gagctacctgtttttttgattggaa

SEQ ID NO: 207728 - DNA, 25 bp, Artificial
  probe
  misc_feature (1)..(25): SEQ ID NO: 5331; WAN024FIK_at; Start 3; Stop 27
gccacgacttccttttttgaactca

SEQ ID NO: 207729 - DNA, 25 bp, Artificial
  probe
  misc_feature (1)..(25): SEQ ID NO: 5331; WAN024FIK_at; Start 357; Stop 381
tacacttgcaggtttgagacctttc

SEQ ID NO: 207730 - DNA, 25 bp, Artificial
  probe
  misc_feature (1)..(25): SEQ ID NO: 5331; WAN024FIK_at; Start 161; Stop 185
ccacttctggaaggctatctgggtc

SEQ ID NO: 207731 - DNA, 25 bp, Artificial
  probe
  misc_feature (1)..(25): SEQ ID NO: 5331; WAN024FIK_at; Start 171; Stop 195
aaggctatctgggtcttggactgtc

SEQ ID NO: 207732 - DNA, 25 bp, Artificial
  probe
  misc_feature (1)..(25): SEQ ID NO: 5331; WAN024FIK_at; Start 84; Stop 108
tccacgacctcccttagctttacca

SEQ ID NO: 207733 - DNA, 25 bp, Artificial
  probe
  misc_feature (1)..(25): SEQ ID NO: 5331; WAN024FIK_at; Start 288; Stop 312
ggtttcatctgcaaaatcacgttcg

SEQ ID NO: 207734 - DNA, 25 bp, Artificial
  probe
  misc_feature (1)..(25): SEQ ID NO: 5331; WAN024FIK_at; Start 47; Stop 71
ggcgatcacgctctcgacggtcgtc

SEQ ID NO: 207735 - DNA, 25 bp, Artificial
  probe
  misc_feature (1)..(25): SEQ ID NO: 5331; WAN024FIK_at; Start 349; Stop 373
gattcttctacacttgcaggtttga

SEQ ID NO: 207736 - DNA, 25 bp, Artificial
  probe
  misc_feature (1)..(25): SEQ ID NO: 5331; WAN024FIK_at; Start 149; Stop 173
cacgtgcaatctccacttctggaag

SEQ ID NO: 207737 - DNA, 25 bp, Artificial
  probe
  misc_feature (1)..(25): SEQ ID NO: 5331; WAN024FIK_at; Start 385; Stop 409
cgtttcttagtcaagttttcaatga

SEQ ID NO: 207738 - DNA, 25 bp, Artificial
  probe
  misc_feature (1)..(25): SEQ ID NO: 5331; WAN024FIK_at; Start 225; Stop 249
tggagtaaactcagcagccaatttg

SEQ ID NO: 207739 - DNA, 25 bp, Artificial
  probe
  misc_feature (1)..(25): SEQ ID NO: 5331; WAN024FIK_at; Start 231; Stop 255
aaactcagcagccaatttgcgagca

SEQ ID NO: 207740 - DNA, 25 bp, Artificial
  probe
  misc_feature (1)..(25): SEQ ID NO: 5331; WAN024FIK_at; Start 39; Stop 63
attgccacggcgatcacgctctcga

SEQ ID NO: 207741 - DNA, 25 bp, Artificial
  probe
  misc_feature (1)..(25): SEQ ID NO: 5331; WAN024FIK_at; Start 28; Stop 52
tcacggcgaccattgccacggcgat

SEQ ID NO: 207742 - DNA, 25 bp, Artificial
  probe
  misc_feature (1)..(25): SEQ ID NO: 5331; WAN024FIK_at; Start 19; Stop 43
ttgaactcatcacggcgaccattgc

SEQ ID NO: 207743 - DNA, 25 bp, Artificial
  probe
  misc_feature (1)..(25): SEQ ID NO: 5331; WAN024FIK_at; Start 241; Stop 265
gccaatttgcgagcatccttaccaa

SEQ ID NO: 207744 - DNA, 25 bp, Artificial
  probe
  misc_feature (1)..(25): SEQ ID NO: 5331; WAN024FIK_at; Start 310; Stop 334
tcgattttcttgagagctacctgtt

SEQ ID NO: 207745 - DNA, 25 bp, Artificial
  probe
  misc_feature (1)..(25): SEQ ID NO: 5331; WAN024FIK_at; Start 116; Stop 140
cattacctgatggtttaaacggtag

SEQ ID NO: 207746 - DNA, 25 bp, Artificial
  probe
  misc_feature (1)..(25): SEQ ID NO: 5331; WAN024FIK_at; Start 279; Stop 303
ggcacgaatggtttcatctgcaaaa

SEQ ID NO: 207747 - DNA, 25 bp, Artificial
  probe
  misc_feature (1)..(25): SEQ ID NO: 5331; WAN024FIK_at; Start 178; Stop 202
tctgggtcttggactgtcagactca

SEQ ID NO: 207748 - DNA, 25 bp, Artificial
  probe
  misc_feature (1)..(25): SEQ ID NO: 5331; WAN024FIK_at; Start 344; Stop 368
ggaaggattcttctacacttgcagg

SEQ ID NO: 207749 - DNA, 25 bp, Artificial
  probe
  misc_feature (1)..(25): SEQ ID NO: 5331; WAN024FIK_at; Start 135; Stop 159
cggtagtggtttttcacgtgcaatc

SEQ ID NO: 207750 - DNA, 25 bp, Artificial
  probe
  misc_feature (1)..(25): SEQ ID NO: 5331; WAN024FIK_at; Start 197; Stop 221
gactcaagatatacattgccaattc

SEQ ID NO: 207751 - DNA, 25 bp, Artificial
  probe
  misc_feature (1)..(25): SEQ ID NO: 5331; WAN024FIK_at; Start 192; Stop 216
tgtcagactcaagatatacattgcc

SEQ ID NO: 207752 - DNA, 25 bp, Artificial
  probe
  misc_feature (1)..(25): SEQ ID NO: 5331; WAN024FIK_at; Start 15; Stop 39
ttttttgaactcatcacggcgacca

SEQ ID NO: 207753 - DNA, 25 bp, Artificial
  probe
  misc_feature (1)..(25): SEQ ID NO: 5331; WAN024FIK_at; Start 214; Stop 238
gccaattcttctggagtaaactcag

SEQ ID NO: 207754 - DNA, 25 bp, Artificial
  probe
  misc_feature (1)..(25): SEQ ID NO: 5331; WAN024FIK_at; Start 260; Stop 284
taccaaatttctcaaagttggcacg

SEQ ID NO: 207755 - DNA, 25 bp, Artificial
  probe
  misc_feature (1)..(25): SEQ ID NO: 5331; WAN024FIK_at; Start 363; Stop 387
tgcaggtttgagacctttcatgcgt

SEQ ID NO: 207756 - DNA, 25 bp, Artificial
  probe
  misc_feature (1)..(25): SEQ ID NO: 5331; WAN024FIK_at; Start 272; Stop 296
caaagttggcacgaatggtttcatc

SEQ ID NO: 207757 - DNA, 25 bp, Artificial
  probe
  misc_feature (1)..(25): SEQ ID NO: 5331; WAN024FIK_at; Start 302; Stop 326
aatcacgttcgattttcttgagagc

SEQ ID NO: 207758 - DNA, 25 bp, Artificial
  probe
  misc_feature (1)..(25): SEQ ID NO: 5331; WAN024FIK_at; Start 249; Stop 273
gcgagcatccttaccaaatttctca

SEQ ID NO: 207759 - DNA, 25 bp, Artificial
  probe
  misc_feature (1)..(25): SEQ ID NO: 5331; WAN024FIK_at; Start 103; Stop 127
ttaccaccgaaaccattacctgatg

SEQ ID NO: 207760 - DNA, 25 bp, Artificial
  probe
  misc_feature (1)..(25): SEQ ID NO: 1271; WAN024FIL_at; Start 10; Stop 34
ttctgcacggaagccacgaattttc

SEQ ID NO: 207761 - DNA, 25 bp, Artificial
  probe
  misc_feature (1)..(25): SEQ ID NO: 1271; WAN024FIL_at; Start 238; Stop 262
gatacgtttgatggcatctggcata

SEQ ID NO: 207762 - DNA, 25 bp, Artificial
  probe
  misc_feature (1)..(25): SEQ ID NO: 1271; WAN024FIL_at; Start 144; Stop 168
ccttaacacggatatagtactggtc

SEQ ID NO: 207763 - DNA, 25 bp, Artificial
  probe
  misc_feature (1)..(25): SEQ ID NO: 1271; WAN024FIL_at; Start 66; Stop 90
tggtacgaccaaatacaatagcgag

SEQ ID NO: 207764 - DNA, 25 bp, Artificial
  probe
  misc_feature (1)..(25): SEQ ID NO: 1271; WAN024FIL_at; Start 181; Stop 205
tgtcaattccttagccgcaatcttg

SEQ ID NO: 207765 - DNA, 25 bp, Artificial
  probe
  misc_feature (1)..(25): SEQ ID NO: 1271; WAN024FIL_at; Start 136; Stop 160
ttcttgttccttaacacggatatag

SEQ ID NO: 207766 - DNA, 25 bp, Artificial
  probe
  misc_feature (1)..(25): SEQ ID NO: 1271; WAN024FIL_at; Start 46; Stop 70
caattcatccacacggcgtttggta

SEQ ID NO: 207767 - DNA, 25 bp, Artificial
  probe
  misc_feature (1)..(25): SEQ ID NO: 1271; WAN024FIL_at; Start 34; Stop 58
caaaccacgagtcaattcatccaca

SEQ ID NO: 207768 - DNA, 25 bp, Artificial
  probe
  misc_feature (1)..(25): SEQ ID NO: 1271; WAN024FIL_at; Start 231; Stop 255
gaacaccgatacgtttgatggcatc

SEQ ID NO: 207769 - DNA, 25 bp, Artificial
  probe
  misc_feature (1)..(25): SEQ ID NO: 1271; WAN024FIL_at; Start 94; Stop 118
tggttgtgccacatccatgagacga

SEQ ID NO: 207770 - DNA, 25 bp, Artificial
  probe
  misc_feature (1)..(25): SEQ ID NO: 1271; WAN024FIL_at; Start 19; Stop 43
gaagccacgaattttcaaaccacga

SEQ ID NO: 207771 - DNA, 25 bp, Artificial
  probe
  misc_feature (1)..(25): SEQ ID NO: 1271; WAN024FIL_at; Start 216; Stop 240
gggctttcataaactgaacaccgat

SEQ ID NO: 207772 - DNA, 25 bp, Artificial
  probe
  misc_feature (1)..(25): SEQ ID NO: 1271; WAN024FIL_at; Start 53; Stop 77
tccacacggcgtttggtacgaccaa

SEQ ID NO: 207773 - DNA, 25 bp, Artificial
  probe
  misc_feature (1)..(25): SEQ ID NO: 1271; WAN024FIL_at; Start 188; Stop 212
tccttagccgcaatcttgacatgtt

SEQ ID NO: 207774 - DNA, 25 bp, Artificial
  probe
  misc_feature (1)..(25): SEQ ID NO: 1271; WAN024FIL_at; Start 98; Stop 122
tgtgccacatccatgagacgagtca

SEQ ID NO: 207775 - DNA, 25 bp, Artificial
  probe
  misc_feature (1)..(25): SEQ ID NO: 1271; WAN024FIL_at; Start 227; Stop 251
aactgaacaccgatacgtttgatgg

SEQ ID NO: 207776 - DNA, 25 bp, Artificial
  probe
  misc_feature (1)..(25): SEQ ID NO: 1271; WAN024FIL_at; Start 3; Stop 27
gaattccttctgcacggaagccacg

SEQ ID NO: 207777 - DNA, 25 bp, Artificial
  probe
  misc_feature (1)..(25): SEQ ID NO: 1271; WAN024FIL_at; Start 245; Stop 269
ttgatggcatctggcatagttgctg

SEQ ID NO: 207778 - DNA, 25 bp, Artificial
  probe
  misc_feature (1)..(25): SEQ ID NO: 1271; WAN024FIL_at; Start 114; Stop 138
gacgagtcatggtgtcaaatttttc

SEQ ID NO: 207779 - DNA, 25 bp, Artificial
  probe
  misc_feature (1)..(25): SEQ ID NO: 1271; WAN024FIL_at; Start 121; Stop 145
catggtgtcaaatttttcttgttcc

SEQ ID NO: 207780 - DNA, 25 bp, Artificial
  probe
  misc_feature (1)..(25): SEQ ID NO: 1271; WAN024FIL_at; Start 24; Stop 48
cacgaattttcaaaccacgagtcaa

SEQ ID NO: 207781 - DNA, 25 bp, Artificial
  probe
  misc_feature (1)..(25): SEQ ID NO: 1271; WAN024FIL_at; Start 176; Stop 200
tctgttgtcaattccttagccgcaa

SEQ ID NO: 207782 - DNA, 25 bp, Artificial
  probe
  misc_feature (1)..(25): SEQ ID NO: 1271; WAN024FIL_at; Start 42; Stop 66
gagtcaattcatccacacggcgttt

SEQ ID NO: 207783 - DNA, 25 bp, Artificial
  probe
  misc_feature (1)..(25): SEQ ID NO: 1271; WAN024FIL_at; Start 193; Stop 217
agccgcaatcttgacatgttcaggg

SEQ ID NO: 207784 - DNA, 25 bp, Artificial
  probe
  misc_feature (1)..(25): SEQ ID NO: 1271; WAN024FIL_at; Start 221; Stop 245
ttcataaactgaacaccgatacgtt

SEQ ID NO: 207785 - DNA, 25 bp, Artificial
  probe
  misc_feature (1)..(25): SEQ ID NO: 1271; WAN024FIL_at; Start 158; Stop 182
tagtactggtcaaccaattctgttg

SEQ ID NO: 207786 - DNA, 25 bp, Artificial
  probe
  misc_feature (1)..(25): SEQ ID NO: 1271; WAN024FIL_at; Start 150; Stop 174
cacggatatagtactggtcaaccaa

SEQ ID NO: 207787 - DNA, 25 bp, Artificial
  probe
  misc_feature (1)..(25): SEQ ID NO: 1271; WAN024FIL_at; Start 86; Stop 110
gcgagttctggttgtgccacatcca

SEQ ID NO: 207788 - DNA, 25 bp, Artificial
  probe
  misc_feature (1)..(25): SEQ ID NO: 1271; WAN024FIL_at; Start 161; Stop 185
tactggtcaaccaattctgttgtca

SEQ ID NO: 207789 - DNA, 25 bp, Artificial
  probe
  misc_feature (1)..(25): SEQ ID NO: 1271; WAN024FIL_at; Start 13; Stop 37
tgcacggaagccacgaattttcaaa

SEQ ID NO: 207790 - DNA, 25 bp, Artificial
  probe
  misc_feature (1)..(25): SEQ ID NO: 1271; WAN024FIL_at; Start 81; Stop 105
caatagcgagttctggttgtgccac

SEQ ID NO: 207791 - DNA, 25 bp, Artificial
  probe
  misc_feature (1)..(25): SEQ ID NO: 1271; WAN024FIL_at; Start 108; Stop 132
ccatgagacgagtcatggtgtcaaa

SEQ ID NO: 207792 - DNA, 25 bp, Artificial
  probe
  misc_feature (1)..(25): SEQ ID NO: 1271; WAN024FIL_at; Start 71; Stop 95
cgaccaaatacaatagcgagttctg

SEQ ID NO: 207793 - DNA, 25 bp, Artificial
  probe
  misc_feature (1)..(25): SEQ ID NO: 1271; WAN024FIL_at; Start 234; Stop 258
caccgatacgtttgatggcatctgg

SEQ ID NO: 207794 - DNA, 25 bp, Artificial
  probe
  misc_feature (1)..(25): SEQ ID NO: 2512; WAN024FIM_at; Start 106; Stop 130
tccaagaggcgacctggagttccca

SEQ ID NO: 207795 - DNA, 25 bp, Artificial
  probe
  misc_feature (1)..(25): SEQ ID NO: 2512; WAN024FIM_at; Start 98; Stop 122
taatcaagtccaagaggcgacctgg

SEQ ID NO: 207796 - DNA, 25 bp, Artificial
  probe
  misc_feature (1)..(25): SEQ ID NO: 2512; WAN024FIM_at; Start 22; Stop 46
aagcccatgttaagcatttcatccg

SEQ ID NO: 207797 - DNA, 25 bp, Artificial
  probe
  misc_feature (1)..(25): SEQ ID NO: 2512; WAN024FIM_at; Start 45; Stop 69
cgcttcgtcaaggataagggtttca

SEQ ID NO: 207798 - DNA, 25 bp, Artificial
  probe
  misc_feature (1)..(25): SEQ ID NO: 2512; WAN024FIM_at; Start 9; Stop 33
gatgtcttcaaggaagcccatgtta

SEQ ID NO: 207799 - DNA, 25 bp, Artificial
  probe
  misc_feature (1)..(25): SEQ ID NO: 2512; WAN024FIM_at; Start 101; Stop 125
tcaagtccaagaggcgacctggagt

SEQ ID NO: 207800 - DNA, 25 bp, Artificial
  probe
  misc_feature (1)..(25): SEQ ID NO: 2512; WAN024FIM_at; Start 185; Stop 209
cgccatatactgaacggactttgac

SEQ ID NO: 207801 - DNA, 25 bp, Artificial
  probe
  misc_feature (1)..(25): SEQ ID NO: 2512; WAN024FIM_at; Start 17; Stop 41
caaggaagcccatgttaagcatttc

SEQ ID NO: 207802 - DNA, 25 bp, Artificial
  probe
  misc_feature (1)..(25): SEQ ID NO: 2512; WAN024FIM_at; Start 165; Stop 189
ttgtttttcaatgcttgatccgcca

SEQ ID NO: 207803 - DNA, 25 bp, Artificial
  probe
  misc_feature (1)..(25): SEQ ID NO: 2512; WAN024FIM_at; Start 73; Stop 97
tcttgtaatttcaaggccttgcgtt

SEQ ID NO: 207804 - DNA, 25 bp, Artificial
  probe
  misc_feature (1)..(25): SEQ ID NO: 2512; WAN024FIM_at; Start 180; Stop 204
tgatccgccatatactgaacggact

SEQ ID NO: 207805 - DNA, 25 bp, Artificial
  probe
  misc_feature (1)..(25): SEQ ID NO: 2512; WAN024FIM_at; Start 201; Stop 225
gactttgactcccttactacgacca

SEQ ID NO: 207806 - DNA, 25 bp, Artificial
  probe
  misc_feature (1)..(25): SEQ ID NO: 2512; WAN024FIM_at; Start 222; Stop 246
accaaagcggaagagttcttcttga

SEQ ID NO: 207807 - DNA, 25 bp, Artificial
  probe
  misc_feature (1)..(25): SEQ ID NO: 2512; WAN024FIM_at; Start 83; Stop 107
tcaaggccttgcgtttaatcaagtc

SEQ ID NO: 207808 - DNA, 25 bp, Artificial
  probe
  misc_feature (1)..(25): SEQ ID NO: 2512; WAN024FIM_at; Start 32; Stop 56
taagcatttcatccgcttcgtcaag

SEQ ID NO: 207809 - DNA, 25 bp, Artificial
  probe
  misc_feature (1)..(25): SEQ ID NO: 2512; WAN024FIM_at; Start 219; Stop 243
acgaccaaagcggaagagttcttct

SEQ ID NO: 207810 - DNA, 25 bp, Artificial
  probe
  misc_feature (1)..(25): SEQ ID NO: 2512; WAN024FIM_at; Start 92; Stop 116
tgcgtttaatcaagtccaagaggcg

SEQ ID NO: 207811 - DNA, 25 bp, Artificial
  probe
  misc_feature (1)..(25): SEQ ID NO: 2512; WAN024FIM_at; Start 56; Stop 80
ggataagggtttcaatgtcttgtaa

SEQ ID NO: 207812 - DNA, 25 bp, Artificial
  probe
  misc_feature (1)..(25): SEQ ID NO: 2512; WAN024FIM_at; Start 206; Stop 230
tgactcccttactacgaccaaagcg

SEQ ID NO: 207813 - DNA, 25 bp, Artificial
  probe
  misc_feature (1)..(25): SEQ ID NO: 2512; WAN024FIM_at; Start 212; Stop 236
ccttactacgaccaaagcggaagag

SEQ ID NO: 207814 - DNA, 25 bp, Artificial
  probe
  misc_feature (1)..(25): SEQ ID NO: 2512; WAN024FIM_at; Start 40; Stop 64
tcatccgcttcgtcaaggataaggg

SEQ ID NO: 207815 - DNA, 25 bp, Artificial
  probe
  misc_feature (1)..(25): SEQ ID NO: 2512; WAN024FIM_at; Start 140; Stop 164
gggcaccagatttaagagccttaat

SEQ ID NO: 207816 - DNA, 25 bp, Artificial
  probe
  misc_feature (1)..(25): SEQ ID NO: 2512; WAN024FIM_at; Start 190; Stop 214
tatactgaacggactttgactccct

SEQ ID NO: 207817 - DNA, 25 bp, Artificial
  probe
  misc_feature (1)..(25): SEQ ID NO: 2512; WAN024FIM_at; Start 172; Stop 196
tcaatgcttgatccgccatatactg

SEQ ID NO: 207818 - DNA, 25 bp, Artificial
  probe
  misc_feature (1)..(25): SEQ ID NO: 2512; WAN024FIM_at; Start 50; Stop 74
cgtcaaggataagggtttcaatgtc

SEQ ID NO: 207819 - DNA, 25 bp, Artificial
  probe
  misc_feature (1)..(25): SEQ ID NO: 2512; WAN024FIM_at; Start 35; Stop 59
gcatttcatccgcttcgtcaaggat

SEQ ID NO: 207820 - DNA, 25 bp, Artificial
  probe
  misc_feature (1)..(25): SEQ ID NO: 2512; WAN024FIM_at; Start 95; Stop 119
gtttaatcaagtccaagaggcgacc

SEQ ID NO: 207821 - DNA, 25 bp, Artificial
  probe
  misc_feature (1)..(25): SEQ ID NO: 2512; WAN024FIM_at; Start 109; Stop 133
aagaggcgacctggagttcccacca

SEQ ID NO: 207822 - DNA, 25 bp, Artificial
  probe
  misc_feature (1)..(25): SEQ ID NO: 2512; WAN024FIM_at; Start 153; Stop 177
aagagccttaatttgtttttcaatg

SEQ ID NO: 207823 - DNA, 25 bp, Artificial
  probe
  misc_feature (1)..(25): SEQ ID NO: 2512; WAN024FIM_at; Start 215; Stop 239
tactacgaccaaagcggaagagttc

SEQ ID NO: 207824 - DNA, 25 bp, Artificial
  probe
  misc_feature (1)..(25): SEQ ID NO: 2512; WAN024FIM_at; Start 176; Stop 200
tgcttgatccgccatatactgaacg

SEQ ID NO: 207825 - DNA, 25 bp, Artificial
  probe
  misc_feature (1)..(25): SEQ ID NO: 2512; WAN024FIM_at; Start 4; Stop 28
gcttcgatgtcttcaaggaagccca

SEQ ID NO: 207826 - DNA, 25 bp, Artificial
  probe
  misc_feature (1)..(25): SEQ ID NO: 2512; WAN024FIM_at; Start 137; Stop 161
tatgggcaccagatttaagagcctt

SEQ ID NO: 207827 - DNA, 25 bp, Artificial
  probe
  misc_feature (1)..(25): SEQ ID NO: 2512; WAN024FIM_at; Start 12; Stop 36
gtcttcaaggaagcccatgttaagc

SEQ ID NO: 207828 - DNA, 25 bp, Artificial
  probe
  misc_feature (1)..(25): SEQ ID NO: 3874; WAN024FIN_at; Start 262; Stop 286
gaactcttccgctttggtcgtagta

SEQ ID NO: 207829 - DNA, 25 bp, Artificial
  probe
  misc_feature (1)..(25): SEQ ID NO: 3874; WAN024FIN_at; Start 799; Stop 823
gaaggaattcatggcgacctagacc

SEQ ID NO: 207830 - DNA, 25 bp, Artificial
  probe
  misc_feature (1)..(25): SEQ ID NO: 3874; WAN024FIN_at; Start 690; Stop 714
gactcgtctcatggatgtggcacaa

SEQ ID NO: 207831 - DNA, 25 bp, Artificial
  probe
  misc_feature (1)..(25): SEQ ID NO: 3874; WAN024FIN_at; Start 1445; Stop 1469
tcaaaaaaggaagtcgtggcaacga

SEQ ID NO: 207832 - DNA, 25 bp, Artificial
  probe
  misc_feature (1)..(25): SEQ ID NO: 3874; WAN024FIN_at; Start 510; Stop 534
tgtacctgagaaccgtcaaactttg

SEQ ID NO: 207833 - DNA, 25 bp, Artificial
  probe
  misc_feature (1)..(25): SEQ ID NO: 3874; WAN024FIN_at; Start 828; Stop 852
caaacgtcttcgtgtccttcgtgac

SEQ ID NO: 207834 - DNA, 25 bp, Artificial
  probe
  misc_feature (1)..(25): SEQ ID NO: 3874; WAN024FIN_at; Start 144; Stop 168
tacaggaaaaactgcagcctttggc

SEQ ID NO: 207835 - DNA, 25 bp, Artificial
  probe
  misc_feature (1)..(25): SEQ ID NO: 3874; WAN024FIN_at; Start 746; Stop 770
aacgccgtgtggatgaattgactcg

SEQ ID NO: 207836 - DNA, 25 bp, Artificial
  probe
  misc_feature (1)..(25): SEQ ID NO: 3874; WAN024FIN_at; Start 942; Stop 966
cgatattccacaagatcctgagagt

SEQ ID NO: 207837 - DNA, 25 bp, Artificial
  probe
  misc_feature (1)..(25): SEQ ID NO: 3874; WAN024FIN_at; Start 1174; Stop 1198
gaaaccattcgtgccaactttgaga

SEQ ID NO: 207838 - DNA, 25 bp, Artificial
  probe
  misc_feature (1)..(25): SEQ ID NO: 3874; WAN024FIN_at; Start 703; Stop 727
gatgtggcacaaccagaactcgcta

SEQ ID NO: 207839 - DNA, 25 bp, Artificial
  probe
  misc_feature (1)..(25): SEQ ID NO: 3874; WAN024FIN_at; Start 895; Stop 919
gcagcgcgtggtttggatatttcag

SEQ ID NO: 207840 - DNA, 25 bp, Artificial
  probe
  misc_feature (1)..(25): SEQ ID NO: 3874; WAN024FIN_at; Start 230; Stop 254
caactcgtgaactagctgtccaaag

SEQ ID NO: 207841 - DNA, 25 bp, Artificial
  probe
  misc_feature (1)..(25): SEQ ID NO: 3874; WAN024FIN_at; Start 876; Stop 900
tttggttgcgacagacgttgcagcg

SEQ ID NO: 207842 - DNA, 25 bp, Artificial
  probe
  misc_feature (1)..(25): SEQ ID NO: 3874; WAN024FIN_at; Start 734; Stop 758
ttggtcgtaccaaacgccgtgtgga

SEQ ID NO: 207843 - DNA, 25 bp, Artificial
  probe
  misc_feature (1)..(25): SEQ ID NO: 3874; WAN024FIN_at; Start 1285; Stop 1309
ccagatagccttccagaagtggaga

SEQ ID NO: 207844 - DNA, 25 bp, Artificial
  probe
  misc_feature (1)..(25): SEQ ID NO: 3874; WAN024FIN_at; Start 432; Stop 456
tgaaacccttatccttgacgaagcg

SEQ ID NO: 207845 - DNA, 25 bp, Artificial
  probe
  misc_feature (1)..(25): SEQ ID NO: 3874; WAN024FIN_at; Start 1308; Stop 1332
gattgcacgtgaaaaaccactaccg

SEQ ID NO: 207846 - DNA, 25 bp, Artificial
  probe
  misc_feature (1)..(25): SEQ ID NO: 3874; WAN024FIN_at; Start 1425; Stop 1449
caatggtcgccgtgatgagttcaaa

SEQ ID NO: 207847 - DNA, 25 bp, Artificial
  probe
  misc_feature (1)..(25): SEQ ID NO: 3874; WAN024FIN_at; Start 1155; Stop 1179
cgaacgtgattttgcagatgaaacc

SEQ ID NO: 207848 - DNA, 25 bp, Artificial
  probe
  misc_feature (1)..(25): SEQ ID NO: 3874; WAN024FIN_at; Start 975; Stop 999
ccgtatcggtcgtacaggtcgtgct

SEQ ID NO: 207849 - DNA, 25 bp, Artificial
  probe
  misc_feature (1)..(25): SEQ ID NO: 3874; WAN024FIN_at; Start 385; Stop 409
cgcctcttggacttgattaaacgca

SEQ ID NO: 207850 - DNA, 25 bp, Artificial
  probe
  misc_feature (1)..(25): SEQ ID NO: 3874; WAN024FIN_at; Start 989; Stop 1013
caggtcgtgctggtaagtcaggtca

SEQ ID NO: 207851 - DNA, 25 bp, Artificial
  probe
  misc_feature (1)..(25): SEQ ID NO: 3874; WAN024FIN_at; Start 493; Stop 517
gaagccattatttcccgtgtacctg

SEQ ID NO: 207852 - DNA, 25 bp, Artificial
  probe
  misc_feature (1)..(25): SEQ ID NO: 3874; WAN024FIN_at; Start 777; Stop 801
gaaaattcgtggcttccgtgcagaa

SEQ ID NO: 207853 - DNA, 25 bp, Artificial
  probe
  misc_feature (1)..(25): SEQ ID NO: 3874; WAN024FIN_at; Start 1095; Stop 1119
caaacctgcaagtgtagaagaatcc

SEQ ID NO: 207854 - DNA, 25 bp, Artificial
  probe
  misc_feature (1)..(25): SEQ ID NO: 3874; WAN024FIN_at; Start 643; Stop 667
gaccagtactatatccgtgttaagg

SEQ ID NO: 207855 - DNA, 25 bp, Artificial
  probe
  misc_feature (1)..(25): SEQ ID NO: 3874; WAN024FIN_at; Start 368; Stop 392
tggtgggaactccaggtcgcctctt

SEQ ID NO: 207856 - DNA, 25 bp, Artificial
  probe
  misc_feature (1)..(25): SEQ ID NO: 3874; WAN024FIN_at; Start 553; Stop 577
ccagatgccatcaaacgtatcggtg

SEQ ID NO: 207857 - DNA, 25 bp, Artificial
  probe
  misc_feature (1)..(25): SEQ ID NO: 3874; WAN024FIN_at; Start 457; Stop 481
gatgaaatgcttaacatgggcttcc

SEQ ID NO: 207858 - DNA, 25 bp, Artificial
  probe
  misc_feature (1)..(25): SEQ ID NO: 3874; WAN024FIN_at; Start 120; Stop 144
tgttatcggtcaagctcagactggt

SEQ ID NO: 207859 - DNA, 25 bp, Artificial
  probe
  misc_feature (1)..(25): SEQ ID NO: 3874; WAN024FIN_at; Start 65; Stop 89
tagaagctagtcctatccaagaaca

SEQ ID NO: 207860 - DNA, 25 bp, Artificial
  probe
  misc_feature (1)..(25): SEQ ID NO: 3874; WAN024FIN_at; Start 301; Stop 325
cgttcagtatatggcggatcaagca

SEQ ID NO: 207861 - DNA, 25 bp, Artificial
  probe
  misc_feature (1)..(25): SEQ ID NO: 3874; WAN024FIN_at; Start 1206; Stop 1230
taaggatgctcgcaaattggctgct

SEQ ID NO: 207862 - DNA, 25 bp, Artificial
  probe
  misc_feature (1)..(25): SEQ ID NO: 5445; WAN024FIO_at; Start 68; Stop 92
tcgaattttttatcattacgccaaa

SEQ ID NO: 207863 - DNA, 25 bp, Artificial
  probe
  misc_feature (1)..(25): SEQ ID NO: 5445; WAN024FIO_at; Start 192; Stop 216
tatcatgctcaacaggcaagtttgc

SEQ ID NO: 207864 - DNA, 25 bp, Artificial
  probe
  misc_feature (1)..(25): SEQ ID NO: 5445; WAN024FIO_at; Start 145; Stop 169
caagccatctggaaaatcatctcta

SEQ ID NO: 207865 - DNA, 25 bp, Artificial
  probe
  misc_feature (1)..(25): SEQ ID NO: 5445; WAN024FIO_at; Start 152; Stop 176
tctggaaaatcatctctactctcaa

SEQ ID NO: 207866 - DNA, 25 bp, Artificial
  probe
  misc_feature (1)..(25): SEQ ID NO: 5445; WAN024FIO_at; Start 277; Stop 301
gaagaattgctctacgcgatctgta

SEQ ID NO: 207867 - DNA, 25 bp, Artificial
  probe
  misc_feature (1)..(25): SEQ ID NO: 5445; WAN024FIO_at; Start 245; Stop 269
tgaacgtagtcatctgggaaaatct

SEQ ID NO: 207868 - DNA, 25 bp, Artificial
  probe
  misc_feature (1)..(25): SEQ ID NO: 5445; WAN024FIO_at; Start 93; Stop 117
taatcaaagaaccaaggcgaatccc

SEQ ID NO: 207869 - DNA, 25 bp, Artificial
  probe
  misc_feature (1)..(25): SEQ ID NO: 5445; WAN024FIO_at; Start 206; Stop 230
ggcaagtttgcttctgtttcgtaaa

SEQ ID NO: 207870 - DNA, 25 bp, Artificial
  probe
  misc_feature (1)..(25): SEQ ID NO: 5445; WAN024FIO_at; Start 15; Stop 39
gctgaatcccaacaacggtactggc

SEQ ID NO: 207871 - DNA, 25 bp, Artificial
  probe
  misc_feature (1)..(25): SEQ ID NO: 5445; WAN024FIO_at; Start 309; Stop 333
tataacgcataaaatagccaagcag

SEQ ID NO: 207872 - DNA, 25 bp, Artificial
  probe
  misc_feature (1)..(25): SEQ ID NO: 5445; WAN024FIO_at; Start 318; Stop 342
taaaatagccaagcagacgtccctt

SEQ ID NO: 207873 - DNA, 25 bp, Artificial
  probe
  misc_feature (1)..(25): SEQ ID NO: 5445; WAN024FIO_at; Start 9; Stop 33
taagaagctgaatcccaacaacggt

SEQ ID NO: 207874 - DNA, 25 bp, Artificial
  probe
  misc_feature (1)..(25): SEQ ID NO: 5445; WAN024FIO_at; Start 179; Stop 203
gggaaaatactcatatcatgctcaa

SEQ ID NO: 207875 - DNA, 25 bp, Artificial
  probe
  misc_feature (1)..(25): SEQ ID NO: 5445; WAN024FIO_at; Start 3; Stop 27
ggaagttaagaagctgaatcccaac

SEQ ID NO: 207876 - DNA, 25 bp, Artificial
  probe
  misc_feature (1)..(25): SEQ ID NO: 5445; WAN024FIO_at; Start 121; Stop 145
tacatgaatcggtgcaatagtcgtc

SEQ ID NO: 207877 - DNA, 25 bp, Artificial
  probe
  misc_feature (1)..(25): SEQ ID NO: 5445; WAN024FIO_at; Start 30; Stop 54
cggtactggcaatctcaacaagaac

SEQ ID NO: 207878 - DNA, 25 bp, Artificial
  probe
  misc_feature (1)..(25): SEQ ID NO: 5445; WAN024FIO_at; Start 342; Stop 366
tactattgataatgcaggcattgca

SEQ ID NO: 207879 - DNA, 25 bp, Artificial
  probe
  misc_feature (1)..(25): SEQ ID NO: 5445; WAN024FIO_at; Start 24; Stop 48
caacaacggtactggcaatctcaac

SEQ ID NO: 207880 - DNA, 25 bp, Artificial
  probe
  misc_feature (1)..(25): SEQ ID NO: 5445; WAN024FIO_at; Start 293; Stop 317
cgatctgtatttgttttataacgca

SEQ ID NO: 207881 - DNA, 25 bp, Artificial
  probe
  misc_feature (1)..(25): SEQ ID NO: 5445; WAN024FIO_at; Start 126; Stop 150
gaatcggtgcaatagtcgtcaagcc

SEQ ID NO: 207882 - DNA, 25 bp, Artificial
  probe
  misc_feature (1)..(25): SEQ ID NO: 5445; WAN024FIO_at; Start 134; Stop 158
gcaatagtcgtcaagccatctggaa

SEQ ID NO: 207883 - DNA, 25 bp, Artificial
  probe
  misc_feature (1)..(25): SEQ ID NO: 5445; WAN024FIO_at; Start 51; Stop 75
gaaccaagtcctcatcttcgaattt

SEQ ID NO: 207884 - DNA, 25 bp, Artificial
  probe
  misc_feature (1)..(25): SEQ ID NO: 5445; WAN024FIO_at; Start 325; Stop 349
gccaagcagacgtcccttactattg

SEQ ID NO: 207885 - DNA, 25 bp, Artificial
  probe
  misc_feature (1)..(25): SEQ ID NO: 5445; WAN024FIO_at; Start 218; Stop 242
tctgtttcgtaaatcatattagccc

SEQ ID NO: 207886 - DNA, 25 bp, Artificial
  probe
  misc_feature (1)..(25): SEQ ID NO: 5445; WAN024FIO_at; Start 270; Stop 294
tagtttggaagaattgctctacgcg

SEQ ID NO: 207887 - DNA, 25 bp, Artificial
  probe
  misc_feature (1)..(25): SEQ ID NO: 5445; WAN024FIO_at; Start 84; Stop 108
tacgccaaataatcaaagaaccaag

SEQ ID NO: 207888 - DNA, 25 bp, Artificial
  probe
  misc_feature (1)..(25): SEQ ID NO: 5445; WAN024FIO_at; Start 255; Stop 279
catctgggaaaatcttagtttggaa

SEQ ID NO: 207889 - DNA, 25 bp, Artificial
  probe
  misc_feature (1)..(25): SEQ ID NO: 5445; WAN024FIO_at; Start 358; Stop 382
ggcattgcaatgaataatatccgct

SEQ ID NO: 207890 - DNA, 25 bp, Artificial
  probe
  misc_feature (1)..(25): SEQ ID NO: 5445; WAN024FIO_at; Start 102; Stop 126
aaccaaggcgaatccccgatacatg

SEQ ID NO: 207891 - DNA, 25 bp, Artificial
  probe
  misc_feature (1)..(25): SEQ ID NO: 5445; WAN024FIO_at; Start 36; Stop 60
tggcaatctcaacaagaaccaagtc

SEQ ID NO: 207892 - DNA, 25 bp, Artificial
  probe
  misc_feature (1)..(25): SEQ ID NO: 5445; WAN024FIO_at; Start 335; Stop 359
cgtcccttactattgataatgcagg

SEQ ID NO: 207893 - DNA, 25 bp, Artificial
  probe
  misc_feature (1)..(25): SEQ ID NO: 5445; WAN024FIO_at; Start 237; Stop 261
tagccccttgaacgtagtcatctgg

SEQ ID NO: 207894 - DNA, 25 bp, Artificial
  probe
  misc_feature (1)..(25): SEQ ID NO: 5445; WAN024FIO_at; Start 232; Stop 256
catattagccccttgaacgtagtca

SEQ ID NO: 207895 - DNA, 25 bp, Artificial
  probe
  misc_feature (1)..(25): SEQ ID NO: 5445; WAN024FIO_at; Start 111; Stop 135
gaatccccgatacatgaatcggtgc

SEQ ID NO: 207896 - DNA, 25 bp, Artificial
  probe
  misc_feature (1)..(25): SEQ ID NO: 2418; WAN024FIP_at; Start 406; Stop 430
gataaaaaattcgaagatgaggact

SEQ ID NO: 207897 - DNA, 25 bp, Artificial
  probe
  misc_feature (1)..(25): SEQ ID NO: 2418; WAN024FIP_at; Start 271; Stop 295
gcaaacttgcctgttgagcatgata

SEQ ID NO: 207898 - DNA, 25 bp, Artificial
  probe
  misc_feature (1)..(25): SEQ ID NO: 2418; WAN024FIP_at; Start 211; Stop 235
caaactaagattttcccagatgact

SEQ ID NO: 207899 - DNA, 25 bp, Artificial
  probe
  misc_feature (1)..(25): SEQ ID NO: 2418; WAN024FIP_at; Start 123; Stop 147
caatgcctgcattatcaatagtaag

SEQ ID NO: 207900 - DNA, 25 bp, Artificial
  probe
  misc_feature (1)..(25): SEQ ID NO: 2418; WAN024FIP_at; Start 449; Stop 473
ccagtaccgttgttgggattcagct

SEQ ID NO: 207901 - DNA, 25 bp, Artificial
  probe
  misc_feature (1)..(25): SEQ ID NO: 2418; WAN024FIP_at; Start 47; Stop 71
aacgctcagaggagcagttgcagga

SEQ ID NO: 207902 - DNA, 25 bp, Artificial
  probe
  misc_feature (1)..(25): SEQ ID NO: 2418; WAN024FIP_at; Start 477; Stop 501
taacttccaacgtgaagaagatgag

SEQ ID NO: 207903 - DNA, 25 bp, Artificial
  probe
  misc_feature (1)..(25): SEQ ID NO: 2418; WAN024FIP_at; Start 88; Stop 112
gctattacgcgtcagttagcggata

SEQ ID NO: 207904 - DNA, 25 bp, Artificial
  probe
  misc_feature (1)..(25): SEQ ID NO: 2418; WAN024FIP_at; Start 170; Stop 194
tgcgttataaaacaaatacagatcg

SEQ ID NO: 207905 - DNA, 25 bp, Artificial
  probe
  misc_feature (1)..(25): SEQ ID NO: 2418; WAN024FIP_at; Start 501; Stop 525
gaaaaatattcgtcgtcgtactgct

SEQ ID NO: 207906 - DNA, 25 bp, Artificial
  probe
  misc_feature (1)..(25): SEQ ID NO: 2418; WAN024FIP_at; Start 315; Stop 339
gagtagagatgattttccagatggc

SEQ ID NO: 207907 - DNA, 25 bp, Artificial
  probe
  misc_feature (1)..(25): SEQ ID NO: 2418; WAN024FIP_at; Start 696; Stop 720
gattattgaaagtcgctcacttgga

SEQ ID NO: 207908 - DNA, 25 bp, Artificial
  probe
  misc_feature (1)..(25): SEQ ID NO: 2418; WAN024FIP_at; Start 670; Stop 694
gctcttcgtaaacttgagtctgcgg

SEQ ID NO: 207909 - DNA, 25 bp, Artificial
  probe
  misc_feature (1)..(25): SEQ ID NO: 2418; WAN024FIP_at; Start 648; Stop 672
cactcgctctgtgattgtcaatgct

SEQ ID NO: 207910 - DNA, 25 bp, Artificial
  probe
  misc_feature (1)..(25): SEQ ID NO: 2418; WAN024FIP_at; Start 516; Stop 540
tcgtactgctgtcaccatggcggtc

SEQ ID NO: 207911 - DNA, 25 bp, Artificial
  probe
  misc_feature (1)..(25): SEQ ID NO: 2418; WAN024FIP_at; Start 556; Stop 580
tccgaactccgtgctgtttcagcaa

SEQ ID NO: 207912 - DNA, 25 bp, Artificial
  probe
  misc_feature (1)..(25): SEQ ID NO: 2418; WAN024FIP_at; Start 634; Stop 658
gatcgtatcggaatcactcgctctg

SEQ ID NO: 207913 - DNA, 25 bp, Artificial
  probe
  misc_feature (1)..(25): SEQ ID NO: 2418; WAN024FIP_at; Start 221; Stop 245
ttttcccagatgactacgttcaagg

SEQ ID NO: 207914 - DNA, 25 bp, Artificial
  probe
  misc_feature (1)..(25): SEQ ID NO: 2418; WAN024FIP_at; Start 436; Stop 460
cttgttgagattgccagtaccgttg

SEQ ID NO: 207915 - DNA, 25 bp, Artificial
  probe
  misc_feature (1)..(25): SEQ ID NO: 2418; WAN024FIP_at; Start 37; Stop 61
tcaattttgaaacgctcagaggagc

SEQ ID NO: 207916 - DNA, 25 bp, Artificial
  probe
  misc_feature (1)..(25): SEQ ID NO: 2418; WAN024FIP_at; Start 531; Stop 555
catggcggtcaataccctttcttac

SEQ ID NO: 207917 - DNA, 25 bp, Artificial
  probe
  misc_feature (1)..(25): SEQ ID NO: 2418; WAN024FIP_at; Start 245; Stop 269
gggctaatatgatttacgaaacaga

SEQ ID NO: 207918 - DNA, 25 bp, Artificial
  probe
  misc_feature (1)..(25): SEQ ID NO: 2418; WAN024FIP_at; Start 138; Stop 162
caatagtaagggacgtctgcttggc

SEQ ID NO: 207919 - DNA, 25 bp, Artificial
  probe
  misc_feature (1)..(25): SEQ ID NO: 2418; WAN024FIP_at; Start 105; Stop 129
agcggatattattcattgcaatgcc

SEQ ID NO: 207920 - DNA, 25 bp, Artificial
  probe
  misc_feature (1)..(25): SEQ ID NO: 2418; WAN024FIP_at; Start 464; Stop 488
ggattcagcttcttaacttccaacg

SEQ ID NO: 207921 - DNA, 25 bp, Artificial
  probe
  misc_feature (1)..(25): SEQ ID NO: 2418; WAN024FIP_at; Start 148; Stop 172
ggacgtctgcttggctattttatgc

SEQ ID NO: 207922 - DNA, 25 bp, Artificial
  probe
  misc_feature (1)..(25): SEQ ID NO: 2418; WAN024FIP_at; Start 421; Stop 445
gatgaggacttggttcttgttgaga

SEQ ID NO: 207923 - DNA, 25 bp, Artificial
  probe
  misc_feature (1)..(25): SEQ ID NO: 2418; WAN024FIP_at; Start 259; Stop 283
tacgaaacagaagcaaacttgcctg

SEQ ID NO: 207924 - DNA, 25 bp, Artificial
  probe
  misc_feature (1)..(25): SEQ ID NO: 2418; WAN024FIP_at; Start 712; Stop 736
tcacttggaatgaagggaacctatc

SEQ ID NO: 207925 - DNA, 25 bp, Artificial
  probe
  misc_feature (1)..(25): SEQ ID NO: 2418; WAN024FIP_at; Start 196; Stop 220
gtagagcaattcttccaaactaaga

SEQ ID NO: 207926 - DNA, 25 bp, Artificial
  probe
  misc_feature (1)..(25): SEQ ID NO: 2418; WAN024FIP_at; Start 285; Stop 309
tgagcatgatatgagtattttccct

SEQ ID NO: 207927 - DNA, 25 bp, Artificial
  probe
  misc_feature (1)..(25): SEQ ID NO: 2418; WAN024FIP_at; Start 619; Stop 643
gcgtcagtgattgcagatcgtatcg

SEQ ID NO: 207928 - DNA, 25 bp, Artificial
  probe
  misc_feature (1)..(25): SEQ ID NO: 2418; WAN024FIP_at; Start 370; Stop 394
gggattcgccttggttctttgatta

SEQ ID NO: 207929 - DNA, 25 bp, Artificial
  probe
  misc_feature (1)..(25): SEQ ID NO: 2418; WAN024FIP_at; Start 325; Stop 349
gattttccagatggcttgacgacta

SEQ ID NO: 207930 - DNA, 25 bp, Artificial
  probe
  misc_feature (1)..(25): SEQ ID NO: 7539; WAN024FIQ_at; Start 21; Stop 45
aaaccagaaaatcgtcgctagaagg

SEQ ID NO: 207931 - DNA, 25 bp, Artificial
  probe
  misc_feature (1)..(25): SEQ ID NO: 7539; WAN024FIQ_at; Start 24; Stop 48
ccagaaaatcgtcgctagaaggaaa

SEQ ID NO: 207932 - DNA, 25 bp, Artificial
  probe
  misc_feature (1)..(25): SEQ ID NO: 7539; WAN024FIQ_at; Start 50; Stop 74
agttccttaaaatgcaagagcaggg

SEQ ID NO: 207933 - DNA, 25 bp, Artificial
  probe
  misc_feature (1)..(25): SEQ ID NO: 7539; WAN024FIQ_at; Start 51; Stop 75
gttccttaaaatgcaagagcagggc

SEQ ID NO: 207934 - DNA, 25 bp, Artificial
  probe
  misc_feature (1)..(25): SEQ ID NO: 7539; WAN024FIQ_at; Start 3; Stop 27
gcaaatagaaaaattgccaaaccag

SEQ ID NO: 207935 - DNA, 25 bp, Artificial
  probe
  misc_feature (1)..(25): SEQ ID NO: 7539; WAN024FIQ_at; Start 22; Stop 46
aaccagaaaatcgtcgctagaagga

SEQ ID NO: 207936 - DNA, 25 bp, Artificial
  probe
  misc_feature (1)..(25): SEQ ID NO: 7539; WAN024FIQ_at; Start 47; Stop 71
aagagttccttaaaatgcaagagca

SEQ ID NO: 207937 - DNA, 25 bp, Artificial
  probe
  misc_feature (1)..(25): SEQ ID NO: 7539; WAN024FIQ_at; Start 20; Stop 44
caaaccagaaaatcgtcgctagaag

SEQ ID NO: 207938 - DNA, 25 bp, Artificial
  probe
  misc_feature (1)..(25): SEQ ID NO: 7539; WAN024FIQ_at; Start 14; Stop 38
aattgccaaaccagaaaatcgtcgc

SEQ ID NO: 207939 - DNA, 25 bp, Artificial
  probe
  misc_feature (1)..(25): SEQ ID NO: 7539; WAN024FIQ_at; Start 32; Stop 56
tcgtcgctagaaggaaagagttcct

SEQ ID NO: 207940 - DNA, 25 bp, Artificial
  probe
  misc_feature (1)..(25): SEQ ID NO: 7539; WAN024FIQ_at; Start 53; Stop 77
tccttaaaatgcaagagcagggcac

SEQ ID NO: 207941 - DNA, 25 bp, Artificial
  probe
  misc_feature (1)..(25): SEQ ID NO: 7539; WAN024FIQ_at; Start 27; Stop 51
gaaaatcgtcgctagaaggaaagag

SEQ ID NO: 207942 - DNA, 25 bp, Artificial
  probe
  misc_feature (1)..(25): SEQ ID NO: 7539; WAN024FIQ_at; Start 45; Stop 69
gaaagagttccttaaaatgcaagag

SEQ ID NO: 207943 - DNA, 25 bp, Artificial
  probe
  misc_feature (1)..(25): SEQ ID NO: 7539; WAN024FIQ_at; Start 31; Stop 55
atcgtcgctagaaggaaagagttcc

SEQ ID NO: 207944 - DNA, 25 bp, Artificial
  probe
  misc_feature (1)..(25): SEQ ID NO: 7539; WAN024FIQ_at; Start 56; Stop 80
ttaaaatgcaagagcagggcactcg

SEQ ID NO: 207945 - DNA, 25 bp, Artificial
  probe
  misc_feature (1)..(25): SEQ ID NO: 7539; WAN024FIQ_at; Start 54; Stop 78
ccttaaaatgcaagagcagggcact

SEQ ID NO: 207946 - DNA, 25 bp, Artificial
  probe
  misc_feature (1)..(25): SEQ ID NO: 7539; WAN024FIQ_at; Start 13; Stop 37
aaattgccaaaccagaaaatcgtcg

SEQ ID NO: 207947 - DNA, 25 bp, Artificial
  probe
  misc_feature (1)..(25): SEQ ID NO: 7539; WAN024FIQ_at; Start 49; Stop 73
gagttccttaaaatgcaagagcagg

SEQ ID NO: 207948 - DNA, 25 bp, Artificial
  probe
  misc_feature (1)..(25): SEQ ID NO: 7539; WAN024FIQ_at; Start 16; Stop 40
ttgccaaaccagaaaatcgtcgcta

SEQ ID NO: 207949 - DNA, 25 bp, Artificial
  probe
  misc_feature (1)..(25): SEQ ID NO: 7539; WAN024FIQ_at; Start 18; Stop 42
gccaaaccagaaaatcgtcgctaga

SEQ ID NO: 207950 - DNA, 25 bp, Artificial
  probe
  misc_feature (1)..(25): SEQ ID NO: 7539; WAN024FIQ_at; Start 55; Stop 79
cttaaaatgcaagagcagggcactc

SEQ ID NO: 207951 - DNA, 25 bp, Artificial
  probe
  misc_feature (1)..(25): SEQ ID NO: 7539; WAN024FIQ_at; Start 46; Stop 70
aaagagttccttaaaatgcaagagc

SEQ ID NO: 207952 - DNA, 25 bp, Artificial
  probe
  misc_feature (1)..(25): SEQ ID NO: 7539; WAN024FIQ_at; Start 29; Stop 53
aaatcgtcgctagaaggaaagagtt

SEQ ID NO: 207953 - DNA, 25 bp, Artificial
  probe
  misc_feature (1)..(25): SEQ ID NO: 7539; WAN024FIQ_at; Start 15; Stop 39
attgccaaaccagaaaatcgtcgct

SEQ ID NO: 207954 - DNA, 25 bp, Artificial
  probe
  misc_feature (1)..(25): SEQ ID NO: 7539; WAN024FIQ_at; Start 57; Stop 81
taaaatgcaagagcagggcactcgg

SEQ ID NO: 207955 - DNA, 25 bp, Artificial
  probe
  misc_feature (1)..(25): SEQ ID NO: 7539; WAN024FIQ_at; Start 44; Stop 68
ggaaagagttccttaaaatgcaaga

SEQ ID NO: 207956 - DNA, 25 bp, Artificial
  probe
  misc_feature (1)..(25): SEQ ID NO: 7539; WAN024FIQ_at; Start 23; Stop 47
accagaaaatcgtcgctagaaggaa

SEQ ID NO: 207957 - DNA, 25 bp, Artificial
  probe
  misc_feature (1)..(25): SEQ ID NO: 7539; WAN024FIQ_at; Start 19; Stop 43
ccaaaccagaaaatcgtcgctagaa

SEQ ID NO: 207958 - DNA, 25 bp, Artificial
  probe
  misc_feature (1)..(25): SEQ ID NO: 7539; WAN024FIQ_at; Start 30; Stop 54
aatcgtcgctagaaggaaagagttc

SEQ ID NO: 207959 - DNA, 25 bp, Artificial
  probe
  misc_feature (1)..(25): SEQ ID NO: 7539; WAN024FIQ_at; Start 4; Stop 28
caaatagaaaaattgccaaaccaga

SEQ ID NO: 207960 - DNA, 25 bp, Artificial
  probe
  misc_feature (1)..(25): SEQ ID NO: 7539; WAN024FIQ_at; Start 28; Stop 52
aaaatcgtcgctagaaggaaagagt
